(19) United States
(12) Patent Application Publication
(10) Pub. No.: US 2008/0256662 A1
(43) Pub. Date: Oct. 16, 2008

(54) Nucleic acid molecules and other molecules associated with plants

(76) Inventors: Joseph R. Byrum, Des Moines, IA (US); Thomas J. La Rosa, Maryland Heights, MO (US); Gregory R. Heck, Crystal Lake Park, MO (US)

Correspondence Address: ARNOLD & PORTER, LLP, 555 TWELFTH STREET, N.W., ATTN: IP DOCKETING, WASHINGTON, DC, 20004, US

(21) Appl. No.: 11/314,833

(22) Filed: Dec. 22, 2005

Related U.S. Application Data
(63) Continuation of application No. 09/960,481, filed on Sep. 24, 2001, now abandoned.
Application No. 09/960,481 is a continuation of application No. 09/306,349, filed on May 10, 1999, now abandoned.

(51) Int. Cl. A01H 5/00; C07H 21/04; C07K 14/415

(52) U.S. Cl. 800/278; 800/312; 800/320.1; 536/23.6; 530/370

(57) ABSTRACT

Expressed Sequence Tags (ESTs) isolated from soybean are disclosed. The ESTs provide a unique molecular tool for the targeting and isolation of novel genes for plant protection and improvement. The disclosed ESTs have utility in the development of new strategies for understanding critical plant developmental and metabolic pathways. The disclosed ESTs have particular utility in isolating genes and promoters, identifying and mapping the genes involved in developmental and metabolic pathways, and determining gene function. Sequence homology analyses using the ESTs provided in the present invention, will result in more efficient gene screening for desirable agronomic traits. An expanding database of these select pieces of the plant genomics puzzle will quickly expand the knowledge necessary for subsequent functional validation, a key limitation in current plant biotechnology efforts.

### CROSS REFERENCE TO RELATED APPLICATIONS

[0001] This application is a continuation under 35 U.S.C. § 120 of U.S. application Ser. No. 09/960,481, filed Sep. 24, 2001 (herein incorporated by reference in its entirety), which is a continuation of U.S. application Ser. No. 09/306,349 filed May 10, 1999 (herein incorporated by reference in its entirety).

### INCORPORATION OF SEQUENCE LISTING

[0002] This application contains a sequence listing, which is contained on three identical CD-ROMs: two copies of the sequence listing (Copy 1 and Copy 2) and a sequence listing Computer Readable Form (CRF), all of which are herein incorporated by reference. All three CD-ROMs each contain one filed called “15367D seq list.txt” which is 28,643,268 bytes in size (measured in Windows XP) and which was created on Dec. 21, 2005.

### FIELD OF THE INVENTION

[0003] The present invention is in the field of plant biochemistry. More specifically the invention relates to nucleic acid molecules that encode proteins and fragments of proteins produced in plant cells, in particular, soybean plants. The invention also relates to proteins and fragments of proteins so encoded and antibodies capable of binding the proteins. The invention also relates to methods of using the nucleic acid molecules, proteins and fragments of proteins.

### BACKGROUND OF THE INVENTION

### I. Expressed Sequence Tag Nucleic Acid Molecules

[0004] Expressed sequence tags, or ESTs, are short sequences of randomly selected clones from a cDNA (or complementary DNA) library which are representative of the 1: 124-130 (1992); Kurata, et al., Nature Genetics, 8: 365-372 (1994); Okubo, et al., Nature Genetics, 2: 173-179 (1992), all of which references are incorporated herein in their entirety.

[0005] Using conventional methodologies, cDNA libraries can be constructed from the mRNA (messenger RNA) of a given tissue or organism using poly dT primers and reverse transcriptase (Efstratiadis, et al., Cell 7:279-288 (1976), the entirety of which is herein incorporated by reference; Higuchi, et al., Proc. Natl. Acad. Sci. (U.S.A.) 73:3146-3150 (1976), the entirety of which is herein incorporated by reference; Maniatis, et al., Cell 8:163 (1976) the entirety of which is herein incorporated by reference; Land, et al., Nucleic Acids Res. 9:2251-2266 (1981), the entirety of which is herein incorporated by reference; Okayama, et al., Mol. Cell. Biol. 2:161-170 (1982), the entirety of which is herein incorporated by reference; Gubler, et al., Gene 25:263 (1983), the entirety of which is herein incorporated by reference).

[0006] Several methods may be employed to obtain full-length cDNA constructs. For example, terminal transferase can be used to add homopolymeric tails of dC residues to the free 3′ hydroxyl groups (Land, et al., Nucleic Acids Res. 9:2251-2266 (1981), the entirety of which is herein incorporated by reference). This tail can then be hybridized by a poly dG oligo which can act as a primer for the synthesis of full length second strand cDNA. Okayama and Berg, report a method for obtaining full length cDNA constructs. This method has been simplified by using synthetic primer-adapters that have both homopolymeric tails for priming the synthesis of the first and second strands and restriction sites for cloning into plasmids (Coleclough, et al., Gene 34:305-314 (1985), the entirety of which is herein incorporated by reference) and bacteriophage vectors (Krawinkel, et al., Nucleic Acids Res. 14:1913 (1986), the entirety of which is herein incorporated by reference; and Han, et al., Nucleic Acids Res. 15:6304 (1987), the entirety of which is herein incorporated by reference).

[0007] These strategies have been coupled with additional strategies for isolating rare mRNA populations. For example, a typical mammalian cell contains between 10,000 and 30,000 different mRNA sequences. Davidson, Gene Activity in Early Development, 2nd ed., Academic Press, New York (1976). The number of clones required to achieve a given probability that a low-abundance mRNA will be present in a cDNA library is N=(ln(1−P))/(ln(1−l/n)) where N is the number of clones required, P is the probability desired, and 1/n is the fractional proportion of the total mRNA that is represented by a single rare mRNA. (Sambrook, et al., Molecular Cloning: A Laboratory Manual, 2nd ed., Cold Spring Harbor Laboratory Press (1989), the entirety of which is herein incorporated by reference).

[0008] A method to enrich preparations of mRNA for sequences of interest is to fractionate by size. One such method is to fractionate by electrophoresis through an agarose gel (Pennica, et al., Nature 301:214-221 (1983), the entirety of which is herein incorporated by reference). Another such method employs sucrose gradient centrifugation in the presence of an agent, such as methylmercuric hydroxide, that denatures secondary structure in RNA (Schweinfest, et al., Proc. Natl. Acad. Sci. (U.S.A.) 79:4997-5000 (1982), the entirety of which is herein incorporated by reference).

[0009] A frequently adopted method is to construct equalized or normalized cDNA libraries (Ko, Nucleic Acids Res. 18:5705-5711 (1990), the entirety of which is herein incorporated by reference; Patanjali, S. R. et al., Proc. Natl. Acad. Sci. (U.S.A.) 88:1943-1947 (1991), the entirety of which is herein incorporated by reference). Typically, the cDNA population is normalized by subtractive hybridization. Schmid, et al., J. Neurochem. 48:307-312 (1987) the entirety of which is herein incorporated by reference; Fargnoli, et al., Anal. Biochem. 187:364-373 (1990) the entirety of which is herein incorporated by reference; Travis, et al., Proc. Natl. Acad. Sci. (U.S.A.) 85:1696-1700 (1988) the entirety of which is herein incorporated by reference; Kato, Eur. J. Neurosci. 2:704 (1990); and Schweinfest, et al., Genet. Anal. Tech. Appl. 7:64 (1990), the entirety of which is herein incorporated by reference). Subtraction represents another method for reducing the population of certain sequences in the cDNA library. Swaroop, et al., Nucleic Acids Res. 19:1954 (1991), the entirety of which is herein incorporated by reference).

[0010] ESTs can be sequenced by a number of methods. Two basic methods may be used for DNA sequencing, the chain termination method of Sanger et al., Proc. Natl. Acad. Sci. (U.S.A.) 74: 5463-5467 (1977), the entirety of which is herein incorporated by reference and the chemical degradation method of Maxam and Gilbert, Proc. Nat. Acad. Sci. (U.S.A) 74: 560-564 (1977), the entirety of which is herein incorporated by reference. Automation and advances in technology such as the replacement of radioisotopes with fluorescence-based sequencing have reduced the effort required to sequence DNA (Craxton, Methods, 2: 20-26 (1991), the entirety of which is herein incorporated by reference; Ju et al., Proc. Natl. Acad. Sci. (U.S.A.) 92: 4347-4351 (1995), the entirety of which is herein incorporated by reference; Tabor and Richardson, Proc. Natl. Acad. Sci. (U.S.A.) 92: 6339-6343 (1995), the entirety of which is herein incorporated by reference). Automated sequencers are available from, for example, Pharmacia Biotech, Inc., Piscataway, N.J. (Pharmacia ALF), LI-COR, Inc., Lincoln, Nebr. (LI-COR 4,000) and Millipore, Bedford, Mass. (Millipore BaseStation).

[0011] In addition, advances in capillary gel electrophoresis have also reduced the effort required to sequence DNA and such advances provide a rapid high resolution approach for sequencing DNA samples (Swerdlow and Gesteland, Nucleic Acids Res. 18:1415-1419 (1990); Smith, Nature 349:812-813 (1991); Luckey et al., Methods Enzymol. 218:154-172 (1993); Lu et al., J. Chromatog. A. 680:497-501 (1994); Carson et al., Anal. Chem. 65:3219-3226 (1993); Huang et al., Anal. Chem. 64:2149-2154 (1992); Kheterpal et al., Electrophoresis 17:1852-1859 (1996); Quesada and Zhang, Electrophoresis 17:1841-1851 (1996); Baba, Yakugaku Zasshi 117:265-281 (1997), all of which are herein incorporated by reference in their entirety).

[0012] ESTs longer than 150 bases have been found to be useful for similarity searches and mapping. (Adams, et al., Science 252:1651-1656 (1991), herein incorporated by reference.) EST sequences normally range from 150-450 bases. This is the length of sequence information that is routinely and reliably generated using single run sequence data. Typically, only single run sequence data is obtained from the cDNA library, Adams, et al., Science 252:1651-1656 (1991). Automated single run sequencing typically results in an approximately 2-3% error or base ambiguity rate. (Boguski, et al., Nature Genetics, 4:332-333 (1993), the entirety of which is herein incorporated by reference).

[0013] EST databases have been constructed or partially constructed from, for example, C. elegans (McCombrie, et al., Nature Genetics 1: 124-131 (1992), human liver cell line HepG2 (Okubo, et al., Nature Genetics 2:173-179 (1992)), human brain RNA (Adams, et al., Science 252:1651-1656 (1991); Adams, et al., Nature 355:632-635 (1992)), Arabidopsis, (Newman, et al., Plant Physiol. 106:1241-1255 (1994)); and rice (Kurata, et al., Nature Genetics 8:365-372 (1994).

### II. Sequence Comparisons

[0014] A characteristic feature of a protein or DNA sequence is that it can be compared with other known protein or DNA sequences. Sequence comparisons can be undertaken by determining the similarity of the test or query sequence with sequences in publicly available or propriety databases (“similarity analysis”) or by searching for certain motifs (“intrinsic sequence analysis”) (e.g. cis elements) (Coulson, Trends in Biotechnology, 12: 76-80 (1994), the entirety of which is herein incorporated by reference; Birren, et al., Genome Analysis, 1: 543-559 (1997), the entirety of which is herein incorporated by reference).

[0015] Similarity analysis includes database search and alignment. Examples of public databases include the DNA Database of Japan (DDBJ) (on the Worldwide web at ddbj.nig.ac.jp/); Genebank (on the Worldwide web at ncbi.nlm.nih.gov/web/Genbank/Index.htlm); and the European Molecular Biology Laboratory Nucleic Acid Sequence Database (EMBL) (on the Worldwide web at ebi.ac.uk/ebi_docs/embl_db.html). A number of different search algorithms have been developed, one example of which are the suite of programs referred to as BLAST programs. There are five implementations of BLAST, three designed for nucleotide sequences queries (BLASTN, BLASTX, and TBLASTX) and two designed for protein sequence queries (BLASTP and TBLASTN) (Coulson, Trends in Biotechnology, 12: 76-80 (1994); Birren, et al., Genome Analysis, 1: 543-559 (1997)).

[0016] BLASTN takes a nucleotide sequence (the query sequence) and its reverse complement and searches them against a nucleotide sequence database. BLASTN was designed for speed, not maximum sensitivity, and may not find distantly related coding sequences. BLASTX takes a nucleotide sequence, translates it in three forward reading frames and three reverse complement reading frames, and then compares the six translations against a protein sequence database. BLASTX is useful for sensitive analysis of preliminary (single-pass) sequence data and is tolerant of sequencing errors (Gish and States, Nature Genetics, 3: 266-272 (1993), the entirety of which is herein incorporated by reference). BLASTN and BLASTX may be used in concert for analyzing EST data (Coulson, Trends in Biotechnology, 12: 76-80 (1994); Birren, et al., Genome Analysis, 1: 543-559 (1997).

[0017] Given a coding nucleotide sequence and the protein it encodes, it is often preferable to use the protein as the query sequence to search a database because of the greatly increased sensitivity to detect more subtle relationships. This is due to the larger alphabet of proteins (20 amino acids) compared with the alphabet of nucleic acid sequences (4 bases), where it is far easier to obtain a match by chance. In addition, with nucleotide alignments, only a match (positive score) or a mismatch (negative score) is obtained, but with proteins, the presence of conservative amino acid substitutions can be taken into account. Here, a mismatch may yield a positive score if the non-identical residue has physical/chemical properties similar to the one it replaced. Various scoring matrices are used to supply the substitution scores of all possible amino acid pairs. A general purpose scoring system is the BLOSUM62 matrix (Henikoff and Henikoff, Proteins, 17: 49-61 (1993), the entirety of which is herein incorporated by reference), which is currently the default choice for BLAST programs. BLOSUM62 is tailored for alignments of moderately diverged sequences and thus may not yield the best results under all conditions. Altschul, J. Mol. Biol. 36: 290-300 (1993), the entirety of which is herein incorporated by reference, uses a combination of three matrices to cover all contingencies. This may improve sensitivity, but at the expense of slower searches. In practice, a single BLOSUM62 matrix is often used but others (PAM40 and PAM250) may be attempted when additional analysis is necessary. Low PAM matrices are directed at detecting very strong but localized sequence similarities, whereas high PAM matrices are directed at detecting long but weak alignments between very distantly related sequences.

[0018] Homologues in other organisms are available that can be used for comparative sequence analysis. Multiple alignments are performed to study similarities and differences in a group of related sequences. CLUSTAL W is a multiple sequence alignment package available that performs progressive multiple sequence alignments based on the method of Feng and Doolittle, J. Mol. Evol. 25: 351-360 (1987), the entirety of which is herein incorporated by reference. Each pair of sequences is aligned and the distance between each pair is calculated; from this distance matrix, a guide tree is calculated, and all of the sequences are progressively aligned based on this tree. A feature of the program is its sensitivity to the effect of gaps on the alignment; gap penalties are varied to encourage the insertion of gaps in probable loop regions instead of in the middle of structured regions. Users can specify gap penalties, choose between a number of scoring matrices, or supply their own scoring matrix for both the pairwise alignments and the multiple alignments. CLUSTAL W for UNIX and VMS systems is available at: ftp.ebi.ac.uk. Another program is MACAW (Schuler et al., Proteins, Struct. Func. Genet, 9:180-190 (1991), the entirety of which is herein incorporated by reference, for which both Macintosh and Microsoft Windows versions are available. MACAW uses a graphical interface, provides a choice of several alignment algorithms, and is available by anonymous ftp at: ncbi.nlm.nih.gov (directory/pub/macaw).

[0019] Sequence motifs are derived from multiple alignments and can be used to examine individual sequences or an entire database for subtle patterns. With motifs, it is sometimes possible to detect distant relationships that may not be demonstrable based on comparisons of primary sequences alone. Currently, the largest collection of sequence motifs in the world is PROSITE (Bairoch and Bucher, Nucleic Acid Research, 22: 3583-3589 (1994), the entirety of which is herein incorporated by reference.) PROSITE may be accessed via either the ExPASy server on the World Wide Web or anonymous ftp site. Many commercial sequence analysis packages also provide search programs that use PROSITE data.

[0020] A resource for searching protein motifs is the BLOCKS E-mail server developed by S. Henikoff, Trends Biochem Sci., 18:267-268 (1993), the entirety of which is herein incorporated by reference; Henikoff and Henikoff, Nucleic Acid Research, 19:6565-6572 (1991), the entirety of which is herein incorporated by reference; Henikoff and Henikoff, Proteins, 17: 49-61 (1993). BLOCKS searches a protein or nucleotide sequence against a database of protein motifs or “blocks.” Blocks are defined as short, ungapped multiple alignments that represent highly conserved protein patterns. The blocks themselves are derived from entries in PROSITE as well as other sources. Either a protein or nucleotide query can be submitted to the BLOCKS server; if a nucleotide sequence is submitted, the sequence is translated in all six reading frames and motifs are sought in these conceptual translations. Once the search is completed, the server will return a ranked list of significant matches, along with an alignment of the query sequence to the matched BLOCKS entries.

[0021] Conserved protein domains can be represented by two-dimensional matrices, which measure either the frequency or probability of the occurrences of each amino acid residue and deletions or insertions in each position of the domain. This type of model, when used to search against protein databases, is sensitive and usually yields more accurate results than simple motif searches. Two popular implementations of this approach are profile searches (such as GCG program ProfileSearch) and Hidden Markov Models (HMMs) (Krough et al., J. Mol. Biol. 235:1501-1531 (1994); Eddy, Current Opinion in Structural Biology 6:361-365 (1996), both of which are herein incorporated by reference in their entirety). In both cases, a large number of common protein domains have been converted into profiles, as present in the PROSITE library, or HHM models, as in the Pfam protein domain library (Sonnhammer et al., Proteins 28:405-420 (1997), the entirety of which is herein incorporated by reference). Pfam contains more than 500 HMM models for enzymes, transcription factors, signal transduction molecules, and structural proteins. Protein databases can be queried with these profiles or HMM models, which will identify proteins containing the domain of interest. For example, HMMSW or HMMFS, two programs in a public domain package called HMMER (Sonnhammer et al., Proteins 28:405-420 (1997)) can be used.

[0022] PROSITE and BLOCKS represent collected families of protein motifs. Thus, searching these databases entails submitting a single sequence to determine whether or not that sequence is similar to the members of an established family. Programs working in the opposite direction compare a collection of sequences with individual entries in the protein databases. An example of such a program is the Motif Search Tool, or MoST (Tatusov et al. Proc. Natl. Acad. Sci. 91: 12091-12095 (1994), the entirety of which is herein incorporated by reference.) On the basis of an aligned set of input sequences, a weight matrix is calculated by using one of four methods (selected by the user); a weight matrix is simply a representation, position by position in an alignment, of how likely a particular amino acid will appear. The calculated weight matrix is then used to search the databases. To increase sensitivity, newly found sequences are added to the original data set, the weight matrix is recalculated, and the search is performed again. This procedure continues until no new sequences are found.

### SUMMARY OF THE INVENTION

[0023] The present invention provides a substantially purified nucleic acid molecule that encodes a soybean protein or fragment thereof comprising a nucleic acid sequence selected from the group consisting of SEQ ID NO: 1 through SEQ ID NO: 53893.

[0024] The present invention also provides one or more substantially purified nucleic acid molecules comprising a nucleic acid sequence selected from the group consisting of SEQ ID NO: 1 through SEQ ID NO:53893 or complements thereof.

[0025] The present invention also provides a substantially purified soybean protein or fragment thereof, wherein said soybean protein is encoded by a nucleic acid molecule that comprises a nucleic acid sequence selected from the group consisting of SEQ ID NO: 1 through SEQ ID NO: 53893.

[0026] The present invention further provides a substantially purified protein, peptide, or fragment thereof encoded by a nucleic acid sequence which specifically hybridizes to a nucleic acid molecule comprising a nucleic acid sequence selected from the group consisting of a complement of SEQ ID NO: 1 through SEQ ID NO:53893.

[0027] The present invention further provides a substantially purified antibody capable of specifically binding to a protein or fragment thereof encoded by a nucleic acid sequence which specifically hybridizes to a nucleic acid molecule having a nucleic acid sequence selected from the group consisting of a complement of SEQ ID NO: 1 through SEQ ID NO:53893.

[0028] The present invention also provides a transformed plant transformed to contain a nucleic acid molecule which comprises: (A) an exogeneous promoter region which functions in plant cells to cause the production of an mRNA molecule; which is linked to (B) a structural nucleic acid molecule, wherein said structural nucleic acid molecule comprises a nucleic acid molecule that encodes a protein, peptide, or fragment thereof which hybridizes to a nucleic acid sequence selected from the group consisting of a complement of SEQ ID NO: 1 through SEQ ID NO:53893 expressed in an effective amount to produce a desirable agronomic effect; which is linked to (C) a 3′ non-translated sequence that functions in plant cells to cause the termination of transcription and the addition of polyadenylated ribonucleotides to the 3′ end of the mRNA sequence.

[0029] The present invention also provides a transformed plant cell containing a nucleic acid molecule whose non-transcribed strand encodes a protein or fragment thereof, wherein the transcribed strand of said nucleic acid is complementary to a nucleic acid molecule that encodes a protein or fragment thereof. The present invention also provides bacterial, viral, microbial, and plant cells comprising a nucleic acid molecule of the present invention

[0030] The present invention also provides a method of producing a plant containing one or more proteins encoded by sequences comprising SEQ ID NO: 1 or complement thereof through SEQ ID NO:53893 or complements thereof, expressed in a sufficient amount and/or fashion to produce a desirable agronomic effect.

[0031] In accomplishing the foregoing, there is provided, in accordance with one aspect of the present invention, methods of producing genetically transformed plants, comprising the steps of:
[0032] (a) inserting into the genome of a plant cell a recombinant, double-stranded DNA molecule comprising
   [0033] (i) a promoter which functions in plant cells to cause the production of an RNA sequence,
   [0034] (ii) a structural DNA sequence that causes the production of an RNA sequence which encodes a desired protein.
   [0035] (iii) a 3′ non-translated DNA sequence which functions in plant cells to cause the addition of polyadenylated nucleotides to the 3′ end of RNA sequence; where the promoter is homologous or heterologous with respect to the coding sequence and adapted to cause sufficient expression of a protein in desired plant tissues to enhance the agronomic utility of a plant transformed with said gene.
[0036] (b) obtaining a transformed plant cell with said nucleic acid molecule that encodes one or more proteins, wherein said nucleic acid molecule is transcribed and results in expression of said protein(s); and
[0037] (c) regenerating from the transformed plant cell a genetically transformed plant

[0038] The present invention also encompasses differentiated plants, seeds, and progeny comprising said transformed plant cells and which exhibit novel properties of agronomic significance.

[0039] The present invention also provides a method of producing a plant containing reduced levels of a protein comprising: (A) transforming a plant cell with a nucleic acid molecule that encodes a protein, wherein said nucleic acid molecule is transcribed and results in co-suppression of endogenous protein synthesis activity, and (B) regenerating plants and producing subsequent progeny from the transformed plant.

[0040] The present invention also provides a method of determining an association between a polymorphism and a plant trait comprising: (A) hybridizing a nucleic acid molecule specific for a polymorphism to genetic material of a plant, wherein said nucleic acid molecule comprising a nucleic acid sequence selected from the group consisting of SEQ ID NO: 1 through SEQ ID NO:53893 or complements thereof; and (B) calculating the degree of association between the polymorphism and the plant trait.

[0041] The present invention also provides a method of isolating a genetic region, or nucleic acid that encodes a protein or fragment thereof comprising: (A) incubating under conditions permitting nucleic acid hybridization: a marker nucleic acid molecule, preferably an EST, with a complementary nucleic acid molecule obtained from a plant cell or plant tissue; (B) permitting hybridization between said marker nucleic acid molecule, preferably an EST, and said complementary nucleic acid molecule obtained from said plant cell or plant tissue; and (C) isolating said complementary nucleic acid molecule.

[0042] The present invention also provides a method for determining a level or pattern in a plant cell of a protein in a plant comprising: (A) incubating, under conditions permitting nucleic acid hybridization, a marker nucleic acid molecule, the marker nucleic acid molecule selected from the group of marker nucleic acid molecules which specifically hybridize to a nucleic acid molecule having the nucleic acid sequence selected from the group consisting of SEQ ID NO: 1 through SEQ ID NO: 53893 or complements thereof or fragments of either, with a complementary nucleic acid molecule obtained from the plant cell or plant tissue, wherein nucleic acid hybridization between the marker nucleic acid molecule and the complementary nucleic acid molecule obtained from the plant cell or plant tissue permits the detection of an mRNA for the enzyme; (B) permitting hybridization between the marker nucleic acid molecule and the complementary nucleic acid molecule obtained from the plant cell or plant tissue; and (C) detecting the level or pattern of the complementary nucleic acid, wherein the detection of the complementary nucleic acid is predictive of the level or pattern of the protein.

[0043] The present invention also provides a method for determining the level or pattern of a protein in a plant cell or plant tissue comprising: (A) incubating under conditions permitting nucleic acid hybridization: a marker nucleic acid molecule, the marker nucleic acid molecule comprising a nucleotide sequence selected from the group consisting of SEQ ID NO: 1 through SEQ ID NO:53893 or complements thereof, with a complementary nucleic acid molecule obtained from a plant cell or plant tissue, wherein nucleic acid hybridization between the marker nucleic acid molecule, and the complementary nucleic acid molecule obtained from the plant cell or plant tissue permits the detection of said protein; (B) permitting hybridization between the marker nucleic acid molecule and the complementary nucleic acid molecule obtained from the plant cell or plant tissue; and (C) detecting the level or pattern of the complementary nucleic acid, wherein the detection of said complementary nucleic acid is predictive of the level or pattern of the protein synthesis.

[0044] The present invention also provides a method for determining a level or pattern of a protein in a plant cell or plant tissue which comprises assaying the concentration of a molecule, whose concentration is dependent upon the expression of a gene, the gene having a nucleic acid sequence which specifically hybridizes to a protein marker nucleic acid molecule, the molecule being present in a plant cell or plant tissue, in comparison to the concentration of that molecule present in a plant cell or plant tissue with a known level or pattern of said protein, wherein an assayed concentration of the molecule is compared to the assayed concentration of the molecule in a plant cell or plant tissue with a known level or pattern of said protein.

[0045] The present invention also provides a method of determining a mutation in a plant whose presence is predictive of a mutation affecting a level or pattern of a protein comprising the steps: (A) incubating, under conditions permitting nucleic acid hybridization, a marker nucleic acid, the marker nucleic acid selected from the group of marker nucleic acid molecules which specifically hybridize to a nucleic acid molecule consisting of the nucleic acid sequence selected from the group consisting of SEQ ID NO: 1 through SEQ ID NO: 53893 or complements thereof or fragments of either and a complementary nucleic acid molecule obtained from the plant, wherein nucleic acid hybridization between the marker nucleic acid molecule and the complementary nucleic acid molecule obtained from the plant permits the detection of a polymorphism whose presence is predictive of a mutation affecting the level or pattern of the protein in the plant; (B) permitting hybridization between the marker nucleic acid molecule and the complementary nucleic acid molecule obtained from the plant; and (C) detecting the presence of the polymorphism, wherein the detection of the polymorphism is predictive of the mutation.

[0046] The present invention also provides a method for determining a mutation in a plant whose presence is predictive of a mutation affecting the level or pattern of protein synthesis comprising the steps: (A) incubating under conditions permitting nucleic acid hybridization: a marker nucleic acid molecule, the marker nucleic acid molecule comprising a nucleic acid molecule that is linked to gene, the gene having a nucleic acid sequence which specifically hybridizes to a sequence selected from the group consisting of SEQ ID NO: 1 through SEQ ID NO:53893 and complements thereof, and a complementary nucleic acid molecule obtained from a plant tissue or plant cell of the plant, wherein nucleic acid hybridization between the marker nucleic acid molecule and the complementary nucleic acid molecule obtained from the plant permits the detection of a polymorphism whose presence is predictive of a mutation affecting said level or pattern of a protein synthesis in the plant; (B) permitting hybridization between said marker nucleic acid molecule and said complementary nucleic acid molecule obtained from said plant; and; (C) detecting the presence of the polymorphism, wherein the detection of the polymorphism is predictive of the mutation.

[0047] The present invention also provides a method for reducing expression of a protein in a plant cell, the method comprising: growing a transformed plant cell containing a nucleic acid molecule whose non-transcribed strand encodes a protein or fragment thereof, wherein the transcribed strand of said nucleic acid is complementary to a nucleic acid molecule that encodes the protein in said plant cell, and whereby the strand that is complementary to the nucleic acid molecule that encodes the protein reduces or depresses expression of the protein.

[0048] The present invention provides soybean nucleic acid molecules for use as molecular tags to isolate genetic regions (i.e. promoters and flanking sequences), isolate genes, map genes, and determine gene function. The present invention further provides soybean nucleic acid molecules for use in determining if genes are members of a particular gene family.

[0049] The present invention also provides a method of obtaining full length genes using soybean ESTs or complements thereof or fragments of either.

[0050] The present invention also provides a method of isolating promoters and flanking sequences using soybean ESTs or complements thereof or fragments of either.

[0051] The present invention also provides soybean ESTs or complements thereof or fragments of either for use in marker-assisted breeding programs.

[0052] The present invention also provides a method of identifying tissues comprising hybridizing nucleic acids from the tissue with soybean ESTs or complements thereof or fragments of either.

[0053] The present invention also provides a method for production of antibodies targeted against the proteins, peptides, or fragments produced by the disclosed or complements thereof or fragments of either.

[0054] The present invention also provides a method for the transformation and regeneration of plants comprising sequences hybridizable to the disclosed ESTs or complements thereof or fragments of either.

[0055] The present invention also provides a method of modifying plant protein expression by inserting in a chimeric gene sense or antisense constructs of the soybean ESTs.

### DETAILED DESCRIPTION OF THE INVENTION

### Agents

[0056] (a) Nucleic Acid Molecules

[0057] Agents of the present invention include nucleic acid molecules and more specifically EST nucleic acid molecules or nucleic acid fragment molecules thereof. Fragment EST nucleic acid molecules may encode significant portion(s) of, or indeed most of, the EST nucleic acid molecule. Alternatively, the fragments may comprise smaller oligonucleotides (having from about 15 to about 250 nucleotide residues, and more preferably, about 15 to about 30 nucleotide residues).

[0058] A subset of the nucleic acid molecules of the present invention includes nucleic acid molecules that are marker molecules. Another subset of the nucleic acid molecules of the present invention include nucleic acid molecules that encode a protein or fragment thereof. Another subset of the nucleic acid molecules of the present invention are EST molecules.

[0059] The term “substantially purified”, as used herein, refers to a molecule separated from substantially all other molecules normally associated with it in its native state. More preferably a substantially purified molecule is the predominant species present in a preparation. A substantially purified molecule may be greater than 60% free, preferably 75% free, more preferably 90% free, and most preferably 95% free from the other molecules (exclusive of solvent) present in the natural mixture. The term “substantially purified” is not intended to encompass molecules present in their native state.

[0060] The agents of the present invention will preferably be “biologically active” with respect to either a structural attribute, such as the capacity of a nucleic acid to hybridize to another nucleic acid molecule, or the ability of a protein to be bound by an antibody (or to compete with another molecule for such binding). Alternatively, such an attribute may be catalytic and thus involve the capacity of the agent to mediate a chemical reaction or response.

[0061] The agents of the present invention may also be recombinant. As used herein, the term recombinant means any agent (e.g. DNA, peptide etc.), that is, or results, however indirect, from human manipulation of a nucleic acid molecule.

[0062] It is understood that the agents of the present invention may be labeled with reagents that facilitate detection of the agent (e.g. fluorescent labels, Prober et al., Science 238:336-340 (1987); Albarella et al., EP 144914; chemical labels, Sheldon et al., U.S. Pat. No. 4,582,789; Albarella et al., U.S. Pat. No. 4,563,417; modified bases, Miyoshi et al., EP 119448, all of which are hereby incorporated by reference in their entirety).

[0063] It is further understood, that the present invention provides recombinant bacterial, mammalian, microbial, insect, fungal and plant cells and viral constructs comprising the agents of the present invention. (See, for example, Uses of the Agents of the Invention, Section (a) Plant Constructs and Plant Transformants; Section (b) Fungal Constructs and Fungal Transformants; Section (c) Mammalian Constructs and Transformed Mammalian Cells; Section (d) Insect Constructs and Transformed Insect Cells; and Section (e) Bacterial Constructs and Transformed Bacterial Cells).

[0064] It is further understood, that the present invention provides bacterial, viral, microbial, and plant cells comprising the agents of the present invention.

[0065] Nucleic acid molecules or fragment thereof of the present invention are capable of specifically hybridizing to other nucleic acid molecules under certain circumstances. As used herein, two nucleic acid molecules are said to be capable of specifically hybridizing to one another if the two molecules are capable of forming an anti-parallel, double-stranded nucleic acid structure. A nucleic acid molecule is said to be the “complement” of another nucleic acid molecule if they exhibit complete complementarity. As used herein, molecules are said to exhibit “complete complementarity” when every nucleotide of one of the molecules is complementary to a nucleotide of the other. Two molecules are said to be “minimally complementary” if they can hybridize to one another with sufficient stability to permit them to remain annealed to one another under at least conventional “low-stringency” conditions. Similarly, the molecules are said to be “complementary” if they can hybridize to one another with sufficient stability to permit them to remain annealed to one another under conventional “high-stringency” conditions. Conventional stringency conditions are described by Sambrook, et al., In: Molecular Cloning, A Laboratory Manual, 2nd Edition, Cold Spring Harbor Press, Cold Spring Harbor, N.Y. (1989), and by Haymes, et al. In: Nucleic Acid Hybridization, A Practical Approach, IRL Press, Washington, D.C. (1985), the entirety of which is herein incorporated by reference. Departures from complete complementarity are therefore permissible, as long as such departures do not completely preclude the capacity of the molecules to form a double-stranded structure. Thus, in order for an nucleic acid molecule or fragment of the present invention to serve as a primer or probe it need only be sufficiently complementary in sequence to be able to form a stable double-stranded structure under the particular solvent and salt concentrations employed.

[0066] Appropriate stringency conditions which promote DNA hybridization are, for example, 6.0× sodium chloride/sodium citrate (SSC) at about 45° C., followed by a wash of 2.0×SSC at 50° C., are known to those skilled in the art or can be found in Current Protocols in Molecular Biology, John Wiley & Sons, N.Y. (1989), 6.3.1-6.3.6. For example, the salt concentration in the wash step can be selected from a low stringency of about 2.0×SSC at 50° C. to a high stringency of about 0.2×SSC at 50° C. In addition, the temperature in the wash step can be increased from low stringency conditions at room temperature, about 22° C., to high stringency conditions at about 65° C. Both temperature and salt may be varied, or either the temperature or the salt concentration may be held constant while the other variable is changed.

[0067] In a preferred embodiment, a nucleic acid of the present invention will specifically hybridize to one or more of the nucleic acid molecules set forth in SEQ ID NO: 1 through SEQ ID NO: 53893 or complements thereof under moderately stringent conditions, for example, at about 2.0×SSC and about 65° C.

[0068] In a particularly preferred embodiment, a nucleic acid of the present invention will include those nucleic acid molecules that specifically hybridize to one or more of the nucleic acid molecules set forth in SEQ ID NO: 1 through SEQ ID NO: 53893 or complements thereof under high stringency conditions.

[0069] In one aspect of the present invention, the nucleic acid molecules of the present invention have one or more of the nucleic acid sequences set forth in SEQ ID NO: 1 through SEQ ID NO:53893 or complements thereof. In another aspect of the present invention, one or more of the nucleic acid molecules of the present invention share between 100% and 90% sequence identity with one or more of the nucleic acid sequences set forth in SEQ ID NO: 1 through SEQ ID NO:53893 or complements thereof. In a further aspect of the present invention, one or more of the nucleic acid molecules of the present invention share between 100% and 95% sequence identity with one or more of the nucleic acid sequences set forth in SEQ ID NO: 1 through SEQ ID NO:53893 or complements thereof. In a more preferred aspect of the present invention, one or more of the nucleic acid molecules of the present invention share between 100% and 98% sequence identity with one or more of the nucleic acid sequences set forth in SEQ ID NO: 1 through SEQ ID NO:53893 or complements thereof. In an even more preferred aspect of the present invention, one or more of the nucleic acid molecules of the present invention share between 100% and 99% sequence identity with one or more of the sequences set forth in SEQ ID NO: 1 through SEQ ID NO:53893 or complements thereof. In a further, even more preferred aspect of the present invention, one or more of the nucleic acid molecules of the present invention exhibit 100% sequence identity with one or more nucleic acid molecules present within the cDNA libraries SOYMON029, SOYMON031, SOYMON032 SOYMON033, SOYMON036, SOYMON037, and SOYMON038. (Monsanto Company, St. Louis, Mo., United States of America).

[0070] In a preferred embodiment of the present invention, a soybean protein or fragment thereof of the present invention is a homologue of another plant protein. In another preferred embodiment of the present invention, a soybean protein or fragment thereof of the present invention is a homologue of a fungal protein. In another preferred embodiment of the present invention, a soybean protein or fragment thereof of the present invention is a homologue of mammalian protein. In another preferred embodiment of the present invention, a soybean protein or fragment thereof of the present invention is a homologue of a bacterial protein. In another preferred embodiment of the present invention, a soybean protein or fragment thereof of the present invention is a homologue of a maize protein.

[0071] In a preferred embodiment of the present invention, the nucleic molecule of the present invention encodes a soybean protein or fragment thereof where a soybean protein or fragment thereof exhibits a BLAST probability score of greater than 1E-12, preferably a BLAST probability score of between about 1E-30 and about 1E-12, even more preferably a BLAST probability score of greater than 1E-30 with its homologue.

[0072] In another preferred embodiment of the present invention, the nucleic acid molecule encoding a soybean protein or fragment thereof exhibits a % identity with its homologue of between about 25% and about 40%, more preferably of between about 40 and about 70%, even more preferably of between about 70% and about 90% and even more preferably between about 90% and 99%. In another preferred embodiment, of the present invention, a soybean protein or fragment thereof exhibits a % identity with its homologue of 100%.

[0073] In a preferred embodiment of the present invention, the nucleic molecule of the present invention encodes a soybean protein or fragment thereof where the soybean protein exhibits a BLAST score of greater than 120, preferably a BLAST score of between about 1450 and about 120, even more preferably a BLAST score of greater than 1450 with its homologue.

[0074] Nucleic acid molecules of the present invention also include non-soybean homologues. Preferred non-homologues are selected from the group consisting of alfalfa, Arabidopsis, barley, Brassica, broccoli, cabbage, citrus, cotton, garlic, oat, oilseed rape, onion, canola, flax, an ornamental plant, maize, pea, peanut, pepper, potato, rice, rye, sorghum, strawberry, sugarcane, sugarbeet, tomato, wheat, poplar, pine, fir, eucalyptus, apple, lettuce, lentils, grape, banana, tea, turf grasses, sunflower, oil palm and Phaseolus.

[0075] The degeneracy of the genetic code, which allows different nucleic acid sequences to code for the same protein or peptide, is known in the literature. (U.S. Pat. No. 4,757,006, the entirety of which is herein incorporated by reference).

[0076] In an aspect of the present invention, one or more of the nucleic acid molecules of the present invention differ in nucleic acid sequence from those encoding a soybean protein or fragment thereof in SEQ ID NO: 1 through SEQ ID NO: 53893 due to the degeneracy in the genetic code in that they encode the same protein but differ in nucleic acid sequence.

[0077] In another further aspect of the present invention, one or more of the nucleic acid molecules of the present invention differ in nucleic acid sequence from those encoding a soybean protein or fragment thereof in SEQ ID NO: 1 through SEQ ID NO: 53893 due to fact that the different nucleic acid sequences encode a protein having one or more conservative amino acid residues. Examples of conservative substitutions are set forth in Table 1. It is understood that codons capable of coding for such conservative substitutions are known in the art.

TABLE 1

| Original Residue | Conservative Substitutions |
|---|---|
| Ala | Scr |
| Arg | Lys |
| Asn | Gln; His |
| Asp | Glu |
| Cys | Ser; Ala |
| Gln | Asn |
| Glu | Asp |
| Gly | Pro |
| His | Asn; Gln |
| Ile | Leu; Val |
| Leu | Ile; Val |
| Lys | Arg; Gln; Glu |
| Met | Leu; Ile |
| Phe | Met; Leu; Tyr |
| Ser | Thr |
| Thr | Ser |
| Trp | Tyr |
| Tyr | Trp; Phe |
| Val | Ile; Leu |

[0078] In a further aspect of the present invention, one or more of the nucleic acid molecules of the present invention differ in nucleic acid sequence from those encoding a soybean protein or fragment thereof set forth in SEQ ID NO: 1 through SEQ ID NO: 53893 or fragment thereof due to the fact that one or more codons encoding an amino acid has been substituted for a codon that encodes a nonessential substitution of the amino acid originally encoded.

[0079] One aspect of the present invention concerns markers that include nucleic acid molecules SEQ ID NO: 1 through SEQ ID NO: 53893 or complements thereof or fragments of either that can act as markers or other nucleic acid molecules of the present invention that can act as markers. Genetic markers of the present invention include “dominant” or “codominant” markers “Codominant markers” reveal the presence of two or more alleles (two per diploid individual) at a locus. “Dominant markers” reveal the presence of only a single allele per locus. The presence of the dominant marker phenotype (e.g., a band of DNA) is an indication that one allele is present in either the homozygous or heterozygous condition. The absence of the dominant marker phenotype (e.g. absence of a DNA band) is merely evidence that “some other” undefined allele is present. In the case of populations where individuals are predominantly homozygous and loci are predominately dimorphic, dominant and codominant markers can be equally valuable. As populations become more heterozygous and multi-allelic, codominant markers often become more informative of the genotype than dominant markers. Marker molecules can be, for example, capable of detecting polymorphisms such as single nucleotide polymorphisms (SNPs).

[0080] SNPs are single base changes in genomic DNA sequence. They occur at greater frequency and are spaced with a greater uniformity throughout a genome than other reported forms of polymorphism. The greater frequency and uniformity of SNPs means that there is greater probability that such a polymorphism will be found near or in a genetic locus of interest than would be the case for other polymorphisms. SNPs are located in protein-coding regions and noncoding regions of a genome. Some of these SNPs may result in defective or variant protein expression (e.g., as a results of mutations or defective splicing). Analysis (genotyping) of characterized SNPs can require only a plus/minus assay rather than a lengthy measurement, permitting easier automation.

[0081] SNPs can be characterized using any of a variety of methods. Such methods include the direct or indirect sequencing of the site, the use of restriction enzymes (Botstein et al., Am. J. Hum. Genet. 32:314-331 (1980), the entirety of which is herein incorporated reference; Konieczny and Ausubel, Plant J. 4:403-410 (1993), the entirety of which is herein incorporated by reference), enzymatic and chemical mismatch assays (Myers et al., Nature 313:495-498 (1985), the entirety of which is herein incorporated by reference), allele-specific PCR (Newton et al., Nucl. Acids Res. 17:2503-2516 (1989), the entirety of which is herein incorporated by reference; Wu et al., Proc. Natl. Acad. Sci. (U.S.A.) 86:2757-2760 (1989), the entirety of which is herein incorporated by reference), ligase chain reaction (Barany, Proc. Natl. Acad. Sci. (U.S.A) 88:189-193 (1991), the entirety of which is herein incorporated by reference), single-strand conformation polymorphism analysis (Labrune et al., Am. J. Hum. Genet. 48: 1115-1120 (1991), the entirety of which is herein incorporated by reference), primer-directed nucleotide incorporation assays (Kuppuswami et al., Proc. Natl. Acad. Sci. USA 88:1143-1147 (1991), the entirety of which is herein incorporated by reference), dideoxy fingerprinting (Sarkar et al., Genomics 13:441-443 (1992), the entirety of which is herein incorporated by reference), solid-phase ELISA-based oligonucleotide ligation assays (Nikiforov et al., Nucl. Acids Res. 22:4167-4175 (1994), the entirety of which is herein incorporated by reference), oligonucleotide fluorescence-quenching assays (Livak et al., PCR Methods Appl. 4:357-362 (1995), the entirety of which is herein incorporated by reference), 5′-nuclease allele-specific hybridization TaqMan assay (Livak et al., Nature Genet. 9:341-342 (1995), the entirety of which is herein incorporated by reference), template-directed dye-terminator incorporation (TDI) assay (Chen and Kwok, Nucl. Acids Res. 25:347-353 (1997), the entirety of which is herein incorporated by reference), allele-specific molecular beacon assay (Tyagi et al., Nature Biotech. 16: 49-53 (1998), the entirety of which is herein incorporated by reference), PinPoint assay (Haff and Smimov, Genome Res. 7: 378-388 (1997), the entirety of which is herein incorporated by reference) and dCAPS analysis (Neff et al., Plant J 14:387-392 (1998), the entirety of which is herein incorporated by reference).

[0082] Additional markers, such as AFLP markers, RFLP markers and RAPD markers, can be utilized (Walton, Seed World 22-29 (July, 1993), the entirety of which is herein incorporated by reference; Burow and Blake, Molecular Dissection of Complex Traits, 13-29, Paterson (ed.), CRC Press, New York (1988), the entirety of which is herein incorporated by reference). DNA markers can be developed from nucleic acid molecules using restriction endonucleases, the PCR and/or DNA sequence information. RFLP markers result from single base changes or insertions/deletions. These codominant markers are highly abundant in plant genomes, have a medium level of polymorphism and are developed by a combination of restriction endonuclease digestion and Southern blotting hybridization. CAPS are similarly developed from restriction nuclease digestion but only of specific PCR products. These markers are also codominant, have a medium level of polymorphism and are highly abundant in the genome. The CAPS result from single base changes and insertions/deletions.

[0083] Another marker type, RAPDs, are developed from DNA amplification with random primers and result from single base changes and insertions/deletions in plant genomes. They are dominant markers with a medium level of polymorphisms and are highly abundant. AFLP markers require using the PCR on a subset of restriction fragments from extended adapter primers. These markers are both dominant and codominant are highly abundant in genomes and exhibit a medium level of polymorphism.

[0084] SSRs require DNA sequence information. These codominant markers result from repeat length changes, are highly polymorphic and do not exhibit as high a degree of abundance in the genome as CAPS, AFLPs and RAPDs, SNPs also require DNA sequence information. These codominant markers result from single base substitutions. They are highly abundant and exhibit a medium of polymorphism (Rafalski et al., In: Nonmammalian Genomic Analysis, Birren and Lai (ed.), Academic Press, San Diego, Calif., pp. 75-134 (1996), the entirety of which is herein incorporated by reference). It is understood that a nucleic acid molecule of the present invention may be used as a marker.

[0085] A PCR probe is a nucleic acid molecule capable of initiating a polymerase activity while in a double-stranded structure with another nucleic acid. Various methods for determining the structure of PCR probes and PCR techniques exist in the art. Computer generated searches using programs such as Primer3 (on the Worldwide web at genome.wi.mit.edu/cgi-bin/primer/primer3.cgi), STSPipeline (on the Worldwide web at genome.wi.mit.edu/cgi-bin/www-STS_Pipeline), or GeneUp (Pesole et al., BioTechniques 25:112-123 (1998) the entirety of which is herein incorporated by reference), for example, can be used to identify potential PCR primers.

[0086] It is understood that a fragment of one or more of the nucleic acid molecules of the present invention may be a probe and specifically a PCR probe.

[0087] (b) Protein and Peptide Molecules

[0088] A class of agents comprises one or more of the protein or peptide molecules encoded by SEQ ID NO: 1 through SEQ ID NO:53893 or one or more of the protein or fragment thereof or peptide molecules encoded by other nucleic acid agents of the present invention. As used herein, the term “protein molecule” or “peptide molecule” includes any molecule that comprises five or more amino acids. It is well know in the art that proteins may undergo modification, including post-translational modifications, such as, but not limited to, disulfide bond formation, glycosylation, phosphorylation, or oligomerization. Thus, as used herein, the term “protein molecule” or “peptide molecule” includes any protein molecule that is modified by any biological or non-biological process. The terms “amino acid” and “amino acids” refer to all naturally occurring L-amino acids. This definition is meant to include norleucine, ornithine, homocysteine, and homoserine.

[0089] One or more of the protein or fragment of peptide molecules may be produced via chemical synthesis, or more preferably, by expression in a suitable bacterial or eukaryotic host. Suitable methods for expression are described by Sambrook, et al., (In: Molecular Cloning, A Laboratory Manual, 2nd Edition, Cold Spring Harbor Press, Cold Spring Harbor, N.Y. (1989)), or similar texts.

[0090] A “protein fragment” is a peptide or polypeptide molecule whose amino acid sequence comprises a subset of the amino acid sequence of that protein. A protein or fragment thereof that comprises one or more additional peptide regions not derived from that protein is a “fusion” protein. Such molecules may be derivatized to contain carbohydrate or other moieties (such as keyhole limpet hemocyanin, etc.). Fusion protein or peptide molecule of the present invention are preferably produced via recombinant means.

[0091] Another class of agents comprise protein or peptide molecules encoded by SEQ ID NO: 1 through SEQ ID NO:53893 or complements thereof or, fragments or fusions thereof in which non-essential, or not relevant, amino acid residues have been added, replaced, or deleted. An example of such a homologue is the homologue protein of all non-soybean plant species, including but not limited to alfalfa, Arabidopsis, barley, Brassica, broccoli, cabbage, citrus, cotton, garlic, oat, oilseed rape, onion, canola, flax, maize, an ornamental plant, pea, peanut, pepper, potato, rice, rye, sorghum, strawberry, sugarcane, sugarbeet, tomato, wheat, poplar, pine, fir, eukalyptus, apple, lettuce, peas, lentils, grape, banana, tea, turf grasses, etc. Particularly preferred non-soybean plants to utilize for the isolation of homologues would include alfalfa, Arabidopsis, barley, cotton, corn, oat, oilseed rape, rice, corn, canola, ornamentals, sugarcane, sugarbeet, tomato, potato, wheat, and turf grasses. Such a homologue can be obtained by any of a variety of methods. Most preferably, as indicated above, one or more of the disclosed sequences (SEQ ID NO: 1 through SEQ ID NO:53893 or complements thereof) will be used to define a pair of primers that may be used to isolate the homologue-encoding nucleic acid molecules from any desired species. Such molecules can be expressed to yield homologues by recombinant means.

[0092] (c) Antibodies

[0093] One aspect of the present invention concerns antibodies, single-chain antigen binding molecules, or other proteins that specifically bind to one or more of the protein or peptide molecules of the present invention and their homologues, fusions or fragments. Such antibodies may be used to quantitatively or qualitatively detect the protein or peptide molecules of the present invention. As used herein, an antibody or peptide is said to “specifically bind” to a protein or peptide molecule of the present invention if such binding is not competitively inhibited by the presence of non-related molecules.

[0094] Nucleic acid molecules that encode all or part of the protein of the present invention can be expressed, via recombinant means, to yield protein or peptides that can in turn be used to elicit antibodies that are capable of binding the expressed protein or peptide. Such antibodies may be used in immunoassays for that protein. Such protein-encoding molecules, or their fragments may be a “fusion” molecule (i.e., a part of a larger nucleic acid molecule) such that, upon expression, a fusion protein is produced. It is understood that any of the nucleic acid molecules of the present invention may be expressed, via recombinant means, to yield proteins or peptides encoded by these nucleic acid molecules.

[0095] The antibodies that specifically bind proteins and protein fragments of the present invention may be polyclonal or monoclonal, and may comprise intact immunoglobulins, or antigen binding portions of immunoglobulins (such as (F(ab′), F(ab′)₂) fragments, or single-chain immunoglobulins producible, for example, via recombinant means). It is understood that practitioners are familiar with the standard resource materials which describe specific conditions and procedures for the construction, manipulation and isolation of antibodies (see, for example, Harlow and Lane, In Antibodies: A Laboratory Manual, Cold Spring Harbor Press, Cold Spring Harbor, N.Y. (1988), the entirety of which is herein incorporated by reference).

[0096] Murine monoclonal antibodies are particularly preferred. BALB/c mice are preferred for this purpose, however, equivalent strains may also be used. The animals are preferably immunized with approximately 25 μg of purified protein (or fragment thereof) that has been emulsified a suitable adjuvant (such as TiterMax adjuvant (Vaxcel, Norcross, Ga.)). Immunization is preferably conducted at two intramuscular sites, one intraperitoneal site, and one subcutaneous site at the base of the tail. An additional i.v. injection of approximately 25 μg of antigen is preferably given in normal saline three weeks later. After approximately 11 days following the second injection, the mice may be bled and the blood screened for the presence of anti-protein or peptide antibodies. Preferably, a direct binding Enzyme-Linked Immunoassay (ELISA) is employed for this purpose.

[0097] More preferably, the mouse having the highest antibody titer is given a third i.v. injection of approximately 25 μg of the same protein or fragment. The splenic leukocytes from this animal may be recovered 3 days later, and are then permitted to fuse, most preferably, using polyethylene glycol, with cells of a suitable myeloma cell line (such as, for example, the P3X63Ag8.653 myeloma cell line). Hybridoma cells are selected by culturing the cells under “HAT” (hypoxanthine-aminopterin-thymine) selection for about one week. The resulting clones may then be screened for their capacity to produce monoclonal antibodies (“mAbs), preferably by direct ELISA.

[0098] In one embodiment, anti-protein or peptide monoclonal antibodies are isolated using a fusion of a protein, protein fragment, or peptide of the present invention, or conjugate of a protein, protein fragment, or peptide of the present invention, as immunogens. Thus, for example, a group of mice can be immunized using a fusion protein emulsified in Freund's complete adjuvant (e.g. approximately 50 μg of antigen per immunization). At three week intervals, an identical amount of antigen is emulsified in Freund's incomplete adjuvant and used to immunize the animals. Ten days following the third immunization, serum samples are taken and evaluated for the presence of antibody. If antibody titers are too low, a fourth booster can be employed. Polysera capable of binding the protein or peptide can also be obtained using this method.

[0099] In a preferred procedure for obtaining monoclonal antibodies, the spleens of the above-described immunized mice are removed, disrupted, and immune splenocytes are isolated over a ficoll gradient. The isolated splenocytes are fused, using polyethylene glycol with BALB/c-derived HGPRT (hypoxanthine guanine phosphoribosyl transferase) deficient P3×63xAg8.653 plasmacytoma cells. The fused cells are plated into 96-well microtiter plates and screened for hybridoma fusion cells by their capacity to grow in culture medium supplemented with hypothanthine, aminopterin and thymidine for approximately 2-3 weeks.

[0100] Hybridoma cells that arise from such incubation are preferably screened for their capacity to produce an immunoglobulin that binds to a protein of interest. An indirect ELISA may be used for this purpose. In brief, the supernatants of hybridomas are incubated in microtiter wells that contain immobilized protein. After washing, the titer of bound immunoglobulin can be determined using, for example, a goat anti-mouse antibody conjugated to horseradish peroxidase. After additional washing, the amount of immobilized enzyme is determined (for example through the use of a chromogenic substrate). Such screening is performed as quickly as possible after the identification of the hybridoma in order to ensure that a desired clone is not overgrown by non-secreting neighbors. Desirably, the fusion plates are screened several times since the rates of hybridoma growth vary. In a preferred sub-embodiment, a different antigenic form of immunogen may be used to screen the hybridoma. Thus, for example, the splenocytes may be immunized with one immunogen, but the resulting hybridomas can be screened using a different immunogen. It is understood that any of the protein or peptide molecules of the present invention may be used to raise antibodies.

[0101] As discussed below, such antibody molecules or their fragments may be used for diagnostic purposes. Where the antibodies are intended for diagnostic purposes, it may be desirable to derivatize them, for example with a ligand group (such as biotin) or a detectable marker group (such as a fluorescent group, a radioisotope or an enzyme).

[0102] The ability to produce antibodies that bind the protein or peptide molecules of the present invention permits the identification of mimetic compounds of those molecules. A “mimetic compound” is a compound that is not that compound, or a fragment of that compound, but which nonetheless exhibits an ability to specifically bind to antibodies directed against that compound.

[0103] It is understood that any of the agents of the present invention can be substantially purified and/or be biologically active and/or recombinant.

[0104] Uses of the Agents of the Invention

[0105] The nucleic acid molecules and fragments thereof of the present invention from library SOYMON029, are from roots from SCN resistant plants. Roots play a critical role in major vegetative organs which supply water, minerals, and substances essential for plant growth and development, therefore, the ESTs of the present invention will find great use in the isolation of a variety of agronomically significant genes, including but not limited to genes that are necessary for absorption, anchorage, storage, transport, propagation, and nitrogen fixation. Such genes are associated with plant growth, quality, and yield and could also serve as links in important plant metabolic, developmental and catabolic pathways.

[0106] The nucleic acid molecules and fragments thereof of the present invention from library SOYMON031 are from carpel and stamens. Flower libraries can enable acquisition of, but are not limited to, genes that are involved in floral development, reproduction and seed production; therefore, the ESTs of the present invention will find great use in the isolation of a variety of agronomically significant genes, including but not limited to, genes that regulate meiosis, cell division, carotenoids, floral biogenesis, embryogenesis, protein, amino acids, sterols, oils, minerals, isoflavones, saponins, vitamins, tocopherols, antinutrient components, carbohydrates, starch metabolism and seed regulatory elements. Such genes are associated with plant growth, quality, yield, and could also serve as links in important developmental, metabolic, and catabolic pathways.

[0107] The nucleic acid molecules and fragments thereof of the present invention from library SOYMON032 are from meristem explants. The ESTs of the present invention will find great use in the isolation of a variety of agronomically significant genes, including but not limited to, genes that are involved in the transformation process, plant regeneration, wound response, plant hormone pathways, and cell synchrony. Such genes are associated with plant growth, quality, and yield, and could also serve as links in metabolic, developmental and catabolic pathways.

[0108] The nucleic acid molecules and fragments thereof of the present invention from library SOYMON033 are from seedlings without cotyledons that have been heat shocked. The ESTs of the present invention will find great use in the isolation of a variety of agronomically significant genes, including but not limited to genes that regulate germination, stress, protein, amino acids, sterols, oils, minerals, isoflavones, saponins, trypsin inhibitors, vitamins, tocopherols, antinutrient components, carbohydrates, starch metabolism, and seedling and vegetative regulatory elements. Such genes are associated with plant growth, quality, yield, and could also serve as links in important metabolic, developmental and catabolic pathways.

[0109] The nucleic acid molecules and fragments thereof of the present invention from library SOYMON036 are from an insect challenged leaf from three soybean cultivars, PI171451, PI227687 and PI229358. These libraries will give rise to insect tolerant/resistant genes. Additionally, leaves are the carbohydrate factories of crop plants, therefore, the ESTs of the present invention will find great use in the isolation of a variety of agronomically significant genes, including but not limited to genes that are necessary to for the interception and transformation of light energy via photosynthesis linked with plant growth, quality and yield. Genes isolated using the disclosed ESTs would also be critical in pathways including but not limited to a pathway such as nitrogen metabolism linked to fruiting and mobilization and distribution of nitrogen.

[0110] The nucleic acid molecules and fragments thereof of the present invention from library SOYMON037 are from etiolated axis+radical tissue. The ESTs of the present invention will find great use in the isolation of a variety of agronomically significant genes, including but not limited to genes that regulate germination, chloroplast development, the photosynthetic process, protein, amino acids, sterols, oils, minerals, isoflavones, saponins, trypsin inhibitors, vitamins, tocopherols, antinutrient components, carbohydrates, starch metabolism, and seedling and vegetative regulatory elements. Such genes are associated with plant growth, quality, and yield, and could also serve as links in important metabolic, developmental and catabolic pathways.

[0111] The nucleic acid molecules and fragments thereof of the present invention from library SOYMON038 are from meristem agrobacterium explants. The ESTs of the present invention will find great use in the isolation of a variety of agronomically significant genes, including but not limited to, genes that are involved in the transformation process, plant regeneration, wound response, plant hormone pathways, and cell synchrony. Such genes are associated with plant growth, quality, and yield, and could also serve as links in important metabolic, developmental and catabolic pathways.

[0112] The nucleic acid molecules and fragments thereof of the present invention from library SOYMON029 are from soybean cultivar P1507354. Libraries from this genotype will give rise to Soybean Cyst Nematode resistant genes.

[0113] The nucleic acid molecules and fragments thereof of the present invention from libraries SOYMON031, SOYMON033, SOYMON037, and SOYMON038, are from soybean genotype A3244. This genotype has disease resistance to brown stem rot (Phialophora gregata) and Phytophthora root rot (Phytophthora sojae). Libraries from this genotype are likely to find use in the isolation of genes involved in disease resistance against a number of agronomically important fungal pathogens.

[0114] The nucleic acid molecules and fragments thereof of the present invention from library SOYMON032 are from soybean genotype A4922.

[0115] The nucleic acid molecules and fragments thereof of the present invention from library SOYMON036 are from P1171451, P1227687, P1229358. Libraries from this genotype will give rise to insect tolerant resistant genes.

[0116] Nucleic acid molecules and fragments thereof of the present invention may be employed to obtain other nucleic acid molecules. Such molecules include the nucleic acid molecules of other plants or other organisms (e.g., alfalfa, rice, potato, cotton, oat, rye, barley, maize, wheat, Arabidopsis, Brassica, etc.) including the nucleic acid molecules that encode, in whole or in part, protein homologues of other plant species or other organisms, and sequences of genetic elements such as promoters and transcriptional regulatory elements. Such molecules can be readily obtained by using the above-described nucleic acid molecules or fragments thereof to screen cDNA or genomic libraries obtained from such plant species. Methods for forming such libraries are well known in the art. Such homologue molecules may differ in their nucleotide sequences from those found in one or more of SEQ ID NO: 1 through SEQ ID NO:53893 or complements thereof because complete complementarity is not needed for stable hybridization. The nucleic acid molecules of the present invention therefore also include molecules that, although capable of specifically hybridizing with the nucleic acid molecules may lack “complete complementarity.”

[0117] Any of a variety of methods may be used to obtain one or more of the above-described nucleic acid molecules (Zamechik et al., Proc. Natl. Acad. Sci. (U.S.A.) 83:4143-4146 (1986), the entirety of which is herein incorporated by reference; Goodchild et al., Proc. Natl. Acad. Sci. (U.S.A) 85:5507-5511 (1988), the entirety of which is herein incorporated by reference; Wickstrom et al., Proc. Natl. Acad. Sci. (U.S.A.) 85:1028-1032 (1988), the entirety of which is herein incorporated by reference; Holt, et al., Molec. Cell. Biol. 8:963-973 (1988), the entirety of which is herein incorporated by reference; Gerwirtz, et al., Science 242:1303-1306 (1988), the entirety of which is herein incorporated by reference; Anfossi, et al., Proc. Natl. Acad. Sci. (U.S.A.) 86:3379-3383 (1989), the entirety of which is herein incorporated by reference; Becker, et al., EMBO J. 8:3685-3691 (1989); the entirety of which is herein incorporated by reference). Automated nucleic acid synthesizers may be employed for this purpose. In lieu of such synthesis, the disclosed nucleic acid molecules may be used to define a pair of primers that can be used with the polymerase chain reaction (Mullis, et al., Cold Spring Harbor Symp. Quant. Biol. 51:263-273 (1986); Erlich et al., EP 50,424; EP 84,796, EP 258,017, EP 237,362; Mullis, EP 201,184; Mullis et al., U.S. Pat. No. 4,683,202; Erlich, U.S. Pat. No. 4,582,788; and Saiki, R. et al., U.S. Pat. No. 4,683,194, all of which are hereby incorporated by reference in their entirety) to amplify and obtain any desired nucleic acid molecule or fragment.

[0118] Promoter sequence(s) and other genetic elements including but not limited to transcriptional regulatory elements associated with one or more of the disclosed nucleic acid sequences can also be obtained using the disclosed nucleic acid sequences provided herein.

[0119] In one embodiment, such sequences are obtained by incubating EST nucleic acid molecules or preferably fragments thereof with members of genomic libraries (e.g. maize and soybean) and recovering clones that hybridize to the EST nucleic acid molecule or fragment thereof. In a second embodiment, methods of “chromosome walking,” or inverse PCR may be used to obtain such sequences (Frohman, et al., Proc. Natl. Acad. Sci. (U.S.A.) 85:8998-9002 (1988); Ohara, et al., Proc. Natl. Acad. Sci. (U.S.A.) 86: 5673-5677 (1989); Pang et al., Biotechniques, 22(6); 1046-1048 (1977); Huang et al., Methods Mol. Biol. 69: 89-96 (1977); Hartl et al., Methods Mol. Biol. 58: 293-301 (1996), all of which are hereby incorporated by reference in their entirety). In one embodiment, the disclosed nucleic acid molecules are used to identify cDNAs whose analogous genes contain promoters with desirable expression patterns. The nucleic acid molecules isolated from the library of the present invention are used to isolate promoters of tissue-enhanced, tissue-specific, developmentally- or environmentally-regulated expression profiles. Isolation and functional analysis of the 5′ flanking promoter sequences of these genes from genomic libraries, for example, using genomic screening methods and PCR techniques would result in the isolation of useful promoters and transcriptional regulatory elements. These methods are known to those of skill in the art and have been described (See for example Birren et al., Genome Analysis: Analyzing DNA, 1, (1997), Cold Spring Harbor Laboratory Press, Cold Spring Harbor, N.Y., the entirety of which is herein incorporated by reference).

[0120] Promoters obtained utilizing the nucleic acid molecules of the present invention could also be modified to affect their control characteristics. Examples of such modifications would include but are not limited to enhancer sequences as reported by Kay et al., Science 236:1299 (1987), herein incorporated by reference in its entirety. Such genetic elements could be used to enhance gene expression of new and existing traits for crop improvements.

[0121] The nucleic acid molecules of the present invention may be used to isolate promoters of tissue enhanced. tissue specific, cell-specific, cell-type, developmentally or environmentally regulated expression profiles. Isolation and functional analysis of the 5′ flanking promoter sequences of these genes from genomic libraries, for example, using genomic screening methods and PCR techniques would result in the isolation of useful promoters and transcriptional regulatory elements. These methods are known to those of skill in the art and have been described (See, for example, Birren et. al., Genome Analysis: Analyzing DNA, 1, Cold Spring Harbor Laboratory Press, Cold Spring Harbor, N.Y. (1997), the entirety of which is herein incorporated by reference). Promoters obtained utilizing the nucleic acid molecules of the present invention could also be modified to affect their control characteristics. Examples of such modifications would include but are not limited to enhancer sequences as reported by Kay, et al. Science 236:1299 (1987), herein incorporated reference in its entirety. Such genetic elements could be used to enhance gene expression of new and existing traits for crop improvements.

[0122] In an aspect of the present invention, one or more of the nucleic molecules of the present invention are used to determine whether a plant (preferably soybean) has a mutation affecting the level (i.e., the concentration of mRNA in a sample, etc.) or pattern (i.e., the kinetics of expression, rate of decomposition, stability profile, etc.) of the expression encoded in part or whole by one or more of the nucleic acid molecules of the present invention (collectively, the “Expression Response” of a cell or tissue). As used herein, the Expression Response manifested by a cell or tissue is said to be “altered” if it differs from the Expression Response of cells or tissues of plants not exhibiting the phenotype. To determine whether a Expression Response is altered, the Expression Response manifested by the cell or tissue of the plant exhibiting the phenotype is compared with that of a similar cell or tissue sample of a plant not exhibiting the phenotype. As will be appreciated, it is not necessary to re-determine the Expression Response of the cell or tissue sample of plants not exhibiting the phenotype each time such a comparison is made; rather, the Expression Response of a particular plant may be compared with previously obtained values of normal plants. As used herein, the phenotype of the organism is any of one or more characteristics of an organism (e.g. disease resistance, pest tolerance, environmental tolerance, male sterility, yield, quality improvements, etc.). A change in genotype or phenotype may be transient or permanent. Also as used herein, a tissue sample is any sample that comprises more than one cell. In a preferred aspect, a tissue sample comprises cells that share a common characteristic (e.g. derived from leaf, root, or pollen etc).

[0123] In one sub-aspect, such an analysis is conducted by determining the presence and/or identity of polymorphism(s) by one or more of the nucleic acid molecules of the present invention and more specifically, one or more of the EST nucleic acid molecules or fragments thereof which are associated with phenotype, or a predisposition to phenotype.

[0124] Any of a variety of molecules can be used to identify such polymorphism(s). In one embodiment, one or more of the EST nucleic acid molecules (or a sub-fragment thereof) may be employed as a marker nucleic acid molecule to identify such polymorphism(s). Alternatively, such polymorphisms can be detected through the use of a marker nucleic acid molecule or a marker protein that is genetically linked to (i.e., a polynucleotide that co-segregates with) such polymorphism(s).

[0125] In an alternative embodiment, such polymorphisms can be detected through the use of a marker nucleic acid molecule that is physically linked to such polymorphism(s). For this purpose, marker nucleic acid molecules comprising a nucleotide sequence of a polynucleotide located within 1 mb of the polymorphism(s), and more preferably within 100 kb of the polymorphism(s), and most preferably within 10 kb of the polymorphism(s) can be employed.

[0126] The genomes of animals and plants naturally undergo spontaneous mutation in the course of their continuing evolution (Gusella, Ann. Rev. Biochem. 55:831-854 (1986)). A “polymorphism” is a variation or difference in the sequence of the gene or its flanking regions that arises in some of the members of a species. The variant sequence and the “original” sequence co-exist in the species' population. In some instances, such co-existence is in stable or quasi-stable equilibrium.

[0127] A polymorphism is thus said to be “allelic,” in that, due to the existence of the polymorphism, some members of a species may have the original sequence (i.e., the original “allele”) whereas other members may have the variant sequence (i.e., the variant “allele”). In the simplest case, only one variant sequence may exist, and the polymorphism is thus said to be di-allelic. In other cases, the species' population may contain multiple alleles, and the polymorphism is termed tri-allelic, etc. A single gene may have multiple different unrelated polymorphisms. For example, it may have a di-allelic polymorphism at one site, and a multi-allelic polymorphism at another site.

[0128] The variation that defines the polymorphism may range from a single nucleotide variation to the insertion or deletion of extended regions within a gene. In some cases, the DNA sequence variations are in regions of the genome that are characterized by short tandem repeats (STRs) that include tandem di- or tri-nucleotide repeated motifs of nucleotides. Polymorphisms characterized by such tandem repeats are referred to as “variable number tandem repeat” (“VNTR”) polymorphisms. VNTRs have been used in identity analysis (Weber, U.S. Pat. No. 5,075,217; Armour, et al., FEBS Lett. 307:113-115 (1992); Jones, et al., Eur. J. Haematol. 39:144-147 (1987); Horn, et al., PCT Application WO91/14003; Jeffreys, European Patent Application 370,719; Jeffreys, U.S. Pat. No. 5,699,082; Jeffreys. et al., Amer. J. Hum. Genet. 39:11-24 (1986); Jeffreys. et al., Nature 316:76-79 (1985); Gray, et al., Proc. R. Acad. Soc. Lond. 243:241-253 (1991); Moore, et al., Genomics 10:654-660 (1991); Jeffreys, et al., Anim. Genet. 18:1-15 (1987); Hillel, et al., Anim. Genet. 20:145-155 (1989); Hillel, et al., Genet. 124:783-789 (1990), all of which are herein incorporated by reference in their entirety).

[0129] The detection of polymorphic sites in a sample of DNA may be facilitated through the use of nucleic acid amplification methods. Such methods specifically increase the concentration of polynucleotides that span the polymorphic site, or include that site and sequences located either distal or proximal to it. Such amplified molecules can be readily detected by gel electrophoresis or other means.

[0130] The most preferred method of achieving such amplification employs the polymerase chain reaction (“PCR”) (Mullis, et al., Cold Spring Harbor Symp. Quant. Biol. 51:263-273 (1986); Erlich, et al., European Patent Appln. 50,424; European Patent Appln. 84,796, European Patent Application 258,017, European Patent Appln. 237,362; Mullis, European Patent Appln. 201,184; Mullis, et al., U.S. Pat. No. 4,683,202; Erlich., U.S. Pat. No. 4,582,788; and Saiki, et al., U.S. Pat. No. 4,683,194, all of which are herein incorporated by reference), using primer pairs that are capable of hybridizing to the proximal sequences that define a polymorphism in its double-stranded form.

[0131] In lieu of PCR, alternative methods, such as the “Ligase Chain Reaction” (“LCR”) may be used (Barany, Proc. Natl. Acad. Sci. (U.S.A.) 88:189-193 (1991), the entirety of which is herein incorporated by reference). LCR uses two pairs of oligonucleotide probes to exponentially amplify a specific target. The sequences of each pair of oligonucleotides is selected to permit the pair to hybridize to abutting sequences of the same strand of the target. Such hybridization forms a substrate for a template-dependent ligase. As with PCR, the resulting products thus serve as a template in subsequent cycles and an exponential amplification of the desired sequence is obtained.

[0132] LCR can be performed with oligonucleotides having the proximal and distal sequences of the same strand of a polymorphic site. In one embodiment, either oligonucleotide will be designed to include the actual polymorphic site of the polymorphism. In such an embodiment, the reaction conditions are selected such that the oligonucleotides can be ligated together only if the target molecule either contains or lacks the specific nucleotide that is complementary to the polymorphic site present on the oligonucleotide. Alternatively, the oligonucleotides may be selected such that they do not include the polymorphic site (see, Segev, PCT Application WO 90/01069, the entirety of which is herein incorporated by reference).

[0133] The “Oligonucleotide Ligation Assay” (“OLA”) may alternatively be employed (Landegren, et al., Science 241:1077-1080 (1988), the entirety of which is herein incorporated by reference). The OLA protocol uses two oligonucleotides which are designed to be capable of hybridizing to abutting sequences of a single strand of a target. OLA, like LCR, is particularly suited for the detection of point mutations. Unlike LCR, however, OLA results in “linear” rather than exponential amplification of the target sequence.

[0134] Nickerson, et al. have described a nucleic acid detection assay that combines attributes of PCR and OLA (Nickerson, et al., Proc. Natl. Acad. Sci. (U.S.A.) 87:8923-8927 (1990), the entirety of which is herein incorporated by reference). In this method, PCR is used to achieve the exponential amplification of target DNA, which is then detected using OLA. In addition to requiring multiple, and separate, processing steps, one problem associated with such combinations is that they inherit all of the problems associated with PCR and OLA.

[0135] Schemes based on ligation of two (or more) oligonucleotides in the presence of nucleic acid having the sequence of the resulting “di-oligonucleotide”, thereby amplifying the di-oligonucleotide, are also known (Wu, et al., Genomics 4:560 (1989), the entirety of which is herein incorporated by reference), and may be readily adapted to the purposes of the present invention.

[0136] Other known nucleic acid amplification procedures, such as allele-specific oligomers, branched DNA technology, transcription-based amplification systems, or isothermal amplification methods may also be used to amplify and analyze such polymorphisms (Malek, et al., U.S. Pat. No. 5,130,238; Davey, et al., European Patent Application 329,822; Schuster et al., U.S. Pat. No. 5,169,766; Miller, et al., PCT Application WO 89/06700; Kwoh, et al., Proc. Natl. Acad. Sci. (U.S.A.) 86:1173-1177 (1989); Gingeras, et al., PCT Application WO 88/10315; Walker, et al., Proc. Natl. Acad. Sci. (U.S.A.) 89:392-396 (1992), all of which are herein incorporated by reference in their entirety).

[0137] The identification of a polymorphism can be determined in a variety of ways. By correlating the presence or absence of it in a plant with the presence or absence of a phenotype, it is possible to predict the phenotype of that plant. If a polymorphism creates or destroys a restriction endonuclease cleavage site, or if it results in the loss or insertion of DNA (e.g., a VNTR polymorphism), it will alter the size or profile of the DNA fragments that are generated by digestion with that restriction endonuclease. As such, individuals that possess a variant sequence can be distinguished from those having the original sequence by restriction fragment analysis. Polymorphisms that can be identified in this manner are termed “restriction fragment length polymorphisms” (“RFLPs”). RFLPs have been widely used in human and plant genetic analyses (Glassberg, UK Patent Application 2135774; Skolnick, et al., Cytogen. Cell Genet. 32:58-67 (1982); Botstein, et al., Ann. J. Hum. Genet. 32:314-331 (1980); Fischer, et al. (PCT Application WO90/13668); Uhlen, PCT Application WO90/11369).

[0138] Polymorphisms can also be identified by Single Strand Conformation Polymorphism (SSCP) analysis. The SSCP technique is a method capable of identifying most sequence variations in a single strand of DNA, typically between 150 and 250 nucleotides in length (Elles, Methods in Molecular Medicine: Molecular Diagnosis of Genetic Diseases, Humana Press (1996), the entirety of which is herein incorporated by reference); Orita et al., Genomics 5: 874-879 (1989), the entirety of which is herein incorporated by reference). Under denaturing conditions a single strand of DNA will adopt a conformation that is uniquely dependent on its sequence conformation. This conformation usually will be different, even if only a single base is changed. Most conformations have been reported to alter the physical configuration or size sufficiently to be detectable by electrophoresis. A number of protocols have been described for SSCP including, but not limited to Lee et al., Anal. Biochem. 205: 289-293 (1992), the entirety of which is herein incorporated by reference; Suzuki et al., Anal. Biochem. 192: 82-84 (1991), the entirety of which is herein incorporated by reference; Lo et al., Nucleic Acids Research 20: 1005-1009 (1992), the entirety of which is herein incorporated by reference; Sarkar et al., Genomics 13: 441-443 (1992), the entirety of which is herein incorporated by reference). It is understood that one or more of the nucleic acids of the present invention, may be utilized as markers or probes to detect polymorphisms by SSCP analysis.

[0139] Polymorphisms may also be found using a DNA fingerprinting technique called amplified fragment length polymorphism (AFLP), which is based on the selective PCR amplification of restriction fragments from a total digest of genomic DNA to profile that DNA. Vos, et al., Nucleic Acids Res. 23:4407-4414 (1995), the entirety of which is herein incorporated by reference. This method allows for the specific co-amplification of high numbers of restriction fragments, which can be visualized by PCR without knowledge of the nucleic acid sequence.

[0140] AFLP employs basically three steps. Initially, a sample of genomic DNA is cut with restriction enzymes and oligonucleotide adapters are ligated to the restriction fragments of the DNA. The restriction fragments are then amplified using PCR by using the adapter and restriction sequence as target sites for primer annealing. The selective amplification is achieved by the use of primers that extend into the restriction fragments, amplifying only those fragments in which the primer extensions match the nucleotide flanking the restriction sites. These amplified fragments are then visualized on a denaturing polyacrylamide gel.

[0141] AFLP analysis has been performed on Salix (Beismann, et al., Mol. Ecol. 6:989-993 (1997), the entirety of which is herein incorporated by reference); Acinetobacter (Janssen, et al., Int. J. Syst. Bacteriol 47:1179-1187 (1997), the entirety of which is herein incorporated by reference), Aeromonas popoffi (Huys, et al., Int. J. Syst. Bacteriol. 47:1165-1171 (1997), the entirety of which is herein incorporated by reference), rice (McCouch, et al., Plant Mol. Biol. 35:89-99 (1997), the entirety of which is herein incorporated by reference); Nandi, et al., Mol. Gen. Genet. 255:1-8 (1997); Cho, et al., Genome 39:373-378 (1996), herein incorporated by reference), barley (Hordeum vulgare)(Simons, et al., Genomics 44:61-70 (1997), the entirety of which is herein incorporated by reference; Waugh, et al., Mol. Gen. Genet. 255:311-321 (1997), the entirety of which is herein incorporated by reference; Qi, et al., Mol. Gen. Genet. 254:330-336 (1997), the entirety of which is herein incorporated by reference; Becker, et al., Mol. Gen. Genet. 249:65-73 (1995), the entirety of which is herein incorporated by reference), potato (Van der Voort, et al., Mol. Gen. Genet. 255:438-447 (1997), the entirety of which is herein incorporated by reference; Meksem, et al., Mol. Gen. Genet. 249:74-81 (1995), the entirety of which is herein incorporated by reference), Phytophthora infestans (Van der Lee, et al., Fungal Genet. Biol. 21:278-291 (1997), the entirety of which is herein incorporated by reference), Bacillus anthracis (Keim, et al., J. Bacteriol. 179:818-824 (1997)), Astragalus cremnophylax (Travis, et al., Mol. Ecol. 5:735-745 (1996), the entirety of which is herein incorporated by reference), Arabidopsis (Cnops, et al., Mol. Gen. Genet. 253:32-41 (1996), the entirety of which is herein incorporated by reference), Escherichia coli (Lin, et al., Nucleic Acids Res. 24:3649-3650 (1996), the entirety of which is herein incorporated by reference), Aeromonas (Huys, et al., Int. J. Syst. Bacteriol. 46:572-580 (1996), the entirety of which is herein incorporated by reference), nematode (Folkertsma, et al., Mol. Plant. Microbe Interact. 9:47-54 (1996), the entirety of which is herein incorporated by reference), tomato (Thomas, et al., Plant J. 8:785-794 (1995), the entirety of which is herein incorporated by reference), and human (Latorra, et al., PCR Methods Appl. 3:351-358 (1994)). AFLP analysis has also been used for fingerprinting mRNA (Money, et al., Nucleic Acids Res. 24:2616-2617 (1996), the entirety of which is herein incorporated by reference; Bachem, et al., Plant J. 9:745-753 (1996), the entirety of which is herein incorporated by reference). It is understood that one or more of the nucleic acids of the present invention, may be utilized as markers or probes to detect polymorphisms by AFLP analysis for fingerprinting mRNA.

[0142] Polymorphisms may also be found using random amplified polymorphic DNA (RAPD) (Williams et al., Nucl. Acids Res. 18: 6531-6535 (1990), the entirety of which is herein incorporated by reference) and cleaveable amplified polymorphic sequences (CAPS) (Lyamichev et al., Science 260: 778-783 (1993), the entirety of which is herein incorporated by reference). It is understood that one or more of the nucleic acids of the present invention, may be utilized as markers or probes to detect polymorphisms by RAPD or CAPS analysis.

[0143] Polymorphisms are useful, through linkage analysis, to define the genetic distances or physical distances between polymorphic traits. A physical map or ordered array of genomic DNA fragments in the desired region containing the gene may be used to characterize and isolate genes corresponding to desirable traits. For this purpose, yeast artificial chromosomes (YACs), bacterial artificial chromosomes (BACs), and cosmids are appropriate vectors for cloning large segments of DNA molecules. Although fewer clones are needed to make a contig for a specific genomic region by using YACs (Agyare et al., Genome Res. 7: 1-9 (1997), the entirety of which is herein incorporated by reference; James et al., Genomics 32: 425-430 (1996), the entirety of which is herein incorporated by reference), chimerism in the inserted DNA fragment can arise. Cosmids are convenient for handling smaller-size DNA molecules and may be used for transformation in developing transgenic plants. BACs also carry DNA fragments and are less prone to chimerism.

[0144] Through genetic mapping, a fine scale linkage map can be developed using DNA markers and, then, a genomic DNA library of large-sized fragments can be screened with molecular markers linked to the desired trait. Molecular markers are advantageous for agronomic traits that are otherwise difficult to tag, such as resistance to pathogens, insects and nematodes, tolerance to abiotic stress, quality parameters and quantitative traits such as high yield potential.

[0145] The essential requirements for marker-assisted selection in a plant breeding program are: (1) the marker(s) should co-segregate or be closely linked with the desired trait; (2) an efficient means of screening large populations for the molecular marker(s) should be available; and (3) the screening technique should have high reproducibility across laboratories and preferably be economical to use and be user-friendly.

[0146] The genetic linkage of marker molecules can be established by a gene mapping model such as, without limitation, the flanking marker model reported by Lander and Botstein, Genetics 121:185-199 (1989) and the interval mapping, based on maximum likelihood methods described by Lander and Botstein, Genetics 121:185-199 (1989) and implemented in the software package MAPMAKER/QTL (Lincoln and Lander, Mapping Genes Controlling Quantitative Traits Using MAPM4KER/QTL, Whitehead Institute for Biomedical Research, Massachusetts, (1990). Additional software includes Qgene, Version 2.23 (1996), Department of Plant Breeding and Biometry, 266 Emerson Hall, Cornell University, Ithaca, N.Y., the manual of which is herein incorporated by reference in its entirety). Use of Qgene software is a particularly preferred approach.

[0147] A maximum likelihood estimate (MLE) for the presence of a marker is calculated, together with an MLE assuming no QTL effect, to avoid false positives. A loglo of an odds ratio (LOD) is then calculated as: LOD=logio (MLE for the presence of a QTL/MLE given no linked QTL).

[0148] The LOD score essentially indicates how much more likely the data are to have arisen assuming the presence of a QTL than in its absence. The LOD threshold value for avoiding a false positive with a given confidence, say 95%, depends on the number of markers and the length of the genome. Graphs indicating LOD thresholds are set forth in Lander and Botstein, Genetics 121:185-199 (1989) the entirety of which is herein incorporated by reference and further described by Arús and Moreno-González, Plant Breeding, Hayward et al., (eds.) Chapman & Hall, London, pp. 314-331 (1993), the entirety of which is herein incorporated by reference.

[0149] Additional models can be used. Many modifications and alternative approaches to interval mapping have been reported, including the use of non-parametric methods (Kruglyak and Lander, Genetics 139:1421-1428 (1995), the entirety of which is herein incorporated by reference). Multiple regression methods or models can be also be used, in which the trait is regressed on a large number of markers (Jansen, Biometrics in Plant Breeding, van Oijen and Jansen (eds.), Proceedings of the Ninth Meeting of the Eucarpia Section Biometrics in Plant Breeding, The Netherlands, pp. 116-124 (1994); Weber and Wricke, Advances in Plant Breeding, Blackwell, Berlin, 16 (1994), both of which is herein incorporated by reference in their entirety). Procedures combining interval mapping with regression analysis, whereby the phenotype is regressed onto a single putative QTL at a given marker interval and at the same time onto a number of markers that serve as ‘cofactors,’ have been reported by Jansen and Stam, Genetics 136:1447-1455 (1994), the entirety of which is herein incorporated by reference and Zeng, Genetics 136:1457-1468 (1994) the entirety of which is herein incorporated by reference. Generally, the use of cofactors reduces the bias and sampling error of the estimated QTL positions (Utz and Melchinger, Biometrics in Plant Breeding, van Oijen and Jansen (eds.) Proceedings of the Ninth Meeting of the Eucarpia Section Biometrics in Plant Breeding, The Netherlands, pp. 195-204 (1994), the entirety of which is herein incorporated by reference, thereby improving the precision and efficiency of QTL mapping (Zeng, Genetics 136:1457-1468 (1994)). These models can be extended to multi-environment experiments to analyze genotype-environment interactions (Jansen et al., Theo. Appl. Genet. 91:33-37 (1995), the entirety of which is herein incorporated by reference).

[0150] Selection of an appropriate mapping population is important to map construction. The choice of an appropriate mapping population depends on the type of marker systems employed (Tanksley et al., Molecular mapping plant chromosomes. Chromosome structure andfunction: Impact of new concepts, Gustafson and Appels (eds.), Plenum

[0151] Press, New York, pp 157-173 (1988), the entirety of which is herein incorporated by reference). Consideration must be given to the source of parents (adapted vs. exotic) used in the mapping population. Chromosome pairing and recombination rates can be severely disturbed (suppressed) in wide crosses (adapted×exotic) and generally yield greatly reduced linkage distances. Wide crosses will usually provide segregating populations with a relatively large array of polymorphisms when compared to progeny in a narrow cross (adapted×adapted).

[0152] An F₂ population is the first generation of selfing after the hybrid seed is produced. Usually a single F₁ plant is selfed to generate a population segregating for all the genes in Mendelian (1:2:1) fashion. Maximum genetic information is obtained from a completely classified F₂ population using a codominant marker system (Mather, Measurement of Linkage in Heredity, Methuen and Co., (1938), the entirety of which is herein incorporated by reference). In the case of dominant markers, progeny tests (e.g. F₃, BCF₂) are required to identify the heterozygotes, thus making it equivalent to a completely classified F₂ population. However, this procedure is often prohibitive because of the cost and time involved in progeny testing. Progeny testing of F₂ individuals is often used in map construction where phenotypes do not consistently reflect genotype (e.g. disease resistance) or where trait expression is controlled by a QTL. Segregation data from progeny test populations (e.g. F₃ or BCF₂) can be used in map construction. Marker-assisted selection can then be applied to cross progeny based on marker-trait map associations (F₂, F₃), where linkage groups have not been completely disassociated by recombination events (i.e., maximum disequillibrium).

[0153] Recombinant inbred lines (RIL) (genetically related lines; usually >F₅, developed from continuously selfing F₂ lines towards homozygosity) can be used as a mapping population. Information obtained from dominant markers can be maximized by using RIL because all loci are homozygous or nearly so. Under conditions of tight linkage (i.e., about <10% recombination), dominant and co-dominant markers evaluated in RIL populations provide more information per individual than either marker type in backcross populations (Reiter et al., Proc. Natl. Acad. Sci. (U.S.A.) 89:1477-1481 (1992), the entirety of which is herein incorporated by reference). However, as the distance between markers becomes larger (i.e., loci become more independent), the information in RIL populations decreases dramatically when compared to codominant markers.

[0154] Backcross populations (e.g., generated from a cross between a successful variety (recurrent parent) and another variety (donor parent) carrying a trait not present in the former) can be utilized as a mapping population. A series of backcrosses to the recurrent parent can be made to recover most of its desirable traits. Thus a population is created consisting of individuals nearly like the recurrent parent but each individual carries varying amounts or mosaic of genomic regions from the donor parent. Backcross populations can be useful for mapping dominant markers if all loci in the recurrent parent are homozygous and the donor and recurrent parent have contrasting polymorphic marker alleles (Reiter et al., Proc. Natl. Acad. Sci. (U.S.A.) 89:1477-1481 (1992)). Information obtained from backcross populations using either codominant or dominant markers is less than that obtained from F₂ populations because one, rather than two, recombinant gametes are sampled per plant. Backcross populations, however, are more informative (at low marker saturation) when compared to RILs as the distance between linked loci increases in RIL populations (i.e. about 15% recombination). Increased recombination can be beneficial for resolution of tight linkages, but may be undesirable in the construction of maps with low marker saturation.

[0155] Near-isogenic lines (NIL) created by many backcrosses to produce an array of individuals that are nearly identical in genetic composition except for the trait or genomic region under interrogation can be used as a mapping population. In mapping with NILs, only a portion of the polymorphic loci are expected to map to a selected region.

[0156] Bulk segregant analysis (BSA) is a method developed for the rapid identification of linkage between markers and traits of interest (Michelmore et al., Proc. Natl. Acad. Sci. (U.S.A.) 88:9828-9832 (1991), the entirety of which is herein incorporated by reference). In BSA, two bulked DNA samples are drawn from a segregating population originating from a single cross. These bulks contain individuals that are identical for a particular trait (resistant or susceptible to particular disease) or genomic region but arbitrary at unlinked regions (i.e. heterozygous). Regions unlinked to the target region will not differ between the bulked samples of many individuals in BSA.

[0157] It is understood that one or more of the nucleic acid molecules of the present invention may be used as molecular markers. It is also understood that one or more of the protein molecules of the present invention may be used as molecular markers.

[0158] In accordance with this aspect of the present invention, a sample nucleic acid is obtained from plants cells or tissues. Any source of nucleic acid may be used. Preferably, the nucleic acid is genomic DNA. The nucleic acid is subjected to restriction endonuclease digestion. For example, one or more EST nucleic acid molecule or fragment thereof can be used as a probe in accordance with the above-described polymorphic methods. The polymorphism obtained in this approach can then be cloned to identify the mutation at the coding region which alters the protein's structure or regulatory region of the gene which affects its expression level.

[0159] In one aspect of the present invention, an evaluation can be conducted to determine whether a particular mRNA molecule is present. One or more of the nucleic acid molecules of the present invention, preferably one or more of the EST nucleic acid molecules of the present invention are utilized to detect the presence or quantity of the mRNA species. Such molecules are then incubated with cell or tissue extracts of a plant under conditions sufficient to permit nucleic acid hybridization. The detection of double-stranded probe-mRNA hybrid molecules is indicative of the presence of the mRNA; the amount of such hybrid formed is proportional to the amount of mRNA. Thus, such probes may be used to ascertain the level and extent of the mRNA production in a plant's cells or tissues. Such nucleic acid hybridization may be conducted under quantitative conditions (thereby providing a numerical value of the amount of the mRNA present). Alternatively, the assay may be conducted as a qualitative assay that indicates either that the mRNA is present, or that its level exceeds a user set, predefined value.

[0160] A principle of in situ hybridization is that a labeled, single-stranded nucleic acid probe will hybridize to a complementary strand of cellular DNA or RNA and, under the appropriate conditions, these molecules will form a stable hybrid. When nucleic acid hybridization is combined with histological techniques, specific DNA or RNA sequences can be identified within a single cell. An advantage of in situ hybridization over more conventional techniques for the detection of nucleic acids is that it allows an investigator to determine the precise spatial population (Angerer et al., Dev. Biol. 101: 477-484 (1984), the entirety of which is herein incorporated by reference; Angerer et al., Dev. Biol. 112: 157-166 (1985), the entirety of which is herein incorporated by reference; Dixon et al., EMBO J. 10: 1317-1324 (1991), the entirety of which is herein incorporated by reference). In situ hybridization may be used to measure the steady-state level of RNA accumulation. It is a sensitive technique and RNA sequences present in as few as 5-10 copies per cell can be detected (Hardin et al., J. Mol. Biol. 202: 417-431. (1989), the entirety of which is herein incorporated by reference). A number of protocols have been devised for in situ hybridization, each with tissue preparation, hybridization, and washing conditions (Meyerowitz, Plant Mol. Biol. Rep. 5: 242-250 (1987), the entirety of which is herein incorporated by reference; Cox and Goldberg, In: Plant Molecular Biology: A Practical Approach (ed. C. H. Shaw), pp. 1-35. IRL Press, Oxford (1988), the entirety of which is herein incorporated by reference; Raikhel et al., In situ RNA hybridization in plant tissues. In Plant Molecular Biology Manual, vol. B9: 1-32. Kluwer Academic Publisher, Dordrecht, Belgium (1989), the entirety of which is herein incorporated by reference).

[0161] In situ hybridization also allows for the localization of proteins within a tissue or cell (Wilkinson, In Situ Hybridization, Oxford University Press, Oxford (1992), the entirety of which is herein incorporated by reference; Langdale, In Situ Hybridization 165-179 In: The Maize Handbook, eds. Freeling and Walbot, Springer-Verlag, New York (1994), the entirety of which is herein incorporated by reference). It is understood that one or more of the molecules of the present invention, preferably one or more of the EST nucleic acid molecules of the present invention or one or more of the antibodies of the present invention may be utilized to detect the level or pattern of a protein or fragment thereof by in situ hybridization.

[0162] Fluorescent in situ hybridization also enables the localization of a particular DNA sequence along a chromosome which is useful, among other uses, for gene mapping, following chromosomes in hybrid lines or detecting chromosomes with translocations, transversions or deletions. In situ hybridization has been used to identify chromosomes in several plant species (Griffor et al., Plant Mol. Biol. 17: 101-109 (1991), the entirety of which is herein incorporated by reference; Gustafson et al., Proc. Nat'l. Acad. Sci. (U.S.A.). 87: 1899-1902 (1990), herein incorporated by reference; Mukai and Gill, Genome 34: 448-452. (1991); Schwarzacher and Heslop-Harrison, Genome 34: 317-323 (1991); Wang et al., Jpn. J. Genet. 66: 313-316 (1991), the entirety of which is herein incorporated by reference; Parra and Windle, Nature Genetics, 5:17-21(1993), the entirety of which is herein incorporated by reference). It is understood that the nucleic acid molecules of the present invention may be used as probes or markers to localize sequences along a chromosome.

[0163] It is also understood that one or more of the molecules of the present invention, preferably one or more of the EST nucleic acid molecules of the present invention or one or more of the antibodies of the present invention may be utilized to detect the expression level or pattern of a protein or mRNA thereof by in situ hybridization.

[0164] Another method to localize the expression of a molecule is tissue printing. Tissue printing provides a way to screen, at the same time on the same membrane many tissue sections from different plants or different developmental stages. Tissue-printing procedures utilize films designed to immobilize proteins and nucleic acids. In essence, a freshly cut section of an organ is pressed gently onto nitrocellulose paper, nylon membrane or polyvinylidene difluoride membrane. Such membranes are commercially available (e.g. Millipore, Bedford, Mass.). The contents of the cut cell transfer onto the membrane, and the molecules are immobilized to the membrane. The immobilized molecules form a latent print that can be visualized with appropriate probes. When a plant tissue print is made on nitrocellulose paper, the cell walls leave a physical print that makes the anatomy visible without further treatment (Vamer and Taylor, Plant Physiol. 91: 31-33 (1989), the entirety of which is herein incorporated by reference).

[0165] Tissue printing on substrate films is described by Daoust, Exp. Cell Res. 12: 203-211 (1957), the entirety of which is herein incorporated by reference, who detected amylase, protease, ribonuclease, and deoxyribonuclease in animal tissues using starch, gelatin, and agar films. These techniques can be applied to plant tissues (Yomo and Taylor, Planta 112:35-43 (1973); Harris and Chrispeels, Plant Physiol. 56: 292-299 (1975). Advances in membrane technology have increased the range of applications of Daoust's tissue-printing techniques allowing (Cassab and Varner, J. Cell. Biol. 105: 2581-2588 (1987), the entirety of which is herein incorporated by reference; the histochemical localization of various plant enzymes and deoxyribonuclease on nitrocellulose paper and nylon (Spruce et al., Phytochemistry, 26: 2901-2903 (1987), the entirety of which is herein incorporated by reference; Barres et al. Neuron 5: 527-544 (1990), the entirety of which is herein incorporated by reference; the entirety of which is herein incorporated by reference; Reid and Pont-Lezica, Tissue Printing: Tools for the Study of Anatomy, Histochemistry, and Gene Expression, Academic Press, New York, N.Y. (1992), the entirety of which is herein incorporated by reference; Reid et al. Plant Physiol. 93: 160-165 (1990), herein incorporate by reference; Ye et al. Plant J. 1: 175-183 (1991), the entirety of which is herein incorporated by reference).

[0166] It is understood that one or more of the molecules of the present invention, preferably one or more of the EST nucleic acid molecules of the present invention or one or more of the antibodies of the present invention may be utilized to detect the presence or quantity of a protein by tissue printing.

[0167] Further, it is also understood that any of the nucleic acid molecules of the present invention may be used as marker nucleic acids and or probes in connection with methods that require probes or marker nucleic acids. As used herein, a probe is an agent that is utilized to determine an attribute or feature (e.g. presence or absence, location, correlation, etc.) or a molecule, cell, tissue or plant. As used herein, a marker nucleic acid is a nucleic acid molecule that is utilized to determine an attribute or feature (e.g., presence or absence, location, correlation, etc.) or a molecule, cell, tissue or plant.

[0168] A microarray-based method for high-throughput monitoring of plant gene expression may be utilized to measure gene-specific hybridization targets. This ‘chip’-based approach involves using microarrays of nucleic acid molecules as gene-specific hybridization targets to quantitatively measure expression of the corresponding plant genes (Schena et al., Science 270: 467-470 (1995), the entirety of which is herein incorporated by reference; Shalon, Ph.D. Thesis. Stanford University (1996), the entirety of which is herein incorporated by reference). Every nucleotide in a large sequence can be queried at the same time. Hybridization can be used to efficiently analyze large amounts of nucleotide sequence.

[0169] Several microarray methods have been described. One method compares the sequences to be analyzed by hybridization to a set of oligonucleotides representing all possible subsequences (Bains and Smith, J. Theor. Biol. 135: 303 (1989), the entirety of which is herein incorporated by reference). A second method hybridizes the sample to an array of oligonucleotide probes. An array consisting of oligonucleotides complementary to subsequences of a target sequence can be used to determine the identity of a target sequence, measure its amount, and detect differences between the target and a reference sequence. Nucleic acid molecules microarrays may also be screened with protein molecules or fragments thereof to determine nucleic acid molecules that specifically bind protein molecules or fragments thereof.

[0170] The microarray approach may be used with polypeptide targets (U.S. Pat. No. 5,445,934; U.S. Pat. No. 5,143,854; U.S. Pat. No. 5,079,600; U.S. Pat. No. 4,923,901, all of which are herein incorporated by reference in their entirety). Essentially, polypeptides are synthesized on a substrate (microarray) and these polypeptides can be screened with either protein molecules or fragments thereof or nucleic acid molecules in order to screen for either protein molecules or fragments thereof or nucleic acid molecules that specifically bind the target polypeptides. Implementation of these techniques rely on recently developed combinatorial technologies to generate any ordered array of a large number of oligonucleotide probes (Fodor et al., Science 251:767-773 (1991), the entirety of which is herein incorporated by reference).

[0171] It is understood that one or more of the molecules of the present invention, preferably one or more of the nucleic acid molecules or protein molecules or fragments thereof of the present invention may be utilized in a microarray based method.

[0172] In a preferred embodiment of the present invention microarrays may be prepared that comprise nucleic acid molecules where preferably at least 10%, preferably at least 25%, more preferably at least 50% and even more preferably at least 75%, 80%, 85%, 90% or 95% of the nucleic acid molecules located on that array are selected from the group of nucleic acid molecules that specifically hybridize to one or more nucleic acid molecule having a nucleic acid sequence selected from the group of SEQ ID NO: 1 through SEQ ID NO: 53893 or complement thereof or fragments of either.

[0173] A particular preferred microarray embodiment of the present invention is a microarray comprising nucleic acid molecules encoding genes or fragments thereof that are homologues of known genes or nucleic acid molecules that comprise genes or fragment thereof that elicit only limited or no matches to known genes. A further preferred microarray embodiment of the present invention is a microarray comprising nucleic acid molecules having genes or fragments thereof that are homologues of known genes and nucleic acid molecules that comprise genes or fragment thereof that elicit only limited or no matches to known genes. Site-directed mutagenesis may be utilized to modify nucleic acid sequences, particularly as it is a technique that allows one or more of the amino acids encoded by a nucleic acid molecule to be altered (e.g. a threonine to be replaced by a methionine). Three basic methods for site-directed mutagenesis are often employed. These are cassette mutagenesis (Wells et al., Gene 34:315-23 (1985), the entirety of which is herein incorporated by reference), primer extension (Gilliam et al., Gene 12:129-137 (1980), the entirety of which is herein incorporated by reference); Zoller and Smith, Methods Enzymol. 100:468-500 (1983), the entirety of which is herein incorporated by reference; and Dalbadie-McFarland et al., Proc. Natl. Acad. Sci. (U.S.A.) 79:6409-6413 (1982), the entirety of which is herein incorporated by reference) and methods based upon PCR (Scharf et al., Science 233:1076-1078 (1986), the entirety of which is herein incorporated by reference; Higuchi et al., Nucleic Acids Res. 16:7351-7367 (1988), the entirety of which is herein incorporated by reference). Site-directed mutagenesis approaches are also described in European Patent 0 385 962, the entirety of which is herein incorporated by reference, European Patent 0 359 472, the entirety of which is herein incorporated by reference, and PCT Patent Application WO 93/07278, the entirety of which is herein incorporated by reference.

[0174] Site-directed mutagenesis strategies have been applied to plants for both in vitro as well as in vivo site-directed mutagenesis (Lanz et al., J. Biol. Chem. 266:9971-6 (1991), the entirety of which is herein incorporated by reference; Kovgan and Zhdanov, Biotekhnologiya 5:148-154; No. 207160n, Chemical Abstracts 110:225 (1989), the entirety of which is herein incorporated by reference; Ge et al., Proc. Natl. Acad. Sci. (U.S.A.) 86:4037-4041 (1989), the entirety of which is herein incorporated by reference, Zhu et al., J. Biol. Chem. 271:18494-18498 (1996), Chu et al., Biochemistry 33:6150-6157 (1994), the entirety of which is herein incorporated by reference, Small et al., EMBO J. 11:1291-1296 (1992), the entirety of which is herein incorporated by reference, Cho et al., Mol. Biotechnol. 8:13-16(1997), Kita et al., J. Biol. Chem. 271:26529-26535 (1996), the entirety of which is herein incorporated by reference, Jin et al., Mol. Microbiol. 7:555-562 (1993), the entirety of which is herein incorporated by reference, Hatfield and Vierstra, J. Biol. Chem. 267:14799-14803 (1992), the entirety of which is herein incorporated by reference, Zhao et al., Biochemistry 31:5093-5099 (1992), the entirety of which is herein incorporated by reference).

[0175] Any of the nucleic acid molecules of the present invention may either be modified by site-directed mutagenesis or used as, for example, nucleic acid molecules that are used to target other nucleic acid molecules for modification. It is understood that mutants with more than one altered nucleotide can be constructed using techniques that practitioners skilled in the art are familiar with such as isolating restriction fragments and ligating such fragments into an expression vector (see, for example, Sambrook et al., Molecular Cloning: A Laboratory Manual, Cold Spring Harbor Press (1989)).

[0176] Sequence-specific DNA-binding proteins play a role in the regulation of transcription. The isolation of recombinant cDNAs encoding these proteins facilitates the biochemical analysis of their structural and functional properties. Genes encoding such DNA-binding proteins have been isolated using classical genetics (Vollbrecht et al., Nature 350: 241-243 (1991), the entirety of which is herein incorporated by reference) and molecular biochemical approaches, including the screening of recombinant cDNA libraries with antibodies (Landschulz et al., Genes Dev. 2: 786-800 (1988), the entirety of which is herein incorporated by reference) or DNA probes (Bodner et al., Cell 55: 505-518 (1988), the entirety of which is herein incorporated by reference). In addition, an in situ screening procedure has been used and has facilitated the isolation of sequence-specific DNA-binding proteins from various plant species (Gilmartin et al., Plant Cell 4: 839-849 (1992), the entirety of which is herein incorporated by reference; Schindler et al., EMBO J. 11: 1261-1273 (1992) the entirety of which is herein incorporated by reference). An in situ screening protocol does not require the purification of the protein of interest (Vinson et al., Genes Dev. 2: 801-806 (1988), the entirety of which is herein incorporated by reference; Singh et al., Cell 52: 415-423 (1988), the entirety of which is herein incorporated by reference).

[0177] Steps may be employed to characterize DNA-protein interactions. The first is to identify promoter fragments that interact with DNA-binding proteins, to titrate binding activity, to determine the specificity of binding, and to determine whether a given DNA-binding activity can interact with related DNA sequences (Sambrook et al., Molecular Cloning: A Laboratory Manual, 2^{nd} edition. Cold Spring Harbor Laboratory Press, Cold Spring Harbor, N.Y. (1989). Electrophoretic mobility-shift assay is a widely used assay. The assay provides a simple, rapid, and sensitive method for detecting DNA-binding proteins based on the observation that the mobility of a DNA fragment through a nondenaturing, low-ionic strength polyacrylamide gel is retarded upon association with a DNA-binding protein (Fried and Crother, Nucleic Acids Res. 9: 6505-6525 (1981), the entirety of which is herein incorporated by reference). When one or more specific binding activities have been identified, the exact sequence of the DNA bound by the protein may be determined. Several procedures for characterizing protein/DNA-binding sites are used, including methylation and ethylation interference assays (Maxam and Gilbert, Methods Enzymol. 65: 499-560 (1980), the entirety of which is herein incorporated by reference; Wissman and Hillen, Methods Enzymol. 208: 365-379 (1991), the entirety of which is herein incorporated by reference) and footprinting techniques employing DNase I (Galas and Schmitz, Nucleic Acids Res. 5: 3157-3170 (1978), the entirety of which is herein incorporated by reference), 1,10-phenanthroline-copper ion methods (Sigman et al., Methods Enzymol. 208: 365-379 (1991), the entirety of which is herein incorporated by reference) or hydroxyl radical methods (Dixon et al., Methods Enzymol. 208: 380-413 (1991), the entirety of which is herein incorporated by reference). It is understood that one or more of the nucleic acid molecules of the present invention, preferably one or more of the EST nucleic acid molecules of the present invention may be utilized to identify a protein or fragment thereof that specifically binds to a nucleic acid molecule of the present invention. It is also understood that one or more of the protein molecules or fragments thereof of the present invention may be utilized to identify a nucleic acid molecule that specifically binds to it.

[0178] The two-hybrid system is based on the fact that many cellular functions are carried out by proteins that interact (physically) with one another. Two-hybrid systems have been used to probe the function of new proteins (Chien et al., Proc. Natl. Acad. Sci. (U.S.A.) 88: 9578-9582 (1991) the entirety of which is herein incorporated by reference; Durfee et al., Genes Dev. 7: 555-569 (1993) the entirety of which is herein incorporated by reference; Choi et al., Cell 78: 499-512 (1994), the entirety of which is herein incorporated by reference; Kranz et al., Genes Dev. 8: 313-327 (1994), the entirety of which is herein incorporated by reference).

[0179] Interaction mating techniques have facilitated a number of two-hybrid studies of protein-protein interaction. Interaction mating has been used to examine interactions between small sets of tens of proteins (Finley and Brent, Proc. Natl. Acad. Sci. (U.S.A.) 91: 12098-12984 (1994), the entirety of which is herein incorporated by reference), larger sets of hundreds of proteins, (Bendixen et al., Nucl. Acids Res. 22: 1778-1779 (1994), the entirety of which is herein incorporated by reference) and to comprehensively map proteins encoded by a small genome (Bartel et al., Nature Genetics 12: 72-77 (1996), the entirety of which is herein incorporated by reference). This technique utilizes proteins fused to the DNA-binding domain and proteins fused to the activation domain. They are expressed in two different haploid yeast strains of opposite mating type, and the strains are mated to determine if the two proteins interact. Mating occurs when haploid yeast strains come into contact and result in the fusion of the two haploids into a diploid yeast strain. An interaction can be determined by the activation of a two-hybrid reporter gene in the diploid strain. The primary advantage of this technique is that it reduces the number of yeast transformations needed to test individual interactions. It is understood that the protein-protein interactions of protein or fragments thereof of the present invention may be investigated using the two-hybrid system and that any of the nucleic acid molecules of the present invention that encode such proteins or fragments thereof may be used to transform yeast in the two-hybrid system.

[0180] Synechocystis 6803 is a photosynthetic Cyanobacterium capable of oxygenic photosynthesis as well as heterotrophic growth in the absence of light. The entire genome has been sequenced, and it is reported to have a circular genome size of 3.57 Mbp containing 3168 potential open reading frames. Open reading frames (ORFs) were identified based upon their homology to other reported ORFs and by using ORF identification computer programs. Sixteen hundred potential ORFs were assigned based on their homology to previously identified ORFs. Of these 1600 ORFs, 145 were identical to reported ORFs (Kaneko et al., DNA Research 3:109-36 (1996), herein incorporated by reference in its entirety).

[0181] Several prokaryote promoters have been used in Synechocystis to express heterologous genes including the tac, lac, and lambda phage promoters (Bryant (ed.), The Molecular Biology of Cyanobacteria, Kluwer Academic Publishers, (1994); Ferino and Chauvat, Gene 84:257-266 (1989), both of which are herein incorporated by reference in their entirety). Several bacterial origins of replication such as RSF 1010 and ACYC are reported to replicate in Synechocystis (Mermet-Bouvier and Chauvat, Current Microbiology 28:145-148 (1994); Kuhlemeier et al., Mol. Gen. Genet. 184:249-254 (1981), both of which are herein incorporated by reference in their entirety).

[0182] Synechocystis has been used to study gene regulation by gene replacement through homologous recombination or by gene disruption using antibiotic resistance markers (Pakrasi et al., EMBO 7:325-332 (1988), herein incorporated by reference in its entirety). In such gene regulation studies, double reciprocal homologous regions of the host genome flanking the gene of interest recombine to stably integrate the gene of interest into the genome. The gene of interest can be expressed once that gene has been stably integrated into the genome. Biochemical analysis can be performed to study the effect of the replaced or deleted gene.

[0183] It is understood that the agents of the present invention may be employed in a Synechocystis system.

[0184] Exogenous genetic material may be transferred into a plant cell and the plant cell regenerated into a whole, fertile or sterile plant. Exogenous genetic material is any genetic material, whether naturally occurring or otherwise, from any source that is capable of being inserted into any organism. Such genetic material may be transferred into either monocotyledons and dicotyledons including but not limited to the crops, maize and soybean (See specifically, Chistou, Particle Bombardment for Genetic Engineering of Plants, pp 63-69 (maize), pp 50-60 (soybean), Biotechnology Intelligence Unit. Academic Press, San Diego, Calif. (1996), the entirety of which is herein incorporated by reference and generally Chistou, Particle Bombardment for Genetic Engineering of Plants, Biotechnology Intelligence Unit. Academic Press, San Diego, Calif. (1996), the entirety of which is herein incorporated by reference).

[0185] Transfer of a nucleic acid that encodes for a protein can result in overexpression of that protein in a transformed cell or transgenic plant. One or more of the proteins or fragments thereof encoded by nucleic acid molecules of the present invention may be overexpressed in a transformed cell or transformed plant. Such overexpression may be the result of transient or stable transfer of the exogenous material.

[0186] Exogenous genetic material may be transferred into a plant cell by the use of a DNA vector or construct designed for such a purpose. Design of such a vector is generally within the skill of the art (See, Plant Molecular Biology: A Laboratory Manual eds. Clark, Springer, New York (1997), the entirety of which is herein incorporated by reference).

[0187] A construct or vector may include a plant promoter to express the protein or protein fragment of choice. A number of promoters which are active in plant cells have been described in the literature. These include the nopaline synthase (NOS) promoter (Ebert et al., Proc. Natl. Acad. Sci. (U.S.A) 84:5745-5749 (1987), the entirety of which is herein incorporated by reference), the octopine synthase (OCS) promoter (which are carried on tumor-inducing plasmids of Agrobacterium tumefaciens), the caulimovirus promoters such as the cauliflower mosaic virus (CaMV) 19S promoter (Lawton et al., Plant Mol. Biol. 9:315-324 (1987), the entirety of which is herein incorporated by reference) and the CAMV 35S promoter (Odell et al., Nature 313:810-812 (1985), the entirety of which is herein incorporated by reference), the figwort mosaic virus 35S-promoter, the light-inducible promoter from the small subunit of ribulose-1,5-bis-phosphate carboxylase (ssRUBISCO), the Adh promoter (Walker et al., Proc. Natl. Acad. Sci. (U.S.A.) 84:6624-6628 (1987), the entirety of which is herein incorporated by reference), the sucrose synthase promoter (Yang et al., Proc. Natl. Acad. Sci. (U.S.A.) 87:4144-4148 (1990), the entirety of which is herein incorporated by reference), the R gene complex promoter (Chandler et al., The Plant Cell 1:1175-1183 (1989), the entirety of which is herein incorporated by reference), and the chlorophyll a/b binding protein gene promoter, etc. These promoters have been used to create DNA constructs which have been expressed in plants; see, e.g., PCT publication WO 84/02913, herein incorporated by reference in its entirety.

[0188] Promoters which are known or are found to cause transcription of DNA in plant cells can be used in the present invention. Such promoters may be obtained from a variety of sources such as plants and plant viruses. It is preferred that the particular promoter selected should be capable of causing sufficient expression to result in the production of an effective amount of a protein to cause the desired phenotype. In addition to promoters which are known to cause transcription of DNA in plant cells, other promoters may be identified for use in the current invention by screening a plant cDNA library for genes which are selectively or preferably expressed in the target tissues or cells.

[0189] For the purpose of expression in source tissues of the plant, such as the leaf, seed, root or stem, it is preferred that the promoters utilized in the present invention have relatively high expression in these specific tissues. For this purpose, one may choose from a number of promoters for genes with tissue- or cell-specific or -enhanced expression. Examples of such promoters reported in the literature include the chloroplast glutamine synthetase GS2 promoter from pea (Edwards et al., Proc. Natl. Acad. Sci. (U.S.A.) 87:3459-3463 (1990), herein incorporated by reference in its entirety), the chloroplast fructose-1,6-biphosphatase (FBPase) promoter from wheat (Lloyd et al., Mol. Gen. Genet. 225:209-216 (1991), herein incorporated by reference in its entirety), the nuclear photosynthetic ST-LS1 promoter from potato (Stockhaus et al., EMBO J. 8:2445-2451 (1989), herein incorporated by reference in its entirety), the phenylalanine ammonia-lyase (PAL) promoter and the chalcone synthase (CHS) promoter from Arabidopsis thaliana. Also reported to be active in photosynthetically active tissues are the ribulose-1,5-bisphosphate carboxylase (RbcS) promoter from eastern larch (Larix laricina), the promoter for the cab gene, cab6, from pine (Yamamoto et al., Plant Cell Physiol. 35:773-778 (1994), herein incorporated by reference in its entirety), the promoter for the Cab-1 gene from wheat (Fejes et al., Plant Mol. Biol. 15:921-932 (1990), herein incorporated by reference in its entirety), the promoter for the CAB-1 gene from spinach (Lubberstedt et al., Plant Physiol. 104:997-1006 (1994), herein incorporated by reference in its entirety), the promoter for the cabIR gene from rice (Luan et al., Plant Cell. 4:971-981 (1992), the entirety of which is herein incorporated by reference), the pyruvate, orthophosphate dikinase (PPDK) promoter from maize (Matsuoka et al., Proc. Natl. Acad. Sci. (U.S.A.) 90: 9586-9590 (1993), herein incorporated by reference in its entirety), the promoter for the tobacco Lhcbl*2 gene (Cerdan et al., Plant Mol. Biol. 33: 245-255. (1997), herein incorporated by reference in its entirety), the Arabidopsis thaliana SUC2 sucrose-H+ symporter promoter (Truemit et al., Planta. 196: 564-570 (1995), herein incorporated by reference in its entirety), and the promoter for the thylacoid membrane proteins from spinach (psaD, psaF, psae, PC, FNR, atpC, atpD, cab, rbcS). Other promoters for the chlorophyl a/b-binding proteins may also be utilized in the present invention, such as the promoters for LhcB gene and PsbP gene from white mustard (Sinapis alba; Kretsch et al., Plant Mol. Biol. 28: 219-229 (1995), the entirety of which is herein incorporated by reference).

[0190] For the purpose of expression in sink tissues of the plant, such as the tuber of the potato plant, the fruit of tomato, or the seed of maize, wheat, rice, and barley, it is preferred that the promoters utilized in the present invention have relatively high expression in these specific tissues. A number of promoters for genes with tuber-specific or -enhanced expression are known, including the class I patatin promoter (Bevan et al., EMBO J. 8: 1899-1906 (1986); Jefferson et al., Plant Mol. Biol. 14: 995-1006 (1990), both of which are herein incorporated by reference in its entirety), the promoter for the potato tuber ADPGPP genes, both the large and small subunits, the sucrose synthase promoter (Salanoubat and Belliard, Gene. 60: 47-56 (1987), Salanoubat and Belliard, Gene. 84: 181-185 (1989), both of which are incorporated by reference in their entirety), the promoter for the major tuber proteins including the 22 kd protein complexes and proteinase inhibitors (Hannapel, Plant Physiol. 101: 703-704 (1993), herein incorporated by reference in its entirety), the promoter for the granule bound starch synthase gene (GBSS) (Visser et al., Plant Mol. Biol. 17: 691-699 (1991), herein incorporated by reference in its entirety), and other class I and II patatins promoters (Koster-Topfer et al., Mol Gen Genet. 219: 390-396 (1989); Mignery et al., Gene. 62: 27-44 (1988), both of which are herein incorporated by reference in their entirety).

[0191] Other promoters can also be used to express a fructose 1,6 bisphosphate aldolase gene in specific tissues, such as seeds or fruits. The promoter for β-conglycinin (Chen et al., Dev. Genet. 10: 112-122 (1989), herein incorporated by reference in its entirety) or other seed-specific promoters such as the napin and phaseolin promoters, can be used. The zeins are a group of storage proteins found in maize endosperm. Genomic clones for zein genes have been isolated (Pedersen et al., Cell 29: 1015-1026 (1982), herein incorporated by reference in its entierty), and the promoters from these clones, including the 15 kD, 16 kD, 19 kD, 22 kD, 27 kD, and gamma genes, could also be used. Other promoters known to function, for example, in maize, include the promoters for the following genes: waxy, Brittle, Shrunken 2, Branching enzymes I and II, starch synthases, debranching enzymes, oleosins, glutelins, and sucrose synthases. A particularly preferred promoter for maize endosperm expression is the promoter for the glutelin gene from rice, more particularly the Osgt-1 promoter (Zheng et al., Mol. Cell. Biol. 13: 5829-5842 (1993), herein incorporated by reference in its entirety). Examples of promoters suitable for expression in wheat include those promoters for the ADPglucose pyrophosphorylase (ADPGPP) subunits, the granule bound and other starch synthases, the branching and debranching enzymes, the embryogenesis-abundant proteins, the gliadins, and the glutenins. Examples of such promoters in rice include those promoters for the ADPGPP subunits, the granule bound and other starch synthases, the branching enzymes, the debranching enzymes, sucrose synthases, and the glutelins. A particularly preferred promoter is the promoter for rice glutelin, Osgt-1. Examples of such promoters for barley include those for the ADPGPP subunits, the granule bound and other starch synthases, the branching enzymes, the debranching enzymes, sucrose synthases, the hordeins, the embryo globulins, and the aleurone specific proteins.

[0192] Root specific promoters may also be used. An example of such a promoter is the promoter for the acid chitinase gene (Samac et al., Plant Mol. Biol. 25: 587-596 (1994), the entirety of which is herein incorporated by reference). Expression in root tissue could also be accomplished by utilizing the root specific subdomains of the CaMV35S promoter that have been identified (Lam et al., Proc. Natl. Acad. Sci. (U.S.A.) 86:7890-7894 (1989), herein incorporated by reference in its entirety). Other root cell specific promoters include those reported by Conkling et al. (Conkling et al., Plant Physiol. 93:1203-1211 (1990), the entirety of which is herein incorporated by reference).

[0193] Additional promoters that may be utilized are described, for example, in U.S. Pat. Nos. 5,378,619, 5,391,725, 5,428,147, 5,447,858, 5,608,144, 5,608,144, 5,614,399, 5,633,441, 5,633,435, and 4,633,436, all of which are herein incorporated in their entirety. In addition, a tissue specific enhancer may be used (Fromm et al., The Plant Cell 1:977-984 (1989), the entirety of which is herein incorporated by reference).

[0194] Constructs or vectors may also include, with the coding region of interest, a nucleic acid sequence that acts, in whole or in part, to terminate transcription of that region. For example, such sequences have been isolated including the Tr7 3′ sequence and the nos 3′ sequence (Ingelbrecht et al., The Plant Cell 1:671-680 (1989), the entirety of which is herein incorporated by reference; Bevan et al., Nucleic Acids Res. 11:369-385 (1983), the entirety of which is herein incorporated by reference), or the like.

[0195] A vector or construct may also include regulatory elements. Examples of such include the Adh intron 1 (Callis et al., Genes and Develop. 1:1183-1200 (1987), the entirety of which is herein incorporated by reference), the sucrose synthase intron (Vasil et al., Plant Physiol. 91:1575-1579 (1989), the entirety of which is herein incorporated by reference) and the TMV omega element (Gallie et al., The Plant Cell 1:301-311 (1989), the entirety of which is herein incorporated by reference). These and other regulatory elements may be included when appropriate.

[0196] A vector or construct may also include a selectable marker. Selectable markers may also be used to select for plants or plant cells that contain the exogenous genetic material. Examples of such include, but are not limited to, a neo gene (Potrykus et al., Mol. Gen. Genet. 199:183-188 (1985), the entirety of which is herein incorporated by reference) which codes for kanamycin resistance and can be selected for using kanamycin, G418, etc.; a bar gene which codes for bialaphos resistance; a mutant EPSP synthase gene (Hinchee et al., Bio/Technology 6:915-922 (1988), the entirety of which is herein incorporated by reference) which encodes glyphosate resistance; a nitrilase gene which confers resistance to bromoxynil (Stalker et al., J. Biol. Chem. 263:6310-6314 (1988), the entirety of which is herein incorporated by reference); a mutant acetolactate synthase gene (ALS) which confers imidazolinone or sulphonylurea resistance (European Patent Application 154,204 (Sep. 11, 1985), the entirety of which is herein incorporated by reference); and a methotrexate resistant DHFR gene (Thillet et al., J. Biol. Chem. 263:12500-12508 (1988), the entirety of which is herein incorporated by reference).

[0197] A vector or construct may also include a transit peptide. Incorporation of a suitable chloroplast transit peptide may also be employed (European Patent Application Publication Number 0218571, the entirety of which is herein incorporated by reference). Translational enhancers may also be incorporated as part of the vector DNA. DNA constructs could contain one or more 5′ non-translated leader sequences which may serve to enhance expression of the gene products from the resulting mRNA transcripts. Such sequences may be derived from the promoter selected to express the gene or can be specifically modified to increase translation of the mRNA. Such regions may also be obtained from viral RNAs, from suitable eukaryotic genes, or from a synthetic gene sequence. For a review of optimizing expression of transgenes, see Koziel et al., Plant Mol. Biol. 32:393-405 (1996), the entirety of which is herein incorporated by reference.

[0198] A vector or construct may also include a screenable marker. Screenable markers may be used to monitor expression. Exemplary screenable markers include a β-glucuronidase or uidA gene (GUS) which encodes an enzyme for which various chromogenic substrates are known (Jefferson, Plant Mol. Biol, Rep. 5: 387-405 (1987), the entirety of which is herein incorporated by reference; Jefferson et al., EMBO J. 6: 3901-3907 (1987), the entirety of which is herein incorporated by reference); an R-locus gene, which encodes a product that regulates the production of anthocyanin pigments (red color) in plant tissues ((Dellaporta et al., Stadler Symposium 11:263-282 (1988), the entirety of which is herein incorporated by reference); a β-lactamase gene (Sutcliffe et al., Proc. Natl. Acad. Sci. (U.S.A.) 75: 3737-3741 (1978), the entirety of which is herein incorporated by reference), a gene which encodes an enzyme for which various chromogenic substrates are known (e.g., PADAC, a chromogenic cephalosporin); a luciferase gene (Ow et al., Science 234: 856-859 (1986), the entirety of which is herein incorporated by reference) a xylE gene (Zukowsky et al., Proc. Natl. Acad. Sci. (U.S.A.) 80:1101-1105 (1983), the entirety of which is herein incorporated by reference) which encodes a catechol diozygenase that can convert chromogenic catechols; an α-amylase gene (Ikatu et al., Bio/Technol. 8:241-242 (1990), the entirety of which is herein incorporated by reference); a tyrosinase gene (Katz et al., J. Gen. Microbiol. 129:2703-2714 (1983), the entirety of which is herein incorporated by reference) which encodes an enzyme capable of oxidizing tyrosine to DOPA and dopaquinone which in turn condenses to melanin; an α-galactosidase, which will turn a chromogenic α-galactose substrate.

[0199] Included within the terms “selectable or screenable marker genes” are also genes which encode a scriptable marker whose secretion can be detected as a means of identifying or selecting for transformed cells. Examples include markers which encode a secretable antigen that can be identified by antibody interaction, or even secretable enzymes which can be detected catalytically. Secretable proteins fall into a number of classes, including small, diffusible proteins detectable, e.g., by ELISA, small active enzymes detectable in extracellular solution (e.g., α-amylase, β-lactamase, phosphinothricin transferase), or proteins which are inserted or trapped in the cell wall (such as proteins which include a leader sequence such as that found in the expression unit of extension or tobacco PR-S). Other possible selectable and/or screenable marker genes will be apparent to those of skill in the art.

[0200] Methods and compositions for transforming a bacteria and other microorganisms are known in the art (see for example Sambrook et al., Molecular Cloning: A Laboratory Manual, Second Edition, Cold Spring Harbor Laboratory Press, Cold Spring Harbor, N.Y., (1989), the entirety of which is herein incorporated by reference).

[0201] There are many methods for introducing transforming nucleic acid molecules into plant cells. Suitable methods are believed to include virtually any method by which nucleic acid molecules may be introduced into a cell, such as by Agrobacterium infection or direct delivery of nucleic acid molecules such as, for example, by PEG-mediated transformation, by electroporation or by acceleration of DNA coated particles, etc. (Pottykus, Ann. Rev. Plant Physiol. Plant Mol. Biol. 42:205-225 (1991), the entirety of which is herein incorporated by reference; Vasil, Plant Mol. Biol. 25: 925-937 (1994), the entirety of which is herein incorporated by reference. For example, electroporation has been used to transform maize protoplasts (Fromm et al., Nature 312:791-793 (1986), the entirety of which is herein incorporated by reference).

[0202] Other vector systems suitable for introducing transforming DNA into a host plant cell includes but is not limited to binary artificial chromosome (BIBAC) vectors (Hamilton et al., Gene 200:107-116, (1997), the entirety of which is herein incorporated by reference, and transfection with RNA viral vectors (Della-Cioppa et al., Ann. N.Y. Acad. Sci. (1996), 792 (Engineering Plants for Commercial Products and Applications), 57-61, the entirety of which is herein incorporated by reference.

[0203] Technology for introduction of DNA into cells is well known to those of skill in the art. Four general methods for delivering a gene into cells have been described: (1) chemical methods (Graham and van der Eb, Virology, 54:536-539 (1973), the entirety of which is herein incorporated by reference); (2) physical methods such as microinjection (Capecchi, Cell 22:479-488 (1980), electroporation (Wong and Neumann, Biochem. Biophys. Res. Commun., 107:584-587 (1982); Fromm et al., Proc. Natl. Acad. Sci. USA, 82:5824-5828 (1985); U.S. Pat. No. 5,384,253; and the gene gun (Johnston and Tang, Methods Cell Biol. 43:353-365 (1994), all of which the entirety is herein incorporated by reference; (3) viral vectors (Clapp, Clin. Perinatol., 20:155-168 (1993); Lu et al., J. Exp. Med., 178:2089-2096 (1993); Eglitis and Anderson, Biotechniques, 6:608-614 (1988), all of which the entirety is herein incorporated by reference); and (4) receptor-mediated mechanisms (Curiel et al., Hum. Gen. Ther., 3:147-154 (1992); Wagner et al., Proc. Natl. Acad. Sci. USA, 89:6099-6103 (1992), all of which the entirety is herein incorporated by reference).

[0204] Acceleration methods that may be used include, for example, microprojectile bombardment and the like. One example of a method for delivering transforming nucleic acid molecules to plant cells is microprojectile bombardment. This method has been reviewed by Yang and Christou, eds., Particle Bombardment Technology for Gene Transfer, Oxford Press, Oxford, England (1994), the entirety of which is herein incorporated by reference). Non-biological particles (microprojectiles) that may be coated with nucleic acids and delivered into cells by a propelling force. Exemplary particles include those comprised of tungsten, gold, platinum, and the like.

[0205] A particular advantage of microprojectile bombardment, in addition to it being an effective means of reproducibly, and stably transforming monocotyledons, is that neither the isolation of protoplasts (Cristou et al., Plant Physiol. 87:671-674 (1988), the entirety of which is herein incorporated by reference) nor the susceptibility of Agrobacterium infection is required. An illustrative embodiment of a method for delivering DNA into maize cells by acceleration is a biolistics g-particle delivery system, which can be used to propel particles coated with DNA through a screen, such as a stainless steel or Nytex screen, onto a filter surface covered with corn cells cultured in suspension. Gordon-Kamm et al., describes the basic procedure for coating tungsten particles with DNA (Gordon-Kamm et al., Plant Cell 2: 603-618 (1990), the entirety of which is herein incorporated by reference). The screen disperses the tungsten nucleic acid particles so that they are not delivered to the recipient cells in large aggregates. A particle delivery system suitable for use with the present invention is the helium acceleration PDS-1000/He gun which is available from Bio-Rad Laboratories (Bio-Rad, Hercules, Calif.) (Sanford et al., Technique 3:3-16 (1991), the entirety of which is herein incorporated by reference).

[0206] For the bombardment, cells in suspension may be concentrated on filters. Filters containing the cells to be bombarded are positioned at an appropriate distance below the microprojectile stopping plate. If desired, one or more screens are also positioned between the gun and the cells to be bombarded.

[0207] Alternatively, immature embryos or other target cells may be arranged on solid culture medium. The cells to be bombarded are positioned at an appropriate distance below the macroprojectile stopping plate. If desired, one or more screens are also positioned between the acceleration device and the cells to be bombarded. Through the use of techniques set forth herein one may obtain up to 1000 or more foci of cells transiently expressing a marker gene. The number of cells in a focus which express the exogenous gene product 48 hours post-bombardment often range from one to ten and average one to three.

[0208] In bombardment transformation, one may optimize the prebombardment culturing conditions and the bombardment parameters to yield the maximum numbers of stable transformants. Both the physical and biological parameters for bombardment are important in this technology. Physical factors are those that involve manipulating the DNA/microprojectile precipitate or those that affect the flight and velocity of either the macro- or microprojectiles. Biological factors include all steps involved in manipulation of cells before and immediately after bombardment, the osmotic adjustment of target cells to help alleviate the trauma associated with bombardment, and also the nature of the transforming DNA, such as linearized DNA or intact supercoiled plasmids. It is believed that pre-bombardment manipulations are especially important for successful transformation of immature embryos. In another alternative embodiment, plastids can be stably transformed. Methods disclosed for plastid transformation in higher plants include the particle gun delivery of DNA containing a selectable marker and targeting of the DNA to the plastid genome through homologous recombination (Svab et al., Proc. Natl. Acad. Sci. (U.S.A.) 87:8526-8530 (1990); Svab and Maliga, Proc. Natl. Acad. Sci. (U.S.A.) 90:913-917 (1993); Staub and Maliga, EMBO J. 12.601-606 (1993); U.S. Pat. Nos. 5,451,513 and 5,545,818, all of which are herein incorporated by reference in their entirety).

[0209] Accordingly, it is contemplated that one may wish to adjust various aspects of the bombardment parameters in small scale studies to fully optimize the conditions. One may particularly wish to adjust physical parameters such as gap distance, flight distance, tissue distance, and helium pressure. One may also minimize the trauma reduction factors by modifying conditions which influence the physiological state of the recipient cells and which may therefore influence transformation and integration efficiencies. For example, the osmotic state, tissue hydration and the subculture stage or cell cycle of the recipient cells may be adjusted for optimum transformation. The execution of other routine adjustments will be known to those of skill in the art in light of the present disclosure.

[0210] Agrobacterium-mediated transfer is a widely applicable system for introducing genes into plant cells because the DNA can be introduced into whole plant tissues, thereby bypassing the need for regeneration of an intact plant from a protoplast. The use of Agrobacterium-mediated plant integrating vectors to introduce DNA into plant cells is well known in the art. See, for example the methods described (Fraley et al., Biotechnology 3:629-635 (1985); Rogers et al., Meth. In Enzymol, 153:253-277 (1987), both of which are herein incorporated by reference in their entirety. Further, the integration of the Ti-DNA is a relatively precise process resulting in few rearrangements. The region of DNA to be transferred is defined by the border sequences, and intervening DNA is usually inserted into the plant genome as described (Spielmann et al., Mol. Gen. Genet., 205:34 (1986), the entirety of which is herein incorporated by reference).

[0211] Modern Agrobacterium transformation vectors are capable of replication in E. coli as well as Agrobacterium, allowing for convenient manipulations as described (Klee et al., In: Plant DNA Infectious Agents, T. Hohn and J. Schell, eds., Springer-Verlag, New York, pp. 179-203 (1985), the entirety of which is herein incorporated by reference. Moreover, recent technological advances in vectors for Agrobacterium-mediated gene transfer have improved the arrangement of genes and restriction sites in the vectors to facilitate construction of vectors capable of expressing various polypeptide coding genes. The vectors described have convenient multi-linker regions flanked by a promoter and a polyadenylation site for direct expression of inserted polypeptide coding genes and are suitable for present purposes (Rogers et al., Meth. In Enzymol., 153:253-277 (1987), the entirety of which is herein incorporated by reference). In addition, Agrobacterium containing both armed and disarmed Ti genes can be used for the transformations. In those plant strains where Agrobacterium-mediated transformation is efficient, it is the method of choice because of the facile and defined nature of the gene transfer.

[0212] A transgenic plant formed using Agrobacterium transformation methods typically contains a single gene on one chromosome. Such transgenic plants can be referred to as being heterozygous for the added gene. More preferred is a transgenic plant that is homozygous for the added structural gene; i.e., a transgenic plant that contains two added genes, one gene at the same locus on each chromosome of a chromosome pair. A homozygous transgenic plant can be obtained by sexually mating (selfing) an independent segregant transgenic plant that contains a single added gene, germinating some of the seed produced and analyzing the resulting plants produced for the gene of interest.

[0213] It is also to be understood that two different transgenic plants can also be mated to produce offspring that contain two independently segregating added, exogenous genes. Selfing of appropriate progeny can produce plants that are homozygous for both added, exogenous genes that encode a polypeptide of interest. Back-crossing to a parental plant and out-crossing with a non-transgenic plant are also contemplated, as is vegetative propagation.

[0214] Transformation of plant protoplasts can be achieved using methods based on calcium phosphate precipitation, polyethylene glycol treatment, electroporation, and combinations of these treatments. See for example (Potrykus et al., Mol. Gen. Genet., 205:193-200 (1986); Lorz et al., Mol. Gen. Genet., 199:178, (1985); Fromm et al., Nature, 319:791, (1986); Uchimiya et al., Mol. Gen. Genet.: 204:204, (1986); Callis et al., Genes and Development, 1183, (1987); Marcotte et al., Nature, 335:454, (1988), all of which the entirety is herein incorporated by reference).

[0215] Application of these systems to different plant strains depends upon the ability to regenerate that particular plant strain from protoplasts. Illustrative methods for the regeneration of cereals from protoplasts are described (Fujimura et al., Plant Tissue Culture Letters, 2:74, (1985); Toriyama et al., Theor Appl. Genet. 205:34. (1986); Yamada et al., Plant Cell Rep., 4:85, (1986); Abdullah et al., Biotechnology, 4:1087, (1986), all of which the entirety is herein incorporated by reference).

[0216] To transform plant strains that cannot be successfully regenerated from protoplasts, other ways to introduce DNA into intact cells or tissues can be utilized. For example, regeneration of cereals from immature embryos or explants can be effected as described (Vasil, Biotechnology, 6:397, (1988), the entirety of which is herein incorporated by reference). In addition, “particle gun” or high-velocity microprojectile technology can be utilized (Vasil et al., Bio/Technology 10:667, (1992), the entirety of which is herein incorporated by reference).

[0217] Using the latter technology, DNA is carried through the cell wall and into the cytoplasm on the surface of small metal particles as described (Klein et al., Nature, 328:70, (1987); Klein et al., Proc. Natl. Acad. Sci. USA, 85:8502-8505, (1988); McCabe et al., Biotechnology, 6:923, (1988), all of which the entirety is herein incorporated by reference). The metal particles penetrate through several layers of cells and thus allow the transformation of cells within tissue explants.

[0218] Other methods of cell transformation can also be used and include but are not limited to introduction of DNA into plants by direct DNA transfer into pollen (Zhou et al., Methods in Enzymology, 101:433, (1983); Hess et al., Intern Rev. Cytol., 107:367, (1987); Luo et al., Plant Mol. Biol. Reporter, 6:165, (1988), all of which the entirety is herein incorporated by reference), by direct injection of DNA into reproductive organs of a plant (Pena et al., Nature, 325:274, (1987), the entirety of which is herein incorporated by reference), or by direct injection of DNA into the cells of immature embryos followed by the rehydration of dessicated embryos (Neuhaus et al., Theor. Appl. Genet., 75:30, (1987), the entirety of which is herein incorporated by reference).

[0219] The regeneration, development, and cultivation of plants from single plant protoplast transformants or from various transformed explants is well known in the art (Weissbach and Weissbach, In: Methods for Plant Molecular Biology, (Eds.), Academic Press, Inc. San Diego, Calif., (1988), the entirety of which is herein incorporated by reference). This regeneration and growth process typically includes the steps of selection of transformed cells, culturing those individualized cells through the usual stages of embryonic development through the rooted plantlet stage. Transgenic embryos and seeds are similarly regenerated. The resulting transgenic rooted shoots are thereafter planted in an appropriate plant growth medium such as soil.

[0220] The development or regeneration of plants containing the foreign, exogenous gene that encodes a protein of interest is well known in the art. Preferably, the regenerated plants are self-pollinated to provide homozygous transgenic plants, as discussed before. Otherwise, pollen obtained from the regenerated plants is crossed to seed-grown plants of agronomically important lines. Conversely, pollen from plants of these important lines is used to pollinate regenerated plants. A transgenic plant of the present invention containing a desired polypeptide is cultivated using methods well known to one skilled in the art.

[0221] There are a variety of methods for the regeneration of plants from plant tissue. The particular method of regeneration will depend on the starting plant tissue and the particular plant species to be regenerated.

[0222] Methods for transforming dicots, primarily by use of Agrobacterium tumefaciens, and obtaining transgenic plants have been published for cotton (U.S. Pat. No. 5,004,863, U.S. Pat. No. 5,159,135, U.S. Pat. No. 5,518,908, all of which the entirety is herein incorporated by reference); soybean (U.S. Pat. No. 5,569,834, U.S. Pat. No. 5,416,011, McCabe et al., Biotechnology 6:923, (1988), Christou et al., Plant Physiol., 87:671-674 (1988), all of which the entirety is herein incorporated by reference); Brassica (U.S. Pat. No. 5,463,174, the entirety of which is herein incorporated by reference); peanut (Cheng et al., Plant Cell Rep. 15: 653-657 (1996), McKently et al., Plant Cell Rep. 14:699-703 (1995), all of which the entirety is herein incorporated by reference); papaya (Yang et al., (1996), the entirety of which is herein incorporated by reference); pea (Grant et al., Plant Cell Rep. 15:254-258, (1995), the entirety of which is herein incorporated by reference).

[0223] Transformation of monocotyledons using electroporation, particle bombardment, and Agrobacterium have also been reported. Transformation and plant regeneration have been achieved in asparagus (Bytebier et al., Proc. Natl. Acad. Sci. USA 84:5345, (1987), the entirety of which is herein incorporated by reference); barley (Wan and Lemaux, Plant Physiol 104:37, (1994), the entirety of which is herein incorporated by reference); maize (Rhodes et al., Science 240: 204, (1988), Gordon-Kamm et al., Plant Cell, 2:603, (1990), Fromm et al., Bio/Technology 8:833, (1990), Koziel et al., Bio/Technology 11:194, (1993), Armstrong et al., Crop Science 35:550-557, (1995), all of which the entirety is herein incorporated by reference); oat (Somers et al., Bio/Technology, 10:1589, (1992), the entirety of which is herein incorporated by reference); orchardgrass (Horn et al., Plant Cell Rep. 7:469, (1988), the entirety of which is herein incorporated by reference); rice (Toriyama et al., Theor Appl. Genet. 205:34, (1986); Park et al., Plant Mol. Biol., 32: 1135-1148, (1996); Abedinia et al., Aust. J. Plant Physiol. 24:133-141, (1997); Zhang and Wu, Theor. Appl. Genet. 76:835, (1988); Zhang et al. Plant Cell Rep. 7:379, (1988); Battraw and Hall, Plant Sci. 86:191-202, (1992); Christou et al., Bio/Technology 9:957, (1991), all of which the entirety is herein incorporated by reference); sugarcane (Bower and Birch, Plant J. 2:409, (1992), the entirety of which is herein incorporated by reference); tall fescue (Wang et al., Bio/Technology 10:691, (1992), the entirety of which is herein incorporated by reference), and wheat (Vasil et al., Bio/Technology 10:667, (1992), the entirety of which is herein incorporated by reference; U.S. Pat. No. 5,631,152, the entirety of which is herein incorporated by reference.

[0224] Assays for gene expression based on the transient expression of cloned nucleic acid constructs have been developed by introducing the nucleic acid molecules into plant cells by polyethylene glycol treatment, electroporation, or particle bombardment (Marcotte, et al., Nature, 335: 454-457 (1988), the entirety of which is herein incorporated by reference; Marcotte, et al., Plant Cell, 1: 523-532 (1989), the entirety of which is herein incorporated by reference; McCarty, et al., Cell 66: 895-905 (1991), the entirety of which is herein incorporated by reference; Hattori, et al., Genes Dev. 6: 609-618 (1992), the entirety of which is herein incorporated by reference; Goff, et al., EMBO J. 9: 2517-2522 (1990), the entirety of which is herein incorporated by reference). Transient expression systems may be used to functionally dissect gene constructs (See generally, Mailga et al., Methods in Plant Molecular Biology, Cold Spring Harbor Press (1995)).

[0225] Any of the nucleic acid molecules of the present invention may be introduced into a plant cell in a permanent or transient manner in combination with other genetic elements such as vectors, promoters enhancers etc. Further any of the nucleic acid molecules of the present invention may be introduced into a plant cell in a manner that allows for over expression of the protein or fragment thereof encoded by the nucleic acid molecule.

[0226] Cosuppression is the reduction in expression levels, usually at the level of RNA, of a particular endogenous gene or gene family by the expression of a homologous sense construct that is capable of transcribing mRNA of the same strandedness as the transcript of the endogenous gene (Napoli et al., Plant Cell 2: 279-289 (1990), the entirety of which is herein incorporated by reference; van der Krol et al., Plant Cell 2: 291-299 (1990), the entirety of which is herein incorporated by reference). Cosuppression may result from stable transformation with a single copy nucleic acid molecule that is homologous to a nucleic acid sequence found with the cell (Prolls and Meyer, Plant J 2:465-475 (1992), the entirety of which is herein incorporated by reference) or with multiple copies of a nucleic acid molecule that is homologous to a nucleic acid sequence found with the cell (Mittlesten et al., Mol. Gen. Genet. 244: 325-330 (1994), the entirety of which is herein incorporated by reference). Genes, even though different, linked to homologous promoters may result in the cosuppression of the linked genes (Vaucheret, C.R. Acad. Sci. III 316: 1471-1483 (1993), the entirety of which is herein incorporated by reference).

[0227] This technique has, for example been applied to generate white flowers from red petunia and tomatoes that do not ripen on the vine. Up to 50% of petunia transformants that contained a sense copy of the chalcone synthase (CHS) gene produced white flowers or floral sectors; this was as a result of the post-transcriptional loss of mRNA encoding CHS (Flavell, Proc. Natl. Acad. Sci. (U.S.A.) 91:3490-3496 (1994)), the entirety of which is herein incorporated by reference). Cosuppression may require the coordinate transcription of the transgene and the endogenous gene, and can be reset by a developmental control mechanism (Jorgensen, Trends Biotechnol, 8:340344 (1990), the entirety of which is herein incorporated by reference; Meins and Kunz, In: Gene Inactivation and Homologous Recombination in Plants (Paszkowski, J., ed.), pp. 335-348. Kluwer Academic, Netherlands (1994), the entirety of which is herein incorporated by reference).

[0228] It is understood that one or more of the nucleic acids of the present invention including those comprising SEQ ID NO:1 through SEQ ID NO:53893 or complement thereof or fragments of either or other nucleic acid molecules of the present invention may be introduced into a plant cell and transcribed using an appropriate promoter with such transcription resulting in the co-suppression of an endogenous protein.

[0229] Antisense approaches are a way of preventing or reducing gene function by targeting the genetic material (Mol et al., FEBS Lett. 268: 427-430 (1990), the entirety of which is herein incorporated by reference). The objective of the antisense approach is to use a sequence complementary to the target gene to block its expression and create a mutant cell line or organism in which the level of a single chosen protein is selectively reduced or abolished. Antisense techniques have several advantages over other ‘reverse genetic’ approaches. The site of inactivation and its developmental effect can be manipulated by the choice of promoter for antisense genes or by the timing of external application or microinjection. Antisense can manipulate its specificity by selecting either unique regions of the target gene or regions where it shares homology to other related genes (Hiatt et al., In Genetic Engineering, Setlow (ed.), Vol. 11, New York: Plenum 49-63 (1989), the entirety of which is herein incorporated by reference).

[0230] The principle of regulation by antisense RNA is that RNA that is complementary to the target mRNA is introduced into cells, resulting in specific RNA:RNA duplexes being formed by base pairing between the antisense substrate and the target mRNA (Green et al., Annu. Rev. Biochem. 55: 569-597 (1986), the entirety of which is herein incorporated by reference). Under one embodiment, the process involves the introduction and expression of an antisense gene sequence. Such a sequence is one in which part or all of the normal gene sequences are placed under a promoter in inverted orientation so that the ‘wrong’ or complementary strand is transcribed into a noncoding antisense RNA that hybridizes with the target mRNA and interferes with its expression (Takayama and Inouye, Crit. Rev. Biochem. Mol. Biol. 25: 155-184 (1990), the entirety of which is herein incorporated by reference). An antisense vector is constructed by standard procedures and introduced into cells by transformation, transfection, electroporation, microinjection, or by infection, etc. The type of transformation and choice of vector will determine whether expression is transient or stable. The promoter used for the antisense gene may influence the level, timing, tissue, specificity, or inducibility of the antisense inhibition.

[0231] It is understood that protein synthesis activity in a plant cell may be reduced or depressed by growing a transformed plant cell containing a nucleic acid molecule whose non-transcribed strand encodes a protein or fragment thereof.

[0232] Antibodies have been expressed in plants (Hiatt et al., Nature 342:76-78 (1989), the entirety of which is herein incorporated by reference; Conrad and Fielder, Plant Mol. Biol. 26: 1023-1030 (1994), the entirety of which is herein incorporated by reference). Cytoplamic expression of a scFv (single-chain Fv antibodies) has been reported to delay infection by artichoke mottled crinkle virus. Transgenic plants that express antibodies directed against endogenous proteins may exhibit a physiological effect (Philips et al., EMBO J. 16: 4489-4496 (1997), the entirety of which is herein incorporated by reference; Marion-Poll, Trends in Plant Science 2: 447-448 (1997), the entirety of which is herein incorporated by reference). For example, expressed anti-abscisic antibodies reportedly result in a general perturbation of seed development (Philips et al., EMBO J. 16: 4489-4496 (1997)).

[0233] Antibodies that are catalytic may also be expressed in plants (abzymes). The principle behind abzymes is that since antibodies may be raised against many molecules, this recognition ability can be directed toward generating antibodies that bind transition states to force a chemical reaction forward (Persidas, Nature Biotechnology 15:1313-1315 (1997), the entirety of which is herein incorporated by reference; Baca et al., Ann. Rev. Biophys. Biomol. Struct. 26:461-493 (1997), the entirety of which is herein incorporated by reference). The catalytic abilities of abzymes may be enhanced by site directed mutagensis. Examples of abzymes are, for example, set forth in U.S. Pat. No. 5,658,753; U.S. Pat. No. 5,632,990; U.S. Pat. No. 5,631,137; U.S. Pat. No. 5,602,015; U.S. Pat. No. 5,559,538; U.S. Pat. No. 5,576,174; U.S. Pat. No. 5,500,358; U.S. Pat. No. 5,318,897; U.S. Pat. No. 5,298,409; U.S. Pat. No. 5,258,289 and U.S. Pat. No. 5,194,585, all of which are herein incorporated in their entirety.

[0234] It is understood that any of the antibodies of the present invention may be expressed in plants and that such expression can result in a physiological effect. It is also understood that any of the expressed antibodies may be catalytic.

[0235] In addition to the above discussed procedures, practitioners are familiar with the standard resource materials which describe specific conditions and procedures for the construction, manipulation and isolation of macromolecules (e.g., DNA molecules, plasmids, etc.), generation of recombinant organisms and the screening and isolating of clones, (see for example, Sambrook et al., Molecular Cloning: A Laboratory Manual, Cold Spring Harbor Press (1989); Mailga et al., Methods in Plant Molecular Biology, Cold Spring Harbor Press (1995), the entirety of which is herein incorporated by reference; Birren et al., Genome Analysis: Analyzing DNA, 1, Cold Spring Harbor, N.Y., the entirety of which is herein incorporated by reference).

[0236] The nucleotide sequence provided in SEQ ID NO:1, through SEQ ID NO:53893 or fragment thereof, or complement thereof, or a nucleotide sequence at least 90% identical, preferably 95%, identical even more preferably 99% or 100% identical to the sequence provided in SEQ ID NO:1 through SEQ ID NO:53893 or fragment thereof, or complement thereof, can be “provided” in a variety of mediums to facilitate use fragment thereof. Such a medium can also provide a subset thereof in a form that allows a skilled artisan to examine the sequences.

[0237] In one application of this embodiment, a nucleotide sequence of the present invention can be recorded on computer readable media. As used herein, “computer readable media” refers to any medium that can be read and accessed directly by a computer. Such media include, but are not limited to: magnetic storage media, such as floppy discs, hard disc, storage medium, and magnetic tape: optical storage media such as CD-ROM; electrical storage media such as RAM and ROM; and hybrids of these categories such as magnetic/optical storage media. A skilled artisan can readily appreciate how any of the presently known computer readable mediums can be used to create a manufacture comprising computer readable medium having recorded thereon a nucleotide sequence of the present invention.

[0238] As used herein, “recorded” refers to a process for storing information on computer readable medium. A skilled artisan can readily adopt any of the presently known methods for recording information on computer readable medium to generate media comprising the nucleotide sequence information of the present invention. A variety of data storage structures are available to a skilled artisan for creating a computer readable medium having recorded thereon a nucleotide sequence of the present invention. The choice of the data storage structure will generally be based on the means chosen to access the stored information. In addition, a variety of data processor programs and formats can be used to store the nucleotide sequence information of the present invention on computer readable medium. The sequence information can be represented in a word processing text file, formatted in commercially-available software such as WordPerfect and Microsoft Word, or represented in the form of an ASCII file, stored in a database application, such as DB2, Sybase, Oracle, or the like. A skilled artisan can readily adapt any number of data processor structuring formats (e.g. text file or database) in order to obtain computer readable medium having recorded thereon the nucleotide sequence information of the present invention.

[0239] By providing one or more of nucleotide sequences of the present invention, a skilled artisan can routinely access the sequence information for a variety of purposes. Computer software is publicly available which allows a skilled artisan to access sequence information provided in a computer readable medium. The examples which follow demonstrate how software which implements the BLAST (Altschul et al., J. Mol. Biol. 215:403-410 (1990)) and BLAZE (Brutlag et al., Comp. Chem. 17:203-207 (1993), the entirety of which is herein incorporated by reference) search algorithms on a Sybase system can be used to identify open reading frames (ORFs) within the genome that contain homology to ORFs or proteins from other organisms. Such ORFs are protein-encoding fragments within the sequences of the present invention and are useful in producing commercially important proteins such as enzymes used in amino acid biosynthesis, metabolism, transcription, translation, RNA processing, nucleic acid and a protein degradation, protein modification, and DNA replication, restriction, modification, recombination, and repair.

[0240] The present invention further provides systems, particularly computer-based systems, which contain the sequence information described herein. Such systems are designed to identify commercially important fragments of the nucleic acid molecule of the present invention. As used herein, “a computer-based system” refers to the hardware means, software means, and data storage means used to analyze the nucleotide sequence information of the present invention. The minimum hardware means of the computer-based systems of the present invention comprises a central processing unit (CPU), input means, output means, and data storage means. A skilled artisan can readily appreciate that any one of the currently available computer-based system are suitable for use in the present invention.

[0241] As indicated above, the computer-based systems of the present invention comprise a data storage means having stored therein a nucleotide sequence of the present invention and the necessary hardware means and software means for supporting and implementing a search means. As used herein, “data storage means” refers to memory that can store nucleotide sequence information of the present invention, or a memory access means which can access manufactures having recorded thereon the nucleotide sequence information of the present invention. As used herein, “search means” refers to one or more programs which are implemented on the computer-based system to compare a target sequence or target structural motif with the sequence information stored within the data storage means. Search means are used to identify fragments or regions of the sequence of the present invention that match a particular target sequence or target motif. A variety of known algorithms are disclosed publicly and a variety of commercially available software for conducting search means are available and can be used in the computer-based systems of the present invention. Examples of such software include, but are not limited to, MacPattern (EMBL), BLASTIN and BLASTIX (NCBIA). One of the available algorithms or implementing software packages for conducting homology searches can be adapted for use in the present computer-based systems.

[0242] The most preferred sequence length of a target sequence is from about 10 to 100 amino acids or from about 30 to 300 nucleotide residues. However, it is well recognized that during searches for commercially important fragments of the nucleic acid molecules of the present invention, such as sequence fragments involved in gene expression and protein processing, may be of shorter length.

[0243] As used herein, “a target structural motif,” or “target motif,” refers to any rationally selected sequence or combination of sequences in which the sequences or sequence(s) are chosen based on a three-dimensional configuration which is formed upon the folding of the target motif. There are a variety of target motifs known in the art. Protein target motifs include, but are not limited to, enzymatic active sites and signal sequences. Nucleic acid target motifs include, but are not limited to, promoter sequences, cis elements, hairpin structures and inducible expression elements (protein binding sequences).

[0244] Thus, the present invention further provides an input means for receiving a target sequence, a data storage means for storing the target sequences of the present invention sequence identified using a search means as described above, and an output means for outputting the identified homologous sequences. A variety of structural formats for the input and output means can be used to input and output information in the computer-based systems of the present invention. A preferred format for an output means ranks fragments of the sequence of the present invention by varying degrees of homology to the target sequence or target motif. Such presentation provides a skilled artisan with a ranking of sequences which contain various amounts of the target sequence or target motif and identifies the degree of homology contained in the identified fragment.

[0245] A variety of comparing means can be used to compare a target sequence or target motif with the data storage means to identify sequence fragments sequence of the present invention. For example, implementing software which implement the BLAST and BLAZE algorithms (Altschul et al., J. Mol. Biol. 215:403-410 (1990)) can be used to identify open frames within the nucleic acid molecules of the present invention. A skilled artisan can readily recognize that any one of the publicly available homology search programs can be used as the search means for the computer-based systems of the present invention. Having now generally described the invention, the same will be more readily understood through reference to the following examples which are provided by way of illustration, and are not intended to be limiting of the present invention, unless specified.

### EXAMPLE 1

[0246] The SOYMON029 cDNA library is generated from plants from the cultivar PI507354 (USDA Soybean Germplasm Collection, Urbana, Ill. U.S.A.) root tissue, that are grown in a greenhouse in late fall to early winter. The plants are infected with Soybean Cyst Nematode eggs. At 10 days post infection the plants are uprooted, rinsed briefly and the roots frozen in liquid nitrogen. Approximately 20 grams of root tissue is harvested from the infected plants. The tissue is moved on dry-ice where it is again stored at −80° C. Total RNA is prepared from the ground root tissue and used to isolate poly A⁺ RNA for library construction. SEQ ID NO: 1 to SEQ ID NO: 5277 are from SOYMON029. The cDNA library is constructed as described in Example 2.

[0247] The SOYMON031 cDNA library is generated from the soybean cultivar Asgrow 3244 (Asgrow Seed Company, Des Moines, Iowa U.S.A.) carpel and stamen tissue. Seeds are planted in moist Metromix 350 medium at a depth of approximately 2 cm. Trays are placed in an environmental chamber set to a 12 h day/12 h night cycle, 29° C. daytime temperature, 24° C. night temperature and 70% relative humidity. Daytime light levels are measured at 450mEinsteins/m². Soil is checked and watered daily to maintain even moisture conditions. Flowers are removed from the plant at the pedicel. Flowers are dissected to separate petals, sepals and reproductive structures (carpels and stamens). The individual tissue types are placed in separate containers and frozen in liquid nitrogen. A total of 300 mg of carpels and stamens are harvested and immediately frozen in a 1.5 ml polypropylene microcentrifuge tube. The tissue is then transferred to a −80° C. freezer for storage. The tissue is moved on dry-ice where it is again stored at −80° C. Total RNA is prepared from 150 mg of tissue and used directly to generate a library using the Clonetech SMART™ PCR cDNA (Palo Alto, Calif. (U.S.A.)) library construction kit. The EcoRI/XhoI adaptors are used in this library construction. The cDNA is ligated into the pINCY vector. SEQ ID NO: 5278 to SEQ ID NO: 15553 are from SOYMON031.

[0248] The SOYMON032 cDNA library is generated from meristematic tissue that is excised from rehydrated dry soybean seeds of the Asgrow cultivar, A4922 (Asgrow Seed Company, Des Moines, Iowa U.S.A.). Seeds are first surface sterilized and germinated in liquid media for 24 hours. The seed axis is then excised from the barly germinating seed and planted on tissue culture media and incubated overnight at 20° C. in the dark. All of the supportive tissue is removed from the explant. Approximately, 570 mg of tissue is harvested and frozen in liquid nitrogen. The tissue is then sent on dry-ice where it is again stored at −80° C. Total RNA and poly A⁺ RNA is prepared from the entire sample. SEQ ID NO: 15554 to SEQ ID NO: 26369 are from SOYMON032. The cDNA library is constructed as described in Example 2.

[0249] The SOYMON033 cDNA library is generated from the soybean cultivar, Asgrow 3244 (Asgrow Seed Company, Des moines, Iowa U.S.A.). Seeds are imbibed and germinated in vermiculite for 2 days under constant illumination (˜510 Lux). After 48 hours, the seedlings are transferred to an incubator set at 40° C. under constant illumination (˜560 Lux). After 30, 60 and 180 minutes seedlings are harvested. They are quickly wiped off and dissected. A portion of the seedling consisting of the root, hypocotyl and apical hook is frozen in liquid nitrogen and stored at −80° C. The seedlings after 2 days of imbibition are beginning to emerge from the vermiculite surface. The apical hooks are dark green in appearance. Total RNA and poly A⁺ RNA is prepared from equal amounts of pooled tissue. SEQ ID NO: 26370 to SEQ ID NO: 31289 are from SOYMON033. The cDNA library is constructed as described in Example 2.

[0250] The SOYMON036 cDNA library is generated from three Soybean cultivars, PI171451, PI227687 and PI229358 (USDA Soybean Germplasm Collection, Urbana, Ill. U.S.A) that are grown in a screenhouse divided in half by a screen. One half of the screenhouse is infested with soybean looper and the other half is infested with velvetbean caterpillar. A single leaf is taken from one representative plant at 3 different time points, 11 days after infestation, 2 weeks after infestation and 5 weeks after infestation. The leaves are frozen and shipped in dry-ice. The tissue samples are stored at −80° C. Total RNA and poly A⁺ RNA is isolated from pooled tissue consisting of equal quantities of all 18 samples (3 genotypes×3 sample times×2 insect genotypes). SEQ ID NO: 31290 to SEQ ID NO: 36578 are from SOYMON036. The cDNA library is constructed as described in Example 2.

[0251] The SOYMON037 cDNA library is generated from soybean seeds genotype A3244 (Asgrow Seed Company, Des Moines, Iowa U.S.A.) that are planted in moist vermiculite, wrapped and kept at room temperature in complete darkness until harvesting. Axis and hypocotyl tissue is harvested at 2, 3 and 4 days after planting. Samples are frozen in liquid nitrogen upon harvesting and stored at −80° C. until use. 1 gram of each sample (axis+hypocotyl at day 2, 3 and 4) is pooled for RNA isolation. SEQ ID NO: 35579 to SEQ ID NO: 45553 are from SOYMON037. The cDNA library is constructed as described in Example 2.

[0252] The SOYMON038 cDNA library is generated from meristematic tissue and part of the hypocotyl. 4.48 grams wet weight, 119 excised meristems are excised from rehydrated dry soybean seeds of Asgrow variety A3244 (Asgrow Seed Company, Des Moines, Iowa U.S.A.) We prepare the explants for transformation by first germinating surface sterilized seeds on solid tissue culture media for 6 days at 28° C., 18 hours of light/day. The germinated seeds are then “cold shocked” at 4° C. for at least 24 hours. The explant is then prepared and wounded for Agro infection. This tissue is slightly modified from the typical explant in that the huge cotyledons have been removed to enrich for the specific tissue of interest. Total RNA and poly A+ RNA is isolated from 2 grams of this tissue. SEQ ID NO: 45554 to SEQ ID NO: 53893 are from SOYMON038. The cDNA library is constructed as described in Example 2.

### EXAMPLE 2

[0253] The stored RNA is purified using Trizol reagent from Life Technologies (Gibco BRL, Life Technologies, Gaithersburg, Md. U.S.A.), essentially as recommended by the manufacturer. Poly A+ RNA (mRNA) is purified using magnetic oligo dT beads essentially as recommended by the manufacturer (Dynabeads, Dynal Corporation, Lake Success, New York U.S.A.).

[0254] Construction of plant cDNA libraries is well-known in the art and a number of cloning strategies exist. A number of cDNA library construction kits are commercially available. The Superscript™ Plasmid System for cDNA synthesis and Plasmid Cloning (Gibco BRL, Life Technologies, Gaithersburg, Md. U.S.A.) is used, following the conditions suggested by the manufacturer.

### EXAMPLE 3

[0255] The cDNA libraries are plated on LB agar containing the appropriate antibiotics for selection and incubated at 37° for a sufficient time to allow the growth of individual colonies. Single colonies are individually placed in each well of a 96-well microtiter plates containing LB liquid including the selective antibiotics. The plates are incubated overnight at approximately 37° C. with gentle shaking to promote growth of the cultures. The plasmid DNA is isolated from each clone using Qiaprep plasmid isolation kits, using the conditions recommended by the manufacturer (Qiagen Inc., Santa Clara, Calif. U.S.A.).

[0256] The template plasmid DNA clones are used for subsequent sequencing. For sequencing the cDNA libraries of SOYMON029, SOYMON031, SOYMON032, SOYMON033, SOYMON036, SOYMON037, and SOYMON038, a commercially available sequencing kit, such as the ABI PRISM dRhodamine Terminator Cycle Sequencing Ready Reaction Kit with AmpliTaq® DNA Polymerase, FS, is used under the conditions recommended by the manufacturer (PE Applied Biosystems, Foster City, Calif.). The ESTs of the present invention are generated by sequencing initiated from the 5′ end of each cDNA clone.

[0257] A number of sequencing techniques are known in the art, including fluorescence-based sequencing methodologies. These methods have the detection, automation and instrumentation capability necessary for the analysis of large volumes of sequence data. Currently, the 377 DNA Sequencer (Perkin-Elmer Corp., Applied Biosystems Div., Foster City, Calif.) allows the most rapid electrophoresis and data collection. With these types of automated systems, fluorescent dye-labeled sequence reaction products are detected and data entered directly into the computer, producing a chromatogram that is subsequently viewed, stored, and analyzed using the corresponding software programs. These methods are known to those of skill in the art and have been described and reviewed (Birren et al., Genome Analysis: Analyzing DNA, 1, Cold Spring Harbor, N.Y., the entirety of which is herein incorporated by reference).

The application's sequence listing, which the Patent Office published only in electronic form, follows.

SEQUENCE LISTING (53893 sequences)

SEQ ID NO: 1 - DNA, 300 bp, Glycine max
  Clone ID: 701036901H1
tgtaaatctcaagatcagatcctcatctaccaccattccaggtgtagccatcaaaacaacgtttgtttaacaaaacccattatcagatcagatccgatcagatcctcttcagattcggatcaccgccgagtccatgagcacgccagcgctttcagggggcacgggcctcttctctggattcacgcgtttatgcaagggccttgcggtggtgcttgtttgcggtcacattgcggttcagtttatcccttcagctgttaactatcttgctcttattcccgccaggacaatcccatttgcctg

SEQ ID NO: 2 - DNA, 297 bp, Glycine max
  Clone ID: 701036902H1
aaattacatagcctcaataatctgagagagaaacaaaaacaatgaaggtttccattgccaagttccactcccttcccctatgttttttccttctcttggccttcaacacaaaacccctcctagcagcagaaccagagccagtggttgataagcaagggaaccctttggagccaggagtagggtactacgtgtggccactttgggctgatgaaggaggcctcacactaggccaaacaaggaacaagacatgccctctttatgttatccgtgacccttcattcattggcaccccatttc

SEQ ID NO: 3 - DNA, 295 bp, Glycine max
  unsure (1)..(295): unsure at all n locations; Clone ID: 701036903H1
gcctagccattgatttggaaaagtccaagcttcaaagatgagtaagcttcagagtgatgctcttagagaagctatctcangaatcatgactgattccaaggaaaagaacaggaaatttgtggagaccattgaactccaaattgggctgaaaaactatgatccccagaaggacaagcgttttantggctctgttaagttgcctcacattcctcgccccaagatgaagatttgtatgcttggagatgcccaacacgttgaagaggctgagaagataggattggactacatggatgtc

SEQ ID NO: 4 - DNA, 291 bp, Glycine max
  Clone ID: 701036904H1
tttttcttctatgaacacatggtggctgagttgaggggaagtacttagaaacagaaacacagagatgaaaccagaaacatctctgaactttactttgatgctgactttcttactttatctgaacttggttatgggagtgctgagcgttgatcattatcgcagagttgactttcctgatgaattcgtttttggttcaggcacctctgcttatcaggtggaaggagcttctaacgaagatgggagaactcctagcatctgggatacctttgcccatgcggtgtatgagcagga

SEQ ID NO: 5 - DNA, 292 bp, Glycine max
  Clone ID: 701036905H1
gtttttgcccaccacttttgctttttctgctcaaattctgtgctcatcgccctcgtcgtgttcactttgtcactgctaatggcatttttgctggggaaacggcgctcttcgcaaaacgaattggcaaaacggcgcagagacaaatcgccagaaggcattgaattggaggagaatcccgaggtgttcaaaagttctttgctgaaggactccaaagaacacatcatcagtacgtactttcctgatgtgcgcacacttttcgatgctttccaacgcggtctcaaattgccgaaca

SEQ ID NO: 6 - DNA, 293 bp, Glycine max
  unsure (1)..(293): unsure at all n locations; Clone ID: 701036906H1
caaattttcggatctcttctgtttcttcgaatncaaaaccctaattcccccaatttcatttttcaaccttgaaaaaccttctctctctctctcagttcccaacggtcatcaccacagctcgatcaacagggacatatttgctactgaagagatgtctcctgcttccaaatctaagtctaaagacaaaaatgctggcaaggaagctcaaaagtcttctgccaagtcttcaggatctggtaatgccgtggctggtgtaccagctagtgcatacaatcctttatcgggaacatcca

SEQ ID NO: 7 - DNA, 292 bp, Glycine max
  Clone ID: 701036907H1
ggcactcaaacattgtttgttgtaggaagaggaatcttgagaaatggcaggggacagcaagagcaagattctgttcatcggagggactggttacatcggaaaattcatcgtggaagccagcgccaaagctggccacccaactttccttttggtgagggagtccactctctccaaccccgcaaaatcatccctcatcgacaatttcaaaggcctcggtgtcaatcttgttttcggagatctatacgatcaccaaagtttggtgagtgctataaagcaggtcgatgtggtaatt

SEQ ID NO: 8 - DNA, 86 bp, Glycine max
  unsure (1)..(86): unsure at all n locations; Clone ID: 701036908H1
gaaaaanaaaaaaacngaacaactacngaaantcaaaaccaacttaaatttnttatggatccannttncatnggttangttgtttt

SEQ ID NO: 9 - DNA, 293 bp, Glycine max
  unsure (1)..(293): unsure at all n locations; Clone ID: 701036909H1
tcaaaccaaaaaacacaacaaaaganaganagaaaganacaaagagttccttgctttgtagtaagatatatccatcaaaaatggttttgtcttggactagaaganacgttttccgccgtgcnaagaaggngaaggaacaaagtcaactattagaagttgaggttgtgattcccaaccactttcgctgtccggtgagtttggagctgatgacagatccggtgactttatcaaccggcattacctacgaccgtgtgagcatcgagaagtggatcgagggagaaaacagaacctgc

SEQ ID NO: 10 - DNA, 141 bp, Glycine max
  unsure (1)..(141): unsure at all n locations; Clone ID: 701036910H1
tggagttttantttaaactatggctatggtaatggaaaaccgncgtttttncgtgttttcaccactttcgtttcttgatcagagtcaccccccaaaaacaaggcctaantcgccttcttcctctttcccttctttnttttt

SEQ ID NO: 11 - DNA, 290 bp, Glycine max
  unsure (1)..(290): unsure at all n locations; Clone ID: 701036911H1
ctcccgcatctcctcgtcgctccgccacgccttcgcgcaggccgacccgtggacggagctcatcgaccggagctccatgtcccgacccgacaccctcgccgaagcatactctcggatccgtaagaacttcgcctanttccgcgtcaattacctaaccctaatcgtgttggcgctcgcggtctcgctcatcacgcatccgttctcgctattcgtcctcttcggtctcctcgcgtcgtggtcgttcctttatctctttcgcccttcggatcagcctgtcgtcntcttcggac

SEQ ID NO: 12 - DNA, 285 bp, Glycine max
  unsure (1)..(285): unsure at all n locations; Clone ID: 701036912H1
ggtgacgagagccaccacccaccaccgcaagcgcaantgaaaaggttactgaagttggatggtacnttcttggcgaggatcaacaacagattggcccttacgccttctctgagttgtgccagcatttcttgaatggatacctctccgaaaatacgtttgtgtggtctgaaggaagtagtgagtggcagcccttgtcctcggtttctgacctgtgggctcaaattaaccggcaggacctgattcttcaactactgtgtctgctcctgatgttgatgagtttgaaag

SEQ ID NO: 13 - DNA, 289 bp, Glycine max
  unsure (1)..(289): unsure at all n locations; Clone ID: 701036913H1
cacttcttgaaccgtgccttaactaaactagagctagaattagagttagctaccttgcctaattcacaaacgcgtccctctacggctctacctattagctatcttntttgtgctgtgattgaaattaatttgtgatagctcaccatggccattgctacttgtgatcatgataagaacgcaaaggctttgcagttcattgaggatatgacccaaaacactgaaagtgtccaaganagggtccttgctgagattctcagccaaaactcccagaccgaatacctganacggt

SEQ ID NO: 14 - DNA, 282 bp, Glycine max
  unsure (1)..(282): unsure at all n locations; Clone ID: 701036914H1
actgatcataaatcacatagctagttgtttaaagtgagaganaaagaaagaagaanatggcaaactttccagttgttgacatggggaaacttaacaccgaagagagagcagcagccatggagattataaaanatgcctgtgagaactggggtttctttgagttggtgaaccatgggatatccattgagttgatggacactgtggagaggctcacaaaagagcactacaagaagactatggagcaaaggttcaaagaaatggtggccagcaaagggcttgagt

SEQ ID NO: 15 - DNA, 290 bp, Glycine max
  unsure (1)..(290): unsure at all n locations; Clone ID: 701036915H1
ctaaagcaaacccagttgtcaagggctgaaaagcttgataagatctaagatttgaagttgaagttccatgccctgagatgaagttatgcacaatttcatcatgaaatgatccgagtttccttcacattttattggtgttcttattatattgttatatgtggtgggtgacttgagtnattggacatctctgcaatttgaaggactctttcatgtgattggtgaaaatatatatgttggccactgttgtttttaagtgcggtttggtgaaagttggttggtgttgttagctt

SEQ ID NO: 16 - DNA, 170 bp, Glycine max
  Clone ID: 701036916H1
gtttctctctacaagtccatatgtaaaatggataacagaaagaaaaagaaaaatcactttggtttgagaactttttaaagtttatattaactgtgttaaggttcataaaactgtagactgatttgtgtgacatgctccacagaaccttaaattttcctctattttgtcct

SEQ ID NO: 17 - DNA, 302 bp, Glycine max
  unsure (1)..(302): unsure at all n locations; Clone ID: 701036917H1
ggccgtttcgaaagcnatgacgctatccaccgcgccctcaccgccaccggcattagaagaggagccgttacctcacgacggcgacgattacgacggcatcgtttcactggacgacgagggtttcccgtncgcaattccccgaatcaggaacggcgtcggaaaanagcagtttcgccgcggattcactatcgcagacggaaccgattggtccttcgctgttgttgtcgctggaagatagtaaacagagcgatttagcgcaagattcggggaagaagatgaagcaggccaatctgttccagatt

SEQ ID NO: 18 - DNA, 294 bp, Glycine max
  Clone ID: 701036918H1
gtttccgatatccaaggggaaatggcattggtgttcaactaccaactggaaataaaggaactcctcttgagattgggaaaggtaggatattgattgaaggggaaagagtggctctcttgggctatggatcagctgttcagaactgtttggctgcagcttccttagtggaacatcatggtttgcgtgtaacagttgctgatgcacgtttctgcaaaccactggatcgttcccgattcgcagcctggcaaaatcacatgaggttttgattacagttgaagaaggatcaattggagg

SEQ ID NO: 19 - DNA, 295 bp, Glycine max
  unsure (1)..(295): unsure at all n locations; Clone ID: 701036919H1
caaatcatcacacacacatactaagaagcaacaattcttctacaatggatctcctccttctggaaaanaccctcataggtctcttcctcgcngcggtggtcgccatcgccgtctccaccctccgcggccggaaattcaagctcccaccgggcccactccccgtcccaatcttcggcaactggctccaagtcggcgacgacctcaaccaccgcaacctcaccgatttggccaaaaaattcggtgacatcttcctcctnccgcatggggcagcgcaacctcgtcgtggtttcttccc

SEQ ID NO: 20 - DNA, 292 bp, Glycine max
  unsure (1)..(292): unsure at all n locations; Clone ID: 701036920H1
ggcacacacagacacacacatttcgtcggaatgggaagggtgattcgcgcacagcgtaaggntgcggggtcggtgttcaagtcccacacccaccaccgcaagggtccggcgaggttccgcagcctcgacttcggcgagcgcaacggctacctcaaaggggtcgtcaccgatatcatccacgaccctggtcgcggtgctcctctagccaaggtggcgttccgccaccccttccgctacaagaagcagatggagctcttcgtcgccgccgagnncttctacaccggccagttca

SEQ ID NO: 21 - DNA, 293 bp, Glycine max
  Clone ID: 701036921H1
cctggttcctgcattgcgttgctctctctataccttctaattcccaaatttctagggtttggtacagagagaaaaaggaacataagatgtctcagaacgggaagctgatgccaaatctagaccagcatagcaccaagcttctcaatctcactgttcttcaacgaatcgacccttttgtcgaggaaattctcatcaccgctgcgcatgtgcaccttctacgagttcaacatcgacctcagccaatggagccgcaaggacgttgaaggatctctcttcgttgtcaagaggaacac

SEQ ID NO: 22 - DNA, 288 bp, Glycine max
  unsure (1)..(288): unsure at all n locations; Clone ID: 701036922H1
tccaccgtccattgcaaagtcttgcgcccaatttccatggaactgtaaagagaggatagttagaagattaaatcttaaagcagtaagtcatcatggataaatcagnnnnnnnnnnnnnnnnnnnnnnnnnnnnnnntgtgatgggagttgccgcaggggctagccaaatggcctattcttctcactacccgactgcttccaggtggcttctggcacgcccgctgtaatgctccttccccaatcaggctccagctgccttctctagttctgctcaccagcttgcatacc

SEQ ID NO: 23 - DNA, 288 bp, Glycine max
  unsure (1)..(288): unsure at all n locations; Clone ID: 701036923H1
aataatgttttgaggacatttctctctccgaaccctcccatgcatggcctcttccgcattcctttccgtttatctcattatctccgtcatcgtccttttgtcgaacaggtgctgcncgtttcaatgcggggtttcctacgacacgatcaccgtcctcaacgcgttccctcacgacccacaagcctttcctgagggtcttctttatcatggaaatgacaccttatttgagtcaactggcctttatggggagtcatccgtccgtaaagttgctcttcgtatgggaaggtt

SEQ ID NO: 24 - DNA, 291 bp, Glycine max
  unsure (1)..(291): unsure at all n locations; Clone ID: 701036924H1
gattttggagattgaagagatatcacaagatgctgcatattggattcgaagaattccacctncgcctctgggccactgcttattttgaggggcataggtttggtcatttgacagccaacatagttgaatctttaaacacttggatattggaggcatctggacttccaataattcaaatgatggaatgcattagaaggcagctaatgacttggtttaatgagcgccgggagaccagtatgcagtggacatcaatacttgtaccatctgccgagagacgtgtagccgaggctc

SEQ ID NO: 25 - DNA, 289 bp, Glycine max
  unsure (1)..(289): unsure at all n locations; Clone ID: 701036925H1
ttcagttctctcatttctcgtcttcactgagaaaaatccttcttcgtgcatgctcctncgtttctatctaaaggggcgaaagantagattataagggggtaagtgagaaagagagtaaaaacaaaattaaaacatgactatggaagagggcagggtcgagaacgaggactacacacaagatggtactgtcaacattaaagggaaacctattcttagatccaaaagtggtggttggaaagcttgctcctttgttgttgtatatgaggtattcgaaagaatggcttatatg

SEQ ID NO: 26 - DNA, 284 bp, Glycine max
  unsure (1)..(284): unsure at all n locations; Clone ID: 701036926H1
ttcaattactccttcaaatcaggtttgtgcgctctctatctctcttggttagttggaaaattttgttgtgcatgctttttggtgatgtatggaacctgaaaganagttcaagacttattagtggaagantttctttctattgaggaaaggtatttattgctctctacttaggtaacataagccaacaattttagtagtaattaatggctggagaattgggagttttgaatgcacttgatgtggcaaagacacaatggtaccacttcactgctatgtgatcgcng

SEQ ID NO: 27 - DNA, 288 bp, Glycine max
  Clone ID: 701036927H1
atcaatcaatccctcatctcattgctgagatctgcaagctggctatggactacgaaccctacgacagtagcggaactgatgatgaccttccaccaacccatcaaaatagaatttccaggggaggaggaggacgtctcgctgggaatgggagatctgctgttggttcaattccttacccaaggatgttcggtgaaattgatatggagacccaaattccatcagcttgagcaagaagcatacagttcagttctaagagcctttaaagcttcaagccgatgccatacttgg

SEQ ID NO: 28 - DNA, 289 bp, Glycine max
  unsure (1)..(289): unsure at all n locations; Clone ID: 701036928H1
cnttttaatcctaattctgcacttcttgatcattcgattttnctcctncaagatgcagatattcgtaaaaactttgaccggcaagaccatcacccttgaggtggaatcctccgacaccattgacaacgtaaaagctaagattcaagacaaggaagggatcccacctgaccagcagagacttatctttgcgggtaaacaacttgaggatggtcgcacccttgccgattacaacatccaaaaggatcaaccctccatctcgtgcttcgcctgcagggtggcatgcaaatct

SEQ ID NO: 29 - DNA, 290 bp, Glycine max
  unsure (1)..(290): unsure at all n locations; Clone ID: 701036929H1
ctctaattttccgggaaaatttctctcactcttgctctctggttntccggcgttcagaggaggaagcagaagagtagaaggaagacatttctctgcttntacggaccactcttcccttcacttccttccctttcttttctcaatttccgtgatcatcacaattttcttcactcctcaatttcaataatcctccatgaaccccctctagcccctcctctccttccttctcttcaacaagaaactgactgaataggagaaacattctgggaattcttcatcagctcatgctg

SEQ ID NO: 30 - DNA, 290 bp, Glycine max
  Clone ID: 701036930H1
ttttccctcactttctcgctcgccaaacgcccctctctctcctccaatggccgaccagctcaccgacgaccagatcgccgagttcaaggaggccttcagcctcttcgacaaggacggcgatggttgtattactactaaggaacttgggactgtgatgcggtcactagggcaaaacccaactgaggcagaactgcaggatatgattaatgaggttgatgctgatggcaatggaaccatcgacttcccagagttcctcaacctgatggctcgcaagatgaaagacaccgact

SEQ ID NO: 31 - DNA, 292 bp, Glycine max
  unsure (1)..(292): unsure at all n locations; Clone ID: 701036931H1
tttttgtagtccattgtatttttattgtgtatcanattttctgtaacaaatgaaaggagaagaatcagtgcatcgtgttttttcactgtacaagctattggtacaaagaaaataaaacaaatatagtagcaaaaaaatgagaaagataaagaacaaaaaacttctagtcatagtgtagctgttaaaatcgagtttatttctattacaaattgtattctgtncatggcatagggaagaagaaactactagtgacatctatgtaaacgtggtcaccaagtaaaccagtgacttg

SEQ ID NO: 32 - DNA, 292 bp, Glycine max
  unsure (1)..(292): unsure at all n locations; Clone ID: 701036932H1
anataactgaattttccgtgctggtttctcncccactgacacaagttgtagttttttaaaattatattatttacctaaaggatttcagattttgagttcatgagagcaatgtaaaagtgaagttctgaactgttaacaagtttggaaaactttgtgcagtgcagtgtgttaagatggaagctatgttcatcttcagaagcagtcatggaaaccagaaattgaagattgaagtgatttcttcttagaaatcagaatactagaaaatactagcacagaaataatgtgggnttcc

SEQ ID NO: 33 - DNA, 298 bp, Glycine max
  unsure (1)..(298): unsure at all n locations; Clone ID: 701036933H1
gcgcaaagcgcaaagcgcaaagcgcagttgtngctctttgaactcgaacgaagttctccgaagtcgaaacactcgttcgattcgctgaactctgaagttaatttcnnttgcgaaaatgtcggtggcgaagaagttgattagatgcgtcatccttgacttggacggcacgctgctcaacacatctggcatcgtaggcaacgttttgaaggttatgttaggtaaatacggaaaggaatgggacggaagagaagctcagaagataattggaacgacgccgtttgnggccgctgctgcggtt

SEQ ID NO: 34 - DNA, 252 bp, Glycine max
  unsure (1)..(252): unsure at all n locations; Clone ID: 701036934H1
atctctccctctctctcatctctcccttccaaaaaaaagcaccaattttttcgaacgccaacgcgaatcacgaagagggtcaccgagaaaatgggtgtttgtgggtcgaggcccaaagtgaacgaggacctctcagcgaagaagaagaacaaccaccaccnnnnnnnnnnnnnnnnnntccttcagaagacgcgtctcttctagaaagatcgaagctaacaacgtttctcactgtattcagctcttcagctt

SEQ ID NO: 35 - DNA, 268 bp, Glycine max
  unsure (1)..(268): unsure at all n locations; Clone ID: 701036935H1
ctccaaactcaagtgtcgganagtttgcttcttttccactctgaatcaccctnctttattttgggtctctcatctttcttcttccttccaagttgtttttggtgttggtgttggtgttgaattgagttgagaagaaaagaagaggtcatagacacacacacaagacatgtctgctgttgagtcagctgaacacaacaacatcagaggagtaccaactcatggtggacgctatgttcagtacaatatctatggcaatctcttcgaagtt

SEQ ID NO: 36 - DNA, 293 bp, Glycine max
  unsure (1)..(293): unsure at all n locations; Clone ID: 701036936H1
tgcgtcttaatggaggagagaaagaagcacccttcttttccctccaactatctcactctncgctcaacttccaagaacgatggctcaagcagcaaaaccaaatcaaccaaccacaaccacaaccacaaccacagccacaagnnnnnnnnnnnnnnnnnnnnnnnnnnnnnncacaccaagagctggtactcgttcccagaaacggaaacgcttataggtctcgttctcagtttcagtatgttgcgaagaatcggaacgttccgaaactcgccgccgcgcaaccaaggttgcgg

SEQ ID NO: 37 - DNA, 288 bp, Glycine max
  unsure (1)..(288): unsure at all n locations; Clone ID: 701036937H1
caaggtgaaacggaagagggtaatctaactttcatgcttacgtcaccaccactcactctttttctaccctaaaccattgaatcgatctaaatctctcccaaatcgcaaaccccttttgctcaattcagtcaattctctccctaagttccgctgtcggcgtctaggttttggagcatacgacaaaaatctgggtgagggagaacgtttccagcttgggacggtgggcgcgttgactctttctgtggtctcatctgtgtccatgtgnattgcaataaggcgctgatgagt

SEQ ID NO: 38 - DNA, 288 bp, Glycine max
  unsure (1)..(288): unsure at all n locations; Clone ID: 701036938H1
tgatttccattgccgccaccgattacccaccaactgatatacataacctcttcacctttccctccttccctaatttatcactnnnnnnnnnnnnnnnnnnnnnnnaagtccactaagttggggcacgtcacccatctcgnccttcccctcgctcatctcaaatccatgcttcggaattagggtttccattcggatttcgtaagtctggtgcccaatttcgtgactccgagcgacgtaaaangggaagggaaagggatgaggatttggggatcggagatcgtgttcgcc

SEQ ID NO: 39 - DNA, 292 bp, Glycine max
  unsure (1)..(292): unsure at all n locations; Clone ID: 701036939H1
ggcggagagaganaaagagagaggtagagaaaagcgaagagtctctctcttcctatctctctctttcaatgtncagggcacaaatnnnnnnnnnnnnnnnnnnnnnnnnnnnnnnnnnnnnnnnnnnnnnnnnnnnnnnnnnnnnnnnnnnnnnnnnnnnnnggcagaaggttctagaagccgccaatttttatttcttttaatttgtctgngtccagagacgttcgtgattgtnaccatggnttcttcgtgtgtcccaaacggngacgtttctgggttcaaagataggngt

SEQ ID NO: 40 - DNA, 288 bp, Glycine max
  Clone ID: 701036940H1
ggagatgaaaagtattgagatggagatcaagagaagaaatgccgatccaaaacttagaaacagatgtggcgttaacgttttaccatatgaactgcttataccaagttctgaacgtggggcaacaggacgaggagtgccaaatagtgttacagcctagtccaatatgtgtacaaaccagcaactgaatcaatgttctattattcttcaccttagctggactaaaatggatttaatatttgatctcctaaaaacaaaaaagaaaataaaatgcaaaagggaatatgcagg

SEQ ID NO: 41 - DNA, 288 bp, Glycine max
  Clone ID: 701036941H1
caattccaatttcagtcacaaacaagtatacaattctagaacacaagcttctctcaaatttcaaagccaaaaaatgtcaaccaccattgatgtcccagaatcaagcaatgttgctaaagaaaaagtagttttagctgcaccctcaaggtctggagggtggaagaaaggggtagcaataatggactttattctaaggttaggtgccatagcagctgctcttggtgctgctgccacaatgggaaccagtgatcaaacatccctttctttactcagttctttcagtttgaa

SEQ ID NO: 42 - DNA, 246 bp, Glycine max
  Clone ID: 701036942H1
gtgacaccaatctctatgaggtgatggtagaaggtgagaatggagggagagttcaagctgcagctatttgccacatggacacctctaagtgggaccgagaccacgtgtcctttcgtgtgctcaaagttgagccgggaacctcacctgtgtgtcatttcttccctcctgataatctagtctgggtgcctttgcctctggctccataactatagtctatagtttcagttcttcttcatcaaagtttgt

SEQ ID NO: 43 - DNA, 287 bp, Glycine max
  unsure (1)..(287): unsure at all n locations; Clone ID: 701036943H1
ggtttttgagtgcggcggtccaaacactcttctctgcagcttttgcctacaactcccttcaccatgggctgaacaaaccgagaaagcttttctgaagcaaccaaaagtgtttctcagcacaaagaagactgggaagggaaagagacctggaaaaggtgggaaccgcttttggaagtccattgggcttgtcatttaagactcccagggaagccatcgaaggaacctatattgacaagaagtgccccttcactggcaatgtntccatccgtggccgtatcttggtggga

SEQ ID NO: 44 - DNA, 266 bp, Glycine max
  unsure (1)..(266): unsure at all n locations; Clone ID: 701036944H1
gaagaaaacacgatcaaagagaggactccaataaggggacaacggcaagcgtgacgacggtgnatttatggactttgctaattcaatgtgcacaggctgtggctagctttgaccaaaggactgcaaatgaaacactgaagcagattaggcagcactcttcaccttttggcgatggacttcagcgtttggctcattacttcgccgatggcctcgagaaacggttagctgctgggacaccaaagttcatttcctttcagtcagcatct

SEQ ID NO: 45 - DNA, 288 bp, Glycine max
  unsure (1)..(288): unsure at all n locations; Clone ID: 701036945H1
agatggagaagtatcagatctggagcaggagaatagcgttggcagcgtttgcntttgcncctgctgttccaatcggcctcagcagacgacgtcgttgtgctcncctgaagataacttcgagaaggaagttggtcaggacagaggagctctcgttgagttctatgctccttggtgtggacactgcaaaaagcttgctccagaatatgaaaagcttggtagcagcttcaagaaagccaaatctgttttaattggcaaggttgactgtgatgagcataagagtttgtggca

SEQ ID NO: 46 - DNA, 288 bp, Glycine max
  Clone ID: 701036946H1
tataataattatttaaaagttatatcaaattattaacaatcacttctgggatgcttgatagtgaaatgtttttgtatgataagcatttaactcacaatacataagttgtcatatactataaactatgacttatgttaaatatgttaaactgaaaaccatgtgaatggagagatctacagtaacatattcttttttatgcttttatttactaatctcaccaattcaatgctataaactatgacttatgttaaatagttacactggaaaaccaggtgaatggagagatct

SEQ ID NO: 47 - DNA, 290 bp, Glycine max
  Clone ID: 701036947H1
cttcaaattctcagtgaaaccaattcagttcagtccaaatcccaaatccgaagtgagatttgcgatggagaggcttcagcgaatgttcgcaggtgcaggtggagctctagggcaccctcccccagattccccaactctcgattcctccgagcaggtctacatctcctcactcgctctcctcaagatgctgaagcacggaagggctggggttcccatggaagtgatgggtttgatgcttggagaattcgtggacgagtacaccgttcgtgtggttgatgtcttcgcaatgc

SEQ ID NO: 48 - DNA, 288 bp, Glycine max
  Clone ID: 701036948H1
cctctttgttcctaaacacggggcactggtttcgaaccctcgttgtggttaggtcttcttcacctttcgaattttggaatccatgggtcagggaactccgggcggcatgaaccggcagggcgaccggaagccggacggcggcgacaagaaggagaagaagttcgagccgtcggtccgccggcgcgcgtggggcggaaacagcggaagcagaaaggtccggaggccgcggcgcggttgccgacagtgactccggtgacgaatgcaaatgcggcttctcaagctggagcg

SEQ ID NO: 49 - DNA, 296 bp, Glycine max
  unsure (1)..(296): unsure at all n locations; Clone ID: 701036949H1
aacgcagagccaaaccatgtcgttccccttcaaccactctcacgccacccacacccaccaccgcagggannnnnnnnnnnnnnnnacgacccaccgtttaccctccgccgggaaactccttcagcaacccgccacctccgttctacggcgtccctcanccaccaccccctcancnggananccacgtgttccattccgctcacgtgacaccaggacacgtgtcccatgacttcaacaactactccgctcccccgcctccacccccttcccaccatcatcatgatcgtcatcatgat

SEQ ID NO: 50 - DNA, 292 bp, Glycine max
  unsure (1)..(292): unsure at all n locations; Clone ID: 701036950H1
gactgagtggtcaaagctccaatgatgtcaaattggtaaacaagaaacatctttctatncaagaagcagacacctatncagcagccagtcccaggacacttctgttgaacgccttatacgggaggtgaccagtgaaaagttttggcatcacccaggtatcaagtaattgtattattaccattagtgtcagatgtataatgttattgataagcttatggtctctttggcatttgaattaaaaaanaaaaanaaaaaaanaaaanaaaaanananaaaaaaagaanaangagcc

SEQ ID NO: 51 - DNA, 99 bp, Glycine max
  unsure (1)..(99): unsure at all n locations; Clone ID: 701036951H1
ttngnttnagcnatggagtntcgttgcnttccattggttttcctcnnctcnatcngntcctgatgacaggtcatgctgccatacctccagaagtttagt

SEQ ID NO: 52 - DNA, 267 bp, Glycine max
  Clone ID: 701036952H1
accaaggtaccatctaacattaggttttcaacaattgagattcaagcacgttggaatttttgttcattaggcactttgctgctctttgatgggtagttttgtatgaagagctttgtatagacagtcattcaaataccaacatttggatgaataaatattcttttcatgtgctgcatatctgtcatccgatttaagcgatggcatgatttggcacaatggtacttttggttcaatgttcatctataagcctggtctggctctttctcc

SEQ ID NO: 53 - DNA, 294 bp, Glycine max
  Clone ID: 701036953H1
tcattcatagcagcaaacccatctccaacaacatgagttcccaaacacgcaaccttcaactttgttctgtttcctctgatgtcccagggccacatgatccccatgatggacatagcaaaaattctggcacagaacggtgttactgtcacagtggtcacaacccaccaaaacgcatcacgcttcacatcaactttttctaattcccaaatccgattactcgaagttcaattcccataccaagaagcagggttgccagaagggtgtgagaatctcgacatgttaccttcattggca

SEQ ID NO: 54 - DNA, 288 bp, Glycine max
  Clone ID: 701036954H1
gtacttccttaatttgccaccctaacctactgcattattattctcttccccttaatttctatctccaatccctcagcaaaacgcagcaaatgggtcggcttaatctcctacttgtgtggtcactctcattaacactgtccctttattatctacacccaatctctgctcagctcagtccaaaccactatgctaaaacatgccccaatcttgaaagcatcgttagacaggccgttgccaagaagttccaacaaacctttgtcaccgtcccggccacccttcgtctcttct

SEQ ID NO: 55 - DNA, 288 bp, Glycine max
  Clone ID: 701036955H1
gtttgttcattttgttgttcgaagccaaaaccctagcagccggcgagaatggcagacgttgaggttgatgcggcggcagcggcaggggcagcgcagccgaagaagagaacgttcaagaaattcagcttcaggggcgtggatctggacgcgcttctggacatgtccaccgacgaactggtgaagatgttcagtgcgcgtgcacgtagaaggttccagagaggtctgacgaggaagcccatggccttgattaagaagctccgcaaagctaaaagggaagcaccagcaggt

SEQ ID NO: 56 - DNA, 289 bp, Glycine max
  unsure (1)..(289): unsure at all n locations; Clone ID: 701036956H1
aaatttctccaacgctatcgagccaaacccaaacgttaactcagaagaagaccnnnnnnnnnnnnnnnnnnnnnnnnnnnnccgaaccactttcaactctccaacgtcgccacacgattcatcgcgtttcgcaggctgcaatggcgacgttcgaactgtaccgcaggtcgacgatcggaatgtgcctgacggagacgctggacgagatggttcagaacggcactctcagccccgagctcgcgattcaggttctggtccagttcgataagtccatgactgaggctctgga

SEQ ID NO: 57 - DNA, 285 bp, Glycine max
  Clone ID: 701036957H1
tatacttctcaattgaaagcagctaaatactatgtaatatggccaacaactttcactcattgctcccatatctaaaagttgattgatccttagaatcttatcttctacatgaggaatagatactgtgcccacttccgttggtgaatggaactcttgattctattcaatctcccttctccaaccctctattatatatcctgcaacctgctttgtttcttgtagtgttctaatcattttggctttggctttccaatcctcctgatttcctcttctacgattctaaaa

SEQ ID NO: 58 - DNA, 283 bp, Glycine max
  unsure (1)..(283): unsure at all n locations; Clone ID: 701036958H1
ctcctactacctattcggctttgcattcgccttcngcggcccctccaacggcttcatcggccgccacttcttcggcctacgagattacccaatgggctcctctccctccggcgactacagcttcttcctctaccagtgggcctcgccatcgccgccgcaggaatcaccagcggctccatcgccgagagaacacagttcgtggcttaccttatctactcttctttcttaaccggtttcgtttaccccatcgtttcgcattggttctggtcctcggacggttggg

SEQ ID NO: 59 - DNA, 285 bp, Glycine max
  unsure (1)..(285): unsure at all n locations; Clone ID: 701036959H1
agtcaacctaccaacatgaagctgaacagcaagagtttganattgtcttgcaaatcccacaatcccgggatcaaaatctcaacttgcacactacccaatttcctaattcgaattctccttctgtgtctctgttgtttcttggtccctgcatcttgttcccggaagcccccacctcttccaattttgcccctcccaacgactttccagctccaatggcaacttgacggcatggccctcttcttccacttcggcaccaacaccttcacagactcagaatggggcacc

SEQ ID NO: 60 - DNA, 286 bp, Glycine max
  Clone ID: 701036960H1
atggattacactagggatacagaagtaatctgttatcgttattccttccaccctgcccggtggaaccaaacgaagaagacgttccgttttccctctgcttttccaagttttcatcgactcaaccatgctattcttacataactagggttaggagttagggcgttcttatcgttttcgctccgttaattacaacaacggccaacatggttgttctttcgctttcacctcccagcctctctaccgctttcctcgcaaagaaactgtctccccaagaacacgcggtgaa

SEQ ID NO: 61 - DNA, 288 bp, Glycine max
  unsure (1)..(288): unsure at all n locations; Clone ID: 701036962H1
cttactctagccatattcttcgccacctttctttctccaccttccatctccattcccctcccctaacttcccttcttatcattacacnnnnnnnnnnnnnnnnnnnnnnnntacctttttcgtatacataagcattccctctcgttaatttcattagcatatcacacaaatcccactcttactcctttnccacgtacgccaccgctgatcaattcaggcgatggcgccgcgtctctggtcctgcttccgcagcagcagtagcaagggcagcaccaccggcggcggtgt

SEQ ID NO: 62 - DNA, 281 bp, Glycine max
  unsure (1)..(281): unsure at all n locations; Clone ID: 701036963H1
caccagtgtacaagccaccagtatacaaaccacccgtttataagccaccagtttacaagccaccagtgtacaagccaccagttgagaagccaccagttgaggaaggaaacggcggtgatacgcgaaccgcctcacgcgccgtccaagacctgccggcgtcgctggacgtcggtgcgtcggtggcgcaggagtcgcttgatccgtcggccaagccatcgatgacntggcagcaccgtttggaatcgacagcgcagntatctctcaggtaggatctctctagc

SEQ ID NO: 63 - DNA, 293 bp, Glycine max
  unsure (1)..(293): unsure at all n locations; Clone ID: 701036964H1
ttgggatgcgaganttctgagaagaaaagagaagatcggtgagtgaggaagcaaatagcaatagcaccgccaccgtcaccactggccactgccactagcaacagcagaatgggaaccttgggcagagttttctacgccgtcggattttggatccgcgagaccggccaagccatcgatcgcctcggctctcgtctnccaaggcaactacctctttcaagaacagctgtctaggcatcgacctctgatgaatctgttcgacaaagctccctcggttcacagggatgcatttgtgg

SEQ ID NO: 64 - DNA, 146 bp, Glycine max
  unsure (1)..(146): unsure at all n locations; Clone ID: 701036965H1
gaattgtgcctatataaacagtaccgaaacctcaaagaaagcacacatcattagaagtgntttacaaagaaattcaaaagcaaagcaagaatcatgaattccaatatttgcaattggaaacaaaatcaggttcttcccacagagga

SEQ ID NO: 65 - DNA, 271 bp, Glycine max
  unsure (1)..(271): unsure at all n locations; Clone ID: 701036966H1
gaaagaagagagagaagctgcgcaccttttcacactagtgcagattgctgaaactgggcatcnctcgccatttgcgcaaagatcccaacaacaacaccattcgaaagttgaaactgaaaaacaccaatccctcctcgtacgaggtttccttgttccgtcatcaattctcgtgtttaaggacacagtttgcttgatacgttttcaagttttcatctccatgttttgattttgaagaataaggagtatgcaattgactactacagatgtggtt

SEQ ID NO: 66 - DNA, 289 bp, Glycine max
  Clone ID: 701036967H1
tacaaaccacccgtttataagccaccagtttacaagccaccagtgtacaagccaccagttgagaagccaccagtgtacaagcctccagtgtacaagccaccagtatacaaaccaccagtttataagcctccagttgagaaacctcctatttacaagccaccagtttacaagcctcctatagagaagccaccagtgtacaagccaccagtgtacaaaccaccagtgtacaaaccaccggtgtacaagccccctgttaagaaacctcctatttacaaaccaccttacccaa

SEQ ID NO: 67 - DNA, 288 bp, Glycine max
  unsure (1)..(288): unsure at all n locations; Clone ID: 701036968H1
cttcttcgtagcatttccccacacgttttcctcgccgaacggcgatacagagctcgccgccgatcgatttggcgtcgtagcagtttcatagtgacgttngactctgaaaacggcgcgttttgagatttggcttttcgcgtgcgttgtcgaagagagagaaaccaaaaaatgaatgggattggtaacgacggaggaggaggattgancaacgtggagatggagtacataagaagacaccacaggcacgancctggtgagaatcagtgtggctctgcgctcgttaagcat

SEQ ID NO: 68 - DNA, 284 bp, Glycine max
  unsure (1)..(284): unsure at all n locations; Clone ID: 701036969H1
tcaggcattagtaagaactaaggggctcttctcattttacgagnatgggcatcaagagtgctgtagagtaagaaaggtgaggcccttgaggagagcccttaagggtctcaaagcatggattactggacagagaaaagaccagtctcctggtactaggtctgaaatccctattgtccaggttgatcccgtttttgagggactggatggtggaattggcagcctggtgaagtggaacccggttgcaaatnntaatggtctagacatatggaacttccttaggacca

SEQ ID NO: 69 - DNA, 284 bp, Glycine max
  unsure (1)..(284): unsure at all n locations; Clone ID: 701036970H1
gtgatttggagtttggagcgactgaactaatcattaatttgcactcgctgtttcagcttcatcacccttcttttgcatcatttatatctcttgagaaatggcacaagaaacctttctattcacatctgaatctgtaaacgagggtcaccccgacaagctgtgcnaccagatctctgatgcagtacttgatgcgtgccttgancaggaccctgacagcaaggttgcctgtgagacatgcaccnagaccaacaggtcatggtcttcggagagatcacaaccaaggc

SEQ ID NO: 70 - DNA, 286 bp, Glycine max
  Clone ID: 701036971H1
gcaaatcatatcagccattgggaatcgagataatgttaatcctcgtgtaaatgcctcgagctcgttgaacaagtctcaactaagaacagatggaggccatctacttggccacaatatgacttctggcagtacttcaatactaggaggaatcccaatacatggtgggatgagtactcttttgaggtcaaatctgattaccagttctggttcaaaatcttcccaagcatccacagctgatttttctggagtaggagttggaattggacctcaaaattgtgattcttcc

SEQ ID NO: 71 - DNA, 287 bp, Glycine max
  unsure (1)..(287): unsure at all n locations; Clone ID: 701036972H1
cttttctctctctagaattctcagatttgcggggcgagatgatgcancagccaggacccggcatggcacctcccaccatgggccagcagccgcagcaacagtaccagcagcagcctccgccgcagcagcaacaaccctacgtcatgatgccgccgcagcatcaggcgccgcagcctatgtgggccccatccgcccagcctccgctgccgcagcagcctgctagcgccgacgaggtccgaaccctctggatcggggatctgcagtactggatggacgagaactatctc

SEQ ID NO: 72 - DNA, 286 bp, Glycine max
  Clone ID: 701036973H1
cacatgggcgtatataatcatgtacaagggctcgtgttgtatctgtgtaattgctaggaagagccgatttggtgttttacttcagagaatcaaggattgtgaatgagaaatggtttatttgttttctactcctgaggtttgatgctcattagtcggtatttatttcgtttaggtattatattttttttaaaggatgcataaggatttgaaatgaagcatggtacccctgaatctccttccttccatcgactgggtccaagaggcacttgaatatcaagttacatac

SEQ ID NO: 73 - DNA, 281 bp, Glycine max
  Clone ID: 701036974H1
agattttgctgctctttgaagaagggtgtttgcttgattttggtgatgtcgctgctctcagatctcatcaaccttaacctctcagacactactgagaaggtgatcgcagagtacatatggatcggtggatcaggaatggacctgaggagcaaagcaaggactctcccaggaccagttagcgacccttcaaagcttcccaagtggaactatgatggttccagcacaggccaagctcctggagaagacagtgaagtgattatatacccacaagccattttcag

SEQ ID NO: 74 - DNA, 283 bp, Glycine max
  Clone ID: 701036975H1
catattttagcacgccaaaccggtctctcgagaggacaggtttcgaattggtttattaatgcaagggtgagactatggaagccaatggtggaggaaatgtacttggaggaagtgaaggaccctgaaaacaacatagcttcctcagaaggggctactgatcaagacaatgatataaacccaaataatgttgaataccctccacctccttcttcatcacgatcagaggatcagaagccatctctggttcgaattgactccgagtgtgcatcctccatcatcaaca

SEQ ID NO: 75 - DNA, 246 bp, Glycine max
  Clone ID: 701036976H1
ttgttgtttgtgtgtttgttttttctctcacctgaaaatgtcttgctgcggtggtaactgtggttgcggaagcgcctgcaagtgcggcaacggctgcggaggctgcaagatgtacccagacttgagctacaccgagtcaaccaccaccgagaccttggtcatgggagtggcaccagttaaggctcaatcgagagtgctgaaatgggtgttcccgctgagaacgatggctgcaaatgtggagctaat

SEQ ID NO: 76 - DNA, 285 bp, Glycine max
  unsure (1)..(285): unsure at all n locations; Clone ID: 701036978H1
aagaagttaaaaataaacgtatctgcattgcgttgctagttccgagttcttgcactcgttagaccaattcctcgtcttgacaacttttccacgcacaccttcatcntccaatcctccaccacaaacatgaagactcgtacctcgaccaaaatctctgcaacgtggattccaattttctctgtcttttccttcattatggtatgctcgtcacaagcaggatgtgggacccaccggaatcaaacgggttgcttactgcgcanattcagcgggaccaacaacagctac

SEQ ID NO: 77 - DNA, 142 bp, Glycine max
  Clone ID: 701036979H1
cggcggtctttcgtaagtgagagcgtggattctgaagaaaacgtgagaagtagtcttagagggagtagcagcgagagactacccgtagtgtggttcttgcacgggcaagactccttcagaggttgagaggggaacctctatc

SEQ ID NO: 78 - DNA, 290 bp, Glycine max
  unsure (1)..(290): unsure at all n locations; Clone ID: 701036980H1
ccaacntccaaaccctaaaagtctnccgcttttaattttctgttgttttctctctcaaatcggtgctccctttcggcggcgcgtganggtttccagcggcgcgngagggtgttattcgcgcgttattccaagttccccgntgacntatgctntgtccgacccacattggagagttcacgccggagagaaggcggaatctcactggacggccgtgatttggcacctccatggcttccgccgnccttgctaatcggaacgaacctaattggcaacggcatagaggcggtggg

SEQ ID NO: 79 - DNA, 286 bp, Glycine max
  unsure (1)..(286): unsure at all n locations; Clone ID: 701036982H1
aaatgcttgggcagcaaaccttggtgatgatggcttatggggaaacaatgcaccagcaatgaatagggtaaatgaatttctggcaggtgctggaacagacgccccagaagttgatgaagagaatatgatctctaggccttcagttagctatgatgatatgtgggcaaaaacacttctagaatcttctgagctagaggaagatgatgcaaagtcattgggatcatcatctccagattcaacaggatcagttgnaacttcgatatcatcccactttggaggangagct

SEQ ID NO: 80 - DNA, 289 bp, Glycine max
  Clone ID: 701036983H1
cacacaaacccgtccctcacactctccaaaccctagcggcactacacactagttctatcgctatctccccaagatgttcgagcgccgatcccgagcacagagaagaggaggaggcacccgccgttggcgacgacgaggacaccggagctcacgtcgctccaatcgtcaagcttcgaggaggttgctgtcaccaccggcgaggaggacgaagatgcaatcctggatctcaaatcgaagctttaccggttcgacaaggacgggaaccagtggaaggagcgtggcgccggca

SEQ ID NO: 81 - DNA, 253 bp, Glycine max
  Clone ID: 701036984H1
gcccagaacacctggtaccgagtcccacaggtagggagggtcctgtttttataactatggatagaaccttcttaaggctaatcaatgatataattttggaaactgacaagacaattgaagttagaggctgttccctttgacttgtgccatttcttctctcaataaacttctattgatgccccgctccacgttccattcttcagtatcctttgtagtttgaaccttcctcacactcccacttcagaaaccaatc

SEQ ID NO: 82 - DNA, 285 bp, Glycine max
  Clone ID: 701036985H1
gttgactcagcgatggcggaagaggtgactcgggtgatggtggcagtgaacgagtcgagcatgaagggataccctcatccttcgatcagcagcaaaggggctttcgaatggaccatcaacaagatcgttcgcaacaacgtctctgccttcaaccttctttttcttcacgttcaagtccccgatgaagatggttttaatgacatggatagtatctacgcatcgcctggacgattttaagaacatgaatcagagagatagaattagaggggttcatctgatggaata

SEQ ID NO: 83 - DNA, 138 bp, Glycine max
  Clone ID: 701036986H1
ggaaattaatgaaaccgtacgtgcgtgcgcgagagaggttgtcgatttttgtttcccttactgcatgggaagccaacaaggagtagaaatttctatttttgtcttgaattagattatgcttacaagatttgtatagtc

SEQ ID NO: 84 - DNA, 284 bp, Glycine max
  Clone ID: 701036987H1
cacgaagtgatcatagcgttgccattctcatcctcttctttctctctctaccattgccatggatccctacaagcaccggccatccagcgccttcaattctcccttctggactacaaattctggtgctcctatttggaacaacaactcctctttaaccgttggagctagaggtccaattctgctggaggattatcatcttgtggagaagcttgcaaattttgatagggaacgtatcccagaacgtgttgtccatgccaggggcgctagtgcaaagggtttcttga

SEQ ID NO: 85 - DNA, 287 bp, Glycine max
  unsure (1)..(287): unsure at all n locations; Clone ID: 701036988H1
aacacaccaattgcatttgcattaccattcacaatgggcaatctcctccacttccaactccctcattcccaccaaatctctaatccnccaatcccaccccctcattcccaacaccaggcccgccctccggcccaagcccggcccatccccttccatcttcgccgttcacgccgccgagcccgccaaaaaccccgtcgtcaccgacaagcccaagccccaagcccaacaacctcccccggcctcggcccgggcaacgaaatgggccgtggacagctggaagtcaaaga

SEQ ID NO: 86 - DNA, 282 bp, Glycine max
  unsure (1)..(282): unsure at all n locations; Clone ID: 701036989H1
tgctctgtgattccagaccttaatttttcncctcattcgcttcaaatttcaggaaatcaattatggctcaaccctcaacaagaataggccttgcancnctggctgttatgggccaaaatctagcactcaatattgctgagaaaggntttcccatttctgtttataaccgaaccacttccaaggttgatgagactgtagaacgagcaaaacaagaaggaaatcttccagtttatggctaccatgaccccgaagctttgttcattccattcaaaagcctaggnc

SEQ ID NO: 87 - DNA, 282 bp, Glycine max
  Clone ID: 701036990H1
ctcagtgaaagagaatccgaggcgaagagaagagaaaaattaagatggaggggaaggagcaggatgtgtcgctgggagcgaacaagttcccggagagacagccgattgggacggcggcgcagagccaagacgacggcaaggactaccaggagccggcgccggcgccactggttgacccgacggagtttacgtcatggtccttttacagagcagggatagcagagtttgtggccacttttctgtttctatacatcactgtcttaaccgtcatgggagtcgccg

SEQ ID NO: 88 - DNA, 285 bp, Glycine max
  unsure (1)..(285): unsure at all n locations; Clone ID: 701036991H1
ctaaaatttcccaattcattgngcacnttgccctaatcacgcgtcctattcttccggcgaattcgccaccgtcgccggcaataaaaccagccgctccactccctcgccggcggtggtactagcaactctccntcgccggnaactaaccaagactaaggaagtagagtgagaacccgcgaagacttcttagcttcactttcttcagntcacagtttctatcacttgccgaatccaatccaacagagtcctggaaacagtggcatcagctttcgccccatgggtgtt

SEQ ID NO: 89 - DNA, 282 bp, Glycine max
  Clone ID: 701036992H1
tagaatactcctctctcttactgagaggctaaacctaaaacccttacctttccttcccgcttctcataatgagggacagaaactgagagtgaaatgcagaaactgctacgcccttcttcttctccggtcgccatcctctctatctccgtcaccgtggctactccctttctctcgttgccccccaaagtttcaaacttggtaccaatgtcagcagcgttcacttcttcttccctcaatccccaactttcttattctcgctatttggctctctctaccaacatt

SEQ ID NO: 90 - DNA, 284 bp, Glycine max
  unsure (1)..(284): unsure at all n locations; Clone ID: 701036993H1
gtctcttgtcaccatgggattcagaagtacttaacttattagcccttatcttgccctttttactcttcgttattgtggcactgaaaataggaagaagnnatctcaagaaatctgagtcaactccaaaaatacccccaggaccatggaagctacctatcatagggaatatactccatcttgtctcatctacaccacaccgaaaattaagagacttggccaaaatatatgggacccttggatgcatctccaacttggggagctcttcataatcgttgtttctcagc

SEQ ID NO: 91 - DNA, 284 bp, Glycine max
  unsure (1)..(284): unsure at all n locations; Clone ID: 701036994H1
ctcttcctctctactaatntcagctatggccgacgaagctgtggttnttccagatcccacccagatcgatgtcaagctctttaaccgctggagcttcgacgatattgagattactgacatttctctggctgattatatcggngtggcgacatccaagcacgccacgtatgtncctcacaccgccggcaggtactcggtgaagcggttcaggaaggcgcaatgccccattgttgagaggctgaccaactctctcatgatgcacggtagaaacaatggcaaganat

SEQ ID NO: 92 - DNA, 134 bp, Glycine max
  unsure (1)..(134): unsure at all n locations; Clone ID: 701036995H1
tacaaaacgagtgtaaaattatttaagtatttgatttcttgcttacgaaaaaaggattttataattgtatctggtgaagtgaaaaattaatgtgcatgagttgattattttaaaannaaaaaaancnnancaaa

SEQ ID NO: 93 - DNA, 287 bp, Glycine max
  Clone ID: 701036996H1
cccaaacaaaccatgggacgtgggtcagatgcagagacagtggatcgactacaccaaatccctcttcctcgagggtttcctggatggtcagtttctgcaacttcagcagcttcaggatgagaacaaccctgactttgtggtcgaagttgtctctctcttctttgaagattctgaaaggcttctcaaagatctcacctttgccctagatcagaatggcgttgacttcaaaaaagttgatgctcatgtgcaccagttaaagggtagcagttcaagcataggtgcacaaa

SEQ ID NO: 94 - DNA, 141 bp, Glycine max
  unsure (1)..(141): unsure at all n locations; Clone ID: 701037002H1
ctcatgtgccgcacgcttgangcgtgcaactcttatgtcggcacgtgcgcgtacatgagtcccgaccggttcgacccggaagcatatggcgggaactataacggttttgctgcggatatttggagtttgggtttaacccta

SEQ ID NO: 95 - DNA, 140 bp, Glycine max
  unsure (1)..(140): unsure at all n locations; Clone ID: 701037004H1
gccccactcaacnaccacacctctcctcgttcacgctacccctttctgctcttcttctacctttcaagttttaaaagtataaagatggcagngacattcctatttacctccagagtcggtgaacgagggacaccctgncc

SEQ ID NO: 96 - DNA, 265 bp, Glycine max
  unsure (1)..(265): unsure at all n locations; Clone ID: 701037007H1
gcgtaccgccagcntctctacgacaatctcctttctctctaactcataactcagatgagttccctctctaataactctagtagtagccacggcaattccttcctccagatgccccccatcaagtttaccaagctcttcatcaatggagatttcgttgattccttatctggaaggacatttgagactatagaccccagaacagaagaggtaattgcaagagttagtgagggagacaaagaagatattgatattgctgttaaagcag

SEQ ID NO: 97 - DNA, 265 bp, Glycine max
  unsure (1)..(265): unsure at all n locations; Clone ID: 701037008H1
ccctccttagccgttaagttagatgangacaagagaatccattcgctacgttcctctctcgattctcttgtctccaccaaacaaatccctccctccttagccgttaagttagatgaagatttgcagagagcgagatgcatcatcgttgacggtgacgcctcttcgctcctccctggccatgcacaaggaaggatgttcaactcaaggtcaaagaggaatacaacagttacngggatagaactgccctgctattcctgctttttcc

SEQ ID NO: 98 - DNA, 218 bp, Glycine max
  unsure (1)..(218): unsure at all n locations; Clone ID: 701037009H1
ggaggttgaacnagaggnaggngcaactgacattttttggcggctttagccgccagtacctttatcttattaacgacattacctttgaatgcacggtagagnccaatttaaattattttaaatagataaatgattatattttactcaaaaaggtgatcaaattgaagtttttaaaaagangataaagaactaaaacaataatttgatcttaatttaat

SEQ ID NO: 99 - DNA, 261 bp, Glycine max
  unsure (1)..(261): unsure at all n locations; Clone ID: 701037010H1
ctccgcttctgtcctccagctctctgaatgctatgtcaggnaggnagctctactttaaatgtgaatgtttacaaaaggggtgagaagtggatattttatgaattctacaaaatttagatgctatttttcatctcttgttttttggagttattgatgtactttaaattcgatcacacttttggctaaaaaataaagaagaaaagatgataacacacttccttgtgttgtgtattctgtgcccatcagtggagctttaaattt

SEQ ID NO: 100 - DNA, 265 bp, Glycine max
  unsure (1)..(265): unsure at all n locations; Clone ID: 701037011H1
gggngcttctcttcgccagggcatccgccacgtgtcaccttcaaccaccgcgagtacgaacaactcacagactccaacgatgccgtttcaacagacttcgagcagcgttccttcttcttcggccccaccgaaaccgcctccatcgcgccctccnccccccgtgacctcgaccaacgcgccacaacgttcgaggtgctgacgtcatacgtctggcgctgccgcacgaaagcgcttcaaatccctccaaatgaagatgtgagaatga

SEQ ID NO: 101 - DNA, 158 bp, Glycine max
  unsure (1)..(158): unsure at all n locations; Clone ID: 701037012H1
gttcgtggtcgtgtgtgtatccatcaaatatatagttccaagcctcaaaattctagctatatagtacgttaagcgtccntngatgtagctttgattaatttagtgtatgtttgatacaagatatttaatttagagaattaatagttttatttnnatcg

SEQ ID NO: 102 - DNA, 265 bp, Glycine max
  unsure (1)..(265): unsure at all n locations; Clone ID: 701037013H1
cncattggttggttcctccttcctccaaagaaaanactagngtgaatctcaaaacatgtncaattgtcttctctgctgctgcaaccctttcccctncggtctcggttattattccctccacttagtttttctcacacttaccctacgaaatttcatcgaaatgggtggnatccaagtctctccaaatcgaggacgcagacccttattacaaactctttgctttctgataagtttccaacggtgggttcgctgtcaacgggacccc

SEQ ID NO: 103 - DNA, 263 bp, Glycine max
  Clone ID: 701037014H1
caatgcataggaattggttgttagcactgagaacatcactttgaattggtactctgggaatgaccgatcgaagcttgtttccaattgtttgttccgtatgggaggggctgccattctgctttcaaacaaaggctctgataggcgaagatcaaaataccagctggttgacaccgttcgcactaataagggttctgatgacaagtgctttggctgcgttgtccaagaggaagattccaatggcaagattggtgtcactttgtcaa

SEQ ID NO: 104 - DNA, 265 bp, Glycine max
  unsure (1)..(265): unsure at all n locations; Clone ID: 701037015H1
gttattctttcgatcagctatgaagtaangagangggcaaggagagatagatagggaaganaaatgagtgtatcattgactgtgatgaccttcaatctccatgatgatgagccacaagacagtcctaattcgtgggagaagagagggatatgtgcataagcgttattaccagttactcacccatcatcctctgtacccaacaaggagtganagcacaattggattttctccagcagggtttgccaggttatgatcaatttgggat

SEQ ID NO: 105 - DNA, 267 bp, Glycine max
  unsure (1)..(267): unsure at all n locations; Clone ID: 701037016H1
gtgctgtggtcgaatgggngggagacggnggngccttcggcgngtaataagcagtgtcccgggnngaatctggtggtgctgctgtgcaggttgtttctggtggaactctttttgcgttatgatacgtttgagtttgagtatacgcaggctgggtttggtcctactattaccattaagtccctcactaaggcctctaccatctgagtttggggtttattatcttccttgtggcagcgtggttttagcttaatttttaaaaaaatgtat

SEQ ID NO: 106 - DNA, 122 bp, Glycine max
  unsure (1)..(122): unsure at all n locations; Clone ID: 701037018H1
gcaangctcgtcgcgttcgtctctctctctctgagctcgatttattgggctcttcgaattcggttcccgatttccgacgagttctatcattcacttcaatcttcggaaatgcctctcagact

SEQ ID NO: 107 - DNA, 146 bp, Glycine max
  unsure (1)..(146): unsure at all n locations; Clone ID: 701037019H1
gttccgttacgctacgttcactctgtctgttgggcttttagggttagggttagggttngggttttggtttgtggatctattgttgtcgctgcgatggatcgcaagagggganggcatgaagctgccttcaatttcaatggcggcgc

SEQ ID NO: 108 - DNA, 209 bp, Glycine max
  Clone ID: 701037020H1
cttttgctttaccaaattccaatttccaattcaaaaccctaactccgttcgaagcaccaaatcgtgatggcaccaaaggcagagaagaagccagcagagaagaagcccgcggaggagaagaaatcgacggtgggagacaaggctccggcggagaagaagccaaaggccggaaagaagcttccgaaggagggaggcgccggcggagaagg

SEQ ID NO: 109 - DNA, 267 bp, Glycine max
  unsure (1)..(267): unsure at all n locations; Clone ID: 701037021H1
cacngatnaggnccgtatcgtacgcaactggatctgctcttctggcgcttgctgnaacctcgtccgaaacgttcgttttggcaaaatctgaatcattggaattttgangcgactcgattcgatgcgaggccacgattggatcaacacgctgctccccgacgagttactcattgagatcttccgccgcctggactctaagtccaaccgcgacgccagctaccctcgtctgcacgcggtggctccgcctcgagcgcctcacacgcgccg

SEQ ID NO: 110 - DNA, 264 bp, Glycine max
  unsure (1)..(264): unsure at all n locations; Clone ID: 701037022H1
gttgagatccactgctgcagaatccaatttgtgaccctaaatccaagttactatgactgctcagacccaagaggagcttcttgcgcaacacctcgaacagcaaaagatccatgatggtgaacctnnnnnnnnnnnnnnnnnnnnnnnnnnnnnnnnnnnnnnnnnnnnnnnnnnnnnnnnnnnnnnnnnngccgaaggactagaaggtgatgcatctggtaggtcgaagcagaccagaagtgaaaagaagagtcgcaaggcaat

SEQ ID NO: 111 - DNA, 263 bp, Glycine max
  Clone ID: 701037023H1
cgttcctctttccattcctttcttcctccgtcccattctcgaattggcgtgtgcctcttgctatccctcaaaggtcttttgaagcagaagaatggacttctttactagagacataaatgaggactctatgcttagatgtccattcttgaggaacatcaatgagcctactaacttctcattcttttcacctttggctttaccaatgcctgttcgtggagctaaaggtccaatttttgaagatggtcccaattttgatttggcat

SEQ ID NO: 112 - DNA, 267 bp, Glycine max
  unsure (1)..(267): unsure at all n locations; Clone ID: 701037024H1
gcttagttgagactaaactgaaggagggagatggacacaatgttctgaaacgctcttcttcctacaatgatgagaggncatttaaagaccagaaaccacaagaagacaaagaggaatcatcctcaggncattcaaaatgcattcctcgatcaattaaggcttcattgaccaagcatccccgaagtgaatccatgagatctcctgtactctgacgtaccacggaactcatcagatagaattgatggctccaggcatattcccctgtaa

SEQ ID NO: 113 - DNA, 262 bp, Glycine max
  unsure (1)..(262): unsure at all n locations; Clone ID: 701037025H1
acgcaattcacaaatcacaaatcacaaatcacaaatcacaaaggtcttttcatttctgctgattatcctcttcagccgccatggaatcggaggctgtcttgaacctcttcgattcttgctggtttgaggttaacattttgaagacaaattcaagtcctcacatatcaattacaagttataacgaaagtttagattatgagataaaagangaagaagangangaagaaccaaagctaccctgatccgaaccagccacaccaga

SEQ ID NO: 114 - DNA, 260 bp, Glycine max
  unsure (1)..(260): unsure at all n locations; Clone ID: 701037026H1
aactactganattcccaaaggcaaaaaacaaaaatacaagatgaagagcaagttcctttttgttttcctattcttgggaattcttaactgtgaagcacaatatttcaatgccaacccatacgactatttacaactagccttaaggtggcctaattcctattgcttgacacatgaaggtggttgcagggaaatagtaccacaatatttcactattagctaccttcatcccatgagaagaggaggccctgatctgcgaaatt

SEQ ID NO: 115 - DNA, 260 bp, Glycine max
  Clone ID: 701037028H1
caaaatgattccaaccctactccgcctccggaaccccttgtagcggcggaacccattactgaggatttggtccaagacaaagaagaagaggatgatagtagtaagattgttattccagtcccagagagcgagtccttgtcatgaaggaggatagcaatagggtttctgattccgagaaaaatgccattgatgagctgaagaagctcctgaaagaggaattagaggacgaggaggtttccatctggggcgtccctctcttt

SEQ ID NO: 116 - DNA, 264 bp, Glycine max
  Clone ID: 701037029H1
cgcatgcgctttctcctccatggccaaaccctgattctcccaattcaaatccaaaccctaatttcctccccgaccaatctcaaaccctcgacttcgactccctcatgcctccgcaacccgaatccccaccgcccaaccatcaccactcccccgacgcctctccaccggaatcctccccgtcgccgccgcctccgtcgatcctctacctctccttcaaccaggaccaggcctgcttcgccgccgccgccgacaacggcttccgca

SEQ ID NO: 117 - DNA, 261 bp, Glycine max
  Clone ID: 701037030H1
gggtacgaatacggtgggcccatgttctgttacgacgggtactatgcaaggcccgtatatgatagttacggtggaggcagaccctgttatgtgaaccgtggtgatcaatatttcagcgaagagaatccacaaggctgcataattatgtgacaattacgtccacggcgttgcattattgggttctgtaaatgatggtggccattcacaatttgtctcaattatcatcatgtttaatcacgtccaatccaatgtttttgttat

SEQ ID NO: 118 - DNA, 267 bp, Glycine max
  Clone ID: 701037031H1
gcaaatctgtaagctctgacggcagcttatagaggtcgttgacggcaaagagagacacaaatgtattctgtttgagtttgaaacattgattcgttgtttcctctgcaaaattaaatcctcattgtgattgttgatgaacaattgaagtgtctctccgatttgaggattccggcgacagcaagcgatgaccaccggcggcgacggtgacacctccaaacaagagctcttccaccttatcaaacgcttcggagcttgcgtcactttcaa

SEQ ID NO: 119 - DNA, 268 bp, Glycine max
  unsure (1)..(268): unsure at all n locations; Clone ID: 701037032H1
ggtttgcagtcactgctctgtttcaccaagtttgggcgtttaaatcagaaccaaatcgtgttctcttccattggcaaacatggcaactcaaatgagcaagaagagaaagtttgttgcggacggagtgttctttgccgaactgaacgaggttctgacacgtgaattggcggnggacggttactccggcgtggaagttagggttacgccgatgcgcaccgagatcatcatcagagccaccagaacccaagccgttctaggtgagaaggga

SEQ ID NO: 120 - DNA, 270 bp, Glycine max
  unsure (1)..(270): unsure at all n locations; Clone ID: 701037034H1
ccgtctcatctggntgtctctcaagatctgtctggggagtggagcttgatttgattattgatattaaggnataaaatctcattcaacacactaaacaatagggattttgcaaatgctaaattttggnaggtccagaagtcagtcaagggcagccagagctacaacaatgggaggcatggattatgcagattcaaaaaagangggcaattttgttgggaaagtatttcttgctgctgcattaacaacactgtgcataatcatgatcaagcg

SEQ ID NO: 121 - DNA, 269 bp, Glycine max
  unsure (1)..(269): unsure at all n locations; Clone ID: 701037035H1
tcagaaccatccctgatgttattggggtggtcattcaggcaaaantcgcgtttgctcggattgtcaaattcctggaggcacctgaacttcagagtgtnaatatcacacaaaggtgtctcaatnngaataagaggggttcaattttaatcaagtctgctgacttttcatgggaagataatgtatcaaagccaacactgagaaacatcnatttggnggttagaccagggcaaaaggtggctatctgtggagaggttggctcaggcaaatca

SEQ ID NO: 122 - DNA, 264 bp, Glycine max
  Clone ID: 701037036H1
tgctgtgcaggtcaaggcccttttacttgttcgtccggttgttcccatcttctctctcgtaccaatcaaatcacacttttgtgttgtgttgggaaaccctaaaccccgttttcggtgagatcgagatcgatcgaacatggatgaggagtacgatgtgatcgtgttgggcacgggtctcaaggagtgcattctcagcggtcttctctccgtcgatggcctcaaggttctgcatatggataggaagactattacggaggagaatcc

SEQ ID NO: 123 - DNA, 263 bp, Glycine max
  Clone ID: 701037037H1
atcaacatgtttctgtgcaagcaccaccaccaagacaggttttacagtattcacatatgactcagacaagtcctttgggtcacattgggcccccaagaaaccctgtacagaatttgttaactccaacaaatgcttcactttcattcctgttactttaagccaaccaacgccaataggacaacatcagacatctgtgtcttcaatgcatctacctatgtctggtatatcgtcatcaatacctaaccagtcattgacccatctag

SEQ ID NO: 124 - DNA, 260 bp, Glycine max
  unsure (1)..(260): unsure at all n locations; Clone ID: 701037038H1
gcttcagagtgatgctttgcgtgangccatttcaggaatcatggccgattccaaggagaagaatcgcaaatttgtggagaccatcgaactccaaatcgggttgaaaaactacgatccacagaaggacaagcgtttcagtggctctgtcaagctgccccacatccctcgccccaagatgaaaatttgcatgcttggtgatgctcagcatgttgaagaggcggagaagataggactggactggatggatgtggaagccctga

SEQ ID NO: 125 - DNA, 261 bp, Glycine max
  Clone ID: 701037039H1
ataactcatttgaggctctgtgagaattgagaaatggctaaagatgttgaggttcaagagcaaggaggagagtactctgccaaagactaccatgaccctcctccagcacctttgttcgacccagaggagctcacacagtggtccttctatagagccctcatcgctgagttcatagcaacccttctcttcctttatgtcactgtgctcaccattattggctacaaaaggcagactgatacaacggtaggtggcaccgactgt

SEQ ID NO: 126 - DNA, 262 bp, Glycine max
  Clone ID: 701037040H1
cttcgctttcccttccctgcactttgcactttgcactttgcactctgcacagcgcaatggcgtgtttgttgagagcgagaaacacctgttactctctgatgaggcgcattcgaatccggtgcatgagcaacgttcccgagaacacggtgtattcggggcccacctcgcagagctcaaccaagcgcgtcacgctgagccagttgcgccagaagcaccgctcctcccagcccatcaccatggtcaccgcctacgactaccccgc

SEQ ID NO: 127 - DNA, 259 bp, Glycine max
  Clone ID: 701037041H1
agtttgatgtgtatgatttggagctaagctctatgttttctaactcggaactcatgcgagtcatgagggaaacaaccaaccgctccatcatcgtcatcgaagacatagactgcaacaaagaggtgcatgctcgaccaacaacgaaacctttttcagattcagattcagacttcgaccgcaagcgtgttaaggttaagccttacaggtttactctgtcgggtctgcttaacaacatggatggtttgtggtcaagtggtgg

SEQ ID NO: 128 - DNA, 101 bp, Glycine max
  unsure (1)..(101): unsure at all n locations; Clone ID: 701037042H1
cncttggnggttataccttaacagtggatgangccaaacctagagataatcagggttctgngtggtagacgtgccggtggaaggngtggtggcggtcgatt

SEQ ID NO: 129 - DNA, 259 bp, Glycine max
  unsure (1)..(259): unsure at all n locations; Clone ID: 701037043H1
tgatgtagctcaagaaaacattgccgagtcccctccttcttccactgtgttcaacatcgatggcttagtcccatcccccaccccttcatcaaagagaaggagggcaatacagaaaagggtggtgcaaatcccaatgaaggagacaganngtgtaggctaaaaggagagagcaacaccccaccctcggattcatgggcttggagaaagtatggacagaaacccatcaagggttccccttatcccagagggtactacaggt

SEQ ID NO: 130 - DNA, 132 bp, Glycine max
  unsure (1)..(132): unsure at all n locations; Clone ID: 701037045H1
gangatcccttctcacttctatagtnctattctcttctcnngctccacctgcttcacctctnctntacccctgnctncttcttaattagcctctctcattgcgtgcaccancccaaaaaaaatatngatata

SEQ ID NO: 131 - DNA, 262 bp, Glycine max
  Clone ID: 701037046H1
ctgacagtcccagccagagcagcaccgtggagtcctccaccccggagcgtgaattcacgcgccgcgccgcccccgccgcaatggatcgctttccgttcctacccatccagcagcaaatcctcgtgacccaccccgtcgcacccatgcgcccggtttactttctcgaccgggcccacttcatgacccagcccttcccactccgattcgaaccgggtccggtccagagcgactccgactcgtcctccgtcgtcgtcgattgcca

SEQ ID NO: 132 - DNA, 265 bp, Glycine max
  unsure (1)..(265): unsure at all n locations; Clone ID: 701037047H1
cttcaacaacccttgttttgttctgtgcaagtnatcttgaaaggcacaacaatggtgaagtctataaactttctcctgcttctgtctctactagcctttgttccctcctgtcactgcaaaaagaanataggaggttacctctaccctcaattttacgacggttcatgccccagagctcaagagattgtccaatccatcgttgccaaggctgtggcaaaagaaccccgcatggctgcttcgttgctcagactacatttccatgatt

SEQ ID NO: 133 - DNA, 267 bp, Glycine max
  Clone ID: 701037048H1
caacgttaacccaatggggaacaacaacacactctcatcacagcccttaaacatgttctcagctgattactatgtacaccaaaacaggatcaaaagctccatcatgccaagtgttgcaggctcaggttttgttagcgacaacaataaccatgatgaagctatcctaagagcatttgcagccaagaacaacgagcacatacagtgcaagatggagcaattttcttctaaccactcacaagacacgggcttgagcaacgacagaaacac

SEQ ID NO: 134 - DNA, 127 bp, Glycine max
  unsure (1)..(127): unsure at all n locations; Clone ID: 701037049H1
caactaagaaaaacatatcacacaatatggcattcaagggctatttccttctnggcctcgttactcttgttcttgttaaatcttccaaagttacatgcganacngaatcagttaatacagtttcacc

SEQ ID NO: 135 - DNA, 266 bp, Glycine max
  Clone ID: 701037051H1
gaaactcaaaaccaaaataaaattattatggatcatattcataggttacgttgttttgggacaatacccaaaattccttttctattgctactttccctgcttctcttcagtttcgttaacgcatccttcgacctcgctactatacccttcaacgacggctattctccgctcttcggagctagcaacgttgttcgctccgaggatggatacggcgtacaactccgcctcgatcgctacacaggttcgggtttcatttcctccagtat

SEQ ID NO: 136 - DNA, 198 bp, Glycine max
  Clone ID: 701037052H1
gttttgcagaaaaaatccaagtaaatttaaggagccaccactgttccaatcagcccctttcattttgcagtgcccgtttattttttcgtgtttgcattcaccgttccacagaaggaaaaaaggccgctttgttccatctctttctgtggtgtgtctcaagataaaaagctcactcactcacagcagcaacaacccttt

SEQ ID NO: 137 - DNA, 263 bp, Glycine max
  unsure (1)..(263): unsure at all n locations; Clone ID: 701037053H1
cgtcgaccaaactcacgtcgtagaagtccaacccgtcggcaccgttgagagtgaattccgccaatgtcgccggangtttggccccgccaacgcactgtactttgccggancccgcagtcggcggtggcgcaagagaattttccgtcagagtcttggccgcagagggtccgtgcccatatccgacccgaccaagacttcgggatttttacaatccttgatttgccgctctcgagggtgaatccagtggtgggaagcggcggtga

SEQ ID NO: 138 - DNA, 125 bp, Glycine max
  unsure (1)..(125): unsure at all n locations; Clone ID: 701037054H1
cgcaactaaaactgcgtgtgaactttagtactataatttacaatattgggtgnattgttattcctgaaatngtanggatcagtcaaactggtttctgaaataaataaaatagcaaattagtttct

SEQ ID NO: 139 - DNA, 258 bp, Glycine max
  Clone ID: 701037055H1
tttgtattattgagttcaaggctggctagggaaggcaatctcttccgattagagatagaaggttcatcatctcatctcaaaaaggcttttgtgattgataatcagttctcgatttgatttgatcggaacagaacagaggcatgggtcaagcttttcggaagctcttcgacaccttcttcggcaataccgagatgcgggttgtgatgcttggtctagatgctgctggcaaaacaactatactgtacaagctccacattg

SEQ ID NO: 140 - DNA, 257 bp, Glycine max
  unsure (1)..(257): unsure at all n locations; Clone ID: 701037057H1
ganaatggcgggtggtggaaaggtttcgttcaaagtcacactcacctccgatccaaaattacccttcaaagtgtttagcgttccagangctgcgccttttactgccgttctcaaattcgccgccgaagaattcaaagtcccgccccagaccagcgctatcatcaccaatgatggtgttggcataaatccccagcagagcgcaggcaatgtcttccttaaacatggttcagaattgcgcctgattccgcgcgataggg

SEQ ID NO: 141 - DNA, 258 bp, Glycine max
  unsure (1)..(258): unsure at all n locations; Clone ID: 701037058H1
cttcttcttctttctattcctcactcaagggttagggatgcgtcngaacagccctgcatactacagtccctccgcggcgaggatacggcnnnnnnnnnnnnnnnnnnnnnnnnnnnnnnnnnnnnnnnnngtccggcaggagggggttcggtggaggcaggcgcagggacagcaatgggagcctcttggttcgtaacattcccctcgattgcagacccgaggagcttcgcgttccctttcgagcgatttggacctgtt

SEQ ID NO: 142 - DNA, 85 bp, Glycine max
  unsure (1)..(85): unsure at all n locations; Clone ID: 701037059H1
gnaaaagangaacctgtgangaaggagcccgaggactaagttagcaacaaggcangaaatgcccaagctnctttcgaagtgggca

SEQ ID NO: 143 - DNA, 256 bp, Glycine max
  Clone ID: 701037060H1
caccacacaccacacacatagtagctattatactctctagagtaattgcggaatctgctagaattttctaataatggcgaaagacgttgagcaggtcacagagcaaggtgaatactccgcgaaggactaccatgaccctcctccggcaccgttgatcgacccagatgagctcacaaagtggtccttgtacagagccgccatagctgagttcatagcaacactcctttttctttacatcaccgtgttgaccattatt

SEQ ID NO: 144 - DNA, 257 bp, Glycine max
  unsure (1)..(257): unsure at all n locations; Clone ID: 701037061H1
ggnanggtggaacattcgctctttattcgctgctctgtaggcatgccaagtttaatttgctccccaatcaacaagcagctgatgaggagttatcatcctataaatatggtccctcttcacaggctatagcctcttctctctaaagangtttctggngaaanataaaaggttaagaacagccctgcttgttgtggtattgtttggtgcttgcatggtcattggtgatggtgtgcttactccagcaatttcggttctag

SEQ ID NO: 145 - DNA, 262 bp, Glycine max
  unsure (1)..(262): unsure at all n locations; Clone ID: 701037063H1
accaaaaccaatcggatcgtttcctctgcggngtcagaaatccatggatccctacaagaatcggccatcaagcgccttcaattctcccttctggactactaattccggtgctcccatctggaacaacaactcatcgctgatgttggatctagaggtacggtatggtattcaatattattttctctcttcatgatcacattttttcatccagatgactctaacccaagactttacttaacanattaagtcaggaccactcgga

SEQ ID NO: 146 - DNA, 263 bp, Glycine max
  unsure (1)..(263): unsure at all n locations; Clone ID: 701037064H1
tcggttctaaatcttcagtgtctgctatctaactgtccagcgcaaaactgctcctngatgctacctcaactttgcgtattacttttgtttagggtgtagttttagtgtgtactagttgagtgcaatgctgtgggctatgaatgatgctttttcgcacccaataatggtataaatagccctacgagangtgattgtcacatctattttgtattgttgtcttcaataaatttggacttctaaaaatcctaatngccggtgcaaat

SEQ ID NO: 147 - DNA, 135 bp, Glycine max
  unsure (1)..(135): unsure at all n locations; Clone ID: 701037065H1
caacggttgctctgctctacgtaaaggacaagcaagtngaagcacgggccttggatgacgccacgcaaccctcgtgcttctttcagcttttcggtgctctgaaagagctcaagagaccgatactggatgctgatg

SEQ ID NO: 148 - DNA, 266 bp, Glycine max
  Clone ID: 701037066H1
cctgccattattgtaagtaagaattgggaaaggaaggaaggagatgaatctccctatcatagatctgtcctcacctgatcctctttccactgccatttccatccgtcaggcgtgcattgagtatggtttcttttaccttgtgaaccatggcgtggagaatgacttggtcaaagcctttgatgagagtaagaggttcttctcacttccaccaggagagaaaatgaagttggcccgcaaggaatttagaggttatactcctcaggatc

SEQ ID NO: 149 - DNA, 132 bp, Glycine max
  Clone ID: 701037067H1
gagtctaggtgccctccttataccaagaaacgtttgattccagattccactgtcatttctacccgccatgcctctttgagatcagcaaagaagcttattgaaactagaggaacatctgttgatgtagctcaa

SEQ ID NO: 150 - DNA, 95 bp, Glycine max
  unsure (1)..(95): unsure at all n locations; Clone ID: 701037068H1
cttggccaagtgaataaaaaatgtgtcaaatatgtcctatttcttnttcccttttaccatttcaagttggcttagagatatgtgttttttttttt

SEQ ID NO: 151 - DNA, 226 bp, Glycine max
  Clone ID: 701037069H1
aaaagagaccagtgtgcagtgagaaagaggttggtcacttcttgtgtggctttgttttgttctttgtgttggaatttgttgatgggtgaagagggagaagaggtgtcaagagataaggaacagcaacacatgggagtttatggaaatgagtggttgtttagtagtttctgtgcaaattggcgccgtttaagacaccagaattcctgttctatgcctcctttgagtg

SEQ ID NO: 152 - DNA, 258 bp, Glycine max
  unsure (1)..(258): unsure at all n locations; Clone ID: 701037070H1
cagaatcaaggttaggtattgtgacggttcatcatttactggtgatgtggaagcagtgaatccagtgactaagttgcacttcagaggaggtaggattttcaatgctgtcatggaggatttactagcaaaaggnatgaaaaatgctcgaaatgctattatctcgggatgttcagctggaggattaacatcagtactgcattgtgatcgatttcgagctctattacctaggggagctagagtganatgcctctcagatgc

SEQ ID NO: 153 - DNA, 257 bp, Glycine max
  Clone ID: 701037071H1
gggtattttcacatttgaggatgaaaccacctcccctgtggctcctgctaccctttacaaagctctagttacagatgccgacaacgtcatcccaaaggctgtcgaagccttcaggagtgttgaaaaccttgaggggaacggtggccctggaaccatcaagaagatcactttcgttgaggatggagaaagcaagtttgtgttgcacaaaatagaatcagttgatgaggcaaacttgggatatagctatagcgtagttg

SEQ ID NO: 154 - DNA, 257 bp, Glycine max
  unsure (1)..(257): unsure at all n locations; Clone ID: 701037072H1
gtgacaaacacaaacacaatcaatggcgaactncacagcggcacccccgcggtcgcaccgaagcccgcgtgggtcctcccgtaccgaaccgagaatctgcgcgaggtctacactctgtcccgaaaactagggcagggtcaattcggaaccacgttcctctgcacgcacaagggcacggggcgcacctacgcctgcnagtcaatcccgaagcggaagtgctctgcnaggaggactacgacgacgtgtggagggagatt

SEQ ID NO: 155 - DNA, 211 bp, Glycine max
  unsure (1)..(211): unsure at all n locations; Clone ID: 701037073H1
gctaaggagactgggttgangagacaaattcttgttgggttttgatgccgggagatgtgtaactcatttgtgatatctctctgtattttgtaatattagcattttcttcccgattttgtacttccaagtgattcttgcaccttaaaaacaaacgattaactactgtaaattatattaaatgctggtgctgatgaacacgattggttatacc

SEQ ID NO: 156 - DNA, 256 bp, Glycine max
  Clone ID: 701037074H1
gttgaatttggaagcaggtttcgaattggtttattaacgcgagggtgaggctatggaagccgatggtggaggaaatgtatctggaagaagagaaggagcaagaaaacgacgtagcatcatcggatattaatgttcccgaagaggatgagaagccaacgcaggaggctccactccttcgaattgactcagagtgcatgtcgtctatcgtcaacgacgtcacaaagagcggcaaaaccattccaaaacgacaatcaaa

SEQ ID NO: 157 - DNA, 256 bp, Glycine max
  unsure (1)..(256): unsure at all n locations; Clone ID: 701037075H1
ggtttgtaagagaaagaaaaaagaggcgcaagatgagtggtagggtttctgggaaggtgaagtggttcaacgatcagaaggggtttggatncataacccctgacgatggcagcgaggaactcttcgttcaccaatctcagatcnggtctgacggtttccgaagcctagctgaaggagagtccgttgagttcgctattgaatctgaatctgacggacgcgccaaggctgttgatgtcactggccccgacggcgccag

SEQ ID NO: 158 - DNA, 254 bp, Glycine max
  unsure (1)..(254): unsure at all n locations; Clone ID: 701037076H1
ggcacccttgccaattgggttcgctgtgttcttggttcacttggcaaccatccccatcaccggaactggtntcaaccctgctcgtagtcttggtgctgctatcatcttcaacaaggaccttggttgggatgaacatggatcttctgggtgggaccattcatcggtgcagctcttgcagcactctaccaccaggtcgtaatcagggccattcccttcaagtccaagtgattcaatcaaacggttcatgcttaatc

SEQ ID NO: 159 - DNA, 254 bp, Glycine max
  unsure (1)..(254): unsure at all n locations; Clone ID: 701037077H1
gctagatctccgctccggcggccacctcacccacggctactacacctccggcggaaagaagatctccgccacctccatttacttcgagagtctcccttacaaggtaaactccaccaccggctacatcgactacgacgcttggaagaaaaagccctagngttcaggccaaaactcataatctgcggtggcagcgcgtaccctcgcgattgggactacaaacgtttcagggaagtcgctgataagtgcggagattg

SEQ ID NO: 160 - DNA, 258 bp, Glycine max
  unsure (1)..(258): unsure at all n locations; Clone ID: 701037078H1
ctttgttttgacggtggcaattcatattttctttttgggatattncaataatatatttgatctgtgactagctagtgagtttacttttgaaattaaccggctaatgattcttgggttggttgatgagtataaattggtcaacacaaaagttgcattcaacatcggcaatttattttcatgacaagcattccgactttgcctattatacaagcaagtaacaataaaagctttttccctctattaggtcactatatgagg

SEQ ID NO: 161 - DNA, 260 bp, Glycine max
  unsure (1)..(260): unsure at all n locations; Clone ID: 701037079H1
gagagatcgacgacagggattcgaaagangggaagcggagtgagacaatggctggtactggacggcaaaggagagacggaggtggtggaggccgggaagcacgccatcatgaggcggacgggactccccgcgcgagaccgcgtatattggaccctctcttgtcctacccctccacccttcttggccgtgagagggccatcgttatcaacttggagcacatcaaggccatcatcaccgcccaagagctcctcctcctcaac

SEQ ID NO: 162 - DNA, 267 bp, Glycine max
  unsure (1)..(267): unsure at all n locations; Clone ID: 701037082H1
gccttgctgagttctgagggaagaacctctcaaggctcactgttcctggaggaccaagtgttgcatgtagcacagcaaaagctgttgagtgggatgctgcttggtctaacaaccttgncccatcaggtagagcagcacttggagtgcatgcatcagcttatggaaaccaggtcaaagctgtagaaccagagaagatcatacccaagatggaagtttctccactcaggagttgccatatnnngcttgtatgagccatagcaagggact

SEQ ID NO: 163 - DNA, 260 bp, Glycine max
  unsure (1)..(260): unsure at all n locations; Clone ID: 701037083H1
ttcctttgtttctatggcttctgcagaagtagagttccgatgctttgttggtgggcttgcttgggccaccgaccacgatgctctcgagnaagccttctctcaatttggcgaaatcgtcgaatcgaaggtccgttagtcgcagggattggatcggatttggattctctcatcccttctgatctgttttgcgttacttgatctatgatacttgtnttgcttgatctataatgattcttttattactcacaccaatcggtagt

SEQ ID NO: 164 - DNA, 259 bp, Glycine max
  unsure (1)..(259): unsure at all n locations; Clone ID: 701037084H1
ctttctcatcacacttttaagatatttttgttacatagtttatggnctacgagagccctgcctctgtagagtgtagaccaacctccttttctttgctttgagctcgctcgatcttcttccatttcatgtcttgttttattttattttatttatttaagccttttaaatgcccaacattttgttcttgntgtttgagattgatgtattcaattctgagtgaaatcttcttttccgggtgtatgatcaattccactgcgaa

SEQ ID NO: 165 - DNA, 259 bp, Glycine max
  Clone ID: 701037085H1
cataaccatgtcagacgaggagcaccacttcgagtcaaaggctgatgctggagcatcaaagacatttccccagcaagctggaaccatccgcaaaaacggttacattgtcatcaagaacaggccatgcaaggttgtggaggtttcaacttccaaaactggcaagcatggacacgcaaagtgtcactttgttgcaattgacatcttcactgggaaaaagcttgaggatattgtcccatcttcccataactgtgatgttccc

SEQ ID NO: 166 - DNA, 257 bp, Glycine max
  Clone ID: 701037086H1
tctgagatgacagttgcaactggtgagctgaagaagcattatctatcgagaacgagtacccgtacagtgtctgtgaacctgcaaggaagcaaggtttctctatatggtgctgatgcaagcttaactggcttggtggacaatggaaaaataccaatgactcttgtctttgaagttggatcgctagggaatattgttgggaggttggtgaggtccaaacatcgaaggcgtgtctcttggctcagtggctattgattccc

SEQ ID NO: 167 - DNA, 204 bp, Glycine max
  unsure (1)..(204): unsure at all n locations; Clone ID: 701037087H1
tagtgcctccttgccagaagttaaaatggcccaagaaactttcctattcacatctgaatcagtgaacgaggggcaccctgacaagctctgtgaccagatctccgatgctgtgctcgatgcatgcttggagcaggaccctgacagcaaggttgcctgtgaaacctgcaccaagaccaacatggtgatggttttcggngagatcac

SEQ ID NO: 168 - DNA, 258 bp, Glycine max
  unsure (1)..(258): unsure at all n locations; Clone ID: 701037088H1
gttcctctcgcccagantccgagatcaaccccgacgaaggcaaggggtttttctcggcttcttcagatttctgaaatggcgcctgtttcagctttagccaagtacaagctcgtcttcctgggtgaccaatccgtgggaaanaccagcatcatcactcgcttcatgtatgataaattcgataacacctatcaggctacaattggtattgattttctatcaaaaactatgtatcttgaagatcgaactgttcgactgcag

SEQ ID NO: 169 - DNA, 254 bp, Glycine max
  unsure (1)..(254): unsure at all n locations; Clone ID: 701037089H1
ctactacttctacttctctcaggaaacatgggtatgcaattaagcnaggctcgcttgcaacgccatgagatgaattattattctccgaaaacgttgttcgtttttggggactcgtatgttgataccgggaactatagaataaatcaagctggttcgtcgtggaaaaacccttatggcgaaacttttcccggaaaaccagccggaagattctccgatggaaganttctaaccgactacattgctaagtntncnnc

SEQ ID NO: 170 - DNA, 240 bp, Glycine max
  unsure (1)..(240): unsure at all n locations; Clone ID: 701037090H1
ctcccacggtaaagctaaactacgagagaatcataagatttaagccaacatacaattagaaacaaacacagaaaagaaatgacttatttctagctcctagttatttgttttttttttcatttttttaagaactaagaaaactagtcctatagaggncatgtaattatgttcaagatacttatgttgaatgtggccaactcttggatgaccacgtggaataatacttttatttattttttt

SEQ ID NO: 171 - DNA, 253 bp, Glycine max
  unsure (1)..(253): unsure at all n locations; Clone ID: 701037091H1
caaaacccagatgcactccaacatgttctgaggaaagctgaggagtatctgggcacagtgcctcctgaantccctactcagaatttgaggacaagttccaggagattggtttggngagagggcggggtgncaacgcagagcgtnctcttgagtcaattcaacttctcttggatcttcttgaggcccctgacccttgcacccttgagactttccttggaagaattcctatggtcttcaatgttgtcattctttc

SEQ ID NO: 172 - DNA, 254 bp, Glycine max
  unsure (1)..(254): unsure at all n locations; Clone ID: 701037092H1
ttgaatcgcgacgaagatgaagaccgaatcgcgttcgaaagaggaaacaaagacgtatcaggaatggnttaatttggcagattcagatggagatggtcgaatctctgggaacgacgccacaaagttcttcgctctctccaacttgtcgcgctcgcaactgaagcaactctgggctctcgccgatgtcaaaaggcaagggtttttgggcttcacagagtttgttactgcaatgcagttggtttcgctagcacaag

SEQ ID NO: 173 - DNA, 256 bp, Glycine max
  unsure (1)..(256): unsure at all n locations; Clone ID: 701037093H1
ctgaattctcttgttgcagagtaacacatggctctgttattcaaggatccgtcgaanatttcagcgtatcgagatagaaggttccccggaacgcaagaggagtttgagcacgcgcttgtgacctcaaccaccgtttacgtggggaacatgtctttttacacgacggaggagcaagtttacgagctcttctcgcgtactggggaaataaaaaagatcatcatgggcttggacaagaacaccaaaacgccctgcggct

SEQ ID NO: 174 - DNA, 259 bp, Glycine max
  unsure (1)..(259): unsure at all n locations; Clone ID: 701037094H1
gttgcggactgagtggtgtgtcgcgttgttgacattagaatttgatcgatttggggttggggcggaagaaagtggaaacgacgccgttggaaggtgggaagaagatgagttcgcagcaaatgcaaatgcaaattcaaatccaaaacagtggtggtggcagtggnnnnnnnnnnnnnnnnnnnnnnccagtgagcgaggttttctggactctcgtcgacaaagccgacaaaaaattctccaaaatcagagaccttccctt

SEQ ID NO: 175 - DNA, 259 bp, Glycine max
  unsure (1)..(259): unsure at all n locations; Clone ID: 701037095H1
actagtaatattattcttcgaatccattttattattcataatgggtattttcacatttgaggatgaaaccacctcccctgtggctcctgctaccctttacaaagctctagttacagatgccgacaacgtcatcccaaaggctgtcgaagccttcaggagtgttgaaaaccttgaggggnacggtggccctggaaccatcaagaagatcactttcgttgaggatggngaaagcaagtttgtgttgcacaaaatagaatca

SEQ ID NO: 176 - DNA, 288 bp, Glycine max
  Clone ID: 701037101H1
ccaatacggaacccaaaattagctcgattaaatccaaatctgagagaagcattgattggtacggtaatggcggaagggaaggaagagagtaaatctagcgaggaaagtgtgaagctgttcgtagggcaagtgccgaagcacatgaccgaacccgaactgcttgcaatgttcaaggagttcgcgctcgtcgacgaatcaacataatcaaagacaaagcgactcgtgcttcccgaggttgttgcttcgtatttgtccgtcaaggaggaggcggataaggccgtcatgcgt

SEQ ID NO: 177 - DNA, 287 bp, Glycine max
  unsure (1)..(287): unsure at all n locations; Clone ID: 701037102H1
ggattttctaaggcctttgcaatgactggttggcggcttggatatattgctggtccaaaacattttgtngcagcatgtggaaagatccaaagtcagtttacttcaggggccagtagtatagctcagaaagctgcagttgctgcattaggactaggccatgctggtggggnggcagtttctaccatggtgaaagcatttagggagcgaagggatttcttagtacaaagttttagagaaatagatggcatcaagatatctgaaccccagggagcattttatctattcct

SEQ ID NO: 178 - DNA, 282 bp, Glycine max
  Clone ID: 701037103H1
ctttttgaaataaatgaggcatttgcctcccagttcgtgtattgccgtaacaagctagggcttgatccagaaaagatcaatgttaatggaggtgcaatggcaattgggcatcctctgggttcaacaggtgctcgatgtgttgcaactctgttgcatgaaatgaagaaacgtggcagggactgtcgatttggagttatatctatgtgcataggtactggaatgggggcagctgctgtttttgagagtggtgattgtgctgatgagctatgcaatgcccggaaa

SEQ ID NO: 179 - DNA, 280 bp, Glycine max
  Clone ID: 701037104H1
atttgtgctccaacacaaaaaaatgaaacctacaatcaccattctcttgttgtctctactacttctcataacttcaccctccttggcaacccgacccgcatccaaccctgatcaagtcaagcacaacaaaaacaacaaccaaggtggtggtgctggtgctggtgctggcgggttctttggccctggaggagggttcagcatacccggttttggaaacgggtttggaaatggcatcataggaggaggatacggatccgggtatggaggtccgaatggaggc

SEQ ID NO: 180 - DNA, 277 bp, Glycine max
  Clone ID: 701037105H1
tccaccggagttttcaccgataaggacaaggccgccgcacatttgaagggtggtgcgaagaaggttattatttctgcccccagtaaggatgcccccatgtttgttgttggtgttaacgagcacgagtacaagccagagcttgatattatttccaatgctagctgcacaaccaactgcctgctccacttgctaaggttattaatgacaggtttggcattgttgagggtttgatgaccactgttcatccatcactgccacccagaagactgttgatggg

SEQ ID NO: 181 - DNA, 279 bp, Glycine max
  unsure (1)..(279): unsure at all n locations; Clone ID: 701037106H1
aaganaagagctttaagggtgattgctgagcatttgacagtagaagaagctgctgggctaaaagagggattccagcttatggatacaaacaacagaggcaagattaacattgatgaattacgagtagggttgcataaacttggtcatcaagttcccgaatcagatgtccaagctcttatggaagctggtgatgtagatggggatgggcacctagattatggagagtttgtagccatttctgttcatctgagaaagatgggaaatgatgagcatcttcgc

SEQ ID NO: 182 - DNA, 277 bp, Glycine max
  unsure (1)..(277): unsure at all n locations; Clone ID: 701037107H1
cttaattgtggagacacaacatcatggattctcctttgttgtcncaagaccatgttttgcccaacaaacacacatggaagatgagcctttgtgctatcgtggctatcacaattgttggactagtagtcagaggcaacactagctatggaatactgtccggagcagaaaaatataatgatggaatcgcaaccaatcagggagatattgttgaatcagatgtgggagttgttgcaaccgatgatgctcggtgttctgcaattggtgtttcaatgctagg

SEQ ID NO: 183 - DNA, 277 bp, Glycine max
  unsure (1)..(277): unsure at all n locations; Clone ID: 701037108H1
aaaacttgggagggttttataggggcatctgttaccaccatcatctctgcatttatgcttgctaacatcatgggtcgctctcagtggctaacgtgtccaaggaaggatttgtcaactggttggcttcactgtgatcctggtccactgtttaagccagaatcttatcccttacctggatgtatttctcactggttntcttggaaagagatatcaatcctaccaattcaatggcattctttatgtctaggcttgtttgcttcaattattgcaccttttg

SEQ ID NO: 184 - DNA, 282 bp, Glycine max
  unsure (1)..(282): unsure at all n locations; Clone ID: 701037109H1
gatatccatctttgcttatttttttctctcccaacatttccagagaatgaaatcaaaatatattaaagagtagcttatatatttgttnactttttcttttttttggagaaaatatatatatatatttgttnacttattagtaagtcaatgtcaaacatgagacacccctcggttgtatgaaatgaaggagatgttacaagacccaaaaggttgattcaatagctcnttactggaaataatcatatggtaaataatatatntttgttctactgactccctaaa

SEQ ID NO: 185 - DNA, 280 bp, Glycine max
  unsure (1)..(280): unsure at all n locations; Clone ID: 701037110H1
gctcgctcttctcactcgtcatcttcgaattcgtctgcgccctaacaaaattcatttcaattccaacttcctctgatcaaaatcctaggctcgttcttgaatccctaattcgatnnnnnnnnnnnnnnnngaagaataaaaggaggatcgatgtgggcagcatcttgcctggcgtcgtgctgcgcggcctgcgcatgcgacgcctgcaggaccgtcgtttcgggaatcagccgtcgttccgcccggatcgcctactgcggcctcttcgccttctcccttg

SEQ ID NO: 186 - DNA, 277 bp, Glycine max
  Clone ID: 701037111H1
tgcagagtatgggttggatgctccaacattaaatgcaactggtccttatggcaccctactgaaaggggatgttctatctgcaattaagtcaggaaaattgtctccaaaacctgcttcatctaaagaaaaggcattgtcatctcaaagtcatcaacaagttgcagcttcccaagagtcaaaatctgacttaaaaaagtcagatgcttatgaagattttcctaatagtcaaattcgcaaggtgatcgccaagagattattggactcaaaacaaaataca

SEQ ID NO: 187 - DNA, 277 bp, Glycine max
  Clone ID: 701037112H1
gccaaaatatgtctcccaaatacatgtcccttttcctcctagtaatactagggatggcttttctggccactacttcccttgctgatcgtcgttttctttcggtggaagatggtcatgatcaccatcaccaccacccaccaaaaaaacactggcctccaaccacacaaaatgaaccttcaaacgtagaaaacaaggagaacactgaggtggaggatggtcatgatcatcaccatcactacccacctaaaaaacactggcctcctaccacacaaaatga

SEQ ID NO: 188 - DNA, 256 bp, Glycine max
  unsure (1)..(256): unsure at all n locations; Clone ID: 701037113H1
aacagagcaaagagagagtgtgcgaaaagtgaaacaaaacaacagancaacaatggcgacacttaaggttcctcagcctcttccccccgttgcagatgattgtgagcagctccgaaaagccttctcaggttggggaactaacgaggagctgattgtatcgatcttggctcataggaatgctgctcagaggaagcttatcagagaaacttatgcccagacctatggagaagatctcctcaaggccttggacaaagaa

SEQ ID NO: 189 - DNA, 275 bp, Glycine max
  unsure (1)..(275): unsure at all n locations; Clone ID: 701037114H1
gctgaatggaggtgttgcagttgctggcttccgattttnccctccgccattccctttccaagcccaccgtctcccttcctcccactcactcactctccgtcgtcgtgttccggcggcggagatcaccctgcggcgggcggtggtgggctccgcgagcatgcgcggtggaggtgtcggagtcggagggagngaagatggtgatggagctggtgggagccttcaacgagttgacggagagaatgaacgtgctgtcgacgactcttcgcgtcttctnt

SEQ ID NO: 190 - DNA, 274 bp, Glycine max
  Clone ID: 701037115H1
ttctatatagctaaagaaagtgatactattaagcataattaatataatggggtacatgtgcattaagatttcgttttgtgtgatgtgtgtgttggggttggtgatcgtgggtgatgttgcctacgctcaagattcagcagaagactacgtgaatgcacacaatgcagcacgagcagaggtgggttctcaatcaccaagacaaacagtgattgttccaagtttggctgggatgatacggttgctgctatgcagagagctatgctaatcaacgcaa

SEQ ID NO: 191 - DNA, 281 bp, Glycine max
  Clone ID: 701037116H1
cattttccctcactttctcgctccccaaacgcccctctctctcctccaatggccgaccagctcaccgacgaccagatcgccgagttcaaggaggccttcagcctcttcgacaaggacggcgatggttgcattactaccaaggaacttgggactgttatgaggtcacttggtcaaaacccaactgaggcagaactgcaggatatgataaacgaggttgatgctgatggcaacggaaccatcgatttcccagagttcctcaacctgatggctcgcaagatgaa

SEQ ID NO: 192 - DNA, 287 bp, Glycine max
  unsure (1)..(287): unsure at all n locations; Clone ID: 701037117H1
ggtttttgttagtgcagaaacagagaaagatggatgaggagaatggttacagtgggagtatcagcttctaacttggagactacaaaagcagagagatctgtgtggctgatgaagtgccctttggtggtggctaagtcatgggngacccatcctcntctcaacctctcgccaaggttgtgctctcccctgatcctctccaccctgaagaagacgatccctctgctgtccagtttacaatggagatggcaggcacagaagctgtgaatatgtccaaaacttattcattg

SEQ ID NO: 193 - DNA, 282 bp, Glycine max
  Clone ID: 701037118H1
caccgcctccactaatggctatgagatcgtgggtgagtcgaggatccgtgactcgtttgatggactcagcaaatcgaggggctttcagtcgcttcttcagcgacaagggtcgcgttctcagcgaggaggaacaggccaaagaaaacgtctacatccagaaatgggagagggagaggttggagaaacagaagcaacaggctgagaagaccaaggcagacaagggcaaagatgctgctgctgataagaaacctgaaggttctcaaaagggctgatttatccttc

SEQ ID NO: 194 - DNA, 280 bp, Glycine max
  unsure (1)..(280): unsure at all n locations; Clone ID: 701037119H1
atggacagggcttgtcattcttcctttctctgctggttgcatctctgaggccagtgttgctgttggtgttccacatccangaagatcaaaaccagacaccaatgcatcacctcctacaataaaacggtctaaaagcgtcgaggattcagagattttgtctggtgaaagcatgaagaactcgttgaggctgctagacgttgttccaaagtctaacctatcctacggcttcaatagactggtcaagggtttcaagaatttttctcaattgtttgtggaaaaa

SEQ ID NO: 195 - DNA, 277 bp, Glycine max
  unsure (1)..(277): unsure at all n locations; Clone ID: 701037120H1
cttgagctttgtcgcaggatcatccgttgatgaacttggtgacantcactgctgagctcaagctatctattttccagcttggaatcagtcctcagataatagcatccattattatgcaggtactctgtcatgttgtcccttctttagtaaagctacggaaagaaggtctggatgggcatgaganaattaagagttatatatggtggatgtcattggctttgcaattctggaagctttaatagttgctgctactcacttccatattcaatttatgctg

SEQ ID NO: 196 - DNA, 267 bp, Glycine max
  Clone ID: 701037121H1
gtgacagagagacaaaagaaaagatgtcagggcctcaatgctgttcaaatccaccaagcttgaaccccggtggaggagttgggcatgtggacaaagtgggtggtgttgattcctatttcactggatctcctcactccaaactcgctgttcttatgctctccgatgtttttggatatgaagcgccaaatttaaggaagcttgctgacaaagttggggctgctgggtattatgtagttgttcctgacctcttggatggcgaacccttaa

SEQ ID NO: 197 - DNA, 260 bp, Glycine max
  unsure (1)..(260): unsure at all n locations; Clone ID: 701037122H1
aacacggagtgatggctgtgcagctgtgggaaaccctgaaggaagccatcgtagcctacactggcttctctccttccaccttcttcacggtgctggcgcttctttttgccgtttactacgtcgtcacgggtctctttggctcctccgacgatcaccatcaccgccaccgccacgtcnnnnnnnnnnnnnnnatgccgcctctgcgccccccggttcagctcggcgagatcacagcggaggagctcaaggctacgacggca

SEQ ID NO: 198 - DNA, 275 bp, Glycine max
  unsure (1)..(275): unsure at all n locations; Clone ID: 701037123H1
tccatttgactcttgttctgaacgacttttcaagagaatcaaaccatggcagtgaaagtatacggtccccactgtgcttccaccaagcgggtgctgnnttgtctggttgagaaggaagtcgaatttgaggttgtccctgttgatgtcactaagggggagcagaaggatcctgagtacctcaaactacagccatttggagttgttcctgtcatcaaagatggagattataccttatatgaatctcgtgctataatgaggtattatgcagaaaaata

SEQ ID NO: 199 - DNA, 276 bp, Glycine max
  Clone ID: 701037124H1
caagaatggcaatgcgtgtgtctccttcagcttcaagtgcactctctctcctaaactgcaagcaaccacctccagtttcatgcatccgtgtaccttgtctctctcgctcctcgccgccatcgctctcctacaccttcaatcctcttaggtccttcatcggtcacggcggaagcagaagcccagggtttcgtgtccattgctacgctcctgctcctctcactcctcccaatctgcaatggatctctaccattcctcagtggttttgatactggcgag

SEQ ID NO: 200 - DNA, 255 bp, Glycine max
  unsure (1)..(255): unsure at all n locations; Clone ID: 701037125H1
agagaaggttgntgagattcgtgacncttcttgggaaagtacgagggtgatccattgagaacngttggtgtaggagctggtgcttggggtagtgtgtttattgctatgctgcaggaggcttatggtagtttaagagaaaaagttctgataaggatatggagaaggccgggaagaatggttgacagggccacggctgagcacttgttcgaggtgatcaatcaagggaggatgtatgaggagantattaggaggtgt

SEQ ID NO: 201 - DNA, 274 bp, Glycine max
  Clone ID: 701037126H1
ttcaagaagcatctgagtgtttactattttgtactatatttatatatagtcactcaagcttctaggatttctgcctgctgcatcaaaatgggaagcaacttgaggtttttgagtctttgcctcttggcattgattgcatcaactcatgctcaacttcagcttggtttttatgctaacagttgcccaaaagcagagcaaattgttttgaaatttgttcatgaccatatccacaatgctccatcactagcagctgcattaataagaatgcactttc

SEQ ID NO: 202 - DNA, 273 bp, Glycine max
  unsure (1)..(273): unsure at all n locations; Clone ID: 701037127H1
ccggtaaccgtgtgtttggtgcccttaagggagctctggatggggggttggatattcctcacagtgataagaggtttgctgggtttgataaggaaaagaaggagcttgatgctgaggttcatcgcaaatatgtttttggtggacatgttnctgcctatatgaagatcttggctgaagatgaaccagagaaataccagttcacacttcagtgaatacatcaagcgtgggatagaagctgatggtatgaggcactgtataagaaggttcatgccg

SEQ ID NO: 203 - DNA, 273 bp, Glycine max
  Clone ID: 701037128H1
gcgatgccggaggaagaagtagtggagctcaagttccgtctctacgatggatccgacatcggtcccttccgttactcccctgcctccaccatcgccatgctcaaggaccgcatttttgcagactggcccaaagacaagaagattataccaaaagcagcaaatgatataaaactgataagtgctggcaaaattttggagaaccacaagacagttggccagtgtagagtaccttttggcgagcttcccaaagggttataaccatgcatgttgtgg

SEQ ID NO: 204 - DNA, 272 bp, Glycine max
  Clone ID: 701037129H1
cttcacattctccattccacaacatcaaggttctgatcatgtcggggaagaggccccggccaatgatcggaaagttgtcggagttgttggtctcgagaggccgcacggtggcacttttggacaccactggaagcccaagaggcccattagacatgaagatgatgcaatcaccaagaggcttaaaaaattatgatcttggtggcgttggtcttggaattgtggtggctcttgataaatccaataacgaggttgctgcacgtgaattttgccca

SEQ ID NO: 205 - DNA, 273 bp, Glycine max
  Clone ID: 701037130H1
ttacccaataagaagcaactctcaatttctgacatttcttcaatcgagtgtttccagtggtatcatccaagaggaacgtaggggaagataaagagatgacgataaaacctgttgttcgtgtttcggaggggaagctggtggtgaaggagcgaacgattttgaccggaatgccggagaacgtggtggagacatcgacggtggaaggaatgtttctcggagtggatttcgagaaggaagacagtaggcaggtggtttcgttgggaacgttgaagg

SEQ ID NO: 206 - DNA, 278 bp, Glycine max
  Clone ID: 701037132H1
gggtaaggtcgcgttgtgttgcgtcgtgtcgtgcgctgttcctctgtttctcgtttttgtgttcagaccgaaccctagctccgcatcgcaaccatgtcgaccaagcaaggtggaaaagctaagcctttgaagaaacccaagtctgataagaaggattacgacgagattgatgtggctaacattcagaagaaaaaggaagaggagaaggcgctaaaggagttgaaagccaaggcgcaacagaagggaagctttggaggttctgggctcaagaaaatgga

SEQ ID NO: 207 - DNA, 283 bp, Glycine max
  Clone ID: 701037133H1
gtcatctctaacttggtggaagccagaaataacattcctgctccatttgacaacatcactacgctacagacactctttgccaaccaaggacttgatttgaaggacttggtcctgctctctggtgctcacacaattggtatcgctcattgttcatcattatcaaaccgctgttcaatttcactggcaagggtgatcaagacccttcactagacagtgaatatgctgcaaatctgaaagccttcaagtgcaaggacctcagtaaattgaacaccacaaaaattga

SEQ ID NO: 208 - DNA, 282 bp, Glycine max
  unsure (1)..(282): unsure at all n locations; Clone ID: 701037134H1
gacagaccatggcaacaaaacctcgtttggcttatctccctgccatttttgttcttcttctagttgtcttcacttctgtgacggcacaatccccagggccagaatcttcatcactccacgacaccttccttcaatgcctcaccaaatacacaanaaactcctcatctcaactctccaacatagtcttcgctaacaccaaccccaagttccccactgtcctccaaaatacatccgaaacgcgcgtttcaacacctcctccaccccaaagccttcactcatcgt

SEQ ID NO: 209 - DNA, 275 bp, Glycine max
  unsure (1)..(275): unsure at all n locations; Clone ID: 701037135H1
attctgaatttgcgggttttggatttggacttggtcgtcaacacagtctaattaatatctttttgctccttcgnnnnnnnnnnnnnnnnnnnnnnnnnnnnnnnnnnnngcaacgcactgaattcgatcaatcaatccatcttcaattgctttgtttcgatcggaggaaaatggccgatcagttatcgaagggagaggaattcgagaaaaaggctgagaagaagctcagcggttggggctgtttggctccaagtatgaagatgccgccgatctct

SEQ ID NO: 210 - DNA, 274 bp, Glycine max
  Clone ID: 701037136H1
aaggccttcaaagcatactataagcttcgtcttgaacgcaccaacaaacgccaccatggtgcccgcctaaagaaggctgctgaagcagagaaggaggacaagaaataaggtccttgagaagacagtttgtaatccatattatagttgtgagaaatttttgtttgatggtctgcgccctagctttatggagatcatgagttttaaagcaccacccttacaatttttgtttgaactcaagtctgttaatttaattagcactctggtctgttttgat

SEQ ID NO: 211 - DNA, 275 bp, Glycine max
  unsure (1)..(275): unsure at all n locations; Clone ID: 701037137H1
cacaactactccttataaccaaaaccaacaacaactatggcaagttatcagaagcactacgatgatcagggtcgcaaggtcgacgagtatggcaatgttgagaggcaaactgacgaatatggcaacccggttcatgccactagtgtcacttatgtngccaccaaaagtgttggtggctacaatgatgacgctaataagcaacatgatattactggtgtctatcccgaaaaagacaccggtagacatcattttggtcgtggttacgacggtgacac

SEQ ID NO: 212 - DNA, 275 bp, Glycine max
  unsure (1)..(275): unsure at all n locations; Clone ID: 701037138H1
cgagaggcgttctatatattattgnattgacaatgaggcctgctcttgctttgcttcctcttctatttgctttcttgttagctgccactacagaatcaagaaaagatacaggggaatattggaaaatgatcatgaaagatcaggaaatgccagaaggacttcaaggtcttgtttcatttcaatctgaaaataaccctaagactcaagagcagcttggtaaaggttccaaaaaccattgtgaagagtctctagttacaaatacacaagttaatagt

SEQ ID NO: 213 - DNA, 272 bp, Glycine max
  Clone ID: 701037139H1
ggaagtctcttcctacttgaagaaggttggttacaacccagacaagattccatttgtgcccatctctggtttcgagggtgacaacatgattgagaggtccaccaaccttgactggtacaagggaccaactctccttgaggctcttgaccaaatcaatgagcccaagaggccctcagacaagccactcaggcttccattgcaggatgtctacaaaattggtggtattggtaccgtgccagtgggacgtgttgagactggtgtcgtgaagcccg

SEQ ID NO: 214 - DNA, 106 bp, Glycine max
  unsure (1)..(106): unsure at all n locations; Clone ID: 701037140H1
aattaagattggaaatgagaaaatagannggaagtgagnngaggaggcactgagcattccaacaatggccttgttctctgctaccgcaaccgttcttcctcggaac

SEQ ID NO: 215 - DNA, 275 bp, Glycine max
  Clone ID: 701037141H1
ctctgtgaatttcctcatatttctataagacacagaatatttaagaatggagttcaccaaaacaagttccctcctaatattcttgctagtgtttgtctcaagcttgatccatgctaaggcataccaaaatctatactgtggcagaggaaccagatgctatggaaagtacatcacatgtcctgctgaatgccctaacagtgaaacaaacaatcctaagactaaggtttgccaaatcgagtgcaacaaacctacttgcaaggcagtctgcagaagtc

SEQ ID NO: 216 - DNA, 82 bp, Glycine max
  Clone ID: 701037142H1
ctcaatgtgaatttgggccgaacacccgtctctctccgggacagttcttctgtgcagagtacactactcttctccatcaaca

SEQ ID NO: 217 - DNA, 271 bp, Glycine max
  Clone ID: 701037143H1
gctggtacaaaatccggtgccttatggagaattcaggctgcaaggtctcatgcatagacctcaaaagtgctggaattgatcaatctgatgctgattccgtgctatcttttgatgattacaataaaccacttatggatttcatgtctgatttgcctgagaacgaacaggttatattggtggggcacagcgctggagggttgagcattactcaggcctgtcacaagtttgcaaacaagattcgtttagctgtttatgtggcagcaactatgct

SEQ ID NO: 218 - DNA, 270 bp, Glycine max
  unsure (1)..(270): unsure at all n locations; Clone ID: 701037144H1
ggatgatatccggtcattggaacgtgaccgatgtctgcnacgcnctgttaggcggcttcgccgccataacagccgnctgctccgtcgttgagccatggncagccatcgtgtgtggttttgtcgcttcagtggttctgatagcgtgcaacaaattagcagagaaggttaaactcgatgatcctttggaagcggcgcagttacacggtgggtgtggcgcgtggggggtgatattcacggcgctgttcgcgaaanaggagtatgtgagccagg

SEQ ID NO: 219 - DNA, 271 bp, Glycine max
  Clone ID: 701037145H1
aattaacctcactcaaactcgggatcacagaaaccaacaacagttcttgcactgaggtttcacgatgttgctggaacttgcacttggtttgtttgtgttagctttgtttctgcacttgcgtcccacaccaagtgcaaaatcaaaagcacttcgccacctcccaaaccctccaagcccaaagcctcgtcttcccttcattggccaccttcacctcttaaaagataaacttctccactatgcactcatcgatctctccaaaaagcatggcccc

SEQ ID NO: 220 - DNA, 270 bp, Glycine max
  unsure (1)..(270): unsure at all n locations; Clone ID: 701037146H1
gtgttcttttcctcattcatttgttctacactgtagtgctcacgaagcacttcaagatcgaatgcccaccaaagcaaaaccaaatatntctccaaaggccgaatcttttcgccctttataaccaaatcaagaaaccccagatctcgggtatagctggtgatcttgaatttttttgttttctgtttttcnttaatttctctcttttcttgancattacattcccggaaaacggttttccggggaaagaagtgaangaagggcacaattggg

SEQ ID NO: 221 - DNA, 275 bp, Glycine max
  unsure (1)..(275): unsure at all n locations; Clone ID: 701037147H1
caagtgaccaccaatattccacaggctatgtgaccnaaaagtcccctcctccacctgtggagtttcctaccttcaccacaacttcatatttggggaggagattcttcacttcagccaccctcagcaccctctctcaatggtggatctccctgacctgttcaattgtgtggggtgcaaagagtatggctctggaaagaggtttgtttgccagcaatgtgattttcagctgcatgacttctgtgccttggctcctcctgctctcaaggcacacccct

SEQ ID NO: 222 - DNA, 272 bp, Glycine max
  Clone ID: 701037148H1
ttgtttggagcgatccgagaaaaactctgtaaacatgttggtttaccaggacctccttacaggtgatgagcttctctctgactccttccgttacaaggaaattgagaatggaatgctgtgggaagttgaggggaagtgggttgttaaaggagcagttgatgtagacattggtgcaaacccttctgctgagggtggaggagaagatgagggagttgatgatgcagctgttaagttgttgacatgttgacacattcagacttcaggagcaaccc

SEQ ID NO: 223 - DNA, 279 bp, Glycine max
  unsure (1)..(279): unsure at all n locations; Clone ID: 701037149H1
ccgagaatggaaacagacctaaacagagggtaacaaaacaagcaaacaccatggtgattaagtctgtgttgttcagcttcattttccccccgccaccttctctggtggtttgggggttgactgtgacaagcttcctgatactggctaatgctttcttgtcagaaattagngggaagcatttgaactattcaaagttttggaatgctaatccctctgcagaaaagcaggtcaagttgtctagcaaagctggcatgcttttgctgtacatcctgcttttct

SEQ ID NO: 224 - DNA, 275 bp, Glycine max
  Clone ID: 701037150H1
ttttggctctttcattctttgcttaattcctatggaggagtttcaaagatcaaggtcttatgcaaatgggcaaatgatgcagatagagagctactatggagctcctaggccttatgatctcagtctcagaacttatagtgctcttatgcacaaactcaaataggtcctcctagggacttgaagttgaagaaaggaaaaagcatttctgcagggtcttctttctccaagtcttggagctttgctgatcctgagcttcagaggaagaagagggttgc

SEQ ID NO: 225 - DNA, 274 bp, Glycine max
  unsure (1)..(274): unsure at all n locations; Clone ID: 701037151H1
ctaccttaaacttccacaatacaactctctcttcctataaacgctgttgtttaacgtgagaacttgggtgatctttttggagtnngtaggagcccttacaccttgcagaatcatctctacattcccaagggctcctactacgcaataactccaagcccgatctcaaattaatatttcatttactcatcttaatcaatattaaataagaaaagatgggagagatgtcaaacttccaattgggtgtgattggtgcactatttctctctgtggcttc

SEQ ID NO: 226 - DNA, 272 bp, Glycine max
  unsure (1)..(272): unsure at all n locations; Clone ID: 701037152H1
cttctccctcttatccacctcagcagtggtctacaccgtggcctcnatctacacttcacgagaagtcactttctccaaagtcatgaacgttgttcccaaagtatggaaaagactcatggtaacttttttatgcacctttgtggcgtttttcgcgtacaacgttatgacactcgttgttttcgttatatgggcacttgcaataggactaaggaatggtggggttgtggttttggttgtgttggggagttgtatttcgcggggtttgtgtactt

SEQ ID NO: 227 - DNA, 270 bp, Glycine max
  unsure (1)..(270): unsure at all n locations; Clone ID: 701037153H1
gttttacatttttnttttgttcctgagttccaatggctcttcaggctgcttccttggtttctgcttctttttctattgctaaagagggaaagtctggtgtatctctcagggacaccacaatgtttggtgtttcattgtcggatactctcaaatctgacttcagctctccctcatcgacttgcaaaagggaattccaacaaaaatttggcccttgagggttcagtcagtggcaacaacaactccaggagtcaccaaggcttcaccagaagg

SEQ ID NO: 228 - DNA, 267 bp, Glycine max
  unsure (1)..(267): unsure at all n locations; Clone ID: 701037155H1
cttgatgtcattcagacctatgtgttttggaatggccatgaaccttctcctggacaatactatttcgaagataggttcgacttggttaaattcgtgangctcgcgcagaagcaggcctctatgttcatctccgtattggtccctacatatgtgctgaatggaacttggggggatttcctgtctggctcaagtatgttccaggcattgctttcagaaccgacaatgagccgttcaaggctgcaatgcaaaantcactgcaaagattgt

SEQ ID NO: 229 - DNA, 272 bp, Glycine max
  Clone ID: 701037156H1
ctctagctccaattcaaccatggcttcgagactcacggtaacagccttggtgctgatagctttggcaacagtttctctccaaacctcagcttcatcagtgggtaaattcatcgacgaaaccatcacttcccacaagatcgtcattttttccaagacctattgcccgtactgtagaagggcaaaagctgttttcaaagagttgaaccaagttccacatgttgttgagctcgacgagagagaggatggttcaaagattcaggatatcatgatta

SEQ ID NO: 230 - DNA, 269 bp, Glycine max
  Clone ID: 701037158H1
ttatcttgggcgatggaaatcctaaagcaattttcaacaaggaagaggacattggaacctacaccatcagggctgtggatgaccctaggacattgaacaagattctctacctcaggccccctaagaacatttactcgttcaacgagcttgtggccttgtgggagaacaagattggcaagaccctcgaaaaaatttatgtaccagaggagaaggttctcaaggacatcgaagaggcacctcttccaatcaatgtggtattagcaatcaac

SEQ ID NO: 231 - DNA, 267 bp, Glycine max
  Clone ID: 701037159H1
aaggataatagcttttgacctagctaatagcacacaataatgggaagatccccatgctgcgatgagaatggccttacgaaaggtccctggactcccgaagaagatcagaaactagtccaacacattcagaaacatggccatggaagttggagagccctccctaagttagctggtctcaatagatgtggaaaaagttgtaggctaaggtggactaactatttaaggccgatatcaagagggggaagttttctcaagaagaggagcaaa

SEQ ID NO: 232 - DNA, 265 bp, Glycine max
  Clone ID: 701037160H1
gccgctgttgttgttgctgcaccaccgaacaacttcccctgtaaatcgcgtttcgtttgtgcaaggttttaaaagatggctgatgctgaggacattcaacctcttgttgttgataatggaactggaatggtcaaggctggttttgcaggtgatgatgctcctagggccgtgttccccagcattattgggagaccacgccatactggtgtaatggttgggatgggtcagaaggatgcttacgtgggtgatgaagcccaatcaaaaa

SEQ ID NO: 233 - DNA, 268 bp, Glycine max
  Clone ID: 701037161H1
ctccgaacgagttgacaccgattccactcactcaaccatgagccgattcaggcgttttgagctcatagaacaaccacctttcttccactcctgctactctttcccttccttcgtcctccaagactcactctctctcgacctcgacctcttgccacttcccagccacttcgacgctttcgcagatctggtgcacgcgccgtcgttcgcttaccggcgcgtggagaggcatctcgagaatgagttgcgtttgcagagcctctctgaccgt

SEQ ID NO: 234 - DNA, 268 bp, Glycine max
  Clone ID: 701037162H1
gctgagctgaccaagcatgattcaaaatggttgcattgtatcccaagggtgtgcccctctgaattctaggtcacgcaaccatggcatacctagtacctctgcctttcgttgcgcttctctaatgcctcccaaggttgccgtctctaacatccggagcttttggggacataatctggaatgtaaacccttgttgccaagaggaatgacattgacaaacacgtttgctgtatcaagcctgcgtgtaagggagggtcaaaatcatctcttt

SEQ ID NO: 235 - DNA, 271 bp, Glycine max
  Clone ID: 701037163H1
atccgattgaaagaataagtagcaactctgtagcctcttttcccatcatctccttacctcctcttttttcaaattagtcctgcagaagaagatcatcatgaggcgcttaaagtcaagaacaacaccacttttgtccaagtttgcgccgttgttggagccatggccaaatgatgctataagaaaggaactataaacctgatcaggacatttgacctgaggaaacatgccctctaggcaagtctgatgcttggctttcatctctgctgttgag

SEQ ID NO: 236 - DNA, 272 bp, Glycine max
  Clone ID: 701037164H1
agcagcagcaacaacaaacaaactctttctggattcagtttttgatgtgaaaatggcagtgactcttacatcaacactctttctggctttgctatttgctgcttcagcttttgctgctcttcagcctagagtacctgaagcttacctccaaaatgggaactttgaggagcagccaaaccctaaatacctgaagaaaacaaagctctttggtaaatacgctttgcctaaatgggagatcaatggtctggttgagtatgtctctgggggtccca

SEQ ID NO: 237 - DNA, 276 bp, Glycine max
  Clone ID: 701037165H1
tgataacttgcatcatatcaaaatctttgggcaagatagggagcttaattaaagtcctaattaaggatcatggaatcccaaacacagtctgagctaccagttgtagacttcaccaacaaaaatctgaaaccgggtactgatgcatgggtttcagcttctcaagtagtgcgtggtgcacttgaggatcatggtggtttcttggcactctatgataaggtcagtttggagacatacgactctgtttattctgaaatgatgaatttttttgacctctca

SEQ ID NO: 238 - DNA, 273 bp, Glycine max
  unsure (1)..(273): unsure at all n locations; Clone ID: 701037166H1
cttttcttacttaagacattgtggctatctgtgacatctcgggttntttttgtacttgtttttggacttgatactgatctattatttaattttttagaatgccttcattttggcttatgctcttttggatatctttgattaacttctcatacaaatgctgctccattaattaagtattgttttactcacattggtttcaaacatcgacttgattaattaccctctcctcatatagaaaagtatttactgtaattgtgtgttgtatcacacagt

SEQ ID NO: 239 - DNA, 268 bp, Glycine max
  unsure (1)..(268): unsure at all n locations; Clone ID: 701037167H1
ggctcgttcttgaaaccctaattcgatatcctcctcctcagaagaagaaggatcgatgtgggcagcttcttgcctggcgtcatgctgcgcggcctgcncatgcnacgcctgcaggaccgtcgtatcgggaatcagccgccgttccgccaggatcgcctactgcggcctcttcgccttctctctcgtcgtcgctggatcctccgtgangtcgccgctcccctcatggaatcccttccctggatcaatcattcaaacacacactagcgtg

SEQ ID NO: 240 - DNA, 267 bp, Glycine max
  Clone ID: 701037168H1
tggaatctgacctccatcaagtaatcaaggcaaatgacgatcttactcctgagcaccatcagtttttcttgtaccaacttcttaggggcctgaaatatatacatacagcaaatgtgtttcatcgtgatttgaagccaaaaaacattcttgctaacgctgattgcaaactaaaaatatgtgattttgggcttgctcgagtttcattaatgatgctccatcagctatattctggactgactatgttgcaactcggtggtacgtgcacct

SEQ ID NO: 241 - DNA, 269 bp, Glycine max
  unsure (1)..(269): unsure at all n locations; Clone ID: 701037169H1
gctttaaaccgatttcttcaggagaaacatggttctaagatggcctttttggatggcaatccccctgaaagactttgtatgccgatagttgatcatattcagtccttgggtggtgaagttcatctaaattcgcgcattcaaaaaattgagcnaaatgatgatggaacggtgaagagcttcttactaaataatgggaaagtgatggaaggagatgcttatgtgtttgcaacacctgtggatattctgaagcttcttctaccagacaactg

SEQ ID NO: 242 - DNA, 266 bp, Glycine max
  unsure (1)..(266): unsure at all n locations; Clone ID: 701037170H1
ggaaattcctgctttggttggaattgccttgcaccgtggttttcctatcctagccgtactgctattcgtcgcaggttcaatttagagggaagttgcgaanacttaatagatcatgcggatgctgcggaagcattttggaagatgaggtgcagcgtgaacagtgtgagtcaacatgtgacttggcaactcatgtcttctgtcatgtatgtgctctttgtcaagaaggtcgtgagctccgtcgcagttacctcatcctggctttaatg

SEQ ID NO: 243 - DNA, 268 bp, Glycine max
  unsure (1)..(268): unsure at all n locations; Clone ID: 701037171H1
gatttccctcatactgantagtgttctgaattgtgctttttgatatcttaagccatttcagcaacatgagtaaccacactcgcgcgctaccaccagcagctacccctaagatgcagcaaaggaaggagcgacaaaggttctccacttctgatgacagtgccatgaccaagcaagttcaggccactcatgcccctgatggtcgtgaaattgatgtcaaacccattctccaaattgtggatganatattggttcggttcatcgctcgcat

SEQ ID NO: 244 - DNA, 268 bp, Glycine max
  Clone ID: 701037172H1
ctctcctctaacttgtaagcaccataccacattatctctctttcgtttcctttcccttctcactctttctctatctaccctttcccttccatccattagagagtggaaaacatcatccatgtgttcatattatgttaggtcatggatacaagagctaccactctttgttaatttcttcttaagaccaatctgtgaaaggtttgacttttcttgtcccttgaatcccgagaacacaagccaaatcaatctcctattgctaacataagcc

SEQ ID NO: 245 - DNA, 270 bp, Glycine max
  unsure (1)..(270): unsure at all n locations; Clone ID: 701037173H1
gaaactaanacagaaagagagagaaagagtggttgaaagcgtccattgaaggtatagagagagaggttttgtgaattggtgctgcttcgtgtctgtttatttcctcgcgaggtttgaatncccggaacagtgaagagaaacggaggttccgatcctgcgatgtgatatatgagagatctgtgcaggaaattgnnactggaaaaaaaaaatggcganncnggaggtatccatcaggcgaattcggtgaacggaaaaggngatantattnng

SEQ ID NO: 246 - DNA, 265 bp, Glycine max
  unsure (1)..(265): unsure at all n locations; Clone ID: 701037174H1
gcccgatcaaacaataaggttgttattggtccagccactgttggaggcattcaagcaggtgcttttaaaattggtgacacagctggaacaattgacaatataattcagtgcaagctctacaggcctggatctgttggatttgtttctaaatctggtgggatgtccaatgaactctacaacactattgcccgtgtaactgatgggatttatgaaggcattgctattggaggagatgttttcccggttccacactttctgaccannc

SEQ ID NO: 247 - DNA, 263 bp, Glycine max
  unsure (1)..(263): unsure at all n locations; Clone ID: 701037175H1
cgtcttcaaattagggttagggttagggtttttttgttacaaataaaattcctattatgctnnnnnnnnnnnnnnnnnnnnnnnnattttataattattcataattgtgtgttgaaaatgaaagccaatttgcagagcaagggcgtcgactatgaatgtcgcatcttgcctgaaggttggcgaaaacaatgacgattctccgtgcctatcaaatttactctgttttgatgatggcctcgaacaagtcgcaacattctttttat

SEQ ID NO: 248 - DNA, 262 bp, Glycine max
  Clone ID: 701037176H1
aattagagaagtcgacggctgccacagcttcttaagcttctgaatgtacattattactgctgcattttttaattctcaagttccctgttacccattctttaggagaatcagagggttgcctatatttgaggcatttgtcggctttgtggtcgccagttgttggtctttgatcatgaagagtttgcagttttgaagtgctcggagctctgtgcaccgaagttgccattgtccagagagaggatgcattcgaggaactgtggag

SEQ ID NO: 249 - DNA, 265 bp, Glycine max
  Clone ID: 701037177H1
ccaatcctgctttcctttcttatcttcccatgacactttgagagttcaagtttccttttctttcctacaaatccaaaataatagttttagtttacaaaatggctgtggaactcatggggttcccaaaactagacgaacaaaaggccattcaagaagccgcatcagaaggcctcaagggcatgaaacacctgatccgaaccctttccaaccaaccctctcacttaaacaccgaacttaccgacgttaccgtttcaaagttcaagaa

SEQ ID NO: 250 - DNA, 264 bp, Glycine max
  Clone ID: 701037178H1
tttgaagttgcttcctgtatgagatactgtagccgattattgcggaatatacctatgacacctgagtctgcattgctttaccttgagcttccttctactgtcttaatggctgatgcagttcaaccattgactgatgcagcaaagcagtatcttgccagtcgatacaaagatataacaaagttccaggaagaggttatgggcttgcctctagctggaatagaagcaatattgtctagtgacgaacttcaggttgcatcagaggat

SEQ ID NO: 251 - DNA, 266 bp, Glycine max
  unsure (1)..(266): unsure at all n locations; Clone ID: 701037179H1
aaganaganacctgaaagtgtcgttgagtcagtgtgtgtgtgcatcagaccaaaagcaacaatgggaggcacttgtgcagatcttcaccaccatgaatcagatatagaactcactgatgctgaaaggnttggcactgatgttggacctgacagtggcaccaaatcccagggtgaagaagctgaaggacaacactacgttgaggtgaccatggacattcatcgtgactctgtggccttacacagtgttaaaactgttgcagtgatga

SEQ ID NO: 252 - DNA, 265 bp, Glycine max
  Clone ID: 701037180H1
caatttctaattagggtttcgcttagagtaaccaataaccatgggagtcttcacctttgtcgtccgcaaatccggcagcgaatggagcgccaagcaacattccggcgacatcgaggcctccgccgattccaccttcgatctccaacggaagctcgtgcaagccgctctcgccgttgattcctccggtggagttcagtctctttctctcccgtgtctcctactccgctgtgttccagtgatagtgggtggtgcatattcgttggag

SEQ ID NO: 253 - DNA, 275 bp, Glycine max
  Clone ID: 701037181H1
gggagaaggaccccattgacaatgagggctactggggaagtggctcagatttgcccacaatgagcactgtggagaagatcctaagcaatttgagctcaaaagtttctgtcatcaacattactcaactatcagagtatagaaaggatggtcatccttccatttttcgcaaattttgggagccccttcgcccggaacaattgtcaaatcctccatcttactctgattgcatacattggtgcttgcctggggtacctgatgtgtggaatgagttacta

SEQ ID NO: 254 - DNA, 270 bp, Glycine max
  Clone ID: 701037182H1
gttctactgtttgagcttgatgctattcgaaaggcatgtgcatccctggaacccaattatcagcctcctgtgacttttgtggtggttcaaaagcgtcaccacacaaggctctttgctagcaaccatcatgataagagttctgttgacaagagtggcaacatattgcctggcactgttgttgactccaaaatctgccatcccaccgaatttgacttttatctctgcagccatgctggaatacagggtacaagccgtcctgctcactaccat

SEQ ID NO: 255 - DNA, 197 bp, Glycine max
  Clone ID: 701037183H1
tgattgaagaagatgccgatcagaaacatcgccatcggaaggcctgaagaggctactcaccccgacacgttgaaggcggggttggctgagttcatctccaccttgatcttcgtgttcgccggttcaggttccggcatcgcctacaacaagctcaccgacaacggcgccgccactcccgccggcctcatctccgcttc

SEQ ID NO: 256 - DNA, 266 bp, Glycine max
  Clone ID: 701037184H1
cacgatctcaacggagcacctctcttcaggtcgccatctagactgcaatcatggctgatggaccacagcatccatcagttgttcagaagctagctggacagtcttacctggtgtccaggctaagccccaactttaactctgggaattattcctcgactggttcttacttcaatggaggactgcactcttctgggttggctgttgtgtcgcctggatctccagttactgtgcatgctccagcagagaaaggagtgagtggatttcta

SEQ ID NO: 257 - DNA, 247 bp, Glycine max
  Clone ID: 701037185H1
aatgaacccaacaacaagtacgatacttttctgtgtttagtacggcccagatacccgctacaccttcgctggtaatctctataatgctttgcgccgcaacagaatcaatacctttttcacagaagataatcatcatgatgagctactactcatgaatggcgaccaaatttcaccctttgctctaagagcaattaaagaatcaaacttgttaattgttgttctctctccaaactacgcatcatcccca

SEQ ID NO: 258 - DNA, 265 bp, Glycine max
  Clone ID: 701037186H1
atctccacatattctgatccaacagtctttaacactcgaagattctctccttttcaaatttcaaaccttttcccccaaaactaacagacccctcttcttcttctctctctgtaatctcaatcgtgcatgggtcgtcttcactgattcgataataaaaatctcagattcattcttcgttttctgttacgatggagttgatttcaggtctaccagaggacgtagcccgagactgcttaattaggatccctacgagcaattcccggcg

SEQ ID NO: 259 - DNA, 264 bp, Glycine max
  unsure (1)..(264): unsure at all n locations; Clone ID: 701037187H1
cttgcggctagggttttagcgcanttcttctagatttaaggaagacgggtaaggnaaaggttcacatcagtattgtggtcattggccatgtcgactctgggaaatccactaccactggtcacctgatttacaagcttggaggcattgacaagcgtgttattgagaggtttgagaaggaagctgctgagatgaacaagaggtctttcaagtatgcctgggtgctggacaaacttaaggctgagcgtgaaagaggaatcaccattg

SEQ ID NO: 260 - DNA, 265 bp, Glycine max
  Clone ID: 701037188H1
gcggcagcattaaggagattctcgggacgtgcgtctccgtcggatgcaccgttgatggaaaggatcccaaggacttgcagcaggagattaccgatggtgatgttgaggtccctctcgattaaggaggaaggctttgttactctctttctctctttttcttttgtctttcttcagatcgtttcgtgttctttttaatataaatttgggggaactatcgaacgttttgtttaaggttattttaccgctttggataatttagatgatg

SEQ ID NO: 261 - DNA, 266 bp, Glycine max
  unsure (1)..(266): unsure at all n locations; Clone ID: 701037189H1
ctttctttcgccaaatgggtcatcatctccttctcccataacacaancttcttcaccttttctttcttcttcgcttcccttcggtggggtttcaagtttcaccataggaataggatgttttctaggttgattcatccccatgaaggccaggaagacatgcagggtggttccaaccacgctcacctcggagacccttgtcttgttctcacctctgatcccaaacctcgtcttcgttggaccgctgaccttcacgaacgctttgttga

SEQ ID NO: 262 - DNA, 265 bp, Glycine max
  Clone ID: 701037190H1
acaccaaattaacaaagccttctttttcttgtgtgatctcacaagcccctaaaggccaccatgtcttccttcaagagcaaattccaagatgagttgattgccaatgctagttacattggcaccccaggaaagggtatccttgcggctgacgagtcaacagggacaattgggaagcgtttggcgagcatcaacgtggagaatgttgaaacaaacaggcgcattcttcgtgagctcctattcactgcccctggttgtcttgagcgcc

SEQ ID NO: 263 - DNA, 262 bp, Glycine max
  unsure (1)..(262): unsure at all n locations; Clone ID: 701037191H1
gtacagatacacacttggctgaggaaggtcggaaaagaaaatggagttgttcttctacacggtgttcggncncttggccgcggttgtggcagttatggagctgagcaagaacaacaaggatcgaatcaacacctcttccgcattcaattccttcnagaacaactacctcctcgtctattccctcatgatggctggggatggctacaaggtccatatgtctactacctttacagtacatatggatacgggaaaggggacatag

SEQ ID NO: 264 - DNA, 262 bp, Glycine max
  unsure (1)..(262): unsure at all n locations; Clone ID: 701037192H1
catgcttcagagttgcagaagtgtgtgtgagtttgagatgattaagaaaataaacgaaggaacttatggtgttgtctacaaggctagggataagaagactggagaactagtagcattgaagaaggtgaagatgaacatagagagggatggatttccaatgtcatccttgagaganataaacattctcttgtctttaatcatccctccattgtgaatgttaaagaagtagttgttgatgattttnatggtacttttatggtaa

SEQ ID NO: 265 - DNA, 262 bp, Glycine max
  unsure (1)..(262): unsure at all n locations; Clone ID: 701037193H1
cttagcagcaggcccattcagcggcggttcaatgaacccagctcgntcattcggcccagctgtggtcagtggagacttggctgctaactggatctactgggttggcccattgattggaggaggtttggctggcttgatttatggagacgtcttcattggttcctatgcccctgtcccagcctctgaaacctacccttgagcttcaacttcacttgtgtgttccttcaagtttcatctctgttcaccgtttcatgtcatgagc

SEQ ID NO: 266 - DNA, 264 bp, Glycine max
  Clone ID: 701037194H1
ggaacccaaaccgaaaccctaaccctaacggagagatggcggagcacttggcatcgatattcgggacggagaaggacagggtgaactgtccgttctacttcaagatcggcgcgtgcaggcacggcgaccggtgctcccggcttcacaccaagccgacaattagcccaacattggttctgtcgaacatgtaccagaggcccgacatgaacatgaacattatcaccaaccccgatcagccacaaccccaatcccttgaccccgaca

SEQ ID NO: 267 - DNA, 265 bp, Glycine max
  unsure (1)..(265): unsure at all n locations; Clone ID: 701037195H1
attactcgtcttctccntgatgcagtaggaactacctgtggccaacgncctagagagggtatatncatactgaatattgtgacattctccgagttcctttcagaaccgaaaanggaattgttcgcaaatggatctcaagattcgaagtctggccatacctagagacttacactgaggatgttgccctgaattgccaaggagttgcaagccaagccagatctgatcgttggaaactacagtgatggaaacattgttgncctcttgt

SEQ ID NO: 268 - DNA, 268 bp, Glycine max
  unsure (1)..(268): unsure at all n locations; Clone ID: 701037196H1
ganaatcgaaggcgacacacagcttgcatccgattccgagaagaagacgaggcttctctttcgaatacaatctttctgctacatgatgttgaacaaatgatacagaatttattctgtgcacagaaattctggtacatatgacaggacttatgcctggcnanttgccacatcatggaacacctgatggcaactctggtaaaagttctcaagacaagcaagaggaatcattaggtcgctggtatatgtctagaaaagaaatagaggnact

SEQ ID NO: 269 - DNA, 277 bp, Glycine max
  unsure (1)..(277): unsure at all n locations; Clone ID: 701037201H1
tctaatgacctcaatgtgacctcttctgcttcggttaaaacactaagcatggacaaagtgtaaaactcactttttatggctttcattgtcttcttcaacttgttcctggaagccaagtattttccacccacttttgtgaanacagtttcacactttcntctttggatgacagagtgaagttccgcatgctttccttgatatcaattggcactccttagctgtactgcagatatccaagagcctcagagacattctagaatgtcatcaacgcattgtc

SEQ ID NO: 270 - DNA, 281 bp, Glycine max
  unsure (1)..(281): unsure at all n locations; Clone ID: 701037203H1
gtttgtaaganaaaganaaaagaggcgcaagatgagtggtagggtttctgggaaggtgaagtggttcaacgatncagaaggggtttggattcataacccctgacgatggcagcgaggaactcttcgttcaccaatctcagatcaaatctgacggtttccgaagcctagctgaaggagagtccgttgagttcgctattgaatctgaatctgacggacgcgccaaggctgttgatgtcactggccccgacggcgccacntccagggaaccagacgcggcggtg

SEQ ID NO: 271 - DNA, 279 bp, Glycine max
  Clone ID: 701037204H1
attatcctaagtctttgggaatagtgctgcaatggcttcaagtcaggaggaggtgacccttttgggagctactggaagcccatttgtgtgcagggttcatattgccctcaagttgaagggagttgaatacaaatatgtcgaagaaaatttgaggaacaagagtgaactgcttctcaaatccaacccagttcacaagaaggttccagtgtttattcacaatgagaagcccatagcagagtctcttgtgattgttgaatacattgatgagactggaagaac

SEQ ID NO: 272 - DNA, 281 bp, Glycine max
  Clone ID: 701037205H1
cggatccagagagtgctcctaaacgacgccgtttcgcaagcatcagtagtgtagtcgcagagaatcaaatcaatggagaagggaaagggagtgatgggatcgggaggacgaagatggggcgttgacttctccgacaattccacttctcgcgatattcccgatcctcccggtttctctcgcacttctctcgatcaggacgattcaacgctcagtcgccagaagaaggacgctgaatccaatggaaagcccagaaagttgggaggtagcacaagcccctatga

SEQ ID NO: 273 - DNA, 283 bp, Glycine max
  Clone ID: 701037206H1
aatttcccaaatttctccactaccctatctcctttgctcctgaaactcgcacattcttcatcagcaatgcacgatcttcaatacgaatgcaatttcgatatttgacatcggagtatcagtgtttgagcgggtgaattggaaaatgctagagcaatggaaagttcggtcaatggtggcttctcccatttgcagagctgtggagatagcagcgaagaagagttatcggtgcttcctcgtcacaccaaagttgtcgtaaccggaaataaccgcaccaaatcggtgc

SEQ ID NO: 274 - DNA, 272 bp, Glycine max
  unsure (1)..(272): unsure at all n locations; Clone ID: 701037208H1
tggtaatattgcnagcttgtngcaacaagctggtagaggtgggaggagagatcagaccatctcttgctgtctatgttgcatttggtggggcctcttgatcaatacttccatgacaaatcccaagaaactctttganagaccaatgaatgttgccatgttgattcccaaaacaagcaggttcttgaacaacatttggtcctgcgcagtccatgaacaccctttgagtgtgaatatgatgagcatattttggtcttgcttggagagtgtcatat

SEQ ID NO: 275 - DNA, 275 bp, Glycine max
  unsure (1)..(275): unsure at all n locations; Clone ID: 701037209H1
ttttctctgcatctgtagtatctatcaccaatcaattccactcttcttcccancncaacaacaaaaaatcaatctgggaaacaaaaacaaaatgccgtcattagaggaggaactcttcccatcaaccccaggaaagttcaagttcgagcggtcccaccacatgaaccgccaactctatcgctgtttcgcctccaccagcaccatgttcctgtgggccctcttcttaatcgccctcaccgcttcctatctcagcttccaaggcttcgtcgattcgg

SEQ ID NO: 276 - DNA, 278 bp, Glycine max
  unsure (1)..(278): unsure at all n locations; Clone ID: 701037210H1
acgaatcacaaccaaaaaacanagnaacagnggcagagatatatgattatgaatttctcaacagaaccctctgcctcacgcttaccattctgatctccacttcttcgctgtgcgacgaatgaaatttcgttgctgcaaatagtgagatttgctgtctttggtcagagttgctccgagtgatcgcttcccctggtgcgacgaatgaaatttcgttgctgcaaatagtgagaatttgctgtctttggtcagagtggctccgagtgatcgcntcccctggt

SEQ ID NO: 277 - DNA, 280 bp, Glycine max
  unsure (1)..(280): unsure at all n locations; Clone ID: 701037211H1
ttggaaagaaaccctagcaagcggaacaatggcagacgttgaggtcgatgtgnnnnnnnnnnnnnnnnnnnggcagccgaagaagagaacgttcaagaagttcagtttcaggggcgtggatctcgatgcgcttctggacatgtccaccgatgaactcgtgaagatgttcagtgctcgcgcacgtagaaggttccagagaggcctcaccagaaagcccatggcctcgatcaagaagcttcgcaaagcgaaaagagaagctccaccaggtgagaagccagaa

SEQ ID NO: 278 - DNA, 280 bp, Glycine max
  Clone ID: 701037212H1
gagttgtcctgtttcggatcaagggatggaggcattggcaaatgggtgtccgaatttggtgaaagttaaggttaagaagtgtaagggggttacccctgagggtggtgattggttgaggaggactagagggtcagttgctgttaatttagatactggtgaggcagagcttcaggaagcgagtgctagtgatggaggggcacaggacaatgttgtagagtttcctcagatgcctgcccaaatcgtggccgcagcagcatctgcatcaagcagcaccactcgg

SEQ ID NO: 279 - DNA, 281 bp, Glycine max
  Clone ID: 701037213H1
gacgagaggagcgatgtgattctgctaaagtttctccgggccagggatttcaaggtgaaggatgccttgagcatgctgagaaacacggtgcgttggagaaaggaattcggaatcgagggtctgtcgaggaagatcttggaagtgattgggacaaggtggtgttcagtcatggacacgacaaagaagggcacccggtgtactacaacgtgttcggtgagtttgaggacaaggagttgtacaacaagacattttgggacgaggagaagaggaacaagttgata

SEQ ID NO: 280 - DNA, 284 bp, Glycine max
  unsure (1)..(284): unsure at all n locations; Clone ID: 701037215H1
ccagaacagcaagggagaatcaattcctcatcgctgcaattcttctttcactctctagtttctcttctttctttcttccaacctcttctcttctatacccttcagaaaagaaattaaaaaacgtagcttcagattattctagctcttcattttccatgtncaatattatgctgtaaatttctcaaactcactgtttcagccacattttggtctaaagatccgtgctttgacccttggcaggttcagcttttgaaggggttggagtttttcttcctcataagcca

SEQ ID NO: 281 - DNA, 290 bp, Glycine max
  Clone ID: 701037216H1
caagaacaagaagcaaaagcaccaacaccccaatgaccaaagcacaaagcagaactctgatttctccttcaagccaagctcagaggtaaagggtatcaaatttggaggccagttcatagtgaagtcctttcacaatcagaagagcaagacccttggagttctcaggttctttctttcccaccaaccaacaacaccaacaaaccaaaggacaagctcctttcccttccaccacagcattcttgcccacaaacttcaccatcttggcacaccatgttggcacaccctcaccc

SEQ ID NO: 282 - DNA, 280 bp, Glycine max
  unsure (1)..(280): unsure at all n locations; Clone ID: 701037217H1
atggcttctctggcgttnatncntcnaaccacgctctnccaatcgnnacgtgcgtatnacgagccttctctgangggnagagcagcaacagacancgtnttcgacncgnttctagtagccaaccgcggtgaaatcgcttgccggatcatgagnccgngcggaggntcggcattccaaccgtcgcgtttacagcgacgccgacaaggactcgctccacgttgngtccgccgacaaggccatccgaatcngaccgccacgggcggctcagttattgaaggac

SEQ ID NO: 283 - DNA, 277 bp, Glycine max
  unsure (1)..(277): unsure at all n locations; Clone ID: 701037218H1
aatcaaacatggctagggttagtgctttgtttcactctttgctcttgatttcttcccttgtattggcttctcaaatccatgtttcctctgggaaactagtccctggactatcatggaattacnatttgttgacatgtccccaagcttgagaggattataaggaagcatcttgaggatgtcttcgagaaggacagtggagtagctcctggcatacttcgactcttcttccatgactgctttcctaatggatgcgatgcgctatattgttgaaggagac

SEQ ID NO: 284 - DNA, 277 bp, Glycine max
  unsure (1)..(277): unsure at all n locations; Clone ID: 701037220H1
aacctctcaagtccaacctacccctttttcttctcccaccaacttcaccgtcttcttcctcgatcatgtctcacttcaagggcaagtaccatgatgagcttattgtcantgctgcttacattggcactcctggaaagggtattcttgtgctgatgagtcaacagggacaattggcaagcgtttggccagcatcagtgtagagaatgttgaatccaacaggcgtgctcttagggagctgctttcaccgctcccggtgctcttaaatatctcagtggtg

SEQ ID NO: 285 - DNA, 271 bp, Glycine max
  unsure (1)..(271): unsure at all n locations; Clone ID: 701037221H1
ctgcaaggnatgccatcgaagctggttttgatggggttgagatccatggggctcatggctacctgcttgagcaatttatgaaagatcaagtgaatgaccgaacagacgaatatggtggatcccttgagaaccgctgccgtttgctttggaagttgttgaagctgttgttaatgagataggggcggacagagttggaattaggctatcgccattcgcagaatattcagagtctggagactctaatccaaaagaattggggctttacatgatg

SEQ ID NO: 286 - DNA, 278 bp, Glycine max
  unsure (1)..(278): unsure at all n locations; Clone ID: 701037222H1
ttcaattcttgctgccaaagccaaaacaaaactgagtcatttctttgtttaggagtttggttctgcaaaaagccaaaaagangaagaagaataaatggaagcagagacctcaaacggtggtggtattggaggcctttacgtcaaagtttgaccgacgaccaaatggaactgctcaggcaacagatttctgtctacgccaccatctgtgaacagctcgttgagatgcacaaggccgtaatacccaacaggacctcgcaggctgaggctgggtatttgta

SEQ ID NO: 287 - DNA, 280 bp, Glycine max
  Clone ID: 701037223H1
cttttcacaacctcactacccaactaacactctttggcaatgttggacttgatgcaaatgaccttgtcttgcttgttggtgctcacacaattggtattgcccattgttcatcaatttcaacccgtctatacaatttcacaggcaagggtgacacagacccaacaatagacaatggatatgcaaaaaatctcaagaccttcaagtgtaagaacattaatgataactcacttattgagatggaccctggaagtcgtgatacatttgatcttggatattacaa

SEQ ID NO: 288 - DNA, 277 bp, Glycine max
  unsure (1)..(277): unsure at all n locations; Clone ID: 701037225H1
gattgatcgatgattgatgatggttcgngcgtcggtgaaggtgggttccgccaagttcgtagtgatctgcgtggggcttttgggcttcgctctcgtcgccgactttctatgggcctctacctcttccactcttcccacctccaccaaaccctccgcatttgtggttccctccaaccacaataagaagaaatatgagaatgccactgcttctggaagattcttgccgcggcttacgccgatttggatgcgccgcagctcaagtggcaaaagatggctc

SEQ ID NO: 289 - DNA, 278 bp, Glycine max
  Clone ID: 701037226H1
agagactcaggcgctgctgcccttcagtccttcagcaatggtttacgtgaagtcacagaaatcaaaagcctacttcaagaggtatcaagtcaagttcaagagaagaagagagggaaaaaccgattaccgtgccaggattcggttgataatcaggacaagaacaaatataacaccccgaaatatcgctttgttgttcgtttcagcaacaaagacattgttgcacaaataatatctgctagcattgctggcgatattgttcttgctgcagcatatgcaca

SEQ ID NO: 290 - DNA, 279 bp, Glycine max
  unsure (1)..(279): unsure at all n locations; Clone ID: 701037227H1
gntcgactatggcaagggtcagatgatggtaactacaactgcaggcacatcttaaaggatcatacagctgaggtgcaagctgtcactgtccatgcaaccaataattactttgtgactgcttcacttgacggctcttggtgcttttatgaactttcttcagggacatgtctgactcaggtttatgacacttcaggttcttctgaagggtacacttctgcagcttttcatcctgatggtcttattcttggaaccggcaccacagaatctcttgtcaagatt

SEQ ID NO: 291 - DNA, 278 bp, Glycine max
  unsure (1)..(278): unsure at all n locations; Clone ID: 701037228H1
aagaggccagagtcgttttaaatccaatttttccatgtcgttcgcatcatcattctcgatgctccgccaccgcgcggtggcggcatacgcgcccactctcctcctccgccgcttccgctgtctcccaacgatcgccgccagnnnnnnnnnnnnnnnnnnnnnnnctaacaaacaagctgctgccccgagccgcaacctcctgaaggcgaaacaaacatgaaagagtattcctgtcttgcccctgtcctctccctcgaagacagccctcctctgacgga

SEQ ID NO: 292 - DNA, 277 bp, Glycine max
  Clone ID: 701037229H1
gctgaccacaaatatgagctgctgtgggtaatacttattggactggtgtttgcgcttataattcaatcattggctgcgaatctcggcgtaaccactggcaaacacctttcagaattatgtaaagctgaatacccattattggtcaagtactgcttatggttattagctgagctggctgtcatagctgcagacatacctgaagtgattggcacggctttgctttgaacatactcttccacatccctgtatgggcagagttctaataactggctgcagc

SEQ ID NO: 293 - DNA, 279 bp, Glycine max
  Clone ID: 701037230H1
ttgcatagcattggttggtagttgtctcaaaaatctcttcttgccctttggccataatcaaaagccaagacactgttcatacagctgctcaattatcaagccaaccttgctcggttccatgcagaatttcagtttattcttatctagtagattggattgaagtagactccttataagtgcgcagaagttcaagtgtagagaatgagtcagcctaagattaaacgccgagttggtaaatacgaggtggggaggaccattggtgaaggtacatttgcaaag

SEQ ID NO: 294 - DNA, 284 bp, Glycine max
  unsure (1)..(284): unsure at all n locations; Clone ID: 701037231H1
gcagtgtatactaaagattaaagaatagtataatatagaagattggggttagggtttgatcgcaacgcaatggctggcaccggcatccatccataccaccagcaatgggctccggcggcagcgnnnnnnnnnnnnnnnnnnnggcagccgcgggcggtcctcctcctcacccaggggaggaggttcgaactatattcataactggtcttccggaagacgtgaaagagagagagctgcagaatctgctgagatggttgccggtttcgaagcatctcaattgattt

SEQ ID NO: 295 - DNA, 287 bp, Glycine max
  unsure (1)..(287): unsure at all n locations; Clone ID: 701037232H1
tccattgtagattgtcacatataganaaanagaattagaagaagggtagctgggaaactttggcaattgaaacctttttttccattgagtgatagagagcntggagaacatgnagatgaacaacgatgaaaggtttgcacaaaanggtgtcccagttnatagcnaggttatgaagntccaagcaggagtcagagaaaattgttgattggtccccggcaagccagagataagatctgttcttcgcgaataagccggcaatttcccgatcgccgttggggatctcggcc

SEQ ID NO: 296 - DNA, 280 bp, Glycine max
  unsure (1)..(280): unsure at all n locations; Clone ID: 701037233H1
cacctttgttcactcttcttctcttgcggctagggttttagcgcactttcttctagatttaaggnagatgggtaaggaaaaggttcacatcagtattgtggtcattggccatgtcgactctgggaaatccactacccactggtcacctgatttacangcttggaggcattgacaagccgtgttattgagaggtttganaaggaagctgctgagatgaacaagaggtcttcaagtatgcctgggtgctggacaaacttaaggctgagcgtgaaagaggaac

SEQ ID NO: 297 - DNA, 278 bp, Glycine max
  unsure (1)..(278): unsure at all n locations; Clone ID: 701037234H1
gaggcttctgaacagtttctgacaccgaaattcagccacaaagttgaccatcttgggatggatgagaatatcatcatgttccaccatttccccacattgatacaacaaggagattccaacaattganaacttccttatcatctttctcttgcaacatcgtttcgcggttcctttgccgtgatttcaattgttgcataagaaaacatcactcactacttctttcctctcctttttcattcaatttctctgattgacacaatgccgcccagatcagtgat

SEQ ID NO: 298 - DNA, 277 bp, Glycine max
  Clone ID: 701037235H1
caaaatccttgggaacagtaattggttttgccatttcaaagctgggaaagaacattcaagtactttcaagttcctttgtccaataagcaagagcaatacactgtggaaggagtgcagaatcttggagacaaagcagtgatgtgtctgggctaaatttcagaactgcagtattttactgccataaagtccgtgaaacaacagctttcatggttccattggtggctggtgatggaaccaaaactcaggcacttgctgtttgccactcagatacttctgg

SEQ ID NO: 299 - DNA, 275 bp, Glycine max
  unsure (1)..(275): unsure at all n locations; Clone ID: 701037236H1
cttgaaaacaacgttggatctgtggctgtgaaacttacaaatgcagagttgagtgaaatttctgatgcagttcctgtttatgaagttgctggggaagcaccaggccttggttctttatcgcaatatacttggaagtttgctacaccccatcaaagtaattgtgttagagaagataaacacgactttttcttccctcacaatccattcacgaaaatgagtgagtagatttttcagtgtattgttgataattggtgaaaggnatcgtgctactctgt

SEQ ID NO: 300 - DNA, 276 bp, Glycine max
  Clone ID: 701037237H1
tctcaaatgctaagagtgagggtgcaaccattttgactggtgggtctcgcccagagcatctaaagaagggattctttgttgaaccaactgtcataactgatgtaactacctccatgcaaatttggagagaagaagtatttggacagttctctgtgtaaaaacatttagcactgaggaagaagctattgatctagcaaatgacactgtatatggcttgggttctgctgtaatatcaaatgatctagaaagatgtgagcgcattactaaggcttttaa

SEQ ID NO: 301 - DNA, 281 bp, Glycine max
  unsure (1)..(281): unsure at all n locations; Clone ID: 701037238H1
gcctcccctcagaaaccaatgtccataatcaccccacgccgtcatcctcaaacgacacccttccgctagcaaaacgactgcggtttggtcgtcgtcttccccgagggcatgctcttgggatattattattcatcatcgtaatcacacctacagagacgttgactttgtgctttttctgggaggggaacaaatggaccaagctcttctggacgacataatncaatcgccttctcgaagttcgcagccggccggggaagcaggtgcagctgtcggagtcggag

SEQ ID NO: 302 - DNA, 272 bp, Glycine max
  unsure (1)..(272): unsure at all n locations; Clone ID: 701037239H1
atttgcatctcataacagagagctgagaaaggaagaaaaaagcgtgtgtcagagatacttaacaatggttgtagaagatacccaaaagtcagtcatcacggaggaccaataccctagcagggtcgtcagcgacaacaacaacgagacgacgacgatgatctcgaagagggtgagatccccgtcgacggcgaagatagcggcgccaccgccacaacgaagcctccggccgccctcgcccganacccccacctctggagattctggacttctgg

SEQ ID NO: 303 - DNA, 275 bp, Glycine max
  unsure (1)..(275): unsure at all n locations; Clone ID: 701037241H1
aaccctaacactcctcttcctcttcgatcatcacctctccacaatgccgccgaagttcgacccctcccagatagtcgacgtcttcgtccgcgttaccggnggcgaagtcggcgcggcgagttccctggccccgaagatcggtccctcggtctctcccccaagaagatcggagaagacatcgccaaagaaaccgccaaggactggaagggctccgcgtcaccgtcaagctcacgttcagaatcgtcaggcgaaggtcacggtggtcccctccgccg

SEQ ID NO: 304 - DNA, 277 bp, Glycine max
  Clone ID: 701037242H1
aagatcttccttacaaaagtttgttttcaaagtgtgttttgtttcccaaatcctactcttgtgaccacaacccttcctcctctttcttttgaaacctctttttttctattccccaaccaaacaagcaaacgctactcactcatcatcactgagatcatgggctcctaatatcaccactgtcaaaaccaccatcaccgacgctcaagccaaggtcgccaccgatcatggtcgtgcctacgtcaccttcctcgccggaaacggtgactatgtgaaaggt

SEQ ID NO: 305 - DNA, 277 bp, Glycine max
  unsure (1)..(277): unsure at all n locations; Clone ID: 701037244H1
gagacagggagacaagacagagtagtacagattactaccaatggctaccaaggtttacattgtttattattctacgtatggacatgttgagaagctagctagagagatagaaaaaggggctgcttctgtggagggagtagaagcaaaactgtggcaggtacctganacattgncctgaagaagtccttgctaagttgggagcacctccaaagagtgatgttccaattattactcccaatgagcttcctgaggctgatggctttttgtttggttttcc

SEQ ID NO: 306 - DNA, 276 bp, Glycine max
  unsure (1)..(276): unsure at all n locations; Clone ID: 701037245H1
attttggagaattggcaaaaacagggagagctcagctgacctgacananataacagcagcatacatggctcctataatcattgtcaggtcagctgctgttatttttgttggaattaacaattgccaaactgttcaaccaattgtagccgttgaaagaacagtgttctatcgagaaagagctgccggaatgtangctcctttgccttatgccttagcncaggtctttgtgaagtaccatatgtgtttttccaaactgtttattactcactcatagtg

SEQ ID NO: 307 - DNA, 276 bp, Glycine max
  Clone ID: 701037246H1
agcgttaccctcggaactgaactgaactgaactgaaccggatccagagagtgctcctaaacgacgccgtttcgcaagcatcagtagtgtagtcgcagagaatcaaatcaatggagaagggaaagggagtgatgggatcgggaggagaagatggggcgttgacttctccgacaattccattctccgcgatattcccgatccctcccggtttctctcgcacttctctcgatcaggacgattcaagctcatcgccagaagaaggacgctgaatccaatg

SEQ ID NO: 308 - DNA, 282 bp, Glycine max
  unsure (1)..(282): unsure at all n locations; Clone ID: 701037247H1
tctttgcaccgtaccaaggcaacatttataggtctcttagagtatgggagggctaatgaatgggttgtgactgaaaaacttggtgactctgtcnnnnnnnnnnnnnnnnnnnnatcaggagatgctgccaagaagaataatgccatcaagggccacccccaaaaagactccgatccaaatttgttgaaagacttaatttactggagctgggatttgctgtcttcctcttcgtatgtggatgctatgattatgttcatgggaaacacaactacttcatctatc

SEQ ID NO: 309 - DNA, 288 bp, Glycine max
  unsure (1)..(288): unsure at all n locations; Clone ID: 701037248H1
gcagttacatacatgaggcgtgtttacaccaggaagagtatggctgaatatgatccacgcttggtagctccaacatgcttgtacctggcatcaaaagcagaagaanagcacagtgcaggctcggcttcttgtattttacattaaaaaattatacagtgatgacaagtatagatatgaaatcaaggacatacttgaaatggaaatgaagattttagaagctcttaattattacctggttgtataccatccataccgttcactatctccgttgcttcaggatgcaggtct

SEQ ID NO: 310 - DNA, 275 bp, Glycine max
  Clone ID: 701037249H1
agaagtagtagcagtagcagtaggaagaggatgatcggcgtcggaaagatcaagcagtacagtaacgtcctcgacaagcccctcaccaagggcaagcaagaggttagtttgagcgcttcgcgttccttgttctcggagcttgttcagtacaaccaaacgcaggtcgacaatattggcgagcttgaacgaagactggaggatgctggatatgcggttggggctcgagttcttgagctgctttgccacagagataagggaaacagaagggagacacg

SEQ ID NO: 311 - DNA, 258 bp, Glycine max
  Clone ID: 701037250H1
accgacaagcaaacgaaaagtaaatcaatcaatcgttggaatctctcaacttatcgcttcttcctgttttagatttgggggtttccgtttcaatggacgacggcgagctggatttctcgaaccatgaagtgttttcgagtccgaacatgggggagcttccgagcagcggttcaatggacagtttcttcgacgagcttctcaaggacacgcacgcgtgcacccacacccacacgtgcaaccctcccggccccgatttct

SEQ ID NO: 312 - DNA, 275 bp, Glycine max
  Clone ID: 701037252H1
cgattggaagtttccttttgattaaacttaaagatcaagcgggccggcccagacatgccttaattgattatggtaaaaggaaagggaaagaggatgtgctttctctctctttgaattggcattggaattcaactcttctctttctctgtcgaagaacaagtagtttcagaaagatgctagagaatcttcaggctcctccgtcaacaacggaatcggccccagtggtgaagcgctatgctccacccaaccagaggaaccgttctgctaacaggcgc

SEQ ID NO: 313 - DNA, 276 bp, Glycine max
  Clone ID: 701037253H1
gtcgactcctgctaggaagaggctgatgagagacttcaagaggctgcaacaagacccgcctgcagggatcagtggtgccccccaggataacaacataatgctgtggaatgctgtcatatttggtcctgatgatactccatgggtggaggcacgttcaagttgacactccaatttactgaggactatccaaataaaccaccgactgtacgatttgtgtctcgcatgtttcatccaaatatttatgctgatggaagtatttgtttggatatattacaa

SEQ ID NO: 314 - DNA, 275 bp, Glycine max
  unsure (1)..(275): unsure at all n locations; Clone ID: 701037254H1
gaagggttaccctcttccgtcttctccagtccgaagtctgcgcctttaccgagggtcgcattgaattggaaganatcacagaagaacgaatcaataacacgaatacctcaagtgagagggagaaatggaatcgcctccgcagtgggttcaagaggggcagaaacacttaaacatatagctcctggatcatcaatttctgttgcatatcacccatcttttggaccttatgatgacctcctctttctagagcttgatgagaaacttctcccagatgt

SEQ ID NO: 315 - DNA, 273 bp, Glycine max
  unsure (1)..(273): unsure at all n locations; Clone ID: 701037255H1
cagagaattagtccatagcaatggcagagcaagacaaggtgatcctacacgggatgtgggccagcccttatgccaagagggtggaattngcccttaattttaagggcataccctatgagtatgttgaagaagacttgagaaataagagtgatttgcttctaaagtacaaccctgttcacaagaaggttcctgtacttgttcataatggaaaggccattgctgaatccatggtgatccttgagtatattgangaaacatggaaagatggtccta

SEQ ID NO: 316 - DNA, 271 bp, Glycine max
  unsure (1)..(271): unsure at all n locations; Clone ID: 701037256H1
tgaagaagtagtggaagataacaagccaccncttccctcgtttcgaaggttgctcgcactgaacattcccgagtggaagcaagcatgtttagggtgtttgaatgcggtgttgtttggtgcattcagcctgtgtatgcatttgcaatggggtcagtgatatctgtttacttcctccccagancataatgngatncaagagaaaactatgatctattcactttgtttcctagggttggctgtgttctccttagtggttatatcctccagatta

SEQ ID NO: 317 - DNA, 270 bp, Glycine max
  Clone ID: 701037258H1
caacattttacactcttttcttcttctcgttgttgcttcgctgttgaatcatggatcagaaggtcgatttcagcgctccccattccatgggaaccactatcatcggcgttacttacaacggcggtgtcgttctcggagccgactctcgaaccagcaccggagtgtatgttgccaaccgagcatcggacaaaatcactcagctcatgataatgtatacgtgtgtcgctctggatcggctgctgattctcagattgtctctgattatgtgcg

SEQ ID NO: 318 - DNA, 270 bp, Glycine max
  unsure (1)..(270): unsure at all n locations; Clone ID: 701037259H1
caaaacacaacacaaattcagattgtttcctacgcgtcttaaattttatcttcnaggttgcatttgaactttgcgcaacctcattattattaaattaaattcattgatccctcgcctagagaggggaaatccagaaatactctgattgacttatatacggatcttattattatntnccttatttaatttaaacnnnatttagttgtctgtagcgccgatgagttgctttcgtgcnttgtttctcgcggaaagatgtgagagggttganat

SEQ ID NO: 319 - DNA, 253 bp, Glycine max
  unsure (1)..(253): unsure at all n locations; Clone ID: 701037260H1
tgcgtttgtngttcatatgantcctgacctgtaagtatcatatacatggcaaacttaacttgacaacatattcctacgatcagtttccaaatggaagcgttttacacaactctcgctcccctggtccacgtctgtnctcaattttcagggctctgaattgcctagaagaaatctttgtaaganatcttcacacactatttttgcatcacttacgctgctaaacgtttcttcagatttgtggtagacctcagac

SEQ ID NO: 320 - DNA, 275 bp, Glycine max
  unsure (1)..(275): unsure at all n locations; Clone ID: 701037261H1
gaaaaagaagaaaaaaacacagcgtcctagatttcctcttctctgcttcggaagaaagagaaaacaaacaaaacaatggcgttcgcttctttcctcggcagagtcctcttcgcttctgtcttcatactctctgcttaccaacatttaatgaatatggagttgatgggggacctgctacaaaagcacttcagacctaagtttgatgccttnacacatcgggtgcattctcaagtgggctttcaaattccagagattaatctgaaatttttaattgc

SEQ ID NO: 321 - DNA, 277 bp, Glycine max
  unsure (1)..(277): unsure at all n locations; Clone ID: 701037262H1
agataccttctttcancctcccttcaacacccttttgncccnttattcttcaaagtctcaaagcaaagctcgaagacctgagaagaacaaagggttgattaaattctgtgtggttgttgttggaggttgaaacacaagttgccaccccaagtgtgtgttaatcttaaatttcacaaggcaagttgcttttttggagtatcatattgtatgaccaaatatttttgtgttttaggactagatattttgcttctggtggcaatttttctcttctccttct

SEQ ID NO: 322 - DNA, 281 bp, Glycine max
  unsure (1)..(281): unsure at all n locations; Clone ID: 701037263H1
ggaaaaggttcacatcagtattgtggtcattggccatgtcgactctgggaaatccactaccactggtcacctgatttacaagcttggaggcattgacaagcgtgttattgagaggtttgagaaggaagctgctgagatgaacaagaggtcttcaagtatgncctgggtgctggacaaacttaaggctgagcgtgaaagaggaatcaccattgatattgctttgtggaagtttganacaacaaagtattattgcacagttattgatgcgcctggacataggg

SEQ ID NO: 323 - DNA, 284 bp, Glycine max
  Clone ID: 701037264H1
ctcatcttgttttcaacgatgatattcaggggactgcatctgttgttcttgctggggttgtggcagccttgaagctcattggaggtactctggctgaccacacattcttgtttcttggtgctggagaggcaggaactggaatagcagaactaatagctcttgagatgtcaaagcagacaaagacacctatagaggagactcgcaagaagatatggcttgtagactcaaagggtttgattgttggttcaagaaaggttcacttcaacacttcaagcagccttggg

SEQ ID NO: 324 - DNA, 272 bp, Glycine max
  Clone ID: 701037265H1
gtcggcgacgacctcaaccaccgcaacctcaccgatctcgccaaaaaattcggtgacatcttcctcctccgcatggggcagcgtaatctcgtcgtggtttcttccccggagctcgccaaggaggttctccacacgcagggctggagttcggctcccgcactcgcaacgtcgtcttcgacatcttcaccggcaagggccaggacatggtcttcaccgtctacggcgagcactggcgcaaaatgcgccgcatcatgaccgtcccttcttcacca

SEQ ID NO: 325 - DNA, 274 bp, Glycine max
  unsure (1)..(274): unsure at all n locations; Clone ID: 701037266H1
gctttctgctagctacgagagatggatcttataccttcactggccagcataaacggtgataattggagacttcaagtcaaggtgcttgctgccctccgttattgctcaatttacaacattggctttcaggaggaataaaaaanaatacnacaaaccaactgtacttcaataatgaatcaacagacaagatttgacccaaatccatcctatganatatcttgtaactgaagaaccattatgcctaatcccgtancttctggactccaacccagcg

SEQ ID NO: 326 - DNA, 268 bp, Glycine max
  unsure (1)..(268): unsure at all n locations; Clone ID: 701037267H1
agaaattaacttgctttcatagttttcacatatttgangtgacatcatgaatatggaggggcagaagaaaaacaagagggtggctgttttggtgggttgcaattaccccaacactagcaatgaattgcatggttgcaaaacgatgtgttggcaatgaaggacacgctggagaagcgctttgggtttgatccctctaacattgagcttctcactgatgcacctcactcttctaataaattgcccactggtgctaatattaaggaggcac

SEQ ID NO: 327 - DNA, 264 bp, Glycine max
  Clone ID: 701037268H1
cgattttcgattctcttctctgcaactatgcctaaccctaaggtcttcttcgacatgaccatcggcggtcaacctgccggccgcatcgtgatggagctctatgccgacgtgactcccagcaccgccgagaacttccgcggctctgcaccggcgagaagggcgccgggcggagggcaagcccctccactacaaaggctcgtcttccaccgcgtgatcccgaattcatgtgccagggcggcgattcacgccggaaaggcaccggag

SEQ ID NO: 328 - DNA, 272 bp, Glycine max
  Clone ID: 701037269H1
ggtgagaaaatttcaagcacaaaaaatggcggagaagaaagtggtcatcctaggaggtggtgttgccggagccaaccttgcaaaaactatacaacatcaagccaacgtcacccttattgatccgaaagaatattttgagttccatgggcaagtttgaggggattggttgagccaacttttgctgaaaggatagtgatcaaccatagagagtacttcaaaaagggtgaccttgttgtatccagtgctgtcaacataactgaaaccgcagtggt

SEQ ID NO: 329 - DNA, 271 bp, Glycine max
  unsure (1)..(271): unsure at all n locations; Clone ID: 701037270H1
ccattttccaaatcgccaaaataacgatttcccccaaaccctgagcttttgggactgtgtaaagattgcagcttgtttctgctattgattcaaattcgaaacttgatttggagcctcatccagcactacaaggatcttaaagtcactttgcagaacttcaaatatgattttagaatgtcatacaacgtgaaaacnaattcctctatatgttttactaaagtaggttctttgtgttgaatgtacaagtataaccatttctgggttttgtgta

SEQ ID NO: 330 - DNA, 267 bp, Glycine max
  unsure (1)..(267): unsure at all n locations; Clone ID: 701037271H1
gctcgcagtatatcgtacataacggggtcgcagcttctctctctcagacgccatccaagcatcgccgtcgtcgatgtaagggacgatgagaggagctacgacggacacatatcggggtctcttccattacgcaagcgacatttctccgataacatctcaaatctcattcaggcagttaaaggcaaagacatctcgtcttccactgcgctctaagtcaggttcgtggcccaattgtgctaggnggctgtcattatcttgaggagaaca

SEQ ID NO: 331 - DNA, 269 bp, Glycine max
  unsure (1)..(269): unsure at all n locations; Clone ID: 701037272H1
gctaggcacaatttttgtnattcctatcttatcttaacattgtttcttggagttgattgaaatggcagtgcaacctgaaattgagcatcccaggaaggcctatggatgggcagctagggatacatctggtgttctctccctttttggttctctagaaggaaaacaggggagaaagacgtgacatttaaagtgttgtattgtggagtatgccactcggaccttcacaagttgaaaaatgaatggagtgattccatctatccccttgtccc

SEQ ID NO: 332 - DNA, 210 bp, Glycine max
  unsure (1)..(210): unsure at all n locations; Clone ID: 701037273H1
ctgatcaaggaggaactaacaatggaggagggtatggtctganggngaatccaaagaagacttggaggttcaatgattcgagtgaggacnaacaacaacaacactactttgttggtgttggacaagttgtgcaaagagtgtggcaaagggtttcactcttggaaagctctgtttggtcacatgaagtgccactctgagaaattgtcccaa

SEQ ID NO: 333 - DNA, 271 bp, Glycine max
  Clone ID: 701037274H1
caaacttcaaagttcacacacacaaaagaatcagcatggctttcaatcaagagttagaagctgtaacccaagctttctcagggcatggagtggatgagaaatcattggtaacattactgggaaaatgggatcctctggagagagaatctttcaggaagaagacaccacatttgttcagtgaagatcatgaacgccattttcagaggtgggatgatcaatatgtccgtctctcaagccatgaattcgtgcgttttaagaatgctgtggtgct

SEQ ID NO: 334 - DNA, 270 bp, Glycine max
  Clone ID: 701037275H1
gttggatggatgttcattttccaacttgataccgcgttcgctcactctcaacttcaacttcaattaatcaaatcccacactttctctctctttccttcaaatctcaattctattttgcaaaatctgaatcaaacacagttaaagacgcacaagaaaacatctcgctcaacaccaccaacacttcggatctacgtttccatctccgaacatcaaaaaaggaaagaaaaaccgatttacagcgacaacaacgaacgaacgattttcgaagcg

SEQ ID NO: 335 - DNA, 268 bp, Glycine max
  unsure (1)..(268): unsure at all n locations; Clone ID: 701037276H1
tcggatctctagctgacaaacaatgccggaaganggcttgtgtgacttactgcataacctacattttgagttgcatcaccaagcattctcctcaatacaaagtcctgatgttgggccgcattttgggaggtattgcccttcacttctgttttcagcatttgaatcatggcttgttgccgagcacttcaagaggggctttgatcaacaatggctgtcattaacattctctaaggctatatttcttggaaatggtcttgttgctattttg

SEQ ID NO: 336 - DNA, 271 bp, Glycine max
  unsure (1)..(271): unsure at all n locations; Clone ID: 701037277H1
ctttctcctaaaacatctccagtgggttcttcttcttctattacaacaacgtcgtccaagaccatgaccatggccatggccacgatcctgctcctgttcacggtcttcgcggtttcatcggccctagacatgtcgataattcgtacgacaacgcccacgccgccacgtcgcgcaganacgggagctgatgtccatgtncgagcagtggctagtaaagcacggcaaggtgtacaacgcgctcggagagaaggagaagaggttccagatcttc

SEQ ID NO: 337 - DNA, 272 bp, Glycine max
  unsure (1)..(272): unsure at all n locations; Clone ID: 701037278H1
tcggcgccaagtacaagctaggtcgcaagatcggaagcggatccttcggcgaaatctacctcgccactacatattgataccttcgagatcgtcgccgtcaagattgaaaacggtaaaacgaagcatccgcaattgctttatgaggccaagctctacaatattcttcaaggaggaagtggaatcccgagcataaaatggtgtggtgtagacggggaggataatgtgcttgtnatggattgctgggacctagtcttgaggatctttttgtctac

SEQ ID NO: 338 - DNA, 276 bp, Glycine max
  unsure (1)..(276): unsure at all n locations; Clone ID: 701037279H1
ctcaaattagcatggctgtcatggttgcattcttgaatttgatcatcatcttttcagtagtctctacaacaggcaagtcactgagcttaaactactatgcaaaaacatgccctaatgtggagttcattgttgccaagggcagtaaaggatgccactgctagggacaaaactgttccagcagcaattctgcgaatgcacttccatgattgtntcgttcgggggtgtgatgctctgtgctgctaaattcaaaaggaaacaacaaagcagaaaaagacg

SEQ ID NO: 339 - DNA, 281 bp, Glycine max
  unsure (1)..(281): unsure at all n locations; Clone ID: 701037280H1
attaaaaaccacattcacattattcctccgaagatgacagttcacgagtggagaagaagaaggcgccgttggaggagttcagatccaacacaggagcagaatggtgctcccagattttctccagagcgtgaatctcaagtacgtgaaattaggttaccactacttgatctccaacctcgtaaccttattccttgtccctcttatcctcgtcacgctcattcaggtttttcagancaccgacatcgaccacctccgccacctctggctccactccagtacaa

SEQ ID NO: 340 - DNA, 268 bp, Glycine max
  unsure (1)..(268): unsure at all n locations; Clone ID: 701037281H1
ganattgcctctttcaagaagcatctgagtgcttattatttgtaatatatatagtcactcaagcttctaggatttgtgccagctacatgnaaatgggaagcaacttcaggtttttnagtctttgncctcttggcattgattgcatcaacccatgctcaacttcagcttggttttnatgccaagagttgcccaaacgctgagcaaatcgttttgaaatttgtccatgaccatatccacaatgctccatcatagcagctgcattgataag

SEQ ID NO: 341 - DNA, 270 bp, Glycine max
  unsure (1)..(270): unsure at all n locations; Clone ID: 701037282H1
caaagaagcaccgcgacgctgtctctcccactcttctccgccgccggtaaatgcaattctttctccactctttcatttccttacaaaaactaagntcacgcaccttcgatttcgcatgctcttttttntgttctttctctcttttaattcaattggttgcacataaattccatttnccattcttcctccgcttgcctttcattacattaccatattctctgtgttccgctccgcgtgcgtgtgcgtctagggtttccttaacaataacaa

SEQ ID NO: 342 - DNA, 257 bp, Glycine max
  unsure (1)..(257): unsure at all n locations; Clone ID: 701037283H1
cgcgtttgggagaagaagagcaaaatcgctgtgaaaatgagcggaacggtgaagaaagttagcgatgtagcattcaaggtgggaaggaacatcgattgggatggaatggcgaanttctggtctccgtgaggctcgcagggagttctccaatctccgtcgcgctttcgacgaggttaactcccaactccaaaccaagtttagccaggaacctgagcccattgattgggattactatagaaagggaattggcactcgtt

SEQ ID NO: 343 - DNA, 268 bp, Glycine max
  Clone ID: 701037284H1
ctttacacccccctctctattttgcgttcattctgttttccagttgaagtctttccctagccaatggccactgatcgtttgacccgggttcacagtctccgtgagaggcttgatgaaaccctcactgccaacaggaagaaattttgggcccttctgtcaaggatcgaagctaagggcaaggggatcctgcaacaccaccaggtcattgctgagtttgaggaaatcctgaggagaacaggcagaagcttactgatggtgcctttggaga

SEQ ID NO: 344 - DNA, 270 bp, Glycine max
  unsure (1)..(270): unsure at all n locations; Clone ID: 701037285H1
cttcttcactcttgattcttatctctcacactgaacactcttgtagntaatcgaatttctcattccgcagaaaccttcaacgatggccgctgaaacgattccctaccagaacggcgtcgttgccagctccaacgattcaccgccacgggcaagaaatcgcgggagaacgannnnnnnnnnnnnnnnnngaagcagaagaagaacaacaaggcatctgaggccccggttcctaactcttccgaagagagtgacgatgcgaaagacaacacg

SEQ ID NO: 345 - DNA, 269 bp, Glycine max
  unsure (1)..(269): unsure at all n locations; Clone ID: 701037286H1
gccctcagcaccagccgaaagccaagaaaaagctttcgatccctgtaactgcgttcgactatttagggttttnncggagacaatggcggatgaatcggagcacacgggcggcgcggctgccggcgaatcgctgctcgacaagatcgccgagaagattcacggccacgacgatcttcctcttcctccgattccgattcggataaaaaggaatcttcgtcgattaaggaganggttttccgcctctttggaagggagaagccagttcactc

SEQ ID NO: 346 - DNA, 267 bp, Glycine max
  unsure (1)..(267): unsure at all n locations; Clone ID: 701037287H1
cgaaaccctaagcactcgctcgggttcgtgtagtgccaaaccctagggctcattttccagatctattcagtttttctctcctctcttttccgatccaccgttggagatcgaagatggtgtcgacgccagcaagaaaaggccgcacagaagaagnnnnnnnnnnnnnnncaagagaggtggcaaagctgncgccgctgccgttatggccgccactcttccaaagccgccgacaaggtcgccaacggaatcgccgatattcagatttcg

SEQ ID NO: 347 - DNA, 119 bp, Glycine max
  unsure (1)..(119): unsure at all n locations; Clone ID: 701037288H1
tggtggtccaacatacacattatatgccaaagagatggcgtggcaaagaaagtactgaaatggtccatgtngagtttgaaaccttattccagtatactggaatgatgttacttgaggag

SEQ ID NO: 348 - DNA, 266 bp, Glycine max
  unsure (1)..(266): unsure at all n locations; Clone ID: 701037289H1
gatgatggacaagggggtgttggatgatgtgataagaaggcttctggaagggaaaggagggaaacaggtgcaactctctgantcggagatccgtcaactctgcgtcaacgccagacaaatcttcctctctcagcccattcttctcgacctccgtgctcccatccgcatctgcggtgatatacatggtcagtaccaggattgctgaggctttttgaatatggtggctaccctcctgcggcaaactacttgtttctgggggattatgt

SEQ ID NO: 349 - DNA, 266 bp, Glycine max
  unsure (1)..(266): unsure at all n locations; Clone ID: 701037290H1
ctttcctggggatgtgaccacagaaaggattgcngctcttcaggaancatactggagtatggcgtcagactttctgaagcagatggaatcgattacactgatcctgaagagcttgagttgttggtcagaactcttatagatctggatgcaatggatggtaaacaaagtgtttctttattggcagagtgttctagttcccctgatgtcagcactagacgagctttagcaaatgcattggcagcagcaccatccatgtggactcttgg

SEQ ID NO: 350 - DNA, 266 bp, Glycine max
  unsure (1)..(266): unsure at all n locations; Clone ID: 701037291H1
aactatgttttcgtgggtgtcatcagtgctactgttttcttccaaatcataatagttgagtacttgggaacctttgcaaacacaacacctctcaccctggcacagtggttcttttgcttgttggttggatttttgggcatgccaattgctgctcgcntaaagaagatccctgtttgaagcacctgaatggataaaaagcagtagttggttaccgttagttgttgcattgcttcaaggtccattatgcctttacattcactaactcg

SEQ ID NO: 351 - DNA, 268 bp, Glycine max
  unsure (1)..(268): unsure at all n locations; Clone ID: 701037292H1
aaattgtnaaattcacattactctctcttcacttctttctccgtcatgactacggaaccagacgttgaatccaagtatgcncacaacggcaaggtcatggtgggcaccgccattctcctcttcattctcataataatcattatnttctncnanacntacgtccgctctgnngcngtcgcngccgcttctactcattcgcttccgaccaattctccgccgcngctctctcgacgacccgtgcntcgacncttccatcatcaagtccctt

SEQ ID NO: 352 - DNA, 268 bp, Glycine max
  Clone ID: 701037293H1
cggtcgaggcatctgttccttctagtggacctaatgccaatcctttagatctctttccccagggccttccaaatgttgggtctggtgctgctggtgctggctctttagactttcttcgcaacagtcaacagttccagccttacgcgctatggtacaggctaatccacaaatattgcagcctatgctacaagagcttggcaaacaaaatcctcatcttatgcgattgattcaagagcatcaagttgacttccttcgcctaattaatgaa

SEQ ID NO: 353 - DNA, 262 bp, Glycine max
  Clone ID: 701037294H1
tcttgcattgggaaaggctaaagaagaaattgatatgcaaattggcaaagatgaatatatacgtgagtcagatataagcaaacttgtgtatcttcaagctatagttaaagagacactaagattgtatccaccagccccttttcatcacctcgtgaattcacagagaattgcatcctaggtggataccacatcaaaaagggaactcgacttatccataacttgtggaagatccacagggaccctagtgtttggtcagacccat

SEQ ID NO: 354 - DNA, 275 bp, Glycine max
  unsure (1)..(275): unsure at all n locations; Clone ID: 701037295H1
cgttgctctgcttcaaccttgcggaagaagaagacgcgccatggtgaagtactccagagaacccgacaatcccaccaagtcctgcaaggccagaggngctgaccttagagtgcatttcaagaacactagggagactgcctttgccatcaggaagttgcccctggttaaagctaaaagatacctggaggatgttttggcccacaaacaggccatcctttccgacgcttctgtggtggtgttgggaggacagcccaggctaagagcagacactccat

SEQ ID NO: 355 - DNA, 275 bp, Glycine max
  unsure (1)..(275): unsure at all n locations; Clone ID: 701037296H1
cttaactccaaacgaagaaaaaagactgagagcaattgcatcaacaacaaattgaaaggatgtcgatcttcgagtacaacggaagcgccgtgntggctatggtcggcaagaactgcttcgccattgccagcgaccgaagactcgcgttcagctccaaaccatagccacggatttccaacgctttccaagattcacgacaagctcttcatcgctctctctggcctcgccnccgatgctcaaacattgtatcagcgtttgttttccggcacaaatgt

SEQ ID NO: 356 - DNA, 295 bp, Glycine max
  unsure (1)..(295): unsure at all n locations; Clone ID: 701037301H1
acncctcttcaacaacccttgnttngtnctgtgcaagtgatcttnaaaggnacaanaatggngaagtctanaaactttctcctgcgtctgtctctactagcctnngttccctcctgtcactgnnaaaagaaaatagggcggntacctctancctcaattntacgacggttcatgcnccagagctcaagagnttgtcnnatccatcgatgccanggctgtgggcanaaggnncccgcatggtgcttcgttgctcagacnacantncatgaatgnttgtcaanggtgtgntgaaccg

SEQ ID NO: 357 - DNA, 293 bp, Glycine max
  unsure (1)..(293): unsure at all n locations; Clone ID: 701037302H1
cctccgtaaattattcatagcatatttcaaaccancactcaaaaggcttccctccctgacttggatttgattgatttcattacattgctacactatattctttttattggtgaattgctatttgctacactatattttaaggacaattatacatagactatatggggttgatggctgcgaaccaaactcaattgttgtctaagatggccatcggagatggacatggtgaagcatccccatattttgatggatggnaggcttatgatgaaaacccctttcatccaaagagaatc

SEQ ID NO: 358 - DNA, 288 bp, Glycine max
  unsure (1)..(288): unsure at all n locations; Clone ID: 701037304H1
ctcaacacgtcaaaaattcatctcatctatctgtagatcggagaaaccaaaaaaaaaaaatggagttcgacgagaagaaagcaatgatccgcgacgtggngttacaagtcgttttcatctcgctcacgattttcagcttcctctggatgcacggnatccctcaaaacctctangccaagntccgcnacngtcccccgaacccacgggccgtgcaagccaagcgccatttcgtcaaaggcgcgnagttcctcgcccaagccagaagatccaaaagngttctccgnaatt

SEQ ID NO: 359 - DNA, 165 bp, Glycine max
  Clone ID: 701037305H1
gccgtttctgaagggaccaaggcggttaccaagtttaccagctcttgaattagggtttgttaggcggttgtgttgcagatctagggttttctgtggatttcttttcttaaaaattagtttgtagatgtaatgatctgaacagttgttaatggaaggtttcgtttg

SEQ ID NO: 360 - DNA, 285 bp, Glycine max
  Clone ID: 701037306H1
gtgtactactccatgtatgggcatgttgagaaactagcagaagaaataaagaaaggggcttcctctgtggaaggtgttgaggccaagttatggcaggtacctgagacactgctggatgaggtgcttggtaagatgagtgcaccacccaagagtgacgtaccagtcattacccccaatgaactatccgaggctgatggctttgtattcggcttcccaacaaggtttggaatgatggctgctcagtttaaagcctttctagatgctactggaggctttggagagcac

SEQ ID NO: 361 - DNA, 284 bp, Glycine max
  unsure (1)..(284): unsure at all n locations; Clone ID: 701037307H1
cgggatccgtgattttnattcatctgtacttgtagagcctttttctactgcaaagggatggatgacaagtgctaactaagcactnnnnnnnnnnnnnnnnnnnnnccttcatcgccaaacacaatgaaggaattgggcgtggttgcaatcctcttttcaatagagttcttggacgttatcgtctacactgtaagcaaagcagccatgaagaagggcatgaatgactttgtctttgtcatgtactccaatgccttcgcaattgcctcctncttccataaccttct

SEQ ID NO: 362 - DNA, 286 bp, Glycine max
  unsure (1)..(286): unsure at all n locations; Clone ID: 701037308H1
cgcaagcaaaaagaaagaatcccaggcgaggagaaagatggaggggaaggagcaggatgtgtcgttgggagcgaaccagttccccgngaganagccaattgggacggcggcgcagagccaagacgacggcaaggactaccaggagccggcgccggcgccgctggttgacccgacggagtttacgtcatggtcgttttacagagcagggatagcagagtttgtggccacttttctgtttctctacatcactgtcttaaccgttatgggagtcgccgggctaagtcta

SEQ ID NO: 363 - DNA, 280 bp, Glycine max
  Clone ID: 701037309H1
ctgacacggggaggtagtgacaataaataacaataccgggctcattgagtctggtaattggaatgagtacaatctaaatcccttaacgaggatccattggagggcaagtctggtgccagcagccgcggtaattccagctccaatagcgtatatttaagttgttgcagttaaaaagctcgtagttggaccttgggttgggtcgatcggtccgcctccggtgtgcaccggtcggctcgtccttctgccggcgatgcgctcctgtccttaactggcgggtctg

SEQ ID NO: 364 - DNA, 280 bp, Glycine max
  unsure (1)..(280): unsure at all n locations; Clone ID: 701037310H1
ctctctctgtttcgctttcaccgaagaataacttgactttcccgnactccacctgagaaaaagatacccttaattcgcaggcgcgtcttgtgttggacaacaaccacaagatgattaacttcgaagaaaccgagttgcgactcggcctccctggcaangactcagcactcaagggaagtgctgccaagagaggcttctctgaaactgcttctgttgatttgaagcttaatctttcttcttgcataacgatctgcctcggattcaccctcntctgtgtcta

SEQ ID NO: 365 - DNA, 280 bp, Glycine max
  unsure (1)..(280): unsure at all n locations; Clone ID: 701037311H1
caaaattctcttccgtttcaggattanngtttcaccgttacagtgaaacatggcaacaaccaaagcgaatctctctgcgtatctttgcgctgctcctcttgatttccacctcttcgtttcaccttctccgcgcttccgatgacgccgatgatgatgcgatcttctatgattcgttcgacgaggattttgaagaccgttgggttgtgtctcagaaagatgagtacagtggtgtctggnaacatgccaagagtgagggacatgatgattatggcttcttgtc

SEQ ID NO: 366 - DNA, 276 bp, Glycine max
  unsure (1)..(276): unsure at all n locations; Clone ID: 701037312H1
agacaccaagcttctctccacgcccttcttgggtaatctgaagtgcagcgatggcngatggattgcactcgcggcatccatcagtagttcagaagttatctggacagtcttatttgttgtctaggcttgcccctactcactcaagaaactattccacaactggtagttacttcaatggaggcttgcagtcttcgggnttggttccagtcatggcacatgcaccggctgagaaaggagtgtctggattttgttggattcatgatgggagagtgtcgg

SEQ ID NO: 367 - DNA, 277 bp, Glycine max
  Clone ID: 701037313H1
cgaagagaaggccacgaaaaaaagaaaacccagaaaaactctgaagaagagttcgttgctttctgttcactgcgaagatgaacggaggcccatctggtttcacaaatgctcccgtcacaagggctttcatcatcacttcggcgcttttcacaatcttctttgggatccaaggccgtttcagcactctggggttgtctatcaggatatttttggaaagcttcgctttggaagttgatcattccatattttcctctcgtcaacacagattgatgtttgg

SEQ ID NO: 368 - DNA, 280 bp, Glycine max
  unsure (1)..(280): unsure at all n locations; Clone ID: 701037314H1
catcaccttccgaaataaggggttcattagtcagcacaaatgtcctcatgataaccggtggacagtttctttcctatcttgttaacctcgcttttactggtgttcctggtacttggcgatggatgcttgntgtttctggtgtgcctgctgttgttcagtttgttctcatgctcttcctcccctgaatccccaagatggcttttngtcaagcataggaaaaatgaagccgttgatgtgctttctaagactttgacgttgctcgcttagaagagaagcgatt

SEQ ID NO: 369 - DNA, 283 bp, Glycine max
  unsure (1)..(283): unsure at all n locations; Clone ID: 701037315H1
cggatgcgttccgggacgtttactacgacgaactcgaagatacaataagctatacaaacaagacgatcccagccccaaagcttcttcatagtcttcatcatcgcatgggtgaaagtgntatgagtcgatgattgttgggttattgtcgtcgtcaatacaccagatgactaggtgaattncnttaaggnaccatgtgctgaaggatgtcgggncacaacgctctgataggatgttacattggggtatagggcttatagacggccttgttggagccgaatgaatt

SEQ ID NO: 370 - DNA, 286 bp, Glycine max
  unsure (1)..(286): unsure at all n locations; Clone ID: 701037316H1
cngcagcagacgatgatggtttgatgagtgttaaggaagaacattttaacaatggtttcaaatctatgccatagttcttatctccctataaataccaaatcccaatttctttctctccatccacacactttcctttcncggnacccatctaagattacccaataagaagcnactctcaatttctgacatttcttcaatcgagtgttccagtggtatcatccaagaggaacgtaggggaagataaagagatgacgataaaactgttgttcgtgtttnggaggggaag

SEQ ID NO: 371 - DNA, 292 bp, Glycine max
  unsure (1)..(292): unsure at all n locations; Clone ID: 701037317H1
catggctgnagatgggaacaacaacgatgtacccttacacaaattcaaagacagcaatccaaaccctggagagttcgatgcaaagggttacagcctcagcggaaaaatcatgctttcagcaataatccttcttttcttcgtcgtcgttttgatgttgtgccttcatatctacgcgcgctggtacctccggcgtgctcgccgccgccagctccggcgccaacgcgagctccgccgcacccagcttgtcttttacaacgacgacgccacccccgcagccgtgtcagtggctcga

SEQ ID NO: 372 - DNA, 289 bp, Glycine max
  unsure (1)..(289): unsure at all n locations; Clone ID: 701037318H1
gttcgtttcactctcacaatggactccctctctctcttctgcaccggagcccttctcgccggcggcctctactggttcgtctgtgttctgggccccgccgagcagaagggcaaacgcgccaccgatctatccggcggctccatctccgccgagaaagtccaagacaactacaagcagtactggtccttcttccgccgccccaaggagatcganaccgccgacaaagttcccgacttcgtcgacaccttctacaatctagtcaccgacatctacgagtgggctggggcag

SEQ ID NO: 373 - DNA, 285 bp, Glycine max
  unsure (1)..(285): unsure at all n locations; Clone ID: 701037319H1
aaggattctacccgccgctcgatgggaattgcgcttcaaggcgtctcgtagggctaatccgcctcacgagggtcaccaacggcacgtgcctttggngggccgaggccccctactgctggtcggcaaacggacggcgggcgcacgcgtcgcttctagcccggattctgacttagaggcgttcagtcataatccaacgcacggtagcttcgcgccactggnctttcaaccaagcgcgatgaccaattgtgcgaatcaacggttcctctcgtataggttgaattacta

SEQ ID NO: 374 - DNA, 283 bp, Glycine max
  Clone ID: 701037320H1
gcgaaggtttaatgtgaggctttggaaagcctttaccgactgttttaactgccttcctgtggcagcccttatagatgaaaaaatattgtgcatgcatggtggtctttcccctgaactcacaaacttggatgaaatcaggaatctacctcgtcctactgcaattcccgacactggcttgctttgtgatttgctttggtctgatcctggtagggatgtgaagggttggggtatgaatgacagaggagtgtcctacacctttggccctgatatggtcgctgaattc

SEQ ID NO: 375 - DNA, 247 bp, Glycine max
  Clone ID: 701037321H1
gttaaaagggaacatcttaacttctctactcaatcctcaatccttatcactcccctccccctctctcccatcaccactattttcaccaaaagactgtgaaactccctcacttctttagccatgccccagaactgcatagcaccaaaaccagaatactgcaatagtactcatcactctgtggaagaaccaccagagatgaccgagccacatgactcaactgttatttcctatcccatgcaaaccaatg

SEQ ID NO: 376 - DNA, 283 bp, Glycine max
  Clone ID: 701037322H1
tggggccagtgaagaaggctatggaagatgcaggattacagaagagtcagattgatgagattgttcttgttggtggaagcacaaggattccaaaggtacaacagcttttgaaggactactttgatggaaaggagccaaacaagggtgtcaaccctgatgaagcagttgcctatggtgctgcagtgcaaggaagcattttgagtggagagggtggtgaagaaaccaaagacatccttctcctggatgtggctcccctcactctcggaattgaactgttggtgga

SEQ ID NO: 377 - DNA, 280 bp, Glycine max
  Clone ID: 701037323H1
caaagtacgatgggattgtttgtgttatggagatgggatcttggtcgagtaggttgtaaatggactgcttcagaggcaggactgggacactgcaattaagatgccccttggagtagttcctgcaggtacgggaaatggcatggcaaagtctcttcttgattcagttggtgatccttgtacagtacccaatgctgttcttgccatcatacgaggccgtaagcgaaaacttgatgtggccaccatcacacaaggggagaccagatttttcaggtgttgatgc

SEQ ID NO: 378 - DNA, 280 bp, Glycine max
  Clone ID: 701037324H1
ctcacactcactgcagatctcaatccatggctaccattgttagcatcaaggcccgccagatctttgacagtcgtggcaatccaaccgtcgaggtggatttgacatgctccgatggtacttttgctagagctgctgttccaagtggtgcatccactgggatttatgaggcccttgaattgagagatggaggatctgactaccttggaaagggtgtatcaaaggctgttgacaatgtgaacaccattattgcccctgctttggttggcaaggaccaatcagc

SEQ ID NO: 379 - DNA, 280 bp, Glycine max
  unsure (1)..(280): unsure at all n locations; Clone ID: 701037325H1
gaggcttctgaacagtttctgacacgaaattcagccacaaagttgaccatcttgggatggatgagaatatcatcatgttccaccatttccccacattgatcccaacaaggagattccaacaattgaaaactccttatcatctttctcttgcaacatcgtttcgcggttcctttgccgtgatttcaattgttgcataagaaaacatcactcactagttctttcctctcctttttcattcaatttctctgattgacacaattgccgcncagtcagtgattga

SEQ ID NO: 380 - DNA, 251 bp, Glycine max
  unsure (1)..(251): unsure at all n locations; Clone ID: 701037326H1
ctccctttcaacaaaacacaggggaagggaaagtagncgtagtagncngtagtaangnacgaaacaccanacatgagtttcttgttaccattnccaaccctctngttgtgtctccnngttgtgttaatttattccctnnaatcaaaggccgatgaatttgatttcgatgagtccttgttcaatgcaaaaacacgcttccagtggcagaaaacttgcnggaagatgcaattgttccgtgggaatgggttatg

SEQ ID NO: 381 - DNA, 276 bp, Glycine max
  unsure (1)..(276): unsure at all n locations; Clone ID: 701037327H1
atttctctcatcaaagtttcaacctttgataagattgaatcatggggaacgccctgagattcctctacagccattgctgcaagcccacagcagctggtgnttctgaatcacttggnccacacggtgtttcctctgccaccgttggtgtttcaacacttgcccatgatctctttcactttgacatcacctcccaggtcccggaaggactcagcaagcatgttgtgtcttctaagaaggctcaggctaattggtatagacagttagtagtgttggaaa

SEQ ID NO: 382 - DNA, 273 bp, Glycine max
  unsure (1)..(273): unsure at all n locations; Clone ID: 701037328H1
tgagaattgagagtagtgcggtttgccggtgagatctgttgtttaagttagtgctgtaatgtcatgctattgctatctcatagatttagatctaaaatctcccttcttcattgctgaacgcggttaaggctatgttatgaatgcgttctaattaagacacaataatgacaaggnaacaagcaagttccacgagacgtggcggtcttcaggagtctgcattccaaatccantcttctcctctatctccatatcccttgtctattgtagccatcc

SEQ ID NO: 383 - DNA, 280 bp, Glycine max
  unsure (1)..(280): unsure at all n locations; Clone ID: 701037329H1
gacncgagggttctggatcantttgaccttaaagcttgggtctatgtttcacnagattttnatgttgntngctcttacaaacagcgattcttaaggcacttcggtccttagcagcagaagaaaaagacttgantctgctccaacttgaattgaagcaaagactgatggganagaacatttttgcttgttnnagatgatgtttggnacgaaaactattggagttgggaggccatacaaattccttcatttatggntcttcaggaagnangttctcattacc

SEQ ID NO: 384 - DNA, 277 bp, Glycine max
  unsure (1)..(277): unsure at all n locations; Clone ID: 701037330H1
tccgaacgaaaacaatcatgggcagcgaacccacccgcgccttcagaatccgacccgaaccaaaacccgggttcggagtctttccgtactttcgaagacatgaacgaacttcgagacagtcttcaaccgcttcgacgccaacgggacgggcaagatcttccgccgacgaactcgacagcgtcctccggtcgctcggatcggcgtctctcccgangaactccgccgttcatggaagacctcgacacgacgtgacggttcatcagctcacgattcgcgc

SEQ ID NO: 385 - DNA, 279 bp, Glycine max
  unsure (1)..(279): unsure at all n locations; Clone ID: 701037331H1
ccctgctattcttcttcatcactcttctgttctcttttctcccctataataatatttccaacacaacaacactcngcagacaagtagccagaacaagaaaatcctttgacacattgatcacttcctttaaggaaacaaacatggaanggggtcacatggggtggttcctctnctgttgttgtttttctctacttttntttcattcttctgggtcacccagaagaaattgcccatcatagcctttgaggatggtacacccccttgtttgggaccataatt

SEQ ID NO: 386 - DNA, 293 bp, Glycine max
  unsure (1)..(293): unsure at all n locations; Clone ID: 701037333H1
ctgctataaaaaacccagtgaatggtatgcagaaatcactcccanncgaagaatcatccatccattccaaaacagattgtagaacaaagaatttcgaagcacagtgttgaacaaagaattccaaagcagagtgttgaacaaagatttccaaagcagagtgttgaacaaagaattcaaaagcagagtgttgaacaaagaattcaaaagcagagtgtggaacaaagaaaagacatacgagaatatntagactaaaatggcaccaaaacaaccagtggcatcatcaaaaccacagt

SEQ ID NO: 387 - DNA, 287 bp, Glycine max
  Clone ID: 701037334H1
gccaacggactctccggtggatggggaaaccttggaggaggggctacccagctcatcatgccccttgtgttctccctacatccgcgacattggcgctaccaaattcaccgcttggaggattgcattctttgtccctgccatgttccaaatgctcacagcattctcaattctgatatttggtcaggacatgcctgatgggaacttccgccgcttgaagaagtcaggggaaaaagccaaagatgatttttcaagagtcttatatcaggtgttacaaatataggggatgg

SEQ ID NO: 388 - DNA, 286 bp, Glycine max
  unsure (1)..(286): unsure at all n locations; Clone ID: 701037335H1
ctcactgcaacggncgccggagatccgtcgctctcctcctccacnaccaccgcgatgggcgccaattccatgcttcgccgagttctctcacgatctcgacgaccagatctcccagctcatgcagtgcaagccactctccgagcaacaggtccgaggtttatgtgagaaggctaaggagattttaacggatgaaagtaatgttcagcctgttaaaagccctgtgacaatttgtggcgatattcatgggcagtttcatgatcttgctgaatgtttcgattggagggaa

SEQ ID NO: 389 - DNA, 282 bp, Glycine max
  unsure (1)..(282): unsure at all n locations; Clone ID: 701037336H1
tctatatttatccacacacaacacacaacacacacctttgcctctgctccgcataactcctncacacacacacacaaaacagaacacaacacatacacatacacatgttgttgatgagtggaggcaacaaaaaacacagatccatcacacacatgaacaattgatctttgtcctttgtatataatttgattctaatttttggcactaagagagccactcaaggctctgggatgtactatacgccatcggggttctgattttcggcggagagaagtcangagc

SEQ ID NO: 390 - DNA, 281 bp, Glycine max
  unsure (1)..(281): unsure at all n locations; Clone ID: 701037337H1
ttttatttgcatgtgaaggacaaattcagaaagtatacataatagagatggtggccatgatggagaggttgcaaattcaaatcagaaaaatagtgagttatggttgtatttttcagttactgatgtgtaattatatccccattgtctggtaaagtggtaatacccagtgtgtaattctttgggaaatgcttttttttttattttttttccntttgaattcagaggacatgtcaaaagtacttggttcangtggtcaacatgagggagggtcatcctcctat

SEQ ID NO: 391 - DNA, 281 bp, Glycine max
  Clone ID: 701037338H1
ctgacggttatccattcttacttttatctcaggaatcattggatgcactaaacgagcttctaaaggaacgcatacctattaatcgtttcagacccaatatccttgttgaaggttgtgatccatattctgaggacttgtggacagagatcaagataagcaggttttcatttcttggtgtcaaactgtgctcccgttgtaaggtacctacaatcaatcaagagactgggatagctggatctgagccaactgagactcttatgaaaactaggtctggcaaagtc

SEQ ID NO: 392 - DNA, 277 bp, Glycine max
  unsure (1)..(277): unsure at all n locations; Clone ID: 701037339H1
cgcaagcnaaaagaaagaatcccaggcgaggagaaagatggaggggaaggagcaggatgtgtcgttgggagcgaacaagttccccgagagacagccaattgggacggcggcgcagagccaagacgacggcaaggactaccaggagccggcgccggcgccgctggttgacccgacggagtttacgtcatggtcgttttacagagcagggatagcagagtttgtggccattttctgtttctctacatcatgtcttaacgttatgggagtcccggggtaa

SEQ ID NO: 393 - DNA, 280 bp, Glycine max
  Clone ID: 701037340H1
cagaaacctgctctcaagttcttgatctatggcagaacaggttggattgggggtttgctggggaagttgtgtgaaaagcaaggaattccctatgaatatggaaaaggacgcctggaggaccgatcatcacttgtggctgatattcagaatgtgaagccaacacacatttttaatgcagctggagtaactggcagacccaatgtcgattggtgtgaatctcataagacggaaaccattcgcaccaacgttgctggggatttaacattggcgatgtcagcag

SEQ ID NO: 394 - DNA, 276 bp, Glycine max
  unsure (1)..(276): unsure at all n locations; Clone ID: 701037341H1
tgatgatggagatggattccatgtgtatgtgggtggtccttgtggccattgctggtgctcttttagtcctaagatctatgctcaagaatgtaaattggnggctctatgaatccaaattgggtgtgaaacagtactctttgcccccaggtgacatgggatggcccttcattggcaacatgtggtccttcctcagagctttcaagtccaaggaccctgattccttcatctcctcctttgtctccagatatggaagaatggaatgtacagaccttgatg

SEQ ID NO: 395 - DNA, 274 bp, Glycine max
  unsure (1)..(274): unsure at all n locations; Clone ID: 701037342H1
ctttcttttttcccgcagtcatgggcaaggtcaagatcggaatncncggatttggaagaattggccgtttggtggccagggtggctctgcagagagacgatgttgaactcgttgccgttaacgatcctttcattaccaccgattacatgacatacatgtttaaatacgacagtgttcacgggcactggaagcatcacgatgtcaccgttaaggatgagaagacccttctcttcggtgacaagccagtcatgtttttggacacagaaccctgaag

SEQ ID NO: 396 - DNA, 274 bp, Glycine max
  unsure (1)..(274): unsure at all n locations; Clone ID: 701037343H1
caaattctacggttcgttgggggatcgagaatgaccagctcagcggttacggaacaatttgacaaatgcatgaagaagcaagtagangcaattgcacgagttttgcatttatttcaatcctacaaagaggacaatattccgtgcaaaatcgacgagggtctctatttgggttcgattgccactgcagctaacaagcctgctttgaaagactgtaatattactcacattttgactgtggctggtagaataccactgcacatcctaagatttgtct

SEQ ID NO: 397 - DNA, 275 bp, Glycine max
  unsure (1)..(275): unsure at all n locations; Clone ID: 701037345H1
cagacccctagttctgttggatcttgcatatagtaaccctttattgattcgcaaagatnaaggtcacagtggtttctcggagtggacgagaagtggttnaaggtggcattgagctcagtgattctgctactatagcagatctgcaggaggcaattcataagcgnaccaagaagtacccatcaaggcagcgcttgacattccagtccaacctggatcaaaggaaaggctgttgtcttaattacaaaaagagtctgnaagactatacagtggaattc

SEQ ID NO: 398 - DNA, 246 bp, Glycine max
  unsure (1)..(246): unsure at all n locations; Clone ID: 701037346H1
caaattcaacttgcanattccaattcctggggagttggntccattttccgaacgaaccatctcaaatccaccgccacataatgtaactgtatgcgaatgcgaatgtgaacgcggtttcgatttagatccagattcatggggatttgctttagcattgaagaccaaaaccactttccatctccgatccaacgcgaagctaaactgcngtaggtcctgaatctggcgctccattggctccatgaacat

SEQ ID NO: 399 - DNA, 275 bp, Glycine max
  unsure (1)..(275): unsure at all n locations; Clone ID: 701037347H1
aatttattatctttctctaagaactctttccaattttttctctctcttcctctttagcttcatcgccatggcatcaccagnaagaaccttctttgccttcattctcgccgtcgtcgctctcttcttcgccgccgncaatgctcaagacctctccccggctccgagtcccgatgccggagcggcgggatccgttcgagctccgtcgccatgatcggagcttcggttgtgctgtcatgatggcatcttgaagcatgaattcgttaattcgntgggtt

SEQ ID NO: 400 - DNA, 271 bp, Glycine max
  unsure (1)..(271): unsure at all n locations; Clone ID: 701037348H1
ctgctttggtctggtctctcagctctgatagattngcaccgattctgggtnngagccaaaaaagctttcttttgtttcctactgtttttcttttcggcaaagtagaagatatttgtgattttcttctgtgaattgaattcgagtcgttgcttctggcttcggtgcttgctcgttttgttggcaccngttattggtccaattgnaatgaaagagtttgagtganaaggagattagactgtgtggtctggccatggagaattctataaggcaa

SEQ ID NO: 401 - DNA, 288 bp, Glycine max
  unsure (1)..(288): unsure at all n locations; Clone ID: 701037349H1
cgaccttgaacgcttcccatcttggtgagtaacacgaatctgaggnaaaaaaatgtcgattatgcnactttacgggcgcagaagagcgtggtgaagcggtcgaagaagtacttggaagangcgctttacatgaagctcttcaaagatggaagcttcccagcttcatcgttcgccagagcctncaacaacttcgtcaagagccgaaagcgcgtttacaatgggaggtaggcgacacgncangaagttcgcgatcgcaagctctatcaacccgctcttagctatcagaaa

SEQ ID NO: 402 - DNA, 286 bp, Glycine max
  unsure (1)..(286): unsure at all n locations; Clone ID: 701037350H1
gttggaaagaaaccctagcaagcggaacaatggcagacgttgaggtcgatgtgnnnnnnnnnnnnnnnnnnnnnnnnnnnnnnnaagagaacgttcaagaagttcagtttcaggggcgtggatctcgatgcgcttctggacatgtccaccgatgaactcgtgaagatgttcagtgctcgcgcacgtagaaggttccagagaggcctcaccagaaagcccatggcctcgatcaagaagcttcgcaaagcgaaaagagaagctccaccaggtgagaaccagaacctgt

SEQ ID NO: 403 - DNA, 275 bp, Glycine max
  unsure (1)..(275): unsure at all n locations; Clone ID: 701037351H1
ctgctttttcccacacnctgctaggnntcagagtcgccgcgcaccctcacttggcttcgactngctctctcaatcgcngattccactcgttatctcgtcntcactaagttcagatggccatggaggttactcaaatccttttaaacgcgcaagcagtcgatggcacnttnaggnaacaagncgangaaagctgnaacnatttcaggnacagtatctccaagtttcggttctctcttgctggggaatggcgaatgagacnagcngcagagagtcgc

SEQ ID NO: 404 - DNA, 279 bp, Glycine max
  Clone ID: 701037352H1
gaagggtgattaccacaggtaccttgccgagttcaagactggggcagagaggaaagaggcagcagagagtactttgcttgcttacaaatctgctcaggatattgctcttgctgacttggcccccactcaccccattaggctgggacttgctctcaacttttctgtcttctattatgaaatccttaactcgccagatcgggcttgtaatcttgccaaacaggcatttgatgaggcaatttccgagcttgacacattgggtgaagagtcatcaaggatagt

SEQ ID NO: 405 - DNA, 273 bp, Glycine max
  unsure (1)..(273): unsure at all n locations; Clone ID: 701037353H1
agaaactgaggacttagctagtagttagagatgcctgagttttgcgtgacaggtggtactgggttcatcgcatcttacctggtcaaggccttactagagaagggtcacacagtgaggaccaccgtgagaaacccaggggatgtggagaaggttggttttctgactgaactaagtggagccaaagagagactgaagattttgaaagcagatctattagtggaaggaagctttgatgangcatgagaggagttgatggtgtcttcaaggcgtccc

SEQ ID NO: 406 - DNA, 212 bp, Glycine max
  unsure (1)..(212): unsure at all n locations; Clone ID: 701037354H1
tgattgaagaagatgccgatcagaaacatcgccatcggaaggcctgaagaggctactcaccccgacacgttgaaggcggggttggctgagttcatctccaccttgatcttcgtgttcgccggttcaggttccggcatcgctacaacaagctcaccgacaacggcgccgccatcccgccggcctcatctccgttccatcgnccatgctttcgc

SEQ ID NO: 407 - DNA, 277 bp, Glycine max
  unsure (1)..(277): unsure at all n locations; Clone ID: 701037355H1
ctaggatttgctaatgatctcattatacatcttcaaaaccgaantcggcatttattgatggagaaccacatttatctgntgataattctgttcatggttcacctgtgaatgcaaatgggaagcaagaaaattctgctaatggtgattatacagttgaggatgaatcctatgcacacagtgaagatgacctggcaagaagcccccatagtctagctgggaggagtacggtggagagtcttctcaagacttttcaaattctcattttggaaaaagtttt

SEQ ID NO: 408 - DNA, 208 bp, Glycine max
  Clone ID: 701037356H1
ccacttttcactgaacacttattactcactccttcatggccacttcgctctctttctccatttctcccaaaaccactgccacaacctcagccttccgattcaaagtctccgccatggctaccaccatcgccgccccttctaccaaggtggctcccgccgtcattgtcggcggcggaagagtgggtagggcttgcaggacatgggcacg

SEQ ID NO: 409 - DNA, 270 bp, Glycine max
  unsure (1)..(270): unsure at all n locations; Clone ID: 701037357H1
gggccagaatcgcacttggaaganccnanangccactcagccagactgcattcaggccctcatcgttgaattcatagccaacttcctctttgtctttgtnggcgttgcttcttccatggtcgttgncaagcttngtggggatncactagtgggattgtttgctgtggccgtggcacatgcattgtggtggctgtaatganctccgncgcncacatttctggtggccaactcaaccccgccgtcaccttggctccttgccgtngtcacatc

SEQ ID NO: 410 - DNA, 270 bp, Glycine max
  Clone ID: 701037358H1
gaagcgagatctcctagaaagcgagtttctcttttctctctctctttcaattttcacatagtcagcgaaaacaaacaaactattggagatttggagcacgaaacacaacacaagcagcagccacctcgtttcattgttttgaattcaactgagaaaaacgacaacgaggatgtttcaggagagcagcgtgacgcggtggccgactcagtggatcgctaccacgacaagctattcgagcgggccctctggtcgtgccggagatctgccgga

SEQ ID NO: 411 - DNA, 273 bp, Glycine max
  unsure (1)..(273): unsure at all n locations; Clone ID: 701037359H1
ggnccatatcacactctgttagcatatggagaagaacactccattgttgacattgagaagagaagagaagcaggagaatgcaatgggggctttgtacatgtcagttatggagatactcttgttcctcttcatattcatatgctctctcacaccaatctcacagtcacagggattacatcaatctccccttttctcttggcacttcttcttcttcgtaccagtatgacggagcttatttnagtgatggcaaagggataagcaacgggatgtctt

SEQ ID NO: 412 - DNA, 270 bp, Glycine max
  unsure (1)..(270): unsure at all n locations; Clone ID: 701037360H1
aaggaagaaggaaagaaatggntattacaaccttcaacggaaccgggcgttggatttggtttcggcgtaggttgcggtttcggtataggatggggtttcggaggnctgtgccttactttcgaatcgtttttgacatttctctaccttttgcaatttaatttnagtacncaattttgatactccactcgttgatcttagaattntgagtctttntccctgctgtttactagcaatctttttaagctgttgcatcattattanccatttagt

SEQ ID NO: 413 - DNA, 268 bp, Glycine max
  unsure (1)..(268): unsure at all n locations; Clone ID: 701037361H1
caaaagaataaataaaagcggaaganagggtaggctgttacggtttggtttggtggttatttgattggtgtgcatccatgttaagctagtggcgatcggatccagctacagcctacaacctacagttttggtttggtttgcttgattgaagatcaaggaaggaagatgttgggtgttataaggcacaagagtattcgccccgcctctccggcaatcagacattctcttctgcagctaaagagatatgtcaggagctctcaatccgcat

SEQ ID NO: 414 - DNA, 272 bp, Glycine max
  unsure (1)..(272): unsure at all n locations; Clone ID: 701037362H1
ttttcttctgcgcttcttctctggtctctggcttccttggtacgggaagaactcaatcttgtccatttccctttggtttttctctcttcgatctcttcaccttccattcgaccaccctcttatcacagctcgcgttaacttaagccctctccgttgagggtttctccaggtgtggtttgattttcagtttctgatgctgaagaaataaaaaagcttgaagctttgctcttctgtgtgaaanatgttggangtggtgcgaaatcccgggnata

SEQ ID NO: 415 - DNA, 276 bp, Glycine max
  unsure (1)..(276): unsure at all n locations; Clone ID: 701037363H1
gggatganaganggaggntgangggcngtgangagcgatcgacagggattcgaaagaagggaagcggagtgagacaatggctggtcctggacggcatangagagacggatgtggtggangccgggaagcacgccatcatgaggaggacgggactccccgcgcgtgacctgcgtatattggaacctctcttgtcatacccttctacccttctnggtcgtnagagggccatcgtcatcaattggagcacatcaaaggcatcatcagcgcccagaagtc

SEQ ID NO: 416 - DNA, 280 bp, Glycine max
  unsure (1)..(280): unsure at all n locations; Clone ID: 701037365H1
ganaaacgcaacacattagacgagtacatttctaaaattcagaagacgtaatgccctttcgacctcttctagagccaccttaacattttccattcaataattaaattatcatcattattataataaactttacctataaacgcatccatgccttccccttcagttcgcagactcacaatggccgcaatatccaatcctatcatgaagcacagtttctctctgagtcgagctctccttcttcctcttccatcnaattcaattcagagatgtanggcgcgtt

SEQ ID NO: 417 - DNA, 281 bp, Glycine max
  Clone ID: 701037366H1
aaccctaaaactctgtgtcctccgccgttcacatcattgtcgacgttcgttcagttgctcacactctcaacagagaagagaagagagatgagaggaaggagctatagtccatcgcctcctcctccacgttacagcagaagaggaggagggaggagtcccagccctaggggccgctatcctccccgtccccgacaacaagatctccctaccagccttcttgttcgtaaccttcgtcatgactgtaggctgaggatcttcgcagacttttggtcaatttggtc

SEQ ID NO: 418 - DNA, 276 bp, Glycine max
  unsure (1)..(276): unsure at all n locations; Clone ID: 701037367H1
tttctcaatcatctctcttttttctcttcccaccttccccacaaagtccttcctccccttttgctttaacaagagtggtaataaatatttattatttttcaaattttaacaacaatgccataattaaataataatttaanaaaatcattcatttatttatataatanannnattgggttctcttttgtaactattctccttgctcctcttgttcttcttcctccttttactccttcaacaacacaatcatttcatttttgtatatttgggacaata

SEQ ID NO: 419 - DNA, 274 bp, Glycine max
  unsure (1)..(274): unsure at all n locations; Clone ID: 701037368H1
cttctatttatgagganaataaagacgatgatggttttctttacatgacttacagtggagagaacactttcggttctcgctagggtcaaatttaataatatatgagatcctctgtaaatagatgctgcaagatgtaaactttctgctgtcgatagtcgatgcctatcctgtttattgcttatggtttacgtatctattgagcagatattttgctgcttgattatgtgcatctcttcaaattatggatttcaatatatgaattagntttatgctc

SEQ ID NO: 420 - DNA, 279 bp, Glycine max
  Clone ID: 701037369H1
ggaaggagatagtgaaagagcttcttcctctaattcgagtgtacaaggatggcagcgtggagcgtcttctaagctctgaaaacgtggcagcctcccctgaagatccccaaactggagtctcatccaaagacatagtcatcgcagacaacccctacgtctccgctcgcattttccttcccaaatcccaccacactaacaacaaactccccatcttcctctacttccacggtggcgccttttgcgtcgaatccgccttctctttttcgtccaccgctatct

SEQ ID NO: 421 - DNA, 275 bp, Glycine max
  Clone ID: 701037370H1
gtgttagtggcagtagcactactcccttattgtgctctttgttctttatttcttccttactttttgcttcctgcacccatgcctcctcccaggcacctcctccaattgtggatggactttcatgggatttctataggacgagctgtcccatgcttgaagggatagtgagcaagcatctccagaaggtgttcaagaaggacaatggtcaagctcctgccttactcaggatcttcttccatgactgctttgttcagggttgcgatggtcgatatgtt

SEQ ID NO: 422 - DNA, 277 bp, Glycine max
  unsure (1)..(277): unsure at all n locations; Clone ID: 701037371H1
ctttctctctctcattctcttctccatcgcgcgtaagaaacacatnttagttgctactaatgggaactgttgaagctgcaaacaaggatgcaaatggaagtctcctagagaaaaatccttcagttgtttttgtgttaggtggcccaggaagtggaaagggtacccaatgtgcaaatattgtccaaaattttgggtatactcatctcagcgctggtgatcttctgcgagcagaaatcaaatctggttctgaaaatggtacaatgattcagaatatgat

SEQ ID NO: 423 - DNA, 275 bp, Glycine max
  unsure (1)..(275): unsure at all n locations; Clone ID: 701037372H1
gaatggcacttcgttgcttggtgatgtccctttctgttctcttcactcttggtcttgcgagagaaagccatgccagagacgaagatttttggcatgctgtttggccaaacactcccattccaagttcattgcgagatcttctaaagcctggccctgcaagtgttgaaatcgatgatcaccctatgcaaattgaagaaacacagtacccgaaaaccttctnctataaagaagacttcatccaggcaaaacaatgaaagtacattcagcaagcctcc

SEQ ID NO: 424 - DNA, 270 bp, Glycine max
  Clone ID: 701037374H1
ctcacacactcattcggtgctccgaatctcagattctagggttagggttcccaatttctccaccgatcagaaaatgagttcaactggtggttctaccaagggcggaaggggcaagcccaaagcctccaaatccgtttcaagatcgcagaaagctggtctccaattccccgttggaagaatcgctcgattccttaaggctgggaaatacgccgagcgtgttggtgctggtgctcctgtgtactctctgcagtgctcgaatactcgctgctg

SEQ ID NO: 425 - DNA, 267 bp, Glycine max
  unsure (1)..(267): unsure at all n locations; Clone ID: 701037375H1
gttttgaacatgctcacttctctgctggcaaatctatccttgttttgggaggagctggtggagttggaaactatgttattcagctagctaaacaagtttataaggcgtctaagatagcagcaactgctagcaccggcaaacttgaacttttaagggagttgggcgttgacttgcctattgattacacaaaggagaacttngaagacttccagaaaaatacgatctagtgtatgatgtagtagggcaagtgatagagcattnaggcgt

SEQ ID NO: 426 - DNA, 270 bp, Glycine max
  Clone ID: 701037376H1
acaagcttcgtctcgtaaagaaaattcgaaagctcaatagagagaactcaattgaatcatcaaatgaggacagtgatttcgcgcttgatccattccacgccttccatttccaggctcaatgccacggtagtgtcaatcagcgggagaaatctctgcacagattctaacaaagttcctgggccattcaaagttgaagaagcagagactgtaaatgtgcctccactcccaacagaaaagttgcttgtgttgggagggatgggttgttggatc

SEQ ID NO: 427 - DNA, 273 bp, Glycine max
  unsure (1)..(273): unsure at all n locations; Clone ID: 701037377H1
gaaaaagcaaaaacactgaatacaccanaaatgggccaaaagcaaaaactgtcatgctttgcctcttctccttgccctgatcctcttcttcactcttcttggaacctctcacgcaggtggcatagccatctactgggggcaaaatggtaacgagggcaccctctcagaagcatgtgcaacaggcaaatacacccacataaacatagcctttctcaacaaattcggcaatggccaaaccccagaaatgaactggctggtcatgaaccccgcaac

SEQ ID NO: 428 - DNA, 273 bp, Glycine max
  unsure (1)..(273): unsure at all n locations; Clone ID: 701037379H1
gggaaaatttgcctcttgcaggagagaaatgattatagactaaagaggatgngaatttttgggggctatgatccttgttattccaattatgcagaagaatacttcaatagaaaagatgttcagtcatcttttcatgcagatactanaagagncactaacgtagcatggnaggtgtgcaagtggccttaagatttggatttacagtggagatgcagatggaagnataccggtgatagggacacgatattgcgttgaagcctgggttacctctca

SEQ ID NO: 429 - DNA, 275 bp, Glycine max
  unsure (1)..(275): unsure at all n locations; Clone ID: 701037380H1
ggacttgattaatttatggttggcctttgacttcattaattaangtatntgtcnatatatcataatcataataatagcatgcgtttgtatggtctgaacttcggtcgttgacatgcaatggttcttaatataatatgtcgtggtgtcaactgtcgagtcatgaacaacaatatctgagattgtataccccttcctccttaaaacacaccanaaaaagtgagtcgtaatgtctaggaaccccattttatgtcngtttcgcatgtaagaaatgttng

SEQ ID NO: 430 - DNA, 281 bp, Glycine max
  unsure (1)..(281): unsure at all n locations; Clone ID: 701037381H1
tttctncctcttnctcagtagtgcgattttcgatntcncttctctgcaactatgcctaaccctaaggtcttcttcgaaatgaccatcgtgcggtnaacctnccggccgnatcgtgatggagctctatnncgacgtnactcccancaccggcgagaacttnngcgnggtctgcaaccngngagaanngcgccggcggnacgngcnagnnncttccatnnnaaatgctcgtccntctacgngtgatccgaacttcatntnccaggcgggcgattacganggna

SEQ ID NO: 431 - DNA, 276 bp, Glycine max
  unsure (1)..(276): unsure at all n locations; Clone ID: 701037382H1
cctttcgaatcctcntcacccagaggtacgattcgtaccatgtagttgtnggatttcggctttgccacttcttgattccaataattttggnttctttttttcccctaatttgatttccccagttagggtttttaactctattcgatcggcgatttcgaatactcggaggctcgaatcgtgttgggggttttccnntttgattaaaaaagtttccgtttttggtgttgggtgatcaagggttgtttgatttttcttgcgatcgagaagggtgaggct

SEQ ID NO: 432 - DNA, 274 bp, Glycine max
  unsure (1)..(274): unsure at all n locations; Clone ID: 701037383H1
tgcactaacactatagtgcttacngagtcaactctgatccccatgatatcatggcggaagtttacaagaatgggccagttgaagttgcatttaccgtttatgaggattttgcttactacaaatcaggagtttacaaacacatcactggttatgnactaggtggtcatgcagtaaagctaattgggtggggaacaactgatgatggggaggactattggcttcttgcaaatcagtggaacagagaatggggagatgatggttactcaagatccga

SEQ ID NO: 433 - DNA, 274 bp, Glycine max
  unsure (1)..(274): unsure at all n locations; Clone ID: 701037384H1
gctgcttcatcaaaganacagaagaaaccttttcttttcgattccgacaatgcgtccaccgcgtaagagggtggatttcgcgcgcgacgacaaggtggagatctgcggcaacgaggatggcttcctcggctcctactaccaagccacggtcgtgtcgcgcctcgacaacggcctctacgtcgtacgctacgacacgctcctcgaagacgacgcatcacaacaaccccttaccgaaacccttttccccaaagaactccgtccccagcgccagtgt

SEQ ID NO: 434 - DNA, 236 bp, Glycine max
  unsure (1)..(236): unsure at all n locations; Clone ID: 701037385H1
cgncactttctcgtnatccaaancctaaataatgtgcgtcggaatccaccggannngaganatcatgggagcanatccttcgccgcatgctccccnncgggcgcnccgtttcccgacnaggngcantcgattactccatcgnctcgagtacgaangtcctccggttncttacgacgntccaaaggtcggatcggctcaaaatnggagctnccaccggtggncgtncgttnccnntt

SEQ ID NO: 435 - DNA, 273 bp, Glycine max
  Clone ID: 701037386H1
accgactaattcgttatggcttccaaccaagaagcaacaatccctttgagatattgggtggataatgaacaaaagcgtgtagttatggcagaagcaagtggagactttgttgatgttctctttagtttcctgacccttccattgggaactatcatccggcttgggaaccaatttcaactaccggtacagattggtagcatcaacaatctgtacgagagtgtgcaaaatttgagccctgatgttttctggaacaacatctgccgaaaatgttgc

SEQ ID NO: 436 - DNA, 270 bp, Glycine max
  Clone ID: 701037388H1
aaaccctgaagaaagacacagccattgtttacttttcattgattgagccaaagctttgtattttctgcgataattttccattgggtggaagaaagtctcaacctttattcgaaagagcaaggatctgagttgagttgagtgatcatgtgtggtggtgcgattatctccgacttcataccggcagtcccgccagcggggcgcggcgcgtgaccgccgacatcctgtggccgagtttgaggaagcgcttctcgaagccgctgtggacgatga

SEQ ID NO: 437 - DNA, 267 bp, Glycine max
  unsure (1)..(267): unsure at all n locations; Clone ID: 701037389H1
ggcctaactggtgcaggtggaaactttggttctggtttgacccaattgatcttcttttcaacctcaaggttttctacttccactggtctctcccttatgggtgtcatgattgtgtgttgcactcttcctgtgactcttgttcacttccctcagtggggtagcatgttcctccctccttcaaaggatgtcaacaagtccactgaggaatatattacacgctgagtggaagnggaagagaagcaaananggttgcaccagaatagtctc

SEQ ID NO: 438 - DNA, 271 bp, Glycine max
  unsure (1)..(271): unsure at all n locations; Clone ID: 701037390H1
gnagaacttgaaacanagatttacgaagttgttctagtggagaaacaatagtaaaaccagaaaaagaacaagatgttccggctgtaagtgaaagacaaaatgtaactgaacctgccaaagctgctccgctaggattgggtgtgggtggtttagagcgcaagnggagaactagacttcaacctcctgtaagtaaaggtgctgatgatagatcatccagttcttctgncaatccaaaatcagcaaaccagaacagatggtcanatatattgcc

SEQ ID NO: 439 - DNA, 268 bp, Glycine max
  unsure (1)..(268): unsure at all n locations; Clone ID: 701037391H1
cctttgttcactcttcttctcttgcggctagggttttagcgcanttcttctagatttaaggnagatgggtaaggnaaaggttcacatcagtattgtggtcattggccatgtcgactctgggaaatccactaccactggtcacctgacttacaagcttggaggcattgacaagcgtgttattgagaggtttgagaaggaagctgctgagatgaacaagaggtctttcaagtatgcctgggtgctggacaaacttaaggcgagcgtgaaa

SEQ ID NO: 440 - DNA, 268 bp, Glycine max
  unsure (1)..(268): unsure at all n locations; Clone ID: 701037392H1
gccgcgtcaganggtatattttgagtccgaggatgtgtatgcttgtattgtcacatgtggaggtctttgtcctggtgtaaatacagtgatcagggaaatagtttgtgggttataccatatgtatggggtgcacaaagtactgggaatagagggagggtatagaggtttttattcttgcaatactattccattgacgccaaaggttgtgaatgacatccacaaacgtggtggaaccatcctggtacctctcaaggagaggaggcaatgt

SEQ ID NO: 441 - DNA, 270 bp, Glycine max
  unsure (1)..(270): unsure at all n locations; Clone ID: 701037394H1
cacagatagaaagaaaagaaatttcaccgtaccagagaacaaggaaggatagaagaaagtgaaagaanatggcgttgtacatggacgangaagagatttggaagtgtccgaagcatccatcaaagagaagaagaagcggaatttgccctacttgccttcgagaccgtctcgtaactcttgccctgactgtgctaagtgcgcccctgttcctgctacgcaaccagctctcctcctctncctcgtctncctctcccttatcggtttttctgg

SEQ ID NO: 442 - DNA, 273 bp, Glycine max
  unsure (1)..(273): unsure at all n locations; Clone ID: 701037395H1
gctctcaggaccatcaacccttctaaggagaagagtccttggattgatgagattgaccagtttccagtcgatgttcctagggtatcttccatttaaacaatgaattttttaaatatttgtgtatcactatcagcattaggtggtagctgttggactggtgaaattatcctgcaaagttgttgtaatacattgctaatttcggagtactgtaggattttatttttaggaccaaaacttagatgccatgcagttcataagatgttttgatatnta

SEQ ID NO: 443 - DNA, 215 bp, Glycine max
  unsure (1)..(215): unsure at all n locations; Clone ID: 701037396H1
gggaccattgggccaatcgtgaacctggaagagcctttttggatactgctactagttcttagtctgtcttttaatttggaaatactagacttttggataacattagttttgcaagagtgaatttgagttattttgtcagcacattccatttacttaaattttgtttgcgaaccnttcgatttgggtattttaatgttatatctggtatgatgcac

SEQ ID NO: 444 - DNA, 158 bp, Glycine max
  Clone ID: 701037401H1
gcagatggtattatagagaaaacattcttgtggggtaggtactctatggaaatgtccgctgtcatttacaaggactgggttttcactgatcaagcattacctaatgatcttgtaaagagaggagttgctgttaaggacccatctgctccccatggagt

SEQ ID NO: 445 - DNA, 159 bp, Glycine max
  Clone ID: 701037402H1
cgaaagccacaaatcttgaatttctgggagatcagctcttgttctcagttgcttagtatgaatccatctattttgtctctcaagaagctcgagagattgtcttctcatcactgttcccttaacacgctcataagcgataatcatttaacctcccttaaa

SEQ ID NO: 446 - DNA, 182 bp, Glycine max
  unsure (1)..(182): unsure at all n locations; Clone ID: 701037403H1
gcaaagaaaganagaaagaaaaccctagcttaccttttcaactttcaagatgcaaatcttcgttaagacactcactggtaagacaatcacccttgaggtggagagttcagataccatagataatgtaaagtccaagattcaagacaaggaagggatcccaccagaccagcaacgnctcattt

SEQ ID NO: 447 - DNA, 156 bp, Glycine max
  Clone ID: 701037404H1
ggtggtaagtgtaagctgccagatggtaagtgtaagctgccggatggtatttgtacatttgagcattggaagtgaggcagtgcctgaaggaattattgctagaatatctaacttggaaatgcagcccttatgggactctggtaaagataatagtat

SEQ ID NO: 448 - DNA, 158 bp, Glycine max
  Clone ID: 701037405H1
ggcaattgttttaagttaacacggctgacccagatgtaaagcctaagtaccctgttcctgagcaggcccataagcccagaagcaaaagcttgacctaggttacacatcaataaattggattgcagagggacagagaaaccctagggaggaagcagcgg

SEQ ID NO: 449 - DNA, 162 bp, Glycine max
  unsure (1)..(162): unsure at all n locations; Clone ID: 701037406H1
ccacnagctcntacagaagccatactactaccattctccaccanctccagtccancannacccttngcccccntcttnnctcncangcacaccctgatncctccagnagctnctaagaagccatagtaatatcattcgcngcnaggtcnagtgcggncgcag

SEQ ID NO: 450 - DNA, 205 bp, Glycine max
  unsure (1)..(205): unsure at all n locations; Clone ID: 701037407H1
ttccctgcaattaacataancataacccctttccaacctttctcctcttcagatcggatcagatcagatccaccgccatggatttcatgaaggtcttcgatcaaaccgttcgagaaataaagagagaggtgaatctgaaggtgctcaagattccggaaatcgaacagaaggtgctggatgctactgataatgaaccttggggtcc

SEQ ID NO: 451 - DNA, 204 bp, Glycine max
  Clone ID: 701037408H1
ggaggacccctcagtatttgagacagcccacggaacaagcgcttggggacttcttgagaaaaatcctgaatattttagtctcttcaatgaggctatggcaagtgattcccgaatagtagacttggcactcaaaaattgcacttcagtttttgaggggctagattccatggtggatgttggtggtggaactggaaccacggccag

SEQ ID NO: 452 - DNA, 158 bp, Glycine max
  unsure (1)..(158): unsure at all n locations; Clone ID: 701037410H1
gtgttactgtttattgttgctagtgtttgtnttgagtctctcaactctcataagangtccctgctttggagtcccatggttgctctctcttccgcggagttcaaccactgctccaacggcctctttctctctcttcccttcctctctcctcagaccca

SEQ ID NO: 453 - DNA, 204 bp, Glycine max
  Clone ID: 701037411H1
caatttcaacgccacaccaaaaattccactgcaccaccaccctccccatttgtacttttcttctcattctctttccactcccctgcattctgcacacaatctagctttacgtgcttctgggcaaccgcataaggttaaactgttaagcatatcattgaaatccttttgggattggaacttgatatgatcatttgtattggggag

SEQ ID NO: 454 - DNA, 291 bp, Glycine max
  Clone ID: 701037412H1
gcttcttcgagtttcacagccaagtcgtaaaagggtttcaagggatggaaaacatgcagagcttctggcaattgggtgatgaactccgtgggcactcaaaagcatcggaggatcacaagtggttaatggttgcctcgaaactggccgaacagacaagattgaagggggagcgtgtgaacaaccttgatctttcaaagggacccattgaaacaaggtcaagggataaatttgggttccaggaagagaacaaatttgattctcttaacttgagcatgttgaacctggactcta

SEQ ID NO: 455 - DNA, 155 bp, Glycine max
  unsure (1)..(155): unsure at all n locations; Clone ID: 701037414H1
ttgctcgtgtggcggctatcaactctgctgctgatnatgatgnngatgatgagtgaaagttcattgcagattccntgtcatcgttgcacaactaaaactctcttattttgcgttcagtcaatcattttatttacatgtgctgtttattttctagg

SEQ ID NO: 456 - DNA, 158 bp, Glycine max
  unsure (1)..(158): unsure at all n locations; Clone ID: 701037415H1
gcttttcttgggcaatggattccactctttcctattctnntcnactgagtttcccaangccacggctagacttttcagttttcaccccctattaataacanaccattaccccnanccctcanaatcttcatcttcaactcagctactcctatttacac

SEQ ID NO: 457 - DNA, 161 bp, Glycine max
  unsure (1)..(161): unsure at all n locations; Clone ID: 701037416H1
gtccatctctgggataacaataacaccaattttntttcttcctcctcttttgaccaaacatgaaacccacggcaacattcttctttctccttccttcaacaacactcgttgtttgtctttgccttggaattggaacaaccaccctctttatnaccctcctc

SEQ ID NO: 458 - DNA, 155 bp, Glycine max
  Clone ID: 701037418H1
cgaccacgacctcccactttcagatcacgagcctctctcacgtgtcgtccgcggggaagcctccgctttcgtcttcctctttcaagagaaagtgcagctctgagaatttaggttctggaaagtgcggtagtcctctagccgctgtcattgttcca

SEQ ID NO: 459 - DNA, 155 bp, Glycine max
  Clone ID: 701037419H1
gttcttccaagaaaaggagattcagaaagcaattaagatgattaagttgaggtcaatgaggtttagccgaagcagctccaagcttggaaatggtgggcacaaagcaacaacacccactgaaaaggattgcagaagcattggtgaaatccaatggg

SEQ ID NO: 460 - DNA, 155 bp, Glycine max
  unsure (1)..(155): unsure at all n locations; Clone ID: 701037420H1
ganattatacggtgaattgagaagagttgaacatgttgatcattctcgcaaatcagctgaacaggctgtgaaggccatcaaagcagctgaggaaggaagaacagttgaggagtatgattaccttccatacttctattcccgttcatttgatctgt

SEQ ID NO: 461 - DNA, 155 bp, Glycine max
  unsure (1)..(155): unsure at all n locations; Clone ID: 701037421H1
cacttcgtccaggacgtcgtcctctcatccgacggtcagttcgcnctctccggctctgggacggcgagctccgcntctgggacctcgcngctggcacctctgcccgccgctttcttggccacancaaggagtgctctccgtggcgttctccatcg

SEQ ID NO: 462 - DNA, 133 bp, Glycine max
  Clone ID: 701037422H1
gctgctattgctgcatctcaggcactggtattccaaaaagattcgcaaccaactctggcttcgacatctgctggtcgtgagaactggggagagaccaacatggctgatgctagccctaggactgatacttcaa

SEQ ID NO: 463 - DNA, 131 bp, Glycine max
  Clone ID: 701037423H1
aaagatggcgcggttgatcacagtggtgtggtgcgcggtggcggtgctactgtgcgccgcggcgggcgcgtcgtgggtggaggaggcggcgaacccgatacgaatggtggcgggggtggaggcggaggtgg

SEQ ID NO: 464 - DNA, 137 bp, Glycine max
  unsure (1)..(137): unsure at all n locations; Clone ID: 701037424H1
ctcaaggcttttaccataagcttacngagggtaccaatatctcaattgacagtgttgggacccttgcagacaagtaacggcggaggatctgttgcgatgtctatcgataatagcagtgtcgggtccaatgattccca

SEQ ID NO: 465 - DNA, 130 bp, Glycine max
  Clone ID: 701037425H1
gccgcagcagcaagtgatcgaagcgaaaagagagtaatcagcagagaaattcatcgtcgtagttatgggtaaagttcacggatcacttgcacgtgccggtaaggttagaggccaaaccccaaaagtggcc

SEQ ID NO: 466 - DNA, 201 bp, Glycine max
  Clone ID: 701037426H1
tcgactttcaagctagattgaggtctgaggatagtgatctttgtcttcgccaacaacatcgtccacttaaaaataaaaaagccctgaaatatctgaacttaaaagccacacttttatttgttgtgtgtgaggtttgatttgatgggaaaatatcttgaatctgcggcgaggttggaagagctatcgcggattgtgtcatct

SEQ ID NO: 467 - DNA, 289 bp, Glycine max
  Clone ID: 701037427H1
aaacgcctcttcaacaacccttgttttgttctgtgcaagtgatcttgaaaggaacaacaatggtgaagtctataaactttctcctgcttctgtctctactagcctttgttccctcctgtcactgcaaaaagaaaataggaggttacctctaccctcaattttacgacggttcatgccccagagctcaagagattgtccaatccatcgttgccaaggctgtggcaaaagaaccccgcatggctgcttcgttgctcagactacatttccatgattgtttgtcaagggtgtg

SEQ ID NO: 468 - DNA, 202 bp, Glycine max
  unsure (1)..(202): unsure at all n locations; Clone ID: 701037428H1
gctccttccttcgtcaacacccctttttgctgatggcgcaaattctgctccatgggactcttcatgccactatctatgaagtcgataagctcaaaattggtggaggcaactttttaaccaagatcgtacaaaacatcgaggngactgttggtattggaaaaggtgtcactaaactatatgcaaccattgatctagagaaggc

SEQ ID NO: 469 - DNA, 155 bp, Glycine max
  Clone ID: 701037429H1
caagctgcatcaaggtgaagactggcatcacaacgagacagtcaagcactggacttataccatagatggtaaggttacaacatgtctggagagtattgaatccattgatgaacagagcaaaacaatcacctacaagctcttcagtggtgacattg

SEQ ID NO: 470 - DNA, 155 bp, Glycine max
  Clone ID: 701037430H1
gttccgaaactgcctccaggagtcgttcgcggagattgaggaccagttgagtaaaaacaccaaagcggacttcaacactgtgttcagtgacgcttccttcaacttcatgttcaggttgttctgtgatggcaaagacccttcgcagaccaacctcg

SEQ ID NO: 471 - DNA, 203 bp, Glycine max
  unsure (1)..(203): unsure at all n locations; Clone ID: 701037431H1
aagaaaacacctccccccaatttgcatcaatctagcaaaagtagacagaatgctaatctccaacttgttgaaacaaacaatgatgcaaagaggcacaattctaagacattgagatctttgaagtatgctgccaagaaatgtgtagctgttttttcattgattatctatggcaaaanaaaatcagcctcatatgttgttggcaa

SEQ ID NO: 472 - DNA, 153 bp, Glycine max
  Clone ID: 701037433H1
aaaaatagtagtactattgtaacgttgtgacttgtagggagggaaatggagggaggtgacgttgggcattgggtgttggagttccttctccgggctcggtacccagtcgtttccagtaacctactcaagaaagtccttcgaatagtcccactt

SEQ ID NO: 473 - DNA, 153 bp, Glycine max
  Clone ID: 701037434H1
ttcctcactctcttcatctgattgaacaaaatgtacacctcgaggaagaaaattcacaaggataaggatgccgagcccactgaatttgaggagacagttggacagtacttgttcgacttggagaacaccaatcaggatctgaaaagtgacttg

SEQ ID NO: 474 - DNA, 153 bp, Glycine max
  Clone ID: 701037435H1
gagaatctaatttgaaacaaaaatgaaggccggtgcagttgagtctggtgaaatttcaaaaggagcacccccaagaaaagggttgattagagggctctcaataatggactttattttgagaattgttgcagccattgccacactcggaagtgc

SEQ ID NO: 475 - DNA, 154 bp, Glycine max
  Clone ID: 701037436H1
atcttcaggtattgtcttaagacctgctttcatatatggcaagaggagagtggatggttttgagcttcctttggatttggtaggggagccagcagaaaaaattctacgagcagtagagaacttcaccaaacctctaagctctcttcctgcatct

SEQ ID NO: 476 - DNA, 177 bp, Glycine max
  Clone ID: 701037437H1
tgttcgtttcactctcacaatggactccctctctctcttctgcaccggagcccttctcgccggcggcctctactggttcgtctgtgttctgggccccgccgagcagaagggcaaacgcgccaccgatctatccggcggctccatctccgccgagaaagtccaagacaactacaagca

SEQ ID NO: 477 - DNA, 170 bp, Glycine max
  Clone ID: 701037438H1
tgacaccgaaaattgctccttcgatgctctcttccgacttcgccaatttggcttccgaggctcagcgcatgctccacttcggcgccgattggctccacatggacatcatggatgggcattttgtccccaatttaactattggcgctccagttattgaaagttgagaaagc

SEQ ID NO: 478 - DNA, 213 bp, Glycine max
  unsure (1)..(213): unsure at all n locations; Clone ID: 701037439H1
cgacgcggaaacacgcgcatcttcacgatcctggaatccaccgcggcgtatccagcgattccgatctccgacgagtctgcgcaggcgaagaatcgcgaggccagccgccggtnaagaatcgcgcgatttgtctggaaatcgcgattcagccacgattcatccccgatactgagactcaaccacgattcaggaagaaaaacgagacaacctccg

SEQ ID NO: 479 - DNA, 155 bp, Glycine max
  Clone ID: 701037441H1
acctttctctctcttttacacaaacctaagctataaaccagatcaaccttacctctctccactttcttactactgtgaagtttgagtttgtggtgtgcaagatatgaaggattttaccatttaaagagatcaacttgttaggtatatggagaaga

SEQ ID NO: 480 - DNA, 177 bp, Glycine max
  Clone ID: 701037442H1
ctcagcttgaattgtggaaagagaagggttctgggaagtatgagaagaaggtgtatgtgttgcccaagcaccttgacgagaaagtggcttctctccaccttggccagcttggagctaggctcaccaagctttccaaagaccaagctgattacatcagtgtgcctgttgagggtccat

SEQ ID NO: 481 - DNA, 208 bp, Glycine max
  Clone ID: 701037443H1
ctatcttggttctctctctcaatctaacgatttcgccattcaacagcgatctttccgtctccatcatcgtcatcaacgctcccatttcctaaacctcagagagggatccagctaacagttgtttcccgctgaaaagttgcttccccacagaactgtaaagcaaacggttagatgcaccaacacaagcaccactaacgaaccattggtt

SEQ ID NO: 482 - DNA, 153 bp, Glycine max
  unsure (1)..(153): unsure at all n locations; Clone ID: 701037444H1
cccttctccgcctgtnaaactgcaaatcccatcaaaatcccaatctttagggtttccgtgtccaatccaaagacttcgtttatgangatttagcgaaaagggttgaaattnatcatggatttgggaagcgaatccgtggaagagaatgaagtg

SEQ ID NO: 483 - DNA, 153 bp, Glycine max
  unsure (1)..(153): unsure at all n locations; Clone ID: 701037445H1
aaacaagatacttgttggcaacaaggctgatatggatgaaagtaaaanggctgtacctacctccaaagggcangcactngctgatgcnnttggtatcaagttctttgaaactagtgcaaaaaccaacatgaatgtggaagaggttttcttttc

SEQ ID NO: 484 - DNA, 153 bp, Glycine max
  unsure (1)..(153): unsure at all n locations; Clone ID: 701037447H1
cgagtttcacagcgaagtcgtaggagggtttcanaagatggngaacatgcagagcttctggcaattgggcgatgaactccgtggacactcaaaagcatcggaggatcacaaatggttaatggttgcttcgaaattggcggaacagacaagatt

SEQ ID NO: 485 - DNA, 155 bp, Glycine max
  unsure (1)..(155): unsure at all n locations; Clone ID: 701037448H1
atattttgttgcancctatggcctcagagncagaagttgctcttgctgccactccctctgatggtcccancgtatttgacaagatcatcaataaggaaattccttctactgtggtctatgaggatgataaggtcctgcctttagggacatagatc

SEQ ID NO: 486 - DNA, 144 bp, Glycine max
  Clone ID: 701037449H1
aaaacaatttcagatcttaccacagaattgaatgagcagcaaagtcagctgcagggcaagaaagaattggagttgtctttagaggaaaaagcagaagaatctgccaagatttcatctgaactcaattttttggagaagagcttg

SEQ ID NO: 487 - DNA, 141 bp, Glycine max
  Clone ID: 701037450H1
ccaactttgagattgagccatctttcggggttgaggcttctgagttgtacccggatgtcaactacaccaccgtggaagaataccttggtcagttcgcttgagaatttaaaaggagaaagatgctcttgtgatcggatattt

SEQ ID NO: 488 - DNA, 174 bp, Glycine max
  Clone ID: 701037451H1
aaagtggcatcgcttaggtacagatacagacacaacctggtaaaaatcccgaccccagtgccgcacaattttccttcactcgcagcggaggtttacttttgatctagtacctgctatccctatgtataagcatggacttctagcatactattgtttgattaaccaagttcttcc

SEQ ID NO: 489 - DNA, 153 bp, Glycine max
  Clone ID: 701037452H1
gagaactgaagggtggtcatttccacagtattgtggagataactgaaaattcagggaaatgtcttctcaacgaatacatggtcgacgaaccatcttgttcaacaccaagaaagagactcttcaatttaccttgtgtttcatccatagaagaac

SEQ ID NO: 490 - DNA, 152 bp, Glycine max
  Clone ID: 701037453H1
aagaataagcgtcgccgtgtacagtgagtttttgatgtcttggctgttcaaggacgttgttagtaaaaactttcaaactgttaagagtttatttgtattgtctgatgttcgaaactaaaagcctgcttgctttatgaatatttatattaaaa

SEQ ID NO: 491 - DNA, 286 bp, Glycine max
  unsure (1)..(286): unsure at all n locations; Clone ID: 701037454H1
ttgtttcccttcatctattttttcttcgcccccttttgtgtttctttttttggttgtttgttctttcttctcgttcgtcgctttgtgatctctctctgcaaccatgtccgccgagaaagagagagagacccaggtttacttggccaagcttgccgagcaggccgagagatacgaagaaatggttgagtgtatgaagaaagtagcaaaacttgatcttgatctaactgtggaagaaaggaactcctctcagtgggatacaaaaatgtgatggtgcacgaanggctct

SEQ ID NO: 492 - DNA, 247 bp, Glycine max
  Clone ID: 701037455H1
tcacaatcacaatggcgcgagtggatctggatggtaaccccatcaagccacttacgatctgcatgatcggcgctggcgggttcatcgggtcgcacctctgcgagaagctcatgtccgaaacccctcacaccgtcctcgccctcgacgtctacagcgacaagatcaaacacctcctggatcccgccgattcccccctcccttgggtggccgcatcaccttccaccgcctcaacatcaaacacgactct

SEQ ID NO: 493 - DNA, 161 bp, Glycine max
  unsure (1)..(161): unsure at all n locations; Clone ID: 701037456H1
agcaccancctcatgcaaaggtcttcttctacttcactngctgctgggaggttgttctccacaacaacagcagccattattgattccccttcacttgctcagagaatcagagatttgcctaaggacctccctggaaccaacatcaagaaacatgtttctca

SEQ ID NO: 494 - DNA, 152 bp, Glycine max
  Clone ID: 701037457H1
gagatttgatagcctcaactcaagtaagggttttctctttgagaaaatcgtatcttacaccttttggtgaccactttgagtgagagaagagaaattaagagagatactcaaattagattcaagagagatggccatcaaccatgaaacttggg

SEQ ID NO: 495 - DNA, 287 bp, Glycine max
  Clone ID: 701037458H1
gcagcttgaactcatttcaaatcgcagcctcttatggaccaactatggattacgttcacttggcaaaacaagttccttgtacatgaagcacaacacagagcatgaccctccatactggagaggtcctgtttggataaacatgaattacagaattctttcagcactccaccattactccaaagagaatgggccatatcaggagaaagctaaagccatctacaaagaattgagaagcaatttaattagaaatatagtgcgcaattatcgacagacgggatttttgtggg

SEQ ID NO: 496 - DNA, 150 bp, Glycine max
  unsure (1)..(150): unsure at all n locations; Clone ID: 701037459H1
gtaccatgagaagaaacgagtttctgtgtccccatttccaatggtccaacctttgaacacaaacctgtccattttacccagaagcaccgaaaagaagaaagactgtgtgctgtacccgcgtaaaacaagacccttttganacgtttcgtg

SEQ ID NO: 497 - DNA, 266 bp, Glycine max
  unsure (1)..(266): unsure at all n locations; Clone ID: 701037460H1
tcgttcattgctttgtagncagatcagatcatcaaaaatggttttgtcttggtcaagaaggaacgttttccgccgtgccaagaaggagaagtcacaaactcaattggaagtggaggttgtgattcccaaccactttcactgcccggtgagtctggagctgatgacagacccagtgactttatcaaccggcatcacctacgaccgtgtgagcattgagaagtggatcgagggagggaacagaacctgccccgtcaccaaccaggtgc

SEQ ID NO: 498 - DNA, 151 bp, Glycine max
  unsure (1)..(151): unsure at all n locations; Clone ID: 701037461H1
cttgagtatgaaaaaggacaggtactggagttgcaaaaaaagacagctgntttggaaacacatgttccagattgcagcctcaaaattgcaaagttagtggcacagctggagttggctgaagaacagcttaagatatcagatgatgaaattg

SEQ ID NO: 499 - DNA, 176 bp, Glycine max
  unsure (1)..(176): unsure at all n locations; Clone ID: 701037462H1
ctccagggngtgctttgccttcattgattcactgtttgatgattgtcgatgaaggatccgttgtttcctaactgaatccgacaatatctatttttgcatcgttaatactgtctctcagtttgtcttaatttaagatanaatgcnatcagataatggcaagtnatttatcggtggaa

SEQ ID NO: 500 - DNA, 153 bp, Glycine max
  Clone ID: 701037463H1
actactcttgtgttgtgtgctactagtaatgaaatgaaattccacgcaaaactccacaaaagccaccttctttgattcaagaaatcaacaccgagttttcaaaatcccattttgttttcccttccttttttcctatataaaccaaccttttag

SEQ ID NO: 501 - DNA, 160 bp, Glycine max
  Clone ID: 701037464H1
ggaagcgtggtggtcttggttggcggttatgcccaagaacatcagatcagcaatggcaacctcttctttcttcttcaccttgctattactgcttctcactgtttcagatttgtttgtgcaaagccgtggccttaattttggaatcaactacgggcaaata

SEQ ID NO: 502 - DNA, 197 bp, Glycine max
  Clone ID: 701037465H1
cttgtatgtcacaattggttagacgaagactgtgtaaagtttttaaggaattgccacaaagctttgccacaacatgggaaggtgattgttatagactatataattccagaagttccggattcaagcaaaatttctatgcaaacttgtgttgctgatagtctcatgtttttagtaacaagtggaaaggaaagaactga

SEQ ID NO: 503 - DNA, 172 bp, Glycine max
  Clone ID: 701037466H1
tcaagagggaaatcaaaatattacagaatctttgtggagggcctaatattgtacagttgcttgacattgttagagaccaacagtcgaagaccccaagtcttatatttgaatatgtcaataacactgattttaaagtgctctatcctacattgtcagactacgaaatacgata

SEQ ID NO: 504 - DNA, 149 bp, Glycine max
  unsure (1)..(149): unsure at all n locations; Clone ID: 701037467H1
gttcttccttttganacgcatagtganagacaatggttganaatatgaagagaagtagctttgaagtgttgggaatgtgctgtgctacagaagaagcactggttganagaattttgaagcctcttcgtggagtcaaagacgtctcagtg

SEQ ID NO: 505 - DNA, 151 bp, Glycine max
  unsure (1)..(151): unsure at all n locations; Clone ID: 701037468H1
gccagcgtctctacgacaatctcctttctctctaactcataactcagatgagttccctctctaataactctagtagtagccacggcaattccttcctccagatgccccccatcaagtttaccaagctcttcatcaatggagatttcgtnga

SEQ ID NO: 506 - DNA, 199 bp, Glycine max
  unsure (1)..(199): unsure at all n locations; Clone ID: 701037470H1
cttgtgtcaatgggtcaccaagcttgtggggcattagagctttggacactacccagagtggctcagagacctcgtaccacaaaacanagatggcacagataggcctgatcatgtggatctagctgctcttgaaatttatagagatagagagaggagtgtggctagatacaaccaattcaggagggcattactgttgata

SEQ ID NO: 507 - DNA, 154 bp, Glycine max
  unsure (1)..(154): unsure at all n locations; Clone ID: 701037471H1
cacaacacttcactcattaacttttcattctccgatacgccactncgcttcatatgcaagcacagcctgaatcctctatagatcgaaactgttaagtttcgacaaacttgacacaaggacaccatcaacatcttgaagagctcgctgtgttgtt

SEQ ID NO: 508 - DNA, 155 bp, Glycine max
  unsure (1)..(155): unsure at all n locations; Clone ID: 701037472H1
ctcgtctccgcanacacgacacgancgagaactcaacctcgtgagacgcatctcgcatggttcactcgctncgcacgctncgcacgccggacactttccggtgccgnacttccgtttcctgatctcgatcttggccggattcctccccatcgncg

SEQ ID NO: 509 - DNA, 103 bp, Glycine max
  unsure (1)..(103): unsure at all n locations; Clone ID: 701037473H1
caaaananaagacaaaagaagacagangaaaganaggagagctggaatcacatggacttgtctttctctttctgggtctccattaaatttttcttctctccct

SEQ ID NO: 510 - DNA, 160 bp, Glycine max
  Clone ID: 701037475H1
tttgcttcttcgagtttcacagccaagtcgtaaaagggtttcaagggatggaaaacatgcagagcttctggcaattgggtgatgaactccgtgggcactcaaaagcatcggaggatcacaagtggttaatggttgcctcgaaactggccgaacagacaag

SEQ ID NO: 511 - DNA, 195 bp, Glycine max
  Clone ID: 701037476H1
gcaaaatcgctgtgaaaatgagcggaacggtgaagaaagttagcgatgtagcattcaaggtgggaaggaacatcgattgggatggaatggcgaacttctggtctccgatgaggctcgcagggagttctccaatctccgtcgcgctttcgacgaggttaactcccaactccaaaccaagtttagccaggaacctga

SEQ ID NO: 512 - DNA, 284 bp, Glycine max
  unsure (1)..(284): unsure at all n locations; Clone ID: 701037477H1
cctcactcagtttgaacccgaatcagagataaaccgcttatcgtgcggtcatctcttccacaaagtgtgcttggagaagtggctggactactggaacattacatgcccactttgccggactcccttgatgcccgaagatgacncaccttgctttcagtaagcaaaacaagtgagcatgccaataagagagagtttcatgtacagtgtagtgtacatattcttgagggtnttgatgttcatgcatctgagttctgccacctttttaagttttaacctttttgcct

SEQ ID NO: 513 - DNA, 288 bp, Glycine max
  unsure (1)..(288): unsure at all n locations; Clone ID: 701037478H1
ccgaaccctacttgggcatcttcaacacatggtcgggcaacgactgtngccggagctggtacggcgttgcctgcgaccccaccaccggccacgtcaccgacgncaacctccgcggcgagtcccaagacccaatgttccagaagcttggccgctccggctacatgaccgggaaaatatcgccggagatttgcaaccttagcaacctcacaaccctcatcgtcgccgactggaaggccgtctccggcgagatccccgcttgcgttgnctcactctacactctccaaatcc

SEQ ID NO: 514 - DNA, 152 bp, Glycine max
  Clone ID: 701037479H1
gctaaagatgttgaggttcaagagcaaggaggagagtactctgccaaagactaccatgaccctcctccagcacctttgttcgacccagaggagctcacacagtggtccttctatagagccctcatcgctgagttcatagcaacccttctctt

SEQ ID NO: 515 - DNA, 153 bp, Glycine max
  Clone ID: 701037480H1
gttctccgattctctcgctgagaatcgttggtcccacatcgctcacagcagcgccttcttccgacacaacaacctcaacctcaacctcgttgaagctcaaacgtcttgcacctggtctcgtggaattgtcatcgcccttgaagagcaaagaga

SEQ ID NO: 516 - DNA, 193 bp, Glycine max
  Clone ID: 701037481H1
gagtggggtgaggggctgaaaggtgtgccaatgcaggtggtgtggtctgctgggtggtccgaagaatggagccgggagggtcaccgggttgcaagtgccctccacaggccggttttcttacgcattctggaggccggtgggctcaggaggacgcagccgttgagatagctgaaaaaatttctcagtttgtatt

SEQ ID NO: 517 - DNA, 148 bp, Glycine max
  Clone ID: 701037482H1
gctttgctcttctagtctttttctctttaatttctctcaattactcatcatattcccctctttctgtagatatctacactgatatcatggagaacaaagccctctttaggcttcttgttattcttctggctctttcttcgttgtattt

SEQ ID NO: 518 - DNA, 132 bp, Glycine max
  unsure (1)..(132): unsure at all n locations; Clone ID: 701037483H1
cgagagtactgatgcaagtnnagacgaggacatgtctgtatctnttcttgtnttaatagacagctgatattatagttgnatgaacgtttaacatggataaatatattgtcaactccatttatgtctattacc

SEQ ID NO: 519 - DNA, 126 bp, Glycine max
  unsure (1)..(126): unsure at all n locations; Clone ID: 701037484H1
tacgtcaccatcagatgcacccaggccttctatagtttctacnttcttgtcaagctggaggttgatgtgtagggtaacttgaggagtgctaacaacaggcgagctactattgattgacaactacaa

SEQ ID NO: 520 - DNA, 149 bp, Glycine max
  Clone ID: 701037485H1
gaacaagggtttctctttctctttctctgtctgcttcttcactttctctcgtttcaatcgaaaaaaatcatgggcagaaaattcttcgtcggtggcaactggaaatgcaatgggaccactgaggaggtgaagaagattgttactacttt

SEQ ID NO: 521 - DNA, 128 bp, Glycine max
  unsure (1)..(128): unsure at all n locations; Clone ID: 701037486H1
ggagagcagtgagtggctccatgtcattgattacactgtgaaactgctattgattgtatcattgctagtaactctgcgacttnttcaaaaggtatggaagtctcgcatcagattgcaaatgcgtaccc

SEQ ID NO: 522 - DNA, 139 bp, Glycine max
  Clone ID: 701037488H1
gcagcaaagcttcaatttccgcttccttcaatttttgaacaagcttctcgcttccctagcttagcacctacatcacagatctttaacgataaaataaaaatggatccaaacgcggtgaagtccactctctccaatctgg

SEQ ID NO: 523 - DNA, 196 bp, Glycine max
  unsure (1)..(196): unsure at all n locations; Clone ID: 701037489H1
ctttgcacgtcaagcgtttttgacagtttcaggtcagcttcaagtcnagtcttatgcttgtgctctgagtagtgtgtatacctttggccccacatttcgcgcagagaattctcacacttccaggcatttggccgagttttggatggttgaacctgagattgcttttgcagagttgaaggatgatatgaactgtgcc

SEQ ID NO: 524 - DNA, 197 bp, Glycine max
  Clone ID: 701037490H1
gccaaggacgaaacaagccgaagatgagcgaactcgagaattcagaaatatgaaaaagaagagaagtaaaactgaactgcgataatctcgttgaactcaggacaaattgaatacttaatttctcttctctctagaaacgtatagacgaaacaatttctatgactatttctgcttctgcttcagatgcaaccttttag

SEQ ID NO: 525 - DNA, 195 bp, Glycine max
  Clone ID: 701037491H1
cgcgtttcaaaaaaaaaacttgtctctccattttgaatctggatccagcgccttctattcagcattcaccacccaaagccaaaccctatttctctttcttccctgtttggttctagccagcacaatgaggagaggagctaagagaaagaccaagcaggaccaagaagccaaacacgacgcacccgaagataacat

SEQ ID NO: 526 - DNA, 281 bp, Glycine max
  Clone ID: 701037493H1
ttgttctctacatctaacttctggttagttggtacgaagcgagggcgctatcacatcctaaatcgttcaagtcccagaaataccagctccataacccagtttcttcttggtgtctagggaaaaaggtaaaattttgaggctcaataaggaacattcgacatgttcaggtcatctcagcagaggaattcgagatgcaaagacttcaaggtgaaacatgctcttcaaatatgtgttcttcttggcgtttgtatctggatggctatctagtcagcattctcgtg

SEQ ID NO: 527 - DNA, 285 bp, Glycine max
  Clone ID: 701037494H1
gaagaaacctgagattggttgggtgaagctgaacgtggatggttcacgcgacccatacaaaagttcctccgctggttgtggtggtgttctgagggacgcatcagcaaagtggctccgtgggctttgctaaaaaactgaaccctacttatgcagtgcaccagacagagttagaagccattctcacgggcttgaaggtggcttcagagatgaatgttaagaaactaattgtggagtcagacagtgactctgtggtgagcatggtggagaatggggttaagcccaatc

SEQ ID NO: 528 - DNA, 134 bp, Glycine max
  unsure (1)..(134): unsure at all n locations; Clone ID: 701037496H1
caatttctctctttntgctcagtttctgtngtattttctcaattacnacatcgtattctgcaaattcaaaccgggtcttggtttnctgaaagatgggacgtggcaaggacaagcatcatgatgaatctgacaac

SEQ ID NO: 529 - DNA, 154 bp, Glycine max
  unsure (1)..(154): unsure at all n locations; Clone ID: 701037502H1
gttctctcatttctcgtcttcactgagaaaaatccttctttgtgcatgctcctcgtttccatctaaaggggagagcgggtgagtgagaaaaaganagtgaggtttctagcttctactgttgagtaaacatgactatggaagagggcagggtaga

SEQ ID NO: 530 - DNA, 201 bp, Glycine max
  unsure (1)..(201): unsure at all n locations; Clone ID: 701037505H1
ggccgactccgtctcctcctcnccncgctccgaccacttccacgacgcgccgccccntgtccgcttcatgtgcagcttcggcggcaagatcctcccccgcccccacganaaccagctccgctacgtcggcggcgacacccgcatcgtcgggtctcncgctctatcactttctccgcccttattcttaaantctccaaantt

SEQ ID NO: 531 - DNA, 150 bp, Glycine max
  unsure (1)..(150): unsure at all n locations; Clone ID: 701037506H1
tttggatttctatgataaanaaaatacaaganagaaactggaatttcagcccatggaccttcaccattcagtttccttnttcttttttgccgggaatttgtttaattaggcaaaacttgcaaagttcatagttggaccctgtcaccgcag

SEQ ID NO: 532 - DNA, 276 bp, Glycine max
  unsure (1)..(276): unsure at all n locations; Clone ID: 701037507H1
cgaagaaaccaacacttgggggtgtctcanatgagaggaaatcagaatcaacttctagtgtagttaatgcatcannaacttccacctcatctccttcttgaaatgccagctttgtcaccgacaatgaaccaaggaaacattgctaaatggaggaaacaagagggagacaagattgaagtgggtgatatattatgtganatanagacagacaaagctacacttgaatttgagagtcttgaagaggggtacctggctaagatacttgctccagaaggt

SEQ ID NO: 533 - DNA, 270 bp, Glycine max
  unsure (1)..(270): unsure at all n locations; Clone ID: 701037509H1
gacngtgtcttngtngtagagagagagagagttcatatccaatctttggttgggtgggtgggcantagntacaagttatagagatcgttagagtgagtgattgaaattcttgagacccacatcgtgtgtgtttgtnttcattcctcggaggatattctaaagatggttgcgagaaccccaccaaagcagaagaagctgttggcngctctcaaccctgttctgattaaagaaacactcaacaaggtggatcagtgcgtggntcggntgcag

SEQ ID NO: 534 - DNA, 269 bp, Glycine max
  unsure (1)..(269): unsure at all n locations; Clone ID: 701037510H1
gaggagtttgttaactgtgtccgctgcattaaaatactttctcctcaagaagttcaacaaatnagcttggatggagattttggcaatggtggccttccatatccagnaggcagcagctctgatggtgggaatgcttaaatggcatccaggaatctgctaattattcttccatgttagtaacttacatcgtttttaggacatattcatcagtgttgtccaaaaggttgtggggtcggtcggcagatgattttnncctgctgcagcaggct

SEQ ID NO: 535 - DNA, 272 bp, Glycine max
  unsure (1)..(272): unsure at all n locations; Clone ID: 701037511H1
atttcattgggatacctggcatctaaaaccccaaacctccctcatttcttcttttccccaaccaacaactccactccnttgcgttcttgtaattcttctggctaaaatttcagcttccagaattgaaaaaaaaatgatcaaacaagnnnnnnnnnnnnnnnnnnncttcttggcctctggattggccctcctcagtctcagagtctgagtctgtttctcttctgcctcacgccgctgattccttcaatgttagtatatccagatgaagaagc

SEQ ID NO: 536 - DNA, 268 bp, Glycine max
  unsure (1)..(268): unsure at all n locations; Clone ID: 701037512H1
ccgaaagcnccttcttgagatgggctataagaatcctgtcctcttgcttcatccacttggaggctacaccaaagctgatgatgtcccacttgattggcgaatgaagcaacatgagaaggtacttgaggatggtgttcttgatccagagacaactgtggtatccatattcccatctcccatgcactatgctggacccacggaggtgcagtggcatgcaaaggctaggatcatgcaggggctaacttctatatcgttggtctgaccccgc

SEQ ID NO: 537 - DNA, 271 bp, Glycine max
  unsure (1)..(271): unsure at all n locations; Clone ID: 701037513H1
gcaganttcaatgcaaactatcaatcattctcctggttctaggatcataagcccancaacaggcaatcatttacctggattagcttcaattttgcaaccacaagtatctaacgctgtaaaggctgctgctattggcaatgacttgggaaggagcagtcaaggagagcacatattttccggtatgaattcatcacacggagctanttttcagtcgcattcacttccagagcctaaattcagccaatatcgtggagcattgtcctcaattggt

SEQ ID NO: 538 - DNA, 270 bp, Glycine max
  unsure (1)..(270): unsure at all n locations; Clone ID: 701037515H1
ggtcatgtctgattggacaagaagattcatatttggcagggattcaagtagagtttaatttgacaccttgtttctctcttgttaatttttgtacctaatgttagtgatatatgttgatggaacagcattttgctccattctcgattgggaacagtttgagaactgatattggattttcattgagtgcttatgttgtttacagcttccattttgcatcaatatatgtggattgaatcagaaaaanaaagaanaangggcngccnccgattt

SEQ ID NO: 539 - DNA, 271 bp, Glycine max
  unsure (1)..(271): unsure at all n locations; Clone ID: 701037518H1
tttatttactaataccacttcacctcactttgctttcattctccataccctatcaaactccactttccttttttcctctctttgtctctctctttctacctcacatcacacattctcatcctctttttatatccttcccctccaaagctgagagagccacaacacaaccaaaaccctatattattcacttggtcaaacactctttcacttgacaaacaaacacttgtgtagctacaatggaagngtattactacaagaggcaccatgtgca

SEQ ID NO: 540 - DNA, 197 bp, Glycine max
  unsure (1)..(197): unsure at all n locations; Clone ID: 701037519H1
canaagcagaattcggtgacggagcgcggcgttggttngnagattnatgaagatcacacccgatnctgatattgcccttgatcatcntcatgatgaaaaggagagtgaagaaaacaanggaagccacatggtgtttgangttgatcagggtttggatanaaaantgacgaggcaganaagagttgtgattgttctgt

SEQ ID NO: 541 - DNA, 269 bp, Glycine max
  Clone ID: 701037521H1
cttgttcgtccggttgttcccatcttctctctcgtaccaatcaaatcacacttttgtgttgtgttgggaaaccctaaaccccgttttcggtgagatcgagatcgatcgaacatggatgaggagtacgatgtgatcgtgttgggcacgggtctcaaggagtgcattctcagcggtcttctctccgtcgatggcctcaaggttctgcatatggataggaacgactattacggaggagaatccacttcgctcaatcttattcagctttggaa

SEQ ID NO: 542 - DNA, 271 bp, Glycine max
  unsure (1)..(271): unsure at all n locations; Clone ID: 701037522H1
cgccatcatctctccaccctccaccgccctcacacccttttaatatcctcactccccccaccacctcccactcttttcttttcacacccctcctcattcttcttcttcacactaattcagaatcaacatgaacccaaatgatgctaactctcctaagccgttggagattctgcagatgaaccctgttcctccgtttttgtccaanaccttcgacctcgtcgacgacccgactctcgaccccattatctcatggggctccaccggttttagt

SEQ ID NO: 543 - DNA, 268 bp, Glycine max
  unsure (1)..(268): unsure at all n locations; Clone ID: 701037523H1
cgagnttcccccaaaacccgtttgcgttgttgtttgcgaagaaatggcgactaagaggagcgtgggaacgttgaagganggtgatttgaaagggaagagggtgttcgtgagggtcgatctgaacgtgcctttggatgacaaccttaacatcaccgatgacactagagtccgtgctgctgttcccaccatcaagtacttaactggncatggagccaaagtgatcctttctagccacttgggacgtctaaaggtgtaacacctaaataca

SEQ ID NO: 544 - DNA, 195 bp, Glycine max
  unsure (1)..(195): unsure at all n locations; Clone ID: 701037525H1
gttaactttcccctttgaaatcctttntgagttctgcgccaactgaatcaagnagatcgaactcngccatagtcttcatcgagacagagatnggaatctgattcccaaacggnaacagtatgagcgtcatcgacattctaacccgagtcgattccatttgcaagangtacgacaantacgacgtcgaaaagcacc

SEQ ID NO: 545 - DNA, 294 bp, Glycine max
  unsure (1)..(294): unsure at all n locations; Clone ID: 701037526H1
gtttcggtcacagcagagcagagagtagtaagaagacactgcacagatctgagtggtgactgaaggaatctagcttctttcatttnctccatcactattcttaggtcctgagggctcattgcccattatcatgtcaaggagggccagtaaatcccttcgcgtcggttaggtngatggtggaagtatacccatttggctngcatctatcccggtcctaaaattctnaaaaactntncccctnactatnctattggggcttgtccattngtggggtgccaatnccttcctggattg

SEQ ID NO: 546 - DNA, 268 bp, Glycine max
  unsure (1)..(268): unsure at all n locations; Clone ID: 701037527H1
taactctttaagaactgattcaccaacgacccctctgaatttcagaaactatcaatgaagggggaagtgcagcttcagcctccagcggttatgcaaaaccctagtgattcggaccctttgctccataaccnnnnnnnnnnnnnnnnnnnnnnntcaccgggaagctctggtgagatcaagaatgaggaagaagacgttgaggctggattactcccctgttgtcgaatttgcctcgaaagcgttccgacccagaggatgaattgatntc

SEQ ID NO: 547 - DNA, 268 bp, Glycine max
  unsure (1)..(268): unsure at all n locations; Clone ID: 701037528H1
agaaatccgtgatctccattttcttccttagcacctaacaaaacaaccaatctaacttgcaaganannnnnnnnnnnnnnnnnnnnnnnnnnnnaatcccactgaacttcttcacaactttgggatttgaattaacgagagccaacaaaactggagaaaggttttggaactttctgatccgggttttgcatctttccatcancgccaccatttacttccnttatatgtnactttcactttattttatnttatatgcatcttagggtag

SEQ ID NO: 548 - DNA, 193 bp, Glycine max
  Clone ID: 701037529H1
ggaggggaagaagggcgacctcctgctttggtttcagtggattcctcgaggcggagaatgtcagggcccattttaaatactttatcaagtgccaatgtcttgggtcagtcaagtggatcatctaggcgggctgctgtttctagtagccgtgatgcatttgttggtgctgagtcagatattcggactcgcactg

SEQ ID NO: 549 - DNA, 196 bp, Glycine max
  unsure (1)..(196): unsure at all n locations; Clone ID: 701037530H1
cgaaatccncatctcccttcacttctgagctctggacgagatcccagatctcancatctttcacgcactcttccatcagattcaccctttcgtttaacgcaaactcataacttgaaggttaatggctgctccaccggcaagggctcgtgccgattacgattatctcataaagcttctcttgatcggtgacagcggt

SEQ ID NO: 550 - DNA, 173 bp, Glycine max
  unsure (1)..(173): unsure at all n locations; Clone ID: 701037531H1
gaaaaatgtccgaaaacgganaagagaaattactcgctgtggcgcggcacatagccaaaacgctgggccacaacaacaccatgtctgatgacntattccaaatactatcgaacttcgatggaagattctcgagagagaatctttctgagaagggcgcagatgtggatcccaga

SEQ ID NO: 551 - DNA, 152 bp, Glycine max
  unsure (1)..(152): unsure at all n locations; Clone ID: 701037533H1
cttttaccaagtgcaggttggattcagaatgcagcttccaaagtntattgccgcatcattcttctgcctaatctgctcatccattatttactatggaaaagcagaggcgcatcaagttaatttctatgtgcacaataaatgtccctttccaa

SEQ ID NO: 552 - DNA, 270 bp, Glycine max
  unsure (1)..(270): unsure at all n locations; Clone ID: 701037534H1
ctgacgtggggtggtatagctttttttttaatctgttnttagtntggttataaatattagttggaagattaattagaatnnnnnnnnnnnnnnnnnnnnnnnnnnnnnncaaataatataataaactcgaaagcaacggctgagattggcttgagggttgacacgtcccttttatcttccacactcagttcccacctttccttctcagtcacacaaactcacaccatgttgtgtcaagtgtgaactcaaaacatatttctctctttcttg

SEQ ID NO: 553 - DNA, 147 bp, Glycine max
  unsure (1)..(147): unsure at all n locations; Clone ID: 701037536H1
cgtgaagaacaagaacgcttttnaagttagggacatgtagggtagggtagggaagagacaagacaacaaacatatagggaccaaacaaacaaccccttgcaaggccttcggccagggcaccctgcgtgctactactgtccagtgtca

SEQ ID NO: 554 - DNA, 268 bp, Glycine max
  Clone ID: 701037537H1
gaatatctcacgccgaagaccgtgcgttgaaatcttgcaaggacgagatccaagcatcgttgttttccttcccagaatttacgctcttcttactatcatcaagatacaaaatggaatatcgacggaccagtggtaggcaggaaaccggtggccgtgacagaagacaatctaaaagggaacaggcatatcaggactctcttattgaggatttgtcacaggattttcgtttgccaatcaaccacaggccaacagaaaatgttgatctgga

SEQ ID NO: 555 - DNA, 267 bp, Glycine max
  unsure (1)..(267): unsure at all n locations; Clone ID: 701037538H1
gaagcattacaaccataaggtggatgcctatagctttgctatagtgttgtgggaactcgtccataataagttaccttttgaaggcatgtctaatttacaggctgcatatgcagcggcatttaagaatacaaggccaagtgctgatgagcttcctgaagatttagctctgattgtgacctcttgttggaaagaggatccaaatgatcgacccaattttagtcanataatagagatgctgcttcgatatctaaccaccatttcaccgtc

SEQ ID NO: 556 - DNA, 269 bp, Glycine max
  unsure (1)..(269): unsure at all n locations; Clone ID: 701037540H1
caactcaccaacacagttgcattattttctttccagatccaactcaaaattgcaatgggagtagaagatacagatatttgtatcatcaaggagccagatcatgttgtagtctattcagatggcatttcccatgattcaggtcatgaagctggaagtgatcatcacaatattacagagtcttatgaacaaatcaatgagactactgaacatcntagttcagaggagagtgcaaaggaatatgaggtgaaggaatgtacaacagaaatttc

SEQ ID NO: 557 - DNA, 267 bp, Glycine max
  unsure (1)..(267): unsure at all n locations; Clone ID: 701037541H1
gtttcagtgagtgatcggtgttcacttgatccttcataagtcgtcatcattcatcatcatccatcaccgttgattgaagaagatgccgatcagaaacatcgccatcggaaggcctgaagaggctactcaccccgacacgttgaaggcggggttggctgagttcatctccaccttgatcttcgtgtncgcnggttcaggttccggcatcgcctacaacaagctcaccgacaacggngcgccactcccgccggcntcatctccgttcca

SEQ ID NO: 558 - DNA, 267 bp, Glycine max
  unsure (1)..(267): unsure at all n locations; Clone ID: 701037542H1
aganactcaactttgantagataatactgctggatgtctcgtctctaattattgtatttggaaaatagttttnagttgaggatctaatcattaccagatttaatatacttggcaaatggggtctgaaggtcctacgacaccgacaacaacaattcatgtgacaggatttaaganattccatggagtttcagagaatccaacagaacacaattgccaatnatttgacggagtacatgaataagaanggttngccaaagggtttagtta

SEQ ID NO: 559 - DNA, 238 bp, Glycine max
  Clone ID: 701037544H1
tcaaattgttggagaaacgcgaattaatccagaaatgcaaagaaagcgttacttgacgttcgtttgaacatcgaaaacattaacacaaatggcaacacgaactggtcgcttgtttcaaaaccaaaacctcaatgtccacgttaatggaggaggagctgtttctgggaaggctgatttaaccggacagaggaaagttggggctgggggaagaaaaccacttggagatctatccaatgca

SEQ ID NO: 560 - DNA, 266 bp, Glycine max
  unsure (1)..(266): unsure at all n locations; Clone ID: 701037545H1
aangctgcttgaccggactgttttgtccttgtgtattattcgggcgcaatgtagaaagattgaaggaagacactccttggactggaccatgcatttgtcatgccatttgtattgaaggtggcatttctctggcaatagcaactgcagctgcaacttccatctttcctggtattaacctggggactgtatgtctcattgttgagggtttattgtttacatggtggatgtgtgggcatcacactggtcaagtgcgccaatccttacag

SEQ ID NO: 561 - DNA, 270 bp, Glycine max
  unsure (1)..(270): unsure at all n locations; Clone ID: 701037546H1
ggaaggtaccctggcaaatcgcaaagaagaaagtccctctcattcctcttctgtctattcncctgcttcatttccattttcttccttctctcccagttcaaatctacctccacctcccaccactcccttcccacgttccaaatcgagaaacacgaataccaccgcggttcctgcgactactccgacggaacatggatccacgacccctcgaggactccgaggtacgacaatacctgcaaggagatcttcaagggctggaactgcctctcc

SEQ ID NO: 562 - DNA, 144 bp, Glycine max
  unsure (1)..(144): unsure at all n locations; Clone ID: 701037547H1
gcttttntgctttcaaagtttctccagcagtggtcattaggtattgagtntatngaaactatttcaggagtgtggtgtgtncgaataaggtgtgtngttncgaaagtatctcctgtgaggngtgctttttatctnngctgctgt

SEQ ID NO: 563 - DNA, 173 bp, Glycine max
  unsure (1)..(173): unsure at all n locations; Clone ID: 701037548H1
tctccatctaatagtgtnaatttgtctttctctatctctatcggtcatgggtgcntntgcttttgatgaggaaaactccctccaccgtggctccggcaacactctacaaagctctgacaaaagatgctgacactatcatcccaaagattattggggccatccaaactattgaa

SEQ ID NO: 564 - DNA, 273 bp, Glycine max
  unsure (1)..(273): unsure at all n locations; Clone ID: 701037549H1
atagattccccttttggcagccacaaagcaacaccctttctttttctctctaccctccaacgtgctctnttccctcctccanttcatccanntntttctcattttntctcccaaatcacactctcanttacaataacacacantcaacttgagaattttccccaaaaatcccaagagctcgcgccatggtttccccggaaaacagcaattggctgttcgnttacccgttgatcgacgacgacgttattcccgtcggcgactcctncttcgcgt

SEQ ID NO: 565 - DNA, 194 bp, Glycine max
  unsure (1)..(194): unsure at all n locations; Clone ID: 701037550H1
gacacgtataantgtatgacattctctnctacnantactnggtgtttcccataccgnacnctcttcttcaatcaagcgaaggtggnctcgattgcaagtgatccacgatacactctacgcttcacnaaaccttcaaacccaattccacagaatncttctgcntcaccatgccaccanagcctttagnctatggg

SEQ ID NO: 566 - DNA, 199 bp, Glycine max
  unsure (1)..(199): unsure at all n locations; Clone ID: 701037551H1
ggggcaaacaagtattgaattcctttcgtcccccagtggttttcttgttattccttcattgtcttttccgttgtntcctgtgatgaagcttccaagacnttcatctttcgngtggattcccaatccaagcccaccgtcttccccacccattatcactggtacacntccgagttcgcccagganaccagcatnctccacg

SEQ ID NO: 567 - DNA, 266 bp, Glycine max
  unsure (1)..(266): unsure at all n locations; Clone ID: 701037552H1
atagtgttaatntgtctttctctatctctatcggtcatgggtgcttttgcttttgatgaggaaaactcctccaccgtggctccggnaacactctacaaagctctgacaaaagatgctgacactatcatcccaaagattattggggccatccaaactattgaaatcgttgaaggaaatggaggacccggaaccgtcaagaagataacagctagtgaaggtgaccaaaccagtttcgtgctgcaaaaagtggatgcaattgacgaggt

SEQ ID NO: 568 - DNA, 267 bp, Glycine max
  unsure (1)..(267): unsure at all n locations; Clone ID: 701037553H1
cacaacaccaccattcttccattctctctctttcntctacactattcattcannnccatgccggtcaangtgaggtgctgaaggtcaatcgtggtctttcgaaatggggaacgggagcagaagntactcggcgaaccggagcgantacaagcttctagaagaagtcggttacggcgccaggncaccgtctaccgtgcaatctacctcccctacaacgaggaggtcgccgtcaagtggccngggatctggatcgtgcaatataatctg

SEQ ID NO: 569 - DNA, 168 bp, Glycine max
  unsure (1)..(168): unsure at all n locations; Clone ID: 701037554H1
ggaaaacaaanncnntctangnnctgccatttcaggctanatagnctttgtttattgtaaacgtcaacatgtncatatagcagtaaagtatatttngcctgaaatggcagancttagattgcttctgtgaggggtaaacaagagccttngatggaaggagggaaggag

SEQ ID NO: 570 - DNA, 239 bp, Glycine max
  unsure (1)..(239): unsure at all n locations; Clone ID: 701037555H1
gcaccttcgtaggacccttatctctctctctctcccgaattattgttcgttcgacccttttacttagtattccctgtttccggtattcgctccctttttttctgcattctggttttacttagatctctgtcccgcaccagatctggtgcagggtgagagggttgggttcattaattntgtatcaatcttccttctgagcggtaggcgtggggataccagagtcttttcgggaagcaaga

SEQ ID NO: 571 - DNA, 268 bp, Glycine max
  Clone ID: 701037556H1
aatcgcaatcgcctcagggaattcaagttatcaaacaaaatgagaggcagaaagagttccaacttcaaatagatagctcaatgaaattaattgtagttctgctgtatttcatttttggtttacctttgtatcttcggaagcattacaattttatttgaaatgtaaaattttgtttttccatgtgctggacctttagacacattgttttgattcaggaaaagaatgaaaaatatctatagttagccaatatccctttctctccataatt

SEQ ID NO: 572 - DNA, 265 bp, Glycine max
  unsure (1)..(265): unsure at all n locations; Clone ID: 701037557H1
cataatctctcttctcttcttctcttnctatctgcaaaacaaaaatgtctcactttntgacgttcgggtcccccagacatttccgacacttactctcttctcgttctcaacatcaccttccgtaccaccgccnacgacctattccctctcttcgacaagtacgggaaggtcgtcgacatctttcatccccaaggatcgaagaantggngagtcaaggggttttnatncgngggtnacaagtatgcngatgaggcncaganggccg

SEQ ID NO: 573 - DNA, 262 bp, Glycine max
  unsure (1)..(262): unsure at all n locations; Clone ID: 701037558H1
taactcttaagaactgnttcaccaacgacncctctgaatttcagaaactatcantgaagggggaagtgcagcttcagcctccagcggttatgcaaaaccctagtgnttcggnccctttgctccataaccnnnnnnnnnnnnnnnnnnnnnnntcaccgggaagctctggtgagatcaagaatgaggaagaagacgttgaggctgattactcccctgttgncgaatttgcctcgaaagcgattccgacccagnggatgaattg

SEQ ID NO: 574 - DNA, 265 bp, Glycine max
  unsure (1)..(265): unsure at all n locations; Clone ID: 701037559H1
gtcacacataacgaaaactaaatcacaccaaaacatacctcaaaacctcaacacattcatacaataaccataaagcacaccaacaacaaattacaacttcaaataaaacagagcatctctctgctcttctctgttctgttctgttctgttctgtttctctctcctccccatatattcctcttcttcttcagaactcagaactcagaagggccacttcacttttagnaacccagttttgcatctgggtttttgcctgttgaagtgc

SEQ ID NO: 575 - DNA, 166 bp, Glycine max
  Clone ID: 701037560H1
ttcattttcagttcatcttagggttcaattctcaatatcctcattccccgttccctcgcctttgcttcctagttcctactgtgacctgtgagtctccccttcccggcctcgccaacgggaaattcaacggattaattctcgtgtttcttcggagcgagcagaagga

SEQ ID NO: 576 - DNA, 119 bp, Glycine max
  unsure (1)..(119): unsure at all n locations; Clone ID: 701037561H1
ttttggagattcaaggcttaatttgtnttccttttctcttcaattaattttcccaaganaaaaatgcaaaccgaattgtagaggaaaatgagaganattgtttctgtcatggaaaacta

SEQ ID NO: 577 - DNA, 149 bp, Glycine max
  unsure (1)..(149): unsure at all n locations; Clone ID: 701037562H1
ttagctnttcttacctcttggcatgaccattcaaatgtnttctttnctcttagcttctnttgctgtattnnntntnttctcctccttggagaagagttttgcntttnaagcagcaagaaaggaggacacagnaagcaacaatcttcatc

SEQ ID NO: 578 - DNA, 120 bp, Glycine max
  unsure (1)..(120): unsure at all n locations; Clone ID: 701037563H1
ttgtttgtngtaggaagaggaatcttgagaaatggcaggggacagcaagagcaagattctgttcatcggagggactggttacatcggaaaattcatcgtggaagccagcgccaaanctgg

SEQ ID NO: 579 - DNA, 170 bp, Glycine max
  unsure (1)..(170): unsure at all n locations; Clone ID: 701037564H1
anaaangcaaaggggatcgcnganatcaattagtctggttgtagtnggaaaaganaaganaatgaaaatgggtggtgggtgcnagtgtttggtatcgttggtgttggctttggngttgatgaggagtttggcggaggcgcaatcgggcaccagcaccacttgcgcccagg

SEQ ID NO: 580 - DNA, 245 bp, Glycine max
  unsure (1)..(245): unsure at all n locations; Clone ID: 701037565H1
cagacaatggaagcgagtngagagctacctcggttgaacatcatcgaatcgaataatcacttttacacatgacttatccttctattccgatttaagcccctaaacgaactatcgaagccacttcaaaaactactcttagattgcntcgatggtcgatcactacaacaagctggttaaactagcggcgagggtttctacgatgatctaacgagtaaaggagagaatcaacccaaatcgggaaggag

SEQ ID NO: 581 - DNA, 268 bp, Glycine max
  unsure (1)..(268): unsure at all n locations; Clone ID: 701037566H1
ctcattaattgcaagaatggcacttcgttgcttggtgatgtccctttctgttctcttcactcttggtcttgcgagagaaagccatgccagagacgaagatttttggcatgctgtttggccaaacactcccattccaagttcattgcgagatcttctaaagcctggccctgcaagtgttgaaatcgntgatcaccctatgcaaattgaagaaacacagtacccgnaaaccttcttctataaagaanaccttcatccaggcaaaacaatg

SEQ ID NO: 582 - DNA, 265 bp, Glycine max
  unsure (1)..(265): unsure at all n locations; Clone ID: 701037567H1
agaatatgagcagcagtgcagggaagttggtgtgtgtcaccggtgctgccggttatattgcttcatggattgtcaagttcctacttgaacgtggttacactgtcagggccactgttcganacccaaatgatcacacgaaggtagaacatttgctaaaacttgaaggtgcaaaggagagactgcacctttttaaggcagatcttttgggtganaattcttttgactccattgttgagggctgtnatggcgtcttcatactgcttct

SEQ ID NO: 583 - DNA, 266 bp, Glycine max
  Clone ID: 701037568H1
ccgagtacatagatgcgatgaggaaggctaatcctgacctcttatgggccatcgacaagaacaagagaggcatattttcgcatgcaattctcaatcgtagaaaagatgtcttccgactcataaaccgtgtcaatggacggaaggagatcatcaaatgtcgtgcagacgcgtttggcaacaacctcttgcacttggcagcatatttagggccttcatccgatctcgatcgtagatccggtgctgctcttcaattgcaaagggaattt

SEQ ID NO: 584 - DNA, 117 bp, Glycine max
  unsure (1)..(117): unsure at all n locations; Clone ID: 701037569H1
ggactatantgagcaatcctgtttgtggttcntcaatagnaggcgaggctantggttccantgatggngcaaagaatatngcnnccgtgaattntcaatcatctgnagnntcntatc

SEQ ID NO: 585 - DNA, 266 bp, Glycine max
  unsure (1)..(266): unsure at all n locations; Clone ID: 701037570H1
ctccaacgtttggaactctcacccaaaaaactacggtcctggttctcgcacttgccgtgtgtgtgggaatccacanccgactgatcaggaagtatggccttatgtgctgcaggcagtgcttccgtagcaatgccaaggaaattggcttcatcaagtatcgctaaaagagcagttgtcaactacggaccaatattgtgttctggcactaggatgttttgaggatgttatgtttgaagaaacttgagactttcttttttcatctaatt

SEQ ID NO: 586 - DNA, 264 bp, Glycine max
  unsure (1)..(264): unsure at all n locations; Clone ID: 701037571H1
cttcttcttcctgagctgtccattgcatcttcctctctcgctttcgctctcagctaacagtctaagaaattgcaggtcaaaatggaagacgggcataagttccaggaagttccaaagccaaaatatgattgtcttttatttgatcttgatgacaccctttatccttatagttctggagtctcagtgcaaatagcaaaanatattgatgagtttatgattcaaaagctggggatggaggctgccaaagttgccganttgaatatc

SEQ ID NO: 587 - DNA, 266 bp, Glycine max
  Clone ID: 701037572H1
atttcttcagcacttatagtgtggtgagagagaaattaaggaagagctagcttaattgagtgctgctaattctatggctacccttgttgctccaaaccaaaaatctccggttgaagacgttgaggctctacataaggctttcaaaggatgggggaccgatgagaaaaccgttattgcaatactgggtcatagaaatgttcatcagaggcaacaaatccagaaaggtttatgaggaaatttaccaagaggacctcattaaacgcctg

SEQ ID NO: 588 - DNA, 253 bp, Glycine max
  unsure (1)..(253): unsure at all n locations; Clone ID: 701037573H1
ctggtgatgtttatctgccaattgctagtgtgaaaggngacattcagatctggggaggaaagggtaagggccagggtggctctggagcaaatggaactataactgggaaggcttgccccaaagggttgtacggtaccttttgtgaggaatgtccagctggnacttacaaaaatgttactggatctgataaatcactttgtcacagttgtcctgtcaatgagcttcctcaccgtgctgcttatatttcagtccg

SEQ ID NO: 589 - DNA, 260 bp, Glycine max
  unsure (1)..(260): unsure at all n locations; Clone ID: 701037574H1
ctcttatcctattatgagccagcaattgaatatttggctacttcaagaacccttccgcgacttattgatgttgtcaggagttctacaaaagagaaggtggttagagttgttgtcttgactcttaagantttnatgtcaaaagggacattgggtgctcagatggttgaccttcagcggcacaagttgtcctgagtttaaaagcacaagcatggagtgatgaggacttgttggangccctgaattccttggnagaagggctt

SEQ ID NO: 590 - DNA, 207 bp, Glycine max
  unsure (1)..(207): unsure at all n locations; Clone ID: 701037575H1
gtgatggctgagtacgacctaactccgcggatggcgccgaatctcgacaggcaccttgtgttccctctcctggagttcctgcaggagcggcagtcttacgacgacgaccacatcctgaaggcgaagatcgaccttctcaacaacaccaacatggttgactacgctatggacatccacaagancctctaccacaccgaggacgtcccg

SEQ ID NO: 591 - DNA, 262 bp, Glycine max
  unsure (1)..(262): unsure at all n locations; Clone ID: 701037576H1
gcataacgaggatgtttttcagccgcagaaaggtantgtnatattcgcatgcnctttanatggttggncgatttgggattcntgagtttgcggagatttatgcttctaagcttggggcgagtntgantgccttgctgagggcgttgtggggacagangtattataaccctnagacgaagatgattgttgggaagaaaggggttggggggaataagaagcctntgtttgttcagtttgtgttggagcccttgtggcaggtgta

SEQ ID NO: 592 - DNA, 123 bp, Glycine max
  unsure (1)..(123): unsure at all n locations; Clone ID: 701037577H1
ttacaacgcaacaacataacgttnctaattgcttgcacttcctcttatggttgcttcctncngtntctcattagctgttttggtttttcgtcttagttctacacctttcctcatttccgcagt

SEQ ID NO: 593 - DNA, 267 bp, Glycine max
  Clone ID: 701037579H1
aaaagttcacccccaagcactaaattcctctaccacttgcaagcaagagacgtttaccctatggatgaaatctctggtactgaacggaaagggatgcaccgtgtttgattcaaatggccaaattgcataccgagttgataactacaactgcaggcatagagatgaagttcatctcatggatcaaaatggcgatattttgttcactatgctgaaaaagcaatataagttgtccaggttttgggagggttatagatttccagttccagg

SEQ ID NO: 594 - DNA, 144 bp, Glycine max
  Clone ID: 701037580H1
gttgattttgtttcatagcttgttggttatgctgttgtggagttacttctctgttgtttttaccgatccgggcagtgtccctccaaactggaagcctatgattgatgaggaaagaggagaggctgatccgttggttgggacaga

SEQ ID NO: 595 - DNA, 141 bp, Glycine max
  Clone ID: 701037581H1
tcatgttttgccttcaacaaattgcatgtatattctctattgttgccatgattgtgggaagcagtgaaattcaagaggctctcagctgctgtcttgtttggctgactttgtgtactgcacggtctgtgcatgcatgcaggt

SEQ ID NO: 596 - DNA, 265 bp, Glycine max
  Clone ID: 701037583H1
ctcattcacacattcacagttatactctctctctctttgtcgcttcggatcactgatctcatctcaattttcagatatgtgcgacatctgataagccagaagtggtggaaaggggtagcaaggatgaaaaacacaaggaagatgatcaagaggaggggaagggtggattcattgagaaggtgaaggatttcattcatgacattggtgagaagattgaggaagctattgggttgggaagccaactgctgacgttactgcgattcac

SEQ ID NO: 597 - DNA, 263 bp, Glycine max
  unsure (1)..(263): unsure at all n locations; Clone ID: 701037584H1
ttggtgctgtcatcttcatctcagtcgctctcaccacttatttcatctcnnnnnnnnnnnnnnnnnnnnnnnnnnnatccaggaagaagaagaagggactggtggacgccataggcaacactcctttgattcggatcaacagcctctccgccgccactggttgccaaattctcggcaagtgcgagttcttaaaccccggaggcagcgtcaaagaccgcgttgctgttcaaattattcaagaggctctagaatctggccagcta

SEQ ID NO: 598 - DNA, 265 bp, Glycine max
  unsure (1)..(265): unsure at all n locations; Clone ID: 701037585H1
accaatctcatctcttcttctttatgttctctttccttcttttgtnttctcgccatggaagacgagccatttctcactaccacttcccaacccatcgccgatttccttcttccatcttccaagtccttcaacgacgtcaccaccacacgcgcgcgtnnnnnnnnnnnnnnnnnnnaggagattcaatccgaacaacaacaacctcccaagaagaaaaaactgagccgctgcaagacagcacctgcgatggtcaccatgcgagacc

SEQ ID NO: 599 - DNA, 252 bp, Glycine max
  unsure (1)..(252): unsure at all n locations; Clone ID: 701037586H1
aagaaaacctatgttgcaaaaagaagtctttcacaagaagatgaaacgatccttgttgctaatggtcatcaacatgacatcccaaaagcagaccaagttttctttgaagaaggattaaggcctggcacaaaattggatgctcacttcaagaaaagagaaaatgtaaccccattgttgcctcgccaaattgcacaacatataccgttgtcatcagcaaagataaaagaantagttgagatgctttttgtgaac

SEQ ID NO: 600 - DNA, 264 bp, Glycine max
  unsure (1)..(264): unsure at all n locations; Clone ID: 701037588H1
ctctctcctcctcgatcccaattccactagggattcaattccgatncgattccnagcttgtnagatccacgacaacgtttcgtttcccagattcttttgtaaannaaaataatcttcctttgcccaacaggtattggacactagttgaagaggggtcaatgggccatgtatgcatgtgaaaagaaatctatctagtaacactnnnnacaggactagctgggaaaaggaaccactgtactgctcactgctatcttatnatgagta

SEQ ID NO: 601 - DNA, 187 bp, Glycine max
  unsure (1)..(187): unsure at all n locations; Clone ID: 701037590H1
ggcgtaccaccaccgcgtcgctgcggcggtgcactcggtggggaaggtgccgttgggaattaanaggaaggggctccggatcgtggtgaccggcggcgcgnggttcgttgggtcgcacctggtggatcggttgattgcnagangggacagcgtgatcgtggtggacaatttcttcacgggaagaaaa

SEQ ID NO: 602 - DNA, 141 bp, Glycine max
  unsure (1)..(141): unsure at all n locations; Clone ID: 701037591H1
cccgatcgaaaccctaactcgcgatggcgatcttgctgggcganatttcttcaatcgctggagctgtngctgaagctgatnaanaacccgcagcctcagccctacgtgaaccctaatctggaccccgttttggctggtgcc

SEQ ID NO: 603 - DNA, 200 bp, Glycine max
  Clone ID: 701037592H1
ctgagtttgccctgtatgaaagctaaaatcatgtagttctgtttatgactgcagttgcttcactttcttccctggttcacaagcctagtttaaaggtacttccagataagggcctagaagttggattgtctgggtctgctgccaaagggaagcctcctacaacgttgtcaccctcaatgttgattgttgattggagatgt

SEQ ID NO: 604 - DNA, 166 bp, Glycine max
  unsure (1)..(166): unsure at all n locations; Clone ID: 701037593H1
ctcttcgaggtatcanagttgaagtaacacatcgtggaaacatgagnaggaaatatcgtatctctggtntgacttncacaggcaaccanagaattgacattcccagtagatganagggnnaccatgaaatctgtggtggagtacttctatgagacatatggggtnt

SEQ ID NO: 605 - DNA, 113 bp, Glycine max
  unsure (1)..(113): unsure at all n locations; Clone ID: 701037595H1
gaagatggcttcacncaggctcgtatcttctctgattcgatcctcccttcgtagatctcaatcgaagccctcaatttccgcatcgncancnaggncnacgtcatccaaccgtg

SEQ ID NO: 606 - DNA, 132 bp, Glycine max
  unsure (1)..(132): unsure at all n locations; Clone ID: 701037601H1
tccancctcactncttcgatcacgccaacacaacacagcatcgatntcgtccaaattcggaccaccaccgnacncttncaancaacannggtncttttcccactgnatntttccacaaantccaannacacc

SEQ ID NO: 607 - DNA, 106 bp, Glycine max
  unsure (1)..(106): unsure at all n locations; Clone ID: 701037602H1
cggcgcnagctggcctccgtgtggntngaaanaatngaaatccccagttcgggcgcctccatnggcggcgtcntcttccccatctccaggntcnattcctnnnctg

SEQ ID NO: 608 - DNA, 122 bp, Glycine max
  unsure (1)..(122): unsure at all n locations; Clone ID: 701037603H1
ggaagccatttacaatnacaaagtncaatttnattnggtgaatcaagaggatgacacagaggtaattccnattntnnaaaatggcaccacttttccggcttggantttgaattatctatttc

SEQ ID NO: 609 - DNA, 119 bp, Glycine max
  Clone ID: 701037605H1
catctcagaggccgattctttcgccgcttctctctttccttgtggtgttctcgtgttgctcgtaacaaaattggtggaaagtgttgaacgcttttgaaatgaagggtttgagaatcaac

SEQ ID NO: 610 - DNA, 115 bp, Glycine max
  Clone ID: 701037606H1
cagggttcgataagtctgatctgaagctggatgttttcatggttcagcacgacatggaaaacatgtacatgtgggttttcaaaggagaggccggagaacgcgctgggtaagatgc

SEQ ID NO: 611 - DNA, 117 bp, Glycine max
  unsure (1)..(117): unsure at all n locations; Clone ID: 701037611H1
ctttgacttgtntcancaattatagcaaaaatgagaacccatttnncantncttcttcccattggattttncttgtncaacccctttcccctttcnnattggggtaaaaagcccgac

SEQ ID NO: 612 - DNA, 120 bp, Glycine max
  unsure (1)..(120): unsure at all n locations; Clone ID: 701037612H1
caatatattccantctctctgtgtatttccctacctctcccttcaagatgnagatcttncgtcaagaccctcaccggtaagaccaatnaacccttggaggtgggaaagcttntgancacc

SEQ ID NO: 613 - DNA, 121 bp, Glycine max
  unsure (1)..(121): unsure at all n locations; Clone ID: 701037613H1
cgacaggtagaacacagaatggtgctcatgcgaactgtgtacccaaccatcgctgttcctcttcctcttcctctttcaaaccttccccggttaggaccaaattttcgcncgtttcgaatgt

SEQ ID NO: 614 - DNA, 109 bp, Glycine max
  unsure (1)..(109): unsure at all n locations; Clone ID: 701037614H1
ctcntctctncctcactntcaccatggaggngcaagcgccaaccccctcgantgcnccgccgcntctngnngccananctnagtagcccgacttccggtgggattctcg

SEQ ID NO: 615 - DNA, 114 bp, Glycine max
  unsure (1)..(114): unsure at all n locations; Clone ID: 701037615H1
ctcanncgcttcaaatttcaggaaatcaattatggcncaaccctnaanaagaanaggccttgctggactggcngttatgggnnaaaatcnaggatgcaanantgctgagaaagg

SEQ ID NO: 616 - DNA, 117 bp, Glycine max
  unsure (1)..(117): unsure at all n locations; Clone ID: 701037616H1
tagcaagtncctttntgtattccnattattgggaattcttaactgtgaggcacaatatttcaatgccaacccatacgactatttacaactagccttaaggnggcctaattccntatt

SEQ ID NO: 617 - DNA, 115 bp, Glycine max
  unsure (1)..(115): unsure at all n locations; Clone ID: 701037617H1
acctgacctanggtnttcttatcattcctcttcccaattccagggtaagctttggatcttccgatcggaggcttacccatcttttcttaatcttcaagganccctttgggacact

SEQ ID NO: 618 - DNA, 118 bp, Glycine max
  unsure (1)..(118): unsure at all n locations; Clone ID: 701037618H1
cgggacgagaggngcgatgtgattctgctaaagtttcttagggcaaggnatttcaaggtgaaggaggccttgaacatgataagaacacacgggtgccgatgggagaaaaggnatttgg

SEQ ID NO: 619 - DNA, 115 bp, Glycine max
  unsure (1)..(115): unsure at all n locations; Clone ID: 701037619H1
aagaagagaaaagagagagaagggtaaggtaaccctagagtggtgaatcgaatctgcaaagatggaagctgtttcttcgaagaagaggtggaggcatttncgaaagccctctacc

SEQ ID NO: 620 - DNA, 76 bp, Glycine max
  unsure (1)..(76): unsure at all n locations; Clone ID: 701037620H1
cagggtagatntnngcntgctgctgtaagnnngccganttttagcccggtcatttcantcaatgccgtcatgtggg

SEQ ID NO: 621 - DNA, 119 bp, Glycine max
  unsure (1)..(119): unsure at all n locations; Clone ID: 701037621H1
aacaatattcacaaatggataganattgttttagccttaccaagaagagttcagcactatgtttaactcactggaacccccatcaaaacgtaagnccaggaaccatcccttgttgtggt

SEQ ID NO: 622 - DNA, 111 bp, Glycine max
  unsure (1)..(111): unsure at all n locations; Clone ID: 701037622H1
ctttgtgaaaaaggggagtttcttattctttctagacgcttccatngatcggcgatttcttagacatggcggagatcacgaacacgaggaagtgaagggtgagtccttgtt

SEQ ID NO: 623 - DNA, 115 bp, Glycine max
  unsure (1)..(115): unsure at all n locations; Clone ID: 701037623H1
cccaactttctctctcaagaaccatcaaatctcgatcctcccctctccctgcaagatccggtggtggttccgattgctccacaatagggnttggtntcgggtgggtcaaggntgg

SEQ ID NO: 624 - DNA, 114 bp, Glycine max
  unsure (1)..(114): unsure at all n locations; Clone ID: 701037624H1
cgaattgattcanttcgacgccggcagttacagtngaattccccaatggcgggtncttcgatcatggagaacanntctccaancgcacgttcgggganctgatcaaaggcttgc

SEQ ID NO: 625 - DNA, 87 bp, Glycine max
  unsure (1)..(87): unsure at all n locations; Clone ID: 701037625H1
atgaacttctacaaganaatcatgccctcaggctgaagacatcancacaggaccaagtgcaggcttctctacaagcggccacaagaa

SEQ ID NO: 626 - DNA, 111 bp, Glycine max
  unsure (1)..(111): unsure at all n locations; Clone ID: 701037627H1
ctctcagaaagaacttccttcaaccctttcgtgaccttcttgccagacttaaccgttctgccactactcccccagttacttgnttagtctctgattgcttcgtcacttttc

SEQ ID NO: 627 - DNA, 112 bp, Glycine max
  unsure (1)..(112): unsure at all n locations; Clone ID: 701037628H1
actgagactgaaaccttcgtgttcgtgttgcatanccanaccctaatgtggaaattgaattttngnaagatggntctggcggagttaaggtggggagcatttccgngtgctc

SEQ ID NO: 628 - DNA, 96 bp, Glycine max
  unsure (1)..(96): unsure at all n locations; Clone ID: 701037629H1
caananaagacaaagactttctcaaacaaaaccagacggttatctagtcttccaatcttccccctattccctgttccnatncctatngnannaatc

SEQ ID NO: 629 - DNA, 115 bp, Glycine max
  unsure (1)..(115): unsure at all n locations; Clone ID: 701037630H1
ccctccttatacactcttctcctctatctaacaacacccaacaaaaataaaanataaaaaanattagggttttcaatttggggaaataaaaataggggggaaacattctagagag

SEQ ID NO: 630 - DNA, 113 bp, Glycine max
  Clone ID: 701037631H1
gcatctcagaggccgattctttcgccgcttctctctttccttgtggtgttctcgtgttgctcgtaacaaaatggttggaagtgttgacgctttgaatgagggtttgagaaatc

SEQ ID NO: 631 - DNA, 96 bp, Glycine max
  unsure (1)..(96): unsure at all n locations; Clone ID: 701037632H1
gaaagaattcccttcaatgaagaacgnaanaatttgncccacccttcccaaganaatatctngaaactgataagtctcctaaananagtgnaaagt

SEQ ID NO: 632 - DNA, 104 bp, Glycine max
  unsure (1)..(104): unsure at all n locations; Clone ID: 701037634H1
ctctctctccctcactctcaccatggaggcgcaaccgcnaacncnctcgactgcnacgccgcctctgnagnanactgcaggttanccggactncngtggaatct

SEQ ID NO: 633 - DNA, 116 bp, Glycine max
  unsure (1)..(116): unsure at all n locations; Clone ID: 701037635H1
gctcaggtagttcgcggcggcgagccggaatcggcnggcggcattcaccaattcagcgccgtcatcgtcctcgtcgtcgtgccncgtnctnctngttgcnngatcaagcccccgtc

SEQ ID NO: 634 - DNA, 107 bp, Glycine max
  unsure (1)..(107): unsure at all n locations; Clone ID: 701037637H1
ctaaaatcaaaaacccnaaccaagaaagttttcaccgcatctccacctattctcaatctccacaaatcgaagaaagagatgagtagacgttcgagcagaactgtcta

SEQ ID NO: 635 - DNA, 116 bp, Glycine max
  unsure (1)..(116): unsure at all n locations; Clone ID: 701037638H1
gaaagacacagccattgtttgtttactttccattgattgagcgaaagcnttgttttttctgcgatcattntccattgggtggaaagaaaaggtcctcnaaccnttaagtccgaaag

SEQ ID NO: 636 - DNA, 109 bp, Glycine max
  unsure (1)..(109): unsure at all n locations; Clone ID: 701037639H1
ttgtttcctcaggccaagagcttggaaaattancctcacaaaagcaaagatcaaacaaaccanggacnagnacacgatgttgcntgaactttgcacttggtttatgggc

SEQ ID NO: 637 - DNA, 82 bp, Glycine max
  unsure (1)..(82): unsure at all n locations; Clone ID: 701037640H1
tggggtggtatagcttttntgtntaatctgtngtnagtttggtnataaatattagttggaagatgaattngaatcggnantt

SEQ ID NO: 638 - DNA, 116 bp, Glycine max
  unsure (1)..(116): unsure at all n locations; Clone ID: 701037641H1
gcagaagatttctcccaattcgggatttcaaaagaggaaaaagataagcttgttggggaattgattaggtacatgctttttcaaaaaccccatccaaanttcctgggtgncccnat

SEQ ID NO: 639 - DNA, 114 bp, Glycine max
  Clone ID: 701037642H1
ccgcattgctctcagcttcacaacaccatggaccacgttagggaaacctctgcttgggctcgctagccggtcctcccacgtccttcgttgacttctggaaggaatttgaagaag

SEQ ID NO: 640 - DNA, 109 bp, Glycine max
  Clone ID: 701037643H1
tagtgcggaagaaaagaaaaacgaaatccctcgctttgagaaatgggtgtattactcttccggtgggttctgccactgactctgttgctccacttgcgcgttaggtttc

SEQ ID NO: 641 - DNA, 112 bp, Glycine max
  Clone ID: 701037645H1
tctattcctatcacccttttaaataccgaaaatgcaccccgctacttcagcacagaacgaagctgccatcgataaacatatcacacttgagacagttatctttatctaacgg

SEQ ID NO: 642 - DNA, 108 bp, Glycine max
  Clone ID: 701037646H1
cttccctggttcccatcatggacgaattagaagaaaccctactcacccaaatcgactgggaatcgttcctcgacgacatacctgaacttaacgtcgatgattttttgc

SEQ ID NO: 643 - DNA, 109 bp, Glycine max
  unsure (1)..(109): unsure at all n locations; Clone ID: 701037647H1
caggatcgacaatcaggtgatgatgaagcaatggccttcgatganacattttgtacggctctagagtatggtttgccacctaactggtggttggggtttnggnattgat

SEQ ID NO: 644 - DNA, 109 bp, Glycine max
  unsure (1)..(109): unsure at all n locations; Clone ID: 701037648H1
gttcaacaggtgagactcagattactccaacccatgtatctgatgaagaggcaaaccttttcgccatgcaactagccagtgcctcagtactccctatggttcntcaatc

SEQ ID NO: 645 - DNA, 114 bp, Glycine max
  unsure (1)..(114): unsure at all n locations; Clone ID: 701037649H1
gaaaaaatgggttcttcttcttctatgtggacggtgtgtgtgattttggcatcactggccttctgcagcactctgtgcncaaccccacgcaggccagtgggatgtacnaattgg

SEQ ID NO: 646 - DNA, 116 bp, Glycine max
  unsure (1)..(116): unsure at all n locations; Clone ID: 701037650H1
aacatctaacaccacacacacggcaacacgcttcagccactattcttcaaggaaaaacanaatgaaagacacaatggaaaacttcctacgacactcaccaacctntggctccngcc

SEQ ID NO: 647 - DNA, 110 bp, Glycine max
  unsure (1)..(110): unsure at all n locations; Clone ID: 701037651H1
ataataataactccatttnccctctgtcttccccccctcctctacacaaaaatattattagcatggagaaggtgaatttngtgaagaatggaggaggcttagattgcctc

SEQ ID NO: 648 - DNA, 100 bp, Glycine max
  unsure (1)..(100): unsure at all n locations; Clone ID: 701037654H1
acganactcantcacacaccatggatttgctctnaatcnctccctcncaccctnnanctgtctgccattcgaaccctnncctcaaaagcctaaagnnaac

SEQ ID NO: 649 - DNA, 110 bp, Glycine max
  unsure (1)..(110): unsure at all n locations; Clone ID: 701037655H1
cgctcttgcaattagtcctcttccaacaanccgcacctaaactctagggttctgacatgganactggtggaaagatcaagaagggcggccggaggnaagaaaaggggngg

SEQ ID NO: 650 - DNA, 114 bp, Glycine max
  unsure (1)..(114): unsure at all n locations; Clone ID: 701037656H1
gcttcntcttcgttggcgcttnttcgcaaaaccaatnggatcantctcgtccgttaccgccgctggcctagancagcgcaaagcnnangtcggaacaaccgncnttcnatcccg

SEQ ID NO: 651 - DNA, 110 bp, Glycine max
  unsure (1)..(110): unsure at all n locations; Clone ID: 701037657H1
cttccctggttcccatcatggacgaattagaagaaaccctactcanccaaatcgactgggaatcgttcctcgacgacatacctgaaacttaacgtcggatgaatttttgg

SEQ ID NO: 652 - DNA, 108 bp, Glycine max
  Clone ID: 701037658H1
tttagggactgcaaattctctgcttctctacacatggagccggtgtcgcgtgctaatttcttttcattccaaagattttgggctaccgtttcaagggacaagggaggg

SEQ ID NO: 653 - DNA, 110 bp, Glycine max
  unsure (1)..(110): unsure at all n locations; Clone ID: 701037660H1
ccgaacttctgatccgaaaactcccattccagaggctcgtcagagaaatcgctcaggntttncaaaaccgatctccgctttcagaggagcgccgttttcggcttccttca

SEQ ID NO: 654 - DNA, 101 bp, Glycine max
  Clone ID: 701037661H1
gaccgttcaaattttacactggattccctgtctattgtgttaggattgctcctcacgtcatgatgacatggatttcctcaaccaggttcagaaaattgcag

SEQ ID NO: 655 - DNA, 114 bp, Glycine max
  unsure (1)..(114): unsure at all n locations; Clone ID: 701037663H1
caaagactaaagcagctgatggacccgagagcaanaagatttctgctattgtgaaccatgataaaagcaagacagcagcccttccccagaacttgaaaattcagaaacattccc

SEQ ID NO: 656 - DNA, 109 bp, Glycine max
  unsure (1)..(109): unsure at all n locations; Clone ID: 701037664H1
gnaaataatggactctccagacttttcagatctaggcgagtcctatcatattcatatggcatttgcattttatatgtttggagatgagctttttaaggatgaaatgacc

SEQ ID NO: 657 - DNA, 105 bp, Glycine max
  unsure (1)..(105): unsure at all n locations; Clone ID: 701037666H1
gtctcagcctcgcgtgatgtttccttgctctttcatcttttcctctttcnctatgcaaataaccgattgancaatcgaattnnntgtgatncaattcgctctgtt

SEQ ID NO: 658 - DNA, 107 bp, Glycine max
  unsure (1)..(107): unsure at all n locations; Clone ID: 701037667H1
ctggtacctgagaggtactcaattttggattatacatcctggctctggtttctagatgtcaaatctccttataatgcacactnattgnaagggngantccatccnta

SEQ ID NO: 659 - DNA, 112 bp, Glycine max
  unsure (1)..(112): unsure at all n locations; Clone ID: 701037669H1
tgaatttcactacactgttcaggatggcatagatgccattgaggatgtgattcnatcacattganacatnatggatgngaccaacaattnagagcnaagcatttccccattg

SEQ ID NO: 660 - DNA, 107 bp, Glycine max
  unsure (1)..(107): unsure at all n locations; Clone ID: 701037670H1
cgaaattnagtttaagatctgattngncggcgacgatggagaacaacgacagtatcatanccgcgggannngatcgaccaaggcggccgtgtggntcggcttcccgc

SEQ ID NO: 661 - DNA, 109 bp, Glycine max
  unsure (1)..(109): unsure at all n locations; Clone ID: 701037671H1
cgatatagacggcttcgaagttgccaccaggattcgaaagtttagaagtggaaaccggcctatgattgttgccttgactgcaagtggcagaaagaangatttgtgggga

SEQ ID NO: 662 - DNA, 106 bp, Glycine max
  unsure (1)..(106): unsure at all n locations; Clone ID: 701037672H1
cggcagtgaagtntcaaggttgacgcaaaganttganttgangtnataagtattatatagcatgcnaagnaaatggtanggtaaggtaaggtccgatagcacggaa

SEQ ID NO: 663 - DNA, 106 bp, Glycine max
  unsure (1)..(106): unsure at all n locations; Clone ID: 701037673H1
gcttctctctctncttgctcctctctccttttcaattactctcnctancaaggagtngatggctgtgcaactgtggggaaaccctgaaggagggcaatcgtggcct

SEQ ID NO: 664 - DNA, 107 bp, Glycine max
  unsure (1)..(107): unsure at all n locations; Clone ID: 701037677H1
caattatcaatggctcgccaaaccatntccattctcaacctcttaccagaacctgatgtcttcnttcanacttcccatggaanacggcattcnagcccaacgnancc

SEQ ID NO: 665 - DNA, 105 bp, Glycine max
  Clone ID: 701037678H1
ctcagaagaaaaaaaagtgagagatggagaactttcccgtgatcaacttggagaatctcaacggtgaggagaggaaggctacccttaaccagattgaaagatgtt

SEQ ID NO: 666 - DNA, 104 bp, Glycine max
  Clone ID: 701037679H1
gactctcttttctctctctgaactctgaagcaaaacaacattaccagagtggttctagtaattcagtgctgctagaagatggaaactagtgaatggcatatcgt

SEQ ID NO: 667 - DNA, 106 bp, Glycine max
  Clone ID: 701037680H1
tttcctccctctcttcgttttttgctctctcgaagtttgagagattcaggttcagatctgagcctattccgttttactcacactctcaaacaaacaaaaccaaaaa

SEQ ID NO: 668 - DNA, 97 bp, Glycine max
  unsure (1)..(97): unsure at all n locations; Clone ID: 701037681H1
ctggcctctgtnttgtttttaaaaaattgaaatccccactctctctcctccattctcgtcttcttctcccaatctccattttccaattcttttttta

SEQ ID NO: 669 - DNA, 105 bp, Glycine max
  Clone ID: 701037682H1
gtgtctcaccgtgcgtgagtgtgtacaaacaccacgtttaaaaattgtgaatttggttaaaaaaaacacaacgtggcgtccttcaagacgagacggagagtttaa

SEQ ID NO: 670 - DNA, 102 bp, Glycine max
  unsure (1)..(102): unsure at all n locations; Clone ID: 701037684H1
ctcttttntctctctcttncaaaacctaattttcatntcttccctcaaatttcaaaatgcgtgagatccngcanatccagggtggccaatgcggcaaccaga

SEQ ID NO: 671 - DNA, 99 bp, Glycine max
  Clone ID: 701037685H1
ccgttgctctgcttcaaccttgcggaagaagaagacgcgccatggtgaagtactccagagaacccgacaatcccaccaagtcctgcaaggccagaggcg

SEQ ID NO: 672 - DNA, 100 bp, Glycine max
  unsure (1)..(100): unsure at all n locations; Clone ID: 701037686H1
cagcatcaaactgcaaggataacaagactggaactgtnnatacaaggcgttgcacaggatcttgcttgcaggcttctantngtgntaattggaaaaattt

SEQ ID NO: 673 - DNA, 107 bp, Glycine max
  unsure (1)..(107): unsure at all n locations; Clone ID: 701037687H1
cgcttattctctcgcattccgtggagatctagtgcttctgctcgcaagacctcgctgaaaattagggtttcnattcggaggtaagacgaaagaatgtttcgggaagg

SEQ ID NO: 674 - DNA, 94 bp, Glycine max
  unsure (1)..(94): unsure at all n locations; Clone ID: 701037688H1
cacctatcaatttcgtaggtttgtacatcttttggnttggggcgaaagttcagccttttcagatttggcatcaaatttcaacagagnancaacg

SEQ ID NO: 675 - DNA, 274 bp, Glycine max
  unsure (1)..(274): unsure at all n locations; Clone ID: 701037690H1
ctttcgtcagtttcgggggaagagatccagcagcaatggtgtacgtcnaggctcagaaatcaaaagcctacttcaagagatatcaagtcaagttcaagagaagangagagggaaaaaccgattaccgtgccnaggattcggttgattaatcaggacaagaacaaatataacactccgaaataccgatttgtggttcgctttagcaacaaggacattgttgcacaaataatatctgctagcattgccggcgatttagttcttgctacagcatatt

SEQ ID NO: 676 - DNA, 96 bp, Glycine max
  Clone ID: 701037691H1
gcttcaaatagtgattcttctggcagttggtggcaacaaacccgattcaattcagagaacattctgagcatgccacaacatttgcaaaatgtgggt

SEQ ID NO: 677 - DNA, 268 bp, Glycine max
  unsure (1)..(268): unsure at all n locations; Clone ID: 701037692H1
aagaagggcaaccacttggagcanagagagaagttaggattgacttctgcccctaaagggcagtcaaagtcacgtacaacactttctgagccatcaaatgtgcttgaaaaagttgaggtttgaaaaagggagcaagtaaccgcattncnagatttagtgacctctngggaganntgaaaggcatggccattgacatgggatcngaattgggagccaaaaccaagccttggatggttttgacatgatatggagaattgatcgtccgcgt

SEQ ID NO: 678 - DNA, 105 bp, Glycine max
  unsure (1)..(105): unsure at all n locations; Clone ID: 701037694H1
caccgaggacccgcaaaacagtggaaatttcagcaccagcagaattcccttcagctgtgcgcgtgattctcctatacagtgtgacttctggnacctggannccct

SEQ ID NO: 679 - DNA, 110 bp, Glycine max
  unsure (1)..(110): unsure at all n locations; Clone ID: 701037695H1
cgaagtctggagtgctaccgtatgtttattaaacatnactgttttaatantttatttacctcnaacttttgcnccaaaggtattctatagagagatttgtnnacttngac

SEQ ID NO: 680 - DNA, 97 bp, Glycine max
  unsure (1)..(97): unsure at all n locations; Clone ID: 701037696H1
gcaaaacangtgaggnaagagnaccctagtttgccagttccaactatggtgttgttntcttttttcttttnnntaattttaccaacancaaaaaccc

SEQ ID NO: 681 - DNA, 284 bp, Glycine max
  unsure (1)..(284): unsure at all n locations; Clone ID: 701037702H1
gtcgaacctcggagatcttcaacgcgaattggagaacaaagccaatgatctcagcaagcttcaaaaggaaattgcgaagaatcaccaaatgagacaganatacacggtccagcttggcgagaacgagctcgtccttaaggaactggatttattgaaagacgacgcaaatgtttataagntgattgggccagtacttgttaancaagatttggccgaggccaatgcaaatgtccgcaagagaatcnaatacatctcagctgaattgaagcgtctggatgccactg

SEQ ID NO: 682 - DNA, 281 bp, Glycine max
  unsure (1)..(281): unsure at all n locations; Clone ID: 701037703H1
acgcgtgccgtgccggggccatcctgtggagatgttctncgagtgatgcagcaccagcccgagctcatgttcgagacactcaagcaccgcgcgcaggagtatgtcagccacgacaacgcagcagcgcttctggctgctggccttgctcgcacctttgacagaatgccttatctgctgtctctgtcttcctttgtggctgacgatgttgccgctgctgttcctgctgctcaagatctgggggagcagtggtcttattaatggatgtgcttcaattcaaatag

SEQ ID NO: 683 - DNA, 87 bp, Glycine max
  unsure (1)..(87): unsure at all n locations; Clone ID: 701037704H1
gttntanttctgattctgatttctcactagtgaatttgaggatcagcagtagtgatgaattccacacaacanncgancgngncgnnc

SEQ ID NO: 684 - DNA, 279 bp, Glycine max
  unsure (1)..(279): unsure at all n locations; Clone ID: 701037705H1
acggcctttgtgccggcgacgcatcattcaaatttctgccctatcaactttcgatgntaggatagtggcctaccatggtggtgacgggtgacggagaattagggttcgattccggagagggagcctgagaaacggctaccacatccaaggaaggcagcaggcgcgcaaattacccaatcctgacacggggaggtagtgacaataaataacaataccgggctcattgagtctggtaattggaatgagtacaatctaaatcccttaacgaggatccattgg

SEQ ID NO: 685 - DNA, 281 bp, Glycine max
  unsure (1)..(281): unsure at all n locations; Clone ID: 701037706H1
gtgcagggaagttggtgtgtgtcaccggtgctgccggttatattgcttcatggattgtcaagttcctacttgaacgtggttacactgtcagggccactgttcganacccaantgatcacacgaaggtagancatttgctaaaacttganggtgcaaaggagagactgcaccttntnaaggcagatcttttgggtgaaaattcttttgactccattgctganggctgtgntggcgtctntcatactgcttctcctttnattatcaacgtcaaanacccacag

SEQ ID NO: 686 - DNA, 277 bp, Glycine max
  unsure (1)..(277): unsure at all n locations; Clone ID: 701037710H1
gcaaatggaaactttgctggttcaggctacaagatcgtatgggtaggttgtgatggagaatatgaagtatacgactcagtcagaaattcttggagtcgtccaggaaacatgcctgtgggcatgangctgccattgtcgctcaactttaggtctcaagctgtctctattggcagcacactttatttcatgcgttcagacccagacgggattgtntcctatgatatggcaactggggtttggaaacaatatataatcccagcgccactgcatctgactg

SEQ ID NO: 687 - DNA, 276 bp, Glycine max
  unsure (1)..(276): unsure at all n locations; Clone ID: 701037712H1
ttgacggtttctagagagagaaagtgatggccggagttaatccaaacgggcgtcgccgattttgcggcggttccgacgcatggcggacagttcattcagtacaacatatttggacnacctcttcgaggttacgacgaataccgtcctccgatcatgcctatcggacgcggcgctaacggaatcgtttgctcactgttgaataccgagacgaacgagctggtggctgtgaagaagatagcgaacgctttcgacaatcacatggacgctaagcgtacg

SEQ ID NO: 688 - DNA, 276 bp, Glycine max
  unsure (1)..(276): unsure at all n locations; Clone ID: 701037713H1
ccttgtctgaagatggaaatgatgatgtgggaagttgtgcggagtcttggtctacagcaattatctctgagttatcccaattccctaaaganaaaaatactgaagaattgagcaaatctgatgccactaaaaagttggaactaatggatgactttctggaggtggagaaattggctcggttatcaaatgatttcagtggagtttcagttacttcaaacaatatggcaaatgaaactgtgaccaatgatgtatcagaggtcagtactgagaaagatg

SEQ ID NO: 689 - DNA, 274 bp, Glycine max
  unsure (1)..(274): unsure at all n locations; Clone ID: 701037714H1
aaagctgcttataaacaagctgatggtaggaaaattgatggtagaagggtgcttgtggatgttgagcgtgggaggactgttccaaattggagaccccgtcgcttaggtggtggacttggtaccactagagttggaggtgaagaagttaatcagcgacattctgggagggagcaacaacagtctcgttctgaagaaccgagagtgcgagacgaccgacacgctgatagagacagggaaatatcacgtgaaagangtagggacaaagacagagaac

SEQ ID NO: 690 - DNA, 101 bp, Glycine max
  unsure (1)..(101): unsure at all n locations; Clone ID: 701037715H1
agtccttgtgccggccacatcgttttaagacncgacacagacacacttggtcttcctctgacnaagaccaacgaaccaacgctcttcctccgantaccgtt

SEQ ID NO: 691 - DNA, 278 bp, Glycine max
  unsure (1)..(278): unsure at all n locations; Clone ID: 701037716H1
ctacgaaattggagcagaggagtggcggaggacgaagtcgacggncgacaatggttaacgaaaacggtgcggtggtgtgctttgttgtagtcgtctccgatcatcatcgagaatgcgcaatctggctgcacctcattccttgggggttttcatctttcgccccaataagcctccttttctcactctcccctcactctctcgaagatctctcccttccatccagtgcggtgcagttcaattccgcccctgcatcgatatccacaaagggaaagtgaagc

SEQ ID NO: 692 - DNA, 279 bp, Glycine max
  unsure (1)..(279): unsure at all n locations; Clone ID: 701037717H1
gggcaaagtgcatggtggatcagaagaanggagggaaggatctgctactgataaagacaaaaggtggtgaaatccctgttcttctntctgctgctaanggctacaaagacatgactcgctatctntactctcagactcagnttgaagcgttcatcgacaaaaattcccacattggggttttgcttcttgcacgatgcatcaccgctgaaatatntgatgtggctttgagttaatcnatcnattccaaagtgcctcaacccatgatccgatggcaacggc

SEQ ID NO: 693 - DNA, 279 bp, Glycine max
  unsure (1)..(279): unsure at all n locations; Clone ID: 701037718H1
caattcacacatccaccgttcagttaaaaaccacccaaatccgatggcggcgtcgggcgtctccgggacctccaatcccaaccggcgaacaagatctgcgtggactgttcccagaagaacccgcaatgggcctccgtatcgtacggcgtcttcatgtgcctagagtgctcaggcaancaccgcggacctgggcgtgcacatctccttcgtgcgatccgtgacgatggattcgtggtccgaaatccagatcaagaaaatggaagccggannaacgacaaa

SEQ ID NO: 694 - DNA, 290 bp, Glycine max
  unsure (1)..(290): unsure at all n locations; Clone ID: 701037719H1
cccattctgcatcaaactttggcctctacctccttccttctgntctcctctcttctctctttcacactntgaatgaatattactntcttgaattctcatctggggtcattccttntctcntgcgttgacaaaatcttcacactttcaaagttggtacctgataaaacttgaaaatagaatcttcccttttngtgtcacaaccatgggttgttgtatgngtaaaanagggtcagagccanaagaacacattgtctacagacatgttgcgggtgctgggggtgctggtgtgt

SEQ ID NO: 695 - DNA, 279 bp, Glycine max
  unsure (1)..(279): unsure at all n locations; Clone ID: 701037720H1
ccaatggttggagaacaagactcaacggtaganttgatttgtgagattcataatcataaattgaccaactcattagttgaacatccatgtcccaaatgattgantacaactgaaaagacacttatgtcacgaagtcaatgttcgaaccaaaaaacatattgatgctccagttaaatgaatatgtcgctacactttccattcgaagtcatgtcggaacccnagacatctgaagtgctgatcagctgcgccaaagatacataccaaggttttgcgggcgat

SEQ ID NO: 696 - DNA, 279 bp, Glycine max
  unsure (1)..(279): unsure at all n locations; Clone ID: 701037721H1
cttctcttgcggctagggttttagcgcanttcttctagattnaaggaagatgggtaaggnaaaggttcacatcagtattgtggtcattggccatgtcgactctgggaaatccactaccactggtcacctgatttacaagcttggaggcattgacaagcgtgttattgagaggtttgagaaggaagctgctgagatgaacaagaggtctttcaagtatgcctgggtgctggacaaacttaaggctgagcgtgaaagaggaatcaccattgatattgcttt

SEQ ID NO: 697 - DNA, 280 bp, Glycine max
  unsure (1)..(280): unsure at all n locations; Clone ID: 701037722H1
cnaaaactcactgcatcaaaaccttctaattcaagtcgcatgttcttctaccttaaggnanaagtgaagaaccatgagccaacctacactatttagcagtggattcgagcttgcatcttctgtgacaagctctgtcnttcttcacagatcatggaatgttatcacgtcccgttatgccggaatcgttacaaacgtgggananggagtatcatggaaagtttatagagaaccaggttcggatttgacgattatagcctttgaggtcaagctagattttcna

SEQ ID NO: 698 - DNA, 278 bp, Glycine max
  unsure (1)..(278): unsure at all n locations; Clone ID: 701037723H1
tccgtttctggtttttcccaattccaaagtagtctgttatcatcgtcatccctttataggacagacaaagctgattcacttaggagcctcaagagctatgtctacatcttctcgtgctcttcccantcccttggaaaacaagtatatgaaacccccagattcttttcagctttcacccgtcagagatctgactggaaattctgcctcatcaaattcaatcagaagtgctgggaagatgttgtcttcancttctgaatgtcccgatgatatcgcttttt

SEQ ID NO: 699 - DNA, 270 bp, Glycine max
  unsure (1)..(270): unsure at all n locations; Clone ID: 701037725H1
gtttaatccacctagctgaatggcatccattggaatagcaatgctaaacagggcttgagngcccttccgttcctctcatatcagggtcagcagagtgcagagaaaagagcagttagttattaggatattggctttggccgtttgaggtgcgtcagattgatgctgtgatgggagattataagantttttcattttccaaaatgatgggctgctgtggttgctttggatttgtccaaaaaccaagaccgcgtcgggctaaacgtagcatca

SEQ ID NO: 700 - DNA, 278 bp, Glycine max
  unsure (1)..(278): unsure at all n locations; Clone ID: 701037727H1
atccaaacaacaatggaccncccgtgaatcgataagcaaccaaaccgacgtcgctctgagcatcacaaagctcctgtngtcgaaaaacgctcgggacagtaacctcgtgtactcgccgctgtcgttgcacgttgttctgagcatcatcgcttctggctccaagggccccacactcgatcagcttctctccttcctccgatccaagtccaccgaccatctcaactccttcgcctctcagctcgtcgccgtcgtgctctccgacgccgctcccgccggng

SEQ ID NO: 701 - DNA, 273 bp, Glycine max
  Clone ID: 701037728H1
caagagcttcttcaatctccagtccaggggtcggatgaccatcttattgagttctctgaagctttaagaactgttgcgaaggctctcaggctagttgctgaagggaaagcttctgctcaagctgaggctactgaatggaaacgtaaatatgagttggagagggatcggaatctgaagtttgaacatgcagagaaatcatgtatagagcatcaggctgatcttgatgatgtgaggacaaataaccctgctaaacaacctactttatgtaatgaa

SEQ ID NO: 702 - DNA, 273 bp, Glycine max
  Clone ID: 701037729H1
aaaaccctcttttttctctctcttgcaaaacctaattttcatttcttccctcaaatttcaaaatgcgtgagatccttcacatccagggtggccaatgcggcaaccagatcggcgccaagttctgggaggtggtttgcgcggagacgggatcgaccctaccggaaggtacggtggggactcggagttgcagctcgagaggatcaatgtctactacaacgaggccagttgcggtcggttcgtgccgcgcgcggttctcatggacctcgaaccggg

SEQ ID NO: 703 - DNA, 272 bp, Glycine max
  unsure (1)..(272): unsure at all n locations; Clone ID: 701037730H1
gaatatatataataaganaaaggcaaaaaaaagaggtgaaaaaaatttgtctggtaaattgttaattctgtngttttgcgtgtttctggactcaggagctgcgctgttcccggggaaaagcatgtacagtatgaacactaaatgcagtgctggggattgccaattgatgtcatggtcttcaccattgccaccacagtttctttgaaactgctcaaggtctagggttctatttaacttctgcacctgagcttttatatttaagagtgtttata

SEQ ID NO: 704 - DNA, 276 bp, Glycine max
  Clone ID: 701037731H1
gccaaggacgaaacaagccgaagatgagcgaactcgagaattcagaaatatgaaaaagaagagaagtaaaactgaactcgataatctcgttgaactcaggacaaattgaatacttaatttctcttctctctagaaacgtatagacgaaacaatttctatgactatttctgcttctgcttcagatgcaaccttttagtttttgcagttgccacttcatgtcttcatcccttcttctaattctccgatctccgatgtttcccttcccaagaagacctc

SEQ ID NO: 705 - DNA, 275 bp, Glycine max
  Clone ID: 701037732H1
aacttgagactaataatggatggtatagttcagctggagaggcaacttgttgattatactgcttctctatttcatgagggctttctagatgaccaatttaaccagcttcagcaacttcaagatgaaagtaacccagattttgtggttgaagtggtgactctcttttttgaagacgcggataggcttcttaatgagctcacaaaagcactaggccagccaagcattgattttaaaaggttggatgctcatgttcaccagttgaagggtagcagctc

SEQ ID NO: 706 - DNA, 278 bp, Glycine max
  Clone ID: 701037734H1
gccctggaactggtcagagtttccaacaaaggttgctgtacagttgaatgatacacacccaacacttgcaataccagagttgatgcgattactaatggatgatgaagggcttggatgggatgaagcatgggatgtgacatcaaagactattgcgtacactaatcatactgtcctccctgaagcactggagaaatggtctcaacctgtaatgtggaaactacttccacgccatatggaaatcatacaagacatagacaagagattcactgcaatgataa

SEQ ID NO: 707 - DNA, 277 bp, Glycine max
  unsure (1)..(277): unsure at all n locations; Clone ID: 701037736H1
ttcttccatttgactcttgttctgaacgacttttcaagagaatcaaaccatggcagtgaaagtatacggtcnccnctgtgcttccaccaagcgggtgctggtttgtctggttganaaggaagtcgaatttgaggttgtccctgttgatgtcactaanggggancagaaggatcntgagtacctcaaactacagccatttggagttnttcntgtcatcaaagatggagantatacctcatatgaatctcgngctataatgaggtattatgcagaaana

SEQ ID NO: 708 - DNA, 277 bp, Glycine max
  Clone ID: 701037737H1
atcgaagaagaagatggctttaggtgttcctgctcttccgttgacatacgtggctcacgttctggcagttgttgccagcgtcttggtcgtggtctgggtcgtcaatttcaggggtggcttggcttgggattctgataacaagtccctcatcttcaacattcatccagttcttattgttattggcttactagttcatgggggtgaagctattataagttacaaagcttttcccctaaagaaggaagtgaagaaattgatacaccttgttttccatgcc

SEQ ID NO: 709 - DNA, 119 bp, Glycine max
  unsure (1)..(119): unsure at all n locations; Clone ID: 701037738H1
gttggaggaattgttagcagtggacgangaantagnacgggaantcgaaaagggtggcnagaaattatccnaagcagaggttttgngcnaagccgaanggatcgnnnttgacntcgnca

SEQ ID NO: 710 - DNA, 278 bp, Glycine max
  unsure (1)..(278): unsure at all n locations; Clone ID: 701037739H1
catcaagatcaatcaacaagaccaagaccaccatgtcagcgaaccccacgacaacaccaacaccaacaccaactttgactcgacgccaaccacgccaaccatgctgccatacctccaaggccgcgtggtcactcgcctccagcagttcgtgctgctcccagaggcagcgcaggcgagatcctcgacctcgaagtctacctgaccaaccaccagaccgtcatcttcagtcagcaccacgtgaagctcgtcaagagcgtgcgtggcgtccgcgtcaaana

SEQ ID NO: 711 - DNA, 277 bp, Glycine max
  unsure (1)..(277): unsure at all n locations; Clone ID: 701037740H1
acgagcgaccttctncgntncncgcaaannntaagtctcatgggtaangncaagactcacatcaacantgacgttcattggacatgtcganncgggaagtccactaaccactggtcnttngatctacnnagcttggaggtattgacaagcgtgtgattnagaggtncgagnangaggctgctgngatgaacaagaggtcattcaagtatgcctgggtgctngacaagctcgaggctgnncgcganacaggaattaccattgatattgctttgtngaa

SEQ ID NO: 712 - DNA, 276 bp, Glycine max
  Clone ID: 701037742H1
cgaagatctggcctataagaatactgttgagtctataacaggaattatatctaaaaccatctcaactaagggcatgctagctgtatacaatgctttatctgaagatgagaaaagggaatttgagaaggcttatagtgcttctttttatccttgcatggaaattctgtatgagtgctacgaggatgtagccagtggtagtgagattcgcagtgttgttttggctgggcgtcgcttttatgagaaagagggtctacctgcttttcccatgggtaacat

SEQ ID NO: 713 - DNA, 275 bp, Glycine max
  Clone ID: 701037743H1
attttttcctctttcttcctcgcctagctagctccagaaaattaggatctgcttcagatctagtgtttccctgtcccaaatcacgagtccattgagtttgattttgtggatgaaaagcatagatagggcttttgcaaaactctccaatgtttcttgaaattatatgaccatgcgtcgaattcgtatgctgcactccttctccgtcgtgttcctctactggttctacgttttctcatgaactccctcttaaatccgtgattaattagatctatctc

SEQ ID NO: 714 - DNA, 277 bp, Glycine max
  unsure (1)..(277): unsure at all n locations; Clone ID: 701037744H1
cagcaatgggcgaagggtgaagacgctttgattcgaaagangaataaaaagcttcgaaagancgaacagcagcggctcttcctctgtctccgccaaggttgccgccgttatcgccgccaagaagcgccgcaaggccggtaaacgccgcatgtgccaggggatgtgctttagtctacctactctggatgatcccttcaatgatcgaggtgggaaagaggaaaccaaaacaaagggtcctaaaaagaaatcccattcaaaaccataagacaagatggat

SEQ ID NO: 715 - DNA, 273 bp, Glycine max
  unsure (1)..(273): unsure at all n locations; Clone ID: 701037745H1
cnaagtactataaagaaggatttaagactttaaagctgaaagnnggcaagantctgaatgcagatatagaagtgcttcaagctatacgtgttgcacaccctgagtgtcagtntattcttgatgctaatgaggggtataactctgaggaagcagttgaagttcttgagaaactacatgatatgaggttgactcctgttctatttgagcaaccagttcatagagatgattgggatggtcttcggtatgtcggtaatatagcaagagagagatatg

SEQ ID NO: 716 - DNA, 273 bp, Glycine max
  unsure (1)..(273): unsure at all n locations; Clone ID: 701037746H1
gcgacaagggtcttctgtacattccgccgttcatgatggttttccacttacaatgggaaccatgcagaactgtgaccaaaccatttcattggctgactttagtaaaggagacagaagtaaaaactcggcgagtgaggaagacgagccgagctataccgaggatggtgttgattgtcaccatgaaacaactagagggaaganaggatcaccttggcagcgtgtgaagtggactgataagatggtaaagcttctgataacagctgtttcttatat

SEQ ID NO: 717 - DNA, 275 bp, Glycine max
  unsure (1)..(275): unsure at all n locations; Clone ID: 701037747H1
aacactcattaattgcaagantgggcactttcgttgcttggtgatgtcnctttctgttctcttcactcttggtcttgcgagagaaagccatgccaganacgaagatttttggcatgctgtttggccaaacactcccattccaagttcattgcgagatcttctaaagcctggccctgcaagtgttgaaatcgntgntcaccctatgcaaattgaagaaacacagtacccgaaaaccttcttctataaagnagaccttcatccaggcanaacaatga

SEQ ID NO: 718 - DNA, 274 bp, Glycine max
  unsure (1)..(274): unsure at all n locations; Clone ID: 701037748H1
cnacgttagtgctttgtttaggtgaactaattcggagaccttgcaagacttcatcaatggctgtcaaagtttatattgtgtactactccatgtatgggcatgttgagaaactagcagaagaaataaagaaaggggcttcctctgtggaaggtgttgaggccaagttatggcaggtacctgagacactgctggatgaggtgcttggtaagatgagtgcaccacccaagagtgacgtaccagtcattacccccaatgaactatccgaggctgatgg

SEQ ID NO: 719 - DNA, 279 bp, Glycine max
  unsure (1)..(279): unsure at all n locations; Clone ID: 701037749H1
ctcactagcctaatttgctcctttagcctcactcctgctctcttctacgtcaaatcctaagaaacccatttgaaatttgaaatctcgttctggctaattccatgttcattgtntactatacctcaccactccaagggtctcataaatttcttctgcttccaactctgctgcagaaaaagaaactgttggttctagatacaagtgggtttccagagtagaagtgaggctattgggcatgagataaacagcaagcaccatcatctacgacccttttgacta

SEQ ID NO: 720 - DNA, 277 bp, Glycine max
  unsure (1)..(277): unsure at all n locations; Clone ID: 701037750H1
attttccaccattctgagtaacttcacacacccatataacaganaatgaggtggggttgtggaaacttgggcaatcaatccctcgccgtcttgctcacggtaataataaagctgttgcttgtcgatattttgcctcagatgctgagctgaaaaanacagtcctttatgacttccatgttgctaatggagggaagatggtgccatttgctggatggagcatgccaatccaatacaaggactcaattatggactcaacccttaactgtagggagaatgg

SEQ ID NO: 721 - DNA, 279 bp, Glycine max
  unsure (1)..(279): unsure at all n locations; Clone ID: 701037751H1
gttggctgctaataatggtactagcactggtattgaaccctcttcttcatcaggaggaagaagccaagatcgatncaagatcacccaacgtagaagtggcttccaaggaattagggacaaatgatgaagaagagaagaaagagtatggtagagggataganagagaggatgatagtccctcagggcatgctcataaagttccaaggttcagtcctccaaaggataataatagtgttgangctgaggctactatgaggaaggcaagagtttctgttagag

SEQ ID NO: 722 - DNA, 275 bp, Glycine max
  unsure (1)..(275): unsure at all n locations; Clone ID: 701037752H1
ttatctgttcttttgttctatagttatgtttcttttgtctatatgatatataatcactgtattcatatagttctgtctgaagagaagagttatgatatattaaatataataagtggttttnttcttcttcatttccacgttccatcaaatgaatatgctctttacagtacagccaagtcatcataacgattaataattagctcatagtttttttggaagagttgtgaaaatgggacttgtggagctttttggggnggcatctatgcccgtgatca

SEQ ID NO: 723 - DNA, 280 bp, Glycine max
  unsure (1)..(280): unsure at all n locations; Clone ID: 701037753H1
aganaaccccttctccaccccccaaaaaaccacccagcccatctccttctcgctcctccaaaaagaaaacttcctgaaacccctccgcttctctctgnngcctctctcgacaacccggatctcggcccattcctccttaagttggcccgtgacancattgcctcgggcgangggcnctccaangnactcganttcgnnatccgggnctccaagtcnttcgagcgntgngnngtcgatggcnantccagcntcgacctcgcnatgagcctcnangtnctcg

SEQ ID NO: 724 - DNA, 276 bp, Glycine max
  unsure (1)..(276): unsure at all n locations; Clone ID: 701037754H1
ctttagacctctctctcacttgaaactccacaaccccattttccttncctatgaccctattccaaatcaccanttctaattccattcttcaggtgttcaattgaattcgtgatgaagagggatcaccgagatannnnnnnnnnnnnnnnnnnnnnnnnnnnnnngagtgtgaagggtgagtgttcctcaatgccgtcgaacgggaaggcaaatatgtgggaggaacaacannaacnanaacaggggatggacgattgctggcggcgttggggtana

SEQ ID NO: 725 - DNA, 273 bp, Glycine max
  unsure (1)..(273): unsure at all n locations; Clone ID: 701037755H1
acctgccatgacagtnataacaatgtctcctttcttatcttactctcttctttccctcgtgttcttcttcactctcaagtancttttccnaagaagcagaanagtacgaaacctgccacctggtccgactcctcttcctataatcggcaaccttaacctcgttgaacaacctatacaccgtttcttccaccgcatgtcncananatatggacacatcatatcnctttggtttgggtcagtctgtngnggntgntcatcanccacagcgtagca

SEQ ID NO: 726 - DNA, 279 bp, Glycine max
  unsure (1)..(279): unsure at all n locations; Clone ID: 701037756H1
ctcaaattagtatttggtttctgcgaaattgcaaaagcaaaacaacatccatcttcttctgcaaaataattctaanaatccataatttgttgccgttcttccttcgtacaatgtcagnactactctagcattcccaactctacaaacacntcatcacctttttgcttttttcttcttctcactaactcagacaactaccatggcctcaaaatccagacccaatctatctgaaaattccaacaaaggatcaattgcaactcctagagtcagtaaaactag

SEQ ID NO: 727 - DNA, 277 bp, Glycine max
  unsure (1)..(277): unsure at all n locations; Clone ID: 701037757H1
ggacatggggcatgggcatggcaacattggtgggtatagctatgtgccagtgtacccggagcagatgcactttcacttgcatgcaccaccaccacaaattttcagtgatgaaaacccgaatgcttgttctgtcatgtgagtgacgctgtntctttccattcaactggntgacggnnggcgatantcncngtcgtncttagagaactagactctagtatctagttctcnaagcncaccatcatnngnnccatncatcncccagttgaatggaaagcca

SEQ ID NO: 728 - DNA, 250 bp, Glycine max
  unsure (1)..(250): unsure at all n locations; Clone ID: 701037758H1
cttccttactctcacncttcctttctctctactccttcggtgtccttctttaccccactttccactcctccgcatgccccttcttcttcctcccttccccttctctggataaggaaagacggagcaaagcgtaagaaaggcaggatgagtaaaaaacaaagagagcaaaatcactttgtcctggtgcatggtataggccatggtgcctggtgttggtacaagcttaagccactgttggaatccgccggcc

SEQ ID NO: 729 - DNA, 273 bp, Glycine max
  Clone ID: 701037759H1
cacgtctcagatttcccagatccaagcccaagcccaagcccagaacttcgctctctcttaatttcttgggccccaagcccgttcctatgaagcacgttggtgggccggcgaagccacgaagctgtaccggggcgtgaggcagaggcattgggggaagtgggtggcggagataaggctaccgaagaaccgaaccaggctttggctcggaaccttcgacacagccgaggaagccgctttggcttacgacaaagccgcgtacaggctccgaggcga

SEQ ID NO: 730 - DNA, 275 bp, Glycine max
  unsure (1)..(275): unsure at all n locations; Clone ID: 701037760H1
ccaaactcaagttcaccaaaagcaaccacaacaagcacttctcttatttcctatcacaccctattacagattcacaagcgcagacacttcaaatggctctggaagctcttcaatcacccagaactnccactccatcgtttagtccctttgaagaaaccaacctcagttacttggagacaccgtggaccaaaggaaagcgttctaagcgtanccggcatggagcagcaactgcaacactcttcatgcaccgaggaagagtacctcgctctctgtct

SEQ ID NO: 731 - DNA, 272 bp, Glycine max
  unsure (1)..(272): unsure at all n locations; Clone ID: 701037761H1
cnggcatcatctcagtcgaggaagagagttgacgccgtcgattctcgcgctgcttccgttctcgttcgcgccaaagatggcagtgcttttgctcgttgcgacgattgcaagangaatgtgccggtngcactcatcgacatgcacagttgcagccttgaagctaaaattaaaatgaacctagacgctcaagttgtggaacaggctgctgaagctaagaagccagagaggaagaagcccaaatctaaagagcctatggcaaaaaaggctaaagt

SEQ ID NO: 732 - DNA, 271 bp, Glycine max
  Clone ID: 701037762H1
ccaattttcaataattcacgactccttccgagatctctctctctcgcccacaatccaaccatggcgaatacggggaatttagacgcggcgatagagcaattgctgaacgtggagaagcagatgaggctcgccggtgacgtggcgggtaccagaaaagcagccaccgatattttgcagctctgcttcgatgcacgagcctggaaaacactcaatgaccagattgtcgttttgtcaaaacgacgtggccagctcaagcaggctgtaacagcta

SEQ ID NO: 733 - DNA, 271 bp, Glycine max
  Clone ID: 701037763H1
accaacacacacttttttatttagtggaaaatttcattgaaacacctcacaaacatgccttttgaatcatcagccaagtctagtcaatctccccctgctgaaggcgacaagcacaagcatttggacagggaaattagggagatggtatctgccatcactcaccgtgtaactgattttcacaaagctggctccacccaccatttggagaaagagcatgaagatgacacgaggatcattaccctcacaggaaccaatgatggagcaacactgc

SEQ ID NO: 734 - DNA, 276 bp, Glycine max
  unsure (1)..(276): unsure at all n locations; Clone ID: 701037764H1
cgaaagtcgcgggctttgaactcttctacgacgacggcaacggttccgggcctccgacccctggncaccaagcatgtcagagtttcttctcggatctggcttcgataggcctttggaacaactctctcagattgagatcaacggtattggaaggtacgagcaccctcctgcttcaaaagcagccattgattcattaccaaccatcgaaatcgatgacacccatttagccatggaatcacactgcgcggtctgcaaggaagcttttgaaacaagcat

SEQ ID NO: 735 - DNA, 278 bp, Glycine max
  unsure (1)..(278): unsure at all n locations; Clone ID: 701037766H1
ctgncntcaacttgntccctcagaagcgnntannaatccacanagaactatgtctcnctactncncacccgcaagaaaaaaatggcntntcaacatcgttggatacccccgtatnggncccaatagaganctnaattcgctctcgagtctatctgggatgncaanagtacgccgaggatttgcanaangngtctactgatctcagggcatccntctgganncagatggntnatgctgggatcagtacatccncagcaacatttctctnactntgacca

SEQ ID NO: 736 - DNA, 271 bp, Glycine max
  unsure (1)..(271): unsure at all n locations; Clone ID: 701037767H1
aacgatgtctcacagcacactcagatctctcttctctatctttaatccattgttgtntggttcccttcacttctcacaatgcgaatccttcgtcatgctctctctcggnacccttctcctcttctnctccttctctcccaccttctgcgaccacctcgccgacgacgaggacctcagcttcctcgacgagccctccgccgcgccggagcacgaccaccatacggcgccgatgactccaattcggcgatttgaggattgaggaggacgacgc

SEQ ID NO: 737 - DNA, 277 bp, Glycine max
  Clone ID: 701037769H1
ctttcattttccctcactttctcgctcgccaaacgcccctctctctcctccaatgggccgaccagctcaccgacgaccagatcgccgagttcaaggaggccttcagcctcttcgacaaggacggcgatggttgtattactactaaggaacttgggactgtgatgcggtcactagggcaaaacccaactgaggcagaactgcaggatatgattaatgaggttgatgctgatggcaatggaaccatcgacttcccagagttcctcaacctgatggctcg

SEQ ID NO: 738 - DNA, 277 bp, Glycine max
  Clone ID: 701037770H1
gggccccgtgctaaaatcatggccaccacagccaccgaacctctcccttcctccgctgaaatgcctcctgccccgcctcctccgaagcaaccgccgcaaccggtggcggcggcgtcagcagtgaagcctgaggctccattgtccgattcgaaagcttcggcggaggcgaacgtaatagtggtcccgagctactctcgttggttctcgtgggattcgattgacgaatgcgaggtgcgtcacctccccgagttcttcgaatcggcgtcgaagagcccta

SEQ ID NO: 739 - DNA, 275 bp, Glycine max
  unsure (1)..(275): unsure at all n locations; Clone ID: 701037771H1
gcccatttgcagagctacattcagacacattatgcggctcctaggatggtgatagctgcatctggagctgtcaagcatgaagacattgttgaacaagtgaaaaanttgtttaccaagttgtcaacggatcccactaccacatctcaattagttgcnaaagngccagctatttttactggttctgnggttagaatgcttgatgatgatattcccctagcacaatatgctgtggcttttgaaggggcatcttggaaggatcccgattcnattcctct

SEQ ID NO: 740 - DNA, 277 bp, Glycine max
  unsure (1)..(277): unsure at all n locations; Clone ID: 701037772H1
agccaagcaagaagtgtgtatttgaacaaaagtttaatttttttttagccaaaacactttttaactcttattttgaagcaaaagaaacacacaataaagagagaaatattgcagtgatatttttctgggggttgagaaagagancagaagaaaagacaganagctcaacgtcaganttagccgtataaggttcgcttattgtgtgtttgtggttttggactagctgaggtttgtcctttggatcccagaaacctttccagcatttgaaaaaccaaga

SEQ ID NO: 741 - DNA, 278 bp, Glycine max
  unsure (1)..(278): unsure at all n locations; Clone ID: 701037773H1
gnntgggaaccattaacaaaaggagagtatcctaaaaacatgcgagccctggtgggaagtagattgcctaagttcaccaaatgggcaagccnagctagtgaatggatcatttgattttattggcttaaactattactcctctggttatattaatggtgtccctccaagcaacgacaaacccaattttctaacagattctcgcaccaacacttcatttgaacgcnatggaagacccctaggtctaagggccgcttcagtttggatatacttttatccaa

SEQ ID NO: 742 - DNA, 274 bp, Glycine max
  unsure (1)..(274): unsure at all n locations; Clone ID: 701037774H1
ggggtcagagtgagaaagagaaagagagaattcgtaaaccctaatttcggaaagatcggcgatgactgcctccaaggatcgcgagaaccttcgtctacatcgccaaactcgccgagcaggccgagcgttacgaagagatggtggaatcaatgaagaacgttgcgaatctcgacgttgaactgacggtggaggagcggaatttgcttctgttgggtacnancatgtgattggtgctcncagagcgtccctggangatcctgtcttccattgagca

SEQ ID NO: 743 - DNA, 272 bp, Glycine max
  unsure (1)..(272): unsure at all n locations; Clone ID: 701037775H1
cccacacacacggcnagtgcgagaacccaggtccgtagttctagggtganaatcctccatggattgatcaggaaatatgggctatgtgttgcaggcagtgcttccgaagcaatgccaaggaaattggcttcatcaagtatcggtgaaagattagttttccacctgccccacccggtttggattcttgcatcaggctatgatgacgtggggatgattttactgtntgaagaacttaaaattntttgtgacatttagcaaagttaattatcnaa

SEQ ID NO: 744 - DNA, 273 bp, Glycine max
  unsure (1)..(273): unsure at all n locations; Clone ID: 701037776H1
gggctactctgaagggaaagtacgatgtcgacaaaaacggcgctgcctttgccaacatcgccgtcaacgccggcgacgtcaagttccgagcctccgtaacggaagccactttcattaacggtcccagcttcaccggcttggcgctcgccgtcgagaaacccggttcctntcatcgtcgactacaacgttcccaaaaaggactttcggtttcagtttatgaacacggttagggttngggagangccgttgaatttgacctacgcgcacagcagg

SEQ ID NO: 745 - DNA, 247 bp, Glycine max
  unsure (1)..(247): unsure at all n locations; Clone ID: 701037777H1
ttgtggaaatggaagaaggtgttggcgccatctttctcgactccaattcagagactgtcggacttggaggtacaaaagcaaaganagtgaaagtgctgaagggagantccgttcctgttggaacggangtgagagcgaacgtgggagcttcccagaacaaaattcttgctgacataagcaactttccccaacaaccaaagcaacacatctctgttgaccaccttctcaaggaaaaggaaattttgat

SEQ ID NO: 746 - DNA, 268 bp, Glycine max
  unsure (1)..(268): unsure at all n locations; Clone ID: 701037778H1
ttttattttgctctacctcctcacttctagggttcgcagcttgtctctcaaacaatggcgctgttccttctctacgaatccgcttcgggctacaccctgttcgangttcacggcctcgacgaaatcggccagaacaccgaagcggttcggaactccgtttcggacctcaacaggttcggcaaagtcgttaagcttcgctccttcaaccctttcacttccgctctcgatgctctcaaacagtgcaagccgtctctgaaggcatattaat

SEQ ID NO: 747 - DNA, 271 bp, Glycine max
  unsure (1)..(271): unsure at all n locations; Clone ID: 701037779H1
cttcttcccaancactactaactcnctcactgcagatctcaattaccatcgntgtccatgggctaccatcgttagcatcaagggcccgccagatttcgacagtcgtggcaatccaactgtcgaggtggatttgactgctccgatggtacttttgccaganctgctgttccaagtggtgcatccactgggatttatgaggcccttgaattgagagatggaggatctgactaccttggaaagggtgtatcaaaggctgttgacatgtgaacac

SEQ ID NO: 748 - DNA, 272 bp, Glycine max
  unsure (1)..(272): unsure at all n locations; Clone ID: 701037780H1
ctcggggtgagttgactcagcgatggcggaagaggtgactcgggtgatggtggcagtnaacgagtcgagcatgaagggataccctcatccttcgatcagcagcaaaggggctttcgaatggaccatcaacaagatcgttcgcaacaacgtctctgccttcaaccttctttttcttcacgttcaagtccccgatgaagatggttttaatgacatggatagtatctacgcatcgcctgacgattttaagaacatgaatcagagagatagaatta

SEQ ID NO: 749 - DNA, 276 bp, Glycine max
  unsure (1)..(276): unsure at all n locations; Clone ID: 701037781H1
ggagaaattaggngacagaattaccgcccttcatcaactcgtttccccattcggaaagactgacacggcttctgtcttattagaagctattggctatatcagattccttcagagtcaaattgaggcccttagcttaccatacttgggcagtggatcaggaaacatgagacagcaacaatccgtaaganataataccaacccaccatttctggttcaaggagagaacaattgtatattccctgaagaccccggtcagttgctgaatgaaaactgttg

SEQ ID NO: 750 - DNA, 277 bp, Glycine max
  unsure (1)..(277): unsure at all n locations; Clone ID: 701037783H1
ggcggaatcagctagaattttctaataatggccaaagacgttgagcaggttacagagcaaggtgaatactcctcgaaggattaccatgaacccacctccggcgccgttgatcgacccagatgagctcactaagtggtccttgtacagagccgccatagctgagttcatagcaacactccttttcctttacatcaccgtgttgancattattggctacaagagacagagtgacaccaananccccggnaacaccgagtgcgacggcgttggcattttg

SEQ ID NO: 751 - DNA, 273 bp, Glycine max
  unsure (1)..(273): unsure at all n locations; Clone ID: 701037784H1
tctcgatttaccaccaaaaacagccacctgaggtttcaatttctctgagnaataaagagagctcctatctcttctctgcgacgacgccgtttctctcccttgaggccttttattcaagcatgggagatagcgaaccggtggtcactgangcatctgctgctgaggcatatgcttcggctggttatgctgagactgggtcaaatcctactcccgangcaggtgctgctgttgatcaatccgctggagaagctgctcaggccagctcaacttacg

SEQ ID NO: 752 - DNA, 276 bp, Glycine max
  unsure (1)..(276): unsure at all n locations; Clone ID: 701037785H1
gnaagctcaatattcattcgtccatggcactctcttctcgtctcntnttccaaatccaaattgatctatgggctgtcaaatacttctgcaaaaggagcatgctattccagttcgtcactttgctaaagagtctgcnctcctgcccttaagggagatcagatgctgaagaacatttttgtggaggtgaagaacaaatttgagactgccataggaatattaaagaaggagaagatcaccattgacccagaagatccagctgctgtttctcattatgca

SEQ ID NO: 753 - DNA, 279 bp, Glycine max
  unsure (1)..(279): unsure at all n locations; Clone ID: 701037786H1
cttccaacctcttcaacactccagacccctcccttcaacctcacacnccaaacccacctctcattccctagagtaagaccctcccctccatttctcattattcattaacgccgataaagcaaaaaatacacccttcacaagttcacataaacacacccgaagagnnnnnnnnnnnnnnnnnnnnnnnnnntcgggtagggttttgttctttgttactcgtttccttccaaattagggtttccctttttgattcaccaaacttctcccgattcgaattcg

SEQ ID NO: 754 - DNA, 277 bp, Glycine max
  unsure (1)..(277): unsure at all n locations; Clone ID: 701037787H1
ggtcaagagagaggagtggcggaatctgtttctgaaaaatcgccgcaaagcgaantccaattctcatattaactgcaactgcaactacgaactacgaacatcagggtagtgattaagaaaaaccctagcaatggggaagaagcagcacagcaaagacagaatgttcatcaccaaaacggagtgcgcaacggagtggggaggcgctaaatccaaagaaaatcgcactcccttcaaacgtcttcccttctattgctgctcgcttacgtttacgccgttt

SEQ ID NO: 755 - DNA, 276 bp, Glycine max
  unsure (1)..(276): unsure at all n locations; Clone ID: 701037788H1
ctcttaataccaattttctagggtttatacaattntcgatggcntcttcagangtngagtaccgttgctttgtacggtgggctcgcttggnccactgacgaccaagctctcgagaganccttctctcagtacggcgaaatcgttgaaacgaagattatcaacgatcgtgagactggaagatccaggggttttggatttgtnaccttcgcctcggagcagtccatgananacgccatcgaagggatgaacggccaaaaccttgacggccgtaacatc

SEQ ID NO: 756 - DNA, 271 bp, Glycine max
  unsure (1)..(271): unsure at all n locations; Clone ID: 701037789H1
aaaaaganagaatcccaggcgangagananatggaggggaaggagcaggatgtgtcgttgggagcgaacaagttccccgaganacagccaattgggacggcggcgcagagccaagacgacggcaaggactaccaggagccggcgccggcgccgctggttgacccgacggagtttacgtcatggtcgttttacagagcaggatagcagagtttgtggccattttctgtttctctacatcactgtcttaaccgntatgggagtcgcggggcta

SEQ ID NO: 757 - DNA, 269 bp, Glycine max
  unsure (1)..(269): unsure at all n locations; Clone ID: 701037790H1
actattggcgggatggtcaaaancgctttgattttattgtcacggtgnacnattgccattggagaaactgtaacttttgctgtacctgatgatgatcttcctttcatctcaaatggagaatggattcgttaccttcttcttgcaanaatgttgagattaataaggatcctaatgtatgtcaagcgataccgagcctttgtggcaactttattgactctcataccaagtttgatgccatacctagggatcatattttgtaccttgtgtat

SEQ ID NO: 758 - DNA, 267 bp, Glycine max
  unsure (1)..(267): unsure at all n locations; Clone ID: 701037791H1
cagcagtgcaggggaagttggtgtgtgtcaccggtgctgccggttatattgcttcatggattgtcaagttcctacttgaacgtggttacactgtcagggccactgtncgaaacccaaatgatcacacgaaggtagaacatttgctaaaacttgaaggtgcaaaggagagactgcacctttttaaggcagatcttttgggtgaaaattctttgactccattgttgagggctgtgatggcgtctttcatactgcttctccttttatatc

SEQ ID NO: 759 - DNA, 229 bp, Glycine max
  unsure (1)..(229): unsure at all n locations; Clone ID: 701037792H1
tctcttgctctgtatctttgatttgatcattccaatcttcaatttttctatatatccatcaatccgctgagtgcaaagttctaatctttcgcctattgggttctactcctttctctcttcgtttccgatcgatccaattttcttcccatggctacgatcggacacnacaatctcaatgccaaattggttcttctcgggggacatgggtgctggggaaatccagcctcgt

SEQ ID NO: 760 - DNA, 267 bp, Glycine max
  unsure (1)..(267): unsure at all n locations; Clone ID: 701037794H1
attccctctctcactccttcatctacttcacatattatatcatcacatatcatagtgatatcatatcacaatgtgtggcatacttgcngtgcttgnttgctctgattcatctcaagccaaaagggtccgcgtccttgagctttctcgcagattgaagcaccgtggtcctgactggagtgggctccacncncatggtgataatatttggctcatcaacggttagccatagttgatccagcttctggtgatcaacccctcttcaatgaa

SEQ ID NO: 761 - DNA, 268 bp, Glycine max
  unsure (1)..(268): unsure at all n locations; Clone ID: 701037795H1
cnagagggagagtgagggaaggtaacaataagggaaatgaagagggagcagagatatggagaagagatcagagattaaatctgcaattgaagagttgtctatgctggttatagtcaaacctgaaggaaatcatgtcatgattgctcacatccccaccaagcctttcctgtctctatgtcacttggttctacaagttcttgataagataaggaccaacgatggncgtttgagacaagacgtttcccagaatattaagaggntggaagtg

SEQ ID NO: 762 - DNA, 286 bp, Glycine max
  unsure (1)..(286): unsure at all n locations; Clone ID: 701037801H1
acggcattgcatccgatgataggttcgccaatgccatgggcttcatgtctcaggaggttgcttctggctgtgctgaggtcctcaggcaatacgaggngttcgacaatgagaattaattacgtaattaatttcagtaatactgttattattaatctactttcgatttgggttttctaatgtctatttaattcaatcttgatgtggagtcttatctcgacattttcatattatcatgttatatatgttgatggaccgaccctgcttaattatattattacatcaagat

SEQ ID NO: 763 - DNA, 284 bp, Glycine max
  unsure (1)..(284): unsure at all n locations; Clone ID: 701037802H1
gttgtncgcaagaaaccggagcgttgattttcttctatttctcgatcgtcttcacgaggaagaatggcaaagagttacttcaaacaagagcatgatcttganaagcagaagagctgaggctgctaggattagagagaaatacccagaccgtatcccggtgattgtggagaaggcagaaagaagtgatatcccaagtattgacaagaagaagtaccttgtccctgctgatctgacagttggacagtttgtctatgttatccgcaaaaggattaaattaagtgcag

SEQ ID NO: 764 - DNA, 279 bp, Glycine max
  unsure (1)..(279): unsure at all n locations; Clone ID: 701037803H1
gattgctagaatggaatttcgatgctcagtcatctcttttaccattctcttctctcttgctcttgcaggagagagccatgtccatgcatcgctacctgaggaagattattgggaagctgtttggccaaacactcccattcccactgcactgcgagagnttctaaagcctctccctgcaggtgttgaaatcgatgaactccctaagcaaattgatgatacacagtacccaaaaacattcttctataaagaagaccttcatccaggcaaaacaatganagt

SEQ ID NO: 765 - DNA, 97 bp, Glycine max
  unsure (1)..(97): unsure at all n locations; Clone ID: 701037804H1
ctctctgaagatggcttcacggcanggctacgtatcttctctgattcgatcctcccttcgtagatctgcaatcgaagccctgcaatttcccncacaa

SEQ ID NO: 766 - DNA, 278 bp, Glycine max
  unsure (1)..(278): unsure at all n locations; Clone ID: 701037805H1
cccttgttcgtttcactctcacaatggactccctctctctcttctgcaccggnncccttcnccgccggcggccttctactggttcgtctgtgttctgggccccgccgagcagaagggcaaacgcgccaccgatctatccggcggctccatctccgccgagaaagtccaagacaactacaagcngtactggtccttcttccgccgccccaaggagatcgagancgccgacaaagttcccgacttcgtcgacaccttctacaatctagtcaccgacatct

SEQ ID NO: 767 - DNA, 274 bp, Glycine max
  unsure (1)..(274): unsure at all n locations; Clone ID: 701037806H1
anacagctcagtttgtacatgagagccagtgtcagatttgggatacagctaagtttttttttttgaagtgttgaggagttgtaggatcatatcctacggtgggtatcancgcaggctaacaattctccaacggaacatgtctcatcggcatcaccgatccctgcagaatattgtgtaatcagactagtcactaatctctttggttgacaataattgtcataataccagtgattgtngcatagaaaatttgcccatgtatttatacctcagcaca

SEQ ID NO: 768 - DNA, 272 bp, Glycine max
  unsure (1)..(272): unsure at all n locations; Clone ID: 701037808H1
tatgcaggtactgaggtggatttcgatggtacaaagcatcttattgtgaaggatgatgacattgttggtatccttgaaactgatgacatcaaggatcttaaacccttgaatgatagantcctcataaaggttgctgaagctgaggaaaaaacctctggcggtttgttgcttacagaggcaaccaaggacaaaccttcgattggaacagtgatagcngttgggccggggcatctggacgaggaaggcaacagaaaacctttgtccgtgactcc

SEQ ID NO: 769 - DNA, 274 bp, Glycine max
  unsure (1)..(274): unsure at all n locations; Clone ID: 701037809H1
gttgctgnttcttaagcctttttctttncttatgtgggttccccncttcccctttcgantntctgcactttagagagacncaccagacatggctggcagtaaccaggtcaatctcaatgaatctaggagtgttgttccgttaaatacatgggtgcttatttccaatttcaagctgtcttacaagcttctcagacgtgacgatggaacgttcaatcgtgagttggcggagtttctggataggaaggtccccgcgaacgcaattcctgttgaaggg

SEQ ID NO: 770 - DNA, 273 bp, Glycine max
  unsure (1)..(273): unsure at all n locations; Clone ID: 701037810H1
tttggtttggttacttgctcgaatttcctcgaatcgcttaatttgtatttgattagttaaaccgcaacgcggaattctncttttctcgaactggctaactctcaggcaagtggttcggacgctgattccagcaacaagcggctggtgctcgcactgtatgacgccctaaactccggcgactccgacgccgtcgtcaagatcgtcgccgccgacctcgagtggtggttccatggtccgccctcacaccagtttttgatgcgcatgctcaccggc

SEQ ID NO: 771 - DNA, 272 bp, Glycine max
  unsure (1)..(272): unsure at all n locations; Clone ID: 701037811H1
aggaatgctaaaagaacaacaattgccaaacccattttaacacagattcataccatagcgaggnatggcgttttgactttctcagaatgtcctgcatccagtacctcaaacacacctgaatcctttgctctctccctagaacggngaccacgatccttgagtttgtccctctcagnttcctctcgttcacgctttgtcagaatcccttctacgatctctatctctggattttgtnctgtccctgtcncgatctctatctcntncccaatccc

SEQ ID NO: 772 - DNA, 273 bp, Glycine max
  Clone ID: 701037812H1
tgaatcaaggggacatgacccttgggaacagtcacaaccaaccgttatgatccaccccagggttgcaaggtcaagagatgcgaatcaagggggcatgacccttggaaacagtcacagccattcagaataattgtgtccattagatgtaatataaatagaagtaaaccagaatgggaaagacactctggaattaggaagaatctgaattgtggagagacaggctctcgaaaacctgtgtaataaaatatctcaaattatctataaaaatttcta

SEQ ID NO: 773 - DNA, 249 bp, Glycine max
  unsure (1)..(249): unsure at all n locations; Clone ID: 701037813H1
cgaaaattgaggtgacaccaagagagacttttaattctatctctctaattttttatttaatttttttattcttgggttaaccgaggcattttattaaccctatttgtctttggttcttcttttcttttnggaaagatcactcagttaatnctncatngtaagtagagtacaaaattncnaattaaacattaganatttttaancngnaataaaaatncagctattaggaacaatctggngtngtactnc

SEQ ID NO: 774 - DNA, 272 bp, Glycine max
  unsure (1)..(272): unsure at all n locations; Clone ID: 701037814H1
tcttctcttgcggctagggttttagcgcanttcttctagatttaaggaagatgggtaaggaaaaggttcacatcagtattgtggtcattggccatgtcgactctgggaaatccactaccactggtcacctgatttacaagcttggaggcattgacaagcgtgttattgagaggtttganaaggaagctgctgagatgaacaagaggtctttcaagtatgccgggtgctggacaaacttaaggctgagcgtgaaagaggnatcaccattgata

SEQ ID NO: 775 - DNA, 283 bp, Glycine max
  unsure (1)..(283): unsure at all n locations; Clone ID: 701037815H1
ataaaacttctctcttcactttcttccacttcatcacaattctcnaagancnaaagacacacaaaatcaattcaaggctttgaactatggccactcttnagagttggagaaaagcctacggtgcnatnaaagacactaccnaagtcggtctcgctcatgtcaanagngacttcgcggtatcncaattctcantcttattngtattnncgnnttcgttttcatntgtnttccgaaatatttctcgtgcgagtgatcggtttttcgcgtgnattataatattatt

SEQ ID NO: 776 - DNA, 282 bp, Glycine max
  unsure (1)..(282): unsure at all n locations; Clone ID: 701037816H1
tcacaatgagaataaacttactgtagtaaagatgagaatgcttctgtggaagagtaaacatactatacaaatggattctagccttaccactaaaggggaagggagactgggaaacactgtaggccaaagcattaagantgctttagaggtggttntcgctttgtctactgacaagattcacaaatcacaatggaacactatagtatcattngattcatgtaaacaatccacctccacctagtggggaaaagtttggntgttgtctaccattacccgtatgtc

SEQ ID NO: 777 - DNA, 277 bp, Glycine max
  unsure (1)..(277): unsure at all n locations; Clone ID: 701037818H1
aattggaaagcatctgcaatccaatcattgccaagatgtaccaaggtggtgctggtccagacgtgggtggtgctggtgcagcagaggatgagtatgctgctcctccttctggtggaagtggtgctggccccaagattgaggaagtggactaaatgtagttgctttcctccagatacctgttttaaaaacttattttactttatgcttttttaattggattttaancgcatgatttttnntggatgggattcaaactatttttcccttctgatatgaa

SEQ ID NO: 778 - DNA, 272 bp, Glycine max
  unsure (1)..(272): unsure at all n locations; Clone ID: 701037819H1
atatatatataatttgagcgtattgaagtttccagaaggataaggatctggtgaatttaagtgtagttttgtggtatcaagttttgatcattagcaacttgtatgttgagttgtctcattatgttcgatcgtatgtgattgtgcgactcgaggagttagaatcttgtattttcctgttaaatatctacaatatatcatataatattttaattgtcttgaattttttanaaaaannnnnaatgactnaanaaaaggggnggccgcncattant

SEQ ID NO: 779 - DNA, 196 bp, Glycine max
  Clone ID: 701037820H1
cttcgctcttcgatcttcgtccggggactgctccgaataccaccaccaccactcgccgatggccacgatcggaggcttacacgactcccaaggctctcaaaacagcgtcgaaaccgaagcccttgctcgattcgccgtagacgaacacaacaagaagcagaattcgcttctggagtttgctagggtggttaggcaa

SEQ ID NO: 780 - DNA, 273 bp, Glycine max
  Clone ID: 701037821H1
agcggcttcttcttccgttttcctgaatcggtgtgaacaatggcgacgtacgctgcgatgaaacccaccaagccagggttggaggagtcccaggaacagatccataagataaggatcaccctttcttccaagcacgtcaaaaacctcgagaaggtttgtgcggacttggttcgtggtgcaaaggacaagcgcctcagggttaagggacctgttaggatgcccactaaggttcttcacatcactaccaggaagtccccctgtggtgaaggtacc

SEQ ID NO: 781 - DNA, 271 bp, Glycine max
  unsure (1)..(271): unsure at all n locations; Clone ID: 701037822H1
tttgtntgtgtcaaacaccataaaccattgtatcttttttctttgttctttgtctaggtcttggcactgaacattattttccatccaaaaataaaaattcagagcagnataacaacaattcaggaaaacaaaaaaactcagccacataatttccttcaactcatggcttgtactgagcatggccatggctctgtgttgttgggtttggtgttgttgagtttagctgcttcacaaagttgttgttatggtttgagcacatttgggtttgaca

SEQ ID NO: 782 - DNA, 273 bp, Glycine max
  Clone ID: 701037823H1
tcctgcaagcggtgactcttgctttggtgttagccaccgtctctgcatcagatcctgatcctcttcaagacctctgtgtcgcagaccttggcttcagcggttaaagtgaatggattcacatgcaaagatgctgccaaggtaaatgcgagtgatttcttctcagacatactagccaaaccaggtgccacaaacaacacctatggctccctagtgactggagccaacgttcagaaaatcccaggactcaacacccttggcgtgtctttatcacgc

SEQ ID NO: 783 - DNA, 213 bp, Glycine max
  Clone ID: 701037824H1
tagtgcctcttgccagaagttaaaatgggcccaagaaactttcctattcacatctgaatcagtgaacgaggggcaccctgacaagctctgtgaccagatctccgatgctgtgctcgatgcatgcttggagcaggaccctgacagcaaggttgcctgtgaaacctgcaccaagaccaacatggtgatggttttcggagagatcacaaccaaggc

SEQ ID NO: 784 - DNA, 272 bp, Glycine max
  unsure (1)..(272): unsure at all n locations; Clone ID: 701037825H1
anaaaaccaaaatggttgaatctcagnccaagttcttcatccccgaactcgatcaatggagtgaatttcgacgtggcggcgcagattaagatggtgtgggaagtgatcaaggcgccattgatcgtgccactgctgaacctcgcagtgtacatttccctagcgatggcactcatgctcttcatggagagggtgtacatgggcattgtcatcatcctcgttaagctcttctggaagaagcctcaccagcgctacaagttcgagccactccaaga

SEQ ID NO: 785 - DNA, 270 bp, Glycine max
  unsure (1)..(270): unsure at all n locations; Clone ID: 701037826H1
gganctcaaacctttgtgttgagaatcttagccatgggcagcaacggtttgaggtacgagatcgaacaaaacgcttacataaaactcgtccttcactccctcaaacacccaacctcngccgtcaacggcgtcttgatcggtcgcatctccgcttccaacgacgtcgtcgagatcgccgatgccgtccctctcttccactctcacatcccccttcttccccaattggagatatctctcatcatgatagaggaatatttttctgctaaaggg

SEQ ID NO: 786 - DNA, 274 bp, Glycine max
  unsure (1)..(274): unsure at all n locations; Clone ID: 701037827H1
cctctttaacgttcacaacggaggtagcatccagcttcctcggcctcgcttatgcacaatcccaaacccttacactctctcactccaaaccactcttctccctcttctacgcagaacaaccactcattcccgatcgctaacatttcctctccgaccctctcgccgcttcttcgttacctccgccacnactgcacctcctcaatccgaggattccgacgtttccaccgtcattcctcccgacaatcgcataccggcaaccatcatcaccggcttt

SEQ ID NO: 787 - DNA, 271 bp, Glycine max
  unsure (1)..(271): unsure at all n locations; Clone ID: 701037828H1
acgcaacaaacacatagccacatcttctctttctcttcccatggcattctgactcatacccaaatcattgattgtttgtctatcgaatcggtgagaaaatggcagtggagctgatggggttcccccaaatgggcgaacagaaggcaattgaagaagcagccgccgaaggctcaagggcatggaacacctcctctgtctcctctcccatcaaccttcccacctccncnctcaccacaccgacgccaccgtttccaattcaaaaaactcatct

SEQ ID NO: 788 - DNA, 137 bp, Glycine max
  unsure (1)..(137): unsure at all n locations; Clone ID: 701037829H1
gagaaaataaggaataaaattgctcctcttacgttgcggtcccttaatttcgtgtcaaatgtggcaccgcatgccttatatgtanaattaaatactactcaggaactgaagcaatgaaagtatagaattaattttgt

SEQ ID NO: 789 - DNA, 276 bp, Glycine max
  unsure (1)..(276): unsure at all n locations; Clone ID: 701037830H1
taactctttcttgtaactaaagccaaacgcgatattctcaacgcttcattgaattgattcgatattatcccaatttcacaaaccccaacctcgctttctctgtcatccaattcacaccgccatggatcccaaccccggaaccttccctctcctctcctacatcatgtcgcgcctcccttccctcactcncagacccgccgccccggcaccctccgattccgaccaattcgacatcgaacagccaccggagattgtgggccaaatgccgcacctggc

SEQ ID NO: 790 - DNA, 279 bp, Glycine max
  unsure (1)..(279): unsure at all n locations; Clone ID: 701037831H1
cacgcacaaacgcagagtcagantctccaatcttcaatcggagacaaagctagcttcgaacgaacgaagtagagtagtgtgctacgnaaaatgtggcggtgcatcgcacgtggtctccgtggacctgcttccaccagatccacctcncatcactcacttggatctcaactttctagattcttctctagtggggcgaactcctcgtacaccgtggtggatcatacttatgatgctgttgtcgtaggagctggtggcgcgggattgagagctgctattgga

SEQ ID NO: 791 - DNA, 282 bp, Glycine max
  unsure (1)..(282): unsure at all n locations; Clone ID: 701037832H1
cgctgtagctatatgcgcaaatctagaaaaacatacgttttgtttggtagttgggtttaatagttcacactaatcttttagctgagtgaagagaacacaagagccttaaggnactctgatgtttttatcacatgatcatagggtcattttgcaatctcactttttaaaacaaagtttggtaattntaatttttaatacctttttatttttgaatatcttattagacaccctttcntcttacattctttattattggaatatgttcaagtttgtngtactcgg

SEQ ID NO: 792 - DNA, 285 bp, Glycine max
  Clone ID: 701037833H1
ctcattttctgttgtaccatactctgcacctgtttcctctgacgctcaacctttctctacaaactctcagtttccgtctcaagatatgtcatcttcacagccagaaacagatattcttgcagacattcttcctcaagcaccattatctgagatgcattcacagcagaacattccagttcctacagatcaattttctcaacaacccttttctgctcctaatggccaaccaggacaagtacaatcatccttttcatctccctccagtcaatatgcacaaccaccctt

SEQ ID NO: 793 - DNA, 273 bp, Glycine max
  Clone ID: 701037834H1
gttttgctgacagaaattctagggacaaccatcgattgagttgtccttatagaggcagtgcttcaacagattatggaggttcaaattttcatgttaatgaggcaaagccggtcatattcccccaacagtcctttgttcaaccaaaacctactactactccgtctgttgttaacttggttccatctgttattgatctaaccggactcggagttccagaagatggcagaaatgatcactgacctaaggtcaactaggtacaatggtccaaggcac

SEQ ID NO: 794 - DNA, 274 bp, Glycine max
  Clone ID: 701037835H1
ggagaacagggtaatattacaggaatggtttgaccgcgttgactcggagaaaagtggaagcataacagcggtacagctgaagactgctcttgctgtgggcaacctggaatttccgctctcagttgttcagcaaatgatcaggatgtacgatttcgacaggaatggtactatgagctttcaagaatttgttgcactcaacaacttccttcttaaggttcaacatgcattttctgatctagagaggggtcgtggttttctgtacctgatgatgtat

SEQ ID NO: 795 - DNA, 272 bp, Glycine max
  unsure (1)..(272): unsure at all n locations; Clone ID: 701037836H1
aaagaatcccaggcgaggagaaagatggaggggaaggagcaggatgtgtcgttgggagcgaacaagttccccgagagacagccaattgggacggcggcgcagagccaagacgacgntnaggactaccaggagccggcgccggcgccgctggttgacccgacggagtttacgtcatggtcgttttacagagcagggatagcagagtttgtggccacttttctgtttctctacatcactgtcttaaccgttatgggagtcgccggggctaagtc

SEQ ID NO: 796 - DNA, 272 bp, Glycine max
  Clone ID: 701037837H1
atcaaatctgagtcccttgatttctctcctgtagaaaatgcaatcggaatgattgaaacacgaaccgctgccttaagaaatgagcttgaagagcctcgaagttcagagggggatcaacttccaagactccagagtctacaaagaatcctacaaggcagtgttgcagtacaagtgaatagtggagtcttgagtgtctgcactgccttcttgtccggggagcctgcgaccaggttacgatcacaggaactgcagcaacttatagctgcccttct

SEQ ID NO: 797 - DNA, 272 bp, Glycine max
  Clone ID: 701037838H1
gcccaatccgtcacgaaaagtctagaccctgtcgtgtaacataaaaaccaccgaagaaaacatcactgcgccgcgctgccacaccgaacaaacacaaacatggatgactccaaactcaatcaattgaagcatttcatcgaacagtgcaagtccaacccttccctcctctccgatccttcactctccttcttccgcgactatctcgaaagtctcggggcgaaactccctgaatctgcttattccgaatcgacgggcgtggagagcgatgagga

SEQ ID NO: 798 - DNA, 272 bp, Glycine max
  unsure (1)..(272): unsure at all n locations; Clone ID: 701037839H1
gaaaaaccctaagcaaagcaaagcggtaaggatggggaanacggagaagctgatgaaccagatcatggaattgaaattcacttcgaaatcgctgcagcgtcaatcgcgtaagtgcgagaaggaggagaaatcggagaagctgaaggtgaagaaggcgatcgagaaaggcaacatggacggcgctcgaatctacgcggagaacgcgatccgtaagcgcacggagcagatgaactacctccgcctggcctcgcgcctcgacgccgtggtcgccc

SEQ ID NO: 799 - DNA, 268 bp, Glycine max
  unsure (1)..(268): unsure at all n locations; Clone ID: 701037841H1
agattcccaaacttttttactttttattccctttttctcactatacaatacaaatacacattcaacaattttcgattcaagttcaaagccatcgacgagtgttgaggaagaataacaatgggaatgatagtggattttgaaaatnaccaaaacgacgccgttctggttccgccccctaacttcgccatggttgaagactgcgttttccgatccagcttccccaccccttccaatttcccctttctccaaaccctaaaccttcgctcca

SEQ ID NO: 800 - DNA, 269 bp, Glycine max
  unsure (1)..(269): unsure at all n locations; Clone ID: 701037842H1
gaaaagttagggttcacaacttttccttttccttttgcttgcgaatctgaatcaaataatgcaatcatccattcattattcatcatactcgtcggcgaagaaaatcacgctgaagagttcggacggcgaggctttcgaggtggaggaggcggtggcgctggagtcgcagacgantaaagcacatgatcgaggacgactgcgccgacagcggcatccctctgccgaacgtgacgagcaagatcctggcgaagttatcgagtactgcaaga

SEQ ID NO: 801 - DNA, 267 bp, Glycine max
  Clone ID: 701037843H1
cgaaatcatttaagataagagtgcattactactaagaggagaaaaaatgaaagttgtatacttccttgttgctatcttggctttgacatccactgtggtctctgcctatgaccctagtcctctgcaagatttttgtgtggcggccaaagaaaaagatggtgtatttgtgaatggaaaattctgcaaagatcccaagcttgtgaaagctgaagatttcttcaaacatgtggaacctgcgaatactgcgaatccactaggttcacaagt

SEQ ID NO: 802 - DNA, 267 bp, Glycine max
  unsure (1)..(267): unsure at all n locations; Clone ID: 701037844H1
gcaagctagctaggttgaaaatagtttggttttgtagtaagtgaggtgaggtgccaaaatggtgaagataactcttggtactttcgatgactcttttggtgttgcctctcttaaggcttatttggcagagttccatgcaactctgattttcgtgttcgctggtgttggttcagccatcgcttacaacgagcttacaaaagatgcagccttggatccaacnnnnctggtggcagtagctgtggcccatgcatttgcactgtttgtnng

SEQ ID NO: 803 - DNA, 269 bp, Glycine max
  Clone ID: 701037845H1
gagaaagtgttggctcacaaaccctccaatttaagctttattgaagcagctagccttcctgcagccatcatcactgcttatcaaggatttgataaaattgagttttctgctggcaaatctatacttgttctaggaggtgctggtggagttggatcccttgttattcagctcgccaagcacgtttttggcgcatctaaggttgcagccactgctagtactccgaaacaggatttgttgaggagcttaggagcagacttggctattgatta

SEQ ID NO: 804 - DNA, 250 bp, Glycine max
  unsure (1)..(250): unsure at all n locations; Clone ID: 701037846H1
cccaaatcccaagtctcctaaaaccctaattcgcagtgaaaatgagagnaatcttgcacatccagggagggcaatgcggtaaccagatcggagcgaagttctgggaggtgatatgccacgngcacggcatcgaccacaccggaaagtacagcggcgactccgagctccaattggagcgcatcaatgtttattacaatgaagccagcggcggaaggtacgttccacgcgccgtcctcatggatctggagcc

SEQ ID NO: 805 - DNA, 279 bp, Glycine max
  unsure (1)..(279): unsure at all n locations; Clone ID: 701037847H1
cnaactccctaccctatttccgctttctctcatccatcangaaaaccnggaaagtccaagaccgaatctaagagagccgatgccaaacttgctgtgaataagaagggcgccgccaccaagactaggaaacccgccggaaaggggaaggcagcgaaagatcctaacaagccaaagaggcctccaagtgctttcttcgttttcatggaggaattcaggaaggtgttcaacaaggaacatcccgacaacaaagcagtgtctgctgtgggcaaagctgctgga

SEQ ID NO: 806 - DNA, 278 bp, Glycine max
  Clone ID: 701037848H1
ttagctaagaagaaaataggagagggttagtttttaggggctgcggaaaaaagatagtgagtggtggccaatgggagcggagaggttttcccacgaccatgctcccttgattctgggtctccagccatccgccctggtcgacaacgttgccaccgtcgattggtccttgctccatcgcattcccggcgagcgcggtggctccatccctgtccaaattgaagaactggaatccatactgagagaggttaaatccaaatcccacgatgacatcaaaactc

SEQ ID NO: 807 - DNA, 278 bp, Glycine max
  unsure (1)..(278): unsure at all n locations; Clone ID: 701037849H1
tgcactttcaaattgctgagaggaacatactggaggagatgatcaaaatccgtaaggnagaaggcagatatgcaagtgagggataaaattttgatantgcnggactcttggcaagaggcatttgggggaccaggtggtaaacatcctcagtactattgggcatatgaggagttaaagcgatctggagtagttttcccaaagcgttcaccagatgcagctccaatatttactcctcctcctacccatccaaatttaagaaatatgcaagccggatatgg

SEQ ID NO: 808 - DNA, 277 bp, Glycine max
  Clone ID: 701037850H1
cacaagcccctgggcctgcacccacgcaaccaccatcaacaaccccatcaccgtccacgtcagcacccgccccattcaccaaccgcaaacacccctcctcctgcggctgcacctgcacccgcaacacccacacccacacccgctccttcatctccaactccaacaacagctccatcccaggccccaggcccaaccacctcctcccctcccgcgccaggcccatcaggcccagcaccaggcccatcaggcccggctccagaccaaccagcctccgagc

SEQ ID NO: 809 - DNA, 271 bp, Glycine max
  Clone ID: 701037851H1
atttgcccaaaatgcaagcaacaattctgcctcgattgtgacatctacgttcatgagagcttacataactgcccaggctgtgagagttccaggcactctaagtctgtaactgcttcccaatgattgccaatcttctgcctgtgacttaaaatttccataaaaatggcgttctacattgtctccttcatattgctatactgcatccacccactggacccatgaataagttccggtgccaagtgactgactaacattatcatctgctcattga

SEQ ID NO: 810 - DNA, 271 bp, Glycine max
  unsure (1)..(271): unsure at all n locations; Clone ID: 701037852H1
ttttcccaaccaaacctccatagaggaaaaaaaatccagactctaggccttcatggatagagaacaagaagagatgcaatttcttgggttctttggcatctacaaagaagcctccaagatcatactttcatggaggagaatcttcacccaaatcanctcancactaatcctccctctctccttcatcttcctcatccacatggaaatctccaacctcctcttcaggaagattctcatcaacgaaatagtcatggacgaaacaaagcctaac

SEQ ID NO: 811 - DNA, 272 bp, Glycine max
  unsure (1)..(272): unsure at all n locations; Clone ID: 701037853H1
tcgcagccattttctttgacactctccaaacatgttcgccacctttcgactccttcttcttctctcattncctctcactactcaccancgcccaatccgaagaccagcgtcaaatccttctgaacctaaaatccaccctccacaattcaaattccaaactcttccactcatggaacgccaccaattccgtttgcaccttcctcggagtcacttgcaactccctcaattccgtcacggaaataaacctctccaaccaaactctctccggtgtt

SEQ ID NO: 812 - DNA, 269 bp, Glycine max
  Clone ID: 701037854H1
gcaatcaaattagttcattctctttgcgcagttccctacctctcctttcaagatgcagatcttcgtcaagaccctcaccggaaagaccatcacccttgaggtggaaagctctgacaccatcgacaacgtcaaggccaagatccaggacaaggaaggaattcccccggatcagcaacgtctcatcttcgccggaaagcagctcgaggacggccgtaccctcgccgactacaacatccagaaggagtcaacccttcaccttgtccttcgtc

SEQ ID NO: 813 - DNA, 268 bp, Glycine max
  Clone ID: 701037855H1
caaacattaccgacaaagtagtttcatccttggccaatctgcatggttggactcttgagaatctaaaccttgatggttgcaaaaatatcagtgatgctagcttgatggcaattgctgaaaactgtgcattgctatgtgatcttgatgtctccaagtgcacaatcactgatgctgggattgcagtcctggcacatgccgaacagattaatctgcaaatcctttctttgtcaggttgcactttggtctcagacaggagcttgcccgctct

SEQ ID NO: 814 - DNA, 268 bp, Glycine max
  Clone ID: 701037856H1
gtcaaccgcgtagacacttgctgcaaagtggttggagtgtttttgttagctccaagaggctagttgctggggatgcgtttatatttttaaggggtgagaatggggaacttcgagttggtgttaggcgtgcaatgagacaacagggtaatgttccatcatcggttatctcaagccacagtatgcatctcggtgttcttgcaactgcttggcatgccatattgactgggaccatgttcactgtgtattacaagcctaggactagtccagc

SEQ ID NO: 815 - DNA, 267 bp, Glycine max
  Clone ID: 701037857H1
gttcttcagagcatcttcatcaatcaagatatccacatgtattatgaagaaactgacaaaccagctctagcccgtacttcaaacttgaatgaggaacttggccaagttgacacaatactttctgataaaactggaactctgaccatgaactcaatggagttcatcaaatgttctgttgctggggtagcatatggccgcggtgtgacagaagttgagcaagccatgggtaaaagtaatggtttacctatttttcatgagcatattaat

SEQ ID NO: 816 - DNA, 266 bp, Glycine max
  Clone ID: 701037858H1
cgacggaacacattctacgtactcgacagacaattccatccctgtcgtcgtttctcaactttgcgtatcagaagacttcattttcttctgcatttctccgttaaagaaaaagcaagaacaaaattaaatttactattttctgtgtgacactgtgtcttatttatgctctttctgtattttctttctacatctatattctaaaccttccttttcctttctgtctgcacctgcgttttcatttattgatgtccttcttttgttttatt

SEQ ID NO: 817 - DNA, 258 bp, Glycine max
  unsure (1)..(258): unsure at all n locations; Clone ID: 701037859H1
tttcggcgcaatcggcttctgcttcaaggaaggagaccttgttattctctaacnacaagtaaaatgtcaggtgaagagggtgtcattgcagttgagcnnnnnnnnnnnnnnnnnnncatcccaggcgagccaatggatatcatgactgccttacaacttgtgctcagaaaatctctggcttatggtggtttgtcgcgtggccttcatgaaggtgcaaaagtgattgagaagcatgctgcacaactctgtgttcttgca

SEQ ID NO: 818 - DNA, 261 bp, Glycine max
  unsure (1)..(261): unsure at all n locations; Clone ID: 701037860H1
gtcactccttgctcttagccctcctcctcttcgccgccgtnnccaccgccgcgatggcggtggccgcgtccgacgccgacgacatcctgatccgtcagtggtgccagatgttggcgaacgaagaggaggacaacctgctgaaanccgagcaccaactcgcgagcttcaaggccaagttcgccaagactacgccaccaaggaggagcacgatcatcncttcgggtcttcaagtccaactccgcagagccaggctgcagccaa

SEQ ID NO: 819 - DNA, 268 bp, Glycine max
  unsure (1)..(268): unsure at all n locations; Clone ID: 701037861H1
ctctctttctctttctctccgacctagcgagaccgagcgatccgntcctaaccccgcgatgctccgccgcgcaaccacctccctcatctccggcgcctcccgccgccgcctctccaccgacgtgccggcgacgcggcggcggattccgtcttcgcggaggcgtggaagaaagtgagccccaacatcgacccgccgaagacgccgctgggtacatgaagccccgaccacccactccttcgactctcccctccaaactcaccgtcaattc

SEQ ID NO: 820 - DNA, 270 bp, Glycine max
  unsure (1)..(270): unsure at all n locations; Clone ID: 701037862H1
cttcaccttgtcctccgtctccgtggggggttttaagctcgttncntaatgttggatgtgttcccaaaacatttgaagaactttgatgtttaatgggtctgtaataatgtcccttgaaaataagttcggtttgtgttgaactcaattgtgtcccattaataatagtactctaatatcccacctacgtttgtnatgaatgtgtgaaatatganatgatnaattgtcaaaaaaaaanaaaaaaaaaanggggggccnccgnntantgaccnc

SEQ ID NO: 821 - DNA, 255 bp, Glycine max
  unsure (1)..(255): unsure at all n locations; Clone ID: 701037863H1
tgaagtctttccatctcacagtgaccagctttgtgctgtacngtggttgtgcttggagtnttccactctccctagatgcacaactagatccctccttttacagagacacttgtcccagggttcactccattgttcgtgaagtcgtcaggaacgtttcaaagaaagatccccgtatgcttgctagtctcattagacttcactttcatgactgctttgttcaaggatgtgatgcatcagttttgttgaacaacactg

SEQ ID NO: 822 - DNA, 111 bp, Glycine max
  unsure (1)..(111): unsure at all n locations; Clone ID: 701037864H1
cgctgtagctatatgcggcaaatctaggngaanatnggtttgngttctnggtagtnngggtttaatagtngcanactantgcttttagnntgagtgaagagaacacangag

SEQ ID NO: 823 - DNA, 277 bp, Glycine max
  unsure (1)..(277): unsure at all n locations; Clone ID: 701037865H1
cccgatgccagaagtactatgaagccggtgcccgttttgccaaatggcgtgctgtgctcaagatcggcccaaacgaaccatccgagctggctatccatgaaaatgcctacggtcttgcccgatatgccgtcatatgccaggagaatggtctggtacctattgtagagccagagatcctggtggatggacctcatgacatcaacaagtgtgctgaggtgaccgagcgcgttcttgcngcntggctacaaggntctaatgatcaccatgttctgcttga

SEQ ID NO: 824 - DNA, 272 bp, Glycine max
  Clone ID: 701037866H1
atggctgttaggcttgatgatgctcaccaagaactttcaaatgctattgtggttgctcaagacacatccaaccagatgtccaggcgtgatcctctgagatgttacatggatgtaattgatgatatgctaactcaaatgggaagatccatccttcaaaccacaaggtggccgattaggagaaagcgacattgattatgatactgacgagaagtcaatggcaacactaagacgtcatcttcgaggagctactgaggagtactacaggtataaaa

SEQ ID NO: 825 - DNA, 271 bp, Glycine max
  Clone ID: 701037867H1
cgagggcaagctctcacctttgaagccccaattttgaagagatataactggcctgacagaaactgagaggatgaaacgtaataatagtgtttatcccgctgcacttaactgtgatgacatcctgcatgagatcctacttcgaataccaccaccaactatctccaaattaattatcgtatcaaaaatatggctgcgtgtgatatgcagtccttcatttcgtcaatgctacgtgaggcaatggggacaaagttttcgacttttgggttttttt

SEQ ID NO: 826 - DNA, 267 bp, Glycine max
  unsure (1)..(267): unsure at all n locations; Clone ID: 701037868H1
anacattggttcaaggctgtgtctccaatggggttaggtttcacaaggcaaaggtgtggcaagttcagcaccaagagtttgagtccaaagtnttgtgtgatgatggggtggaantgaaggggagtttggttgttgatgctagtggattcgcaagtnattttgtagcatatgacaaggtgagacaccatggttttcagattgcncatggngttttggctgangtggatgatcacccttttgatttggacaagatggtnttaatggact

SEQ ID NO: 827 - DNA, 266 bp, Glycine max
  Clone ID: 701037869H1
ccaggtttggcaggcacaccccttctggtccagattcgtggagcatgatgattatggcaatggtgttgagatgggaaagggagctattaaagaagtgtagttagtcctcgtcttggtttatttttctcaatgactagcgttttagcttttgttggtaaatcatactattggtttcaatgtattgaattgttcctaaaaattaaaaagggttatttttcttatgtatcccctgcttcttcatatgaagcaagtttacaggatacttt

SEQ ID NO: 828 - DNA, 267 bp, Glycine max
  Clone ID: 701037871H1
gaggcggtgatgtcttcaattagattcctatggatcctgatggtgtctttgacggcatcatgcgcgttaagccaaccgcagaagctatcggcgtacgatgttctgatggagtacgggttcccggtgggtcttcttcccaagggagccatagggtattcgctcaacagagacagcggcgagttcgcagtgtatttccaaggagcgtgcagcttcgacatagagtcctacacgctcaagtacaaatccaccatcacgggtgttatctcc

SEQ ID NO: 829 - DNA, 268 bp, Glycine max
  Clone ID: 701037872H1
cacaaagtgagcttgaaaagattaaacgtaacctgaggaaagttcataacccagttgttgagaatgctgttccgtcagaagttgaatcggagacgccaaaggatcatttggaaaaggcaacagttacctcatgccttgctgtttcagaacaagaggtcattagttctaatgagaagatcaagaaggaagcaacattaattgtttctagtgtgccagatatagaaactactccaagactttcagttagtaaggaggtgttagactcacc

SEQ ID NO: 830 - DNA, 263 bp, Glycine max
  unsure (1)..(263): unsure at all n locations; Clone ID: 701037873H1
ttcaaaacaaggtttccatcaactggctactcgaccaaggtcccagcttaggtattgtccgagtgcatggggttgggcttttacacaccgagctagtgtctggnatccctgtaattttcttccagtttgtagccaacctcccagccttccatcaggtcctagttttcctatgcatcaaacatgtgccggttccacatgttaaagctaaggaacggtttctagttggtcgtattggtccaaaagagttcagaatctaccggtgc

SEQ ID NO: 831 - DNA, 264 bp, Glycine max
  Clone ID: 701037874H1
gatggctttaggtgttcctgctcttccgttgacatacgtggctcacgttctgggcagttgttgccagcgtcttggtcgtggtctgggtcgtcaatttcaggggtggcttggcttgggattctgataacaagtccctcatcttcaacattcatccagttcttattgttattggcttactagttcatgggggtgaagctattataagttacaaagcttttcccctaaagaaggaagtgaagaaattgatacaccttgttttccatg

SEQ ID NO: 832 - DNA, 263 bp, Glycine max
  unsure (1)..(263): unsure at all n locations; Clone ID: 701037875H1
agctctcaaggattgaccttgagtgggtccatgtcctcagcgaaggatgggccacacccctgaaangcttcatgagagaagccgagtncctccaaacgcttcatttcaactcgctccgactcgatgatgggtcggtcgtgaacatgtcagtgcccatcgtgctggctattgatgatgcgcagaagcatcggatcggggataacaaaaaggttgctctttttgattccaagggagaccccgttgcaattctcaataatattgag

SEQ ID NO: 833 - DNA, 267 bp, Glycine max
  unsure (1)..(267): unsure at all n locations; Clone ID: 701037878H1
cnaaccgtggagcttcagttagggttgggagggacacagagaaagcagggaagggatattttgaggacagaaggccagcttctaacatggacccatatgtggttacttccatgattgcagacacaaccattctgtggaagccatgagcaaaacttgcatgttgtctccctttggatggaacaaggaacaaggaacaaggaacaaggaacagttatgcttttctaagtagggtttggtcctttttatttttacctttgatttttctag

SEQ ID NO: 834 - DNA, 272 bp, Glycine max
  unsure (1)..(272): unsure at all n locations; Clone ID: 701037879H1
cngctccaaacactcgtttcaggcattcttgccttgttagtaggngccttgctttataagtnaaaganaacacatggtcctaatgcaaagatctgcactgcgccacaagcaggaggagcatggcctattgttggtcatttgcacctcttcggggctcatcaacttacacacaaaacactaggnacgatggctgacaaacatgggccaattttcacgataaaacttggttcatacaaagttctggtgttgagtagctggnagatggccgaaga

SEQ ID NO: 835 - DNA, 277 bp, Glycine max
  unsure (1)..(277): unsure at all n locations; Clone ID: 701037880H1
cttctttttactctctctctgtctctctctacgctttctcgttcananatccctcaagggatccactaactgaaggagaaatggggttgacattcaccaagcttttcagccggcttttcgccaagaaggaaatgcgaattctgatggtgggtctcgatgcagctggtaagaccaccatcctgtacaagctcaaacttggagagatcgttaccacaattcccaccattgggttcaatgtggagactgtggaatacaagaacattagtttcactgtctg

SEQ ID NO: 836 - DNA, 265 bp, Glycine max
  unsure (1)..(265): unsure at all n locations; Clone ID: 701037883H1
ccttgctcttgttctctgattggcctagccagtagtagccaatttgttggagctggttgggaatggcgtcgaaaccgaaatcaaatggaaattccaaatgcaacaaagnanccgctgacagctatatgctgttgaatcctgaagacgctcatttcttcgatcttgttcatgtgctgtattcccgtaacttgggaaaccgaaaatttgtggacagcaatgctgagggatcttatgagggaagctccgccaaagatggcttatattc

SEQ ID NO: 837 - DNA, 268 bp, Glycine max
  unsure (1)..(268): unsure at all n locations; Clone ID: 701037884H1
agaactgaatattaatcttatatattcctcaacaatttcagcatcagaattttatcaaaatggaaggacaaacaagtgattcattaagtaaacaacaatgtttggngacaacattaaccaacgagcttcaaaatgtggaacctccagaanatgtatggattcgatatgcaatgcatttatagagtaccaccagccattcgtgaaaataatcccaaagcctacacacctcaaatggtttcaattggcccttttcacaaagcacgtgacg

SEQ ID NO: 838 - DNA, 92 bp, Glycine max
  unsure (1)..(92): unsure at all n locations; Clone ID: 701037885H1
gctctaacaccacanctcctggcctctggntnnngcagccttgcacagtnacacactgaaacaacaaaacaccanaataccggnaaannana

SEQ ID NO: 839 - DNA, 266 bp, Glycine max
  unsure (1)..(266): unsure at all n locations; Clone ID: 701037886H1
gccttggagttaaaagccgatcttcttgtttntttgagtgatgtagaaggtctttatancgnccctccaagtnnnccncacattcaaancttattcatacgtatattaaggagaagcatcagaatgaaattacttttggtgacnaatctagagtgggaagaggtggaatgactgccaaagtaaaagctgctgttcatgcagctgatgccggcattcctgttgttattaccagtggttttgcagctgagaatattatcaatgttctc

SEQ ID NO: 840 - DNA, 264 bp, Glycine max
  unsure (1)..(264): unsure at all n locations; Clone ID: 701037887H1
aacaatttgcccaattgtttganatgttcaatatgagatttgtatctcaagattgggtggtttcatgtgcactaatacttctggtgtcatgcacaacatactcatcagcttctttggggaaacctgagaacaacataaaaacatctgtttttaaatcacccaagattgagctaggtccagggttagtttcaaacaaattttattttgatgttgactttccaagaggccatattgcactcaagagtttcaatgctgaattggntg

SEQ ID NO: 841 - DNA, 266 bp, Glycine max
  unsure (1)..(266): unsure at all n locations; Clone ID: 701037888H1
cagccttgtctacactgcatganaatcagaccatagatgatgaaactttggcagaaccaatggatgttgatgatgcggacaatcgaagtagctggagaagtccacgtgaacagcttcaacattggcagatgaacaggaggnagttggcattttcaacagtggggacaccagactacattgctcctgaagtacttttgaaaaaaggatatgggatggaatgtgattggtggtcactgggngcaataatgtanganatgctggttggt

SEQ ID NO: 842 - DNA, 263 bp, Glycine max
  unsure (1)..(263): unsure at all n locations; Clone ID: 701037889H1
ctcagaattctctaaaagagatctttttctgctctttgaagaaagaagggtctttgcttgattttggagatgtctctgctctcagatctcatcaaccttaacctctccgataccaccgagaaggtgatcgcagagtacatatggatcggtggatcaggaatggacctgaggngcaaagcaaggactctcccaggaccagttagcgacccttcagagcttcccaagtggaatatgatggttccagcacaggtcaagctcctggt

SEQ ID NO: 843 - DNA, 263 bp, Glycine max
  unsure (1)..(263): unsure at all n locations; Clone ID: 701037891H1
tcaagagcaaaagaagaggcttctagcaggaaggctatcatggagaaagtggagaagtggatgctagcatgtgatgaggagcactggctagaagaatatagcagggatgagaatcgatactcagtcagtagaggagctcacaaaaacttgagacgtgccgaacgtgcccgtataatggtcagcagaatgccagctttggtagatttgctaataaaantgactaggagttgggaagaaganagaaataaagttttcttgtatga

SEQ ID NO: 844 - DNA, 263 bp, Glycine max
  unsure (1)..(263): unsure at all n locations; Clone ID: 701037892H1
ccgcggcggcggctgcngcctcctccgacgagatcaggnccgtctggctcggcgacctccaccattggatggacgagacctacctccacaactgctttgctcacaccggcgaggttgtgtcggccaaggtcattcgaaataagcaaactggtcagtctgagggatatggattcgtggagttctattcacgagcgacggctgagaaagtcttgcagaactataatggcacgatgatgcccaatacagatcaggcattccgtctg

SEQ ID NO: 845 - DNA, 266 bp, Glycine max
  unsure (1)..(266): unsure at all n locations; Clone ID: 701037893H1
cctagctagtagtctcagttcgtttganagagaaaaaatggcagagggtctcgttctccgcggaaccatgcgcgcccacaccgacgtcgtgacggcgattgccactcccatcgacaactccgacatgatcgtnacggcgtcgcgcgacaaatccatcattctctggcacctcaccaaggaggacaagacctacggtgtcccccgccgccgcctcaccggacattctcacttcgtccaggacgtcgtctctcatccgacggtcagtt

SEQ ID NO: 846 - DNA, 90 bp, Glycine max
  unsure (1)..(90): unsure at all n locations; Clone ID: 701037894H1
ctctcccatcctttccgcattctccaatacccttnngatttgtgaaaggaaagcaaacatggttganccaggtnccaancanccctacaa

SEQ ID NO: 847 - DNA, 136 bp, Glycine max
  unsure (1)..(136): unsure at all n locations; Clone ID: 701037901H1
cgctatgactagatattgcaggtttttgctctttggttttnaggaggatgagcttggttttgagaggggaagtcacaagaagcctaagaggaggttgattactcaggaaatagctgaaacgtttttgactgttcct

SEQ ID NO: 848 - DNA, 292 bp, Glycine max
  Clone ID: 701037903H1
gcttcttgcaaagttgagggaatacaaatctgatctaaccaatttgaaaaaggaatttaaaaggctaacatcacctaatgctgacgaggttgcccgtgaagaattgttggagactggaatggcaaatacacatttggcttctgctgatcagagagaacgattaacaatgtctgtggagagaataaaccagtcgggtgagagaattagggagagccatagaaccttgctggagactgaagaactaggtgtcaacatcctccaagatttgcacagtcagagagagactctactg

SEQ ID NO: 849 - DNA, 97 bp, Glycine max
  unsure (1)..(97): unsure at all n locations; Clone ID: 701037904H1
cttttnctctctgtctcnctctctcgntctcgctcttnnnntcatcaagnacagagttacagactcaggagtcttgncgattctctttcgtcttggt

SEQ ID NO: 850 - DNA, 291 bp, Glycine max
  unsure (1)..(291): unsure at all n locations; Clone ID: 701037905H1
ctttcaaatcccttcttctttctctcccaaatctcaatcttcataacattcacccatttcttcacattgggggctttcnggttctatttgttgattttgatgctcgagttctgnggtttctaaagcattgaaatggggaaagggagaagtcctgggaaatggttcaagaatttactcttggggaagaaatcgtcttcaaagtctacttcatcaaagaagaatgncatttttaaaccttcnattgacaaggatttgctggtgtcgtctgaggtacccgtgcctgatccaagc

SEQ ID NO: 851 - DNA, 294 bp, Glycine max
  unsure (1)..(294): unsure at all n locations; Clone ID: 701037906H1
caaaccaaggacgagaacacgatgttgcttgaacttgcacttggtttattggttttggctctgtttctgcacttgcgtcccacacccactgcaaaatccnaaagcacttcgccatctcccaaacccaccaagcccaaagcctcgtcttcccttcataggacaccttcatctcttaaaagacaaacttctccactacgcactcatcgnccctctccaaaaaacatggtcccntattctctctctactttggctccatgccaaccgttgttgcctccacaccagaattgttgccnt

SEQ ID NO: 852 - DNA, 292 bp, Glycine max
  unsure (1)..(292): unsure at all n locations; Clone ID: 701037907H1
ctcaattacaggaattcgtagagatcgaaaatatgcagtgcaaccacggagtttgtatgcaacaggggtgcacatgtcaatggatctatcaggaaagacaacacacaaaactgaaggtaggatcaaatacttccactatcatggaaccanatcaganaggagagaaacatgtaaaatactcgtcaacacaacacaagtcacccagaacaaaattccttatgtgatggacaccacaatgagggacactgctggggtaatcaagaaatttgagctcaagatgattggnacaagg

SEQ ID NO: 853 - DNA, 292 bp, Glycine max
  unsure (1)..(292): unsure at all n locations; Clone ID: 701037909H1
caccaacataatttgtttttctcttctagcttccactatgtctaaaacgnatgtgagaagacatgctcttgagaagtgcaggagtgtgaaagagacacagaaagtattgaaccacaactttttcaccagaaacctcaagaaagtgtaccctattgggcttcagaaaagcacctcatctttgtctctgtcttcaatttcattgtctttgtcacaaaactcaaatgactcttcacaggctgattctttgactccactggatgaaaagatttcgctggcactgcgtttgatatcg

SEQ ID NO: 854 - DNA, 291 bp, Glycine max
  unsure (1)..(291): unsure at all n locations; Clone ID: 701037910H1
ctccaatccattcccccttttgacttccccatatggctcgctactccttcctcttggccctcctncctcctcctcttcgccgccgtgtccagcgccgccgacgacatcctgatccgtcaggtggtgccggatgccgtcggcgaagggcggagaaggaggaggaccacctgctgaacgcggagcaccacttcgcgagcttcaaggcgaagttcgggaagaagtacgcgaccaaggaggagcacgaccgtcgcttcggcgtcttcaagtccaacctccgcagagcgaggctgc

SEQ ID NO: 855 - DNA, 132 bp, Glycine max
  Clone ID: 701037911H1
gcctcttgtttgagtgttcaccaaaaaattcaagttactgtgatttgacatgtacacagggctttctgaacggatatttagtttgttaaattatggttgcccccatatttatttttcatagctggtgaaaca

SEQ ID NO: 856 - DNA, 291 bp, Glycine max
  unsure (1)..(291): unsure at all n locations; Clone ID: 701037912H1
gccagggatcaataaggacaaagaaggagggggcaaagaggtggcctggtttggggtttagaatttaaccatatttttgttcattaatatatatattgaatgcacattctgtaacataggatatcttgnatagggttgaatttgggagggagcttccctgtttcttgatatttgttcatgcatttgtttctcttggttaattgctttatcaattgtgttgtgatctttttagctgtaccacaaaattctatacctgtgtcctccgtttccggaaaatgttgaaagcaaatt

SEQ ID NO: 857 - DNA, 72 bp, Glycine max
  unsure (1)..(72): unsure at all n locations; Clone ID: 701037913H1
ttggattggttttcttcttccttntctctanagagnntctaatctcantcctcattacagatttcttcatcc

SEQ ID NO: 858 - DNA, 295 bp, Glycine max
  unsure (1)..(295): unsure at all n locations; Clone ID: 701037914H1
cgaacaactacatagcatttatttttcgctcttctctcttctattcagccactgctcacaccatgagtgccgagaagaagaaactgattggcagattacgcctatttttcactaatgcaaaaccatacctcttaatgattggcttgcaatttggcatggctggaaattacatcttcggcaaggatgttcttaaccatggcatgagtcgttttgtgttcattgtttaccgaaatgctatggccaccattgctcttgcccctttgcatctttattgaaaggnaaagtaggcctaaga

SEQ ID NO: 859 - DNA, 300 bp, Glycine max
  Clone ID: 701037915H1
attgcaggcatgtctagcattgaacttaacgtaaagcagcaaggagaaccaacccgggttcagcctgcacaggaaacagaaaagggactctacttcctttcaaacctagaccagaacattgctgttccagtgcgcacggtttattgcttcaaatccggttctagaggaaacgaggatgctgcacaagttatcaaggaagccttgtcgaaaattcttgtcccttattaccccatggctggcacgttgatgataagcttggaagggaagttaatagtggataaccctggggagggtgcggtg

SEQ ID NO: 860 - DNA, 302 bp, Glycine max
  unsure (1)..(302): unsure at all n locations; Clone ID: 701037916H1
ccctaccattccaaagctcgaaggtgaacagtgagtgagtgagttattcagaacccaggatttggcgaaagtgaagcgatgagcagtgataggaatattggggttgccttggacttttccaaaggaagcaaaatcgctctcaaatgggctattgacaatcttctccgcaacggtgacatactctacatcgtccacatcaagccttccgnaggaagtgaattccgaaatcttctctggtccaccactggttcanctctgattccgttgtcggagtttcgtgagaaggaggtgatgcatcacta

SEQ ID NO: 861 - DNA, 290 bp, Glycine max
  unsure (1)..(290): unsure at all n locations; Clone ID: 701037918H1
gggaaatggttatgtgggttgtgctcagaagcggtgagagatgaagtgagccatggagggaagaaggcatcatcagctatggatgaagctgtgaaggctcacatgtcattctgccgcaagttcaaatccaaccctgcagttagagttgctgaagggatgagacagatgctaaggagaaggtctgacttgnnnnnnnnnnnnnnnnnnnnnnnnnnnnnnnnnnnaaagaagtacacaaggtcaaccagcacttctcaagtcggggattcttcaagtttccatttgtagta

SEQ ID NO: 862 - DNA, 249 bp, Glycine max
  unsure (1)..(249): unsure at all n locations; Clone ID: 701037919H1
tgagagaagagatgatacaaatgcttaggattgcattgctttgcaccagtagaaacccagcggataggccttctatgagggatgttgtgttgatgctgcaagaggccaagccaaagaggaaattgcttgatagtgttattgtgggtcgatgtgctggggacaatgtgnnnnnnnnnnnnnnnnnnnacattcctttgccacaaaagccaaccgcggatcaatgctaatgtgtttatatgattganatgt

SEQ ID NO: 863 - DNA, 289 bp, Glycine max
  unsure (1)..(289): unsure at all n locations; Clone ID: 701037920H1
gttataacttttccaatatatgttttcagtttaagtttggttacgtttgattgaataaacttaaaaaatattattaaggagaagtgaagtaagtttttcttcttaagttaaaagtaacttatacatgagataatttatagaaattcttatacaataacttatccaaaaatttgttctttaatttatacataagtnaaatttattttgtggtaaaaatttagtttatttattttcgnatacaagtgnntatggaaaatttatccaaataaaaccaaaattgtnttcttca

SEQ ID NO: 864 - DNA, 286 bp, Glycine max
  unsure (1)..(286): unsure at all n locations; Clone ID: 701037921H1
cggcatatgaaacattgaatgaagtagtaaggtgttcaacagatgaaacagctactttggtggtacaactagtttctgtcatcatgatggagctgcacaaatgtcttgaagcacaaaatctttcatcggatgagagagaaaagcggagtgaattgataggccttctttgtgggtgcatgcaagtnattattcagaaactagggtctttggattctaccaaatatgtgttggtgcagtattcngatcagataatgagactattcttcagggtctttgcttgtagaaa

SEQ ID NO: 865 - DNA, 287 bp, Glycine max
  Clone ID: 701037922H1
gttttgaatcatagggaagtatagcaaacagttatatcataaagtcaactgttcttgccgttgttctgtctttcagttatgtgtttcagctggccctgcccttggcctctggccccaagatatcttcaaacttcaaagtttctcttgttttgtcttcttgaattccaccttcatcaacctagagccccttaaaacttaaaagtgtcctaatttagttaattgatcccataccatagtctattccattaatgtcaggtggtgaagacactgagggctacaagtactgg

SEQ ID NO: 866 - DNA, 288 bp, Glycine max
  unsure (1)..(288): unsure at all n locations; Clone ID: 701037923H1
cacttctcttctgtgtttcttagnagaattaagatggctaccttgactgtacctccagttcctccttcccccagagatgatgccatgcagctttaccgtgcttttaagggatttgggtgtgatacaagtgctgttatcaatatacttgctcatcgagatgctacacagcgtgcctacatccagcaagaatacaaagcaatgtattctgaggaactttccaagcgcttagcttcggagcttagtggaaagttagagactgcagttctgctctggttgcatgaccctgca

SEQ ID NO: 867 - DNA, 99 bp, Glycine max
  unsure (1)..(99): unsure at all n locations; Clone ID: 701037924H1
cacacctccatgtgntgctcaagcttcttctgtntcacttctacnnngaagtttataactgctcctgcaattgctaangctgcgccttccccatntaga

SEQ ID NO: 868 - DNA, 288 bp, Glycine max
  unsure (1)..(288): unsure at all n locations; Clone ID: 701037926H1
aaaacgcgtcttcataaacgccgcccaaaacttctcatacccttttattcattccattcctttactaagggttttcttttctttgccgagaaaatgagagagtgcatttcgatccacattggccaggccggtatccaggttggaaacgcctgctgggaactctattgccttgaacacggcattcagcccgatggacagatgccgagtgacaagaccgttggcggaggagacgacgccttcaacacatttttcagcgagaccggcgccgganagcacgtgccccgcgcc

SEQ ID NO: 869 - DNA, 290 bp, Glycine max
  Clone ID: 701037927H1
attttccgagaggccaaaatatccattgcacctttctctttctccgatggctaatccctcacttcttgttcttcagtctcctcctattatccgccaccgtagccgccgccgaacggatcgacgatgaagacgaccttctgatccgtcaagtggtgccggatgcggaggaccaccacctgctcaacgcggagcaccacttctccgccttcaagacaaagttcggcaagacctacgccacgcaggaggagcacgaccaccgcttccgtatcttcaagaacaacttgctccgc

SEQ ID NO: 870 - DNA, 288 bp, Glycine max
  Clone ID: 701037928H1
caaagtctcagatcgagcaagtggtgggttcttccacttctgttcgcttctctggctatgcttgtagatattttggcttcctaatttcacggaaaaagtatgttgtctgcattgatgatgattgtgttcctgcaaaagataattcagggattttggtggatgctgtggctcagcatattgtgaacctgcagactcctgccacccccttcttctttaatacactgtatgatccattctgtaagggtgcagattttgttcgtgggtacccattcagcctgcgaatggggt

SEQ ID NO: 871 - DNA, 294 bp, Glycine max
  unsure (1)..(294): unsure at all n locations; Clone ID: 701037929H1
cgctaacactcattaattgcaagantggcacttcgttgcttggtgatgtccctttctgttctcttcactcttggtacttgcgagagaaagccatgccagagacgaagatttttggcatgctgtttggccaaacactcccattccaagttcattgcgagatcttctaaagcctggccctgcaagtgttgaaatcgatgatcaccctatgcaaattgaagaaacacagtacccgaaaaccttcttctataaagaagaccttcatccaggcaaaacaatgaaagtacaattcagcna

SEQ ID NO: 872 - DNA, 296 bp, Glycine max
  unsure (1)..(296): unsure at all n locations; Clone ID: 701037930H1
cgatggtgaaaatctcacttggtggatacgatgatggggaaggacccagcaaccgaacccataagcgacgcaggnnnnnnnnnnnnnnnnnnnnnnnnnnnnnnnnnnnnnnnnnnnnnagctttgagatggtggacccttcaataggaactcaagagaacgaagatcatgctgctccatccaatgatggatcgaattctaacggaaatggggctggaaccagtacccgggataggtccgttcctatcttcgtttccgaccctgatgtccttgattgctgcatttgctatgaaccc

SEQ ID NO: 873 - DNA, 300 bp, Glycine max
  Clone ID: 701037931H1
cttcaacgtcctcttacgagcagatcccaattctccttcccagtttcaaaccctaattccctcattcccatggcctcagaagagcccactgtcgcggtggaacccgctcccgaacctgccaccgccgagcctcccccggaggagaaggaggagcccaaacctgaagccaaggctaagaaaaccaaggaacccaaacctaaaaaggtttccagaccacgcaaccctcccactcatccttcctacgaggagatgattaaagacgcaattacctcgctgaaggagaaaaccggttcgagccaa

SEQ ID NO: 874 - DNA, 292 bp, Glycine max
  Clone ID: 701037933H1
ggagaacagggtaatattacaggaatggtttgaccgcgttgactcggagaaaagtggaagcataacagcggtacagctgaagactgctcttgctgtgggcaacctggaatttccgctctcagttgttcagcaaatgatcaggatgtacgatttcgacaggaatggtactatgagctttcaagaatttgttgcactcaacaacttccttcttaaggttcaacatgcattttctgatctagagaggggtcgtggttttcttgtacctgatgatgtatttgaggcttgggaaaaa

SEQ ID NO: 875 - DNA, 289 bp, Glycine max
  unsure (1)..(289): unsure at all n locations; Clone ID: 701037934H1
cattactactgaaacttaatctcaaagaaagaagctgctgagatgaataagaggtctttcaagtatgcctgggtgcttgacaagctcaaggctgagcgtgaaagaggaatcaccattgatattgctctgtggaagtttgagaccacaaagtactactgcacagtcattgatgcccctggacatagggatttcatcaagaacatgattcnctggaacatctcaagcngactgtgctgttcttattattgattccaccactggtggttttgaagctggtatttccaaggat

SEQ ID NO: 876 - DNA, 94 bp, Glycine max
  unsure (1)..(94): unsure at all n locations; Clone ID: 701037935H1
cagggttagaacaggangngaaaggaccaggncaggttagacntcatnttttntgtacttgtggtcntcanttatgcatggtnantattatgca

SEQ ID NO: 877 - DNA, 285 bp, Glycine max
  Clone ID: 701037936H1
cagatctgtcttccgaagcaggaactaaatatggctgacttgttggaatggtcaaagcaagataagaaacgaatgcttcatgtcgtctaccgtgttggtgaccttgatcgcaccatcaaattttacacagaatgtttaggaatgaagcttttgaggcaaagagatatcccagaggagaaatatgctaatgcttttcttggatttggccctgaagaatcccattttgttgttgaattaacatataattatggggttacctcgtatgacattggcgatggctttgga

SEQ ID NO: 878 - DNA, 285 bp, Glycine max
  unsure (1)..(285): unsure at all n locations; Clone ID: 701037937H1
cttcgtctcaaacttcttcgttccttcgattcattccatttcntccaaaatggccaaagacccagttcgcgttctcgtcactggagccgcagggcaaattggatatgctcttgtccctatgattgctaggggagtgatgctgggtcctgaccagcccgtgatcctccacatgcttgacattcctccagcagcagagtcgttgaatggggttaaaatggaattggtggatgctgcattccctcttcttaaaggtgttgttgctacaaccgatgtggttgaggcatg

SEQ ID NO: 879 - DNA, 285 bp, Glycine max
  unsure (1)..(285): unsure at all n locations; Clone ID: 701037938H1
ggcacgcattctatcgctgtttctctcgaatcaacaaaacgccaccgtttcattgatctacttcctccaaggccaggtctccaagaattggnaccaattcaagctgcaaatatacttgaacttcaacttatcccacattctccactctcaatggcttcaactctcaaatctggcggaattcatacaggggcaatcaatgatgatttatacaaggaattgtggcatgcatgtgctggtccccttgtcactctccctcgtgaaggggaacgagtctattactttcca

SEQ ID NO: 880 - DNA, 286 bp, Glycine max
  Clone ID: 701037939H1
cttcctttccattcctctctccagaagtcctagccctacaatctcaaagacaaacccatcattcaaagtcataaccgatacctaaaatcctcattccaatcaaaaccaaccccaccatgcccacaaaattaagtcatcaaattaaagcaccgatgatcctcaatttgatccttgtgcttatttgtgtcactactccaatcaaaggtgagaaatcaaggaagcttgatgaggtcacaaacggtaatgagaagtgcacaccatgtgaaggtggttacaccccatcacc

SEQ ID NO: 881 - DNA, 285 bp, Glycine max
  Clone ID: 701037941H1
gtgaagctcaggttcttcttcctcctcacttcccttttccattttcattttcctctataaacccctcccctctctctctctctagatccaaccgcaccgatggaaacacaatgatccaaccctaatccaagcgcctcttacctccaagttttgtgattgaagctgcgatggaggaggagacctccgatgcaatgaaccttgatttgaatctgggcccaggcccagagcccgaaactgggcccatgagcaatgaagctgtgaacttggacgattggataggggagc

SEQ ID NO: 882 - DNA, 284 bp, Glycine max
  unsure (1)..(284): unsure at all n locations; Clone ID: 701037942H1
gcggttgcaattgcatagcatagagaaagtgcagagagagcacagcgtaacgactcagtcaaacactctgtaactcttnnnnnnnnnnnnnnnnnnnnnnnnnccgatcgcatagctcgctcgcaaccaccatgccttcccgaagaagaactctcttgaaggtcatcattctcggtgacagtggggtggggaagacatctttgatgaaccaatatgtgaataagaagtttagtaatcagtacaaggcaaccattggagcggattttttaaccaaagaagtgcaa

SEQ ID NO: 883 - DNA, 284 bp, Glycine max
  Clone ID: 701037943H1
gtgaaagagaatccgaggcgaagagaagagaaaaattaagatggaggggaaggagcaggatgtgtcgctgggagcgaacaagttcccggagagacagccgattgggacggcggcgcagagccaagacgacggcaaggactaccaggagccggcgccggcgccactggttgacccgacggagtttacgtcatggtccttttacagagcagggatagcagagtttgtggccacttttctgtttctatacatcatgtcttaaccgtcatgggagtcgccggggctaa

SEQ ID NO: 884 - DNA, 285 bp, Glycine max
  Clone ID: 701037944H1
gcaagctagctaggttgaaaatagtttggttttgtagtaagtgaggtgaggtgccaaaatggtgaagataactcttggtactttcgatgactcttttggtgttgcctctcttaaggcttatttggcagagttccatgcaactctgattttcgtgttcgctggtgttggttcagccatcgcttacaacgagcttacaaaagatgcagccttggatccaacggggctggtggcagtagctgtggcccatgcatttgcactgtttgtaggtgtctccgtcgcagccaa

SEQ ID NO: 885 - DNA, 289 bp, Glycine max
  Clone ID: 701037945H1
cgaaaacccccaactccaacctctgttcatcgtctaccgcgctttcttttcaaccagaactatgattaagctttttaaagtaaaggaaaagcagagagaacttgcagaaaatgcaagtggcggaccacctgttaagaagcaaagtgctggagagttgcgtcttcacaaagatataagtgagctgaatctaccaaaatcatgtaccatgcaattccccaatggcaaagatgatctgatgaactttgaagtttcaattcgacctgatgatggatattacttaggtggcaca

SEQ ID NO: 886 - DNA, 295 bp, Glycine max
  unsure (1)..(295): unsure at all n locations; Clone ID: 701037947H1
attagggtttgccgattganagagaaagagaaatgggagaacgaaaaggnatcccaatggctttggggctcttggcgatgatcctcttcttcattgcttcctcttcctctcacctcgttcgcgcttccggtgacgccgacgacgcgatcttctacgagtcgttcgacgaggattttgatggacggtggattgtatccgacaaggaggattacaatggtgtctggnagcatgccaagagtgatgggcatgatgattatggacttcttgttagtgaacaagccaggnaatatgctat

SEQ ID NO: 887 - DNA, 102 bp, Glycine max
  unsure (1)..(102): unsure at all n locations; Clone ID: 701037948H1
atttaagantngctctaagangaanaaaaataccgatggttgtgtgcttgcttgttgccatacttggctctgacattcctctgttgtcctgctgcctatgac

SEQ ID NO: 888 - DNA, 285 bp, Glycine max
  Clone ID: 701037949H1
agtgaacagctttaggattctggaggaggagggcatgcatatgccgaccaacacgaggatgaaagcttcaaatttgctgatgcaactgatctcatgtggctcaatatcagtgaaaaaccatagttttggccttattccttcctataagcccaggttttccagttcaaaatttccttccccgctgttctcaacttcttttgtgttgggggagtttgattgcttagccgagaatccaaagctgatgagtctcagattggaagacaaagaatattttagtggaagcta

SEQ ID NO: 889 - DNA, 276 bp, Glycine max
  Clone ID: 701037950H1
actttggaaaggcttattctccgctctcgtctgaaacctgaaaccctttgttcttcgtcggcggaagcatgtcatcgtcatcatcaagcaacgcctacgacgtgccatgggtagaaaagtaccgtcccagcaaggtcgccgacatcgtcggcaacgaggacgccgtctccaggctccaagtcatcgctcgcgacggcaacatgcccaatctcattttatccggtcctcccggaaccggcaaaaccactagcattctcgccctcgcgcacgagcttc

SEQ ID NO: 890 - DNA, 282 bp, Glycine max
  Clone ID: 701037951H1
gctttgcagagtataagatctggtatgctcttgctcccacgtctctgattgattacttgcaagcttcatctgcactcatggatcccaaccagcccgtgggtgaaaactacgccaatcccaggacttgcttctttcatgtcctcttcaaggctgcagccttggcattttacattctctcggccctctttattgataactttgtcatcattttcgtggtgaccgttcttcttgccgcccttgatttttgggtagtgaagaatgtgagtgggcgaattttagttg

SEQ ID NO: 891 - DNA, 281 bp, Glycine max
  Clone ID: 701037952H1
agaaagaagatgagcagcaactcaggaaaagtggtgtgtgtgactggtgcttctggtttcattgcttcatggatcatcaaactgcttctccaacgtggttacactgtcagggccactgttcgcgacccatctaaacccgaaaaggttgatcacttgctcaaacttgatggtgcaaaggagaggctacatctctttaaggcagatctgctggaagaaggttcctttgactctgcttttgagggttgtgatggtgtctttcatactgcttcacccgttcattt

SEQ ID NO: 892 - DNA, 283 bp, Glycine max
  unsure (1)..(283): unsure at all n locations; Clone ID: 701037953H1
ggttaagaagcatccctttagcatgagtgaaattaaatccttggtacggcaacttcttgaaggtgtcaagtatctaccatgataattggnttatccatagggncttganatcatcaaacatcctgctgatccatgatggggagcttaanatatgcnactttnggttgtcaaggcagtatggaagcccgctgaagccatatactcctgttgtggttacactatggtacagagcacctgcccttttgctgggtgctaaagaatactcaactgcaattgacatgtg

SEQ ID NO: 893 - DNA, 282 bp, Glycine max
  unsure (1)..(282): unsure at all n locations; Clone ID: 701037954H1
gtcgtttcaactcgcggcctctgaacctcttcgaaaccctcgttaaaacctaccgagactccgggtccgctcccttcgtcttcgatttgttgatcaaggcgtgtttggattccaaaaaacttgacccttctattgagatcgttcgaatgttgctctctcgcgggatcagccctaaagttagcaccttgaattctttgatttctagggtttgtaaaagtcgaggggtggatgaagggtatgcnatttaccgcgagttttttcggttggatgaggaaaacaacg

SEQ ID NO: 894 - DNA, 283 bp, Glycine max
  unsure (1)..(283): unsure at all n locations; Clone ID: 701037955H1
ttggcatggccattcaaatgtcttcttttgtctttgtttctcttacaattttattttgcttctcttccttggagaagagttttgcctttcaaacaacaaaggaggccacagaaagcaacaatcttcatcaatatactcatcttgttcacctcagctcactccttccttcatcttcctgcagctcttctgccaaaggtccnaaaagaaaagcatcattagaagtggtacacaaacatgggccatgctcccaactgaataatcatgatggcaaagcaaagtctac

SEQ ID NO: 895 - DNA, 286 bp, Glycine max
  Clone ID: 701037956H1
gagcgagcgagcgagcagtttcaaagagaggatttgggattgggaaggcgagggattgcgctgcgtctcttcctcttctactttcgattcatccctcattcataatcttccaatccaacaacctcagcctcacactcacacatacacacatctgaacgcgtatcgtccctcccatggcttcaaagcgcatcctcaaggagctcaaggacttgcagaaagacccaccaacttcttgcagcgctggtccagtagctgaggacatgttccattggcaagcaacgattat

SEQ ID NO: 896 - DNA, 281 bp, Glycine max
  unsure (1)..(281): unsure at all n locations; Clone ID: 701037957H1
ctcgacccgaaaacaaaggtcaagattaaccgtggtgttgccatctgtcacttggacaccnccgattggagcccgacccatggagcattcatctcgttagggtcgggtccaggtcggattgaggtgtgccactggatcttcgagaatgacgtggcgtggaccattgtgaagtgagaaaagcgaacatcagaataaggaaggaagaagagttacctctataggaaattanagttaaattttttaaaaaaagcacttctgttctgctaagaaaatttagcagt

SEQ ID NO: 897 - DNA, 271 bp, Glycine max
  Clone ID: 701037958H1
ccaatcaaaccaaacaaaacataagcaccgctcttttctctccgaaatccccatctccctttcacttctgagctctggacgagatcccagatctcaccatctttcacgcactcttccatcagattcaccctttcgtttaacgcaaactcataacttgaaggttaatggctgctccaccggcaagggctcgtgccgattacgattatctcataaagcttctcttgatcggtgacagcggtgttgggaaaagttgcctccttctgcgtttctc

SEQ ID NO: 898 - DNA, 104 bp, Glycine max
  unsure (1)..(104): unsure at all n locations; Clone ID: 701037959H1
aaacaataggaaaacaaaagaccagctagctgattatnnaaatcatgttctcatttatacntttatgaaatgtttctcatcattttgaactacttttatcggtc

SEQ ID NO: 899 - DNA, 289 bp, Glycine max
  unsure (1)..(289): unsure at all n locations; Clone ID: 701037961H1
ctagacactcatctcactcgcgccatcgtagggtttctccttttgtttcgcaacatggttgccgctaagaaaactangaagacccatgagagcatcaacaacaggctcgctcttgtcatgaagagtggcaaattcaccctcggttacaagaccgttctcaaatctcttaggaactccaaagggaaattgattatcattgctaacaactgcccccctttgagaaagtcagagattgaatactatgctatgttggcaaaggttggagttcatcattacaatgggaacaatg

SEQ ID NO: 900 - DNA, 93 bp, Glycine max
  unsure (1)..(93): unsure at all n locations; Clone ID: 701037962H1
ctttttacttcccctatggctcgtcactccttgctcttagccctcctcctcttcgccgcngtnnccaccgccgcgatggcggtggcgcgtccg

SEQ ID NO: 901 - DNA, 293 bp, Glycine max
  unsure (1)..(293): unsure at all n locations; Clone ID: 701037963H1
agaaagagaaaatcatgtcaacagcagaagctcctccttctttccaagaagcagcgcgatgcgttgtctgcaattgcagtttcaacactttcagaagaaggcaccactgtcgatcctgtgggagaacattgtgtaatgaacatncatcaaatcaaatggctttaccacaatttggcctttactcaaatgtccgagtatgtgctgattgtttcaacaacttgcggtctgggaaggatgaaccacatccttcttcagacggagtaaacagtgtgacagatacaatttctaaatta

SEQ ID NO: 902 - DNA, 106 bp, Glycine max
  unsure (1)..(106): unsure at all n locations; Clone ID: 701037965H1
tttncgtttctcatcagagactnnacacagtccaatttcaaaaccgaatcgagtttaaanttgaatttcattttcaacttccctgtgatgccttacacggtccgag

SEQ ID NO: 903 - DNA, 284 bp, Glycine max
  Clone ID: 701037966H1
gtaaaatacatccccactgaagttcaagttcttgtgtgtaaaatggccaacattttcctacacaatgggggcaacacttgcaaggctaccctctatctcttattcataaccacagccttttttatcgcaaactctgcaaggattctagatgaagtggaatcccaaccccaagccataggcaatctaccagcacctggagctaccaatccttcactcacaacagctccagtcaccaccacaccacagatagatcctgccaccactttgccaagtggccaaacatc

SEQ ID NO: 904 - DNA, 280 bp, Glycine max
  Clone ID: 701037967H1
catttctatatagctaaagaaagtgatactattaagcataattaatataatggggtacatgtgcattaagatttcgttttgtgtgatgtgtgtgctggggttggtgatcgtgggtgatgttgcctacgctcaagattcagcagaagactacgtgaatgcacacaatgcagcacgagcagaggtgggttctcaatcaccaagacaaacagtgattgttccaagtttggcttgggatgatacggttgctgcttatgcagagagctatgctaatcaacgcaaa

SEQ ID NO: 905 - DNA, 282 bp, Glycine max
  unsure (1)..(282): unsure at all n locations; Clone ID: 701037968H1
aaaaatttcaagccttatctcatagcataagcagagccccaagttacacccacgttcagtgagtgacattcctaccgtttcaaagttttccaaccgcattcccaatggatcctcaagctccggcgacgggcaccaccgttcggagcgccgcggaaccatctcaacctcagccaccaaaaccatcccctcctctccctctccctccaccttccacatcatcancccctncacaccctcccccaatccctaaccctaaccctaaccctagcccaggcccaggcc

SEQ ID NO: 906 - DNA, 279 bp, Glycine max
  unsure (1)..(279): unsure at all n locations; Clone ID: 701037969H1
gcgcagaagaacctcctgaaattcgatcgcttcattcattcacgttttgctttcttcagattttcgtcaatattagagattctacgttcgcacgattatgaagatgatgctatagcagcagcagtagaattcgttattgcaaaagaagaagaaaatggacgatagaggtagctcattcgttgctgttaggagaattcctcaaggagaaacctgccatccaaattctggaggaatgctgcagaggatacagagacgtatagatgttccatntgatagttc

SEQ ID NO: 907 - DNA, 280 bp, Glycine max
  unsure (1)..(280): unsure at all n locations; Clone ID: 701037970H1
ctttttccttcaagtcactaagataatggcaagcatttataacnttccatcacacataaaagcctgggtctattatgaatatggaaacatagaagagattctcaaatttgaatctaacatacccataccagacatcaaggaagaccaagtgctcatcaaggttgtggctgcagcgcttaatcctgcagattatatgagggctcttgggtttttcaaggacactgatgcacccttacctattgttccagggtttgatgctgctggtgtggtggtgagagtg

SEQ ID NO: 908 - DNA, 277 bp, Glycine max
  Clone ID: 701037971H1
ggtgagtgtgagtgagtgtatcaatcggccacacagaaatgggcagtgcttctctgattccagtttcctggttgccttggcggccactttctcctttcaagggaacggtgaaaaccttggtcgcaaaaccatggctgaagaagattcagcaagcaagacccctcatttccgtggttaacaaggctgcctctctatcttcccccgtgacagcacccagcgtcggcgttcggtttcggctggacaattggggccgcaaccgggttcgaggaagaggcta

SEQ ID NO: 909 - DNA, 282 bp, Glycine max
  unsure (1)..(282): unsure at all n locations; Clone ID: 701037972H1
cgcataatctagggtttgttcgttggttcgcaacaatggcgatgaggagattctacaacgagatcaaggggaagagggtgagcgaggttccggagcacgtgaagccgatgctgtcgctgaactacatcaagaaggcgattcagcgangcttcgataattaccatgccaagtacattgaanccagctcccccgatcccatcttccatgtctgctacggcggcatgatcttctcctacctcgttgctctcccccacgagcgccgccacctccagcacgcccagg

SEQ ID NO: 910 - DNA, 281 bp, Glycine max
  Clone ID: 701037973H1
cgcctccacccccgcaaatcctcgatgatgctatttacgccgattgacaccacactcctcaaaaagcaccttggacctcctcatcaaagaagtggagaagaaagtccatcaaaggtcggagattagagaggacacaacgaagatggtgaagaaggctccacggttgccgttgatgaagtaaagggatagcacggagagagaaatggaggaaatagagaagcatgaaaaaaggatggtggcagcgatgcgttactaggatcgacagacaaagacaatgatgg

SEQ ID NO: 911 - DNA, 279 bp, Glycine max
  Clone ID: 701037974H1
gtgattctgaaaatctgaaatttcatttctctctgtataaatatcctagtccttatcagcttcactatttcgattgacatcgccgaagaaggtattgacgtcgatgatgaaaatgaaattggtgaaaacattactgcttctcctttgtgtgaaactcttctgttatgcagtgattggtgctcctcaaacttgtcctgctaacaatgaggataaatgcggcgattcagatgaatggaaaggggagtttttccctgacattcccaaaattaaatatgaggg

SEQ ID NO: 912 - DNA, 282 bp, Glycine max
  Clone ID: 701037975H1
gggagaaagggtgtgagaatggagagcaaagaggaagatgtaagggttggagcaactaagttctcagaaaggcaaccaattggtacagcagctcagggtgacaaggactacaaagaaccacccccagcacctttgtttgagcctggtgagctaaagtcatggtccttctacagagctggaattgctgagtttgtggccactttcttgttcctctacattaccatcttaactgtcatgggtgtcaacaggtcaccctccaagtgtgcctctgttggcattcaa

SEQ ID NO: 913 - DNA, 281 bp, Glycine max
  unsure (1)..(281): unsure at all n locations; Clone ID: 701037976H1
gccggtggttcgtgtggcttttggcggtactaggcatcatcggagccacactcttcatagtgagcttgatccaaacctcggagaacaacttcctatgttccataacaagaacgatnnnnnnnnnnnnnnnnnnnttcaccgatggccccacatcgatgcaactcaaagccatcctccactacgcgacctctcagattgtccctcaacaatctctttccgagattacaataaccttcgacgtgctccaaagcctccaccgccccgccaattcctcgtgtttg

SEQ ID NO: 914 - DNA, 286 bp, Glycine max
  unsure (1)..(286): unsure at all n locations; Clone ID: 701037978H1
aaaagagtagcgggcagtgacaaagcaatagcgtggagtgggtcttgcgttgtgttggaatcccaaattcatttctgtttctcattctcaattcttcttctattctcattctgatttgccacacacgcagaaaggntgaaaatagtgggacttgattcactggaggtggagaaagatggctaacaacgcagctgcttgtgctgagagagcaactagtgatatgctcattggtccagactgggcaatcaacatagacttgtgtgatatcattaatatggaccctggg

SEQ ID NO: 915 - DNA, 289 bp, Glycine max
  Clone ID: 701037979H1
gttcttacacatgctagaaactttttcttttcacattcatcctgaaataaaaaaaaaaattattagatttatattctcttagctcagaacaagacttaagagttaagagggtcacctgttttacaagttttctgatgattaaacagtattgattggctatattattatggtttattgataacactggttattcactagaaatgaaaaagaaaaagaatactgtgatcaatagtttaatacttttgttaccttgcaattttgaaggaaaggagcaggtgtttgtctatcc

SEQ ID NO: 916 - DNA, 156 bp, Glycine max
  unsure (1)..(156): unsure at all n locations; Clone ID: 701037981H1
ccactcttggtggcacgcggattncagacccgcaaangaaatattgctgcgccgctggaccctgcagcattctcggatgcagtggtccagatttatttggataatgctggtgatctggaacttattgctaagagtattgaatcttcagaccttaac

SEQ ID NO: 917 - DNA, 273 bp, Glycine max
  unsure (1)..(273): unsure at all n locations; Clone ID: 701037983H1
acaaaaaggccactagctctggggagaagaatgttctcatttttgatctcggtggtgggacttttgatgtctctcttctcaccatcgaggagggtattttcgaggtgaaggccactgctggtgatactcacttgggaggtgaagattttgataacagaatggtgaaccattttgttcaggaattcaagaggaagaacaagaangatattagtggaaatgccaganctctgaggaggttgagaacagcatgtgagcgggcaaagaggactctct

SEQ ID NO: 918 - DNA, 276 bp, Glycine max
  unsure (1)..(276): unsure at all n locations; Clone ID: 701037984H1
cttacaaaagtttgttttcaaagtgtgttttgtttcccaaatcanactcttgtgaccacaacccttcctcctctttcttttgaaacctctttttttctattccccaaccaaacaagcaaacgctactcactcatcatcactgagatcatggctcctaatatcaccactgtcaaaaccaccatcaccgacgctcaagccaaggtcgccaccgatcatggtcgtgcctacgtcaccttcctcgccggaaacggtgactatgtgaaaggtgtcgttggc

SEQ ID NO: 919 - DNA, 274 bp, Glycine max
  unsure (1)..(274): unsure at all n locations; Clone ID: 701037985H1
cgtccgcgagcttatagctgatgatgcctggttgaatggtganttcattactactgttcaacaacgtggtgctgcaattatcaaagctagaaagctttcaagtgcactatcagctgctagtgctgcttgtgaccatattagagattgggttcttggaactcctcagggcacctgggtgtcaatgggagtatattctgatggttcctacaatgttccagctggactgatctattcattccctgtcacttgtgccaatggggaatggacaatngtt

SEQ ID NO: 920 - DNA, 276 bp, Glycine max
  Clone ID: 701037986H1
gaacagtataagcttttctgaatgtggagggattgaaattgaggagaattgggataaggtcaagactgtatttatgccaacaggagtgtctcttacatcagagagtattgccccacttgttgcaacacttcccttagagatcaagggagaaattgaggaatttctcaaggtgattttcactctatttcaagacctggattttactttcttggagatgaatcctttcactttggtcaatggaaagccttatcctctggacatgaggggcgaacttga

SEQ ID NO: 921 - DNA, 277 bp, Glycine max
  Clone ID: 701037987H1
gtcttttttcactcttcagttctcgttgttgttcttcgctttcctgaaactagggttttcaatttcgattcattcgttaataattaaagatgtttgggagggcaccgaagaagagcgataatacgaggtactacgaaatcctcggcgtctcgaagaacgcttcgcaggatgatctgaagaaggcttacaagaaagccgccatcaagaatcaccctgacaagggcggtgatcccgagaagtttaaagagctggcacaagcatatgaggttctgagtga

SEQ ID NO: 922 - DNA, 154 bp, Glycine max
  unsure (1)..(154): unsure at all n locations; Clone ID: 701037988H1
gggctcccaagggtttaacctttctggctgtgttaatatgcgtttcagcactgtcactgagtccttctgttgcgggggaagggcaaaataatggccttgttatgaacttctacaaggaatcatgccctcaggctgaagacatcntcacagaaca

SEQ ID NO: 923 - DNA, 277 bp, Glycine max
  unsure (1)..(277): unsure at all n locations; Clone ID: 701037990H1
ctttcctcttggtcttaaaccatgaccaacccaaaactaggttangccggaatctccgattccggcaaccacattccctcctccaagaaaaaccacaagaagctccttctctctctattggccaccctcctcgtggcggcctccgtggtggccattgttgccggagtnaaaaacaaaaccaaaaactccgacaactccgacaccaccagcacctccctctccctctcccaccactcgcacgtgatcgttaagagcgcctgtagctccacattctatc

SEQ ID NO: 924 - DNA, 64 bp, Glycine max
  unsure (1)..(64): unsure at all n locations; Clone ID: 701037991H1
tctcttgctgtntgtctgatctatctctcttcttcccntctttganccannctcctcnttctcc

SEQ ID NO: 925 - DNA, 276 bp, Glycine max
  unsure (1)..(276): unsure at all n locations; Clone ID: 701037992H1
gcaggaagaaatcatggaaatgcagaaaaataaggatttggaccctgcatgcagaccaagggtaagtaaaatacactgcttgagaaggacacttactggaccatggtagattatgtgaatgtgagtcattgtttccaagtgacatctacacgaaggaagccattatgtcataagggctggggtatatatatgtatgtgagacgtgaggatgatatacaaganaacacaaaagctttttcgtgttagtaaacgatgcgtattcgtgttgtaagtttt

SEQ ID NO: 926 - DNA, 280 bp, Glycine max
  Clone ID: 701037993H1
agacgaggaggatctacttcatgacatcaacgtatacagaaaagttttgaaccttcctgttctggatgaaagtggcaaagcttcttgcttagctgaagagatagcagaaaatctagagcacacgaaatgtgaagactttcgtgactactaccctctgcctagttacacctccaaaattcctaagttccaaaagagcataaacaaatgcaagatcaacatcaacaccacaaaagatggggtcatcatgcctctctgtgtgcccaagttggaccccgatgct

SEQ ID NO: 927 - DNA, 283 bp, Glycine max
  unsure (1)..(283): unsure at all n locations; Clone ID: 701037994H1
ggggacatactttttgttaaatgctgagaactaccactgggcaatggacttctttcttttcagctgcctcaacagctgtttatgtttatttgtactcaatatactacttctatgtgaagacgaagatgtcaggcttcttccagaccagcttttattntggatacactttgatgttttctcttggactaggaattctatgtggagctgtgggttttcttggttcaaatttgttcgtgaggnggatctacagaaatatcaagtgcgattaaggttttgagtcaga

SEQ ID NO: 928 - DNA, 159 bp, Glycine max
  Clone ID: 701037995H1
ctctttctctagtcctgttatttctcagcgcgtaaagcatggctttgttggtggagaaaaccacgagtggtcgcgagtacaaggtcaaggacctttcccaggccgacttcggccgcctcgagatcgagctggccgaggttgagatgcccggcctcatgg

SEQ ID NO: 929 - DNA, 268 bp, Glycine max
  unsure (1)..(268): unsure at all n locations; Clone ID: 701037996H1
ccgattgctagaatggaatttcgatgctcagtcatctcttttaccattctcttctctcttgctcttgcaggagagagccatgtccatgcatcgctacctgaggaagattattgggaagctgtttggccaaacactcccattcccactgcactgcgagagttctaaagcctctccctgcaggtgttgaaatcgatgaatccctaagaaattgtgtaacagtaccaaaacntcttctataagagactcatcagcaacatgaagtnancac

SEQ ID NO: 930 - DNA, 280 bp, Glycine max
  unsure (1)..(280): unsure at all n locations; Clone ID: 701038002H1
acgcattcaanccctagatttcaatctagggtttctttgnacgctaattccatcttcaaattctgccttcattcgattcaggggggaattaaattgnttctatttnntntcgaatttaccacaaattagaaatcgataaagaaaatggtgagggtgttgagaagctgcattcaatcgattttgaagctggtgaactcggtgattgggatgncggggctagccatgattctgtactccgcatggatgattagggtttggcagaggaagatgggcgaacttc

SEQ ID NO: 931 - DNA, 281 bp, Glycine max
  Clone ID: 701038003H1
ggaaaattactaaacttgtttctgatggaacatatctgttgaagcaattccttaattaggaaagcagttcagaatcttggacagtttccttctattttgccagagaatttgtaaatatatttgctgctctggtgtctccgacataccaacttcgaagaggattcggcaattgaaaaatgaaagaaaatacgtcagtcttcattgttcgttgcaagttgagtatgtgtatccatgctatttcggtatttgctatacacctcaggtagcaaatcatactttta

SEQ ID NO: 932 - DNA, 281 bp, Glycine max
  unsure (1)..(281): unsure at all n locations; Clone ID: 701038005H1
gctggagcttcgaggatattgaggttactgacatttcactggctgattacattggagttgcggcatccaagcacgccacatatgttcctcacaccgccggangnccnctccgtgaagcggttcaggaaggcgcagtgccccattgtgagaggctcaccaactctctcatgatgcacggtagaaacaatggcaaganactcttggctgttaggatcatcaagcatgctatggagattntncatttgttgactgaccagnaccccattcaggttattgttgat

SEQ ID NO: 933 - DNA, 118 bp, Glycine max
  unsure (1)..(118): unsure at all n locations; Clone ID: 701038006H1
aacaactcaaactcaagcaagcntctctcgtatnctcttagcttttattccttctctcgctctctctcnctctcttnncntgnnnnaacagctnactaagagaagntatagccatnta

SEQ ID NO: 934 - DNA, 99 bp, Glycine max
  unsure (1)..(99): unsure at all n locations; Clone ID: 701038008H1
ctttccaatttgaattgttccattttcatttctttccgcaaangttcgcaactacttnctcaganannnagtttctaagttcaaggacnataccagagc

SEQ ID NO: 935 - DNA, 282 bp, Glycine max
  unsure (1)..(282): unsure at all n locations; Clone ID: 701038009H1
gatggcttctcctcttcttactccttacaagatgggcannttcaatctgtcccatagagttgttttggcaccgctgaccagacagaggtcttacgacaacgtcccacaaccccatgccatcctctactactcccagagancttccaaggaggccttctcattactgaagccactggcgtctctgacacggctcaaggctatccgcaaacccctggcatatggactaaagaccatgttcaagcttggaaacccattgtcgatgccgtccacgccaaaggggtg

SEQ ID NO: 936 - DNA, 282 bp, Glycine max
  Clone ID: 701038010H1
gaaacaccaccatagtttttgtgtaacttaaacgtagaaaatattatcaagttgttgcacaaatcattatgggtactctccatgcttctcaagaagttcaccctcctctttctcctcatttctggatcacttttatcaacttcctttgcaggtagagtacgatccaactctatcaagaacttcgctaaagatgtgaatgcaatcgaagagggaacaccaaggaaaccactgaataaggaagaagtaagaaccatccatgagaggctcttagggctaacacaa

SEQ ID NO: 937 - DNA, 280 bp, Glycine max
  Clone ID: 701038011H1
atcaacgctgggaaggcttcaaaggggagagaacggagggtcataaacccattttcagcgtcaagagatcgtcgatcatcggacggtcgaggaccagcgtggcggtggaggtgtacgatagccccggtgtggagtacctcatcgaagttgcttcccgcagcgctgctgcaaggttttcaatgccgctaaggaacttgtggctgagattcgtcgcaaagtggaccccaccaccagcgttatgctcgggaaggaagtcttttggctctgcgtgaagcctggt

SEQ ID NO: 938 - DNA, 95 bp, Glycine max
  unsure (1)..(95): unsure at all n locations; Clone ID: 701038014H1
cttcttctggtagtttagacacctctgccaagtgcaaactccttcaccaacttcaccttctccacacaccctttcaccacncacttctctctctg

SEQ ID NO: 939 - DNA, 282 bp, Glycine max
  unsure (1)..(282): unsure at all n locations; Clone ID: 701038015H1
gcatatgcaaactatacgagacaaaaatttaaggnacattatatnaggtattgtaggtttgtttactgtaatgatcttgttccgaggttgccctacgatgacaaggnaatgatgttcaagcactttnggacatgtcttttctttaaagacgctatgaactcgaggttcttgaagagcaatggaataagaactacttctcactctggtgtgtgatacccatggcatacaacgcgattttagaaataataaggagtttcattattgcccgccaaaatggagctt

SEQ ID NO: 940 - DNA, 97 bp, Glycine max
  unsure (1)..(97): unsure at all n locations; Clone ID: 701038016H1
tgttntacgctnnngtgactanggnacaaggggtctgcttcttcccttcntgttttcaaaggganngaatttncnattttacaatttttgcatcccg

SEQ ID NO: 941 - DNA, 277 bp, Glycine max
  unsure (1)..(277): unsure at all n locations; Clone ID: 701038017H1
ttcatccgaatctgattctgatgatgattcaagtgaagataaggtatttatataatctagaaagcngattttataatgaactgctgatgatcttgactcttgcatgatttgtctgatggtatatagtgaaatgaaatgctttaagaatttaagtccaaaatactaatgattggcctganaaaaggcagaataataagtgttgattgtaacacaatgatggcattgtcattgctagatatatgagagacgtagattgttgggcagtgaagcattcctt

SEQ ID NO: 942 - DNA, 278 bp, Glycine max
  Clone ID: 701038018H1
aaaccctaattttttcttcttcaccgcgcaccacactgagaggaagagggagtgagagtgttcttcgtttgctaccttctctcagaaatggttacgttcaggtttcaccagtaccaggtggtcgggagggctctcccaacggagcagatcagcatccgaagatctaccgaatgaagctctgggccaccaacgaggttcgcgccaagtctaagttctggtattttttgaggaagctgaagaaggtaaagaagagcaatggtcaagttcttgctatcaac

SEQ ID NO: 943 - DNA, 279 bp, Glycine max
  Clone ID: 701038019H1
ggtttcttcaatcggaatcgcgaacaacatggaagtgagaattgggcaaagggtgtctcgcggaatgctccctctcctcgctctccacaccgtcagcgagtattaccgctccgaccacaaacctccgttcaccgccgccctcatcgccgccaacaccctcatctacctccgcccctccttcctcgatcccctcattccccccattgaacaagtctggttcaacccccacctcatcctcaagaacaaggacttgaaacgcttcttgttgtcgccgtttta

SEQ ID NO: 944 - DNA, 276 bp, Glycine max
  unsure (1)..(276): unsure at all n locations; Clone ID: 701038020H1
ctgtcatgtggatcttttgctggataaacttgcaacctaatttttattgatttttggatacaggtttttatgagactcgaattgcatattatgcatggaggggtgctaaaggataccgcttttctgccatccctgattattaagtgtgacggtaaatgagaaatagagctatctataccgtgaaaacatagtaatgatcaaattcggttgcaacttgtatgcttcaatggcaaagatggaacanaatggtagaaaagtgtaatcgtacttgatact

SEQ ID NO: 945 - DNA, 257 bp, Glycine max
  unsure (1)..(257): unsure at all n locations; Clone ID: 701038021H1
gaccggaaatacccaaacggnncgaggccgaaccgggccggctggcaccggttactggaaggcaaccggggcggataagcccattggtcagcccaaaccggttgggattaaaanagctttggtttttacgcagggaaagctcctaaaggggacaaaagcaattggatcatgcacgagtatcgtctcgcagacgtagatcgctccgttcgcaaaaagaacaccctaagggtatatacactccgtacttctttctagtt

SEQ ID NO: 946 - DNA, 281 bp, Glycine max
  unsure (1)..(281): unsure at all n locations; Clone ID: 701038022H1
ctctgtttctttgtttctttatcgaagtttcaacttggtttccttctaatgggaacctctcttctccgcttcccacgattgtcttcaaggccaccacgatgccttgtccccaactccatcttccatcagatcacaaagaaaccctaaccctagccccaacccttaccagactcgccggcggaggctccacgacggcgaccgctccggcatggtggtgaaaggccccagcgcgnacctcgtcatgggccatgtcaagatcctcaagagaggcgagacgctca

SEQ ID NO: 947 - DNA, 279 bp, Glycine max
  unsure (1)..(279): unsure at all n locations; Clone ID: 701038023H1
accattttctcactacggtaatcaactggcaaatacttggacaatggcctcagaaaatggagacaaactagagcttgctttcagtgctgttcctgatcccaagcccaagaaggattgggtcattttgtcccttagggtggtcgcttttttgccacagcatctgctacacttgttatggcattcaacaaacaaaccaaaggcatggtagttgctaccattggcaccaacccagtaacaattactcttactgcaatgtcncagcacactccagcttttata

SEQ ID NO: 948 - DNA, 246 bp, Glycine max
  unsure (1)..(246): unsure at all n locations; Clone ID: 701038024H1
tcacatttcctgngctataggctatagccttccataatcttataacaatggnggggaccaccagccaaagcacgtttaccttcatccctagcacaattgagacacctagtccaagcatnnctgagatttcatcatcatcaccttcccctggcggctctcttgcaagagttgcacaaagttaccctcctggatttcccagaaaggtatttgcggaggttatagggacatttctgttagtgtttgtgg

SEQ ID NO: 949 - DNA, 279 bp, Glycine max
  Clone ID: 701038025H1
catccgtctacaagaattgggttttcactgaccaagcattaccagctgatctcgtcaagagaggattggcaattgaagatccctctgcaccccatggccttcgccttgtgatagaggactacccttatgctgttgatggacttgaaatatgggatgctattaagacatgggttcatgaatatgtctccttgtattacccaacagatgcagcagttcaacaagatactgaactacaagcatggtggaaggaagctgtggagaagggtcatggtgacttaa

SEQ ID NO: 950 - DNA, 275 bp, Glycine max
  unsure (1)..(275): unsure at all n locations; Clone ID: 701038026H1
gtttgttcttgtgatcgaagctaagcgaagaaaatgggtggatcagtgagggacgtgaagtcgaagggcgaggtcgacgaggtggtggcgagtggctctccggttatcctccacttctgggcgtcctggtgcgaanttccagcacatggaccaactcttctctcacctttccactgatttccccaacgcccgcttcttaagggtcgaggccgaagagcaacccgagatttctgaggcttactccgtctccgctgttcctttctttgccttctgca

SEQ ID NO: 951 - DNA, 276 bp, Glycine max
  unsure (1)..(276): unsure at all n locations; Clone ID: 701038027H1
acaaaacacacttacataaaaaatcatccttatctatgccacttccacttggacttccacctccacccactttctctgcgccatggaaacagtacgttgtctggcatgtgtacttgttcaaggtgacatatgacctaaacaatattagaacttaatctgatcacaaggcagtttttttgagctgatctggatgggaaccggtgaaganagcacagctaaagttcctaaaccatcttctacttcttcaattcagataccactggcaccttcatatcc

SEQ ID NO: 952 - DNA, 277 bp, Glycine max
  unsure (1)..(277): unsure at all n locations; Clone ID: 701038028H1
cattcacactctgcggantcccaaagcaagcactaatctaacaaacgcaatttaaaaaccgcaacaaacttttctctctttcgttcacacacttattctctggcttctttttcttcttccattttcgcttctcgtagcattttggaacactcatggcttccattgccggatccagctgcgtcgctctccgaaccgccaatttcgcctcctccgataaccggaaaatcggtcagatccggcaatggtctccaattctcactaatctccgtcctgtttc

SEQ ID NO: 953 - DNA, 279 bp, Glycine max
  unsure (1)..(279): unsure at all n locations; Clone ID: 701038029H1
gtggtatgtgggttgctgcggcaacaaaaccattcatcaaattccaattccacagacacactacttntcttccgcttcttctgatggcaaaccaagcttcactctccttttcttcttccgtgtctcctgttcacgcgcctctcagcgcgtgggcacgcacaacggaagctttcattgcgacgaggccctcggctgcttcatgattcgcctcacgaacaaattcaacagcgccgaaatcgttcgctcccgagaccctcaggtgttggaggttctcgatgc

SEQ ID NO: 954 - DNA, 282 bp, Glycine max
  unsure (1)..(282): unsure at all n locations; Clone ID: 701038031H1
ataagttatgtatttataaaggttcttatatataaacattataaagtttgcagatcgtttagctgaactagattgttggtattacctactagctaagcattcatttattttgtaatttaaaatcgttgatgtataagaacctcttaagttnatgtatttataaataattttgtgcttcgatccttgaagacagaaaaaaaaactcatacaggtaatctcatcataatatttttagtattcctttgaaaaaaaatcaacagttatataaactccatgtataat

SEQ ID NO: 955 - DNA, 97 bp, Glycine max
  unsure (1)..(97): unsure at all n locations; Clone ID: 701038032H1
cacanctccatgtgctgctcaagcttcttctgtttnacntactacttgaagtntataactgctgcctgcaattactaatgctgcgccttccccattt

SEQ ID NO: 956 - DNA, 277 bp, Glycine max
  Clone ID: 701038033H1
attttgtgaacaagagaaattcgggaccagaagttcgatgagaaggaaaacattgtgttcatcacagtggtgtgttgtagccccgagaagataagagacaagctttgctacaaaggtggaggctctatcaagagcattgagtactggaactgcccaagcccaaggccgagaagcctaaagcagaccctcccaaagctgagaagcccaaggccgagcccgagaaaaagaaggacggtggcggcgagaagcccaaggccgagcccgagaaaaagaagga

SEQ ID NO: 957 - DNA, 277 bp, Glycine max
  unsure (1)..(277): unsure at all n locations; Clone ID: 701038034H1
gcgaaaagcaatagaattcaaagagagagtttcttgttctgtattttttgatttgatcatttcaatcttcaatttttnttttatatatccaccaatccgcaaagtgcaaatttctaatctttcacgtattgggttcttctctttccctcttcgtctccgatcgatccaattctcttcccatggctacgatcggacacaacaatctcaatgccaaattggttcttctcggggacatgggtgctgggaaatccagcctcgttttgcgctttgtcaaggg

SEQ ID NO: 958 - DNA, 275 bp, Glycine max
  unsure (1)..(275): unsure at all n locations; Clone ID: 701038035H1
gcactataganaaaaaaggacattcattcatctatggctacccttattgctcccagcaaccactctccccaagaagatgctgaagctctcagaaaggcttttgaaggatggggaactgatgagaacactgtcatagtaatttgggtcatagaactgtgtatcagaggcagcaaatcagaagagtttatgaggaaatttaccaggaggatcttgtgaagcgcctagagtctgagatcaaaggagactttgagaaagccgtgtaccgatggatactg

SEQ ID NO: 959 - DNA, 274 bp, Glycine max
  Clone ID: 701038036H1
atcgcccttccaattttcttcaattcaagcaccaaactttcttcttcaagttcccgaacctgaacccgaacccgaacccgaacctccttcgattgcgcaggctcaattgctcagtatcagacggcaccgttccgtcttcggtggtgccacggactcttcttctcttgcggtgaagtctttgttcagaagaaagcagcagaggtgtcttctgagctcaaagggacctccatatttctggttggtttgaagagctcttttaaaactagtttgggga

SEQ ID NO: 960 - DNA, 275 bp, Glycine max
  unsure (1)..(275): unsure at all n locations; Clone ID: 701038037H1
cgtccgcgagcttatagctgatgatgcctggttgaatggtnaattcattactactgttcaacaacgtggtgctgcaattatcaaagctagaaagctttcaagtgcactatcagctgctagtgctgcttgtgaccatattagagattgggttcttggaactcctcagggcacctgggtgtcaatgggagtatattctgatggttcctacaatgttccagctggactgatctattcattccctgtcacttgtgccaatggggaatggacaatagttc

SEQ ID NO: 961 - DNA, 278 bp, Glycine max
  unsure (1)..(278): unsure at all n locations; Clone ID: 701038038H1
gttgcatttcacacaccaacttcccntagaagagagaagagagaagagactcttccttccatcctgcaactcaaatcatcatgcaagactccagctcaatgaagatctcccctctggatctcatgtccgccatcttcaagggaagctcgacccctccaacgtctnnnnnnnnnnnnnnnnnnnnnnnnnnnnnnnnttcctcctcgagnaccgcgacttcctcatgcncctcaccacctccgtcgccgtcctcatcggctgcgtcgtcgtcttcatct

SEQ ID NO: 962 - DNA, 277 bp, Glycine max
  unsure (1)..(277): unsure at all n locations; Clone ID: 701038039H1
ctttttgatccatttttcattcgttgtgatcttcctcttcctcgtacacaggtgagtngactgaaaggtagcaatggcgaccaggaacttggaaaagatggcatccattgatgcacagcttaggcaattggctcctgccaaaggagtgaggatgacaaactgattgagtatgatgctcttctgctggatcggttccttgatatccttcaagatttacatggggaggatctganggaaacagttcaagaagtgtatgaactttcagctgagtatgaag

SEQ ID NO: 963 - DNA, 277 bp, Glycine max
  Clone ID: 701038041H1
agagtgcagccccttcgccttgctgaatgggatactgaagacaaagtcacattttttatgagtggaagaaattatacatttcgagattttgagaaaatggccaacaaggtatttgcacgaagatattgcagtgctggatgtctcctgccacatacttggaaaaagagttttggcatgaaattggttgtggaaaaatggaaactgttgaatatgcatgtgatgttgatggcagtgccttttcatcatctcccactgaccagcttggtaacagcaaatg

SEQ ID NO: 964 - DNA, 276 bp, Glycine max
  Clone ID: 701038042H1
ggcctcgccaccagaccaaagtgctggcttcgtatatattccatcaggttcttcaggacgcaattttcaggaagaaacccatttgccaagtcgattccatgcttgggaaagagagcacttgccttcattggcgttaaaccatttggtagagaatcaagttggagagcataccaccagactgccagtgtgtcagacccaagtatcagatccagcagctttcgattaagacacgaatccgacagaatgccttcacaaaatcggtgatatacttgtttt

SEQ ID NO: 965 - DNA, 275 bp, Glycine max
  unsure (1)..(275): unsure at all n locations; Clone ID: 701038043H1
ttcaattccattcctttactttcatttcatcctccacaattttccaattccatttctctttcccaaattctccctaaacaagtaacaccaataaacacaagcttctctctttcagctcttggagggtttcaattctccattggatccctcatctgggtacctttcaaatttgaggcaccttcgatcctgtggtccaagtttgcagctttgactttttttctcaacatgggtgggagcgagagctcgaagggngtggttatgggtcgtttggttga

SEQ ID NO: 966 - DNA, 273 bp, Glycine max
  unsure (1)..(273): unsure at all n locations; Clone ID: 701038044H1
cataattagcatagttattatggggagggttgagtactccccattgtttgagacaagaaggtgcagaggaaggttcatctacaggtctttgcaatctcattatttgtgaccatatgctttatatggcattacagatttagccacataacaaagggtgaagatggaaactgggcactgntggtatgcttgcttcagagctgtggtttggcttttactgggtccttactcaagcccttagatggaaccttgtgttcagacaacccttcaaaaaca

SEQ ID NO: 967 - DNA, 278 bp, Glycine max
  unsure (1)..(278): unsure at all n locations; Clone ID: 701038045H1
ctcgccgtcctccactccctccaccaaaatccgagtgntcgagcgcaacggccgcgtacgggggacgcatcgccaccgtgacggtggcggnccgagaccttcgaggccggagcgtccattctccatccaaagaacctgcacacatggattacgttaagatcctgaagctgaaggtcaaagagccgaccgcgtcggaggattccctctctctcggcatttgggatgggaacaagttcgttttcaaaacggtgtcgccgcttagttccactgttcccctc

SEQ ID NO: 968 - DNA, 279 bp, Glycine max
  Clone ID: 701038046H1
agctagctagctcataattacaataatgggttccctccctcacgtagtagaggactgcatgggcttcctccaactttatagcgacggttccattttccgttccaacgacatagaattcaaagtttcacccattcaagacaactccataacctataaagattatctctttgacaagagattcaacctttctcttcgcttctacaagccccaacacgtagcacccatagacaataacaagaagcttcctattgtgatgttccttcacggtggaggcttttg

SEQ ID NO: 969 - DNA, 279 bp, Glycine max
  Clone ID: 701038047H1
tcataataacttgtacattgagagcactactacttggagaattatttacctaccaacttttcaatttcaaagccaaaaatgtcaaccaccattgatgtccctgcagaaacgacaagcaagaataatattggcaatggaattagaaagttccaggtgcacccccaaggccagaaggagggtggaagaaagggttagccataatagactttgttctaaggttaggtgctattgcatctgctcttggtgctgctgccaccatggcaacgagtgatgagacat

SEQ ID NO: 970 - DNA, 126 bp, Glycine max
  unsure (1)..(126): unsure at all n locations; Clone ID: 701038048H1
tncnagantagctctaagangagancaaatacgatggttgtgtgcttgcttgttgccatncttggctctgacatcctctgtngtctctgcctatgaccctagtcctcttgcaagatttttgtgtgg

SEQ ID NO: 971 - DNA, 276 bp, Glycine max
  unsure (1)..(276): unsure at all n locations; Clone ID: 701038049H1
accaaatctccgttgcttccttactctccagcgcctactcatatcacagatcatggataattcatagtactactatttcgtacaagtattcacgaaccattcnattccaatttccattcagcagcaaccaaatcaccatctcttttgcatcattagttttttagttagattaccctcttccgtttcaccttcctttcatgcttacgtcaccaccactcactctttttctaccctaaaccattgaatcgatctaaatctctcccaaatcgcaaaccc

SEQ ID NO: 972 - DNA, 274 bp, Glycine max
  Clone ID: 701038050H1
gtttgttggttcgagccacgccctcaaaggaagccaatgaagcaaaagcattttcttcatctacatgaccattagttccaaaaacccactgactactacgagtgcccgttgtctgcttcagaatcactccctgaggaacccccgaatccgaatcgcttgacgaagacgaatcactgcttgaactgccagagctactagaactactacttgcatggcctccaacaacatctttatctttctcaatctccacaggggggaacatactcgttggcat

SEQ ID NO: 973 - DNA, 275 bp, Glycine max
  Clone ID: 701038051H1
ctcaggcgctgctgcccttcagtccttcagcaatggtttacgtgaagtcacagaaatcaaaagcctacttcaagaggtatcaagtccaagttcaagagaagaagagagggaaaaaccgattaccgtgccaggattcggttattaatcaggacaagaacaaatataacaccccgaaatatcgctttgttgttcgtttcagcaacaaagacattgttgcacaaataatatctgctagcattgctggcgatattgttcttgctgcagcatatgcacat

SEQ ID NO: 974 - DNA, 273 bp, Glycine max
  Clone ID: 701038052H1
cttgtttctgtctgcaattttcaattccaactctctctcacatgcaattctccatccaacaaaagtttctcatcatttctgtttcccataagcaattaattaaaatactgaatttggtataatttctttctcaaatatattagttttacaattattttatttctttttccttggattgtagccggggtttcttgttgtgagagaaaaacctttattctctgttttgggaacatctggggtctcaatttagtggaagttaaattttgaaacttt

SEQ ID NO: 975 - DNA, 275 bp, Glycine max
  Clone ID: 701038053H1
ttatgattgggacaacaagagattgaatataggaactacaaatgatcagcatcaaatatatacaagtttagagcaagtggtagggacaggtgcagatccaaaacctggactcttcccctcttatcccagcatgaactcaatacagctccaagtttgccattggccacatggcttccacctcaagcttctgcacctgccctccttggaaaaggagcaaggcaatggcgaagtggagattggatgtgctcaaattgcaacaatcataattatgcttc

SEQ ID NO: 976 - DNA, 275 bp, Glycine max
  unsure (1)..(275): unsure at all n locations; Clone ID: 701038054H1
gtggttgtgatggtggtgtataacactcgatccagcacataacaatggaaacgcagctttacgtgttttctctcctagattctgctcttaaacgccgtcgttttcaaactctttttttccccttcgcttctctgtctttgtaaccgaaaggggggaaaatataattaacaccgatttcgcgaccaattcttcttctgcgttgaattgggacaacgagaaattggatctcagtttttggcaggnnataaaaattgcntttgagtgtnaaatnacag

SEQ ID NO: 977 - DNA, 276 bp, Glycine max
  Clone ID: 701038055H1
ccgaacttctccttctccttctcccctctcactctcactctttccatggccgcttcaccacaatcctccgctccgactgtgtcgcctggtgatgctaacatcaacaaagatggtgtatttcaattgattcaagcacatcaggaaaaagctgctagacttccaccagttgaggaaattcgaactgtccttgatcgtagcgtgcgtgggatgctctctacattctcgaagaagttcgatggttatccatcagggtctatggttgactttgcttgtgat

SEQ ID NO: 978 - DNA, 82 bp, Glycine max
  unsure (1)..(82): unsure at all n locations; Clone ID: 701038056H1
ggtcantggacagagtgatcatgctgtcgatatacgacaangacgnngtnaatttactnccgggaatnccctgattgnncat

SEQ ID NO: 979 - DNA, 276 bp, Glycine max
  unsure (1)..(276): unsure at all n locations; Clone ID: 701038057H1
aganagcagactttcttttctcttttgtagatcgagatcgtagaaattaagaaaggcatgaatagaggtgttttgcaaagctgcaccggtgcaacaaatgatggccagaaaccctaacaactggtggaacatcaacaccatggcnnnnnnnnnnnnnnnnnnnnnnnngcacctttcttctccactccttccaactttctaactccttataaccccacttctcttcctcttccttcttggcatgacaacaatcaagagctacccgagtcatggagc

SEQ ID NO: 980 - DNA, 275 bp, Glycine max
  unsure (1)..(275): unsure at all n locations; Clone ID: 701038058H1
ctcactcttgttcttnggtctcctcctattctccgctgccgtagccancgtcgaacgaatccgacgatggagacanccttntgatccgncaagtggtgccggacgcggaggaccaccanntgctcancgcggancangacttctccgccttcaagacaaagttcgncangacctangctacncangaggagcacgaccaccgcttccgnatcttcaagtacnacttnctccgngccangtcgcgccanncattggaccccnccgtgncnaggcgt

SEQ ID NO: 981 - DNA, 271 bp, Glycine max
  Clone ID: 701038059H1
gagaaggtcaatggcagagtctgtgggtgtggctgggttcggtgtttcaggctcattctctcttactaggcccacaatcttttctcgatcttccaataatatctctctctttcgctctcaatctcatttccctgctgcgcattcggttccttgacacgttccaacccacacgtgcacgccgctgtcacttccgactccaaggccgctacttcgcttgacctaactcaacccgatctcgataatagcggcggcggtgccaaggtaacggagg

SEQ ID NO: 982 - DNA, 274 bp, Glycine max
  Clone ID: 701038060H1
tgagtttccacacccaagtgaagaagcaagagctcgaattctacagatccattcgaggaagatgaatgttcacccagatgtcaactttgaagaacttgctcggtccacagatgatttcaatggagctcaactgaaggctgttgtgttgaggctggcatgttggctctacgccgtgatgcaactgaggtgaaccatgaggactttaatgaaggtattattcaagtccaagcaaagaagaaagcaagcctcaattattatgcataggctggatttt

SEQ ID NO: 983 - DNA, 274 bp, Glycine max
  unsure (1)..(274): unsure at all n locations; Clone ID: 701038061H1
gtccatatagtattctttttgtccatagaatcccaattagaaaacagagcttcagagaaggtgagaatggtctaagangccttgcatggcgagccaaagaattggagagcacgggtttgtctgagtcgggaccttcaagtcccatgttccttatggagttcttcatgggattagtacttcatcaggcctaatcaatcaagggtctgcttttgattttggggagttggaagaggcaattgttctgcaaggnattaagataagaatgatgaagccc

SEQ ID NO: 984 - DNA, 224 bp, Glycine max
  unsure (1)..(224): unsure at all n locations; Clone ID: 701038063H1
gccatggttctctccaaaaccacctnccgaatccgacgtctctgtccactcaaccttcgcttctcgatatgtcagaacttcgcttcccagtttaagatgccggaggagtcgataccaaaggaggcagcgtatcanataataaacgatgagttgatgttggatgggaacccaaggttgaacttggcatcatttgtgacaacctggatggagccagagtgtgataa

SEQ ID NO: 985 - DNA, 89 bp, Glycine max
  unsure (1)..(89): unsure at all n locations; Clone ID: 701038064H1
ctcaacggcacttganaccnttnatgngcnatttgatccagattttatcaacattaggacanaggctncgtgaagttctgcaaagggaa

SEQ ID NO: 986 - DNA, 274 bp, Glycine max
  unsure (1)..(274): unsure at all n locations; Clone ID: 701038065H1
ctactgatgcctttttgggcacccagatttccaccattctgngnaacttcacacactatataacagaaaatgagggggggcttatggcaactcgggcaatcaatcactcgccgtcttgcccagggtgataagaaggctgttgctcgtaggtattttgcctcagatgctgagctgaaaaagacagtcgtttatgacttccatgttgctaatggagggaagatggtgccatttgctggatggagcatgccaattcaatataaggactcaattatgg

SEQ ID NO: 987 - DNA, 272 bp, Glycine max
  Clone ID: 701038066H1
tgagaatgagctgaaggacaagaagttttttggaggagaggaaattgggttggtagatattgctgctgtcttcatagcattttggatccctataattcaagaagtattgggtttgaagttattcacaagtgagaaattcctaagctctacaaatggagccaagagttcatcaaccaccctgttgtcaaacaagtccttcctcctagagatcaactttttgccttctacaaagcctgccatgaaagtctttctgcttcaaaatagacttattt

SEQ ID NO: 988 - DNA, 273 bp, Glycine max
  unsure (1)..(273): unsure at all n locations; Clone ID: 701038067H1
ctaactccctaccctattccgctttctctcatccatcatgaaangaggaaagtccaagaccgaatctaagagagccgatgccaaacttgctgtgaataagaagggcgccgccaccaagactaggaaacccgccggaaagggaaggcagcgaaagatcctaacaagccaaagaggcctccaagtgctttcttcgttttcatggaggaattcaggaaggtgttcaacaaggaacatcccgacaacaaagcagtgtctgctgtgggcaaagctgct

SEQ ID NO: 989 - DNA, 271 bp, Glycine max
  unsure (1)..(271): unsure at all n locations; Clone ID: 701038068H1
ccctcttcattgccaatggaaggnagggcgtgatatatggtggcaggatgtcattcctcaatatccaactacttgtccgttggagtgggttgatgcagaggatccactttttctactctatacaagtgggagcacaggaaaacctaagggtgtcctccatacaactggtggttacatggtgtacactgcaacaacatttaagtatgcatttgactacaagccgtctgacatctactggtgtacagctgattgtggttggattactgggcac

SEQ ID NO: 990 - DNA, 253 bp, Glycine max
  unsure (1)..(253): unsure at all n locations; Clone ID: 701038069H1
gtgtgattgagtttggctgtcacaatctctctctcatacgaaaatgtcactcatcttgccaaactgccgccttctacaactctctcttctgcatctcccattcacagaacaataacaagtacaccacattctccttctcgcttcgtcctccaacaactcttcacttcaatccccacaggnccctccctctaattngcncttccaattcttctatcaatnctgcttngaccactganctggacgctgtgtccgc

SEQ ID NO: 991 - DNA, 256 bp, Glycine max
  unsure (1)..(256): unsure at all n locations; Clone ID: 701038071H1
tgtgagcaaagaaagatagtgagtgaagtaactgaagagaagaaaaaatgccgngcctcaacctcagcaccaacgtgtccctcgaaggcgtcgacacctcttccatcctcgccgaagccactcctccgtcgccagcataatcggcaaacccgaagcctatgtgatgattgtactgaaaggatcagtacccatagcttttggtgggaatgagcagccagcagcttatggagaattggtttccattggtggtcttaac

SEQ ID NO: 992 - DNA, 273 bp, Glycine max
  unsure (1)..(273): unsure at all n locations; Clone ID: 701038072H1
gcgaagactagatctgatctgagagantggctcctcggtctagcagcaaggacgcccaagaccttttccgcgctctttggtctgcttatgctgcaacccccactaatctcaagatcattgatctctatgtcatctatgacgtattcaccgctttcatccaggttgtttacatggctttggttggatcatttccatttaactccttcctatcaggagtactttcttgtgtaggaactgctgttcttgctgtttgtctcaggatccaagtgaata

SEQ ID NO: 993 - DNA, 275 bp, Glycine max
  Clone ID: 701038073H1
ctcactcttgttcttcggtctcctcctattctccgctgccgtagccaccgtcgaacgaatcgacgatgaagacaaccttctgatccgtcaagtggtgccggacgcggaggaccaccacctgctcaacgcggagcaccacttctccgccttcaagacaaagttcgccaagacctacgccacgcaggaggagcacgaccaccgcttccgtatcttcaagaacaacttgctccgcgccaagtcgcaccagaaattggacccctccgccgtccacgggt

SEQ ID NO: 994 - DNA, 271 bp, Glycine max
  unsure (1)..(271): unsure at all n locations; Clone ID: 701038074H1
gtttganacattgattcgttgtttcctctgcaaaattaaatcctcattgtgattgttgatgaacaattgaagtgtctctccgatttgaggattccggcgacagcaagcgatgaccaccggcggcgacggtgacacctcaaacaagagctcttccaccttatcaaacgcttcggagcttgcgtcactttcaagatctccaatctgttctctctctctctccacggcctcgatatacgctctatcggggcagttgctggtcttgctgttgcaa

SEQ ID NO: 995 - DNA, 271 bp, Glycine max
  Clone ID: 701038075H1
gcaccattacttgatgctgtttatgatgctggctttctctgtgctatttgattctgtgaaagctccaggcctcggattaggtgctaggtacatgtttaccatggcagttggtcgccttcttcgtgccataacttttgcatctacaattctgccatcagctcgcccttggtgtgctggttctcggttcagagttccgggatatcctcatcgttgggctcagaaatattatgttccctatgctacagatcatgatgctatcagccgggtgata

SEQ ID NO: 996 - DNA, 274 bp, Glycine max
  Clone ID: 701038076H1
gccaagtatcccaaattttcccccaatctcttcagacattcatccactgtccctctatagaaccattcataatccgaatcccaaaaccaaaacctagggttcccaattcacaaaatccacaatgaaagcctctttgaagtccgagaagaacacaagaaacccctcttccgtgcaaaagtcccactgagcatcctcggcaagcccttccaatccggcatagtcgctggcgaatccaaagaactcacactcaacctttgcaccttcttcgaatcgg

SEQ ID NO: 997 - DNA, 272 bp, Glycine max
  Clone ID: 701038077H1
gtgagttcaaatcaattttaggcagaaaaatgaggtgttttggtcttgtagtgataggtctagtggttgtgcttggagggttacccttctcttcaaatgcaggattagatcccttcttttacaagaagagttgtccccggtgcatttcattgtatttagagtcgtagagaaagtttcaagaaccgatacacgtatgcctgccagcctcgtcaggcttttctttcatgactgctttgttcaaggctgtgacgcatcaattttgttgaacaaca

SEQ ID NO: 998 - DNA, 274 bp, Glycine max
  unsure (1)..(274): unsure at all n locations; Clone ID: 701038078H1
ccaagacatagcaaacgatccaaactcttttttcatttgcagcatcaaaatgagtggtagcaacgatggtccgcggcagtggagctctaggtttttgaaggtggctagtgcagctgccgctacanccgccgttgccggcgtttatatgccattctttcatcctcaacctctgctagctctgagatggaagtgccgtttggcagcgcacggcgtgagagcaaagaacgtgacgatggtggctccgggtctcatcctcgcnagggtgccaccacgg

SEQ ID NO: 999 - DNA, 276 bp, Glycine max
  Clone ID: 701038079H1
gtgatttcagtgagtgatcggtgttcacttgatctcatcataatcgtcagcgtcaattgaagaagatgccgatcagaaacatacgccgtcggaaggcctgaagaggcgactcaccccgacacgttgaaggcggctttggcgagttcatctcaaccttcatcttcgtgttcgccggctcaggctccggcatcgcctacaacaagctcaccgacaacggcgctgccacccctgccggcctcatctccgcctccatcgcccatgcattcgccctcttcg

SEQ ID NO: 1000 - DNA, 270 bp, Glycine max
  unsure (1)..(270): unsure at all n locations; Clone ID: 701038082H1
cacccaccacccaccgccgccacattcacaccacgcgccgccgcttccaatttccccggagacccaccctttgcatggcagtgagctttctggcgcgcgatgtatcggacctctgccttgggaagccgccgctgagtcgctnnnnnnnnnnnnnnnnnnnnnnnnnnccttggccgcgctcaagagctccgaccacgagacccacgtcagcttgtggagcttctgcgagaacaagaacgaggttcgttgcgttgggaaactgtgcatggt

SEQ ID NO: 1001 - DNA, 269 bp, Glycine max
  Clone ID: 701038083H1
gcgcctcttgatagggtctcccaccctaaccaagccagatcccgttttcaattccttctcagtttccttttctctgaaaaaacatgttgagggttgcagctagaaggctctcttcttctctctcatcttcttctccgttgcggcccaatcacgccgcttccgcttttctctctcgaaacgacgtcgtcgtcgatgaccgcagatctgctccttcctcccatccccttcttcccttcagaggttatgctactgaatccctgatccacaca

SEQ ID NO: 1002 - DNA, 268 bp, Glycine max
  Clone ID: 701038084H1
ttcaccttctgttctattggatcctctttgagaatgtgatgtctttgcaccgtaccaaggcaacatttataggtctcttagagtatgggagggctaatgaatgggttgtgactgaaaaacttggtgactctgtcataataataagaataaatcaggagatgctgccaagaagaataatgccatcaaggccacccccaaaaagactcgatccaaatttgttgaaagacttaatttactggagttgggatttgctgccttcctcttcgta

SEQ ID NO: 1003 - DNA, 271 bp, Glycine max
  Clone ID: 701038085H1
cagacgccgtagagtcagagagagagattcactgaaacagagcgcagaagaaaatacataaactaatccagaaaatgagcagcggcgctggaaaggtggtgtgtgtcaccggcgcttccggttacattgcttcctggtagtcaaattcctcctcaatcgcggctacaccgttaaggccaccgttcgcgacacaagtgatccgaaaaaaataaaccacttggttggcctcgacggtgctaaggagaggctgcacctctacaaggcgaatctt

SEQ ID NO: 1004 - DNA, 272 bp, Glycine max
  Clone ID: 701038086H1
cttgttctgattatggaacagctgaagccaagtgctgctaactcttcccctctcactcccctcggcttcttggacagagcagccaccgtccacggcgacgtcccttccgttgtttataacaacaccaccttcacgtgtcccagacgcgccgccgatgcctccagctggcctccgccctctcctcccttggtatccgccgcggcaggttcgtctccgtcgtggcccccaacatccccgccatgtacgagctcccacttcgccgtccccttcgt

SEQ ID NO: 1005 - DNA, 270 bp, Glycine max
  unsure (1)..(270): unsure at all n locations; Clone ID: 701038087H1
ctcggctgaaggcgaggcaaggggtgagaacggttgcaatggcngaagtcgacgtggtgggtcccaccggggagagcgtgaagcgtgacggggttagcatcggagaagttgtgatgaaaggagggtgtgtgatgttggctacctaaaagacccttcgggaacagcaagttgtttcaagaacggttggttctacaccggagatgttggtgtgatgcatgaagatgggtacttggagatcaaagataggtcaaaggatgttataatcagtgg

SEQ ID NO: 1006 - DNA, 273 bp, Glycine max
  Clone ID: 701038088H1
cctagaaaacaagactgccttcaccaccaagaaagactatggtaaagaggagagggaagctcaatgggctcttgctcagaggaccctgcatggacttcaaccaccagaaacttctaatatcttcaatgaaaagagcagtatagagaactcactgagattgctgagcaggccaagaggagagctgaagttgcaaggcttcgtgagcttcacacacttaagggacatgttgagtctgtggtgaagctgaagggtctggacattgacacaatccag

SEQ ID NO: 1007 - DNA, 245 bp, Glycine max
  Clone ID: 701038089H1
aatgacgctcaacatagcggctttggctgtgttgtgtatttctgtctttggcatcgctgtggtggctgaagatccatataggttcttcacctggaatgttacatacggagacatttatccacttggtgttcgccaacagggaatacttatcaacggtcaattcccaggtccagacattcattctgttaccaacgacaacctcatcatcaatgtcttcaacagcttggaccagccatttctcctct

SEQ ID NO: 1008 - DNA, 269 bp, Glycine max
  unsure (1)..(269): unsure at all n locations; Clone ID: 701038090H1
gtgagacagtgtaactcggaagcgcanagcaatggcaagagcgactctccttcacttgctgcggtcacagagcctccgccacgtgtccaaaaacgctccttcagcatatcgttgttttgggtcctctacctgtcacgacccattagccccaatccatcattcaaaacttcctcccatcttgctgttttccaaagaagatgggcatcacaaatcccaactacagaggaagacgacaagattagcatcggacctcgtagtggaggacaacc

SEQ ID NO: 1009 - DNA, 270 bp, Glycine max
  unsure (1)..(270): unsure at all n locations; Clone ID: 701038091H1
gggatccgtgattttgattcatctgtacttgtagagcctttttctactgcaaagggatggatgacaagtgctaactaagcactnnnnnnnnnnnnnnnnnnnnnccttcatcgccaaacacaatgaaggaattggggtggttgcaatcctcttttcaatagagttcttggacgttatcgtctacactgtaagcaaagcagccatgaagaagggcatgaatgactttgtctttgtcatgtactccaatgccttcgcaacttgcctcctcct

SEQ ID NO: 1010 - DNA, 270 bp, Glycine max
  Clone ID: 701038092H1
cagggatgcaatgaaggaatttgcacagaaattggagaaactggcagaggagttgctagacctgttatgtgaaaatcttggattagaaaaagggtacttgaaaaatgcattttatggatcaagaggtccaaattttggacaaaggtagcaaactaccctgcatgcccaaagccagagttggtgaagggtcttcgtgcacatacggatgcgggtgggattatccttctcttgcaagatgacaaggtcagtggccttcagcttctcaaaaat

SEQ ID NO: 1011 - DNA, 273 bp, Glycine max
  Clone ID: 701038093H1
ctttccttctgtaaactgggcttatttcttattcaaaatactcaaccggcacttgaaaccttttatgagcaatttgatccagattttatcaacattaggacaaaggctcgtgaagttctgcaaagggaagatgacctgatgaaattgttcagcttgtgggcaaggatgctttagctgaaggagataagatcaccttagaaactgcaaagcttttgagagaggattatcttgctcaaaatgcctttacaccatatgacaaatctgccccttcta

SEQ ID NO: 1012 - DNA, 270 bp, Glycine max
  Clone ID: 701038094H1
caagattgaaagtgttagtccaggaagtgaaatacgaaggtggttgaataatgagcatgagggaaattgtgtaagcttagacgcatctcctgttatgcatgaccataattggattggcgttgcgttttgtgcaatatcgtcgtacctcatgaaacactctcagcaatgagtttttcagaaacagaatatccattccatttgtttggtgatattcgagtggatttatatggagatttagatctagaacttgttttagacaaatcagatcac

SEQ ID NO: 1013 - DNA, 272 bp, Glycine max
  unsure (1)..(272): unsure at all n locations; Clone ID: 701038095H1
gggaattatggtaattgatatcgaggttttgactcatggattctgatcgccccagaaaaccttccaaaaatttagttcactctcgcttcttccttttcggcttctattgctgggattgggagttcttaaccgctctctcctttttagttgttccccttaatcttgttccttcatatttttntttttnctnattagatcagattgancaaaagggttgcccttnatttttnaancttgggggaataatagnaatagaantaagaaaagnttag

SEQ ID NO: 1014 - DNA, 275 bp, Glycine max
  unsure (1)..(275): unsure at all n locations; Clone ID: 701038096H1
gttattccttgcttcacttgtatgctttagtttctagcatcgatcactcctaattacttgctgcatttctctactccttgtgcttgacacttttgtcatttaaaatggaacttaattttaagtaccaacttagcctttnctctgtnacactgctcttacctgccctgtgtacctctcaagactcttttacgtgctccagagcaacctattatggtagcccagattgttatggaaatccaaggggagcttgtggctttggagaatatggnanaacg

SEQ ID NO: 1015 - DNA, 305 bp, Glycine max
  unsure (1)..(305): unsure at all n locations; Clone ID: 701038101H1
aaaacaanaccatttgatccaacagacacactccctctctctcttgatcattctctctcagtgctctcgatctccatctgcaacttccttgtctgacagatcctgtgttccggagaaaggaaaggaaaggaaagatgtcggggcaaacgcagcgtctgaacgtggtccccaccgtgacgatgctgggagtggtgaaggcccgattggtcggcgccacgcgcggccacggcttcctgaagaagaagagcgacgcgctcaggtgccagttccgccagatcctgaagangatcgtctccacaaaagaa

SEQ ID NO: 1016 - DNA, 297 bp, Glycine max
  unsure (1)..(297): unsure at all n locations; Clone ID: 701038103H1
cnganctcggattggaaaaagattgtggaacctgtcatgcagttgtatacanaggcaactgatggatctaatattganactaagganagtgnttngtctggcatcatcaagatgcagaccctgattttggctcatgccaagccaaagaattgtnaaatcatctggaaagtgtccttgctaatgaacctgcagttgttatcaggggccagcatattgttgaagtcaanccacagggattaaacaagggatggtggcnnaaaaggtntttccatntggttaatganggcnatccaccnc

SEQ ID NO: 1017 - DNA, 295 bp, Glycine max
  unsure (1)..(295): unsure at all n locations; Clone ID: 701038107H1
cattggtgtgcctgagcccttgtctgtgtttgttgacacttatggcactgggaagatccctgacaaggaaatcctcagcattgtgaaggagagttttgacttcaggcctggcatgatctccatcaaccttgatctcaagaggggtggaaatggcaggttcttgaagactgcngcatatggacactttggcagagatgaccctgacttcacatgggaagtggtgaagccactcaagggggaaaaggtactgcttaactaaaaggggttccaacactcttggccaanggattttgcc

SEQ ID NO: 1018 - DNA, 297 bp, Glycine max
  unsure (1)..(297): unsure at all n locations; Clone ID: 701038108H1
cacgtggtctttctccaagtcagtgagcctcattctcattcttgctacttcagaaactcgcttcccttttccaaagcgaagacgccacttccgtttnatgactacttaatatgtcatatatgccataacgtatgtacagtangcataaacntggntgtaatgcatggcgngatattgngtttattttcctgtcactagtnttttgagtatgtnccngacatgctgtgttcagtactattgttaccctgctgaactattccaaaattgggaatgatctgtttctaagtcatcaaacct

SEQ ID NO: 1019 - DNA, 300 bp, Glycine max
  unsure (1)..(300): unsure at all n locations; Clone ID: 701038109H1
gnaaactaaaggtgaagtttgccaganncaagatgggaaggcaccattttcagcagcaacactgtgctgatgngagcatgtgnntggngagtcagggtcagcaacagagctatgccttccaagaagagtcttggagccctgataacaactatggccacaaccacaagcnattcccaggcatgcactgnnnnnnnnnnnnnnnnnnnnnnnnnnnngggcttggtggttttgcngctgtggactctgccttttccatggcaaaacatcatcatggggcatgngccaagggcgtagnanccc

SEQ ID NO: 1020 - DNA, 297 bp, Glycine max
  unsure (1)..(297): unsure at all n locations; Clone ID: 701038110H1
cttcattaaacaatggccgtaaagcaagtgagatttttcaaggncaagctctcttgtacaaacatttgcttggcttcatagattctaagtgtctaaaatggatggttgagcttgacatacccgacataatccacagccatagccatggccaacccattactttttcagagttggtgtcaattctacaagtcccaccaactaaaactcgtcaggtgcagagcctcatgcgttatctagcacacaatggattctttgagatagtaagaatccagacaacataggaaggcatatgctctc

SEQ ID NO: 1021 - DNA, 295 bp, Glycine max
  unsure (1)..(295): unsure at all n locations; Clone ID: 701038111H1
agcaattccaaggcttagatgggtgatgagatcaccattgaagatgttgacaaagctcaagaatgcttatatgaactttatgttgagactgtcaaggaacgtaggtgctatcaacagtgataacatctttgaagtgaaacgnattccaaaggctcgtcaagtgtataagggttattccagtgatgaatttgaggctaggctcatttttgagatttctaagacattngtngcttcctatganttcatcccatgtnttgtngttnntnttctatcttattccagtnatcctacaact

SEQ ID NO: 1022 - DNA, 294 bp, Glycine max
  unsure (1)..(294): unsure at all n locations; Clone ID: 701038112H1
aagtcagagagagagaagatgaagagcgaaagcnnattggttggattctgcattgaggcancatgtgagagcagagaaagcgtggataaatggcggatgcagagccgcagtctcgatcgcttgccttctcatctcgccgactctctcctccgccgcctcatcgcccgccgcntctttacccctctctcctcgaggttttcaaacatagtgcngaagaggttgatgtgagangggacaactccgtggacgcagaatggatggcgtatttgggagcatatcgtcattgcgctactt

SEQ ID NO: 1023 - DNA, 293 bp, Glycine max
  unsure (1)..(293): unsure at all n locations; Clone ID: 701038113H1
ttttagcgcanttcttctagatttaaggnagatgggtaaggcaaaggttcacatcagtattgtggtcattggccatgtcgacttctgggaaatccactaccactggtcacctgatttacaagcttggaggcattgacaagcgtgttattgagaggtttganaaggaagctgctgagatgaacaagaggtcttcaagtatgcctgggtgctggacaaacttaaggctgagcgtgaaagaggatcaccattgatattgcttgtggaagtttganacaacaaagtattattgcccc

SEQ ID NO: 1024 - DNA, 294 bp, Glycine max
  unsure (1)..(294): unsure at all n locations; Clone ID: 701038114H1
gntctcctgcggcaccgccgattgcngctccgggaaagtagagtgcgtcggcggagcanaccgccggcgacattggcggagttcactctncaacngcgccgacggtttggacttctacgacgtgagtaccngtcgacggttanaacttccgatgctgcatcgtcgcaaggacggcatcagggganggtgnagcgccacggttgcctcntcgacctcaacggcgggtgtccagcggagngagggtggcgngatcaacggcanccgcggancntggcgtgccgganagcgtgcgac

SEQ ID NO: 1025 - DNA, 299 bp, Glycine max
  unsure (1)..(299): unsure at all n locations; Clone ID: 701038115H1
ctagaatctattattgcatcggaactttctgatccagcttggccagcagcactattgaatgatgtactactcactttgcatgctcgtnttaaggcttctccagatatggctgttactcttcttcaaattgcaagaatatttgctaccaaagttcccggaaaggttgatgctgatgtgttgcaactgctctggaagacttgtcttgttggagctggtcctgatggaaaacataaagctttagaagcagtcacaattgtacttgatctaccacctccgcagcctgggtcaatgcttggtcc

SEQ ID NO: 1026 - DNA, 297 bp, Glycine max
  unsure (1)..(297): unsure at all n locations; Clone ID: 701038116H1
ctttgaagatgtacttgatatttatgagggaagtattaagcttccaagtgganctttagcnagtaaacttcagagaacttgttccctatgagctgctgagagaacttattaggaatgatggtgagagattcctcaaattcccggtgcctgatgtgatcaaagtgagtnagactgcatggaggacagatgaggaatttgcaagggaaatgcttgcaggggttaaccctgttattaatccgccgtcttcaggaatttcccccggcccagccaagctagatnccagagtctntggagacc

SEQ ID NO: 1027 - DNA, 299 bp, Glycine max
  unsure (1)..(299): unsure at all n locations; Clone ID: 701038117H1
ggaaagggtgggaagggtttaggaaagggaggagcaaagaggnatcgcaaggngntangnganaatatccagggaatcacgaagccngagattnggagactggngagaagaggtggcgtgaagagaatcagtggtttgatctacgaagagaccaggggagtggtnaagatctttatngagaangtgatattagggatgnngtgacgtacacggagcangntaggagaaagacagtganggccatggatgtngtttacgctctcaagaggcagggaaggatctctaggtttcggaggntg

SEQ ID NO: 1028 - DNA, 299 bp, Glycine max
  unsure (1)..(299): unsure at all n locations; Clone ID: 701038118H1
tgcatttctatttctaactaattattgtgcttattnattattgttganacnnanaagaatggcaaagttaataaaattctttgagttgaacacaggggccaagattccttctgttgggttaggcacttggcaagctgagcctggtgttgtagccaaagctgtcaccacagccattctggttggatacaggcatattgattgtgctcaagcgtataacaatcaagcagagattggttctgctcttaagaagctttttgatgatggtgtggtgaagcgtgagggccttatggatcacctcc

SEQ ID NO: 1029 - DNA, 294 bp, Glycine max
  unsure (1)..(294): unsure at all n locations; Clone ID: 701038120H1
cttttttgttttcaaccagttatttcaaaatttagttacaatcantgggtcttattctctaacattgatgtcttcattttttctatttttttggacatgcaggcctccagtcagttttctttgtccattgtttgtntctgttcgggtaatgaagagtgattcccggtccagcaaccagcgatgtctcgctttttgggttttgtattccttgtgtatgatcatggaaggggaactttcagtgctatttaactgcctcccatggtggcctcatgtgaaatccatagcaactatcct

SEQ ID NO: 1030 - DNA, 222 bp, Glycine max
  unsure (1)..(222): unsure at all n locations; Clone ID: 701038121H1
tgattgaagaagatgccgatcagaaacatcgccatcggaaggcctgaagaggctactcaccccgacacgttgaaggcggggttggctgagttcatctccaccttgatcttcgtgttcgccggttcaggttccggcatcgcctacaacaagctcaccgacaacggcgccgccactcccgccggcctcatctncggtttccatcgcccagctttcgccctcttc

SEQ ID NO: 1031 - DNA, 295 bp, Glycine max
  Clone ID: 701038122H1
ccaaaagcaaccacaacaagcacttctcttatttcctatccacaccctattacagattcacaagcgcagacacttcaaatggctctggaagctcttcaatcacccagaagggccactccatcgtttagtccctttgaagaaaccaacctcagttacttggagacaccgtggaccaaaggaaagcgttctaagcgtagccgcatggagcagcaactgcaacactcttcatgcaccgaggaagagtactcgctctctgtctcatcatgctcgctcaggcggcgccggcggtgtcccc

SEQ ID NO: 1032 - DNA, 294 bp, Glycine max
  unsure (1)..(294): unsure at all n locations; Clone ID: 701038123H1
ganaccagaggaacaacccaaggcagaggagaaaaaaccagaggaagagaagaagaaagaagaagcagcagcagcggaaaaaccaagcgaagagaaaaaaccggaacaagagtcgaaagaggaagttgctgctccgccaccgccaccgccaccggcngagattgtgctcaaagtgttcatgcattgcgagggttgcgctcgcaaggttcgtcgctccctcaaaggattcccaggganngacgatgttgtcacgattgcaaatctcacaaggtggtcgttaagggagagaaagcg

SEQ ID NO: 1033 - DNA, 298 bp, Glycine max
  unsure (1)..(298): unsure at all n locations; Clone ID: 701038124H1
attttgggatccctggtgctgttancgtggttaacggctttgacaatgagttcttcttggacagcntaancatggncacnaaatgttcattttgcttgcaaatcttgggttcaaccanacaagcttgacccagagaagagaattttcttcgttaacaaggtgtatctaccctgtgaaacaccaattggggtgaangaactaagagaaaaggnactgaaacancnaaggggtgatggatggggacttagggtatcttctgatagaatcttagactcatgnatgtatacaatgatttggg

SEQ ID NO: 1034 - DNA, 290 bp, Glycine max
  unsure (1)..(290): unsure at all n locations; Clone ID: 701038125H1
tcgcagtttcaccaccgcgtcatgtccgaaccagaagccgcttcggtgatgtggcaactcatgcaagccgtggcgcactgccaccgcctcggcgtcgcgcaccgagacgtgaaacccgataacattctcttcgatgaggagaatcggctcaaattagccgatttcngctcggctgacacttttaaggagggcgagccgatgagcggggtgnttgggacgccgcattacgtggcgccggaagtcctcgccggaagggatacaacgagaaggtcgacgtgtggagcgccggc

SEQ ID NO: 1035 - DNA, 292 bp, Glycine max
  unsure (1)..(292): unsure at all n locations; Clone ID: 701038126H1
ctggctttaggtgttcctgctcttccgttgacatacgtggctcacgttctggcagttgttgccagcgtcttggtcgtggtctgggtcgtcaatttcaggggtggcttggcttgggattctgataacaagtccctcatcttcaacattcatccagttcttattgttattggcttactagttcatgggggtgaagctattataagttacaaagcttttcccctaaagaaggaagtgaagaaattgatacaccttgttttccatgccatcgcattaatacttggnatagttggaa

SEQ ID NO: 1036 - DNA, 293 bp, Glycine max
  unsure (1)..(293): unsure at all n locations; Clone ID: 701038127H1
catatcatgggttcagaaaattgtatagataagangcactttgtgctggtgcatggggcatgccatggagcatggtgttggtataagctcaagccacgcttggnatctgctggccacaaggtcacagtgcttgaccttgcagcttctggagccaacatgaagaaaattgaagatgttgacactttttcacagtatactgagcctttgttgtttctattggacacaattccctcaaatgaaaaggtagttctagttggtcacagctttggagggctgaacatagcacttgccag

SEQ ID NO: 1037 - DNA, 295 bp, Glycine max
  unsure (1)..(295): unsure at all n locations; Clone ID: 701038128H1
cgcatcacaacacttggttgtttgttaccatcttccaaaaatatcatgctcctaacgtaaaaatcctcggtttcaacgttcaactgcgatctctaaacaaaaccatggcatcactctcaggcatttgctcctcttccccaactctcaaaaaattcccgaaccaatccccatcgttgaccgaccctctccgcaaagaccacgtgtccttccccgcccgccgcgccgatcggactctcagcctcgcgccccctcctcgtgcggtggctcgtgaggtttccgnaggagcattggcggc

SEQ ID NO: 1038 - DNA, 294 bp, Glycine max
  unsure (1)..(294): unsure at all n locations; Clone ID: 701038129H1
cgcgaccggagctccgctctgccgcgtccgagctcgcctctgttctgaaccagttttgttttgttcctttgcggcttgtttctctgantgtgcgagctattgttccgaaaagcaatggcaagtgcattgagtagcagagttgaatctgttcgaaactccccctttctaagattttcgctcaacttcatcagagcccttagctcttcttcgtcttcttggtctgccgtttcttctgctgagaaccttaagaaatcaaagcgaaggaagaagaagaattgttcgaggtggctcagt

SEQ ID NO: 1039 - DNA, 296 bp, Glycine max
  Clone ID: 701038130H1
cttccgtggcagtggtagttgccaaactagtagcaagaagtaagtcacgtttttctccgttttcattcatcacaatattaaagcttttagtttccttcagtatgggggacacttacgttttggccacaccgaagcgcaaccgttccgatgacgtggacggcggcgaggcgaagaagctgctgttgcagcagggcgaggcagacccggcggcggcgctggcgagcgcgcggcacgagttcggggagcacggcggggtgaacatgtcgatcgaggcgtcggcgacgttcacggtgatg

SEQ ID NO: 1040 - DNA, 300 bp, Glycine max
  unsure (1)..(300): unsure at all n locations; Clone ID: 701038131H1
cactcttcttctcttgcggcnagggttttagcgcacttcttctagatttaaggaagatgggtaaggnaaaggttcacatcagtattgtggtcattggccatgtcgactctgggaaatccactaccactggtcacctgatttacaagcttggaggcattgacaagcgtgttattgagaggtttgagaaggaagctgctgagatgaacaagaggtctttcaagtatgcctgggtgctggacaaactttaagggctgagcgtnaaagaggaatcaccattggatatngcctttgtggaagttc

SEQ ID NO: 1041 - DNA, 254 bp, Glycine max
  Clone ID: 701038132H1
cagaaaacgtagaaaaataagcaggagagttaaatgtgtaataatcaacttggaggtaatgattctcagttagttacctgtgtgtgtccttatgcctttctgtttatgcatgcttatggatattaagatattttcatgtggtatagattctactctttttttttattagtgtggtataaactctcttgtgtcgcaaagtttttctccctcgtgatggaatatatggattttgatagccaaaaaaaaaaaaaagg

SEQ ID NO: 1042 - DNA, 299 bp, Glycine max
  unsure (1)..(299): unsure at all n locations; Clone ID: 701038133H1
caggaatctctggaacagacaagtgggttgcatgggctatcaatcccagcaacaacctcaattcagctatgacgggagcacaagctctggtggctatcataccatctagcggtgccccaaatgcatatacttcttccatccaaaatcccgganccacactggcagagggagccatctcttataatcanccaggattgacggctacccatcagagcactgaggtcaccatctatgctaccctcactcttcccagtggtaccaccactttggtccacctttggaacgatggtcctgtgtct

SEQ ID NO: 1043 - DNA, 297 bp, Glycine max
  unsure (1)..(297): unsure at all n locations; Clone ID: 701038134H1
gagacaccccatgaaagatanaaaaaaaanttgcaaagatgatcntatctgagacaaagactngaccctctcttgngncaacttacaacatagattagatattactttgacaagaaaacctagatctttctcccctctatgaccttctcaatatagacttgtatttatagaggtttcagcttcagggaagatgataatggtctaaaaagnaaaaaagctttgcatggcgagccacagaataggagcccctggtttgtcngagtcaanaccttcaantcaccacatcccttnnggggt

SEQ ID NO: 1044 - DNA, 292 bp, Glycine max
  unsure (1)..(292): unsure at all n locations; Clone ID: 701038135H1
cgagttgttgccggaagggtttttggagaggaccaaggagaagggaatggtggtganggactgggccccacaggcggcgatactgantcatgactcggtgggtgggttcgtgactcactgcgggtggaactcggtgttggaggcggtttgtgaagctgtgccaatggtggcgtggcctctctacgcggagcagaagatgaataaggtgcatcttggtggaggaaatgaaggtgggtttggcggtgaagcaaaacaaagacggcttagtgagttctaccgagttgagggaccc

SEQ ID NO: 1045 - DNA, 278 bp, Glycine max
  unsure (1)..(278): unsure at all n locations; Clone ID: 701038136H1
tgganatgagaanatagacggaagtgagagaggaggcactgagcatccaacaatggccttgttctctggctaccgcaaccgttcttcctcggaacctcgcattcgcttcctccaccaaactctccctctctcacagtcactctcttctacatcacttcctttcattccccactcccaaatcatcaaaccctcgcaaccgggtcgcaatctctctccaaaccccacgcgctcaatccggngcgtccgcctccgcctccttccatgggcttctgctacgt

SEQ ID NO: 1046 - DNA, 289 bp, Glycine max
  unsure (1)..(289): unsure at all n locations; Clone ID: 701038137H1
accacctcacctcttgtccagaaatctccattctccaaaactgcttcaactcttnnnnnnnnnnnnnnnnnnnnnnnnnnnnnnnnnnggagtaccctcttcaatttccatcaattaagtttctctaataccctctgannnnnnnnnnnnnnnnnnnnnnnnngtcatggctctgtgatatattttgtgctttttcttgccctcactggccattcaagtgctctttactgtgtatgcaaagatggtgtgggtgatcaagctcttcagaaagcaataggntatgcagtgg

SEQ ID NO: 1047 - DNA, 291 bp, Glycine max
  unsure (1)..(291): unsure at all n locations; Clone ID: 701038138H1
cnactcagtagtcaacactaggcactctctattcccattcattgcagaagaagatggaggctcacccctacgncccacgcgatttgnacttacccggctacgctccctgcttcctttccatgtccaacattctntccgtcttcgcctcctcctcattgctcatcgtcactctcgtctggatcttctctggacgctttaagaaaaccaaagttgatagagtgctgatgtgctggtgggccttcacaggtctcacacacattattcttgagggttatttgtnttctctcctga

SEQ ID NO: 1048 - DNA, 297 bp, Glycine max
  unsure (1)..(297): unsure at all n locations; Clone ID: 701038139H1
gggaaacatggnttccttaagctccttagtgctgctccttgcagntctaattctatcccctgcaagttcttgcacactatgagaatcccccagtgtacaagcctcccactgagaaaccaccagtttataagcanccagttgagaagcctcctgtttacaagncacccagntgaaaagccnccaatttataagnctccagttgagaagccaccagtgtagaagccnccagttgaggngccncnangtgttacaagccaccagtngagaaaccaccagtgtagaagcganncagttgac

SEQ ID NO: 1049 - DNA, 219 bp, Glycine max
  unsure (1)..(219): unsure at all n locations; Clone ID: 701038140H1
ctttctctntatccatatgctatgcatatgnttattctctctatctntctctcactattgatctgattatngcttgtgtactataaccaaattggagcnaacccttttgcatctgatcntagaatnacaagnctagctacccgtttnctaccttntcatganctgtaattggttgtaaaaaannangaggntnnntcgtnattntngtnntannatgna

SEQ ID NO: 1050 - DNA, 275 bp, Glycine max
  unsure (1)..(275): unsure at all n locations; Clone ID: 701038142H1
gnctccatgccgatcaatatttatggtgtggggcaattctgagtctcgagtgttttagttgtgaactctgttgcgtgattaaaacaagtctgagaagaaaaacaaattagtccaaccttttgtttgtttctggaagttagttatatcaagttgtgtttttgcattaaggggtttttgtcaatgatatgctaattttaatagatgtagatttatgtcaatgatattgtatgtnaatttattcagtctcgtatctagctgaataataagaatatact

SEQ ID NO: 1051 - DNA, 290 bp, Glycine max
  Clone ID: 701038144H1
ggagagctcattcactcatcactgccaatgacaaaacaaagttctaggttggagggtaaggtggctcttatcactggagcagcaagtgggattggtgaagagacagtgagattgttcgctgaacatggagcacttattgttgcaacagatattcaagatgaacaaggtcaccgagttgctgcttcaatagggtcagagagagtgacttaccatcattgtgatgtgagagatgaaaaccaagttgaagaaacaatcaatttcactttggaaaaacatggtcgcatagatgt

SEQ ID NO: 1052 - DNA, 291 bp, Glycine max
  unsure (1)..(291): unsure at all n locations; Clone ID: 701038145H1
tcaacaacagctaaaaaaatctaaggtggtgaaaattgactcaaganaatcatgggaacaccacataactaatgcaaccaataaaggctaccctgttatggttcatttctctgcttattggtgcatgccttcaatagctatgaatcatttctttcaacaactggcctccacctatcaaaatgttctctttctgaatgttgatgttgatgaggtcaaggaagttgcttccaagttggaaattaaagcaatcctaccttttgtttgatgaatggaggagctccagtgggataa

SEQ ID NO: 1053 - DNA, 274 bp, Glycine max
  unsure (1)..(274): unsure at all n locations; Clone ID: 701038146H1
acaagatcgatgaagactcttcacnttctcctagtttcacncctttgctttccaggcgttanttgcttggttctagtcctacagaagctacacgtttgcggacactgtcactgggctattcttcaagtactggagcaactctgaagaaagtgagtttaaggccaccaacacatccacgacgacactcgcctccaccaccaatcctggctattctcctgaacccggtccaggacgaactcgaagatctcctccgactccaaggacctttcatcgt

SEQ ID NO: 1054 - DNA, 223 bp, Glycine max
  unsure (1)..(223): unsure at all n locations; Clone ID: 701038147H1
tnttctctctctgaattctcttttgtnttctagtgctggtgtgtaatttgaaggagaatttttaaagtgggttggggttggttttagaattctgtgactaacgcgtcctgggtcaccgtgcccctcccttggattccgctggtagtgttttttgtgcaggaaaacagataaagtcggtggctttattggaatatggtgaaantgtcataccctttatgttctg

SEQ ID NO: 1055 - DNA, 300 bp, Glycine max
  unsure (1)..(300): unsure at all n locations; Clone ID: 701038148H1
ctcttatatcttaaaaaatacgtaattattattaggagccaggcgtacacttgaagtatgaataaaaagacacaccaaagataccattgttaaaagtttgggcagccctaggcacaaaagaaantggtgattgatggctactcctccggtgaattcgttgccaatagcataccaagcatggacaagcctgggantcccagattggttgaacaaaggagacaacgcatggcaaatggtgtcagccaccttggttgggattcaaagcatgccgggcctcgtcatcctctacggaagcatcgt

SEQ ID NO: 1056 - DNA, 276 bp, Glycine max
  unsure (1)..(276): unsure at all n locations; Clone ID: 701038149H1
gagctctggagttactcttctttatggtgatgnaaatgatcatgaaagcctnntnaaggcaatcaagcaagttgatgttgtaatatctacactaggtggacagcagatagatgatcaagtgaaggtcatagcagcaataaaagaagctggnaacatcaagaggttcctcccatccgaatttggattagatgtggatcatcacaatgcagttgagcccagcagcaagctttttcaacaaaaaagtgaaaatcagaagggcaattgangctgcaggaa

SEQ ID NO: 1057 - DNA, 289 bp, Glycine max
  unsure (1)..(289): unsure at all n locations; Clone ID: 701038150H1
cacacctcatcggaatattcctttcttttcggtttcaatctctggatccgtcgtgacanacggcatggccacttccaatggcttcgtcgacggcactccctcggaatctgcattgatctttctcggcaccggttgttcgagcatggttcccaacctcatgtgcctccttcagccttctgaccctccctgccccgtctgcgtccagtcattgtccatccctcccgaacgaaaccctaattacaggtgcaatagtctctcctaatgactacggcggcggcgccgccaangt

SEQ ID NO: 1058 - DNA, 278 bp, Glycine max
  Clone ID: 701038151H1
tgagagtgaagtaaaagggttgaaaattttgaatatgaagatcagtattttgctatgtgtggtgctttgggtttccttggggtttgtcaaggaggcagcctaaggaaaaagttctaccgggattcctgccctcaagccgaggacattattaagaccaaaacccagcagcatgtgtctgctaatcccgatttgccagccaagttgcttagaatgcattttcatgattgttttgtcaggggttgtgatgcctcagttttgttgaatctatgccagtaaca

SEQ ID NO: 1059 - DNA, 290 bp, Glycine max
  unsure (1)..(290): unsure at all n locations; Clone ID: 701038152H1
cntactggaatttcttcaacacatggtctcagatctttcaatctcaagctcaaggccatgaatacaatgttcccatttcacacccacccattctcaaccgttggtttcccagtgattgtgatccgtctgttaatcttcctttcaaacatcatgacgagntcatttgcaactttgaagcaccttttctgagggagagagtcttccacttttctgcagagtccatagcaaaactgaaagcaaaagccaactcagagtccaataccacaaaaatctcttcattccagtcatta

SEQ ID NO: 1060 - DNA, 291 bp, Glycine max
  unsure (1)..(291): unsure at all n locations; Clone ID: 701038153H1
gagaaaccatatagaatcaattctaataatggttttgccgacttaaatttaccatgtaagcttcaaaaagagacaggtgtgnagtctgatgattttggggcctcaatccctcacagaaaccatacatttcatgatatgcccgggagantgacaccaggctctcataattttcccaatgatgtcatcctgaatttgaaaagaaaacaggatcatgaagcttacccagatctcccactatcaaatcacgggcagaaacatgggatgggctgcnctcggggcacttgtgctggg

SEQ ID NO: 1061 - DNA, 290 bp, Glycine max
  unsure (1)..(290): unsure at all n locations; Clone ID: 701038154H1
gaaacttcaccgtttgantctcgcgagatgctcgcatccttcgtctcgtccacgnccctgctgtcggactcatgggngcctctgcacccaggccaacgncactncccttcctgaccttcgtgactgagcgtgtcggcgcctccgtgtatgtggctttctccggngtccatatggccggcgagtccgacccgaactggagaaatttgactcctttgtacagcatcggcggcctgcctctgttttcgtctcggcggagcaaggaatgggangaaccggtcatggttcatgcc

SEQ ID NO: 1062 - DNA, 290 bp, Glycine max
  unsure (1)..(290): unsure at all n locations; Clone ID: 701038155H1
catatttttcccatctatttttttttctcaaaactcacatattagtattttctcncacaaaatttcagctccntnattttnatttttctgtntcatccaatcctgctcatttatttttaatgacaaaatatacgcaaatggtgcaaagttgaagattttccacatcttgtttcatgccccagctcctcaagctagcttttgattttgatttttctcatttctggcttaaatttntcatctttttctataaaaaaaataaaattcccagcagcatagtagtagaagntttt

SEQ ID NO: 1063 - DNA, 288 bp, Glycine max
  Clone ID: 701038156H1
gtttccctgagttaacagctacatttgcaaaacgatgttcctgtcaaatttgcctatatattcagaaatcacgagcctggctgctctagaacacaaagatttggtttttattctacctaacaccacatggatacgttgccggaggattgtgtttccaaaattctgtcttacacatctccaccagacgcatgtagattctctatggtctcttcaaccctacgctcttccgctgactctgaccttctctgggcgaatttctttccttctgattactctggacatgtctca

SEQ ID NO: 1064 - DNA, 215 bp, Glycine max
  unsure (1)..(215): unsure at all n locations; Clone ID: 701038157H1
gntcactagacgaacacatgagagattgcgcctagtcagacatgtaaattgccatgtagttcagcaaattattacttggttgagattttcatgatggtttgagtgccttagtggacgaccccttaagaaagggtctcccatgtaccacatgtaatgataagtatgggatctatgatttgagatacttgtaaatgttagtctatccttaactgatt

SEQ ID NO: 1065 - DNA, 285 bp, Glycine max
  unsure (1)..(285): unsure at all n locations; Clone ID: 701038158H1
caacttgaattttcttgcaattgtggaagggatttcttttttgcagatgatggccattattattgttgtttaaaaaatttcatgcacattgttttaagcagtgttgttaaatagccgcaatagtggcgctatagtgctattgcattgcgaaattccctggatccgcgattgcaactctggtccactattgtggctgctataggtgttgtggttgcagcatgcgtgctgcatcctcttgttatctctgtcaagtntcctgccaattggacttttgagttaatatta

SEQ ID NO: 1066 - DNA, 289 bp, Glycine max
  unsure (1)..(289): unsure at all n locations; Clone ID: 701038159H1
canaatggcaggntaggaagactgcttcttggtttctaatttcacaggacacagtcatcctagaagattcaacaagattacatcactgagagactctgcctggtttactatttctcaagccaaaaattcacgtgaagcaaataacaggcgaatcatgtcattagttaggcctgctgatctagctcctacatcatatgaaaatgctaagctcttctcactgaagggaaggnatgttagaccaggcctgtcctcccaaatttttgatcctgataagcataggagcatgtac

SEQ ID NO: 1067 - DNA, 282 bp, Glycine max
  unsure (1)..(282): unsure at all n locations; Clone ID: 701038160H1
ttcatttcactgtgagcaaacaagatcttcagatccatgacaacaacgacaatgcttctgcgaanttcgtccacgccgattctcaattctcgcatccctcacccgaaggattcgcctcacgaacccgaaatccttcaccggagcccgcgcacgcgctcgctcacgctctccgcgtcgtcgagttcgctctcgccggtcgaagcttcgccgagcagaatgacgcgggcgctgtcggagaggatctctcgcgcgtccaaaagtcttcgttcggtctctctgttt

SEQ ID NO: 1068 - DNA, 288 bp, Glycine max
  unsure (1)..(288): unsure at all n locations; Clone ID: 701038161H1
tacttactcacagatatatatttttctnttgtctccatcattttctcgagagctttcagtttgngtggttcatctttctncttctccttccctcccccctctgtaanaccccgcttctctgaatccctttctgttaatcatctgtctttcaagctaagatttncgggtttgnctattaattcaccaagaagcaaacttagaaggatttttcgaaagccaggtgttttcagaaacgagatccaggttttattgtcgaatttcgctagtcaaattaattttcataattat

SEQ ID NO: 1069 - DNA, 289 bp, Glycine max
  Clone ID: 701038162H1
ggcttccattgcaggatgtctacaagattggtggtattggtactgtgccagtgggacgtgtagagactggggttgtgaagcctggtatggtggtgacttttggtcccactgggctgacaactgaggttaagtctgttgagatgcaccatgaggctctcacagaggctcttccaggtgacaatgttggatttaatgtgaagaatgttgcagtcaaggatctcaagcgtggttttgttgcatccaactccaaggacgaccctgccaaggaagctgccaacttcacatccca

SEQ ID NO: 1070 - DNA, 293 bp, Glycine max
  Clone ID: 701038163H1
gagactctcgaacagcgtgaagctggtacaacaacggctgttgtttctgagcaaacaaaagcaattgcagctaaaatatcaaattgggacaatgtcgttttggcctacgagccagtttgggccattggaacaggaaaggttgctactcctgctcaggctcaagaggtccatgctgatttgaggaaatgggttcatgacaatgtgagtgctgaagttgctgcatctgtaagaattatctatggaggttctgtaaatggaggaaactgcaaagaattggccgcacagcccgatgt

SEQ ID NO: 1071 - DNA, 266 bp, Glycine max
  unsure (1)..(266): unsure at all n locations; Clone ID: 701038164H1
ggggaaaattaacanccgtgcataacttttcctgaaatgcacccatatgttcctttcatgactnngacgggtgatattccgcnactttacatgctttatgctgttgttgtgcacctggacacactaaatgcgtctttctctggacactatgtttcatatgtgaaagatctgcaaggcaattggttcagaatagatgatattgaggttcagccagtactagttaatcaggtcatgtcagaaggagcatatatcttattctacatgag

SEQ ID NO: 1072 - DNA, 288 bp, Glycine max
  unsure (1)..(288): unsure at all n locations; Clone ID: 701038166H1
cncttagccacatggagcatcatcacctaagacttattctcctactcttgttcctgttcctacccaacacctgcttctctttctcatttcaaactccttcaagcaatgaattctcgaatcaaagttcttcctctctgaagcagcagattctggagctagctaatagtcccagcacggtgaaatggatgaagagaataaggagggaaatccacgagcacccagaacttgcatatgaagagttcagaacaagtgctgtcataaggcgtgagttgacttgttgggtgttga

SEQ ID NO: 1073 - DNA, 287 bp, Glycine max
  unsure (1)..(287): unsure at all n locations; Clone ID: 701038167H1
ctgtgttcctgtntnngttcttcgatggcggcaacctcaacatcactggcttctcaactctacattggcctgcgccgcccctgcctcaagctcgattctttcaattctcaatctttctctctcttcgaccctaatcttcgcctatccctctctccacccaaaccctcacgcgccgtcatcgccatggccggcaccgggaagttctttgttggtggcaactggaagtgtaaggcaacaaaagactcaatcagcaagcttgttgctgacttgaacaagcaaaattggag

SEQ ID NO: 1074 - DNA, 288 bp, Glycine max
  Clone ID: 701038168H1
ccttattcattcaccaccctatccaacatggctgaggagactccaaaccagacaaccacaccaccccctcctcaagagtcagtggtgcaagtggaggaagtggtggtaaccgatgttccacagcccgacaaaacaacaactacagttccagttgaaagagattcgcaacctcaaccttatgagccagagaagaagaagcccgttgaggaaaccgtcactctcgagactcacctctccaaacccaacaatgctggaccacaccaacaacatccctgaattcattgaaga

SEQ ID NO: 1075 - DNA, 287 bp, Glycine max
  unsure (1)..(287): unsure at all n locations; Clone ID: 701038169H1
caaccttaaaagactctcttttctctctctgaactctgaagcaaaacaacattaccagagtggttctagtaattcagtgctgctagaagatggaaactagtgaatggcatatcgagcgaagatctagcttcggctctgaatcccccttagcaaganangcaggaaatgtgcctganactgggtcactctctattgtggtgcttggngcttctggtgatcttgctaagaagaagacatttcctgcacttttccacctatacctggcagggattcttaccaccagatga

SEQ ID NO: 1076 - DNA, 286 bp, Glycine max
  unsure (1)..(286): unsure at all n locations; Clone ID: 701038171H1
cagaaagcagagaattggtgagtaagatagccgctacagaagagaaacaagaagcaaatggcttctttccatctcagaagattagtaagcagcgttcttaactcgcgggtgcaaacaaatccccttttgaccttcaggtgcctctgttctcctccngttacacctttcacttcccatgctagttacgaccctaactccatccacttgtccaaccaagaaagcaaaagacgcttgttcaacaggctattatacagaagcaagcagcgagggttcctcgaactcgatt

SEQ ID NO: 1077 - DNA, 285 bp, Glycine max
  unsure (1)..(285): unsure at all n locations; Clone ID: 701038172H1
ccagttactatactctctctttctgaaacaatttncccaattgtttgagatgttcaatatgagatttgtatctcaagattgggtggtttcatgtgcactaatacttctggtgtcatgcacaacatactcatnagcttcttnggggaaacctgagaacaacatataaacatctgtttttaaatcacccaagattgagctaggtccagggttagtttcaaacaaattttattttgatgttgactttccaagaggccatattgcactcaagagtttcaatgctgaatt

SEQ ID NO: 1078 - DNA, 283 bp, Glycine max
  Clone ID: 701038173H1
gcggctgtctttgttgaagcattcaaaagtgcgaggtgcgtattgtctaggggtttttctcaaatggcaatgatccaactactcttttaggaggcattgttgttcgtaacactcttgtaatgtatgatcgtgagcattcaaaaattggtttctggaaaactaattgttctgagttatgggaaagactacatgtctcaaatgccccaccacccttgatgcctcctaaatctgaaggaacaaatttaaccaaagcattaagccctctgttgctccatctccatca

SEQ ID NO: 1079 - DNA, 286 bp, Glycine max
  unsure (1)..(286): unsure at all n locations; Clone ID: 701038175H1
cnagaaccggccatccggagagcaatgccttgttgaatgggcaaagccttacctttctaacaaacgcagagtttttcgcgtgatggatagtcgtcttgaaggccagtattcccttacacaagctcaaagggcagccacccttgcttttcaatgtcttgctgtagagcccaaatacaggccaaatatggatgaggtggtgagagcattggagcagctacgcgaatcaaataatgatcaggtgaaaaatggtgatcataaaaagcgtagtagagttagtggatctggc

SEQ ID NO: 1080 - DNA, 284 bp, Glycine max
  unsure (1)..(284): unsure at all n locations; Clone ID: 701038176H1
gattggattgggtttgcagcagaagcagcgaaggatatggcgattcttccttctcttgcagttccttcaactcccatttctcgggtaaagctgtttcaatgccaaccctgtcaattccatagatgcacagaactatatcttcctcatcaaacatattatactcgaactacatcaattaaagtancaatggcagaccaaaatgagccgagtgaggttaatatgcagattggggatcatgagggagaaacttaaagaaacatgccagtctcagttcaagaattcct

SEQ ID NO: 1081 - DNA, 284 bp, Glycine max
  Clone ID: 701038177H1
ccggtctcctagtcccatacttttcatggaaatacagccatcgccgtcaccactccaacactggttctcttgagcgggatgaagtatttgtgccaaagcagaagtcctgtatcaagtggtactctaaataccttaacaatcctccaggcagagtcctcactcttgctgtcaccctcacacttggttggcccttgtacttggctttaaatgtttctggaaggccttatgatagatttgcttgccatatgacccatatggtcccattactctggatcgtgaacgac

SEQ ID NO: 1082 - DNA, 289 bp, Glycine max
  Clone ID: 701038178H1
ctgaagcgcgatggaaacgggattgaggatctgagcggtggcgttcatcaactcccctgctgatggtcccgcctccgtttcccactatttcaaacccaaacatatagctctcgtcgacgacgagggtttacctttacaagaggtgcattttagaggctactccaaggaacaacactccctcttcctcacggttactctggttttgtcgtgtgtaagaaaagttcgcctcctcacctccggacgaaaactctcactcttgggacatgatagcagaccaaagacaggaaac

SEQ ID NO: 1083 - DNA, 287 bp, Glycine max
  Clone ID: 701038179H1
ttgtagacgcagacgcagcagatcagatcctctgtcttcaattcaagttcaaggtatggctcaacaacagggggacgaaatggagtatgctgctgatgataatgaaatggcggaagtagaagatgacatgtatttcagtggtagagtgtttggtgattcagagtccgaatcagacgacgatgatgaatatgactccatggaaaatcggatgacagatacctctgctggcagaagctaggaaaggaaaggatatccaaggtattccttgggatagattagcattagtc

SEQ ID NO: 1084 - DNA, 288 bp, Glycine max
  unsure (1)..(288): unsure at all n locations; Clone ID: 701038181H1
ggataggtcaaacatcatcatgtcggacgaagagcaccatttcgagtccaaggcagacgccggtgcctccaaaacctaccctcagcaagccggtaccattcgcaagancggctacatcgtcatcaaaggacgcccctgcaaggttgtggaagtttcgacttccaaaactggaaagcacggtcacgccaagtnccactttnttggaattgatattttcactgccaagaaacttgaggatattgtgccctcttctcacaactgtgatgttcctcatgtgaatcgtactga

SEQ ID NO: 1085 - DNA, 284 bp, Glycine max
  unsure (1)..(284): unsure at all n locations; Clone ID: 701038182H1
cnataagcaaaagccaattgatacgtgcatatcacaaaaactactcttacacaccaaaaaaatcctctatcaccaaactcacctataccctcaaactcaaggccctatagtccaagcaagtgagtgagtgttacaacttacacagcatggaatatagtcaatatactacttattcagcagaaggtgttgaggcagaaacttacacaagtagctggcaccaccccatcaagatcanagaggngaaccacaacaacacaagaggttcgtgatgaccaaatcaatct

SEQ ID NO: 1086 - DNA, 257 bp, Glycine max
  unsure (1)..(257): unsure at all n locations; Clone ID: 701038183H1
atccagatcttgcaaaaaaaaaaaacacaatggcagcgagngctcccantccangngaagagttcgtgnanatggcgaagctggcggagnaggccgagcgctacgagganatggngganttcatggagaaggnctccgcctccgccganagcnaggagctgnccgtggaggagcgaaacctcntctcngtngcctanaanaacntaatcggngctcgccgngccncctggngcatnatcnccnccattgagcagaag

SEQ ID NO: 1087 - DNA, 255 bp, Glycine max
  unsure (1)..(255): unsure at all n locations; Clone ID: 701038184H1
ctagctgctaattatgtagcatcaactttagttctttgtccttgggggtcgataattgttgctaatacaactgctggttttgaagacgtcatcaaatgggcttctagtatcatcgccctacagctgtttagttttcttggggaagaattcgggctgctgtatgacaatgagaggacaagaatgtttttctgttatctaaaatgtattcttgttctgtcaaaattgtgagtntccaagttgctttgtgaaacctcc

SEQ ID NO: 1088 - DNA, 281 bp, Glycine max
  unsure (1)..(281): unsure at all n locations; Clone ID: 701038185H1
tacgaaattgtgtcaatccttattggtctcatgtgtttttcttggtgttaaggaaattcatctntctcgtagtaacgaatggagagtagggagagggagaggtgaacctcgtccttgccccaacgaggtttggaccgaagcacgtgcgggatggcaggccnnnnnnnnnnnnnnnnnnnnnnnngcgcgtggggcttggagagaggccagaggtagagcgcgtggagacgacggaagcctccgagggcgangaccacggatcgtagctgttgctcacgcac

SEQ ID NO: 1089 - DNA, 281 bp, Glycine max
  unsure (1)..(281): unsure at all n locations; Clone ID: 701038186H1
aagaaaactcaagctcccagattctgttccaatgcctcccgtacctatttcccccatcaaagttgggcatattgatgatgtccaagagctaagaaaaaccaagccaaggacaattcctcaaagatttgtacgagacatgacaganagaccaacagtcactacacctcttcccccaccatatagtgacatgccagtcattgatttctataagcttagcaaagggaacaaagaggaagtcctcactgaacttttcaatcttggcaatgcttgtgaagagtggg

SEQ ID NO: 1090 - DNA, 262 bp, Glycine max
  unsure (1)..(262): unsure at all n locations; Clone ID: 701038187H1
gngaggagcttgaggagaaagtgagacncattgaattccatcanngctgatattagtagtaagatgtcgtatgtggtggctgagaatgctacacttagacagcaagtgggtgcngctggtgtcatgtgtnnnnnnnnnnnnnnnnnnnnnnnngggatgtaccctcatcatcctccaatggcacctatgccttatccgtggatgccttgtgctccttatgttgttaagcctcaagggtctcaggttccttnggttcccatcc

SEQ ID NO: 1091 - DNA, 284 bp, Glycine max
  Clone ID: 701038188H1
ccattactcacttttcatccttcgatcatacacttagttgcttccaattaagatggttctgctagagaagctctgggatgatgttgtggctggccctcaacctgagcgtggccttggcaagctcagaaaactcaccaccctcaaaactattgatgaaggagaaagtagcaagctgcagaagacgttgtcgatgccgtcgacaccaacaaccccgatgactccgacgactccaacgacaccgggatcggcccgtaaagctgacaacgtttggaggagcgtcttcc

SEQ ID NO: 1092 - DNA, 281 bp, Glycine max
  Clone ID: 701038189H1
cttctgccctgcttcagcagctgttttagtcttgggtgagaacattccaaacctcattcaagatgggatcataaataccgaagggttcccgattataaaagggaaatttcaactatccccagaaatgccaattatggacacagctgacattccatggtgcagcttaggtgacccaaccatgcacaaggttatatataatcatgcgtcaaagattatacgatattcacatttaacagattggtggcttggaaacaccacaagtgaccttgaacctggtgcta

SEQ ID NO: 1093 - DNA, 226 bp, Glycine max
  Clone ID: 701038190H1
actaccacaatccatgtccaagaaaccaagttttgcgagagttttcgctaaacaaagctcttcagtcatgaacaacaatcaatctgctgccaagaagtatgctttgattcgtgataacttctctacccttgaacaggtgactacagccctgaggaaagaaggattagaatcatcaatctcatccttgggaattgattttacaaagagcatgaatggactgaatctc

SEQ ID NO: 1094 - DNA, 283 bp, Glycine max
  Clone ID: 701038191H1
cgcaagcaaaaagaaagaatcccagggcgaggagaaagatggaggggaaggagcaggatgtgtcgttgggagcgaacaagttccccgagagacagccaattgggacggcggcgcagagccaagacgacggcaaggactaccaggagccggcgccggcgccgctggttgacccgacggagtttacgtcatggtcgttttacagagcagggatagcagagtttgtggccacttttctgtttctctacatcactgtcttaaccgttatgggagtcgccggggctaa

SEQ ID NO: 1095 - DNA, 283 bp, Glycine max
  unsure (1)..(283): unsure at all n locations; Clone ID: 701038192H1
cttttccttctctctggctttcctttgacgcttctgacactgctcnntttctttctctccgtgtcctaatggctnctccccgactcttcttcctgccgcaactccctgatcccctccttcatctactcctcttcctccaaaacgctccctctacaccacatgctcaannnnnnnnnnnnnnnnnnnnnnnnncagccgccggaaaacctccacgccggatcgcgcggcctcatgattcctctcccagcgagtcacgcaagatcgagatgtactcccctgcctt

SEQ ID NO: 1096 - DNA, 283 bp, Glycine max
  Clone ID: 701038193H1
gcaagtaataccagttacaaattacagggtatacaagcaacataaaactcacgttagatattgaagtactactagtcaaaaggttcagtatcgattagttacccctagacagaaaatccgtaacttgttgagccagcaatgcaggttcacgttggtaagatatcataatgcagaggcacattgcaggaagagttttgagcatcaaacgaggagcatcttgagaagactccatggagctactacttttctctacacccttcctttttgttttaggcagtttttt

SEQ ID NO: 1097 - DNA, 284 bp, Glycine max
  Clone ID: 701038194H1
ctaacctacctctttttcttctctctcaacaacttcaccttcttcctcctcgatcatgtctcacttcaagggcaagtaccatgatgagcttatcgccaatgctgcgtacattggcactcctggaaagggtattcttgctgctgatgagtcaacagggacaattggcaagcgtttggccagcatcagtgtagagaacattgaatccaacaggcgagctcttagggagctgcttttcactgctcctggtgttcttcaatatctcagtggtgtcatcctctttgagg

SEQ ID NO: 1098 - DNA, 264 bp, Glycine max
  unsure (1)..(264): unsure at all n locations; Clone ID: 701038195H1
caacattagtgctgagttctttgaacngcaacctaaggaagncttgcccntgtgaatggcactgctgttggttctgggcttggcttcaattgggctttttgaagccaacatcattgctgtctgtctgaggttatttcagcaatttttgctgaagtgatgcaagggaagccagagttcactgaccattgactcataaactaaagcaccaccctggacagattgaagctgctgctatcatggaacacattttggaaggnagctctt

SEQ ID NO: 1099 - DNA, 299 bp, Glycine max
  unsure (1)..(299): unsure at all n locations; Clone ID: 701038201H1
ggcgggtagggtttcgacgngcttcttcttcgtgtttgctctttctctccttcttccttttcagatctccgctgaggaatcatcggagaaagagttcgtactcacattggatcactctaactttcacgacactgtcagcaagcacgatttcatcgtcgtcgagttctacgctccatggtgtgnccactgtaagaagcttgctcccgagtatgagaaagctgcttctatcttgagtagtcatgatcctccggttgttttggctaaaattgatgccaatgaggagaagaacaaagaccttg

SEQ ID NO: 1100 - DNA, 296 bp, Glycine max
  unsure (1)..(296): unsure at all n locations; Clone ID: 701038202H1
ggaatggcttcnctaccctttccgttgatgaacaagtcgttgccatagagctgccantgaaatacggtcncctcattgagttcagtgaacaagagagggntgaacctctctgaggtggtgtgttccanattcacaatgggcnggtttggagaaaccaaggacagaaggacagtgagagtggaatgcttcatgaaagaaagcagccccaatatctgggtgaggcctatcagtggactcacaatggtggttgaccttgaactcatgaagatcgttcagtatcagacggtggcattata

SEQ ID NO: 1101 - DNA, 292 bp, Glycine max
  unsure (1)..(292): unsure at all n locations; Clone ID: 701038204H1
ttaaatcagcggcccggatgcatttatacttacaccgaatcacgaggcgacaacatcgacatggagggtctcatcaacggcttcatcaangttgctctcggagctgatggtggcgatcgggaagaacaacaacacgggagagacgaccgtagtagaagctcctgggctgaagtcgtctcccaggatcaacaagtaccattccaactcccatgtnttttaatatttgcttcatcacccaatctcatttcttcatcttcatttttgcaggatcaccctcttcctcatcaccaac

SEQ ID NO: 1102 - DNA, 291 bp, Glycine max
  Clone ID: 701038205H1
tgttgttccttcgttcgttccctccactaagcaaaacccaaaagacattcattttcgtttcgtttgtatagagcatggccggtggttctatcaagagacattgtttctccgaagaggacgatgtggagcctgggtattctgggcacaaccacttccatcattaccaacacggttttatttctaggacattgggttatggcactttctacaaccgacgtgtgaggagccattcgattttctcgccgagatctgggagatttatgatgccagattcgaagaccaccaacccca

SEQ ID NO: 1103 - DNA, 291 bp, Glycine max
  Clone ID: 701038207H1
aattgttcaacttgagatgatggcatcatttgcagggactactcagaagtgcaaagcatgtgagaagactgtgtatttggtggatcagctcactgctgacaacaagatctatcacaaatcatgtttcagatgctaccactgcaagggtacccttaagttgagtaattattgttccttgagggtgttttatactgtaagcctcattttgatcaactctttaagaagactggcagcttggacaaaagttttgaaggtattccaagaactgcaagacttgaaagatctgccgat

SEQ ID NO: 1104 - DNA, 290 bp, Glycine max
  Clone ID: 701038208H1
ctgcatagtaatcattactttggaaatgattccggcattattgaaaatgaagctgtttctaagtcaaatgtggtcaagtttgaagtgcagctttacaaaactcgtgaggagaaatatctgcttgatcttcaaagggtccagggcccacagtttcttttcttggatctgtgcgctgctttcctttcacagctacgtgttctctagtgaagctcacaagtcgcaaaggagaccttgaggtgtcttgtgtggcatgtgaataagcttacgttgtacatatcaatgccctttca

SEQ ID NO: 1105 - DNA, 287 bp, Glycine max
  Clone ID: 701038210H1
cgggttacaagcttgactggggagtcaagggaatctggttaggaatgatatcagggactatcctccaaacatgtgttcttttggtgctgatttacaaaactaattggaacgaagaggcctcccttgccgaagataggatacggacttggggtggacataaaaaagcgactgtgaatgacacagaaaacacacaagaaacatgaaattgcagtaggagaattggtacgatatgaagtatgatacttgaattgttgacagaaaagctttagttgctttagaatattcta

SEQ ID NO: 1106 - DNA, 286 bp, Glycine max
  Clone ID: 701038211H1
tcacccttgaggtggaaagctctgacaccatcgacaacgtcaaggccaagatccaggacaaggaaggaattcccccggatcagcaacgtctcatcttcgccggaaagcagctcgaggacggccgtaccctcgccgactacaacatccagaaggagtcaacccttcaccttgtccttcgtctccgtggtggcatgcagatcttcgtcaagactctcactggcaaaaccataaccctagaggtcgaaagctctgacaccattgacaacgtcaaggccaagatccagga

SEQ ID NO: 1107 - DNA, 282 bp, Glycine max
  Clone ID: 701038212H1
cattttcttcgtagccaaacactctgaaattctcagttatgtcgtggcaagcgtatgtggatgatcacctactgtgtgaaatcgaaggtaaccacctcactcacgccgctatcatcggccaagacggaagcgtttgggctcagagcaccaacttccctcagttcaaacctgaggaaataactgccatcaataatgactttaatgagcctggatcacttgctccaactggatgtatatcggtggcaccaaatacatggtcatccagggtgagctggtgctgtc

SEQ ID NO: 1108 - DNA, 282 bp, Glycine max
  unsure (1)..(282): unsure at all n locations; Clone ID: 701038213H1
cctctcgcccagaatccgagatcaaccccgacgaaggcaaggggtttttctcggcttcttcagatttctgaaatggcgcctgtttcagctttagccaagtacaagctcgtcttcctgggtgancaatccgtgggcaaaaccagcatcatcactcgcttcatgtatgataaattcgatancacctatcaggctacaattggtantgattttctatcaaaaactatgtatcttgaagatcgaactgttcgactgcagttgtgggatacagctgggcaggaaaga

SEQ ID NO: 1109 - DNA, 205 bp, Glycine max
  unsure (1)..(205): unsure at all n locations; Clone ID: 701038214H1
ccgcgaaaaagagntggagagagagagaagtgagantgtgagagggagnacagtgaagaagagaacgaaggaacgaagatggagactcctcctccgnaacaaggcgtggtgaagaagaaggagacaaggggccgaaaacccaagccgaaagacgaacacgccaaggcgttgaaggaagggagaaaaacacagcaacaacaacatg

SEQ ID NO: 1110 - DNA, 284 bp, Glycine max
  unsure (1)..(284): unsure at all n locations; Clone ID: 701038215H1
tgagcngcactgttctttctttgtntattgttctngttcttcattcacaccccattctctcncntcanacgttcaaaccctgaaacctttctatctttttcntttgattattatttggngagactgagacgtgtttgtctttnctcggagcttttgattactttaacattttggnttgctggtaatattccttgttcgtcttcagttgttacacttttggcccctttttaggtttcggtgattttccggagacccaggttggaattcgcaagatctaaggtntt

SEQ ID NO: 1111 - DNA, 289 bp, Glycine max
  unsure (1)..(289): unsure at all n locations; Clone ID: 701038216H1
ctaacactcattaattgcaagantggcacttcgttgcttggngatgtccctttctgttctcttcactcttggtcttgcgagagaaagccatgccagagacgaagatttttggcatgctgtttggccaaacactcccattccaagttcattgcgagatcttctaaagcctggccctgcaagtgttgaaatcgatgatcaccctatgcaaattgaagaaacacagtacccgaaaaccttcttctataangaagaccttcatccaggcaaaacaatgaaagtacaattcagc

SEQ ID NO: 1112 - DNA, 294 bp, Glycine max
  unsure (1)..(294): unsure at all n locations; Clone ID: 701038218H1
gcaaacttcaacttgtaatcaagggagagaganaatttcaagcacaaaaaatggcggagaagaaagtggtgatcctaggaggtggtgttgccggtgccaaccttgcaaaaactatacaacatcaagccaacgtcacccttattgatccgaaggaatattttgagattccatgggcaagtttgangggattggttgagccaacttttgctgaaaggatagtaatcaaccatagagagtacttcaaaaagggtaaccttgttgtatccagtgctgtcaacataactgaaactgcag

SEQ ID NO: 1113 - DNA, 290 bp, Glycine max
  unsure (1)..(290): unsure at all n locations; Clone ID: 701038219H1
gcccttctaaaacgccttactctgtatcttctttcatcatccaaaaaaaaccattcacacaaagaaaacctntgggtttcccaagatgtcatcatcggaactctcttctttctttctcctgcccctatcagccatactcagtttcgatgctttgctcggagttatgtttctagtggccgtgttcggctactggctggttcccggtggtcttgcttgggctttgtccaaattcaagcctgcgattcccgggccttgcggttacccggtggtgggcctggtttgggctttca

SEQ ID NO: 1114 - DNA, 288 bp, Glycine max
  unsure (1)..(288): unsure at all n locations; Clone ID: 701038220H1
gttgttcaagtaaatggccttcgtcaccactgctgaagtgtgtgatgcgaacccccagttaattttgagtggggagcntcgtgcccttcagccagtttttcagatttacggtcgtcgacaggtcttctctggacctatagttaccttgaaggtgtttgaagacaatgttttggttcgngagttcctgaagagaaaggcaatggaagagtgcttgttgttgatggaggcgcgagtttacgctgtgctatattgggtggcaaccctgtggtacaagctcaaaacaaggat

SEQ ID NO: 1115 - DNA, 290 bp, Glycine max
  unsure (1)..(290): unsure at all n locations; Clone ID: 701038222H1
ctttgaaggaattggttatgcttcctttacagaggcccgagctattttgcaaagggcaattaaccaagccgtgcaagggtatcctattatttggtccccctggaacaggtaagacaatgcttgcaaaggcagttgctaccgaagctggtgcaaatttcatcaacatttccatgtcaagtatcacatctaagtggtttggtgagggtgaaaagtatgtcaaagctgttttttccctggctagtaaaattgctcctagcgtgatatttgttgacganttgnatagcatgttg

SEQ ID NO: 1116 - DNA, 287 bp, Glycine max
  unsure (1)..(287): unsure at all n locations; Clone ID: 701038223H1
ttgtgtttgcntgtctctccgtaaatngccttcgactgtgacaacacgcaccgatcgccatgaacatcttcaccaagaaacccaccgccaaagaggctcttcgtgagagtaaacgtgaaatgacaaacgccagtagaggtatagagaaggaaattggagctctacaatcggaagaaaaaaagcttgttgctgagataaagagaactgctaagacgggaatgaggcagcaactaaaattctagctcgccattgatcaggcttaggcaacaattgctaatcttcaaggt

SEQ ID NO: 1117 - DNA, 283 bp, Glycine max
  unsure (1)..(283): unsure at all n locations; Clone ID: 701038225H1
cttcaacttcacccattcatacgtgntgttgttactgctgctcttttctcttttcttttctctttagttctctcttcccctnnnnnnnnnnnnnnnnnnnnnnnnngagcttgtttaagcttttcttccattaacatattatcacaatgtgtggtattcttgctgttcttggttgttctgatgactctcgagccaaaagggtccgcgtgcttgagctctctcgcagattgaagcaccgtggccctgactggagtgggctccatcaacaggtgactgctttttg

SEQ ID NO: 1118 - DNA, 286 bp, Glycine max
  Clone ID: 701038226H1
cctcctcgactacttcgacaacacaaagctccaccagatcaccaacgggaccactctttccaccactctctaccaaaccacaggtaatgccaacggcaacgtcggctccgtcaacatcaccgacctcaaaggcggcaaggtcggcttcggctccgcggctcccggctccaaactcgactcctcctacatcaaatccgtcaaaagtatcccctacaacatctccgtcatcgaaatcagcgcgccgataatggcgccggggatcctcgcggctcctcctccgtcagcc

SEQ ID NO: 1119 - DNA, 285 bp, Glycine max
  Clone ID: 701038227H1
cataaaccctacttctacttcccccctttgctctcaaaccttatcacctaatccttatcctcccaaaccagaaaaccatgtctacctccgcagcttccctcgcactcccaaccctcactctccgaacccgacaacctctatgttctccccaatgcttctcctcgtccctctccctcacacccaacaacaaacccatttccatttctgctgtttttctcaaaccaacaactctgtcgtcgtctcgcttcgttccccacgtcgtggtgtcgtcggatttggggcagg

SEQ ID NO: 1120 - DNA, 281 bp, Glycine max
  Clone ID: 701038228H1
cctcgtttggggtaagtgaaatttgagcagtttttgccaaacgagggcaaatccgggggtggaagagaggagcaagcggtggttgatgagaagctctgaaatttcaccaacttggggtggacgctaaccgttacctttgggaagaaactgcttctatgccaaactgcgtttgcagttaacgaagctcctctcagcaaccctttgctagtcatcttcagcacgaagagagcgtcgtcgtcttcgctatgtcgcgacagactccagaagagccgaatacctcc

SEQ ID NO: 1121 - DNA, 281 bp, Glycine max
  unsure (1)..(281): unsure at all n locations; Clone ID: 701038229H1
agacaactcccaacttctctcagtactctcatcaggatccgtgtgagcagtcgagcagagagatgatcatcaacgtgaagnnatcgacggtggtgcggccggcggaggaggtggcgcggcgggtggtgtggaactccaacgtggacctggtggtccccaatttccacacgcccagtgtatacttctataggtccaacggcacctccaactttttcgacggcaaggttctgaaggaggcactgagcaaggtgctggtgccgttctacccaatggctgggcgg

SEQ ID NO: 1122 - DNA, 284 bp, Glycine max
  unsure (1)..(284): unsure at all n locations; Clone ID: 701038231H1
gcaacanctnagaaagaatcccangcgagganaaagatggaggggaaggagcangatgtgtcgttgggancgancaagttncccgngagacagccaattgggacngcggcgcagngccaagacganggcaaggactaccaggagccngcgccggcgccnctggtngacccgacggantttacntcatggtcnttttacagagcnnggatagcagagtttgnggccacttttctgtntctctacatcnctgtcttaancgntatcggantcgcgntgcnaantct

SEQ ID NO: 1123 - DNA, 284 bp, Glycine max
  unsure (1)..(284): unsure at all n locations; Clone ID: 701038232H1
attaataacaagctagctattagttcgantttgtagtaagtgaggtgccaatatggtgaagatagctcttggtactttggatgactcttntagcgctgcctctcttaaggcttatttcgcagagttccacgcaactctgattttccgtgttcgctggtgttggatcagccatcgcttacaacgagcttacaaaagatgcagccttggatccaacggggctggtggcagtagctgtggcacatgcattgcactgtttgtagtgtctcgtcgccgccaacatctca

SEQ ID NO: 1124 - DNA, 294 bp, Glycine max
  unsure (1)..(294): unsure at all n locations; Clone ID: 701038233H1
acctggccaccttctagaaaccacgccaggcccaccaaaaaacctgaaccggttccggacccggtcgaaccggaggagaagttcgcgnacgagtccatgataacaaccgcggaagaattggggtggctgggggagatggaagcgacgtcgtccacggttctcgaaagcccgtttatggctacgacgtcnccatgctgacgtggcgctgattccgatgagggaggaggacgagtcgctcttcgccgacctcggagagctgccggagtgctcggtatgttccggcagggctgctgg

SEQ ID NO: 1125 - DNA, 289 bp, Glycine max
  unsure (1)..(289): unsure at all n locations; Clone ID: 701038234H1
cgagcttgataagcaataagcaactactccctcgtatctcacagttgttgaaaagcaaggtacatgngttgggtgaaggggttcgtggggcacagatgggtggtgtttgtgtgcgcgatgtgggacatgtcgtttgcggggacatcttacatgttcgggagcatatcgccggtgataaagagcagcatgggtttcaaccagaagcaggtggcgttcttgagcgtggctaaggattgggtgacaacttggtcttcttgctggaaaaatcagccaggcttcccctgtttgg

SEQ ID NO: 1126 - DNA, 290 bp, Glycine max
  Clone ID: 701038235H1
caggagcattgaggaccaaggtggacagcgatggcgcgaatgtcatggttgcattatacgaaaacggtttggtcaccgattgtccaagaggggagaacaaagggcgtgtcctatccaacgactatgttgttagaaagctcgaaaagctctgcactgtcaaagacatctctgccaagaaaacagtatcaggaatggttaactttcccttatgggaaggattcaaaagcagcaaatgtggtttggctgtctttgttcagagcaaatctcaccagatttttggttcacagagt

SEQ ID NO: 1127 - DNA, 288 bp, Glycine max
  unsure (1)..(288): unsure at all n locations; Clone ID: 701038236H1
cactttttagtcatcacggtttctgcccacnatatggtataggantgttgatcgacaaatctctccataaagattgattgctttggtaacgtgacattgcatgacttgattgaagacatgggtaaagaaattgtccgaagggaatcaccagaagagcctgaaaatcgcagtaggttatggtgtcctgaagatatagttcaagtctagaagaaaataagggtactagtagaattcaaatgatagctctgggatatctcaattatgaagaagtagatgggatggatggcc

SEQ ID NO: 1128 - DNA, 289 bp, Glycine max
  unsure (1)..(289): unsure at all n locations; Clone ID: 701038237H1
catttggggtgtgtgagtgcgtgtgtgtggttggntgtttgtntgtntgtttgttcatcaacaatgaagatatctgatgagaacagttctaaaccaatcaaccccacaagttttcaaggagggatagaatgtgtggggaacagaaagatggggcagaacagaagggctttgancgtgatcaatcaggatctggtggcggaagggagaccttacccttgtgttgttaacaaaagggcattgggcataaaaacacgatgtttgtgagaagaagcaggcggatccagggcat

SEQ ID NO: 1129 - DNA, 289 bp, Glycine max
  unsure (1)..(289): unsure at all n locations; Clone ID: 701038238H1
ggaacagactgcatattagtcataggatatccttggtatgaaggccagcagactgagtcaagtgaacctgattctnggagtgaatctgattcagataaacagaatcactccagtcattcttcgaaggatgatctgaagaggaaaaagcacagaagaaagtcatccggaacagttgtgattcgtaacatcaactacatcactccaaaaaggagaaatggaaatgaggatggaggctctgatgaatctttagaagatgatgatgtcatcgatgacgaaaccatcaaacaaa

SEQ ID NO: 1130 - DNA, 288 bp, Glycine max
  unsure (1)..(288): unsure at all n locations; Clone ID: 701038239H1
tttctttgtctcggtcagantttctcacagagaaaacaggaaagcgagaaccttcttaccccttcacctcttctctcttttcctatttctttctctcangtttcgctccatcatccctcacacctcagcccaccctacccgnancccacccaccttcttctttctctctttcttcccttttccctttagttttcgtntgttcttcccttgtgggttctcttgtttctctctgatctcatgaagaagatgaaaggggttgtccccatggaacctccttatgaggtgtac

SEQ ID NO: 1131 - DNA, 284 bp, Glycine max
  unsure (1)..(284): unsure at all n locations; Clone ID: 701038242H1
cntcaactctgcttcccctggcaaccttcttcttagttctctaccgcttcttatctccagattgctggggcgaaagcacaaccgttgactagtctcaagcttaactctccgatccttcaggagtctattgctaaagagatcaatgaaaatcctgaggcaggatgggaggctgctataaatcctcatttctccaattatacagttgaacaatttaagcgccttcttggagtcaaaccaacgcctaagaaggaactgagaagtacacctgctatatctcacccaaa

SEQ ID NO: 1132 - DNA, 212 bp, Glycine max
  Clone ID: 701038243H1
agaaagaagaatggaggaggaaggtgacatatacgacggtgttcgagctcagttccctctctcattcgggaagcaatcgaagcctcaaacccctcttgaagccatccacaatgcgacacgtcgttccaattccaatcccaaaacagccaacgaccttccttctgtctcctcctcttccagggattggctcaattccctccgccctcccaaaa

SEQ ID NO: 1133 - DNA, 276 bp, Glycine max
  Clone ID: 701038245H1
ttcgctctctctgcttcactttctcgcttttgcattttcttgtgaaaaaaaaaatcctcagaacaaaaataggtctcttcttctctgatctaccaaagcttcaaattctccttagtttggtttgtctgtgagtttggagtgtaatgtcgccgccgacgctggtaacggaggaggaggggcggagcaccgtggcgtccgattcttcgcaatccttggactgtttctctcagaatggtgctggattgaaagaaggaattacttagggttgtctgattg

SEQ ID NO: 1134 - DNA, 267 bp, Glycine max
  unsure (1)..(267): unsure at all n locations; Clone ID: 701038246H1
cnctgagagtgaatatggtgtgctggattgcactggtgctgccaacagtggaaatggtattgtttgcagaagatgatttctttttttatgtcactaatgtgctcctattaagattgattcggagtttctaattctgatttagtttgatgattgttcttctgtttaattgtgtcctaaaccaaagtgtcctgttgaataaaaagtgaaatattttaatttgttcgattcataaacgaacaaatgggtgagatatataccaggttctct

SEQ ID NO: 1135 - DNA, 283 bp, Glycine max
  unsure (1)..(283): unsure at all n locations; Clone ID: 701038248H1
gaaaatcctctgatactgttgttttcctgaaaccatcacaatttgtttctcaatcatgtcaacctcatcctcttcccaaagcctcaaaattggcatagttggattcggcaactttggccagtttctggccaagacaatgataaaacaaggccacactctcacagcaacttctcgatctgattactctgaactttgtctccaaatgggcatccattttttcagggatgtcagcgcattccttaccgcggacatagatnncatagtgttgtgcacatcgatatta

SEQ ID NO: 1136 - DNA, 291 bp, Glycine max
  unsure (1)..(291): unsure at all n locations; Clone ID: 701038249H1
ctctctcttttcttcccattttgccccttcctcctttccttgtttccgagnagggccaaccacatatgctaaacaaggaaactaaattctaacctccttcagatctacaccacccttctctttttttccagtttcataaattctacaccatgggcacggnggttctacggccacaagattgtttcacccaccgcatcgctgttccaccggcggggttttcccggagaagaacctctgggacacacaacaacaattacttcaggggcacgcggaagccggttacccgacccg

SEQ ID NO: 1137 - DNA, 240 bp, Glycine max
  Clone ID: 701038250H1
aggctctttttttcttttttgttggtttctcttgttttttttttgtaggtactgaggaagaaagaccaaaactttatccgcttgcttcacttagctcaagagcgtacaattcaggcaaaggccttgaagtcggagtgtgtgttaaggatttcttaggagttgcttctgtcttgactgaagaaatggaggtatatggcaaatctatggttgcaggtccgcaaagttattttctgtcaagta

SEQ ID NO: 1138 - DNA, 113 bp, Glycine max
  Clone ID: 701038251H1
ctccctctttctcgtcactagctctgtgcattcttctctcgctctctgccttccatcacactcggcatttcctttcccaagatagtagaagatggcagacactgaggatattc

SEQ ID NO: 1139 - DNA, 287 bp, Glycine max
  unsure (1)..(287): unsure at all n locations; Clone ID: 701038252H1
gcaaagatgtttcctttcgggcaaaagggtnaaaagataaaggggactatggtggttatgcagnagaatgtgttggatatcaacagcatcaccagtgttggagggatcgttgaccaaggcttaggcttcataggcagtgcagtcgatgcacttacttttgcagccaccaaaatctccatccagttgattagtgctaccaaggctgatggtgggaaaggaaaaattggaaagagtacaaatttaagaggaaagataacattaccaaccttgggagctggcgaacaagc

SEQ ID NO: 1140 - DNA, 284 bp, Glycine max
  unsure (1)..(284): unsure at all n locations; Clone ID: 701038253H1
ggcttcaaagtcttggtctatcccaacgtggactacgcattcatagtgacactacttatgattattgatgacatcaaagattatgatgtgttggtaaatgcgacggtgagtggtgtcctaactgtggcgacggggggtatcttacctattctgacattgtttgagggagaaaatttagaagaagaaaccttagatggagaaaacttagaagncgaatacttacaaganggagaaaacaactcaggtggagaaaacttagatggagaaaacaacccagaaggaga

SEQ ID NO: 1141 - DNA, 282 bp, Glycine max
  unsure (1)..(282): unsure at all n locations; Clone ID: 701038254H1
tagttattccttgcttcacttgtatgctttagtttctagcatcgatcactcctaattacttgctgcatttctctactccttgtgcttgacacttttgtcatttaaaatggaacttaattttaagtaccaacttagccttttctgtgtcacactgctcttacctgccctgtgtacctctcaagactcttttacgtgctccagagcaacctattatggtagcccagattgttatggaaatccaaggggagcttgtggctttggagaatatggnaaaaggtaaag

SEQ ID NO: 1142 - DNA, 283 bp, Glycine max
  Clone ID: 701038255H1
ttatattctctcactctcttactctttcactctacttctctctcctattgcggctagggtttaggtttttctttcaccgtctccgttccttcaatcttcttattctctttcatctctgatggagacgttgcgggtttagttctaaggggtggttctggccttgggtttttggaacgtacggtgtcgttttggggttgggaaaacaaattctgagagatggcaaccacgaacccttttgatttgttgggtgacgacgctgaggacccttctcagctcatcgccg

SEQ ID NO: 1143 - DNA, 283 bp, Glycine max
  unsure (1)..(283): unsure at all n locations; Clone ID: 701038257H1
attgaatcttcttcatcactgccaaaaacgncaaaccaaaattttaaaacataaatctccaaccccattttctcacacacactctctttttctcttccaattacaacacaatcngtctgagattcgccaccgaaaaacctctcaccatggtttctcgccatttggtttcgctcttcctctgtttcctctgtttcgagatctctgtttcatcaattcgattgcccggtttggaccaagacgccaaggccacgcatggatcggtgcttaggttgaacagaggagg

SEQ ID NO: 1144 - DNA, 281 bp, Glycine max
  unsure (1)..(281): unsure at all n locations; Clone ID: 701038258H1
cgaagggcttcgaatctctctgaaacttttctcttctctttgattcttctctaccagtgaatctcacggcaagcaatccagcaggtgtatgatgccaagcttaacaagtgaacccaaaaatgttgaaatctttggtgtctatgaaatcatagtgagcnggtttagtggtgttgatcaagcccctcatttgctcaccaagacatcggatttgttgtgtgctaccttaaacttttggtggccaattctacatctggaagctagaagagtgtcccttccctcga

SEQ ID NO: 1145 - DNA, 279 bp, Glycine max
  unsure (1)..(279): unsure at all n locations; Clone ID: 701038259H1
ctgctcgtgcctctagggttatcatatctccatttccatttccnctctctcagtttccaagaatcttaagctatgggaaagtcttacccaaccgtgagcgctgattaccagaaggccgttgagaaggcgaagaagaagctcagaggcttcatcgctgagaagagatgcgctcctctaatgctccgtttggcatggcactctgctggaacttacgacgtgagctcgaagaccggtggtcccttcggaaccataaagcacccctccgaactcgctcacggc

SEQ ID NO: 1146 - DNA, 276 bp, Glycine max
  Clone ID: 701038260H1
tccagtatggggttgggatcttacatgctacccagaatgagtcaaaaatcctgaagaagtctcttaaggatgttgtaacagaaaacgagtttgaaaagaggcttttggctgatgttattccacctaatgacattggtgttactttcgatgatattggagctcttgaaaatgtcaaggatacattgaaggaattggttatgcttcctttacaaaggccagagctattttgcaaagggcaattaaccaagccgtgcaagggtatcctattatttggtc

SEQ ID NO: 1147 - DNA, 277 bp, Glycine max
  unsure (1)..(277): unsure at all n locations; Clone ID: 701038261H1
ccaactctggcttcaacatctgctggtcgtgaganctggggagagaccaacttggctgatgctagccctaggactgatacttcaacagatgatacagaagacaaaaatcaaaggcctgaaaggggtgaatccagtggatcaaaagataaatcagatcanaagacattaagacggcttgctcaaaatcgtgaggctgccaggaaaagccgactgaggaaaaaggcatatgtgcaacaattagagagcataggttgaaactgacccaacttgagcagga

SEQ ID NO: 1148 - DNA, 276 bp, Glycine max
  Clone ID: 701038262H1
cgcatcgcagcctgttccagcattcgggctttccgctggagtcggagttggcaacgctttggtgttggagatcgtgatgaccttcggtttggtgtacacagtctacgccactgccgttgaccccaagaagggcaatttgggaattattgctcccatcgccattggtttcattgttggcgctaacattttgttgggtggggccttctccggagcagccatgaaccctgctgtgacatttgggcctgctgtcgtgagctggacctggaccaaccatgg

SEQ ID NO: 1149 - DNA, 280 bp, Glycine max
  unsure (1)..(280): unsure at all n locations; Clone ID: 701038263H1
ctgctttaagtttgtggctttctactttctctttctagagtagnnctaaactcatacactgatcatgggagtggatttaagacaagtggtggcgggtgtcctcaccctcacaatgttcgtcatgcttatacacatgatcaaaagagaccattttgatgctgttgatgataaacttcctggaacggaggatgtcagctttgaaagtacaaactttgatactactcatgttaganagaacatcgggatttggaagggagatggtgatgagttaaaaccatgt

SEQ ID NO: 1150 - DNA, 285 bp, Glycine max
  unsure (1)..(285): unsure at all n locations; Clone ID: 701038264H1
tctcatccacacgaatcacactntncacagtgcgattcattnnaccaatggatcgcaacggcgttctctgctctcgcattcatctgcattgtagtngcnggcgtnggaggacagtctcncgccgcagcgccgtcaaacactccggnaactcccgcngccgccactcccgcccaagcaccttccacagtaccgaaatcanaagctcccgttgcttctcccaaatcatctccancagctgnaacccctgcatctatccggcggcatctnccaccaccanccncgcng

SEQ ID NO: 1151 - DNA, 286 bp, Glycine max
  Clone ID: 701038266H1
tctgcttcccctagcaaccttcttcttacttctctccgcttcttatctccagattgctggggcggaagcacaaccgttgactagtctcaaacttaactctcatattcttcaggagtctactgctaaagagattaatgaaaatcccgaggcaggatgggaggctgctataaatcctcgtttctccaattatacagttgaacaatttaagcgccttcttggagtcaaaccaatgcctaagaagggacttagaagtacacctgctatatctcacccaaagacgttgaaa

SEQ ID NO: 1152 - DNA, 283 bp, Glycine max
  unsure (1)..(283): unsure at all n locations; Clone ID: 701038267H1
gcatagggacatggtcctctcggagtacctcccgcgcgtgatggaggaagccgaggtggcgcgtgagcggaggaagacgctgaagctcttcacgccggcggacntgaggatggtgggaaggagagggtgcganatgtggcagggcgtgaatccggaccatcccgccaagttcgagacgctggcgatggatttggagatgaaggagatgataataaaggatttggatacgtttcttgagaggaagtttttgtataagaatgttggaaaggcttggaagagagga

SEQ ID NO: 1153 - DNA, 288 bp, Glycine max
  Clone ID: 701038268H1
gcaaagaaatggaagggttgtcgtcttcatcggcgatcgcgcagaaaacatgggaacttcgagaacaacatcatcccgatggacactccgggcggcgccgctacctcctccaccgctaccaccacgaccaacgccgacgactcgatcttctactacgacgaggcggggcagaacgagttccagcgcgacaagccctgggccaacgacccccactacttcaagcgcgtgaagatctccgcacttcgcgctccttcaagatggtcgtccacgcgcgctccggcggcacca

SEQ ID NO: 1154 - DNA, 205 bp, Glycine max
  Clone ID: 701038269H1
ccaccccaaaaacaaagtgagattataggaaacaaaaatttctttgcttaatactagttcctcctttctcctagcctggtagtcttttgaaaattctttatcttgatcacataattttcattttgaacttgaagaaagttttagtgtatttttttttccttaaagaaacagaacatatcctgttctttctttctctgtttgcatt

SEQ ID NO: 1155 - DNA, 283 bp, Glycine max
  Clone ID: 701038270H1
ggctttctgtccaagctcatgttcctcagttgaagccacccccatgcaatatcaacgatttaggagaacagtgctcagaagcaaagggcatgaaggccatgatattcttcgtagccctgtacttggtggcattaggtagtggttgtgtcaagccaaacatggttgcttacggaggcgaccaattcgaccaagacaaccccaagcaattaaagaagctctctacctacttcaacgctgcatattttgcatctctttgggagaattgtgagcctgaccattcttg

SEQ ID NO: 1156 - DNA, 281 bp, Glycine max
  unsure (1)..(281): unsure at all n locations; Clone ID: 701038271H1
cnatgagtcgtcatcccgaggttaagtgggctcanagacttgacaaggtctatatcacggtgcaattggctgattcaaaaaatgccaaggtggatcttacaccagatggtatttttaccttctctggtagtgctggtgctgaagaccatcagtatgagctaaaactggagctctttgacaaggttaatgtagaggagagcaaaattaatgtaggagtgcgaacatattctgtgtagtgcagaacgcagaggatggatggtggaaaaggttatgcctggaga

SEQ ID NO: 1157 - DNA, 284 bp, Glycine max
  unsure (1)..(284): unsure at all n locations; Clone ID: 701038272H1
gaagagaagaggncttgtattttctgccagtttcccagtatggtggccacaagcacaaatcaatccgagttagaaacaagtaagaaggattccacttatgacagaatagctgaagtcaaagcctttgatgaaacanaacttggtgtgaaaggcctcttcgattctgggatcacaaagataccacgcatgttccatcatgccaaggtngaggaccacactgaaaccatgccaaatgactcaaacttcagtgtccccatcatagatctccaagatatagacacaaa

SEQ ID NO: 1158 - DNA, 278 bp, Glycine max
  unsure (1)..(278): unsure at all n locations; Clone ID: 701038274H1
ctttcgcttctgaatcttcaacaatggtgctcgaggcgacgatnatctgtatcgacaattctgaatggatgcgtaacggtgattactctccttctcgatttcaagctcaagcagacgctgtgaatctcatttgcggtgctaaaacgcagtctaatccagaaaatacagtgggagttctcacaatggcagggaaaggcgttcgtgttttggtcacccctaccagtgatctgggcaagatcttagcctgcatgcatgggctagatataggtggtgagatg

SEQ ID NO: 1159 - DNA, 279 bp, Glycine max
  unsure (1)..(279): unsure at all n locations; Clone ID: 701038275H1
canatacgaaantccnccgagtgnttcgagntctaccaagttagncaatcagcatggcacctaaaccctgggctttctgccgctttaatttctcgttctctcgccatcaagtccatatacatcgttccagcatggagaagataaaaataaaactactcatgaaggatgaaacatttctccaacacccttttgttcttgctgttgttctggttttaggccttgttatgatggacccttttcatctgggtccagtgtctgagcatgaattcagacccgtga

SEQ ID NO: 1160 - DNA, 317 bp, Glycine max
  unsure (1)..(317): unsure at all n locations; Clone ID: 701038276H1
aagntcannanttgnggacntcaccacaccanacanatacagantacttagacctggaanngcnaaggaagaganagnngncatcttggagaagcattcttncgttnaggacaganaccacgtaatcatnagtngtgatttcatttgncagngtgcacgttccttagtctanggccnaatgttttcaactttggcatttagggaaantancgggttgantaaatgganacggttcaatgccggttgcaaactcaagttcnagccnntttgcggattcggcncattaattgagncatggggcctttcaacattcncgt

SEQ ID NO: 1161 - DNA, 277 bp, Glycine max
  Clone ID: 701038277H1
ctcaggtactgcgtttcggaagcagacacagatggctcgtacgaagcaaaccgcttcgtaagtccacaggaggaaaggctcctaggaagcagcttgcaaccaaggctgcacgtaagtctgcaccaactactggtggtgtgaagaagccccaccgttatcgtcctggtaccgttgctcttcgtgaaattaggaaataccagaagagtaccgagcttttgatccggaagctccccttccagaggctggttcgtgaaattgctcaggacttcaagactga

SEQ ID NO: 1162 - DNA, 280 bp, Glycine max
  unsure (1)..(280): unsure at all n locations; Clone ID: 701038278H1
cnaaaccctatgggccgacgaagccaaagccaaaggcaacgcagccttctcctccggggactatcctgccgccatccaccacttctccgatgccatcgccctggctccctccaaccatgtcctctattccaaccgatccgccgcatacgcctccctcaaaaactacgcagatgcattagcggatgccaaaaagacagttgaactcaagcccggactggtccaagggttacagccgtctcggtgccgcgcatcttggccttttcccaatagatgatgctat

SEQ ID NO: 1163 - DNA, 263 bp, Glycine max
  unsure (1)..(263): unsure at all n locations; Clone ID: 701038279H1
aaaattacagacgattggacattnactcactaataagattttcnccatttanaatattttccnaaagtcccaaagtcaaacacaatnaatgattcaaatagnatcgtgtgttcactcctgtttagtagnatcnaaaatggcgcattcttctgttatagtcttcctctgnactctccttctcttcttttctccgtcaattcgtgcctccgacgatgacgtggcgctgcacgcgaagaagctcatcagagacctcaattgttccc

SEQ ID NO: 1164 - DNA, 279 bp, Glycine max
  unsure (1)..(279): unsure at all n locations; Clone ID: 701038280H1
ttgaatagngcggttaaaaaccgcggttgacagctataacctttcatgtggaaatagcgttcctttcacacttgcgttcttgancttctttctccttttcacgggctttctcttcttttcctctggcttcatcatcatctctctatctgcaccccttttgagaacttcaacttgttacttaattactctactctcccctttctancttctgtgttcttcttcttcggttctctcttcatggggtgctgcttaagtgccaggatcaaagctgagagccct

SEQ ID NO: 1165 - DNA, 284 bp, Glycine max
  unsure (1)..(284): unsure at all n locations; Clone ID: 701038281H1
gaccttctcaggaaatccttccagcttcctcgcaaaaacatcggtgccattatgganattgggctccccaacgaacgtgcgccatgttgcgcatgtcacctttgataggttcaatggtttcttgggcttgcctgttgagtttgaacctgaggtccccagaaggcctctagtgctagtgcatctgtttttggagnttcaacagaatccatgcagttgtcgtatgactcaagagggaacagtgtgccaacaatactgctgttgatgcaaaggcatctgtatgttca

SEQ ID NO: 1166 - DNA, 283 bp, Glycine max
  unsure (1)..(283): unsure at all n locations; Clone ID: 701038282H1
cgaacggcgagcgtagtcgcaaganacgcaacagaatagaacgacgaataggcgtgcagggaaaccatttcattttcgagcgcgtcgctttcgaatccaatggccttcaacaacgcactgagatctgccgcgaagtcgtcgcttcttccgaatcttccttctctaactcagtgagcagaggttttcattcaactggcatgaagaggatgggaggtggacatggtcatgatgagccctactatcttcatgcaaagcacatgtacaacttggacaagatgaagca

SEQ ID NO: 1167 - DNA, 264 bp, Glycine max
  unsure (1)..(264): unsure at all n locations; Clone ID: 701038283H1
cccggcactctccaagtgcgggtacngatggggtcaaagtcgatgtcatccacttncctaacccatggtgtgtgagaaatatggagggcgagtggatatggcgaaagcatattacaaagctctcactgcttccgtgagaaaacattttaagggcaacggcgtcattgccagcatggagcattgcaacgatttcatgttgctgggaactgaagcaatatcccttggtcgtgttggggatgatttctggtgcactgacccttatgg

SEQ ID NO: 1168 - DNA, 274 bp, Glycine max
  Clone ID: 701038284H1
ccgggtgctttaggggcagcgggtgctctaggggctacatattgtccaccctatctcactgttgatggtgcttatcatgcccgacaatcaggacaaacatctgcaacacctatttcaagcaaggaaaataatgtgaataaagctaataatgaatggaaatcaccacagaaatcagagcctgtaaatgatgagtttggacagaggcaaaataagccccgcagatactcggagatgaattttgggcaatgaagtattatagaatgcaacttgtttg

SEQ ID NO: 1169 - DNA, 283 bp, Glycine max
  Clone ID: 701038285H1
gcaaaaagaaagaatcccagggcgaggagaaagatggaggggaaggagcaggatgtgtcgttgggagcgaacaagttccccgagagacagccaattgggacggcggcgcagagccaagacgacggcaaggactaccaggagccggcgccggcgccgctggttgacccgacggagtttacgtcatggtcgttttacagagcagggatagcagagtttgtggccacttttctgtttctctacatcactgtcttaaccgttatgggagtcgccggggctaatctaa

SEQ ID NO: 1170 - DNA, 281 bp, Glycine max
  Clone ID: 701038286H1
tcctttttcctcattctcttcttcacaaaacatcactcttttttcatttcaccgacaacacaacaacgtgagttaaacaaaaaacagtaactccacgcagccatgacagacagggtgtacccatccgccaagcccgccgtggttaacggcggcgccgccaacccatctttcccggcgacgaaggctcaactttacggcgccacccgccccacctaccgccctcaaccccaccaccggcgccggagccggcgacggtgctgctgcacttcttcttctggctg

SEQ ID NO: 1171 - DNA, 283 bp, Glycine max
  unsure (1)..(283): unsure at all n locations; Clone ID: 701038287H1
gnaaggaagatgagtttgagggcatcagagatagcgaagaagttgaatctgcaacctncacccagaaggtgggttttacgtggagacattccgagaccattccgtccagctttcgacctctcagctcccccccgaatacaaagtggatcgccctgtatcgacctccatctattttctcgttccttctgggagtgtgtctcgcctccatcgcataccctgcgccgaaacctggcatcattacatcggcgaccctctcaccgtagtggaattgaatgagaaagat

SEQ ID NO: 1172 - DNA, 278 bp, Glycine max
  unsure (1)..(278): unsure at all n locations; Clone ID: 701038289H1
gtgcaaccagctgtctccggaggtggagcgccggcctttcacggcggaggaagacgaggcgatcctgaaggctcacgccaggttcgggaacaagtgggccancatcgcgcgcttcctcaatggccgcaccgacaacgccatcaagaaccattggaattccaccctcaagaggaagnngctccgagcctctctccgagcctcggcctctgaagagatccgccaccgtttcgggtagtcaatccggatccgatttgagcgattcgggtttaccattattc

SEQ ID NO: 1173 - DNA, 277 bp, Glycine max
  unsure (1)..(277): unsure at all n locations; Clone ID: 701038290H1
ctagaatggaatttcgatgctcagtcatctcttttaccattctcctctctcttgctcttgcaggagagagccatgtccatgcatcgctacctgaggaagattattgggaagctgtttggccaaacactcccattcccactgcactgcgagagcttctaaagcctctccctnccaggtgttgaaatcgatgaactccctaagcaaattgatgatacacagtacccaaaaacattcttctataaagaagaccttcatccaggcaaaacaatgaangtac

SEQ ID NO: 1174 - DNA, 273 bp, Glycine max
  Clone ID: 701038291H1
aaaatcccattctggtatcagcctcaaactctttgaaggctaactcagagaggaagttctcagtatctgatgagtctagtccagagagatcaaaatgggtttatatattccagagagaatatgctaccgttgaccccgcccttgttgattttgttggcaccgatgaagcaacaacgtgtgttggccttgttattcggaaccaaaagaatggaatgacgtcagttgcccatatggattcaccaaaaattgtagaaatgggcctctcccaaatgt

SEQ ID NO: 1175 - DNA, 270 bp, Glycine max
  unsure (1)..(270): unsure at all n locations; Clone ID: 701038292H1
cttgtccatctatcccacaactaatttttgattttccttgtttatttatcttcttcctcccnnnnnnnnnnnnnnnnnnnnnnnnnnnnnnnnnnnnnnnnnnnnnnnnnnnnnnnnnnnnngaggggatgatggacaagggggtgttggatgatgtgataagaaggcttctggaagggaaaggagggaaacaggtgcagctctctgngtccgagatccgtcaactctgcgtcaacgccagacaaatcttcctctctcagccaattcttc

SEQ ID NO: 1176 - DNA, 273 bp, Glycine max
  unsure (1)..(273): unsure at all n locations; Clone ID: 701038293H1
cntgaatgatttacaggcatagagatttgttagttaaacgcaaggncagttgagtttacttcggccattatgatctccagtttctaattttcttgccctacttagattttcattacttgagcatgtatttttcttgaaaaagaacagcggnttgttactgaagaacaatttgaatttnttttccatgtataaccanatagcattgtttactatttgatttgttaagtcaattgaattaaanaanaagannaaantgacccaanttgaagcagg

SEQ ID NO: 1177 - DNA, 272 bp, Glycine max
  unsure (1)..(272): unsure at all n locations; Clone ID: 701038294H1
aaaaccctaataacaatgggaggnaaatgtccgcacaggaacgtgaanaagagaagatattctcacaagaccgcgcggcgaaccaaatttgagctgaaaggggacgacatggtttatgcgcagttcaacaaacccgatcaagagagaccccctttacccgtcgacgaagatttgcctgggatgggccagtactattgccttcactgcgatcggtactttgccatataactgtgagggtgagcactttaagaccaaacgacacaagaagcggt

SEQ ID NO: 1178 - DNA, 278 bp, Glycine max
  unsure (1)..(278): unsure at all n locations; Clone ID: 701038295H1
cnnacaaaggaacttgttatgccagttcccagctttcaatgttataaatgggggaagtcatgctgggaataatctggctatgcaagantttatgatactaccagttggngccacttcatttgctgaggcattccgcatgggcagtgaagtttatcatgtattaaagggaataatcaaggcaaaatatggncaagatgcatgtnatgttggagatgaangaggatttgctcccaatgttcaagatancagggaggggcttgtcttactcatggntgcta

SEQ ID NO: 1179 - DNA, 278 bp, Glycine max
  unsure (1)..(278): unsure at all n locations; Clone ID: 701038296H1
gacaacagttttcccagancgaacaaataataccattcacttgctcggctccgttaacaaaacaagaccaaaaggagaatggagtaccaatcttttggaagagtccagagaccaaaaggggctaacataatgcaggcattgaaggtgatcctggttttggctgttggtgcatggctgttatatcaggtcaagcactcgagaaacgatacagagaactatagcgatcaaaccgagtttgatggagctatattgttggggcgtaaaggatgccatcaggt

SEQ ID NO: 1180 - DNA, 148 bp, Glycine max
  unsure (1)..(148): unsure at all n locations; Clone ID: 701038304H1
gaaatgtccagtgttctcaggaagatgagggcggtggtgctggagacaagaagaaataagtcttatttactgtttccagattcactagatggacctgtggaattgatgggacgagctttcatatttttgccntggttcnattagttta

SEQ ID NO: 1181 - DNA, 80 bp, Glycine max
  unsure (1)..(80): unsure at all n locations; Clone ID: 701038309H1
gtacaagcncgaaggaggaggaggagaggaagaatcgaaagacgaaggcgggttgatgatncaagccgcagagcttcact

SEQ ID NO: 1182 - DNA, 143 bp, Glycine max
  Clone ID: 701038312H1
aaaaaagagaagaaaaaaaaacttggttttatcttctttgttattattatattcacttcttcaatatcttggttctttgatattattattcgattgagcaaaaaatgggagttccagagagagaccctcttgcacaattgagc

SEQ ID NO: 1183 - DNA, 146 bp, Glycine max
  Clone ID: 701038314H1
ttctctctgtgtatttccctacctctcccttcaagatgcagatcttcgtcaagaccctcaccggcaagaccatcacccttgaggtggaaagctctgacaccatcgacaacgtcaagggccaagatccaggacaaggaaggaatccc

SEQ ID NO: 1184 - DNA, 154 bp, Glycine max
  unsure (1)..(154): unsure at all n locations; Clone ID: 701038315H1
ctaacacttcattaattgcaagaatggcacttcgttgnttggtnatgtccctttctgttctcttcactncttggtncttggcgaganaaagccatgcccagagcngaagatttttngnatgnngtttggccaaacacttcccattccaagttca

SEQ ID NO: 1185 - DNA, 150 bp, Glycine max
  unsure (1)..(150): unsure at all n locations; Clone ID: 701038317H1
gnactctttttccttcaagtcactaagataatggcaagcatttataacattccatcacacataanagcccgggtctattatgaatatggaaacatagaagagattctcaaatttgantctaacatacccataccagacatcaaggaagac

SEQ ID NO: 1186 - DNA, 88 bp, Glycine max
  unsure (1)..(88): unsure at all n locations; Clone ID: 701038318H1
gcatcactacnccaaatgtctaccacattaggagcttgcatgagctcanacaagactatcaacccacgaccatgcattggcccaatta

SEQ ID NO: 1187 - DNA, 142 bp, Glycine max
  Clone ID: 701038319H1
aatggagatgcatgtaggggctgtacaacctggagaacgagccttaatcatagatgatcttattgccactgggggaacgttaggtgcagcaattaagcttctagaacgtgttggggtgcatgttgtggagtgtgctgtgtga

SEQ ID NO: 1188 - DNA, 145 bp, Glycine max
  Clone ID: 701038320H1
cgtttggccagcatcagtgtagagaatgttgaatccaacaggcgtgctcttagggagctgcttttcaccgctcccggtgctcttaaatatctcagtggtgtcatcctctttgaggaaactctctaccagagcacagctgcaggca

SEQ ID NO: 1189 - DNA, 144 bp, Glycine max
  unsure (1)..(144): unsure at all n locations; Clone ID: 701038321H1
ctttgaaggaantggttatgnttnctttacngaggancgagctattttgcaaagggcaattanncaagccgtgnaagggtatcctattatttggtcccnctggaacaggtaagacaatgcttgcaaaggcagttgctaccgaag

SEQ ID NO: 1190 - DNA, 144 bp, Glycine max
  unsure (1)..(144): unsure at all n locations; Clone ID: 701038322H1
ctacacttgttactcaccaggagactcttgagtcaaaggttactgagtctaagggccatggttaaatttcaacttaaganagtgctctgcatgggagtagctgtgggcaatgttagtatggangaaaagcanatcttccanaat

SEQ ID NO: 1191 - DNA, 148 bp, Glycine max
  unsure (1)..(148): unsure at all n locations; Clone ID: 701038326H1
ctgggatgatatggagaagatttggcatcacacattttacaancgagctntcgtgttgcccctgaagaacaccctgtactttcttaccgagggnacccttcaatcccaaggccaaacagagagaagatgacccaaattatgtctgagc

SEQ ID NO: 1192 - DNA, 141 bp, Glycine max
  unsure (1)..(141): unsure at all n locations; Clone ID: 701038328H1
aattaccagttactatactctctctttctgaaacaatttgcccaattgtttgagatgttcaatatgagatttgtatctcaagattgggtggtttcatgtgcactaatacttctggngtnatgcacaacatactcatcaacc

SEQ ID NO: 1193 - DNA, 143 bp, Glycine max
  unsure (1)..(143): unsure at all n locations; Clone ID: 701038330H1
ttaagcttcctaagantcttttggcaaaggtttccaccatcaagaatacagagcaggttttggagcagttgccggggtgatatcatctcttgacgnacacatggaaaatgggttgcaaaatgttccacatctaaagacccgtg

SEQ ID NO: 1194 - DNA, 149 bp, Glycine max
  unsure (1)..(149): unsure at all n locations; Clone ID: 701038333H1
gcataatcgctgacgcagatgcaaacatcgaaggagaacgcgatgctttgttcctcttttgtncttccccttcccaatcttcaactttagggttcctttaatctcgttattcctcttcactcccaagctccgttcactccaacaacact

SEQ ID NO: 1195 - DNA, 148 bp, Glycine max
  unsure (1)..(148): unsure at all n locations; Clone ID: 701038334H1
ccggcgaacgaaatcggtgacaganaagcaacaagcaatctcgatccccaaatcgtgaaatccgatgacgaccgctgcaagacccacatgggcacctgctaaaggtggcaacgaacaaggtggtacttcgaattttcggtccctcaca

SEQ ID NO: 1196 - DNA, 143 bp, Glycine max
  unsure (1)..(143): unsure at all n locations; Clone ID: 701038336H1
attgantatnagtggtnaaggttgttggaggagctctaacaagagatatggagacacaaaattggttcgagagattgaagcctttcgcagctgtggtatcaatacagtttggatatgncagctatggatgtnctatccaaggc

SEQ ID NO: 1197 - DNA, 143 bp, Glycine max
  Clone ID: 701038338H1
cagccagccagccatggtgctcatcaatgtttcacgcgttgagaccactcccttcgatggaccagaagcctggaacctctggtctccgcaagaaggtgaaagtattcgtgcaaccttcattacctccataactttgttcagtc

SEQ ID NO: 1198 - DNA, 145 bp, Glycine max
  unsure (1)..(145): unsure at all n locations; Clone ID: 701038339H1
ggccatttcaatccccagtttcttcttcaacgtcctcttacgagnagatcccaattctcnttcccagtttcaaaccctaattccctcattcccatgggcctcagaagagcccantgtngcggtgggaaaccggntcccgaacctg

SEQ ID NO: 1199 - DNA, 138 bp, Glycine max
  unsure (1)..(138): unsure at all n locations; Clone ID: 701038342H1
agaaactcaaaagcatggggtcttctagttatttcttcacttccnttgcttctggttgtagtgttcaaatctggctaaagggcagccttctggtccctgcatgttcatattggggactctgtggttgatgtgggaaat

SEQ ID NO: 1200 - DNA, 138 bp, Glycine max
  unsure (1)..(138): unsure at all n locations; Clone ID: 701038343H1
ttaatcaaacatggctagggttagtgntttgtttcactcctttgctcttggntttcntcccttgtattggcttctcaaatccatgnttcctctgggaaactagtccctggactatcatggaattactatntgttgaca

SEQ ID NO: 1201 - DNA, 144 bp, Glycine max
  unsure (1)..(144): unsure at all n locations; Clone ID: 701038344H1
cnccnncagnggngcagcttcatgngcgcangaagcagancttgtncttaacacagttgacagcanaaacattggcctagaggtctcccactgtnttccgttgcgccttacanctgagtattanagcttgagatncttctcagc

SEQ ID NO: 1202 - DNA, 140 bp, Glycine max
  unsure (1)..(140): unsure at all n locations; Clone ID: 701038345H1
cnaaaggcaggtgattgtntggggcttgccaaaaagtgacagacagaggtaaagcagctatagaaatggaacacaagacaagtctccaagcatcctaaagtatgatggagtggatttttgttgaaggatatgattagaga

SEQ ID NO: 1203 - DNA, 140 bp, Glycine max
  Clone ID: 701038347H1
ttaatcaaacatgggctagggttagtgctttgtttcactctttgctcttgatttcttcccttgtattggcttctcaaatccatgtttcctctgggaaactagtcccggactatcatggaattactatttgttgacatgtc

SEQ ID NO: 1204 - DNA, 145 bp, Glycine max
  unsure (1)..(145): unsure at all n locations; Clone ID: 701038348H1
cgcatngcagnctgttccagcattcgggctttccgctggagtcgganttggcaacgctttggtgttggagatcgtgatgaccntcggtttggtgtacacagtctacgccacnnccgttgaccccaagaagggcaatttgggaatt

SEQ ID NO: 1205 - DNA, 110 bp, Glycine max
  unsure (1)..(110): unsure at all n locations; Clone ID: 701038349H1
caaaaccgccttcgaaaccgagcttccggaggacggcgtggattgcgtgggaacaggncatnacgtgnaatgcctccgttaacaacggaaganaaacaatcggnacccat

SEQ ID NO: 1206 - DNA, 134 bp, Glycine max
  unsure (1)..(134): unsure at all n locations; Clone ID: 701038350H1
atcacattggtctttcctgtgtatcagaggaaagccatggggatctcaatacaggaatagcttagtgtatgtcctgctgttgtttgcattctgtgaaatgcaaatccattgnnggaaaagacactctaacctgc

SEQ ID NO: 1207 - DNA, 142 bp, Glycine max
  unsure (1)..(142): unsure at all n locations; Clone ID: 701038351H1
gcattccgcaaaatgggctgccaccaccttagtctctgaagtcactctcccctcntcctccggccagcggaagatgccgctgatgggcctcggcaccgcgccggaagcaaccagcgcggttaccacaaaagatgctgttctt

SEQ ID NO: 1208 - DNA, 102 bp, Glycine max
  unsure (1)..(102): unsure at all n locations; Clone ID: 701038353H1
tncaangnnttgtttnttgctangtttcttcaccatgtcaacngctgggaaaatcaccactgaaatcggggntcatgnaaccgctanaaagtggttcaacct

SEQ ID NO: 1209 - DNA, 134 bp, Glycine max
  unsure (1)..(134): unsure at all n locations; Clone ID: 701038354H1
caaaagatcatctctagctctgtattttgcatattgcatactgttgtaaccgttgactcagttccttcgatggaattcgtggnttcttcttcttcctctcacagtcggaacctnnatcatccntctcaaaancg

SEQ ID NO: 1210 - DNA, 142 bp, Glycine max
  unsure (1)..(142): unsure at all n locations; Clone ID: 701038355H1
ctctaattacactttctatctcattttcgttcggttcaaacactcttcatgggcatcagacaagaagattaggatcggcatcaacgggatttggaaggattgggccgtttggnggccagggnngntcttnngaggaatgact

SEQ ID NO: 1211 - DNA, 135 bp, Glycine max
  Clone ID: 701038357H1
gaggaaaatggcgggtacggtttcgacttgtttcttcttcgtgtttcttctttctctccttcttccttttcagatctccgctgaggaatcctcggagaaggagttcgtactcaattggatcactctaactttcac

SEQ ID NO: 1212 - DNA, 135 bp, Glycine max
  Clone ID: 701038358H1
ttaccatttgctcccagtacagagcttaaccgagcttcacaaagatgaatcgggaaaagttgatgaagatggccggttcggttagaactgggggaaagggtaccatgagaagaaagaagaaggctgtccacaaga

SEQ ID NO: 1213 - DNA, 135 bp, Glycine max
  Clone ID: 701038359H1
tcgagttcttggtgtcttggcgatgtcaaggtccataggtgatagatacctgaaaccatggataattccagaacctgaagtcaatattgtgcgtcgagaaaaaaatgatcagtgtcttattctagcaagtgatgg

SEQ ID NO: 1214 - DNA, 137 bp, Glycine max
  unsure (1)..(137): unsure at all n locations; Clone ID: 701038360H1
ctgcactccaattggaaaaaagaagtgaacttgcgatctgggtatccaattttcgaactctttcgatggggaatgatgcagggtcaccgcanggtccggttacgtgtgggtcgtggattcggaggcccgagaatttg

SEQ ID NO: 1215 - DNA, 139 bp, Glycine max
  Clone ID: 701038361H1
cgtttatggaggatcaaagcggagaagctgaaggacaagaacaacaaatacaaccttcactctttcatcatttcattatttaataacaattattattctcaatgggcaagactcctttctcctttcgtcgctccgcctc

SEQ ID NO: 1216 - DNA, 138 bp, Glycine max
  unsure (1)..(138): unsure at all n locations; Clone ID: 701038362H1
gcaggctttcttnctacttattattagcagaaagatggctcctantcttgcccttcagtttctttctcttttccttttgtnnattatgaatggctatgtcatnggagcnagagatatgaaggtaganctgcgaganca

SEQ ID NO: 1217 - DNA, 139 bp, Glycine max
  unsure (1)..(139): unsure at all n locations; Clone ID: 701038366H1
tttgttgttcgaagccaaaaccctagcagccggcgagaatggcagacgttgaggttgatgcggcggcagcggcangggcagcgcagccgaagaagagaacgttcaagaaattcagcttcaggggcgtggatctggacgc

SEQ ID NO: 1218 - DNA, 138 bp, Glycine max
  unsure (1)..(138): unsure at all n locations; Clone ID: 701038367H1
gaacactgtaaaatattagtcttggcttctttaatgtctatnttaaagtggaagacttgtgtagtaaaagggtctgcatctagtactcccaataaaagaaaaaaaagagaagcaaattccttcttccttaatttacta

SEQ ID NO: 1219 - DNA, 137 bp, Glycine max
  unsure (1)..(137): unsure at all n locations; Clone ID: 701038368H1
agcgatcaacagacagaagattttgcttcatcatctcaacccttgcatcatcccacccaccccaacgaatcatcctccctccatgcttcagntgtgtggcgggggatagcgctgntatnaaaggacatcgacattcg

SEQ ID NO: 1220 - DNA, 138 bp, Glycine max
  unsure (1)..(138): unsure at all n locations; Clone ID: 701038370H1
cngaatatgaggcagcagtgcagggaagttggtgtgtgtcaccggtggctgccggttatattgcttcatggattgtcaagttcctacttgaacgtggttacactgtcagggccactgttcgaaacccaaatgatcaca

SEQ ID NO: 1221 - DNA, 136 bp, Glycine max
  Clone ID: 701038371H1
gccagtgccagtgtattacggtggagaaaatgaataccaaaggggaatcatccctcctaacgccgtgtttggagatccaaagggcatccccatccagcaaaccatttacagggacactcctgctcctttcaactgc

SEQ ID NO: 1222 - DNA, 135 bp, Glycine max
  unsure (1)..(135): unsure at all n locations; Clone ID: 701038372H1
tttcaaganngttagttagggataatagggcagggaagaataagagggatgtacaaagatcgagagngagttggtgtttctgtttccgcttccaaatcggaggatcggaagcgaatcaacgacgttctcgataag

SEQ ID NO: 1223 - DNA, 134 bp, Glycine max
  unsure (1)..(134): unsure at all n locations; Clone ID: 701038374H1
gnaaaagagaacttcttgctgcaatacctgttgaggtgagatcttttcacaattcattttcncgtggnttctcttaatttaactcaattcttggacctttattttcatttcagttctttcatcgttagcgttag

SEQ ID NO: 1224 - DNA, 136 bp, Glycine max
  unsure (1)..(136): unsure at all n locations; Clone ID: 701038377H1
cnggcgaggagaaagatggaggggaaggagcaggatgtgtcgttgggagcnaacaagttccccgacagacagccaattgggacggcggcgcagagccaagacgacggcaaggactaccaggngccggcgccggcgc

SEQ ID NO: 1225 - DNA, 139 bp, Glycine max
  unsure (1)..(139): unsure at all n locations; Clone ID: 701038378H1
gacagctttggttgtnttgtttttgcttgtgttgattctaaaggagtcgatcatgggangtannanttcaaaaacggtctgaaanangcncatgtgtcatccatatgnaactgctggnttcctcatcttcacggggntg

SEQ ID NO: 1226 - DNA, 136 bp, Glycine max
  unsure (1)..(136): unsure at all n locations; Clone ID: 701038379H1
cntggattcaaccaaaatcaagatagaatataacgcnttggttgtattctccgaaccttttttnttgtgtgtgttcagttatttgtacgtgatagaattagagagaaagagncaancngagttttgtgtttgatcc

SEQ ID NO: 1227 - DNA, 117 bp, Glycine max
  unsure (1)..(117): unsure at all n locations; Clone ID: 701038382H1
gctaacctcgntgttgtgaatagacgtgctgaatcaatcanntctcggttttcgcgtaanctagtcgttcatcccaaaatggtttgcttggnttgtttgctgccccttttnntggtt

SEQ ID NO: 1228 - DNA, 135 bp, Glycine max
  unsure (1)..(135): unsure at all n locations; Clone ID: 701038383H1
tcacactcctgangccgcgccacgtggcagtgatcggcgcngncncgncggcctagtggcggctcgggaacttcngcnagaagggcatcgcgtggtggttttcgagaaaanggacaccagtnggtggnatnttgg

SEQ ID NO: 1229 - DNA, 134 bp, Glycine max
  unsure (1)..(134): unsure at all n locations; Clone ID: 701038385H1
ggtccnagattcatttnaatcntanttctgcacttcttgatcattcgattttnctcctcaagatgcagatattcgtaaaaactttgaccggcaagaccatcacccttgaggtggaatcctccgacaccattgac

SEQ ID NO: 1230 - DNA, 126 bp, Glycine max
  unsure (1)..(126): unsure at all n locations; Clone ID: 701038387H1
ggatttttagcatatttggatactggggaatgtancttcttggtgtcattgggaactatcttatcttcggaagccatcctctggatttagaagtagcagatgggtacngatgagggttgggttctc

SEQ ID NO: 1231 - DNA, 126 bp, Glycine max
  unsure (1)..(126): unsure at all n locations; Clone ID: 701038389H1
ttagcttagcgcatgaccttaggtgggagataagtctgctagatccatctttcgtattaaggagttntctttgaaggctgtgatcttatggagcctgncanggctaaatnccncaancacatttga

SEQ ID NO: 1232 - DNA, 128 bp, Glycine max
  unsure (1)..(128): unsure at all n locations; Clone ID: 701038391H1
cattccgcaaaatggctgcnaccaccttagtctctgaagtcactctccctcctcctccggccagcggaagatgccgctgatgggcttcggcaccgcgccggaagcaacagcgcggttaccacaaaaga

SEQ ID NO: 1233 - DNA, 134 bp, Glycine max
  unsure (1)..(134): unsure at all n locations; Clone ID: 701038393H1
cnttgctgaaaataacaagtctgaagagaaggttaatgaagcagtggaagatgtacgacatgagctgcaaganactggagagcgtggttcaaagagattaaggagtagtgaccaggaagctctgaagaangtta

SEQ ID NO: 1234 - DNA, 136 bp, Glycine max
  unsure (1)..(136): unsure at all n locations; Clone ID: 701038395H1
tgaaatctgtggtggggttggcattcttggcattgcatggggccttggtggcatgatccttcatccttgtcnactggcactggtggngatctcagggggtcaacattnacccagnggtgacatttggggtgtttta

SEQ ID NO: 1235 - DNA, 152 bp, Glycine max
  unsure (1)..(152): unsure at all n locations; Clone ID: 701038409H1
ggctaatctgtgcgtatcaggttttgcncctttcaattttctgtntatttcattcattccgctgctgaggtcaagccactcacactgggcgcccacttttccatgggaaactgcttctccgaagtcgccgcaggcgcgccgccatcggggaa

SEQ ID NO: 1236 - DNA, 117 bp, Glycine max
  unsure (1)..(117): unsure at all n locations; Clone ID: 701038410H1
gtgcatggccttgagttggcattggatgagatctccttatgatttggctatatcaagtggaaggatgaacnnaaacctgatcctcatggtaacacatgttgcatgctacctggagca

SEQ ID NO: 1237 - DNA, 198 bp, Glycine max
  Clone ID: 701038411H1
ctctcattaggtattccctcctaaaaaacaccaaaccctctcaaaccttaatttacccaaaatgataaaacactctcttttagtcttacccatctcattaacacttgtaatttctctcttgcattcaaccactttagcagcgatagctccggccaccgcaccggcacaagctccccccactactccagcggcctccgc

SEQ ID NO: 1238 - DNA, 257 bp, Glycine max
  Clone ID: 701038422H1
cttggtgcaaagcatcctccgtttcaatttctctctctcagcgctttctgcaatcgaacctttcatctccaaagggatccacaggccgaaggagaaatggggctgacattcacaaagcttttcagtcggcttttcgcgaagaaggaaatgcgaattctgatggttggtcttgatgctgctggtaagaccactatcctgtacaagctcaagctcggagagatcgttaccacaattcctaccatcgggttcaatgttga

SEQ ID NO: 1239 - DNA, 114 bp, Glycine max
  unsure (1)..(114): unsure at all n locations; Clone ID: 701038424H1
tgaccaganacagagcagcactcacattcacaacgaaggtttcctattcatcagacatggtgaaggcaatcagagttcacgaactcggtggccctcaagttctgaagtgggagg

SEQ ID NO: 1240 - DNA, 254 bp, Glycine max
  unsure (1)..(254): unsure at all n locations; Clone ID: 701038426H1
gcagagaaatgagaattgggcattggctcagtccttctgaggcaggtggcgctgccaaacgcagaacctccggcagaaattgccaccgcaaacacgtggaagacgggtagtagtactccatacccccattctctcatattccctttactaattaaagatcatgaacancgagagacagtccgacgacgacgacgttgctgcacggcaagtacgagctaggtcgtgtgctgggggcaggaagctttcgccaaggt

SEQ ID NO: 1241 - DNA, 192 bp, Glycine max
  unsure (1)..(192): unsure at all n locations; Clone ID: 701038428H1
cgattctgatctctgggacttgccctcggcgcagttgaacccgctgcttgcagaatcagagccaccggttganttggaacttgcggtctcgcattcggaatcccaggacgtcgatttgaggnaattcgacatccgttcggctctcaacgaggtgtttggacaattagggtttggggcggttgacggaggagg

SEQ ID NO: 1242 - DNA, 247 bp, Glycine max
  unsure (1)..(247): unsure at all n locations; Clone ID: 701038429H1
gcaaggtgctgtgaaggatattgctgcttcggttaactggcttaaagcaaatggctcaaagaaggctggtgtaactggattttgtatgggaggtgctctctctattgccagttctgtcttggttcaagaggttgacgcttctgtagcattctatggagttcctgcttctcaacttgctgaccctgcacaagccaaggctcctgatgnngctcattttggagagctggacantttgttggcttncaga

SEQ ID NO: 1243 - DNA, 249 bp, Glycine max
  unsure (1)..(249): unsure at all n locations; Clone ID: 701038430H1
caagtgtcacaagtcataactcgttagagagagtttgngtgtgtttttgtgtgtcaccttggtgcatacaacacaagatggaggaccaaaatggtagtggtaagttgagccaagggcttcgcaaggtgaagccttaccttgctatattgtcccttcagtttggctactcagggatgtatatcatcactatggtttctttcaagcatggcatgagtcattggatactctcagtgtaccgtcatgtagttg

SEQ ID NO: 1244 - DNA, 134 bp, Glycine max
  unsure (1)..(134): unsure at all n locations; Clone ID: 701038432H1
cntcancnnnnnttgntgccatcaagtactccatggacttgtatgctgcttacatagttganagcttaaggcactaacttctttagaaactgaatagccaatttcagtgatctccaattatgtaaaatgtggat

SEQ ID NO: 1245 - DNA, 149 bp, Glycine max
  unsure (1)..(149): unsure at all n locations; Clone ID: 701038434H1
gntcacacctcactcactgattctcaaaaactcaaaagatggtgatgaagaaaaaccttctcttctcactttcacttctcctaatggttctcttcacttcatctcaaaccaccccagcaccatcaccttcctcaaccccaacagacatc

SEQ ID NO: 1246 - DNA, 146 bp, Glycine max
  unsure (1)..(146): unsure at all n locations; Clone ID: 701038435H1
aaaggtcacgttggatatgtagcagaactgcttcatcttctcttctctccgcttccaccaccactcactcantcactccactccctcacaattcacaatcctcacgttgcaccattcacatgaagctcctctcgcgctccgtgttt

SEQ ID NO: 1247 - DNA, 194 bp, Glycine max
  unsure (1)..(194): unsure at all n locations; Clone ID: 701038436H1
ctcggttctgccttcacaaaaaaattatcgagatccccttttnctcctaaganaagccatggctaagggtcccggtctctactctgacatcggcaagaaagccagggatctgctgttcaaggactaccacagtgaccagaagttcaccatcaccacctactcacccactggagttgctataacagcatcaggaa

SEQ ID NO: 1248 - DNA, 201 bp, Glycine max
  Clone ID: 701038437H1
attatttaatgcgcgaaaatgggcagtgaggagaatagtgtgtgatccacttctttcatcgcttcggatcttcaatctcatctccgatctcaaaatgcccgctgtttatggagctcgcttgaccaccttcgaagactccgagaaggagagtgaatacggttacgttcgcaaggttcaggacccgtcgtcgttgcggatggc

SEQ ID NO: 1249 - DNA, 251 bp, Glycine max
  Clone ID: 701038438H1
tctctatcgagtaaattaactatgaagcctaccctactattatccctttccttcctgcctctctttgctttcctggctctttcagaagatgttgaacaagttgtggacataagtggcaaccccattttcccaggtggcacatattacattatgccatcaacttggggcgctgccggtggtggattgaaactaggccggacaggaaactcaaactgcccagttactgttttgcaagattactcagaaatctt

SEQ ID NO: 1250 - DNA, 244 bp, Glycine max
  unsure (1)..(244): unsure at all n locations; Clone ID: 701038441H1
gcgtgatcgggtacgacaacaccctatggaacggatctgtggtggcaccccctgatgctcctcttaggaagtatgttaggtactacaggganttcgtgctggagctcaacaaagccctcgctgtggaccccaggatcgagatttgcatgctcccggttggtgatggaatcactatctgccgtcggatcaagtgatttctgatcatcataatcgtggaccaccgttgcttcttctgcacacccta

SEQ ID NO: 1251 - DNA, 139 bp, Glycine max
  unsure (1)..(139): unsure at all n locations; Clone ID: 701038442H1
ctttggagctgcgatcctctgcttcgatggccaccgtgcaactacnatccctaaaccttgttcgctcctcagnacttccttccgcnaccttntccnctccgatcgcngtctccggccgccgcaactnngcagcnntgaa

SEQ ID NO: 1252 - DNA, 189 bp, Glycine max
  unsure (1)..(189): unsure at all n locations; Clone ID: 701038450H1
cgaagaagccctaactacgcacgcactcattcttgagaaagctcaatattcattccgtccatggcactctcttctcgtctcttttccaaatccanattgatctatggctgtcaaatacttctgcaaaaggagcatgctattccagttcgtcactttgctaaagagtctgcccctcctgcccttaaggga

SEQ ID NO: 1253 - DNA, 129 bp, Glycine max
  unsure (1)..(129): unsure at all n locations; Clone ID: 701038451H1
gnataacgaatatgctctttatactgtaacactcttcagtcgtgttgcggataattttagaactagtgcacgtgaaaaagggttccaaattcgtgactttgaatacagtccagaaacacatgagaaccg

SEQ ID NO: 1254 - DNA, 243 bp, Glycine max
  Clone ID: 701038452H1
tataattatggctcttctggtactcagaacttttaccaaagcactggacgaccacctttgccaaaccagatgaagactggtcatggaagtagttctaatcttatcagacatggtagctcacctgctggattgttttcaaacattaacattgatattactggctatgctgctgttgtaaggggcatgggaactatgggagctgctgctaataacaccagcgaggaagcaaacttttcaccagca

SEQ ID NO: 1255 - DNA, 189 bp, Glycine max
  unsure (1)..(189): unsure at all n locations; Clone ID: 701038455H1
ctccttgtccatctatcccacaactaatttttgattttccttgtttatttatcttcttcctcccttgtttgtctgttctctttgtttctttggcttgacnnnnnnnnnnnnnnnnnnnnnnnnnnngaggggatgatggacaagggggtgttggatgatgtgataagaaggcttctggaagggaaagga

SEQ ID NO: 1256 - DNA, 243 bp, Glycine max
  unsure (1)..(243): unsure at all n locations; Clone ID: 701038457H1
caatgtgcttcgctgttcatctctcccatcacgattgacaaaccctaaccctaaccctaatcacccgaccagcatggtgaagaataaggtcnccgattggctcaanagctctatatggtcctcatcatcgccgtcgtcccctccctcctccgccgtcgccagccccttcgaacagccaccgcgtcctccgtctcccgccgtcgtgaccccctttgaaccaccgcctccgcgtcctccgtcgnt

SEQ ID NO: 1257 - DNA, 239 bp, Glycine max
  unsure (1)..(239): unsure at all n locations; Clone ID: 701038458H1
cncccatctacaagtaagcttggaattaagaagcagcaacaataataagtcatgttctagtattcattgtggaataaatttccgttccatttggagcagagttaagcatataatttgttatacaagttctttgaataagagtctgagtgtatcacctctaagctacgatcttcatgactcatatgaggttgcttctatttatttggtggccattttcaagtgttgttcttactaagttc

SEQ ID NO: 1258 - DNA, 133 bp, Glycine max
  Clone ID: 701038459H1
gggacttccagttatggtggcagtctgggatacgctcggatgagtctttcaacaatggcaactcctaacagatataccactcctattggcaatagcgggggcaatgggagaagcgattctcttatgaactcag

SEQ ID NO: 1259 - DNA, 197 bp, Glycine max
  unsure (1)..(197): unsure at all n locations; Clone ID: 701038461H1
cacaaagcgggttactgtctgttcaagctaccatctctctctctctttcntagtgcctccttggcanttaaaatggnccnagaaatttcctantcnaatcngnatcnntggacgangggnaacctggaaaggtcnggggaccaagtcnccggtgctggtgnntgatgganggntnggagganggacctggacangaa

SEQ ID NO: 1260 - DNA, 237 bp, Glycine max
  Clone ID: 701038462H1
ggatgccagaacacgagccagttcgtggaggccgtggaggtggacgaggtgggggacgtggatttggacgtggtcgtgggtttagtcgtgactcctcgaatgatgagaactcattccctaccagcagagctccttataatcagggtccttttgaagaaggagatgctgggaagtcttctgaaagacgcagttatggtggaccacgagttccttaccgtggtggtcgtcgtggaggtt

SEQ ID NO: 1261 - DNA, 187 bp, Glycine max
  unsure (1)..(187): unsure at all n locations; Clone ID: 701038467H1
ctcaagacagaatcactgttatggaggattcagagcaaaggaaganaaggctgaaaganatgcgcgtgcaagctgatcaagctgaagtttctggtggtgtgnaaggttctgtggtgcctggttttctctcaaatcccctgatggaagctccttcaactatgccatcacaggataaatcatatgctgc

SEQ ID NO: 1262 - DNA, 79 bp, Glycine max
  Clone ID: 701038470H1
cgaattattgtcatgggctaagagctcattcaagatggaacacccacttgagaggaggcaggctgaagcatctcggata

SEQ ID NO: 1263 - DNA, 243 bp, Glycine max
  Clone ID: 701038471H1
aggaaaaccctagctagtagtctcagttcgtttgagagagaaaaaatggcagagggtctcgttctccgcggaaccatgcgcgcccacaccgacgtcgtgacggcgattgccactcccatcgacaactccgacatgatcgtgacggcgtcgcgcgacaaatccatcattctctggcacctcaccaaggaggacaagacctacggtgtcccccgccgccgcctcaccggacattctcatttcgtc

SEQ ID NO: 1264 - DNA, 62 bp, Glycine max
  unsure (1)..(62): unsure at all n locations; Clone ID: 701038476H1
cggtgatgtcagaggaagaggcctgatgctagnanttgnacttntcactgatcgtnaactta

SEQ ID NO: 1265 - DNA, 191 bp, Glycine max
  unsure (1)..(191): unsure at all n locations; Clone ID: 701038477H1
cgcgggtnaggtagaacccttccactgtggtgactctgcgatggatctgatgcctganttgaacgattatttggtttaattgttctgctggagctttcttaagagggtttggggttttaacgccaaagccaaaacaggagaaagaacatcatctcttcgctaacttgaactagcatggatgtttgctactg

SEQ ID NO: 1266 - DNA, 162 bp, Glycine max
  unsure (1)..(162): unsure at all n locations; Clone ID: 701038482H1
ganagtgaaagancttcttcctctaattcgagtgtacaaggatggcagcgtggagcgtcttctaagctctgaaaacgtggcagcctcccctgaagatccccaaactggagtctcatccaaagacatagtcatcgcagacaacccctacgtctccgctcgcat

SEQ ID NO: 1267 - DNA, 242 bp, Glycine max
  unsure (1)..(242): unsure at all n locations; Clone ID: 701038486H1
cgagtgtgtttttgcaaganggtatggcgaaggacgttgaggttgctgagcgtggctccttctctgggaaggactaccaggaccctccaccagcaccactcattgatgctgaggagctcacaaagtggtccttttacagggctcttattgctgagttcattgccactttgctcttcctctacatacactgtgctcacagttatagggtacaagcaccagacggatcatgctgatgcgtgtgg

SEQ ID NO: 1268 - DNA, 240 bp, Glycine max
  unsure (1)..(240): unsure at all n locations; Clone ID: 701038487H1
ctttgttcactcttcttctcttgcggcnanggttttagcgcanttcttctagatttaaggnagatgggtaaggaaaaggttcacatcagtattgtggtcattggtcatgtcgactctgggaaatccactaccactggtcacctgatttacaagcttggaggcattgacaagcgtgttattgagaggtttgagaaggaagctgctgagatgaacaagaggtctttcaagtatgcctgggtg

SEQ ID NO: 1269 - DNA, 238 bp, Glycine max
  unsure (1)..(238): unsure at all n locations; Clone ID: 701038490H1
caaatacgaaattccaccgagtgcttctagntctaccaagttagacaatcagcattgcacctaaaccctggctttctccgctttaatttctcgttctctcgccatcaagtccatatacatcgttccancatggagaagataaaaataaaactactcatgaaggatgaaacatttctccaacacccttttgttcttgctgttgttctggttttaggccttgttatgatggacccttttc

SEQ ID NO: 1270 - DNA, 121 bp, Glycine max
  unsure (1)..(121): unsure at all n locations; Clone ID: 701038492H1
gnagagatggaagaagatggcaaganagacaacactgattcacccaccaattcgcaacanacagtttctgatgatgatgaaatagactacacaaccaaaccagagttttatgacccagatc

SEQ ID NO: 1271 - DNA, 179 bp, Glycine max
  unsure (1)..(179): unsure at all n locations; Clone ID: 701038493H1
cgtnaatagcattccgcaaaatggctgccaccaccttagtctctgaagtcactctcccctcctcctccggccagcggaagatgccgctgatgggcctcggcaccgcgccggaagcaaccagcgcggttaccacaaaagatgctgttcttgaggccatcaagcagggctacaggcacttt

SEQ ID NO: 1272 - DNA, 206 bp, Glycine max
  unsure (1)..(206): unsure at all n locations; Clone ID: 701038495H1
gaaagggctgataatggtgccaatgatggaagaaccagtacnaatcagttccacgggaagccaagacncnaagtagatcctgctcgagacctctctattcaagttttagagaagttttctcttgtcacaagatttgcccgtgaaacaacttcacaactttttggagaaaaccagagtaatggatttagtcccattgacaggaggac

SEQ ID NO: 1273 - DNA, 111 bp, Glycine max
  unsure (1)..(111): unsure at all n locations; Clone ID: 701038496H1
tanagcacaaganaaccctaagccacttcagattcttactggcacgaagtcttcagcggggaaaaaccccacatcggttagaatcattcccgcatccccaaatacanacac

SEQ ID NO: 1274 - DNA, 288 bp, Glycine max
  unsure (1)..(288): unsure at all n locations; Clone ID: 701038501H1
ctnttntccgctatnttctggaacnaatggctgnagtgacaaaggaggaaganaggggtagtcctagttggggtgcttcattttttacgcagacaacagaggatgtggctagagctgttgccactgctatgaattctcagaggccatctgtgtatattcattgaaaaatgatcatggtggcagccaacttcaaaggctgcagtatcaagttacgaaaatgataaaaggattttctagccctccagaagttaaatatacaaattacaatccggaaatcttgacaactca

SEQ ID NO: 1275 - DNA, 283 bp, Glycine max
  unsure (1)..(283): unsure at all n locations; Clone ID: 701038503H1
gatctccgcaaccatgagtggtgttacatgctgtcttcgtttccctggtcaactcaactctgntgctgaggaaactngccgtgaatctcatccctttccctcgtctgcacttcttcatggttggatttgcgcctctaacctctcgtggctctcagcagtaccgtgcattgacagttccagagctgacacagcaaatgtgggatgccaagaatatgatgtgtgccgctgatcccaggcacgggcgttacctcacggcatcagccatgttccgtggcaagatgag

SEQ ID NO: 1276 - DNA, 283 bp, Glycine max
  Clone ID: 701038504H1
ctcctttgtaatagaaagcacgcgtttctctctctccctctctcaacgaatatttgtgtacttcctcttttgtgggtagattcaatttaccatgtcgagttcatcggaatactctcaattttccggccagaaaccggcgaggtcgccggagaaatcgagcttctctcagacttgtagcctgttgagtcaatacatcaaggagaagggtagcttcggagatcttaccctcggaatgacatcatgtgggtcacctgagacatcttgtcaatctgctacaaccatg

SEQ ID NO: 1277 - DNA, 282 bp, Glycine max
  unsure (1)..(282): unsure at all n locations; Clone ID: 701038505H1
ctctccttctcgctctttcagctttgacttnngttggaaactnaggcctaatcaaaatggtgaagttcacagctgaagagctacgttcgtattatggactataagcntaatatccgtaatatgtgctgtcantgctcatgttgatcacgnaaaatcaaccctcactgattctcttgtggctgctgctggtattattgctcaagaagttgccggtgatgtccgtatgactgatacccgtgcanatgaagctgagcgtggtataccatcaagtctacaggatct

SEQ ID NO: 1278 - DNA, 232 bp, Glycine max
  Clone ID: 701038506H1
ttacagaaacatgctggagaatcttcaggctcctccgccaacggaatcggccccagtggtgaagcgctatgctcctcccaaccagaggaaccgttctgccaacaggcgcaaatcatctgatcggcttgatcggacaaacagtatcgggaatgacttagaaaagaatcaagttgcttattcaagaagtgttcacattccagatcacggagatgctggtagcagtaatcttctt

SEQ ID NO: 1279 - DNA, 284 bp, Glycine max
  Clone ID: 701038507H1
cgtttgtagtgtagcaggaacaagcagcaatggcgccgaaggtaacacgcaaggttagcagaaaccccgaattgataaggggaattggaaagtactcgaggtcgcagatgtaccacaagaggggcatttgggctatcaaggccaaaaatggtggcgttttacctcgccacgaccctaaacccaaacctgaaacacccgctgaaaaaccacccaaattttaccctgctgatgatatcaagaagccccttgtcaacaagcacaaacccaaacccgctaagctcagg

SEQ ID NO: 1280 - DNA, 286 bp, Glycine max
  Clone ID: 701038509H1
gctgcatatgcttatgtgaaatcaattcgaccaagggtgcttctagcttcctctcagtggcaagctgtccaagaatactattaccatcttatggttaggagggctgttggatgtgctcccacagccaatctattagtaaaggcttctcagacggcagcaggttcacgagatcttgtgatgtttgatgacaattctgtagtcatggtaacagagtcagatctagaaggttacgacccaagtagtcaatcagccatggcaagtgaaatatgggcagatttaagtgttg

SEQ ID NO: 1281 - DNA, 284 bp, Glycine max
  unsure (1)..(284): unsure at all n locations; Clone ID: 701038510H1
ccagatggagcatgtngttttgacaaccaccaccaccattgttgttattgtcaaaaccagatcggancctgtgggtttgtctgatcctaattncgctctattggaacactgcaacgggtttgggtgctggagtgatcaacctaacaacattggtccttcagtcacttctctgatctagagaaaaagatgaagcatcgttttcaaaaagctacatatgaagaagaaganagtctctctccctcgtttaattaaggtcatcttttggtccctttaggcttaggttt

SEQ ID NO: 1282 - DNA, 284 bp, Glycine max
  unsure (1)..(284): unsure at all n locations; Clone ID: 701038512H1
ctcaaacattaattatttgtggtgcaagtgcaacttacaactctcattgataatttcttcagtcttcttaatcttacttttattcttcacttaaaatggaaacccttattggaaaaacattcctcacactcttatttntcatcttcagttttctcaatagtctcgtcaagtagtggaccagctccatccagcaacatagattggtggtgcaacctaaccccacaccctgtgccatgcaaacactacaccattactcaaatgaagagccatcatttccaaatcaa

SEQ ID NO: 1283 - DNA, 284 bp, Glycine max
  unsure (1)..(284): unsure at all n locations; Clone ID: 701038514H1
cgatctccgcaaccatgantggtgttacangctgncttcntntccctggtccnactcaactctgatctgangnnactggccgtgaatcttcatccctntcnctcgtctgcacatcttcatgnttgnattcgcgcctctaacctctcgtggctctcantagncaccgtgtcatgacagttccagagctgacacagcaaatgtnggatgccaagaatatgatgtgtaccgctgatcccaggcacgggcgttattcacggcatcagcnacnnccntggncangatga

SEQ ID NO: 1284 - DNA, 284 bp, Glycine max
  unsure (1)..(284): unsure at all n locations; Clone ID: 701038515H1
gcagacaccaaanctaaaatgtggttcagattcctttaccccatccagatcttcgagactttgccaaatctcaggctgattacgtattgggcaagaatcctatgcatatgagttttctggtgggctatggagataaataccctcaatttgtgcatcataggggtgcttcaattcctgctgatgcancaactggctgcaaggatggcttccagtggcttgagtcatctgatcctaatcccaatgtagctactggagcacttgttggtggacccttcttaaatgag

SEQ ID NO: 1285 - DNA, 284 bp, Glycine max
  unsure (1)..(284): unsure at all n locations; Clone ID: 701038516H1
cttcttctcttgcngctagngttttagcgcanttcttctagatttaaggaagatgggtangganaaggttcacatcagtattgtggtcattggccatgtcgantctgggaaatccactaccactggtcacctgatttacaagcttggaggcattgacaagcgtgttattgagaggtttganaaggaagctgctgagatgaacaagaggtctttcaagtatgcctgggtgctggacaaacttaaggctgagcgtgaaagaggaatcaccattgatattgctttgt

SEQ ID NO: 1286 - DNA, 256 bp, Glycine max
  Clone ID: 701038517H1
aaaacctagggttgagccttttgctcaggttttcagcgcttctttcttacaatggttctacagaacgatattgatttgctgaatcctccagctgagttggagaagagaaagcacaagctcaagcgtcttgtgcagtcaccaaactctttcttcatggatgttaagtgccagggctgcttcaacataacaactgtgtttagccactctcagactgttgtggtttgcggaaactgccagactgtgttgtgccaaccaa

SEQ ID NO: 1287 - DNA, 278 bp, Glycine max
  unsure (1)..(278): unsure at all n locations; Clone ID: 701038518H1
tttgttgttgtaactcgttcttcttcttttgttgttctgtgtttgtgtttgttttttctctcacctgaaaatgtcttgctgcggtggtaactgtggttgcggaactcctgcaagtgcggcaacggctgcggaggctgcaagatgtacncagacttgagctacactgagtcaaccaccaccgagaccttggtcatgggagtggcacctgttaaggctcaatttgagggtgctgaaatgggtgtgcccgctgagaacgatggctgcaaatgtggaccaaa

SEQ ID NO: 1288 - DNA, 263 bp, Glycine max
  unsure (1)..(263): unsure at all n locations; Clone ID: 701038519H1
ggccatataacataatacaaacctatccttgcttcacnnttagacatggcaactactacacttcatgaagcttgctttcatgcttctcatgaaccttgttatctgcagcgcagaatcttccatcggcagaaagtccaatcctaacccagaagagttcgtgaagtcctcgtgcagggcaacacggtaccctgttctatgcgtcaagtctctgttggcctacgcaagcgtgattcgccgaagcgaccgacaatagccacgaccgc

SEQ ID NO: 1289 - DNA, 274 bp, Glycine max
  unsure (1)..(274): unsure at all n locations; Clone ID: 701038520H1
cgcgctagtagtagtccttctcaaagtggaatttgaccctcatgagcatcatctacctaacgttatgattcccattcccatgagcaatattttncatgggaaagtcaaagtatcaactacggataacgttaggtagatgatgctttgactttcccatgcaaaatattgctcacngaatggaatcataagtacagactttttttattttatccaancattcttgtgtagttncccctcacatagcaacggtatatgtttaattgatcaataaatg

SEQ ID NO: 1290 - DNA, 282 bp, Glycine max
  Clone ID: 701038521H1
cgcggggcagaggaaggggcagagttttggagtttgaaagagaaaatattgattgcagttgagttctaatgagtaacgaatacgattacctgttcaagcttctcctaatcggagactcttccgttggaaaatcctgcttgcttctcagattcgctgatgactcctatgtcgacagctacataagtaccattggagttgatttcaaaatcagaacggtggagctggaagggaaaaccgtcaagctgcagatttgggatacagctggacaggagcgattcagga

SEQ ID NO: 1291 - DNA, 285 bp, Glycine max
  unsure (1)..(285): unsure at all n locations; Clone ID: 701038522H1
ctaaatcggagtttcagtttcacccctcttttctcatctctnncatncatagtcctcagaggctagtcttcctattatcacaaacaatgtctgacagtcaagaatctgacaagaacattgagatatggaagatcaagaaattgatcaaggctctggaagctgctcgaggtaatggtaccagcatgatttctctgataatgcctccacgcgatcaaatttcccgggtcactaagatgttgggagatgaatttggaactgcttcaaacatcaaaagtagggtgaacc

SEQ ID NO: 1292 - DNA, 281 bp, Glycine max
  unsure (1)..(281): unsure at all n locations; Clone ID: 701038523H1
ccagcaagggccattttctgaatgcgctctatctntctcgnccgatctggctactancccnaanccgcttcgaaccgtggcttcctcggcctcgnagaacctctctcgaagnaaatcttcttcgtcgtcttcgntttctcaacaaacttccgggtcgacccggatcgtttaccgcgaacctcggatccnatcggaatccaattttccgatctggcagcagaactggttcatcgcattgctcttcctcatggctctcggattcntcgccctcgctctnttcc

SEQ ID NO: 1293 - DNA, 285 bp, Glycine max
  unsure (1)..(285): unsure at all n locations; Clone ID: 701038524H1
ccgattgctagaatggaatttcgatgctcagtcatctcttttaccattctcttctctcttgctcttgcaggagagagccatgtccatgcatcgctacctgaggaagattattgggaagctgtttggccaaacactcccattcccactgcactgcgagagcttctaaagcctctcnctgcaggtgttgaaatcgatgaactccctaagcaaattgatgatacacagtacccaaaaacattcttctataaagaagaccttcatccaggcaaaacantgaaagtacna

SEQ ID NO: 1294 - DNA, 269 bp, Glycine max
  Clone ID: 701038525H1
tagcaattaagcttccttttgctagtagctatctctagcttctagttctagccccttcctttgtgaactttttttgtttatccagaagaatatgacatcctggttattgggaaggtctagtaggatcttaattcatcaacaacaacagcttcacaagggaccatttcttaactataatagctcttgttcctctttcgatcaactgagccattaggtgccgtgatgcattaccgggtaagaactcgtcacctaccctttccgttttggcg

SEQ ID NO: 1295 - DNA, 283 bp, Glycine max
  unsure (1)..(283): unsure at all n locations; Clone ID: 701038526H1
ccgaanattccgacaagattacggaanactttgaggcaattccaggngtcccaanaatnnaaagagatgtacaacccagcaacatggatgctagaagtgagttctgtagcagctgaagttcgtcttggaatggactttgctgaatactacaanacatcatctttattccagcgaaanaaagctctcgtanaggagttaagcacacccccgcctggngctactgatttgtatttccccaccaagtatctctctccacattggggcaatttaaatcctgntttgg

SEQ ID NO: 1296 - DNA, 280 bp, Glycine max
  Clone ID: 701038527H1
ctgaataaagcagagaagaataagaaaatgggtgtgttcagtacagtgctgctgtgccttatgtccctaatgtggatggtggatgctcgaattccaggcgtatactctggcggcgcttggcaaaatgctcacgctacgttctacggaggatccgatgcttccggcaccatgggtggagcatgtgggtacgggaacctgtacagccaagggtacggagtgaacactgcagcgttgagcacggcactcttcaacagcgggctgagctgcggacgtgcttcga

SEQ ID NO: 1297 - DNA, 281 bp, Glycine max
  unsure (1)..(281): unsure at all n locations; Clone ID: 701038528H1
cctaatcgtttccctgaaaaaaccctaaaaccaganaacgttcctcattgaaaaatcccatctttcatttcaacgttcctcaatagcgcattctagtcttcacgagcaataatttttcgattgctttcccaacatgaccgcttctnataagaaaaaccccaaagagaaaccaatttcgccgcaaggaagaaaaaccggaagaaccggaagtgccgaaatacagagatcgagctaaagagcgtagagaggatcagaatcctgattatgnacaaactgagttg

SEQ ID NO: 1298 - DNA, 280 bp, Glycine max
  unsure (1)..(280): unsure at all n locations; Clone ID: 701038529H1
ctctctgttccaaaaccctaatccttcgtcttccaaggaganggctgattctccccttcgcaaggaactcaaggtcaccttccccatggaaagctcagtcgagatcgagatctaggtcaaggtcgagatctaggtcgaggtctaggcctagacaaaggccaagatcgcgttctagaagtcgtggcaggtcaaggtcaccaattcgtggaaggtcaaggtcaccaattcatggaaggtctgaacctacaaatcctggtgacacatttatgtaatggtctat

SEQ ID NO: 1299 - DNA, 279 bp, Glycine max
  unsure (1)..(279): unsure at all n locations; Clone ID: 701038530H1
aagaatcagggttatggttgctggaggtgatggtacagttggttggntattaggatgtctaacagaacttcgtgcacagggtcgagagccagttcctccagtagggatcgtaccactggggacgggcaatgacctgtctaggagttttcgttggggtgggtcatttccgtttgcatggaggtctgcaattaagagaactctacaaagggctagtaatgggacagttaatcgtttggatagttggcgagtttcacnttcaatgcccgaagtacacctgtg

SEQ ID NO: 1300 - DNA, 282 bp, Glycine max
  unsure (1)..(282): unsure at all n locations; Clone ID: 701038531H1
aaaggaggancacagcactacacagctccgaaataggagggggagaaattttgtatgcgttggatttcgtagattctgattcatggtcagcacatagattgtggtggcagcacaatggatcctggcagtggaggaaacagtcttggcaacaactctaatctcgcttcaaaacaacgtttacggtggacacatgaattacatgagcgctttgttgatgctgtggctcaacttggtgggccagatcgtgccacacccaaaggtgtcctcagagttatgggtgta

SEQ ID NO: 1301 - DNA, 285 bp, Glycine max
  Clone ID: 701038532H1
gataggttctttgcttggagtgagtgcgagtcaattcttcttggtttctttcgttagccttggaacaaacaaacataccagtcaaaaatcaaaatctcagagttgtttgaacgagaaattgaaatgtctcagaccaagaaattgacgccgaatctggatcagcagagcacgaaggtgctgaatctcaccgtgctccagcgaatcgatccgtacatcgacgagattctcttcactgccgcgcatgtctccttctacgacttcaacatcgaaagcaaccagtggagt

SEQ ID NO: 1302 - DNA, 284 bp, Glycine max
  unsure (1)..(284): unsure at all n locations; Clone ID: 701038533H1
gaggcgcagagtagagcagcagagaagagagaaaacggcactgcagccgtagaaggaaaaccgaccatggtgcacgtctccttttacaggaactatggtaagacgtttaanangccccgccgtccgtacgagaaggagcgtctagacgcggagctgaagctggtgggggagtacgggctgcggtgnaagagggagctgtngngggtgcagtacgcgctcagccgcatccgcnacaacgcgcggaatctccttaccctcgacgataagaacccncgccggatctt

SEQ ID NO: 1303 - DNA, 273 bp, Glycine max
  unsure (1)..(273): unsure at all n locations; Clone ID: 701038534H1
gtccagggtnttaacttactttgtttgggagtcctgaaaagcaacaacgtgaaacattataggacgtgagtattttaattgaagaaaaactaaattatatctgactatatatgatcttgaagcttcatttcagattactttgtcaattcntgcttcttatcaatatagcagccacaactgctatattcttattagaccttcttatgttctctgaaattcttagcatcgccaatgcctgtcttgtttgtctgttttaagttaacaaatcacaca

SEQ ID NO: 1304 - DNA, 279 bp, Glycine max
  unsure (1)..(279): unsure at all n locations; Clone ID: 701038535H1
ttttataaaaaactggagcgttatttattttcttcttaaccccttcttcctcttgcgcatcgtctcaactncaactggcatttctgaacactctaaaaaaccagagccaaaccccaaacaaaattgtcttctcttctatttctccaattacaactcgtttccctaactcggccgagtcatcatggcgaatcacccttccgaagctcccaccgacgacttcctggagcaaatcctgggcctctcgaccttcgcctccgccgaccccgccgccgacgctct

SEQ ID NO: 1305 - DNA, 278 bp, Glycine max
  unsure (1)..(278): unsure at all n locations; Clone ID: 701038537H1
gctcttatttacccatcaagcctaaggcacttcacttgttctgcattgaccatagcttctctctttctttcctaattaatccttcccatgcaaacaaacgcccctctcatactcatagtgacacacacagcttagtttcgttgtattgtatgtgtcctttctcaattctcatcatatatctgttcaagtaccattatctttctatgttgagtgtcggcattttttgagtttctcactaccacttgttcttttnttctgatacatgcatatatatacgt

SEQ ID NO: 1306 - DNA, 272 bp, Glycine max
  unsure (1)..(272): unsure at all n locations; Clone ID: 701038538H1
ctcgagcgtttttctcaaaaagttgcaagagtacnagcaaaaaccaaagtnngagacnnaatgatgaagccatcgatgctcagatctcttcactctgccgccacccgcggcgcctcccacctctcccgccgtggctacgcctccgagccggtgccggagcgcaaggtggccgttctaggtgccgccggcgggatcgggcaacccctctcccttctcatgaagctcaacccctcgtttccagcctctccctctacgatatcgccggaactccc

SEQ ID NO: 1307 - DNA, 276 bp, Glycine max
  Clone ID: 701038539H1
aatcatctttagttcttcagtaatttattgtgggattctattctaagattttgagaatgtctagctgtgggtgtggaagcagctgcaactgtggcagcaactgcggttgcaacaagtactcttttgacttgagttacgttgagaagacaaccacagagactctagttttgggtgttgggcctgtgaaggcccaattggagggtgctgaaatgggtgttgcatctgagaacggtggctgcaatgtggatcaagctgcacctgtgacccagcaactgc

SEQ ID NO: 1308 - DNA, 123 bp, Glycine max
  unsure (1)..(123): unsure at all n locations; Clone ID: 701038540H1
cacgcnttcttcattctcgaacactctntcttaagctaatccagtataggaagccancntatctcgagggataaaataaaataanttgataaatggtgtcgtgcggcttcttacagcgtatat

SEQ ID NO: 1309 - DNA, 282 bp, Glycine max
  unsure (1)..(282): unsure at all n locations; Clone ID: 701038541H1
cttatccaatttgaattgttccattttcatttctttngcaaaantngcaactacttcctcagaaaaaaagtttctaagttaaggaaatccagagagacaanaatagccggnnacggtncagctacatgcatagaccatcctccttgccatcattnctncctcctcttggngtcttccctcaaatatngctgctaggtggagtctggatttgtttggtgctgacccttttggttatatacctggaatatctatgctgnctatgctatcaccaagtgatcaccc

SEQ ID NO: 1310 - DNA, 254 bp, Glycine max
  Clone ID: 701038542H1
ctttaaacctctctctctctcaaattattcgaaatccaaaaaccaaaaacaagtttcttattataaaaaatgaaacaaatagaaatggaaagtaacgcatcagcactagcaaagaaagtttggagcatggtacgtgtggtgttgttcatgcttcgaaaaggcataacaaaggggaagctcatgatggacctcaacatgatgctgaaacgccgcggcaagctcgccggcaaagccattgccaacttaatgtcgtc

SEQ ID NO: 1311 - DNA, 280 bp, Glycine max
  unsure (1)..(280): unsure at all n locations; Clone ID: 701038543H1
ctcagtcactcagtctctgcacttgttgtgatgaagaaactctcactcttaccctcggatttggacactaaatgttccactccctcgttgatgagcatgatgggcttttttgtcgcttcnttcgtcctctgctctgtggttttctcagtctccattgttcttcgagaccctccctcagatgccgccctgcacgaaccctcgtcactcgcagccctcttgcaaatcacacaaactctacgagatttggtcaatgaaanntctgattctgttgagctgcaag

SEQ ID NO: 1312 - DNA, 277 bp, Glycine max
  Clone ID: 701038544H1
aaagaacacatggaagtctgtgatcttgatcctaagttgttacaaggttaagtgttccttggaggaatcagagaaacaggttttgaaacaaggttctttccagaggttatgtctatcagatgtgagcaattcaagctccactcaggccattgaagacatttcaatttcatttgctggctcaaagctctatgcattcacacttgaggagctaagggaagcaacaaacagtttctcatggagtaacatgctaggtgaaggagggttggacctgtctaca

SEQ ID NO: 1313 - DNA, 279 bp, Glycine max
  unsure (1)..(279): unsure at all n locations; Clone ID: 701038545H1
taaaacctaaacaataattantagtagttgatcggctttaaatgctgtattttcttctttcctctttccctgtctccattgtctgggtctgttttagctttgcagaggttggccttggcaggcacacgcacatcccacattacancaaacacatttcattttttntttttcnttcncctttgnnatcctcaaaatccccgnccttaattggtcngancccaacaaaaaacagnncaagcnagccatggattcctcccagatccatggcttgtcctcgta

SEQ ID NO: 1314 - DNA, 278 bp, Glycine max
  unsure (1)..(278): unsure at all n locations; Clone ID: 701038546H1
gcgtgaagnctaaatgaaatattgggagaagatattgccaagcacgtaattctaaaggtcaccgaagatggatccggcattggggctgcactgcttgctgcctcttattcatcctaaactgtggatagagggtacacctgctataaaaatatatataaattgtttgatatnnnnnnnnnnnnnnnnnnnnnnnnnnnnnnnnnnnnnnnnnnnnnnnnnnnnggcacacacgcacgtatagccagtaaatcagaatttatgnccatatttaatatctg

SEQ ID NO: 1315 - DNA, 281 bp, Glycine max
  Clone ID: 701038549H1
gttcgcactcgcagattcttgagcaagaataatggggaagaaaagaaaacacagtgagactactgcaagctgtagcacaacccaaaaaggaagaggctgctccagagagaccggctaggacccttttggggtggaaggataagaatcaagttgaggatgattcaccaatatttaggaacaaagagaagctattggtcattgctctaggcgcatcaattacaggtaccggcatttgatgttgaatttggtcacacttttgcctcattgtaagaaggataaca

SEQ ID NO: 1316 - DNA, 276 bp, Glycine max
  unsure (1)..(276): unsure at all n locations; Clone ID: 701038550H1
atcatctttagttcttcagtaatttattgtgggattctattctaagattttgagaatgtctagctgtgggtgtggaagcagctgcaactgtggcagcaactgcggttgcaacaagtactcttttgacttgagttacgttganangacaaccanagagactctagttttgggtgtngggcctgtgaaggccaattggagggtgctgaaatgggtgttgcatctgagaacggtggcngcaactgtggatcaagctgcacctgtgacccatgcaactgc

SEQ ID NO: 1317 - DNA, 271 bp, Glycine max
  unsure (1)..(271): unsure at all n locations; Clone ID: 701038551H1
ctacacacttcccccaattcccaaaccnaaccctctctcttccggcgtnctgggggtggcgtcnccggcgattcccccctccggttccctctncacccttcaattcanccctctcgtcttcgcttcactgattccctctttcaaaatgcttccgatcgcttgctagggttttccctctcccaaatctcctcctcggaaagcaccctgtaccttttattcctccgactaatcaacttctttgctatggctattcgtgtaancttttcctttt

SEQ ID NO: 1318 - DNA, 280 bp, Glycine max
  Clone ID: 701038552H1
ccaacatctcatacacttgtgtgtcatagggtggtctcctttggtgagaattgagaagacactcaattcatcaccttttccctctctccttttccaaagaaaaagaaaaaaagaagatcaattccaatggaggtttcatgcaaaattttgagaagatcaatccacagttttcttcaaaactaccattattttacctcaactgcagcttttctagcccttcctttctccgcatcaatactcctatcagaagctttgtgccagcctcttcatccctcttgcc

SEQ ID NO: 1319 - DNA, 280 bp, Glycine max
  Clone ID: 701038553H1
cactatagaaaaaacgacattcattcatctatggctacccttattgctcccagcaaccacttctccccaagaagacgctgaggctctcagaaaggcttttgaaggatgggggactgatgagaaaactgtcatagtaatattgggtcatagaactgtttatcagaggcagcaaatcagaagagtctatgaggaaattttccaggaggatcttgtgaaacgcctagagtctgagatcaaaggagactttgagaaagccgtgtaccgatggatactagaacct

SEQ ID NO: 1320 - DNA, 281 bp, Glycine max
  Clone ID: 701038554H1
taaatagggttagggttagggtttatgcaatcgaattcctgagacggtgcatttgtacgtaatcgatggcgaattcgcacggatccagcagctaagagcataaggggcacgaaccctcagaacctggtggagaagattctccgatcgaagatataccagaacacctactggaaggagcaatgtttcgggttaacggcggagacgttggtggacaaggccatggagctcgaccacctcggcggcacctacggcggaaaccgcaaacccacgccgttcatgtg

SEQ ID NO: 1321 - DNA, 278 bp, Glycine max
  Clone ID: 701038555H1
catattcacatgagctgccacgatatggtcttgaagtaggacttacaaattatgcagcagcttattgcactggtctcctgttggcccgaagagtcctcaaaacacttgaaatggatgaggagtatgaaggaaatgttgaggctactggagaggattattcagtggaacctgccgagagcaggaggccattccgtgcactccttgatgttggtcttgttaggactacaacaggaaatcgcgtctttggtgcccttaagggagctctggatgggggtttg

SEQ ID NO: 1322 - DNA, 282 bp, Glycine max
  Clone ID: 701038556H1
ctagggttaacatttctccatttccattttctctctcacttttcaagaatcgtaagctatgggaaagtcttacccaactgtgagtgctgattaccagaaggccgttgagaaggcgaagaagaagctcagaggcttcatcgctgagaagagatgcgctcctctaatgctccgtttggcatggcactctgctggaacctttgacaagggcacgaagaccggtggacccttcggaaccatcaagcaccctgccgaactggctcacagcgctaacaacggtcttga

SEQ ID NO: 1323 - DNA, 242 bp, Glycine max
  unsure (1)..(242): unsure at all n locations; Clone ID: 701038558H1
accgacgcttgaananaccgaaccgttgcttcgattcgggttcaagttcgaagaagaaaagcgatgagttcgggtagtagcagcagccacagcagtgagnaggagaaggagaagcagagagtnagtcgcacgtcgntgatactntggcacgcgcancanaacgacgccgcagctgtgcggaagctcctncangaggatcccttcgctcgttcaaggccagagactacgncaaccgnacgccg

SEQ ID NO: 1324 - DNA, 216 bp, Glycine max
  unsure (1)..(216): unsure at all n locations; Clone ID: 701038559H1
tgaagccatcgatgctcagatctctccactccgncgccacccgcggcgcctctcatctcttccgccgtgggtacgcctccgagccggtgccggagcgcaaggtagccgttctcggcgccgccggcggggatcgggcagcctctctcccttctcatgaagctcaatcccctncgtttcgagcctctccctttacgatatcgccggaactcccggcgt

SEQ ID NO: 1325 - DNA, 277 bp, Glycine max
  unsure (1)..(277): unsure at all n locations; Clone ID: 701038560H1
ggcgatggaaactatgctcacaacaagtgacaganacagagtagaaccaaaagattcataataactaacattagaaactaggtgaaagtaactgnacagacacacaacacatcttccttaatttctccgtccatttccctccnataaataaatcttcatttccatctttcttgggtgatccaatggcgacccttttccagggattgggagttgtgaanccatcattggcttcttcaaactncaacaagttccatcttccttctcgtanatccctctg

SEQ ID NO: 1326 - DNA, 209 bp, Glycine max
  unsure (1)..(209): unsure at all n locations; Clone ID: 701038561H1
tgattgaagaagatgccgatcagaaacatcgccatcggaaggcctgaagaggctactcaccccganacgttgaaggcggggttggctgagttcatctccaccttgntcttcgtgttcgccggttcaggttccggcatcgcctacaacaagcttcaccgacaacggcgccgccactcncgccggcctcatcttcggttccatcggccatg

SEQ ID NO: 1327 - DNA, 283 bp, Glycine max
  unsure (1)..(283): unsure at all n locations; Clone ID: 701038562H1
cgacanccgcatcaanagtcactcnattcccantcagaatacaanatcnnagcatttcncttagcgtaggaaatggaagtcacactttcancctgcaagtccattagctcgccgtctgttcccgtcgcaggtttgtttgcggggaatggaggaattaagagctcgcaatgcagtttcttagcgggaggagcaaagtgaggtttcctaggcaagtaggtcaagttagccaccttcgcaaacagcgccaaacgcgtcactgcggtgctctccangcgacttgcag

SEQ ID NO: 1328 - DNA, 283 bp, Glycine max
  Clone ID: 701038563H1
agcgcaccggaagcgcccacggttgggatatcatcttttacattttcagcttccttcaagggcatcttcgctcttcacttctcattgtcttgattggcactggctggtccttcctcaaacccttccttcaggataaggaaaaaaaggttctcatcgttgtcatcccccttcaagtcattgccaacattgctcaggtcgttattgacgagaatgggccctacggccatgactgggctactggaaacaggtcttcctccttgttgatgtcgtctgttgctgcgcg

SEQ ID NO: 1329 - DNA, 278 bp, Glycine max
  unsure (1)..(278): unsure at all n locations; Clone ID: 701038565H1
gatgnntagtgtgagttatagcaatctgaagaacggcatnanagcattcttngnccctctacnctncatcctantctacntctcattnnaatnggncattagtactccttcttcttggtcttctctgtggacatggtgctatcaccagcctctgctattggccaatgtcctttcttcttcaatgtcaattccacttctggctcatcggcctaatccaatccagccactggatgattgacccgtattggacagtgatacctgtgatgcttgttcatata

SEQ ID NO: 1330 - DNA, 276 bp, Glycine max
  unsure (1)..(276): unsure at all n locations; Clone ID: 701038567H1
ganaancccagttttgctgcttcaagttcangcactacttcagttctgcnactgtcttctgctttgtccaattatagtcattttgaacagtgatgaancnagggtcagcaaacaaccaacagctcttttgggcaagagtggttatgcgcaaatggcttaacatggctagtaacgagcctgnttacaccgctgaccctgatgatgataatgaggatgaccctgaaagtgactcagataatgaagagttgggaaaacggacacggtttggggacagca

SEQ ID NO: 1331 - DNA, 275 bp, Glycine max
  unsure (1)..(275): unsure at all n locations; Clone ID: 701038568H1
cgcaacaaaaagaaagaatcccaggcgaggagaaagatggaggggaaggagcaggatgtgtcgttgggagcgaacaagttccccgagagacagccaattgggacggcggcgcagagccaagacgacggcaaggactaccaggagccggcgccggcgccgctggttgacccgacggagtttacgtcatggtcgttttacagagcagggatagcagantttgtggccattttctgtttctctacatcatgtcttaaccgttatgggatcgccggggc

SEQ ID NO: 1332 - DNA, 280 bp, Glycine max
  unsure (1)..(280): unsure at all n locations; Clone ID: 701038569H1
cttcattcattccccttctcttatattcaaaatcacgttcaactttctcccttcactcattctcacaaaccatgagcacaatccaccaaacacacactcgtcgcgaaggtgaagacaaagagttcagtttctggggctcatcaaacatcataccttctgaaaatgattgtgatcaaccacaaggtaatgaatcaaggctcaaaaaggaagcatactttggagaaacacaccanagaaaaagccttaaatatgagtattcacggttttgttcaacagtttc

SEQ ID NO: 1333 - DNA, 212 bp, Glycine max
  Clone ID: 701038570H1
atctttcgaagttcgtttgcgtgtgttgtgtggtcagtcaccgatggcagcaccacctgcgagggcacgtgccgattacgattacctcatcaagcttcttcttattggcgatagggtgtgggaaagagttgtctgcttttgcgattttctgatggttccttcacaaccagttttatcaccaccattggcatgatttaagataagaaccatga

SEQ ID NO: 1334 - DNA, 276 bp, Glycine max
  unsure (1)..(276): unsure at all n locations; Clone ID: 701038571H1
tttggttganagtagcaaagatgtttcctttcgggcaaaagggtcaaaagataaaggggactatggtggttatgcagaagaatgtgttggatatcaacagcatcaccagtgttggagggatcgttgaccaaggcttaggcttcataggcagtgcagtcgatgcacttacttttgcagccaccaaaatctccatccagttgattagtgctaccaaggctgatggtgggaaaggaaaaattggaaagagtacaaatttaagaggaaagataacattac

SEQ ID NO: 1335 - DNA, 277 bp, Glycine max
  Clone ID: 701038572H1
tcatctcaatgagtttgacagtggttacttctcttcttgagaagtatgggattgatcctaaacaaatcggtcgtctggaagttggaagcgagaccgtgatagacaaaagcaaatccatcaagaccttcctgatgcagatcttcgagaaatatggaaatactgacattgagggtgttgattcaactaatgcatgctatggaggaactgctgctctgtttaattgtgtcaattgggtggagagcaattcatgggatggacgctatggacttgttgtctg

SEQ ID NO: 1336 - DNA, 262 bp, Glycine max
  unsure (1)..(262): unsure at all n locations; Clone ID: 701038573H1
ggccaaattgccgaaactggacacncctcctagaataaacntcatttttattttttacnttcaaggccaagaattcaatggcaggtattgcatctggaatcagcacccttgccattggctcaggtgatgctcgacggcgtccagcacaagcccaatccactcccaacactaacactaacacaaacactaacagcaacacttcttcttctacgccatcatctgaagggttcacttatttaaattctgccaagcaagatanaaa

SEQ ID NO: 1337 - DNA, 279 bp, Glycine max
  unsure (1)..(279): unsure at all n locations; Clone ID: 701038574H1
aaaacatctcaatgggttcttcttctattacaacatcgnnntgcaaccatgaccntggctgcgatcgtgctcctgttcacggtcnttgccgtttcctccgccctagacatgtcgataatctcgtacgacagcgcccacgcggacaaggccgccannttgcgcaccgaggaggagctgatgtccatgtacgagcagtggctcgtgaagcacgggaaggtgtacaacgcgctcggcgagaaggagatccgcttccagatcttcaaggacaacctgcgattc

SEQ ID NO: 1338 - DNA, 277 bp, Glycine max
  unsure (1)..(277): unsure at all n locations; Clone ID: 701038575H1
tgatgttgatgacaatgatgggaaacttgcnaaatcaattagtgcttctactcaagagcctgaaattaaggngcaacaactagccanagaaacttctagcncnataaaccanaaaggttctgaattgtctgaaaccnttnagcagantgatcgaanaccatctgatgcccgggtgaagcagatacaagatcagcttatccaagctaaggtctatctttcccttccagttgtaaaatccaanccacatctcactcgggagcttcgattacgggtaaaa

SEQ ID NO: 1339 - DNA, 276 bp, Glycine max
  unsure (1)..(276): unsure at all n locations; Clone ID: 701038576H1
ancttgttggccaacaagggtctcttaagttctgacgaaattctcttgacaaagaatcaagtatcagcggatttagtgaagcagtatgcagaaaacaacgatcttttctttgaacaatttgccaagtccatggttaagatgggaaacattactcctttaacagggtcaaggggagagatcagaaagaactgcagaggaattaacaagtgatgtagtgatatcattgtcatgtgacacgtgtgaaagtgcacctacattttacttttcttcctcttg

SEQ ID NO: 1340 - DNA, 275 bp, Glycine max
  unsure (1)..(275): unsure at all n locations; Clone ID: 701038577H1
gcggctaaagtttgtgagtggtctctgccaccaaccccgcactgtgtgggatcttcaatggcaccttccttatgtctatcccttccaaacacttccaccttctctgatttccacaagctacactgtttctgtttccanccaaaaaaaccgatccggcaatttatgtctggttgggtcccagaagctcggcccgtggcggcccatttgggttaccgaaagaagcttaatgcgttgagccaagatggagagagtaccacgggacgatggaggataac

SEQ ID NO: 1341 - DNA, 281 bp, Glycine max
  unsure (1)..(281): unsure at all n locations; Clone ID: 701038578H1
cgcaacagggcaaaaaccatcgatgatgtttctctgantctgagngantcacgcgttactgttacttgannnnnnnnnnnnnnnnnnnnagtggttttngagaaatggttgagcnatcggtgctggtgctcgaaaagcaagggccaaatccagtgtnntcngaangaatcnacgattgggtgtttgactgccatgggcttttgcacaatgnggttttgatcatcgcttctttncttnncgncttgnanttagcactgcaagctnaaaagagttcctcagac

SEQ ID NO: 1342 - DNA, 279 bp, Glycine max
  unsure (1)..(279): unsure at all n locations; Clone ID: 701038579H1
ctcaatttcagttcttctacgttctaaccattcgcaaaangacttcgttttaatcntacatcctcgttagtcgttagtncttacgcgaaccagctgaatgcacggcaacgtcggtcacgtgaccaatggcttctcatcaattcctcgacaacttcataatntccgatcacattctcgtaccgggctcctccgactccgaggttgaaaatgtcggtgacgtgcctcactgtccggtccttgttttcgtcaactccaagagtggcggtcaactcggcggac

SEQ ID NO: 1343 - DNA, 278 bp, Glycine max
  unsure (1)..(278): unsure at all n locations; Clone ID: 701038580H1
cacactacaccgatatttccaccaaacccgtttgcnttgttgtttgcgaataaatggcgactaagaggagcgtgggaacgttgaaggagggtgatttgaaggggaagagggtattcgtgagggtcgatctgaacgtgcctttggatgacaaccttaacatcancgatgacactagagtccgtgctgctgttcccaccatcaagtacttgactggttatggtgctaaagtgatccttctagccattgggacgttccaaaaggtgtaacacctaatacag

SEQ ID NO: 1344 - DNA, 272 bp, Glycine max
  unsure (1)..(272): unsure at all n locations; Clone ID: 701038581H1
tttnttcctnattgttgctatgattgtngtctgtttagttccaaatnnngaaattagcataggagcactgtgattttggatgaccatatggtcntccagttatcccntggtaatatatgtgacgttgtagatgcataaatnttgtggctccaaggtgtcttaatgacactgcttctctctgtgtttggctnngctgtagtngatttaacatgtctttgccnaaattgcctgataatcagatntnagatggtttancctgtaaagaantgana

SEQ ID NO: 1345 - DNA, 275 bp, Glycine max
  unsure (1)..(275): unsure at all n locations; Clone ID: 701038582H1
gaacaacaaaatagagggtaattttccaccttcttcgctacanaccataccataagggcnccctttcaacgcatgctttccctcccaaattcttcacctttctcccctctttcccttcatttttctattntcttacatgttgttgcatccgtgccaaaaggggtttgttcctgcacaattaaattcaaccccttaggctataaaaaaaaaagatttttcatttcaatctttggaaggtttcaataataagaagcccttgattctagaagaaaaac

SEQ ID NO: 1346 - DNA, 275 bp, Glycine max
  Clone ID: 701038583H1
gggaacacggagaagctgatgaaccagatcatggaattgaagttcacgtcgaaatcgctgcagcggcaatcgcgtaagtgcgagaaggaggagaaatcggagaagctgaaggtgaagaaggcgattgagaaaggcaacatggacggagcgcggatctacgcggagaacgcgatccgtaagcgcacggagcagatgaactacctccggcttgcctcgcgcctggacgccgtcgtggcccgcctcgacacgcagcgaagatgacgacgatcagcaag

SEQ ID NO: 1347 - DNA, 276 bp, Glycine max
  unsure (1)..(276): unsure at all n locations; Clone ID: 701038584H1
cnaacaccacactcacgcaaatggatccgctcaggggatccgaacccgaaaaccctaccgccacgtgtctctccatgctctccctccgccgcttctccgngtgccggacttcgcccgtcgcctcnctccctccgacttcgtcgcccgcgtcctcgccgtagccgacgtcctctccgcctccgacttctactccgtcctccagctccgcccttctgacggcggcaaccgcgacctcgcgcggcggcagtacgcaaaactcgcactctcctcgaccca

SEQ ID NO: 1348 - DNA, 278 bp, Glycine max
  Clone ID: 701038585H1
aattaacctcactcaaactcgggatcacagaaaccaacaacagttcttgcactgaggtttcacgatgttgctggaacttgcacttggtttgtttgtgttagctttgtttctgcacttgcgtcccacaccaagtgcaaaatcaaaagcacttcgccacctcccaaaccctccaagcccaaagcctcgtcttcccttcattggccaccttcacctcttaaaagataaacttctccactatgcactcatcgatctctccaaaaagcatggccccttattct

SEQ ID NO: 1349 - DNA, 276 bp, Glycine max
  Clone ID: 701038586H1
cttagttctgccacacaggatccagggccctctaacactcttgctcttccaggtccaggagattccaaggattctcagaaaggaggaccccaaaatgccttggttgttggtccaactatgccatccacaacaccgaatgatactggctttcagagcaaaagtacagcggttgtttcagcctctggttcatctgaaagaaatttatcaacatctgctttgatggaaagaatgccaagtaaatggccacgtcctgtatggcatgcaccatggaagaat

SEQ ID NO: 1350 - DNA, 273 bp, Glycine max
  Clone ID: 701038587H1
gtcattactatattttatgaccctgaaagagtcatgtggaactcctagctaataatctgttatgtaacaatagcacaactgagtgaaatttcgtatattagtatttctggcatatctagtgaagtctttgaattcttgctggacttatatgatgtgcctcatactctttcagtttttcattggcctgtattttttctagcgacatagaattggtttcaacatttgaaagatgcctctgaagtctcaataagaatccaattcctgttaagtatg

SEQ ID NO: 1351 - DNA, 277 bp, Glycine max
  Clone ID: 701038588H1
ttggggtcacttccttgtacattggttggggtctagatggctctgtctggatttcatcagaattgaaggggttgaatgatgattgcgaacattttgagtcttttccacctggtcacttgtactctagcaaagagagagcgtttcgcagatggtacaatcctccatggttctctgaggctattccctcagcaccttatgatcctcttgctttgaggcatgcctttgagaaggctgtggtaaaaaggttgatgactgatgttcccttggtgttttgctc

SEQ ID NO: 1352 - DNA, 278 bp, Glycine max
  Clone ID: 701038590H1
tccaaatacagaaatatcattttccgagacaatcccatcttccatttccatcttcaatatttcttctcatcgagaagcttcgcgaacgaaaacaaagaaccctagacagatccattccatagccatgtcaggtgttggccctctatctcaggattgggaacccgtcgtcctccgcaagaaggctcccaccgccgccgccaagaaggacgagaaagccgtcaacgccgcccggcgctccggcgcggaaattgaaaccctaaaaaagtataatgctggga

SEQ ID NO: 1353 - DNA, 273 bp, Glycine max
  unsure (1)..(273): unsure at all n locations; Clone ID: 701038591H1
ccaganacagagtgcgttcgtngacgacaaacacacacaaacacacaacaaaagctcnccgganaatctttctccggcgacctggaattccgacgaaggtagttgcggctccttcgtcccgaaactgaggcccccaaagtataaactttggtggtggtgggtaggatctggcggtgtatgatgggatcttgcatatgcccgttggagactccggcgaggttgctttggaccacaagttcttccgtcataagcttatgatctnctataataata

SEQ ID NO: 1354 - DNA, 271 bp, Glycine max
  Clone ID: 701038592H1
cgttcatgatttacccgacaagggaactcgacaatactatgttgctatggcccacagagaccgaatattccggggccggagactcgccgccggttaccactcgcctctcacttttatcccctccaacgagacttatcagattgaagcctttggattcttgcattttgccaatgtttctgttgggactccaccattatcgtttctggtggcatggatactggcagtgacttgttctggttaccttgcaattgtaccaatgtgtgcaggtata

SEQ ID NO: 1355 - DNA, 275 bp, Glycine max
  unsure (1)..(275): unsure at all n locations; Clone ID: 701038593H1
ctcttccccaccaaactanaccttttctcagtgtagaattttcagaatttgaggtatggggaggctgtttgtgacccatctggaggggcagatctatacctgcaaacactgccgcacccacctcgctctctatgaagacatcgtttccaaggctttccacagcagacatgggancagcttatctcttcagtaaggtgtaagttatcctgattttagattttggaaccctatcatatgtgattactataaacaaaaactcagataaatgttctctt

SEQ ID NO: 1356 - DNA, 280 bp, Glycine max
  unsure (1)..(280): unsure at all n locations; Clone ID: 701038594H1
ccaaataggagtntgtgtaagggaagaagatggtgtcaggttctggaatctgcgcaaagcgagtngtggtggacgcccgccaccacatgttgggtcggctagcgtccatcgtggcgaaagancttctgaatgggcagaaggttgcggtggtgcgctgcgaagagatttgcatctccggcggtctggtgaggcagaaccatgaaatacttgagattcctccgcaaacgcatgaacaccaaaccctcccatggccctatccattccgcgccccagccaagat

SEQ ID NO: 1357 - DNA, 190 bp, Glycine max
  unsure (1)..(190): unsure at all n locations; Clone ID: 701038595H1
caaganagagaaggaaaaggacaaatctggcccggcagagaaagaagggcaagaaagctcaagtttaaagactgctggtgctgaaggagaaataacagcaggatttttattaaagaaaagtgcaaaaactaatggttggagcaggcgatggtttgtgctaaatgaaaagacaggaaagcttgggtacacc

SEQ ID NO: 1358 - DNA, 222 bp, Glycine max
  unsure (1)..(222): unsure at all n locations; Clone ID: 701038601H1
tgcgaaatccgttcccctatctgcttttcgagttgttgctaaagagtgatggactcaccgcccagcaatcaccacgcggtcgacggagacgccaacgacgtcgttagatccttttcccaccgcgacgacgatgaagacggcaagccccaacccctcaccggggacggcgcaattctggaaagatattcatagggggtttagcgaanaaacggnnnttgcntt

SEQ ID NO: 1359 - DNA, 257 bp, Glycine max
  unsure (1)..(257): unsure at all n locations; Clone ID: 701038603H1
attccaaattctcaactttcctaactttagcaaccatctaagaagttcagtcccttaattatctctcaccttgaattagaaaagcattcaaagctttgaacccaatttcactgtttgcacctcaaacatcttagaagtcccaattgagtctcaattccacaaccaaaaatgcanagttcaatttcacaatctgatatttttatcactgattaccttgtaccccaagaagttccatttcaatttcaatttcaagatat

SEQ ID NO: 1360 - DNA, 255 bp, Glycine max
  Clone ID: 701038604H1
agccgccgttgcacgccactcctaacgcttttgataacgacgtttgttcctacttcctacgttcccttctctctctgcgtgtctctgtctctgtctgcggctccgtacgggtttcgaggcaatctaggtgcaaattgcttgtcttgaatagaatgccaggagaagaagtattagctcaagaagatgagaggggtagatgttttgagcctgaaacctctgaggatgagtggcggaagtctcgagctagatctctta

SEQ ID NO: 1361 - DNA, 258 bp, Glycine max
  unsure (1)..(258): unsure at all n locations; Clone ID: 701038605H1
gtggcttttgagggaaaggagggaacttttagtgtgggagggtggaaactggaattgggtttggttgggggtanagagaatgaagattcagtgtaacgtgtgtgaggctgcggaggccaaggttctgtgttgtgctgacgaggctgcgctgtgttgggagtgtgatgagaaggttccatgcggccaaacantttgcagcaancccnngaanntcccccttcccaaccnttccccccccaatgnncccaaagnggnntt

SEQ ID NO: 1362 - DNA, 254 bp, Glycine max
  Clone ID: 701038606H1
gagagagatgccaatatagctgcacaacaggctgagagggctaagaatgatcgcatgagtggtcgggagctatttttgtcaaatgctagcttgtttgtggatgatgcagaagcatatgacgtgtaccagagagaaccagaatcttatgaaactgaagagaatgggagtaggaatgctgcagaagatggtcccagctcctcagcaacagccgctgctgatggtgattatcttgatgacatagatgacgatgacga

SEQ ID NO: 1363 - DNA, 254 bp, Glycine max
  Clone ID: 701038607H1
tccgatcctctgtcctctcgaagctttcatcgttcaacatattctcaccatctcagtcatgggcctgctatcttgttttaggtctaccgtcctgagaaaatgttccaaaggaagctctggcatgtcaagattcctgtatacgaacaattttcaacgaaacttgatttcgtctggtggcaatgaatcgtattatgggtattttaacaggagatcatacacttcactttatatgggaactggaactgtgggtggga

SEQ ID NO: 1364 - DNA, 246 bp, Glycine max
  unsure (1)..(246): unsure at all n locations; Clone ID: 701038608H1
ttttttttcaaaacaaaattaattttattggctcgaaattgaatggttgtttcctgtatcttgtttcctctatgcaataacgaagtancaaatagatgggtatacacaacaattctattttcatatttcataatatacaatcttacttcttttatggatacaaaaggggaaaaaaatgatttcacatacaacaattgctcagggattttnatggttggatatttgaattcctttttcaattcttta

SEQ ID NO: 1365 - DNA, 254 bp, Glycine max
  unsure (1)..(254): unsure at all n locations; Clone ID: 701038609H1
agggaagatatcaagatgcttgtgaagaagtggtgggacatatatgaagatgagacactggactacaataacaactctgtcaacgtggaacgtttcacatcggcactattggatgctgggggctttcagtttgtgccagcaccttctgctgcctaatatgcttattatttacagctacaaattaatgttaattaacgacaaagtatatgtattgttatntgcttttattcgtttttgggtcttatatatgaagg

SEQ ID NO: 1366 - DNA, 253 bp, Glycine max
  Clone ID: 701038610H1
gccaaaggcacatctaaatcatttgatggtggcacaaggtcattagaaaggagtaaaattcttctaaatggaaagcctccaagttactcattcaatcagtcttctgaaggaaccaaagacggggaggaaaatgataaatggaaaggaaattccgatgataaaccaaatgacttacctacagttgatacagaggatagtgttccgggagttttgtatgatttgctgcagaaagaggtcttagccttgaggaaag

SEQ ID NO: 1367 - DNA, 252 bp, Glycine max
  unsure (1)..(252): unsure at all n locations; Clone ID: 701038611H1
cggaaacanccntcaaacgacgtacggcgangggtgaagttgcttgtcaggaagtggaaggaaattgttgangaatgggtgaagttgaatcctcagggaagaagcaanactctgatggctnatggagantcgccgcctgtgcagaaaaccacccaaaatgggcatcatcatcagcagattcctgattttgcatactctcccaatccanacaanngnagnngngcctntgaccgtaacaantcagaagcagaa

SEQ ID NO: 1368 - DNA, 253 bp, Glycine max
  unsure (1)..(253): unsure at all n locations; Clone ID: 701038612H1
cggcaccagcgaaacgctcttcgttatcttttctcagactccgcggcgtagatccgaggagttcgggaaatcctaactcatcatctcaactcaagtcatggctggacttgcacctgagggatcacagttcgatgctcgtcaatatgattctaaaatgagtgacttactttcatctgatggacagganttctnnantccctatgacgnggttnatgatagttttgcacgcaatgggttggcaggaaaatcttcc

SEQ ID NO: 1369 - DNA, 220 bp, Glycine max
  unsure (1)..(220): unsure at all n locations; Clone ID: 701038613H1
tcaattcgcttttcatccaaccaggacatggcggcagatgaagatatgtctttgaagtctaatctgagtcaatcaaatgaaacttggaagcaggagatggaaagaagtcaatctcaagtggatgtattgcaggcaaggataatggaggtaagggcacaaatacaaggctcaaaggaagatgcaaaanaggagttagaggttctatggagaagagtcaaga

SEQ ID NO: 1370 - DNA, 225 bp, Glycine max
  Clone ID: 701038614H1
ccttttctctcttctctctctttctccggcgacgatctcagattccggtcactcctctcgccggcgatcccttattcctccgtcctccgtcgagtcctttccgattcgaatcgttcccagccttgtgccaccatgaatcccgaatacgattatttgttcaagcttttgctgattggagattctggtgtaggcaagtcatgtcttctcctgaggtttgctgatgat

SEQ ID NO: 1371 - DNA, 253 bp, Glycine max
  unsure (1)..(253): unsure at all n locations; Clone ID: 701038615H1
aacacaacaacactctctcttctcgctcttggcttttcgctcttcactcactctcattcattcatttccaccgttcatggatccagtaagcgtgtggggtaacacgcccttggcgacggtggatcccgagatccatgacctcatcgagaaggagaagcgccgtcaatgccgcggaatcgagctcatcgcctccgagaacttcacctcnttcgccgtnatcgaggcctcggnagcgttctnaggaanaannacc

SEQ ID NO: 1372 - DNA, 255 bp, Glycine max
  unsure (1)..(255): unsure at all n locations; Clone ID: 701038616H1
ctcacaaggattgagtgttggatctagtcatctagatttaaaaaaaaaatgaagatcattgagaaaattcgcgcagttactgctgatccaaacagggtggtgtnctcatttgagtncttcccccccaagactgaggatggtgtggacaatctgtttgagaggatggaccgcatgntggctcacaacncctctntttgcgacatcacttggggcgctggagggacaacggctgatcttacatnggaaattgccaac

SEQ ID NO: 1373 - DNA, 254 bp, Glycine max
  unsure (1)..(254): unsure at all n locations; Clone ID: 701038617H1
ggcttccaaggagttctctggtctttgctccttggctccttcactatctgagagcattttgtgcactactgggttgaaaatgtatatgctggagancaaaggaggtgccatagcatgcatgttcttncctcttttcttcttggggacatggcctgctcttttgactatgttagagaggcgtggtcgtcttcctcagcatacctaccttgattactcaatcaccaatttcttggctgctttactcattgctttta

SEQ ID NO: 1374 - DNA, 241 bp, Glycine max
  Clone ID: 701038618H1
tgatttggttcggaaagaagtggtcgtaagtccatttctctcttgtaaatatggcagccgatacggaacctaagaagatcataattgataccgaccctggcattgatgatgctatggcaatattccttgctctacaatcacccgaagttgaagttattggactcacaaccatctttggaaatgtgtacaccactctggcaaccagaaatgccttgcatttgttggaggttgctgggagaac

SEQ ID NO: 1375 - DNA, 255 bp, Glycine max
  unsure (1)..(255): unsure at all n locations; Clone ID: 701038619H1
acacactctcatagctgtagcggcgacactaagatcggagaaagaatggcgaaaacgacgtcgttgctgctctttacactgctcctcttcggaaccctagctctcatccaggcgaagaaatcgaaggaggatttgaaggaggtgacccacaaggtttactttgatgttgagattaatggaaaagaagcaggtcgtattgtaatggntctttatggggaaggctgttccaaaaactgcagaaaacttccgagcatt

SEQ ID NO: 1376 - DNA, 254 bp, Glycine max
  unsure (1)..(254): unsure at all n locations; Clone ID: 701038620H1
tgttgccgtgcagaaatacttcagacatggtccttggtaccacgaagctgatatgaggacaggaagagcaacttattggcagcttacaagccttcaagcattttggcctggcctacaggttcttattggggatgttattcnctgccaattcatctcaccgggagtttntccatgtgtggaagaactatggagtgntcccagagaggtatnnnncgggattatcagatgcttcaccntactganaatattaccct

SEQ ID NO: 1377 - DNA, 234 bp, Glycine max
  Clone ID: 701038622H1
tttcatggttgatgatccaaaggcgataactgaagacaccacacatgttcctccacggaagcgacagaatcttcttctagaaataccctcaagaacagaagagagttctcaagaatttgttgcaatcaaaatgccaccgacacccagttccaatcccactcctactccaaagagagtgaattttcttgtatcggacaccggcagatattgaaaaaccaaatactgcagctccag

SEQ ID NO: 1378 - DNA, 254 bp, Glycine max
  Clone ID: 701038623H1
cttctccccaattctcaaaccttacctagtattttcgtttctgaacccaattaattaagcacacaaggaccataacatacctatacctcaatatcacaagtcttatggaggcagagcgagacaagtacaagatgatcaactttgaagaaaccgagttacgactcggcctgccactcagtggaaacgagacgctcaaaaacacttgcagcactgggaagagggttttttcggatactgccgtggatttgaagctt

SEQ ID NO: 1379 - DNA, 252 bp, Glycine max
  Clone ID: 701038624H1
gaaacatttcactaatagagagacataagcataatattgagaaataatggagggttgtacttattgtgtgaagttgctatgccttgttgggtttgtggtgcttgtgagtactattgcaggggtggagagtgctggtgaatgtgggaaatctaccaccccagataatgaggcttataagcttgcaccatgtgcctcagcagcacaagatgagaatgctagtgtttctcagagttgctgtgctcaggtgaagaa

SEQ ID NO: 1380 - DNA, 251 bp, Glycine max
  unsure (1)..(251): unsure at all n locations; Clone ID: 701038625H1
gctagacttagctattcttacctcttggcatgaccattcaaatgtcttcttttctcttagcttctcttgctgttttctttttcttctcctccttggagaagagttttgcctttcaagcagcaagaaaggaggacacagaaagcaacaatcttcatcaatatactcatcttgttcacctcagctcactccttccttcatcttcttgcagctcttctactaaaggtcnnaaaacaaaagcatcattagaagtg

SEQ ID NO: 1381 - DNA, 249 bp, Glycine max
  Clone ID: 701038626H1
cgaatagccactttgcgcaccacgatgaggtgatgcttctgggacacgacgataagtatttgccagataggggcatgcaggttacaatcgcgtttaatcacttcggtgagggtctggtgcagcgtatgccacgatgcaggctcggttacatccacgtcgttaataatgacttcacgcagtgaagatgtatgctatcggcggtaggctaaccccaccatcaacagccagggtaaccgttacaccgctccc

SEQ ID NO: 1382 - DNA, 249 bp, Glycine max
  Clone ID: 701038627H1
gtgagtcagagcaacccagcagctccaccaccacctgtgggttatcccactaaggatgatgttccttcccaacaaaatgttccaatcaaaacctctactaggggtgatggcttttggaagggatggtgagttcatttataaccaaaatcttactttgtctaattaattagggtactgatatttatagcaagtacaataattaaggacacaagttaaagaattttaaaatagaaagttttgtattgaaaa

SEQ ID NO: 1383 - DNA, 252 bp, Glycine max
  unsure (1)..(252): unsure at all n locations; Clone ID: 701038628H1
gtcgagttcaacgctggctccacccagtccacttttccatgatgtgaaaagcgaggatgaatacannnnnnnnnnnnnnnnnnnnnnnnnnnnnnnnnnnnnnnnnnnnnnnnnnnnnnnnnnnnnnnnnnnnnnnnnnnnnnnnnnnnnagatgatgatgtttcgagcaaccatgtttcaacgccgttcatgaatccagggtcaaaagggctggctgccaatcgaaccagtttgcgctattggatattttg

SEQ ID NO: 1384 - DNA, 252 bp, Glycine max
  unsure (1)..(252): unsure at all n locations; Clone ID: 701038629H1
aacttggcagtaatggcttcaatgaataaccaaaaagaaattgagctctttgagggccaatctcttctgtacatgcagctatatgggcacctaagacctatgtgtcttaagtgggctgttcaactaggtattccagacataatacagaaccatgccaaacccatttctctttctgnacttggtctctactcttcaaattccaccagctaacgctgcttttgtgcagcggttcatgcgcntcttggcacacaa

SEQ ID NO: 1385 - DNA, 252 bp, Glycine max
  Clone ID: 701038630H1
caaaagattgcaatgtttgacaagaatggtggtttacaggctctgattcaatatccagatatccaaacagctgttgtggccaaggaagccttggaaggacactgcatatatgatggaggtttttgcaagcttcacatctcgtattcgcgtcattctgatcttagtataaaggtgaataatgatagaagtagagactatactattcctaatgtaccaccacctgtagtgaatgctcagccctcaattttaggg

SEQ ID NO: 1386 - DNA, 232 bp, Glycine max
  unsure (1)..(232): unsure at all n locations; Clone ID: 701038631H1
gtngttgacgttttctttgttncttcactgtgtatgcgnccatggtggatcccaagaagggagcacttgctgggcttgggccaacgctggttgggtttgtggttggggccaacatcctcgcaggtggggcttactctgctgcttctatgaacccagcaaggtcttttgggcctgccttggtcgctggaaactggaccgatcattgggtttactgggttgggcctctcattgg

SEQ ID NO: 1387 - DNA, 254 bp, Glycine max
  Clone ID: 701038632H1
caatgttgttagaaagccagtccaaaccctcatagagacatttgaaaatttttggtcttgtctggtgatttcctgctgagtatggcggttcttggagaaagatgcttatcctttcttgtcaatgttgtaatagcagaatgcttgctagaagtattctcttcttttgtgtaacttgggtttgtatgattgcttaaattagctaatacttttagctataattggaactcttggatcctcttgtgcgtgccttgttt

SEQ ID NO: 1388 - DNA, 235 bp, Glycine max
  unsure (1)..(235): unsure at all n locations; Clone ID: 701038633H1
caaattgattganatcaaaccncaccaccgctgctaggtcaagcttctctgtcggtcattgcatctccaatctcgcttcttctctcagattcagataccaattcggtttcttccgaaccaaacttgtttttgagaaattcggcaattgattttccatggccaacaatccgtcacagcttctcccatcagagttgattgaccggtgtataggttcgaaaatttgggggatatgang

SEQ ID NO: 1389 - DNA, 252 bp, Glycine max
  unsure (1)..(252): unsure at all n locations; Clone ID: 701038634H1
attcttattggcaagtgaaatctttgcttgaaaagaataaactaagtggttgtcctgaaaagttttaaacgaggatatctgcaggttatggaaaaatctctgaaggctcattatatattattaagttcgctaattctgggatataattttatgaccttgtgttaactcatacatctttnggggttcctcaggctttggtcgtgtaatagattaccccagattgacctttctcatncccttnatttaacncct

SEQ ID NO: 1390 - DNA, 252 bp, Glycine max
  Clone ID: 701038635H1
tctctctcacactttctctcagcgttgaaacttgaaattcttcttctccgaaacctctttgaaccgggtcaagaaataaacctcgctgggaaccgttgattgggtttgtacgaataatttgaaatgaagattcagtgcaacgtgtgcgaggccgcggaggccaaggttctgtgctgcgcggacgaggcagcactgtgctgggaatgcgacgagaaggttcacgcagcaaacaagctcgccagcaagcaccag

SEQ ID NO: 1391 - DNA, 253 bp, Glycine max
  unsure (1)..(253): unsure at all n locations; Clone ID: 701038636H1
gacactcacaagaacaagaagaagcatttagaatcgaaattggaagagaagcataaggagggtatgaatgattacaaaggangagaaggagaaagtagtgttgttgttcggaagcgattcaaggagannnnnnnnnnnnnnnnnnnnnnnncctttccttccacaagggccatcatcaaccaacaacaccgtcgctgtgcctccctccccaacaacactcaatacgaggaatctgaaacagatgtcgaagtgt

SEQ ID NO: 1392 - DNA, 237 bp, Glycine max
  unsure (1)..(237): unsure at all n locations; Clone ID: 701038637H1
acttgatcaccttttttgagaaaagatatatatcaatggcaacttccgagtgngttagaagtccgccctcctgctttaacttccatctctgaaccacttccattttttgatggaaccacaaggttatacatttgntatctgtgcccttttgcacaacgcgcatggataactaggaactgtaagggattgcaagancaagatcgaattggttcctattgatcntaaaaaacaggccng

SEQ ID NO: 1393 - DNA, 253 bp, Glycine max
  unsure (1)..(253): unsure at all n locations; Clone ID: 701038638H1
accaaaccaaagcaagaatagtgttctaagagtgagcaacaacttcaaacaccattgtgagaaatggcttccaagggtgcacttctcttgtgtctcaacattctcttcttcactgtggtaagctccacatatgtcccatgcaacccaccccctaaaactcctaaacacacacctgtcccaaagcnaccttccccaaagcaaccaagtngccccaaagacaccattaagtttggtgtgtgtgctgatgtgttag

SEQ ID NO: 1394 - DNA, 249 bp, Glycine max
  unsure (1)..(249): unsure at all n locations; Clone ID: 701038639H1
gttcatttctacacatccctagctctgtcgttccgtcgttgacgatggcgtttcgggtgcgaancctgacctccgctctctctttcttctctctctcttgtccatcgcttccgccaatgtcttcttcgaagagcgtttcgatgacgggtgggaaaatcgatgggttaaatcagattggaaaaaagatgagaacgtggctggggagtggaaccacacctctggtcaatggaatggagacgctaatgacaa

SEQ ID NO: 1395 - DNA, 251 bp, Glycine max
  Clone ID: 701038640H1
gccaaattaaatatttggtatactgcatggagaatgctattctaaatcttccaccagaacaggaacagatggtctggttgattgatttccagggtttcaatatgtcacacatatcaataaaggtgacacgtgaaacagcccatgtattacaagaacattatcctgaacgtcttggtctggcaatactgtacaatgcacctaagttctttgaaccatttttcacgatggtaaagcccttattagagactaag

SEQ ID NO: 1396 - DNA, 250 bp, Glycine max
  Clone ID: 701038641H1
gaaaactctgttctcggccatggaagaattacggaaactagagaaagtacatagcatgctggaattcatggaatcacggggcgtttcaaacctcgatcatcactctaaccgcttcctcgctaatttcattctcttcttgatagaaccctccggagaccttgccataaacgacaagtgctccttgctttcccagcttattcccactctctcatcttcattccttgaagacgcgtatcaacaccaccttgac

SEQ ID NO: 1397 - DNA, 251 bp, Glycine max
  Clone ID: 701038642H1
caaccttgggagataggagagatgcatacggtattcattttgaatgggatgctaactttggaattccaggagcaatttacattcagaaactatacgtatgatgagttcttccttgtcagtgtcactcttgaggacattccaaatcaaggaaccattcactttgtttgtaactcatgggtttacaactttaaagactacgacaaaaaggatcgcattttctttgccaataagacatatcttccaagtgcaac

SEQ ID NO: 1398 - DNA, 249 bp, Glycine max
  unsure (1)..(249): unsure at all n locations; Clone ID: 701038643H1
caaagaatatgaatcagggccaatcanacttcatttggattctttgggtcttcactctagtaaatcagtttttgataatattaaaagctatttgattgaagaaaagaactatatggatcgagaagatgtgtctttagatgtttcaattgcggatagaatatggaagtgccttcctcgtagaattgaatctcaaatcatccaggttccccaacagaagacntgaatatgactgtggtctttttgtattgt

SEQ ID NO: 1399 - DNA, 249 bp, Glycine max
  unsure (1)..(249): unsure at all n locations; Clone ID: 701038644H1
ctaaaacgtccacacattctccgtcgccacaacaacaatggctccgaagaaaggtgtncaaaggttccgttgtagcagcgaagaagaaggttcaggagaaggtgacgaatcctttgttcgagaagcgtccgaagcagttcgggatcggaggcgcgctgccgccgaagcgggacctgacgcggttcgtgaagtggccgaagaacgtccaaatccaacgcaagaagcgcatcctcaagcagaggtcaaggt

SEQ ID NO: 1400 - DNA, 248 bp, Glycine max
  Clone ID: 701038645H1
ccagatcttaatcaagaggagtgagttttgtttttccagccatgacgccgctggtgagtctaagcctttctctcagatttacgcttaacagagttacagtcactcagtaatctactccttttctagatcctgcatgctgggaaaaccaacaaaaattcttacaagacactcattgcagccgagtatgctggcgtccaagttgattttgcccctaattttgagatgggtgtctccaataaaactcctga

SEQ ID NO: 1401 - DNA, 249 bp, Glycine max
  unsure (1)..(249): unsure at all n locations; Clone ID: 701038646H1
gtcatctcatcccagggttcatctttgctttctgtagatctttctgggtctgatgtcactgatttngggctgacataccttaaagattgtgaaagtctcatttcctnaaatctaaattactgtgaccaaatttcagatcgtggactagagtgtatcagtggtctgtcaaacttgacaagtttgagtttcagaagaaatgattcaatttctgctcaaggaatgagtgccttttctggtcttgttaacttg

SEQ ID NO: 1402 - DNA, 107 bp, Glycine max
  Clone ID: 701038647H1
tttttggtggatgatgtttgcatgtgctacacttgtggccaagttgtacactgtacgagattctggtgtcatatttgctgcattcagtctagttgaaattgagtact

SEQ ID NO: 1403 - DNA, 252 bp, Glycine max
  Clone ID: 701038648H1
gtaaaacctcagtctctcactcgcagatctttcactcacccaaaaccaagctagtccgaggaagtcctctattcagaaccagatatggagacaaaacccaccgagatcagcagcggcaagatgttcggaggctacaacaagaggttcagacatttcagccctaccctcggctgctccatgaacttccacatctacttccctcatctccttctccctctcacaaattcccagtcttgtactttctctctggcc

SEQ ID NO: 1404 - DNA, 186 bp, Glycine max
  unsure (1)..(186): unsure at all n locations; Clone ID: 701038649H1
aanagagacaacaaaggtagcttacgcagtggagcagcttgtagccttcaatcgatacaatcccgatattcttccagatctcgaaaactatgtcaacgaccaggtttcgtcgcaaacttatagcctggacgcgaatctctgccttcttcgcctctaccagtttgaactgagaaaatgagttcccag

SEQ ID NO: 1405 - DNA, 251 bp, Glycine max
  unsure (1)..(251): unsure at all n locations; Clone ID: 701038650H1
gtttctgcgaggcttaagaaacctcgcagaaccaaagaaaactcactctcacacactttggttcacaaaaacctttcacttctattttcantctttctagttccttctcccatattatagtacccttttatcccaagttacttaaatttaaaacctttattactgctcatacttgtttttcgctttgttaagttttaagaaaaatggaggcacattctccagttatagccaagaagctatggaatgtgttg

SEQ ID NO: 1406 - DNA, 248 bp, Glycine max
  unsure (1)..(248): unsure at all n locations; Clone ID: 701038651H1
cgagaagcaccagcgcgtgtggctgggaacgttcaacgaggaagacgaggcggcgcgtgcgtacgacgtcgccgtgcagcgattccgcggcanngacgccgtcacaaacttcaagccgctctccggcaccgacgacgacgacggggaatcggagtttctcaactcgcattcgaaatccgagatcgtcgacatgctgcgtaanatacgtacaatgacgagctggaacaaagcaagcgcagcgcggcttc

SEQ ID NO: 1407 - DNA, 247 bp, Glycine max
  unsure (1)..(247): unsure at all n locations; Clone ID: 701038652H1
tgaaaatcttccaccaaatgtaattaagcaacttgccaaggagttgaaaagtcttgatgaatcccctcctgagggcattaaggttgtggtaaatgatgatgattttncgacaatattttctgacattnaaggcccaggtaagtagcttttatgnggnatgttgtatgatgggncactcgcatngggtagggncctnaaantaccngcagnnctataattnggncnncggaaccncttnagggaangg

SEQ ID NO: 1408 - DNA, 210 bp, Glycine max
  Clone ID: 701038654H1
cttcaccactccaaacccaccacaccaccattattcatatctcattctctaacctttcactctgccttactcactctctactttgctcatcatcgtagatgaaccaacacttctagtctctcttactttataaccatgtaaaaatgagtcacctaatgaaaaattagtagcttcttgttgtgctttttattttgtttgtgttgagataaa

SEQ ID NO: 1409 - DNA, 247 bp, Glycine max
  Clone ID: 701038655H1
gaaacattatctgctgttaagtctcagcaaataaaggataataaccctcactttggcattgattgtaatgatgttggcactaatgacatgcgtgagaaaatgtctttgaaactttgatcggaaagcagcaacagctcctactcgctactcaagttgtcaagatgatactgaaaattgatgatgtcatctccccatctgagtactgatatttttaaactcagtcatggtctacgtcaagatgctgaat

SEQ ID NO: 1410 - DNA, 249 bp, Glycine max
  Clone ID: 701038656H1
gaaaatcctcacccattttcttcgtagccaaacactctgaaattctcagttatgtcgtggcaagcgtatgtggatgatcacctactgtgtgaaatcgaaggtaaccacctcactcacgccgctatcatcggccaagacggaagcgtttgggctcagagcaccaacttccctcagttcaaacctgaggaaataactgccatcaataatgactttaatgagcctggatcacttgctccaactggattgtat

SEQ ID NO: 1411 - DNA, 247 bp, Glycine max
  Clone ID: 701038657H1
gttgacatgaagtccatgtttcagttacttgaggaaagagcagatattagggataaagaaaatgcaaagcctctgaaatttaacgggggaagaatccaatttgagaatgtacattttagttacctcacagaaagaaagatactagatggaatatcatttgttgtgccagctggtaaaagtgttgcaattgttgggactagtggaagtggaaaatcaaccattcttagattgctattcagattctttg

SEQ ID NO: 1412 - DNA, 243 bp, Glycine max
  unsure (1)..(243): unsure at all n locations; Clone ID: 701038659H1
cgatttcatcacacttatagttctctcttctctttcttttcctttctttctccgccgaagatggcgccgcccacgccagcagttgaaggcgcccaggcgcngcaaggncggcagcaacagccgcaaggagggtttggcctcaccggaatcatacgcatggtcgttttctggtacttcgcttccaaattcttttcccccaaaaaacctacgaancttcggtctatctcnaatctttttcagaag

SEQ ID NO: 1413 - DNA, 245 bp, Glycine max
  Clone ID: 701038660H1
caggctctggttttgcggttagggtagctctttctactcaaaacaaaacaaaacatcaatttctgtttcagttcgcggagatcaatatttgtcgctgaggtcgatcgtcgataaaaggcaatgtttttgtgggattggttttatgggattctagcgtcgcttggcctgtggcagaaggaggccaagatcttattcttgggcctcgataacgctggcaaaaccaccttgcttcacatgctcaaaga

SEQ ID NO: 1414 - DNA, 248 bp, Glycine max
  Clone ID: 701038662H1
aactattatgaaatcgacaatacacctactggaacttgtgctgtttgtgtggttggcggtgaaaggtcccttgttgccaacttatcagctgcaaattgctataagtctgagcatttgacgagaccggaaaattgggcattagttgaaaaggccaagtatttctacatttctggctttttcctcactgtatctcctgattccatacaattagttgctgaacatgcagctgcaaataacaagttcttcat

SEQ ID NO: 1415 - DNA, 249 bp, Glycine max
  Clone ID: 701038663H1
gaagaaacacgttcgtttcgtttcgttcccatggcggtctccgtttccgcgtcctccgcgattgcttctttgaactccgaactctccacgcgcttgccaccctcactcgcctccgcatcttcttccgccaagcaatcctttctgcaattcccgtcgtgcacgcgccttcttcggattagcactccacgcgctcccgctccatcgcgacctcgattccttcctctggttcaagcgaagaaacaaacctat

SEQ ID NO: 1416 - DNA, 253 bp, Glycine max
  unsure (1)..(253): unsure at all n locations; Clone ID: 701038664H1
agtatacaacaattacaatcctcacaatcctncctcccttcatttctcaaattcncaatatttcaccaattcaaaacccttcatcattgatcttttcactcttttcttctttgctcgcaacattcattcacaatttgggtgctccttctgtttcttctcctcaccattggattggataatctgcaatttcttcaattgacaaaagcaacgggagttgggttccaacggaattatggttttcctcattgcgatg

SEQ ID NO: 1417 - DNA, 258 bp, Glycine max
  unsure (1)..(258): unsure at all n locations; Clone ID: 701038665H1
cttgaggaaactttgtgatccataaataagtctcagaacacgaaattctcatcacaaaattctcatancacaatacnaaaganattgaagctagcaaactcatcaaatggcggaaatggcagtgctccttcgcacgagacanattgcnttcactgctaagcaangaagcnaacctgnttnccggcatccncanagaatttgcngncataagngcaagtacnagatgtncatgcaagccttnctctaggatggcagata

SEQ ID NO: 1418 - DNA, 241 bp, Glycine max
  Clone ID: 701038667H1
aaaaaattgttcttgtttgtccatttagccatgaagaagttgtctttctccatccccaccgcaaaaccccaatcggtggacacttccaccacccgaaaggacgacgacagcgacggaaccaaacagtacatcaccgaattcgacccttccaaacccgcaaaccccaaaatcacaatccccccaatccaaaaccagtggaacccccaacaagacaacgaacacagcaccacgcggtggcgcc

SEQ ID NO: 1419 - DNA, 174 bp, Glycine max
  Clone ID: 701038668H1
tttttgttttgaagttgttactaaataaaattaaatagtgtattaattttaagtaagtgttaaaaaacttatccttctctttttactttgttaaaaaaaattgaattttgctaaggaatatactgtgcatatcctttgggtattctagtaaagtgatgaaagccttcatggttc

SEQ ID NO: 1420 - DNA, 247 bp, Glycine max
  Clone ID: 701038669H1
ccgttttccgatcctctttctcgtcgccaccctcatcaccctcgcctccggtgcacgccacgatattctccggttaccctccgaagcttccaggttcttcaaagcacctgctaatgccgatcaaaacgatgagggcaccaggtgggccgttttagttgccggttccaatggctactggaattacaggcaccagtctgatgtttgccatgcatatcaactactgaggaaaggtggtgtgaaagaggaa

SEQ ID NO: 1421 - DNA, 216 bp, Glycine max
  unsure (1)..(216): unsure at all n locations; Clone ID: 701038670H1
tcgttcattgctttgtagtaagatcagatcatcaaaaatggttttntcttggtcaagaaggaacgttttccgccgtgccaagaaggagaagtcacaaactcaattggaagtggaggttgtgattcccaaccactttcactgcccggtgagtctggagctgatgacagacccagtgactttatcaaccggcatcacctacgaccgtgtgagcattga

SEQ ID NO: 1422 - DNA, 248 bp, Glycine max
  unsure (1)..(248): unsure at all n locations; Clone ID: 701038672H1
ctgacatcanggttggnatcccagcatctngtcatgatgtcagncccnnnatntnctgnnattgtgggaatgcttgagnatgcagagaatgagatcatgacaaaagttcngaaggctcggttcaggtgttgcatgacccatccaatgactgctgactgatctgatcctctgcgaaagcaaatggnaaaaagtcataaaaacatagactggaaaatttgggggcaagatgaaactctggtagtgaaggg

SEQ ID NO: 1423 - DNA, 244 bp, Glycine max
  Clone ID: 701038673H1
tagcaagctagctaggttgaaaatagtttggttttgtagtaagtgaggtgaggtgccaaaatggtgaagataactcttggtactttcgatgactcttttggtgttgcctctcttaaggcttatttggcagagttccatgcaactctgattttcgtgttcgctggtgttggttcagccatcgcttacaacgagcttacaaaagatgcagccttggatccaacggggctggtggcagtagctgtgg

SEQ ID NO: 1424 - DNA, 245 bp, Glycine max
  Clone ID: 701038674H1
caaagtcccaccacttggttttcataacccattctccatctcagaatggagaatgcgagaataagccagtggttgatccttctggtgtgtgcgctgctgttgctgatatcagaagcttcttatgtgccaatcactattgttcagaacgcggtagcaaaaggagctgtttgtttggatgggagtccaccagcttatcattttgataggggatttggatcagggattaacaattggttggttgcatt

SEQ ID NO: 1425 - DNA, 243 bp, Glycine max
  Clone ID: 701038675H1
gtaagaaatgctgcacaaaagagtgactgcaatgttggtcagttggatccaaacttgtatgatgatgctgggtttgaatttgatttggagacaaaaaaggatgaagataatgagagtggacagtaagaactaggttccatttgtaggtcaatgtgtctcactgtaatgtgtagtgtctttttctggaagaaaatacaaatcatgctttgtaaattaaatttcacgcaatccatttgtacatat

SEQ ID NO: 1426 - DNA, 241 bp, Glycine max
  unsure (1)..(241): unsure at all n locations; Clone ID: 701038676H1
tctctctcntttnggttttnacctttnctntncccacacaagnangnangnantagatccaaccacttccattgcnaccaattgcntcttcttgtnnatnttgctcccatancattagcaacacngtgttagatactcagancccccctcttntctctatgcattcccccagctgggaagggtgtactggaatcagagtgtagctgtggggtgcagattgattacnattcttgtgttggcc

SEQ ID NO: 1427 - DNA, 245 bp, Glycine max
  Clone ID: 701038677H1
gttccctgggaaacggagttcaagtctcacctgttactccatctgctgatgttactgcttacttcagctctgagcattcgagcaactcgtttgattattctgaccttggatggggtgaacaagtccccaagacccccgagatctcatccttgctttctgctgctcctttggagggtgctgctgatcaggttcagaagaccaacaactcgcaggatgtggtggctgcacaagatgattctgcaaaa

SEQ ID NO: 1428 - DNA, 248 bp, Glycine max
  Clone ID: 701038678H1
aagtaatcgagcttcagcaatggtgtacgtcaaggctcagaaatcaaaagcctacttcaagagatatcaagtcaagttcaagagaagaagagagggaaaaaccgattaccgtgccaggattcggttgattaatcaggacaagaacaaatataacactccgaaataccgatttgtggttcgctttagcaacaaggacattgttgcacaaataatatctgctagcattgccggcgatttagttcttgcta

SEQ ID NO: 1429 - DNA, 246 bp, Glycine max
  Clone ID: 701038679H1
gggcatctatgactaggataatggcagggcttcaccagtctctagaaagggaagcttttttgccaagattaggagaatcttcaccaccctcttggtttaacaagttatattgagctgtctgattgagcatgattgaatgcttggggacatagatgacaagctcattggaaactgaaggggaggaagtgccatggatttagaaccattatgatgttacggtcgaaattatatacatttttcttggag

SEQ ID NO: 1430 - DNA, 248 bp, Glycine max
  unsure (1)..(248): unsure at all n locations; Clone ID: 701038680H1
gtctctacaatcactccttcctctcatcctctataaagaaagtgcttaatttgtgttgttacttggttcagtttccatggattgggggcttgctatatcttctcatcctaaaccttattcagtcacaactggtggaaatctctggcggagtaaacacaccaccaagaatatttactttgcaagttcttggatatcaaaagcttcacgacacaaaaggganactcaaatagaacataatgttttgaggt

SEQ ID NO: 1431 - DNA, 249 bp, Glycine max
  Clone ID: 701038681H1
tcttattcatcttttcattcactcactctcactcatggctgaagatgggaacaacaacgatgtacccttacacaaattcaaagacagcaatccaaaccctggagagttcgatgcaaagggttacagcctcagcggaaaaatcatgctttcagcaataatccttcttttcttcgtcgtcgttttgatgttgtgccttcatatctacgcgcgctggtacctccggcgtgctcgccgccgccagctccggcg

SEQ ID NO: 1432 - DNA, 181 bp, Glycine max
  Clone ID: 701038683H1
tgtggctgaagtgttctccaggattgatcataagtttgacctcatgtatgcgaagagggccttcgtgcactggtatgtgggtgaaggtatggaagagggtgagttctcagaggctcgtgaggaccttgctgctcttgagaaggattatgaggaggttggtgccgagtctggtgatggagat

SEQ ID NO: 1433 - DNA, 245 bp, Glycine max
  unsure (1)..(245): unsure at all n locations; Clone ID: 701038684H1
cttcccccaacaaactaaaccaaaccaaaccataccattaagaaacaacacatctatctcagtccccaaaccaagaaaccctaaattaaattcatgtgctcctccgggtctaccagtgctgcaccaacaagaccttgttacttggaacaaggccacggcttggcttccttaaaacacatggatgcgtgtcataatcggtgccannannttgtctctnggtccangncatggggtangganntcct

SEQ ID NO: 1434 - DNA, 248 bp, Glycine max
  unsure (1)..(248): unsure at all n locations; Clone ID: 701038685H1
ggaatctacagtgttcttaaccagaagcgtggacacgtgttcgaggaaatgcagaggccaggtaccccactatacaacatcaaggcatacctccctgtcatcgagtcctttggtttctcgagcacattgaaggctgcaacatcaggccaggccttcccacaatgtgtgtttgatccctgggaccatgaggttttctgacccattgggggggntgncacaaanggnggcanantttntcantgaatttc

SEQ ID NO: 1435 - DNA, 251 bp, Glycine max
  unsure (1)..(251): unsure at all n locations; Clone ID: 701038686H1
cagaatccgcggcaatgcaggtttgtgaagaggaaccgaagatgttggaacctaaacctgaacctgttattcagcgaagaggaaccgaagtgtttggatgatgttatcaatgaagaggaagctgttgtgngccgagaacgttgaagggagaggagcctatcgtgggctgagacattgaaggaagaggttgtggatgagatgggcagaancaacccctttgtaaagaggaatcggagaagggtgttttcgga

SEQ ID NO: 1436 - DNA, 245 bp, Glycine max
  Clone ID: 701038687H1
agaaaaagaagcgaaactaaagtcagcattcgaaaaagatgagtagcatcggtacaggttacgatctatcggtcaccactttctcccctgatggccgcgttttccagatcgagtatgccgctaaagccgtcgacaacagcgggactgttattgggatcaagtgcaaagatggggttgtgttgggcgttgagaagcttattccgtcgaaaatgatgcttccgggttccaatagaagaatacactcc

SEQ ID NO: 1437 - DNA, 245 bp, Glycine max
  unsure (1)..(245): unsure at all n locations; Clone ID: 701038688H1
ctttcttcctaacacggaacactcaggtttcgaacccttgttgtggttaggtcttcatatttcgaatttgggaattcatgggtcagggaactccgggcggcatgaaccggcagggcgaccggaagccggacggcggcgacaagaaggagaagaagttcgagccggcggcgccgccagcacgcgtggggcggaaacagcggaagcagaagggcccggaggcngcggcgcgactgccgacggtgact

SEQ ID NO: 1438 - DNA, 242 bp, Glycine max
  Clone ID: 701038689H1
taatcatgtggtttgtgtcatcccaggaggaccagcatgcaagtctaatctcttcaataaactaagttccttgcttagagtgaatgagatggatgtaatatgtgctgctttcagtggacagttagatctgtctattttgaaatcaccatgcgtactagtttcatcatcatgctcgacagatgagacaattgttgcagattcagatattgaagttgaaacagccacatcagtccgctcaaatg

SEQ ID NO: 1439 - DNA, 242 bp, Glycine max
  unsure (1)..(242): unsure at all n locations; Clone ID: 701038690H1
tctagatcgcgagcggccnacctttttttgtactgtacttgtccaatgtgatgactaagccaaggtacatctgttctattatagtattatctgtcacatatatgatatatgctagacttacgtacaatttagttttatttgtgtgccgggtgtgtgaaaggaaaaaaaaacaagtcaaaaggtgttctgctgcacttgaatccagtgctgaccctgtgtgtgctgcttttcttttctctttc

SEQ ID NO: 1440 - DNA, 244 bp, Glycine max
  unsure (1)..(244): unsure at all n locations; Clone ID: 701038691H1
ggcaacacacacttcaatttatcagcatggcctccgttcagtgccacaaaacctgcaaagtgagctgccaacaggaaaaccagcacgcctcgtttgggcagaaagtttctgacttgttcaaagggcatcaacataatgaccacagctccaattatgccacccaaaccaaagtgctttcccagtcagggtcagggttaggccccttcaccancaaaactcaaacacaatgcggttgccccaaaaa

SEQ ID NO: 1441 - DNA, 241 bp, Glycine max
  Clone ID: 701038692H1
cgtgcctctagggttatcatatctccatttccatttcctctctctcagtttccaagaatcttaagctatgggaaagtcttacccaaccgtgagcgctgattaccagaaggccgttgagaaggcgaagaagaagctcagaggcttcatcgctgagaagagatgcgctcctctaatgctccgtttggcatggcactctgctggaacttacgacgtgagctcgaagaccggtggtcccttcgga

SEQ ID NO: 1442 - DNA, 242 bp, Glycine max
  unsure (1)..(242): unsure at all n locations; Clone ID: 701038693H1
cttttgcattgatcggtatcttttgagaagatgggaacagtgtngcaggatcaaagactgttcttgctgttggacctggaccaaaatcttctgtggattcggtgactgggagattgcccctgctttgacagcattcaagaagcatgtgctaatatggtcaaatcacctgagcttgttgccacttggtctgtgttctaacgcattatctagcattcgttggctgattcggtagttatagtcac

SEQ ID NO: 1443 - DNA, 245 bp, Glycine max
  unsure (1)..(245): unsure at all n locations; Clone ID: 701038694H1
ctcagatctatataattcagttcttcttattctccactaatagcttctnccttcggctacttgagaccttgctgcaaaggttctctcttagcttagtaacaatgggtttgaaagcactttttgtttggtgcattatatggttaggtttagcacatttgtcccttggaggaagagtgaggcactacaagtttgatgtggagtacatgatcagaaanccagattgcttggaacacgttgtgatggga

SEQ ID NO: 1444 - DNA, 244 bp, Glycine max
  unsure (1)..(244): unsure at all n locations; Clone ID: 701038695H1
agcaaattaatcaaacatggctagggttagtgctttgtttcactctttgctcttgatttcttcccttgtattggcttctcaaagccatgtttcctctgggaaactagtccctggactatcatggaattactatttgttgacatgtcccaagcttgagaggattataaggnagcatcttgaggatgtcttcgagaaggacagtggagtagctcctggcatacttcgactcttcttccatgactgc

SEQ ID NO: 1445 - DNA, 252 bp, Glycine max
  unsure (1)..(252): unsure at all n locations; Clone ID: 701038701H1
gcgcagtcgtttgattgtgaagtgagtnccgattgagcacgtcttggaggcaacgacgtctacggcagctcctgcgttggtggttaagtcgcttgtcctttcagtccctcgatgagtccgccaacccctaaaaagcacttcttagttctccctctcccactaanaaccatagnntctaggattataatttaacatcagccctcactccttcggcacaccaaacccttccttncnantcncnnantattcnaa

SEQ ID NO: 1446 - DNA, 247 bp, Glycine max
  unsure (1)..(247): unsure at all n locations; Clone ID: 701038702H1
agcatacccaaaaaagaaaaagaaaaaaagaatgggtgttgcatagcgagctgcgagaatctatctgctcctgttgccgctagtggtcttgagcgttgaatgattcactttcaggaacagaaaagcccttgacgctagccatcgtcgcttttatngatagaaaaaagaatacaacatatattaaacttncnactacctttttccttcaccaccctngtgcttctnccctgaattacccggattgggt

SEQ ID NO: 1447 - DNA, 246 bp, Glycine max
  Clone ID: 701038703H1
aatcaccatccctttccttattcttcttctgtttcatccctctccccattttctcgctctcgtttcttgtcctctactcctttgctccatggcttctgattcccctttccctgtcaccgctcaaaacatcaaccccaaggttctgaaatgtgagtatgctgttagaggagaggttgtcacacttgcccagaatttgcaaaaggatttacaggccaatccaggttctcacccatttgatgagatact

SEQ ID NO: 1448 - DNA, 244 bp, Glycine max
  unsure (1)..(244): unsure at all n locations; Clone ID: 701038705H1
caactttcctaactttagcaaccatctaagaagttcagtccctnaattatctctcaccttgaattagaaaagcattcaaagctttgaacccaatttcactgtttgcacctcaaacatcttagaagtcccaattgagtctcaattccacaaccaaaaatgcanagttcaatttcacaatctgatatttttatcactgattaccttgtaccccaagaagttccatttcaatttcaatttcaagata

SEQ ID NO: 1449 - DNA, 240 bp, Glycine max
  unsure (1)..(240): unsure at all n locations; Clone ID: 701038707H1
cttaaataagcaaggtgcattttagtggaaaatttttcacctnctattggatcagctttgagggtaaataaaaagatgatgagagggtagttagaaactcgtaaatcagctagactctaagcgttgtttttcttgactaaacatcttactgtcaattttattttttttggattttgatttgagaaaattaattgatgtcaagtgcatttgaagacagtttataattattgatttaattaa

SEQ ID NO: 1450 - DNA, 242 bp, Glycine max
  Clone ID: 701038708H1
gaaaattgaacaattctgaggctatcacaaaaaataaacactgagaaaggagagaaggctgtgcttgaggcatatcctgatgggaaataacaggtttagactgtcagatatgatgccaaatgcatggttttataagctcaaagatatgagcaaatcaaggaagagaaatgttcctcatgttatgaagaacaaagtagcctcaccaacaacatcacaaaggtcacagccaagatactctcatt

SEQ ID NO: 1451 - DNA, 244 bp, Glycine max
  unsure (1)..(244): unsure at all n locations; Clone ID: 701038709H1
ataacacccaccaaagaaccatggctacccagttcctcaaatccctccttctcctnctccaccttaaccctaaccatctcagcagaatacacaggctttgtgggcacaatagacccaaagtccataggcataaagcacaagaaaaccctaagccacttcagattctactggcacgaagtcttcagcggagaaaaccccacatcggttagaatcattcccgcactccccaaatacaacacaacca

SEQ ID NO: 1452 - DNA, 147 bp, Glycine max
  Clone ID: 701038711H1
ctttttcttacgttatcattgaaaattaagttacaaacttccgtccaatgtttctgtgtaagccgagtgacacagttttgtttagacaatcagaagacatttttggcgcgtaatatatctgggttttgttcagaacccaaaatcaga

SEQ ID NO: 1453 - DNA, 238 bp, Glycine max
  unsure (1)..(238): unsure at all n locations; Clone ID: 701038712H1
gttcggttgggacaaggatcttgccaagaaaatctggtgctttggccctgagacccttggncccaacatggtggttgatttcattcaaatactggactcccttgcacatatcaaccaccatgttgggnccaagggantccagtatttgaatgaaatcaaggattctgtggttgctggattccagtgggcatcaaaagaaggtgctttggctgaagaaaacatgagagccatctgcttg

SEQ ID NO: 1454 - DNA, 241 bp, Glycine max
  Clone ID: 701038713H1
tccatggttgggctttgaaagtcactaagaagatgaccatatctttaaaccccatcgtcagcttcagctcaacgaagttggaaacaaaggatcaggatgcatcaagatattctgttggagcttctttaccaaaggcaacccagtttacacctttgttgatagtgtctagatcgagaaagcttgtcaaggaaagaagatttggtccttgtttttcagtggcagatagtgatcagcttgcagc

SEQ ID NO: 1455 - DNA, 216 bp, Glycine max
  unsure (1)..(216): unsure at all n locations; Clone ID: 701038715H1
tgncgtttcattactgaacgaaaattgcancctgaaaaattcaagaatcagttggtcaatcagagtacttatgctaagcttggatgcacacaaggatggttttttgctcctctgttccatcctccttccagcaacatagcacatcttgcaaaagtaaaagtcatgaaaacgcatggtggttgggaagacttgcaaattccttccagcatcaggtca

SEQ ID NO: 1456 - DNA, 244 bp, Glycine max
  Clone ID: 701038718H1
aaaagaaaaaagaagagagaaaaatacaaaattaggatatttgttccaggcctagcaaggggtagatgacctcctaagaggaaaagcttcagcagttgcaactgaggaaaaggtgcatgaaaatggtaagcagctggtttttcaattgtaccaataatgtaatggtgttcgaccccacctggattataaagagttatttacatattgattatttcctttgttaaatgaacgagtgaagtgaaag

SEQ ID NO: 1457 - DNA, 244 bp, Glycine max
  unsure (1)..(244): unsure at all n locations; Clone ID: 701038719H1
actcactaacatcacaacttctctctttctacacaaataactccnacnccagtgtgagcagttgataagagagatgatgatcaacgtgaaggaatcgaccatggtgcggccggcggaggaggtggcgcggcgggtggtgtggaactccaacgtggacctggtggtccccaatttccacacgcccagcgtctntttctataggtccaatggcgccancaactttttcgacggcaaggttatgaag

SEQ ID NO: 1458 - DNA, 240 bp, Glycine max
  Clone ID: 701038720H1
gcttagaaaagctatgtttaaggggaaacaattttgaaacactacccagcctcaaggagctttccaaactgttacatttaaacttacaacactgcaagagattgaaatatttgcctgagctcccttcacgaactgatgtcccatcaccatcaagtaacaagctgcggtggacaagtgttgaaaatgaggaaatagtattgggattaaatattttcaactgcccagaattagttgagaggg

SEQ ID NO: 1459 - DNA, 241 bp, Glycine max
  unsure (1)..(241): unsure at all n locations; Clone ID: 701038721H1
cggaaccgcacgcgagggtctcggtcgaaccggcctcggaggtttccnaggtcgcactcgaccggggcactcgctggtccaaccgggaganaacactgaccggttcactttgaggttgcctttggaggtgaggaagcaattaataaaccgccaattgcaacgtgcgagtagcttgatcgtgttacccagggaaggtagtttgcggcagggttaccgaaccggaggagaagggagtagtagg

SEQ ID NO: 1460 - DNA, 238 bp, Glycine max
  Clone ID: 701038723H1
ctcaaagtctggggcttcaatgacctgtgctggttgccagggtactggcatgaaggtgtctattaggcaccttggtccttctatgattcagcaaatgcagcatccttgcaatgagtgtaagggtactggagagacaatcaatgacagagacaggtgccaacagtgcaagggagagaaggttgttcaggagaagaaagtacttgaagttgttgtggagaagggaatgcagaatggacag

SEQ ID NO: 1461 - DNA, 200 bp, Glycine max
  unsure (1)..(200): unsure at all n locations; Clone ID: 701038724H1
gnancatttcacnaatagngagacataagcataanattgagaaatantngngggtngtacttatncgtgnnaagttgctatgccntgnngggnttgtggngcttgtgagtactattgcaggggtggagagtncctggngantgtgggaaatctaccancccagataangaggcntataagcttgcnccatgtgcctcagc

SEQ ID NO: 1462 - DNA, 239 bp, Glycine max
  unsure (1)..(239): unsure at all n locations; Clone ID: 701038725H1
ggtatacggtgatattggtacatcaccactttatgtgtatgcaagcaccttcactaaaaanattaacaacaatgatgacattcttggcgtcttgtctctcatcatctataccattgtgctcataccttttcttanatatgtcttcatcgtattgtgggccaacgacaacggcaacggtggagcgtttgcactctattcgctaatctgtaggcatataaagatgagtttgattccaaatc

SEQ ID NO: 1463 - DNA, 237 bp, Glycine max
  unsure (1)..(237): unsure at all n locations; Clone ID: 701038726H1
gagagaccnagtttganacatcaaaggaaatggaantccgaccccaattacaccaaatcatggtatgatagaggtgctaaaatctttcaggcagacaagtatcggaaaggtgcatgtgagaattgtggagctatgacacatgattctaagtcatgcatggaaagacctcggagagtgggagcaaaatggacaaacaaacacattgctcctgatgaaaagatagaaacttttgagctt

SEQ ID NO: 1464 - DNA, 240 bp, Glycine max
  Clone ID: 701038727H1
ctgggccttgggtttttggaacgtacggtgtcgttttggggttgggaaaacaaattctgagagatggcaaccacgaacccttttgatttgttgggtgacgacgctgaggacccttctcagctcatcgccgccgagcaactcaaggcggcggctgccgcctcggcggccaccgcggcttcccaagaaggcgccggctcagcagaacaagccggctcagctccctaccaagccgcctcctcc

SEQ ID NO: 1465 - DNA, 239 bp, Glycine max
  Clone ID: 701038728H1
ctaacgcgtgcatagcagagtcagagacagagacgcagccatggggcggagacctggcgaggtgttataggcaaattaagaacaagccataccccaagtcacgtttctgccgtggtgttcctgatcccaagatcaggatttatgatgttggtatgaagaagaagggtgttgatgagtttcctttctgtgtccatctggttagttgggagaaggaaaatgtttcaagtgaggccctggaa

SEQ ID NO: 1466 - DNA, 240 bp, Glycine max
  unsure (1)..(240): unsure at all n locations; Clone ID: 701038729H1
ctgaaacttacattctttcaaccaacagtccttaaaaattaaaagaatcatataattgatatcgacttagtataaagaatattattatgtgagggcaatcaccaatcagctactgaagaatttccctggctgctatactattatgcttganaacaatgaagttttgcattgaagcaaattctattgtatccaagaaccctctaatgctatgtgagcatagcaaataaccttataattccc

SEQ ID NO: 1467 - DNA, 245 bp, Glycine max
  unsure (1)..(245): unsure at all n locations; Clone ID: 701038730H1
aaaacctttcacccaatatcctcaancctactacttctgataaattgctaatttttataaagctagctagagatgatggtttcaaaaggaagatttgggtttgagtttaagcctcaacttccctcatcanaataccccaaatcctcaacatnccgagtctcatgtcatcctctactcattcctcttctccttctggttgcaaccctcaaaaaccctcttggaacgaggctttcacttcttcgggt

SEQ ID NO: 1468 - DNA, 245 bp, Glycine max
  Clone ID: 701038731H1
gccatgttcaaggtactgcacaaatccccggatatacctgaaagtttgtcttcagagggacaggatttccttcagcagtgtttcaaaaggaatccagcagaacgaccatcagcagcagtgcttcttacacacgcctttgtacaaaatttgcatgagcaagatgttcaagttcattcacaagggcaaagctgtcccagaggagacgctggaccaggagatgattcacgtaggcatagtcccagtaa

SEQ ID NO: 1469 - DNA, 248 bp, Glycine max
  Clone ID: 701038732H1
tgttgttgttgtagctatcagtaggtgaatccaaaaccctagccctcactctcaccaccattttttcaattcttgagctatgtttcagggataatagggcagggatgtacaaagaacgagagcgaggtggtgtttccgtttccgcctctaaatccgaggatcggaagcgaatcaacgacgttctcgataagcacttggaacgatcctctccttccacttcccgccccatcaacaccgcttccaagaat

SEQ ID NO: 1470 - DNA, 249 bp, Glycine max
  unsure (1)..(249): unsure at all n locations; Clone ID: 701038733H1
caagattctaagagagattttnctgctctttgaagaagggtgtttgcttgattttggtgatgtcgcngctctcagatctcatnaaccttaacctctcagaccacnactgannaggtnatcgcagagtacatatggatcggtggatcaggaatgggacccngaggagcaagccaggactctcccaggaccnnntagcgaacctcanaagctttncccgtnggncnnagntggtttcaggcncaaggcccc

SEQ ID NO: 1471 - DNA, 242 bp, Glycine max
  unsure (1)..(242): unsure at all n locations; Clone ID: 701038736H1
gtgaggagttagtgnccanaattttctgatcatnanatcaaaccctncttgcatttnattttttttcttaatttaccaaaaaaatggttctatgantctcacgagtacgcatgcgatggatccagaaggtggaacaactcgtcaaaactctgctaagagagagtcgtggagaacggttctgactctggcgtaccagagtttaggagcngtgtanggcgatttgagcatttcgccgttgtacg

SEQ ID NO: 1472 - DNA, 240 bp, Glycine max
  Clone ID: 701038737H1
atttcaaccagtattttgttacatttaaattggcatcttcccccatttacattgacctgagattttcaaactttggtatcatctagcaaaggaatagattaaataattgaagttccatataaacttaggttactggtgttgtttgtttaagtgcttctaagaacacacgactggatacttgattctcatgacataaatttcctagcttgaaggaaagaaataattttctgagtttatttt

SEQ ID NO: 1473 - DNA, 244 bp, Glycine max
  unsure (1)..(244): unsure at all n locations; Clone ID: 701038738H1
caaacatcanaacaatgtctccattttctctgcttcctcttcacnacattgctatcttntctcggcgccgncgacgcgcgactgcaccttggacttctacaaggacacgtgtccgcagttcagccagatcataagggacaccgtcacaagcaagcagatcgccagccccagcancgccgccgccacgcttccgcctnntcctccacgantgcctcctccccaanggctgngacggnctccatnc

SEQ ID NO: 1474 - DNA, 238 bp, Glycine max
  unsure (1)..(238): unsure at all n locations; Clone ID: 701038739H1
gggactaaaaggaaaaatgaagaaaatgagtaaggcatttgacgaagtgtttgaacaaatgcataaaagaccatgaagatcctctgcaagcaacaagaatagtgtgcactctgaagattttgtggacatactgctatcacatatgcaccaagctgtgaatcagcaagagcagaaatatgtcattggtagaactaatatcaaggcaattatattagatatgattgcngggtcatttgac

SEQ ID NO: 1475 - DNA, 240 bp, Glycine max
  unsure (1)..(240): unsure at all n locations; Clone ID: 701038740H1
ctctcctcctcgtggaagntctcggtcaaagtcaagatctcctcatcagttaccggagaaggaggaggtctcgctcttattcacctgctcgtcattctaaggatcaccgctctaggtcaccattgaggccccatcattactcaagctatgatagggaaagacggtcctatagagatattagggaacatagtgatagatacagaagacgagattcagatagatcacttgatcatcgttcat

SEQ ID NO: 1476 - DNA, 217 bp, Glycine max
  unsure (1)..(217): unsure at all n locations; Clone ID: 701038741H1
ggaccattattaaggcctcagncctgttatgttcggtacttccattgttcagtatggnctttatgatgaaggttggatggctgatctttctcacttgtatgctcgcaaggttgatatagttttgcgaggatatgctggttggaattcaaggcgtgctctgcaggttctggataaaatctttcctaaggatgcccctgtacaaccttcattggtcatt

SEQ ID NO: 1477 - DNA, 236 bp, Glycine max
  Clone ID: 701038742H1
cttcaacctcaccaaaggaactaagaatttcattgaggctagagaaagtggtgatcaatatgtcaaagaatccaaaagttttctttgatattctaattggaaagatgaaagctggacgagtagtgatggagttgtttgccgatgcaaccccaaaaacagctgaaaacttcagggctctctgcactggggaaaaggggattggacgatctgggaaacctttacactacaaaggttct

SEQ ID NO: 1478 - DNA, 237 bp, Glycine max
  unsure (1)..(237): unsure at all n locations; Clone ID: 701038743H1
gtntgtttttgcgagcgtaaggttgangagaagagatggtgggagcacggncacgggacatagatgacttgcccaaganccgccgccaantacacancgcttacgccgttgtggtttctagagagagctgctacggtccaccccaccagaaactccctcatccacggatctcgtcgctacacgtggcagcagacttaccaccgttgccgtcgattcgcctccgctctttctaatcat

SEQ ID NO: 1479 - DNA, 238 bp, Glycine max
  Clone ID: 701038744H1
gtgagaaagaaaaatggagggaaaagaggaagatgtttccttgggagctaacaaattctcagagaggcaaccgattggaactgcggctcagagccaagacgatggaaaggactacacagagccacccccggctccacttttcgagccctccgaactcacttcttggtccttctaccgagccggaatagccgagtttgtagccacttttctctttctctacataaccatcttaaccgtc

SEQ ID NO: 1480 - DNA, 238 bp, Glycine max
  unsure (1)..(238): unsure at all n locations; Clone ID: 701038745H1
aacaaccacttatcccctttctccttctaacgagtgaggaaaaatggcgcgtaagaagatcagagagtatgactcanagaggttgttgaaggagcactttaagagactctctggcaaggagttgccgatcaagtctgcacaaattaccgcatcaactgatttcactgagctacaagagaaggaaccctggctttcatcttctaaattggttgttaaacctgacatgttatttggaaag

SEQ ID NO: 1481 - DNA, 240 bp, Glycine max
  unsure (1)..(240): unsure at all n locations; Clone ID: 701038746H1
ggaaaccctacacgattaccaagtccagggagagctggactgagcaggagcacgacaagtttctagaagctctccaattatttgatcgggactggaaaaagattgaagcanttgttggttcaaaaacagttatccagatacgaagtcatgcacagaagtattttcttaaagttcagaagaagggaacaagtgaacatgtacctcctccccggccaaagagaaaagctgctcgcccatacc

SEQ ID NO: 1482 - DNA, 241 bp, Glycine max
  unsure (1)..(241): unsure at all n locations; Clone ID: 701038747H1
gcattggtggctagctaagcnaagtagaaaccaaactcttcagcagtttgtttttgcttagnnnnnnnnnnnnnnnnnnnnntctccaccaccacaaccaccatgtattctgccactgcctccaacactttcttccttctctcttgtttccttctcttctgtctcctctcagctccttcctgtgtttccatgttctctggtattgagacaggagatttaganaaaagagatgatttgtttc

SEQ ID NO: 1483 - DNA, 244 bp, Glycine max
  unsure (1)..(244): unsure at all n locations; Clone ID: 701038748H1
gagcaatgaatttgtaaatagggcaaaagtaatggataaggaattaatttctctggatatattagaaaaccgaattcgattgtctaatgatgaaactanaacaaaatatttaactaaaatatatgatcctttcctgaacggacgctttcgtggacnaatcgaaaatgttttttcaacctcaatccaatatgaaaaaaatganaaanaanataccattttgataaataaaattcatggtatcctt

SEQ ID NO: 1484 - DNA, 236 bp, Glycine max
  unsure (1)..(236): unsure at all n locations; Clone ID: 701038749H1
ctctctttctttctctcaaagtgttgaacttgaagttgcagagagaaaatggattgagaattctctctcttttctctttctcttcccaactttccttccttgggatcattctgcttctttgctatggaagactcagattcagttgtaggctgatagattccanaacttctaagancnagagtggaaaaggnattgggaattgaaaggtacggacnggtaanncggaactngaaagg

SEQ ID NO: 1485 - DNA, 237 bp, Glycine max
  unsure (1)..(237): unsure at all n locations; Clone ID: 701038750H1
gatctatgggttatgggaacactgctgcttggggtgctcctagtggtggtgctggatctggtggtggcggtcctggttcagcaactgcaggtcagtcccctggtggagctgctggatatgggaatcaaggttatggatatggtgggtatgctggatatggtggaagtgatagttcttangggaattcaagtgcatatggtactgttggtggacgtactgggagtggtccaaacagta

SEQ ID NO: 1486 - DNA, 237 bp, Glycine max
  unsure (1)..(237): unsure at all n locations; Clone ID: 701038752H1
aaaccataaagtaaagaggcctttaaaagctcttattggtgatgtattgagcttactttgaggacaactcattggtacttttcatatatttgtggtgctccctcttcagtttttggtaaactaaacttcctcaattcaagggggtatcaaaatctgctggttggtttcatcaatctgatggaggaaaatctgcctcccggatttaggttccaccctacagatgaagngctcatcaca

SEQ ID NO: 1487 - DNA, 237 bp, Glycine max
  Clone ID: 701038753H1
ggatgttaagtcagaaactggaagtacatctctaaaggttttgccaccatggatgattaaatcagggatggttcttacaaaggaacaacgtggagaggtgaaggaggaaatgaagatggatgggacttcaatttccacatcagcacagtacttggacgacaagaaatcaacagttgaccatgatgataagagaaatatacaggatgagtatattaaggctattatgctgctttgctt

SEQ ID NO: 1488 - DNA, 241 bp, Glycine max
  unsure (1)..(241): unsure at all n locations; Clone ID: 701038754H1
gtaacgangatgntggagttggtgttgttgtacaagaacccattgctccacanatgccctaacnnncaatcctcgctttcancttcgccttcttcaagatccccctacttcttcctccagggcctcnagacctagatccaccccgactcccaaccccaatccaacaatggcctccgagccgccatccgcngncccggcagcatcganagctaccaacccttgtcttccaaaaccgccgcng

SEQ ID NO: 1489 - DNA, 236 bp, Glycine max
  Clone ID: 701038755H1
ataatgttatatctatgcacgatatcatacaagacatggcttgggagattgtgcgccaagaatcaattgaggatcctggaaaccgtagccgattgatcgatcctaatgacgtttatgaagtattaaaatataacaaggggactgaggccataagaagcataagagcaaacttgccagcaattcagaatctgcagttaagccctcacgtgtttaacaagatgagcaaactacagttt

SEQ ID NO: 1490 - DNA, 238 bp, Glycine max
  Clone ID: 701038756H1
cacacacaaggcagaaccaaatagctcattagtgagtttttgagttcgtgtgtcctttctttgtgtgttgcaaggttacaagatggaggatcaaaatgcatcatctaatggattgggcaaggtgttccacaaggttaagccctaccttgctatgatgtcccttcagtttggctactccggaatgtacatcatcaccatggtttctttcaagcatggcatgagccattgggtactctcc

SEQ ID NO: 1491 - DNA, 236 bp, Glycine max
  unsure (1)..(236): unsure at all n locations; Clone ID: 701038757H1
caaacccaaaacaaaaaataaaaatggagggggatctgaagcagaagctgttgagangaagnnnnnnnnnnnnnnnnnnnnnnnnnnnnnngttatcattggccaagagggtgtggaatgagagcaaggttatgtggatagtggcggcaccagccatattcacaaggttttccacctttggcatcagtgttataagccaagcttttgtnggccatattggttctnagganttggcc

SEQ ID NO: 1492 - DNA, 235 bp, Glycine max
  Clone ID: 701038758H1
cggcgcaggcgccgaatccggagatttgaagggagagacggcgccggtggacggcctcttgaactggcagaatgcgagattgaaggcggagattttaacgcatcctctgtacgaacagcttctgtcggcacacgtggcgtgcttgcggatcgccacgccggtcgaccagttgcccaggatcgacgctcagctcgcacagtcccagaatgtggtcgccaagtactctgccttcgga

SEQ ID NO: 1493 - DNA, 235 bp, Glycine max
  Clone ID: 701038759H1
gggagatgcagtgtatgagattgaccctgccaaagaccttgaggcttctgaggcttatcctcacgtggaatacagcactgtttctgaatatttggatcagtttgtctgatttccgaaatcttaggaaccaaagcacttatatgattttatcactctgcaaaatgcttaataaaacaaatgcagttcttccttctgtttttctttcagaaaaggcctatgcaggcttttttgcagc

SEQ ID NO: 1494 - DNA, 180 bp, Glycine max
  Clone ID: 701038760H1
gctctctcgcaccatgaacgagaaggccaacgtctccaaagagctcaacgctaaacacaaaaagatactggagggacttcttaaactaccagagaacaaggaatgtgctgactgcaaagctaaaggtccaagatgggctagtgtcaatcttggcatctttatatgcatgcagtgttctgg

SEQ ID NO: 1495 - DNA, 240 bp, Glycine max
  unsure (1)..(240): unsure at all n locations; Clone ID: 701038762H1
cggaaaacgagaagngagagagaaagacaaatagaagaagctgcatttgcagagacgccctgagagagagaattggaaggttgcgacgagtgatgatatacacatattgtgacggtagtgcaaatcgnggaaaaagaggtagcaatttgcgagttgcaatgagtaacgaaaaggctccttcatcagcttcttcgagtagctacgagttgagcaaaggcatcaatggcctcgacaaggtta

SEQ ID NO: 1496 - DNA, 242 bp, Glycine max
  Clone ID: 701038763H1
ctagaatggaatttcgatgctcagtcatctcttttaccattctcttctctcttgctcttgcaggagagagccatgtccatgcatcgctacctgaggaagattattgggaagctgtttggccaaacactcccattcccactgcactgcgagagcttctaaagcctctccctgcaggtgttgaaatcgatgaactccctaagcaaattgatgatacacagtacccaaaaacattcttctataaa

SEQ ID NO: 1497 - DNA, 242 bp, Glycine max
  unsure (1)..(242): unsure at all n locations; Clone ID: 701038764H1
taacagcagacaagaaaaatggagattgaggacacatcaagtagagtatctattgcatttcctcttgggcttagctcttcttgttgcctgtnattgttctnttgttgcttcttttgttgctgcttgcactgggaaaaactccaacctttgtttccattttgnatggttatcgtcgatactcagcctcngacacaagcagacttcactccccctcctcacaagccaggctttcctgtcttgat

SEQ ID NO: 1498 - DNA, 239 bp, Glycine max
  Clone ID: 701038766H1
gccattgcattcactcaagtgagaaaaaaaaagtaacaaaaataaacaccaaaaacagatcagaacagagcaacaaccatggtgattcacagactcgaattgtgcataaccatggttcgactagccatagagttcgtcgtgagcgtcgcggaaacagtggtcatagttcaacagagaaacatgagcctcttggaacgttgaatcgcgcaagtacacctcttcctttctatggctacctc

SEQ ID NO: 1499 - DNA, 239 bp, Glycine max
  unsure (1)..(239): unsure at all n locations; Clone ID: 701038767H1
cttcaattgtgactcctcaacccacttgattcaccccaacnccaataattttagccaccagtgtgtagataacttaagccaaaacaaccaaccaattcttttggataccaccttccatatattgatactgnaaaatatagttaaatttcattccgaaacaatgatcaacaaagtagcagttctattagttgttttgctttcatcattgctgctttggcttctgatcctgatccagtaat

SEQ ID NO: 1500 - DNA, 236 bp, Glycine max
  unsure (1)..(236): unsure at all n locations; Clone ID: 701038768H1
caaaattcaccaattcccagttccgtggactgnagcacccttagatttcgttaccaaagacaaggagaagcaccggaagcgtaataaaatggatatgtacattcgtgttaaacgtagtaagacaacctacttcattcggtgcaagccatctgataaaattcttgacataaagcagaagttgcaagaacttattgatcagccagctattaatcaacggttaattttacctgatacag

SEQ ID NO: 1501 - DNA, 237 bp, Glycine max
  Clone ID: 701038769H1
ctgtgttagtgttgtgtttgttgtgtgttgagaagcagagatgcaaggaagcgcggccgacggagaagccttggatttcgagcctgaggacgatgacttgatggacgaggacggcgcccccgacgccgacgccgacgcttctccacctcaacctaagctcaaatccgccatcacccccgccgccacttcctctctctccgccccgaagaagaccaagggccgcggattccgccagga

SEQ ID NO: 1502 - DNA, 233 bp, Glycine max
  Clone ID: 701038770H1
gaaaacttcaccccggggaactggggaagtatattttcttcttttttggtggttctagttgttggaggaagatattgtaatcatgaatgttgaagaagaggttcagcgtctcagccaagaaatcaagaggcttggtaaggtccaagcagatggttcttacaaggtaacatttggaacactatttaacgatgatgagtgtgcaaatatatttgaagcacttgttggaacactaa

SEQ ID NO: 1503 - DNA, 270 bp, Glycine max
  unsure (1)..(270): unsure at all n locations; Clone ID: 701038771H1
gcagaaggagcaaaagcaatggcgccgaagaagccgagaaccacgacaaggaaccctgatttggttagggggattggcaagtattcgaggtgcggcagatgtaccacaagagggggcattctggggccattcaagggccaaaaaacngtggcgtttttgccccggccaacgattcccaaggcccaaggcccganggcncccgggcccaganaggccggcnncaantttcttacccccggcgggaacgattgtttanagganangcccccc

SEQ ID NO: 1504 - DNA, 235 bp, Glycine max
  unsure (1)..(235): unsure at all n locations; Clone ID: 701038772H1
gcagtctatgcttcttttagatgccttcaacaaagatagggcatctttgcccacacctctgccaaatccaccacctttggcacctcttcctgtagttgctcctgatgctcgaacacaagagatgataaatgaaaanctgaagaaggctgaggatcttggtgagcaaggaatggttgatgaggctcaaaaagcactggaagaggctgaagcacttaagaagcttcctgccaggcaa

SEQ ID NO: 1505 - DNA, 234 bp, Glycine max
  Clone ID: 701038773H1
cagaggccatatcttcgcctggatttgtgagcttatttctggccaaagatgtaccgagtgataataaaattggaccggttgttgctgatgaggatctctttgctgtagattatgtcacttgtgtgggacaggttataggagtagttgtggccgatactcatgaaaatgcaaagattgctgcacgaaaagttattgttgcgtatgaagagctcccagccatcctttcaatacggg

SEQ ID NO: 1506 - DNA, 232 bp, Glycine max
  unsure (1)..(232): unsure at all n locations; Clone ID: 701038774H1
gtcgtagactgtttctgcatgaaagtatttatacagacgtactagaccaacttgttgaagtctacaaacaagtcaaaattgggaaccccttggagaaggggactctagttgggcccttgcatactcgtacttcagtagaaaactttcagaagggtatttcagtcataaaatctcagggagggaaaatcctaaccggtggatctgtattagagtcgggaggnaattttgtaca

SEQ ID NO: 1507 - DNA, 233 bp, Glycine max
  Clone ID: 701038775H1
tccaccttgggcctagccagctagcgcttcttctctcgcattccgtggagatctagtgctgccaaacctcgctgaaaattagggtttcgtttcggaggtagacgaagatgttcggaagggcaccgaagaaaagcgacagcaccaggtactacgaaatcctcggcgtttcgaagaacgcttcgccggatgatttaaagaaggcttacaagaaagccgccattaagaaccaccct

SEQ ID NO: 1508 - DNA, 233 bp, Glycine max
  unsure (1)..(233): unsure at all n locations; Clone ID: 701038776H1
aaattcttttaatttttgattaaattatttattatatatttgtataatgttataatttgatctaggttttctagataaatatatgggnattgaatatatgatgttgaatgatgtaaaatcagacggattcccactgatattatttntatatgattacacaaccagctactactgacaacatcatgtncatgctctttgttttgtagattcttagtgttttaagtttcatctgc

SEQ ID NO: 1509 - DNA, 235 bp, Glycine max
  unsure (1)..(235): unsure at all n locations; Clone ID: 701038777H1
gaagcgaagtgtgtttgggaacaatggcagagcaaaagaaccggtggagctgggacgttcgccggctttgacccgtggaagtcgtctacgcctccgcagtcgccggcggcgcggaacacggcgatcggaaacctagtgcgccgttggtgcggcggtactccatttcggccacgtcggttcttccgnaatcgaagcacgctgtggccttcaagcttcagcggctgaaggaccaagt

SEQ ID NO: 1510 - DNA, 238 bp, Glycine max
  unsure (1)..(238): unsure at all n locations; Clone ID: 701038778H1
cagcaagcagccatgccgtcggacgacgaacgctcgaacgccagcgacttcnnnnnnnnnnnnnnnnnnnaccaaggaggagaaggtcgtcgaggacctgagcaactcggacgtcgtcgaacgctaccgcctcgcggccgagatcgcgcagtcggcgctccagggcgtgctcgcgcanctcgcggccggcaaggacgtcgtcgagctctgcnagttcggcgacctcatcatccagcag

SEQ ID NO: 1511 - DNA, 236 bp, Glycine max
  unsure (1)..(236): unsure at all n locations; Clone ID: 701038779H1
aatcagggaggacccattttgctctagcatttgaacttcctggtggctggcataagttgaaggatgctatgattttgactgttcttcagatgctattgggaggtggtggatcattctcagctggtggacctggtaaagggatgtattcacggctatatctcaatgttctgaatgantatccacaagttcattcaatttcagcattcaacaatatttacaatggcactggcattttt

SEQ ID NO: 1512 - DNA, 240 bp, Glycine max
  unsure (1)..(240): unsure at all n locations; Clone ID: 701038780H1
tcagtgggcttgtaagacctgttttagaaactcacggatgggatcatgatgtgggttatgaagggttgaatgtagaganattgttcgttctcaaggaaaagatacctttatctttctctggtcaggttactaaagataaanaggatgctaatgttcagatggaaatatccagttcagttaagcatgggaaagggacagcaacttcattaggttttgatttgcaaactgtggggaacgact

SEQ ID NO: 1513 - DNA, 237 bp, Glycine max
  unsure (1)..(237): unsure at all n locations; Clone ID: 701038783H1
ggcgcagagcgtgatccattgacgaagatggtgcagcgtctcacctaccgcaagangcacagctatgccaccaaatgccaaccaacacagggtcgtcaaaacccctggtgggaagctcgtttatcagaccaccaagaagagggccagcnggcccaagtgccccgtcactggcaagaggattcaggggattccacacttgangcctgcagagtacaagagatcaaggttacccagaaa

SEQ ID NO: 1514 - DNA, 234 bp, Glycine max
  unsure (1)..(234): unsure at all n locations; Clone ID: 701038784H1
cttcaaccctagcgtttccacaatcgattctgatgatatatttgcnntggtgtttgcctgaggatttggggcgtttccgggtgatacataacttgacttgattgtggttgatactaactggacaggaataatgcatcgcaattcacttaaaagatcaaatgatagtacccggattatcatcacagctatnatgggaattgcctttggattttttgttggtatttcaatttcatc

SEQ ID NO: 1515 - DNA, 234 bp, Glycine max
  unsure (1)..(234): unsure at all n locations; Clone ID: 701038785H1
gttttgtagtaagtgaggtgaggtgccaaaatggtgaagataactncttggtactttcgatgactcttttggtgttgcctctcttaaggcttanttggcagagttccatgcaactctgattttcgtgttcgctggtgttggttcagccatcgcttacaacgagcttacaaaagatgcagccttggatccaacggggctggtggcagtagctgtggcccatgcatttgcactgtt

SEQ ID NO: 1516 - DNA, 235 bp, Glycine max
  Clone ID: 701038787H1
ctcagattgcaattgcctcttctcttctcccagaatcggtcactaatccgatatcatgaagctcgatacgactagtctcgaatcgtttcccacactgattgcacctcaaaacgacgtcgccggagaactctccgccgctccgttctttgaccttccgaattccaatgacttcgatgggttcttgaaagacgctattcagatggtgaagcccgcgaagggtactacaactcttgct

SEQ ID NO: 1517 - DNA, 235 bp, Glycine max
  unsure (1)..(235): unsure at all n locations; Clone ID: 701038788H1
tcttcttcatcttcttctcctttgtcacttctcagcacnantcaatctcttcaatttctttcttctactggcaataagcatcagnacactgccacatccagttcccttctgtgtgttcctttcttctantctctccagtccagccaaaacgaagctccttccatcattttcagttttttctgtcaagtgttgttgcttcttctcccaaactcgtncaaacattggctggtaacaa

SEQ ID NO: 1518 - DNA, 231 bp, Glycine max
  Clone ID: 701038789H1
aagtactataatagctatctatcgaaaccagcgagcaagatcgattcgggtcaaacatggatgggcaatcgtcggagaaactgatactggtgaagcgcgagtcaaacggcgtcgcactggtgatgattaatcgtcccggttcccttaactcgctgacccggcccatgatggtggacctggcccaggctttcaagagactcgaccgggacgagtcggtgcgggtcgtcatat

SEQ ID NO: 1519 - DNA, 261 bp, Glycine max
  unsure (1)..(261): unsure at all n locations; Clone ID: 701038790H1
ggactcctaagttcagtgatggctattgtcacctgcttgattgggttgcactatggacatattattgtccattttaaggaccacagagtgagaatcatatactggatgatcccaacctgcttgtncttttagtttttgggccttggcgttgggaactngatttgggaatggcatatgaaatanaggtctctgctaactncggctncagttnagcaacatgtgttcanctggctgggtggcttggcagggcgttccttcttt

SEQ ID NO: 1520 - DNA, 232 bp, Glycine max
  unsure (1)..(232): unsure at all n locations; Clone ID: 701038791H1
ggaaaagcactggcgcactaacccncgagncttctcttctcntctctctctgncgtgagtcaccatgntgagggtnagtgtgctgaacgntgctctgaagagcatgtacaatgctgagaaaaggggaaagcgccaagtcatgantaggccancctccaaantcattatcaaattccttttggtgatgcaaaagnacggatacatcggagagtttgagtatgttgatgancnc

SEQ ID NO: 1521 - DNA, 224 bp, Glycine max
  unsure (1)..(224): unsure at all n locations; Clone ID: 701038792H1
ttgtgccatttcttctctcaataaacttctattgntgccccgctccacgtnccattcttcagtatcctttgtagtttgaaccttcctcacactcccacttccgaaaccaatcnnnnnnnnnnnnnnnnnnnnnnnnnnnnnnctccttgttgtgacaaggcaaatgtaaagaaaggaccatggtcaccagaagaagatgaaacgctaaaggattacatagagca

SEQ ID NO: 1522 - DNA, 233 bp, Glycine max
  unsure (1)..(233): unsure at all n locations; Clone ID: 701038793H1
ttatctacccacaatctaacacagaaggccaagttttgccgtttgcatttcctcttcaaactctgtctctccagatctaggtgctctgccttcatnttacatttngacaagatggcaacaanaacagtttccaacttgccaattgctatgtcaagacccaagattccttcatcanaaaggattgcaaatgtatgtcctgcaattcttggaggtagatctaaggttggttcatg

SEQ ID NO: 1523 - DNA, 238 bp, Glycine max
  Clone ID: 701038795H1
gtgaaagagaatccgaggcgaagagaagagaaaaattaagatggaggggaaggagcaggatgtgtcgctgggagcgaacaagttcccggagagacagccgattgggacggcggcgcagagccaagacgacggcaaggactaccaggagccggcgccggcgccactggttgacccgacggagtttacgtcatggtccttttacagagcagggatagcagagtttgtggccacttttctg

SEQ ID NO: 1524 - DNA, 241 bp, Glycine max
  Clone ID: 701038796H1
tttgcatccttcctttggtcttatagttattagttagaccttgcacagtaaataacaatgaagcggccatttagttcgagcggttatcacttttgtctaatgaatatgttcctgttgcttttggcagtaaggtcccaactgacaacagacttttataaatcatcatgtcctaacgtttccaaaatagtaaggagagaagttcaaaaagctctaatgaatgagattcgaatggctgcttctt

SEQ ID NO: 1525 - DNA, 192 bp, Glycine max
  unsure (1)..(192): unsure at all n locations; Clone ID: 701038814H1
ctttttgatatcacttgtatgnacacttggtggtcgggctgctgagcaggttcttatancggagaatctcaacaggagcacaaaatgacttggaaaaagtgaccaagatgacgtatgcccaagtagcagtttatggttttagcgacaaagtaggcctcctctccttccctccaactgagggctcatatgagt

SEQ ID NO: 1526 - DNA, 199 bp, Glycine max
  unsure (1)..(199): unsure at all n locations; Clone ID: 701038841H1
cactcttcttctcttgcggctagggttttagcgcacttgcttctagatttaaggaagatgggtaaggaaaaggttcacatcagtattgtggtcattggccatgtcgactctgggaaatccactaccactggtcacctgatttacaagcttggaggcattgacaagcgtgttattgagaggtttgannaggaagctgctg

SEQ ID NO: 1527 - DNA, 185 bp, Glycine max
  unsure (1)..(185): unsure at all n locations; Clone ID: 701038842H1
ttgatggattcccttccttccgtgtcgccctccatggtcctccctcccagccaccctttccgccgcctccctcccagcctcgtctccgcccgaaccagaannnnnnnnnnnnnnnnngtgtcggtgtcctgcaccctctccggcaacggcaccgacgacgaggtcgagagggccctccacatgga

SEQ ID NO: 1528 - DNA, 197 bp, Glycine max
  unsure (1)..(197): unsure at all n locations; Clone ID: 701038843H1
cagatatgaaccggtcaatgaacccactttggacaactgctttgtatcaacaagttatgatgctactactcactttgagtcgaccgtggatgacgttctcaacatgtatacattgataactggaaaggtaagtgttatgccttggttaccactngtttccacttcttgaattaatttttgagccacagatagtgact

SEQ ID NO: 1529 - DNA, 197 bp, Glycine max
  Clone ID: 701038845H1
gagaaaagcatgaggatggtattaatggctttgttggctttcacgatgcttttatctaagggtgaaggccaattagtagagaatttctacagtttatcttgtccaaacgtggaatccatcgtgaaagaagcagtgactaacaagtttacacagaccattacaactggacaagcaactctgcgtctctttttccatga

SEQ ID NO: 1530 - DNA, 169 bp, Glycine max
  unsure (1)..(169): unsure at all n locations; Clone ID: 701038846H1
tcggagctcaatttcgccgtcaatggcggcctccaatgctcacaacggcaccaccaccaactccatcangcacgccttcggcaacgtcctcgcgttcttcatccttctcctcatcggcgttctggccttctcgatccgtctcttctccgttatanagtatgagagtgtt

SEQ ID NO: 1531 - DNA, 198 bp, Glycine max
  Clone ID: 701038847H1
cttgatttgaaggacttggtcctgctctctggtgctcacacaattggtatcgctcattgttcatcattatcaaaccgcttgttcaatttcactggcaagggtgatcaagacccttcactagacagtgaatatgctgcaaatctgaaagccttcaagtgcaaggacctcagtaaattgaacaccacaaaaattgagatg

SEQ ID NO: 1532 - DNA, 198 bp, Glycine max
  unsure (1)..(198): unsure at all n locations; Clone ID: 701038849H1
caatcttctganagtgtttggttganagtagcaaagatgtttcctttgcgggcaaaagggtcaaaagataaaggggactatggtggttatgcagaagaatgtgttggatatcnacagcatcaccagtgttngagggatcgttgaccaaggctaggcttcataggcagtgcagtcgatgcacttacttttgcagccacc

SEQ ID NO: 1533 - DNA, 197 bp, Glycine max
  Clone ID: 701038850H1
cagagacagagacgcagccatggggcggagacctggcgaggtgttataggcaaattaagaacaagccataccccaagtcacgtttctgccgtggtgttcctgatcccaagatcaggatttatgatgttggtatgaagaagaagggtgttgatgagtttcctttctgtgtccatctggttagttgggagaaggaaaat

SEQ ID NO: 1534 - DNA, 197 bp, Glycine max
  unsure (1)..(197): unsure at all n locations; Clone ID: 701038851H1
ctttatccttgtgacaataagtttcatactgaagctttgaatgaactcctagagtctgatgacaagtttgganttattgtcatggatggcaatggtactttgtttgggaccttgagtggtaatacgagagaagtgcttcataaattcagtgtggatctcccanagaaacatggangagganggcantcanctctgcg

SEQ ID NO: 1535 - DNA, 197 bp, Glycine max
  Clone ID: 701038852H1
acttaatcgatttcccatatttcatccgtacgccaaagttggtggtattcactctccacgctaattaggttgttgctgtacatcatcttcctcaagttgtctgattgattgagtatgtacattgtgtacaggaagtatttgcacctaaatagttttctctgttattttggtattatctgtaaaactagagtaaaggt

SEQ ID NO: 1536 - DNA, 198 bp, Glycine max
  unsure (1)..(198): unsure at all n locations; Clone ID: 701038853H1
gttttgagatttgactcacgcagaggagagtaataatgtgtgggaagtagaagtagaagtagaaggagagaagcaccactaacgtcagcgattccttgccnttttcttctttcttagactcgaagacaagtttgatcctattttgagaatcgcattcagatggaaagcgcatcaganctgtggaattcccgttgttgc

SEQ ID NO: 1537 - DNA, 197 bp, Glycine max
  unsure (1)..(197): unsure at all n locations; Clone ID: 701038854H1
gctcctggtgctgcttcatctgagactgtgcccaagagatcgccaataccaagccaggaagatgcaacgaggaatgcactgaaaattttgtcacatggtaaggatgatggaagtgatactggtagangaagagaatatggagggagaggtgggttggatcgaggcaggggcagaggcagaggcaggggaagaggtcg

SEQ ID NO: 1538 - DNA, 197 bp, Glycine max
  Clone ID: 701038855H1
aagaatcacatcgcaacgaatcagaggcccctttcaacgaatcacatggcagaaccgtcgtccaccgccgccaccatcgctaccgctgatcctccggttccagcgaccaaaagctgggccgacgaagcggacgaagaaaccaacgcctccaccgccgaggcagaaacctcctccgttaacctggaagcgttaaccat

SEQ ID NO: 1539 - DNA, 200 bp, Glycine max
  unsure (1)..(200): unsure at all n locations; Clone ID: 701038856H1
antcaatcttctgagagtgtttggctganagtagcaaagatgtttcctttncgggcaaaagggtcaaaagatanaggggactatggtggttattgcagaagaatgtgttggatatcaacagcatcaccagtgttggagggatcgttgaccaaggcttaggcttcataggcagtgcagtcgatgcacttacttttgcagcc

SEQ ID NO: 1540 - DNA, 191 bp, Glycine max
  Clone ID: 701038857H1
gagtttgcagctgcatcatcgatcatcgtcacctcatggacggacacgattcacaagacccgaagcagagccctgctgacatgactgcctttgtgcaaaatcttctccagcagatggtgagttgtgtagtctaggttcttagagctgcattttctgacttttagaatatgtttcactgttgctaactggag

SEQ ID NO: 1541 - DNA, 190 bp, Glycine max
  unsure (1)..(190): unsure at all n locations; Clone ID: 701038858H1
tttcagcttatcggaagcttgcccggagttatcatcctgatgtgaacaagtgagtttttctttcttctttcatattgaacatcgtctactttctgattctgttcccttgccttgttccccactctctttttttngcttttaaaatttttatttcttttatttcactgttgctgtggacaaagtggtttgg

SEQ ID NO: 1542 - DNA, 190 bp, Glycine max
  Clone ID: 701038859H1
gggaagatgcatctgcagcttgcagatccacaaagaagtataaatgtttgattattatttagagggctctatctagttaaaattaaatagttattgtgcttttgttttattagacagttgtaaggcactgtgttctacatgtgtttgcagttgtctgcatgcattgtaattttcaaagtccgctttatca

SEQ ID NO: 1543 - DNA, 189 bp, Glycine max
  unsure (1)..(189): unsure at all n locations; Clone ID: 701038860H1
gaaaaagttataaagtnattatctttgtctgtttcagaacaacccagttaataatataaatantcctgtttttgcaatatttttctgagaacccatttttcattttctctctcatcttgtggtgctagttgttcttttgagaatagtgggtgtttttgtgcttaaaactataatgtctgtcttaaagta

SEQ ID NO: 1544 - DNA, 152 bp, Glycine max
  Clone ID: 701038862H1
caccattctaagttatatcagtatgagggggatcatattgtcattcatagctctagttggatttagataaattgtacatagcttggagatgaattcctgacctgtttctattcttctttgctacacccaattagagatactgttgattgacc

SEQ ID NO: 1545 - DNA, 191 bp, Glycine max
  unsure (1)..(191): unsure at all n locations; Clone ID: 701038864H1
gcanaagttaggcagttctgaaactaaatcattgttatcaagcgctgtctanncgtttagcatcggatccaatgattatcttagcccgttcttgacacattctgatgttcttaactcttactctcattcagaatatgttggtatggttgttggtaacttgacttccattatcaaggnaatatacaagagag

SEQ ID NO: 1546 - DNA, 191 bp, Glycine max
  Clone ID: 701038865H1
ctctgatatttctatattttggtgctctgtgtctctacgatctggatccaacggtccaaaatgttcggggcttgtgctgcttgttttcccaggttttagagctccaaaccttcagatccacctcattcgtctccagatcttccttcctagataacgttttcgggttcgagaaggcacttgtttgtttgtcg

SEQ ID NO: 1547 - DNA, 190 bp, Glycine max
  unsure (1)..(190): unsure at all n locations; Clone ID: 701038866H1
gttccccttcgcgtctctctccaaacaaaacagaactgaactcgctgactgaaactcgcaaaaattagggttttgcagtgatggcactgtccaaccgcgtccgatcgggaatctctctcttcaccaaatccacgttcctcactttcgagcgatnccactctccaacgatcccttgttgccccttccattt

SEQ ID NO: 1548 - DNA, 190 bp, Glycine max
  Clone ID: 701038867H1
acctacctctttttcttctctctcaacaacttcaccttcttcctcctcgatcatgtctcacttcaagggcaagtaccatgatgagcttatcgccaatgctgcgtacattggcactcctggaaagggtattcttgctgctgatgagtcaacagggacaattggcaagcgtttggccagcatcagtgtagag

SEQ ID NO: 1549 - DNA, 191 bp, Glycine max
  Clone ID: 701038869H1
ggacacatttcatgtcatagcagaactaccaccagacaactttggagcctatatcatatcaatggcaactgcaccatctgatgtgcttgcagttgagcttctacaacgtgaatgccacatcaagcatcccttaagagttgtggccattgtttgagaagctagctgatctagaggctgctcctgctgctttg

SEQ ID NO: 1550 - DNA, 190 bp, Glycine max
  unsure (1)..(190): unsure at all n locations; Clone ID: 701038870H1
cttcgccaagaagagggggaagaagctgttcacactcccagcaccangcaagccatcaaggctctcacttctcagatcaaggacatcgcagtgaaggcttctggggcatataagagctgcaggccatcttcaggatcttcaaatggtaacaggaataggaagtatgcagactcagatatggggtcagatt

SEQ ID NO: 1551 - DNA, 191 bp, Glycine max
  unsure (1)..(191): unsure at all n locations; Clone ID: 701038871H1
aganctagagtntnngagtgatgaattgcctgtnaaggtnggagaaggacgagggtgagtcttttcctgctggatccanaataaggaagcatcatcacagggaagaggggggtgttgaagaaaatagaagcagcaagcaagccgcaattttctctgaanctacattgcgatcatccatgattgatataatt

SEQ ID NO: 1552 - DNA, 191 bp, Glycine max
  unsure (1)..(191): unsure at all n locations; Clone ID: 701038872H1
agaaaatagcgaaataaacgacgtagaaagtagataacgagtgagagagagggataaaggaataaaganataaaaataaaagtaaaatagagggagaaatgagaagtgtgaagatggtaaaatgatctcaaactcggaccccgtagaaccagtcacggcaaccgccactgccggcgccgacgacgccaccg

SEQ ID NO: 1553 - DNA, 187 bp, Glycine max
  unsure (1)..(187): unsure at all n locations; Clone ID: 701038873H1
attaattgcaagaatggcacttcgttgcttggtgatgtccctttctgttctcttcactcttggtcttgcgagagaaagccatgccagagacgaagatttttggcatgctgtttggccaaacactcccattccaagttcattgcgagatcttctaaagcctggccctgcaagtgttgaaatcgangat

SEQ ID NO: 1554 - DNA, 186 bp, Glycine max
  Clone ID: 701038874H1
tgagcaccacttcattaaactcttcccaccgttaagctccactcatcccccatgatcccttcaggaataatgaagcaccccagaggaaagcttcctcttcccatcattgtcatcacaacctgtgttcttgcttttgtggctatcttgtatgtagagaggctcagtttcctctcttccaagtccatt

SEQ ID NO: 1555 - DNA, 87 bp, Glycine max
  Clone ID: 701038875H1
tacaatcgtggtggcggtggatatggtggtcgtagtggcggtggcggtggcggtggtggataccgtagccgtgacggtggttatggc

SEQ ID NO: 1556 - DNA, 185 bp, Glycine max
  unsure (1)..(185): unsure at all n locations; Clone ID: 701038878H1
caaaaaaccaaacaccccttctcccaattcccattcccaccagaatcctccattactccgagacccagcacatgctngntccnnnttttctcatttctttatttgcaaaatccacacaccctaaattcctttcccttcgaagaatcccttacatcaccgtaacccaataagaagtacctcatttc

SEQ ID NO: 1557 - DNA, 186 bp, Glycine max
  Clone ID: 701038880H1
tttgaatagaataaattagagaagaaaaagtctcaaatcaggtggaatgggtatctgcatatcctctgaatcttcagcgattcatggagcccctgaagaggctcgtgatgaaaatgtgttagtgtttgaagcaaccaaggttctaagtggactttgctctgcttacactaaacaaggtagcaaagg

SEQ ID NO: 1558 - DNA, 187 bp, Glycine max
  unsure (1)..(187): unsure at all n locations; Clone ID: 701038881H1
canaatcactcctattgcnatagcaatatgatgggtgacactgagatcaaaccatcagttgaagtagtcatatgtgcttccatgaacaataacaatagcgcaaacaaccacaccctcccaaccgacatcaccaagtcatcacaatcacacttaccaatcttgaccaagctccatgctggttactttt

SEQ ID NO: 1559 - DNA, 149 bp, Glycine max
  unsure (1)..(149): unsure at all n locations; Clone ID: 701038882H1
aaacggcgtngcagggaatggtcttatctggttaaggaccgactcttcacttaggaggaagtgacgatcganatctggtaagaggctttaatcaaccaacgaacaacgatgtcgtggtttgcaaggacaatcgcaaactcactcagact

SEQ ID NO: 1560 - DNA, 186 bp, Glycine max
  unsure (1)..(186): unsure at all n locations; Clone ID: 701038883H1
ccgacgcccacgcgccaaacccgcgcgtgctgccactttatgacatctttagttttctcagcaccacaatcagcagcggcatcataacctacctcgcanacaccaaaaacgacaccccaatgctcctcttcgccgccttcatctacgtcgtttacttctccgtcgacttctccccaccaccacaac

SEQ ID NO: 1561 - DNA, 184 bp, Glycine max
  unsure (1)..(184): unsure at all n locations; Clone ID: 701038884H1
atcaagtactccatggacttgtatgctgcttacatagttgagagcttaaggnactaacttctttagaaactgaatagccaatttcagtgatctccaattatgtaaaatgtggatgaaactccataaacattctgatttccgtgccgttctgttatggcactactgctgcctcggttcttgacac

SEQ ID NO: 1562 - DNA, 183 bp, Glycine max
  unsure (1)..(183): unsure at all n locations; Clone ID: 701038885H1
gttccatttattggacttgttatgggtgatagggggttgatttctcgtatactttctgcaaaatttngtggatatctcacttttggtacccttgagtcaggagttgtttcagctcctggtcaanctactcttaaggatctattgtatctatacaatttaagacaactggctcctgatacaaaa

SEQ ID NO: 1563 - DNA, 184 bp, Glycine max
  Clone ID: 701038886H1
aaaaaatggaccttctcctaaattgcctaaaccttaacaccattgctattgcatcaatcctttctctaatcttcttatgtttgtttctatatcgtaaaaattctcgtgggaaagatgctccagtagtgtctggtgcatggccaatacttggtcacctctcattgctgaatggttcacaaacacc

SEQ ID NO: 1564 - DNA, 184 bp, Glycine max
  Clone ID: 701038887H1
cgatttctgagattccttcgaattgttaactctctttcagtttcaagttggaaactttttcgattttcgctttctggaggtgtgaattgttgtttgaaagtcacaagcaatggtgaaggacactgcgtattatgacatattaggtgtcaattatgatgcatctgctgcagagatcaagaaagct

SEQ ID NO: 1565 - DNA, 186 bp, Glycine max
  Clone ID: 701038888H1
gacgctgaaagtgaaacgcaaaatcccgtgacggagtgcttccactgcactgtcatacaatggcttcctccaacactcccaaacccgaaaagaagaagagtaccaaaaaatccgaaatctccaaagccgaaaagaagaaaaccaaaaacgctgaaatccccaaaaccgatggcaaaacgaagaaga

SEQ ID NO: 1566 - DNA, 181 bp, Glycine max
  Clone ID: 701038889H1
gttttttttaacactgaaaatctaaagagaaagtgattccctcagcggtgacagaacgcttccttgagcagagaaacccaagcagatcgattactcttgagaaaacaagatgagccgccacccttctgtcaaatgggctcagacgtctgatgtactctacttaacagttgagctgcctgat

SEQ ID NO: 1567 - DNA, 179 bp, Glycine max
  unsure (1)..(179): unsure at all n locations; Clone ID: 701038892H1
gctaaaccaaaccaaaactaaaacaatgttgtctgtctgagtttacattgagagtgcccaagttcgaattcgaaagcnaaaacatgtttttggcgagacccattttccgaggaccctccctttggggcgttgcactcttcctatgcatattcctctgnctctgcagctgctattcaagc

SEQ ID NO: 1568 - DNA, 177 bp, Glycine max
  unsure (1)..(177): unsure at all n locations; Clone ID: 701038893H1
ggtatctcaaaccaagtcacgccaaaaatgtgatagaggttcctatttccgagctcttaaatacatctattttgtgccttatctatctgcttgtttgttncttggacaacgtgataactttagtgtgggtcattctgttgtcgtggtctatgactcctggagtcctggttttttgat

SEQ ID NO: 1569 - DNA, 276 bp, Glycine max
  Clone ID: 701038901H1
cagagacagggagacaagacagagtagtacagattactaccaatggctaccaaggtttacattgtttattattctacgtatggacatgttgagaagctagctagagagatagaaaaaggggctgcttctgtggagggagtagaagcaaaactgtggcaggtacctgaaacattgcctgaagaagtccttgctaagttgggagcacctccaaagagtgatgttccaatttactcccaatgagcttcctgaggctgatggctttttgtttggttttcc

SEQ ID NO: 1570 - DNA, 259 bp, Glycine max
  unsure (1)..(259): unsure at all n locations; Clone ID: 701038902H1
gnttttctctgcagggggaacttggagccaatgctatattagctgtgtccattgcngcttgtnaagctggtgctgcagaaaaggaggttccactttacaagcacattgctgacctgtctggaaaaaccagcccaacacttcctgttcctgcctttactgtcataagtggtggaaaacatgctgggagtaacctggccattcaggaaatcatttctcccaatnggagcaagcaaatttgaggaagcattgcgaatgggca

SEQ ID NO: 1571 - DNA, 269 bp, Glycine max
  unsure (1)..(269): unsure at all n locations; Clone ID: 701038904H1
gcaaacgatccaaactcttntttcatttgcagcatcaaaatgantggtagcaacgatgnnccccggnagtggagctctaggtttttnaangtggctagtgcagctgtcgctacanncgccgttgncggcggtttatatgccattctttcatcctcaacctctgntagntctgngatggnagngccgtttggcagcgcacggngtgagagcaaagaacgtggatggtggctccgggtctcntcctcgcganggtnccaccacggtnagtt

SEQ ID NO: 1572 - DNA, 265 bp, Glycine max
  unsure (1)..(265): unsure at all n locations; Clone ID: 701038909H1
ggaaggcatgcgtntggtgatcaatatcgggctactgacnctgtaattaaaggagctggaaagctgaancnggtgtttgttccagaaggccaaggtgangaaactgaattcgaggtttttaacttcactggtgaagggggtgtttcattggctatgtacaatactgatgagtctattcgttcttttgccgaggctctatggcaactgctttagagaaagtggccactttatcttagcaccaaaaatacaattctcaaganatatg

SEQ ID NO: 1573 - DNA, 267 bp, Glycine max
  unsure (1)..(267): unsure at all n locations; Clone ID: 701038911H1
gtttaataaacgttgaaactattcctcctgcgccatctccattgctgttttctctctgcttgctattacaatccaattcaagaagttcgttcaactttgatgctcaagtctaacaacatatataaccattgacagatattcaaattcagcataattgtgattannattttggtccttccctggaatgaaaatactgtttgtcantaaatttgggagtgatttgcggttatntttaatgggctgctactgttcaacttcaaagaaaac

SEQ ID NO: 1574 - DNA, 267 bp, Glycine max
  unsure (1)..(267): unsure at all n locations; Clone ID: 701038912H1
gcgaccnggttncgatcacaggaactgcagcancttntngctgcccttcttgagttcatggctgtttgtnaacgtgccatccgtgtncntttcagattgnttggtgaggaagatcnggntttccacacncaacttgtnantggtttccagtcnctgacagcagagttatcacnttncattcctgccnttctctcagagctatgacaagtgtttgcctctntnttttgcttcgntttgttcntnttgtngtctcctcnttccctttca

SEQ ID NO: 1575 - DNA, 268 bp, Glycine max
  unsure (1)..(268): unsure at all n locations; Clone ID: 701038913H1
aacacccccattacaaatctctgtatttcagggttgaagattcacacattgaattgaagtttggaaatttgacacctaccccacaccatcatggcctgcatcgacaaattttgggttttcgccctcgctcttctcctcctcgcttcccctctcctccaagttgctaggtgccagtcagactctgatgatgtagtggaggctgctgaagaatcaggtgantcggcattgttggtgatgatgtccaagactttggtgatgggactttccc

SEQ ID NO: 1576 - DNA, 268 bp, Glycine max
  Clone ID: 701038914H1
cacactcactctccttctctctcctattgcggctagggtttgggtttttcactttcagcctctccattccttcaaccttcttcttctctttgatctctgatggagacgttccgtgtttagtagcaagggttagttgaggccttgtgtttggaaacgtacggtgtcgttttggagttgggaaaacaaataattctgagagatggcaaccacgaaccctttatttgttgggtgacgacgctgaggacccttctcagctcatcgccgccgg

SEQ ID NO: 1577 - DNA, 271 bp, Glycine max
  unsure (1)..(271): unsure at all n locations; Clone ID: 701038915H1
agcaaacttagaaggatttttcgaaagccaggtgttttcagaaacgagatccaggttttattgtcgantttcgctagtcaaattaattttcataattattcttnttctttgaaaccagccaagagggttatttttgatccctcaaagctaatttctctctctctttttttatgtccgggactgaagaggttgtctatttgaaatctccttcatcctttcctttgtagaaaactttttaaatttttttgtcagtgggtgttttaattaacca

SEQ ID NO: 1578 - DNA, 272 bp, Glycine max
  unsure (1)..(272): unsure at all n locations; Clone ID: 701038916H1
cttcagcacaatgggtgcctacaagtatgtttcggagctatggcgcnagangcagtctgatgttatganattcttgcagcgggtgacgtgctgggagtatcgccagcaaccttctattgtccgtttgacaaggtctactcgcccagataaggctcgtcgcttgggtttcaaggctaagcagggttacgtgatttaccgtgttcgcgtacgaaggggtggccgtgagaccagttccaaagggtattgtttatggtaagcccaccaaccaaggt

SEQ ID NO: 1579 - DNA, 272 bp, Glycine max
  Clone ID: 701038918H1
cttcttcttccttccttcactcgtatatcacttccttcctcgtttacgttaaccttctaattcaatccattcctcacttccttttcaaccgaagcttttctccgataatcgcagagagaaagaataatggattggggaaacgtaaccgcggaggatctgatcgacgcgctccgcgaggtccgattggtcgtcgccgccgcgcccgctgtcggaattcttctcgattcactgttcccagatcttcctctaaatggaacagccgcctcaaatgt

SEQ ID NO: 1580 - DNA, 265 bp, Glycine max
  unsure (1)..(265): unsure at all n locations; Clone ID: 701038920H1
agagctggaatcacatggacttgtctttctctttctgggtctccattaaatttttcttctctcccttctttctcctctctctctctctgaccattcnnnnnnnnnnnnnnnnnnnnnnnnctctctctctcccctccgccatggctgnggataaggagntgtctacctctgtcatcaatgggaatgattccctaactggtcacatcatatctacaacttggnggcaaaaatggggancccaaacagactattagctacatggcag

SEQ ID NO: 1581 - DNA, 264 bp, Glycine max
  Clone ID: 701038921H1
ttcaagaacttcaagaaatggggagacattgaatttccactgccatttggaagggttatgagtgccaccgagtctttcattcatggattagatgaaaagacaagtgcatccttaaaattcacagtgttgaacccaaagggccgaatttggacaatggtagctgggggaggtgctagtgtcatttatgctgatacggtaggagatcttggctttgcatgagcttggaaactatgctgaatacagtggtgcacccaaagaagagga

SEQ ID NO: 1582 - DNA, 267 bp, Glycine max
  unsure (1)..(267): unsure at all n locations; Clone ID: 701038922H1
ggagtctgtaaagaaaaagtatggaggaatgctgcccaaaaagccaccactcatatctaaggaccatgaacgtgcttacttcgattctgcggattgggcacttggaaagcaaggcggagagaagcctaagggaccacttgaggctcttcggcctaaattacagccaacgcagcagcaaacacgttaccggaaatctccttatgctccttcaggagaagaggggaagtgttccagccgaggatgcaccttccaaccagtaagcngcaa

SEQ ID NO: 1583 - DNA, 268 bp, Glycine max
  unsure (1)..(268): unsure at all n locations; Clone ID: 701038923H1
ctnaaaagcaatcacgcccgaaaacgaaagcntctccctctccccnangcaaacanctgcccttaaccctcnnnnacaagccacccaaacccatccacttcaannnnnnnnnnnnnnntcncctccctctctgacngggattgattctccatggncgagtatctctctctctgtcttnanttttacacatcagtnaaccttatttntaatttcttcttctnttncttnctttcaatttcnttganacagntcngagnnntacccaang

SEQ ID NO: 1584 - DNA, 265 bp, Glycine max
  Clone ID: 701038924H1
agcactttgatcatgcaactgctacgtgataacctcaccctctggacctctgacatgcaggacgatggtgcagatgaaattaaagaagccgcacccaaaggtgacggggaacaaaattaaacataccatactctctgcttattagtcattgaacttcccttctgtaatgttttcaaagggagaaggtgttgaatgctaatctcaatgttactgagattgggcattcgtgttcttcgttatgaattgtggatgtactgggctattt

SEQ ID NO: 1585 - DNA, 265 bp, Glycine max
  unsure (1)..(265): unsure at all n locations; Clone ID: 701038926H1
gtaaaaacctgccatgacagtnataacaatgtctcctttcttatcttactctcttctttccctcgtgttcttcttcactctcaagtaccttttccaaagaagcagaaaagtacgaaacctgccacctggtccgactcctcttcctataatcggcaaccttaacctcgttgaacaacctatacaccgtttcttccaccgcatgtccccananntatggacatcatatccctttggtttgggtcacgtcttgttgtggttgtttcat

SEQ ID NO: 1586 - DNA, 263 bp, Glycine max
  Clone ID: 701038927H1
gaagctctcaaggaagctatccatcttggcctcgtctcccgccaagacctctttgtcacttccaagctttgggtcaccgaaaatcatcctcatcttgtccttcctgctttgcgcaaatcacttaaaactcttcaactagagtacttggacctgtatctcatccactggcccctgagttctcagccagggaagttctcatttccaattgaagtagaatctcttgccttttgacgtgaagggtgtgtgggaatccatggaagagt

SEQ ID NO: 1587 - DNA, 264 bp, Glycine max
  unsure (1)..(264): unsure at all n locations; Clone ID: 701038928H1
caacgatatcagtcttccattcatcaacaaccactctctctcccctctctgcagcaaaaccaattctccggngacatctccggtcaggttccggcagcctctccggcgactcggcatggcaactcaatgaatgcggaatcaccgccggggctcctcatgtcggtttcctgcctctccgactacgacctcctctgcggcgaggactcctccggaatcctccggagagtcgccggagtgctccttctccgacatcgactcctcacc

SEQ ID NO: 1588 - DNA, 264 bp, Glycine max
  unsure (1)..(264): unsure at all n locations; Clone ID: 701038929H1
gagaatacctcaccggantttctgcgcgacgttgtgataagttttattctggcggggcgtgatacgacgtcgtctgctctgagctggtttttcnggattctgtcctccagacccgacgtgcaaagaaaaattcgggacgaaatcgaaacggttagatcggaaaaatcaaagggcgcgtttggatacgaggaggtgaaggagatgcgctacctgcaaggcgatttcggagacgatgaggttgtacccgccagtgccggttgacac

SEQ ID NO: 1589 - DNA, 265 bp, Glycine max
  unsure (1)..(265): unsure at all n locations; Clone ID: 701038930H1
acaaggtcaatgaaactgtcaatgttgtctctcagaagacaacagagattggacaaaggacatggggtatgatgaaaggggtcatggcattggcttcacagaaggttgaggaattcgctagagataacccgaattggacgtctgataactggcaacgaaatgaaagtgatagaanatggtttctaccaggagttcaatcgagagaataatggccggttcttctaccagagaaggacaacattcttcaggtggacaaactaatact

SEQ ID NO: 1590 - DNA, 267 bp, Glycine max
  Clone ID: 701038931H1
gaaagataccagtttttttgttgttttttttcctcaatctcaaccatggaaaagcagaagacactgatgagtttgattctgttgctgttgttatttacttcggatgtgagtgcttggaccggtgaaatccatggaagagttgtttgtgacgtttgtggggattctctcttggacctgaagaccatattcttgaaggtgctgaggttgctgttctttgccaccaagtctggggaagttctaaattatcaggcattcactgatgctaag

SEQ ID NO: 1591 - DNA, 271 bp, Glycine max
  Clone ID: 701038932H1
ccaaaatcacactcctatatatcttcctatagcaatatatatgatgggtgacactgagatcaagccatcagttgaagtagtcgtatgtgcttccatgaacaataataatagcgcaaacaaccacaccctcccaaccgacatcaccaagccatcacaattaccaatcttgaccaggctccatgctggttactttttcatatgcctttcctttggagcacaagttgctctggaagagtttgagtaaacacaacaaggactcacaaagtctctg

SEQ ID NO: 1592 - DNA, 271 bp, Glycine max
  unsure (1)..(271): unsure at all n locations; Clone ID: 701038933H1
ctttggncnttccangctccaaccttagattctttcttgtcagangnagcccttatntnactgcttctgtcanaaagccaacncctctttncatcagnacagtgcactgcgtagtttccttgtcttnngatgattacnacnccaaacncncccttaagcttaacaacactcaggcntggatcatatacncctcctctccaatctacttgaaccatgttccttgaggttncatccaagccattttctggnatcattcgtntagcggctttgc

SEQ ID NO: 1593 - DNA, 266 bp, Glycine max
  Clone ID: 701038934H1
gctgagttgaccaaggaactccagtcagtccaggcacaacttgtggctgagagatcaagatgctttaacttggaggccaaaattgcagaactccagaagttgctggaatcaatgcagtctgtggaagatgaggtacaggctcttcgtgaaaagaaatctgctctggaccaggagatggagctcgctgcaacagctgagaggaaaagttctggttggcgggtttggtgggagtgaaacatgataaatatgtggccatgagggcaaat

SEQ ID NO: 1594 - DNA, 228 bp, Glycine max
  unsure (1)..(228): unsure at all n locations; Clone ID: 701038935H1
caaancttngctctgtttttnaattatnccttgcnttctcttgagttcagatggaagcanctaatggccaccaaaatggttcgttttgcttgtccagtactaagggaagtgatccgttaaactggggagcggcggcggaggcgatgaanggganccacctggacgaggtgaagcgcntggtccgagtaccggangccggtggtccggctcggcggcganacgctcacc

SEQ ID NO: 1595 - DNA, 263 bp, Glycine max
  Clone ID: 701038936H1
ggaatttaatatagtcgtcaaagatccagaatctcaagtcttagagcttactgtttatgactgggagcagattggcaagcatgacaagatgggtatgaatgtcattccattgaaagagattacacctgatgaaccaaaagcggtgactcttaatttactcaagaccatggaccctaatgatcctgagaatgcgaagtcacgtgggcagctaactggaagttctgtacaaaccttttaaggaggatgagttacctcagagtgca

SEQ ID NO: 1596 - DNA, 264 bp, Glycine max
  unsure (1)..(264): unsure at all n locations; Clone ID: 701038937H1
ctttgtttgttccatctcttgcttcttgcttctattacttgcttcnttcttcaccatgtcacttgctgggaaaatcaccactgaaattggggttcatgcaaccgctgcaaagtggttcaacctctttgcaacacaacttcatcatgttcaaaaccttactgatagagtacatggnaccaagctgcatcaaggtgaagactggcatcacaacgagagtcaaacactggncttataccatagatggtaaggctacaacatgtctgg

SEQ ID NO: 1597 - DNA, 263 bp, Glycine max
  unsure (1)..(263): unsure at all n locations; Clone ID: 701038938H1
gaacaaagcacttagtgctattcaataattacgaaaaaccancagcgagtgttgtttttgtttggtccaggctggaccagggaatgaatagagatgagaggctttcggttgaagagaactgagttaagcggcgaaccaaacgcagantcggcggcagaaattgccaccggaagcacgtcgaagagggtgaaccaaacacaaanttccntccaccttctcttttcaatccccaactcanatctgtgaagaaaatctcaatttct

SEQ ID NO: 1598 - DNA, 263 bp, Glycine max
  unsure (1)..(263): unsure at all n locations; Clone ID: 701038939H1
gtgaatgcgtataaaaggaaaataaagaaattagcgccaaaatgttgggtgtgttcagcagctccatagtgtcgccnccggacgagctcgtggccgccggcagccgtactccgtcgccgaagatgacggcggcggcgctgcggaagcggttcgaggagaagaacccctccgccgtgtcggtggaggtcggagagcatgtccagctcgcttataccccacaacgagtcgccgtttcagcccagatcctttgctgtcaaggatga

SEQ ID NO: 1599 - DNA, 263 bp, Glycine max
  unsure (1)..(263): unsure at all n locations; Clone ID: 701038940H1
gcttcttgcaagangtttctgagcttttatatcctctatatatagttctctggcanttaaggtctcatccnnataagcacaaatgggtagccagagttacttcaaggctttgattatttgccttatagcactaattggatcaactcaagctcaattgcagcttggtttctatgccaaaagttntccaaaggctgagcanataattctgcagtncggttgagcatatccacaacgctccatcactagcagctgctctcataaga

SEQ ID NO: 1600 - DNA, 262 bp, Glycine max
  unsure (1)..(262): unsure at all n locations; Clone ID: 701038941H1
ctgatttgatggaaaacgggagtctttatgatcatttattcggtnctgctaagaagaatctcacttggccaattcgtcaaaagattgctctagggaccgctagggggttggcttatttgcactatggagctcaaccttccatcatccatagggatattaaggctagtaacattcttctggaccacaattttgaagccaaggttgcggatttcggtggcaaagttcaaccctgaggggatgactcacatgagtactagagtgg

SEQ ID NO: 1601 - DNA, 264 bp, Glycine max
  unsure (1)..(264): unsure at all n locations; Clone ID: 701038942H1
gncacacgctcatggaggttgnanccgacgnggttgccgtcatcaccatcgtcaacccttcncgtnaattccactttcctttgatgtattgcgcantttaaaggngagttttgatcnggcgatncatagagatgntgtcaangcanttgtngttacaggtgcnaagggaaaattttctggaggttttgatatttctgcatttggtggtnttcaagncnnnnnngcgtccaanacctggttggatatcagtagnnatcatcactg

SEQ ID NO: 1602 - DNA, 264 bp, Glycine max
  unsure (1)..(264): unsure at all n locations; Clone ID: 701038943H1
ctccttcaaaactcatctcgaaaccctaagcactcgctcgggttcgtgtagtgccaaaccctagggctcattttccagatctnttcagtttttctctcctctcttttccgatccaccgttggagatcgaagatggtgtccgacgccagcaagaagaaggccgcacagaagangnnnnnnnnnnnnnnnaagagaggtggcaaagctgccgccgctccgttatggccgccacctcttccnaagccgccgacaaggtcgccaacgg

SEQ ID NO: 1603 - DNA, 241 bp, Glycine max
  unsure (1)..(241): unsure at all n locations; Clone ID: 701038944H1
caaatattctcactcgtcgtcttcngctgcgccctaaccannttcaattcaaactcttctcatcaaaatccaaggctcgttcttgaaaccctaattcgatatcctcctcctcagaagaagaaggatcgatgtgggcagcttcttgcctggcgtcatgctgcgcggcctgcgcatgcgacgcctgcaggnccgttatcgggaatcagccgccgttccgccagatcgcctactgcggcctctt

SEQ ID NO: 1604 - DNA, 262 bp, Glycine max
  unsure (1)..(262): unsure at all n locations; Clone ID: 701038945H1
gcgganatgatgagatagaccttgagttcttggggaacagaacaggacaaccttacattctgcanacaaatgtgttcaccggaggcaagggtgatagagagcaaagaatctatctctggtttgatcccacgaaagantaccacagatactccattctctggaacttgtatcngnttgtgttctttgtggacgaggtgccaatcagggtgttcaaacagcaaggacttgggagtgaaattcccattcgaccagccaatgaagg

SEQ ID NO: 1605 - DNA, 263 bp, Glycine max
  unsure (1)..(263): unsure at all n locations; Clone ID: 701038946H1
gcntgtccnnttctcagagagnacatgcnttggctatagancaactggtacctganttcatcgcactaaggctgantctttgcngttacatgaatgtggaaaagttttggatgatctnttttttgttaatacttccangactaantcagcatgattttgagcgcctatcanctcccaagattgttgaagcnagagatgtgcttcttcagaaactgagagagganaaatttgcaagccggagaacctgaaaaaccnaggnctgt

SEQ ID NO: 1606 - DNA, 269 bp, Glycine max
  unsure (1)..(269): unsure at all n locations; Clone ID: 701038947H1
ccatcgcnaaggaacatgaacggtgcagngagncaggggctgntnatccggtgcggcgggggtgcaccaccatcggccagtantccgntancttcctcgacggntcttccaacggcaancggtggctccaatcggccggccttcaacancttcantcctcctccnnccaacttcctccgcttcaggnctatnacttgtacggaggtgcacagggaggaagagtaccggaatgcgccgaggagctttaacggnggaaatgngttttatnt

SEQ ID NO: 1607 - DNA, 267 bp, Glycine max
  unsure (1)..(267): unsure at all n locations; Clone ID: 701038949H1
aattgcnagaatggcacttcgttgcttggtgatgtccctttctgttctcttcactncttggtcttgcgagaganagccatgccagannncgangatttttggcatgctgtttggccnnacactcccnttccaagttcattgcgagatcttctaaagcctggccctgcaagtgttganntcgatgatcaccctatgcaaattgaagaaacacagtaccaaaaccttcttctataaagnngaccttcatccaggcnaaacaatganagt

SEQ ID NO: 1608 - DNA, 263 bp, Glycine max
  unsure (1)..(263): unsure at all n locations; Clone ID: 701038950H1
ctagttagcttganttctgttattgaaganatctaagttccttaacgaaancacttcacntgtagtagagtagggtanttttgtggtgctttgtttcacgagtaacatctgcaagaagtcttctccttcaccatgccaccaaagcctttagactatgggtcaataaatganaacgtgaagaagagtcaatatgctgtcagaggtgaattatacccgagcttctgagcttcagaaagagggcaaaaagattatatttactantg

SEQ ID NO: 1609 - DNA, 260 bp, Glycine max
  unsure (1)..(260): unsure at all n locations; Clone ID: 701038951H1
cgtcaacagttgcaaattctgtggatagtgacgatgaaaactgttctaatggatcaagaacttcctcttctgatttccttgatcaaaataaggttatgatgttggataagtcaactgccggaatctgtttggntcaaaagttggatgtggagaaagaattaatagagcaggaaatgantttatcttcttcatatgaggagaaaaacgatattaaggcattcaagtggtgttgttggagatgtgaaggaaaatgattcata

SEQ ID NO: 1610 - DNA, 260 bp, Glycine max
  Clone ID: 701038952H1
catgggctctgacaaaatactcccttctcatgtggtcgcaaatggccacgccccacttgattccggccacgcccgtctcaaagaactcggttacaaacaagaactcaagcgtgatctttcggttatttcgaattttgcgttttcgttttctattatatcggtgttgactggagtgaccactctttacaacactgggttgaattatggcggccgtttcgctggtgtatgggtggtttttagcttctgctttcaccatgatc

SEQ ID NO: 1611 - DNA, 235 bp, Glycine max
  unsure (1)..(235): unsure at all n locations; Clone ID: 701038953H1
gagntgcagacctgncctngggttttnttntcattcctcttcccaattccagggtaagctttggntctgccgatccggagcncttacccatcttttcttaatcttcaaggaaccctttgggncactaaagtttccaaattgaagaggaaaaaaanaaaaagnnnttgcccggagnggntgcgnctgngngggnagntttggnncgggnttcgggtgncatntctgngggtggtna

SEQ ID NO: 1612 - DNA, 261 bp, Glycine max
  unsure (1)..(261): unsure at all n locations; Clone ID: 701038954H1
gtaaaacttggcattagggttgtgatttgtggaactattggttgttcggccatagtttcatcaattttttgtnacattttatgaaagacttaaatntgtttttgacccctgatatatatactcganttttgccatantcaattacaaagggcattctatgttttgacaaaactcaagcgtttacgctctatgctagccaagcggatcaatattntcagcagtttctccttcaacccatgttatagattcctgctctaacag

SEQ ID NO: 1613 - DNA, 260 bp, Glycine max
  unsure (1)..(260): unsure at all n locations; Clone ID: 701038955H1
caataccttagcatgaaattcaactttgtgggactacatgttgaagtttgattggtgaacgaggtgcgctaatgccttcttaagttttgcttttctgtcactttccctctgtgttggtttgctctgatcacttttgtctgcattacaacctgagcctcagatctgatctcttgatccacaaaaccatggctgaaaaggtgaccatcatgaaacaaggttgaccttgagtgtgaganatgctacnagaaggttaaganact

SEQ ID NO: 1614 - DNA, 253 bp, Glycine max
  unsure (1)..(253): unsure at all n locations; Clone ID: 701038956H1
gtcctcttccacctcgccttcttctcccaatgccttccctccgcctgggcccactcggcgatcctcctcccgggtcaactcgcccgtgactcaccgcagagctgccccgcccctgaccccaacctctactacaagccagtcatcggaatcgtcagccatcccggcgacggcgcctccggccgcctcagcaacgccaccggcgccttacatcgccgcctcctatgtcanattcgttgaggccgccggcgcccgt

SEQ ID NO: 1615 - DNA, 256 bp, Glycine max
  unsure (1)..(256): unsure at all n locations; Clone ID: 701038957H1
caagtttcaagtttgagccccctttctgtaatccataaccatagctttggttganttgagggatttgattntggntaagtatgaggctgtcaaggatttgggagctgggaattttggggtggctaggctcatgaggaacaaggagaccaaggagcttgttgccatgaaatncatcgagcgtggccaaaanattgatgagaatgtggcnagagattatcaaccacagatccctcggcaccccaatataattcgcttc

SEQ ID NO: 1616 - DNA, 258 bp, Glycine max
  unsure (1)..(258): unsure at all n locations; Clone ID: 701038958H1
gttcgattttgtagtaagtgaggtgccaatatggtgaagatagctcttggtactttggatgactcttttagcgctgcctctcttaaggcttatttcgcagagttccacgcaactctgatttncgtgttcgctggtgttggatcagccatcgcttacaacgagcttacaaaagatgcagccttggatccaacggggctggtggcagtagctggcacatgcatttgcactgtttgtaggtgtctccgtcgccgccaacat

SEQ ID NO: 1617 - DNA, 260 bp, Glycine max
  Clone ID: 701038959H1
cacaaagcaagcgcgtgctgtgaactcttctcccactaacagttccataaccattgttgaagaagaggctagcagtaacagctgcaagaccaagctttttggtgtgtctctccaatccaagaaaagggtgcaccctgatgagtacggatctaactatattcttcaaagctccgaaacgaataataaggcgcgtttggttttggaaaatgatgctattaggcttgaatcttatgcccccttcaacttgttaattagttagt

SEQ ID NO: 1618 - DNA, 259 bp, Glycine max
  Clone ID: 701038960H1
gcaagttcctttttgttttcctattattgggaattcttaactgtgaggcacaatatttcaatgccaacccatacgactatttacaactagccttaaggtggcctaattcctattgcttgacacatgaaggtggttgcagggaaatagtgccacaatattttactattagctaccttcatcccatgagaagaggaggccctgatctgcaaaagcccctcaccatttaatatgccaaatagcactatggagataaacaaga

SEQ ID NO: 1619 - DNA, 161 bp, Glycine max
  Clone ID: 701038961H1
ccaaatggggggccaaggattcttctatttgtagggtagtggcactttcaaagaaggccaaggattctatttgtagggtagtggcactttcaaagagtttctttctcttttaaaaactcgttaatcttttatgtttactgttaacagctcgagattacgaa

SEQ ID NO: 1620 - DNA, 260 bp, Glycine max
  unsure (1)..(260): unsure at all n locations; Clone ID: 701038962H1
cnagggtcttgcatgcccctttgagtttcaagtttcaagtttgagccccctttctgtaatccataaccatagctttggttgagttgagggntttgattatggataagtatgaggctgtcaaggatttgggagctgggaattttggggtggctaggctcatgaggaacaaggagaccaaggagcttgttgccatgaaatacatcgagcgtggaaaagattgatgagaatgtggcaagagagattatcaaccacagatccct

SEQ ID NO: 1621 - DNA, 256 bp, Glycine max
  unsure (1)..(256): unsure at all n locations; Clone ID: 701038963H1
ctttctccttattcttcattagatcctcagttcccaatcgaccctccatttntgtgaactgagatggctggaggtgttattcggcagttatttaggaggaaactccaatctcattctcctaattcttcttttaagtcattcattatcacaaagaaagatggtgctgactctattggcaacaactccttaagagtgcttgcattagttagctggtgtctcagggtttctaggttttgcnacaacagcatttgctgat

SEQ ID NO: 1622 - DNA, 266 bp, Glycine max
  unsure (1)..(266): unsure at all n locations; Clone ID: 701038964H1
gttgtgttgcactgtcactgttacagttgttggtgtaaaggaacagcggtgggtgagtgagagagggangaaacatggctacggcgtcggcgtcggcgtcgtgggaggaactgacgctgaaagtgaaatggagcggcaacgaatacaccgtccgcgtctgctgcgacgacaccgtgggcgaactcaaacgtcgaatctgcgagctaaccaacgtctncccttcgccagaagctcttgtaccctaaactcgcttccaaactcagcga

SEQ ID NO: 1623 - DNA, 260 bp, Glycine max
  Clone ID: 701038966H1
ccggatcacagggaaaataaaaaacaatggagttggacttgacaccaaagacagcagaagtgttgtttgagggagatggtggaggttactacacttggtggagttctaaagtgccactgctggccaagaccaatgttggtgctggtcggttagtgcttcagcctcagggctttgctattcctcattattcagatatatccaaagtaggttatgcttcaagggaacgatggcgtactgggatggccctccgcaacagtact

SEQ ID NO: 1624 - DNA, 259 bp, Glycine max
  unsure (1)..(259): unsure at all n locations; Clone ID: 701038967H1
gtttgtgtagtagtgactttnggttgggttncntctcaactcaacaaacgtcgtcgttctgcattttcccaaccttcctccaatggcttctgcttccttaatcaactcgttgacttgttcttcgcgtgctcccactcagcactgttccactttcacccgcaccaccgccgccacgtcactgagacaatttaacagccactgtcggagaccacgcgacgaggatctcgccgccttccaccgttgtctgcaaagctgtctc

SEQ ID NO: 1625 - DNA, 258 bp, Glycine max
  unsure (1)..(258): unsure at all n locations; Clone ID: 701038968H1
cttcaacggtaaatccctctctgcacttcgtctctgttagggattaatcattattttccgcgcaccaaacagccngagtcaattttcttctctcttctaagacacaccaatgccagagaagaagaacaagaaagtttctttcaccgaagaagatgctgttacgctcatgcagaggtacgacgcaactacggtgttcactttacttcaggntggcgcattaccctcaccccaagattgattggtgcgagttggtgaaga

SEQ ID NO: 1626 - DNA, 258 bp, Glycine max
  unsure (1)..(258): unsure at all n locations; Clone ID: 701038969H1
ttgtcccttcttctcaagatctcattgcatttccctccctttacaggggagatagantttagatagtgcaaganaagcgtaatctccaagttctcatcttttttgttcccttttgttttcagagatatacataggccccagaagaacaaattgctacaacctattttgatttgagatctgtctgtctctttggtttcacttcagggctcagtgaggaatgcgaagaaaatggggaggaaaggaaatagttggttttct

SEQ ID NO: 1627 - DNA, 261 bp, Glycine max
  unsure (1)..(261): unsure at all n locations; Clone ID: 701038970H1
gnaagcttccactctacccgtttacccaacccctcttcccaaaacctctaatttctctcttcatctccttccaatggcttccattcccacactctcttcatccctacctacactctctgctcactccttatcccattcaaaccccaacaaccactgcactctccctcccacatctctcttcggcaccaggntcaccctcctacgcgccaccttcgtctcattccctccccaacaccaattgccgtgcaacctcagccaccg

SEQ ID NO: 1628 - DNA, 257 bp, Glycine max
  unsure (1)..(257): unsure at all n locations; Clone ID: 701038971H1
gcgttctatatattattgnnttgacaatgaggcctgctcttgctttgcttcctcttctatttgcnttcttgaagttagctgccactacagaatcaagaaaagatacaggggaatattggaaaatgatcatgaaagatcaggaaatgccagaaggacttcaaggtcttgtttcatttcaatctgaaaataaccctaagactcaagagcagtggtaaaggttccaaaaaccattgtgaagagtctctagttacaaatac

SEQ ID NO: 1629 - DNA, 259 bp, Glycine max
  unsure (1)..(259): unsure at all n locations; Clone ID: 701038972H1
ggcatgaggcttagagatgaacccatttaaagaatctacctaccaacctaagagactggacccaaggccttagctttaggtcagttagatgatatgtttgcatcatgttatccgtagcttcaactttctgtaacttcttgtataggcaaaggtttcaaaccttcaatctatccttctcttgcttttgccaaaatgttatggtgaatagggagaaaaagatggaaaaaaatgtgactgtttcntgtactgatattgtaaa

SEQ ID NO: 1630 - DNA, 256 bp, Glycine max
  unsure (1)..(256): unsure at all n locations; Clone ID: 701038973H1
cagatacaatgcgttgatcagaagggcttgtgttatgacattatgaggatttctaaagactctgatattaaggttgcttttggtcgattttcttcaagtgtgaaaggctttcggaatattgacttgtttgtccagcacaacgatgggaaaaagatcatagatcctgaaagccagaaaaccttgtgttcatgcttaaaagaagagatgcnatccgttgcgggtgacgatagtgaaccggggtccagacacagaactt

SEQ ID NO: 1631 - DNA, 255 bp, Glycine max
  Clone ID: 701038974H1
cggagcatggcagatctcaagtccacattcttgaacgtctattctgttctcaaatctgaactcctccacgaccctgcttttgagttctccgatgatgctcgtaattgggtcgaccggatgctggactacaatgtgccgggaggaaagttgaaccggggactgtcagtaattgatagctacagattgttaaaagaaggacaggcattaagatgacgaaatttttcatgccagtgctcttggttggtgtattgaatg

SEQ ID NO: 1632 - DNA, 258 bp, Glycine max
  unsure (1)..(258): unsure at all n locations; Clone ID: 701038975H1
ctttctccctcagctccttccaaaatgaagttccaagttatagagnctctctttggtaaaagcaccccaaaacaaatgatcccaaaagtgactttgcttgcagtgtttgccgtactgttattcactgtcacaccactttcctaccctttgtttagatactcttcttcatcatcatctttgaagagcaataagcaattatccaaganaccnatcagcatttgatgatctgaatgagtcagcaagcttgccttcaacttt

SEQ ID NO: 1633 - DNA, 258 bp, Glycine max
  Clone ID: 701038976H1
gaagggtgagctaaagtcaattttccttcctttcctttccactagtcacataatcccgctagtggacatggccagactcttcgccttgcacgacgtcgacgtcaccatcatcaccaccgcacataacgccaccgttttccaaaagtccatcgatttagatgcgagtcgcggtcgccccatcagaacgcacgttgtcaacttccccgccgcaagtgggtctccccgttgggatcgaagccttcaacgtcgatacgcctc

SEQ ID NO: 1634 - DNA, 257 bp, Glycine max
  unsure (1)..(257): unsure at all n locations; Clone ID: 701038977H1
ganagantagaaatgactcaagtgatgagaggagaggtgattgananggcttatgctgggtcttggaaggctcacaagtccccagacaagccttaccttattgaaaagatcaacagaaacgaccctcaagaagttatcttttgctttccaggatcaggtgctgtcagggattggtactctcagaaaaactttggtgaaacaaaaatagattggtctgtttccctcactcagaagcnttggtatcgatgaacaagctt

SEQ ID NO: 1635 - DNA, 259 bp, Glycine max
  unsure (1)..(259): unsure at all n locations; Clone ID: 701038978H1
ttcacattcagaatgcagagaggcacgccagtnagaaagccacacaccaacacctccgatctcctcacttggtcggaaactcctccgccagaatccgccgccaccgtcgcctccgccacccgctctggccagccttccgatagaatcagcaaggttctccatggcggccagctcaccgacgaagaagctcagncgctagccaagagcaaactgctcagggtataaaatgaaagaaatgactggaagtggtatattttct

SEQ ID NO: 1636 - DNA, 261 bp, Glycine max
  unsure (1)..(261): unsure at all n locations; Clone ID: 701038979H1
ctcaaaccgatggtaccagaatgtccatagcttctttctacaaccctggtgatgatgctgtcatttctcctgcaccagccttggtgaaggaattagatgagacaagccaagtgtacccaaaatttgtgtttgatgattacatgaagctctatgctggtctcaagtttcaggctaaagagccaaggtttgaagctatgaaggccaatgcaagcngttgatgtgggggccatagccacagtttgagtctcagggctctcagca

SEQ ID NO: 1637 - DNA, 262 bp, Glycine max
  unsure (1)..(262): unsure at all n locations; Clone ID: 701038980H1
ctttgttttctgatctatggcttccaaggagttctctggtctttgctccttggctccttcactatctgagagcnttttgtgcactactgggttgaaaatgtatatgctggagagcaaaggaggtgccatagcntgcangttcttgtctcttttcttcttggggacatggcctgctcttttgactatgttagagaggcgtggtcgtcttcctcaatacctaccttgattactcaatcaccantttcttggctgctttactcat

SEQ ID NO: 1638 - DNA, 259 bp, Glycine max
  Clone ID: 701038982H1
ggtttgttttcggcctttgatcttcgattctctctctttttctctcgcgaaaaccgtatcagcaatgtctggagaatcagccagcgctattcacaagggtcaagtcgatctcttagacttcattgactggtctggggttgaatgcctcaatcaaagctccacccactctctccccaatgctatcaaacagggttatagagaagacgatggtgcatctggagagtgatgcagacgagcagcttttgctctatattccttt

SEQ ID NO: 1639 - DNA, 258 bp, Glycine max
  Clone ID: 701038983H1
gcttgctatagggtttaggttaaatactttgagagtagtctggttattcagctctcacaaatactagtagaaacaaaaaccgcggaagcagccatggccgaagcagaacacaacgatcccacctcgccggagcgcgaggaccaaaccaaaagcaacaaaaagaagctccgaaagagaaaaagacctcaaaagaccgagcagaaacaagaaggagaagaacgatgcgaacattgatagcgcccaaacacaaactgaaga

SEQ ID NO: 1640 - DNA, 255 bp, Glycine max
  Clone ID: 701038984H1
ttggttcttctttgtcagcttcttctctttcttgtacttcacatattatggaatgatgactgtgtccatcacaccaaaccaccaagtggcatcaatctttgcagcagcattctatggactctttaatctcttctctggtttctttatcccaagaccggtgagtaccattctagtttcgttattatattgaaacaaacatatcttacaatctttactaacataactcttctaccaactttggcttttcagaaaatt

SEQ ID NO: 1641 - DNA, 256 bp, Glycine max
  Clone ID: 701038985H1
tgaattaaggtggtgttggcatacgctgaatctgagttagaaaagcaggtggacgcgtttactgagtcagcattcaaggggaaccctgcatctgtgtgtttcttagaggaagagagagatgaggagtggctgcaagcagtagccgctgaattcaatatctctgagacttgttacttatcacgcatcacccactcgctccatggaatctaatccccgttttcgtctcagatggtttactcctgttgctgaggttaaa

SEQ ID NO: 1642 - DNA, 258 bp, Glycine max
  unsure (1)..(258): unsure at all n locations; Clone ID: 701038986H1
cagccaagtaagctacaccagtgaggaacagaaaacctgagcaaaaaacaaaacaaancagtaagctaagcttcactgccatgcctgcaacgccattctcgtgttcgttcctcactcttcaaccgcgcttcaactcctacgttaaccccatcttccgttcactcaccttccaactctcttcttcgccgctcccattgttcactaggaaagggagaagaaattaaggatcagctttattgttttgaagatcgaggcaat

SEQ ID NO: 1643 - DNA, 255 bp, Glycine max
  Clone ID: 701038987H1
ctcaagccaaccatgtcttccttcaagagcaagtaccaagatgaactcattgccaatgctgcttacattggcaccccagggaagggtatccttgctgctgatgagtcaactggtacaattggcaagcgattggccagcattaatgtcgagaatgttgaagcaaataggcgtgctcttcgtgaactcctattcaccacacctggtgcttgagtgcctcagtggtgtgatcttgtttgaggaaaccctataccaaaa

SEQ ID NO: 1644 - DNA, 255 bp, Glycine max
  unsure (1)..(255): unsure at all n locations; Clone ID: 701038988H1
aaggattttgctgtggaactggaggaactggcagagctagttcttgacttgctgtgtgagaatcttgggctagagaaagggtatctgaagaaggtgttctatggatcaaagggcccaaattttggtaccanagttagcaactaccctccttgtccgaagccagagctgataaaggggctcagagctcacacagatgctggtggcatctctactcttccaagatcacaaggtcagtggattacagctcctcaaaga

SEQ ID NO: 1645 - DNA, 246 bp, Glycine max
  Clone ID: 701038989H1
gtaagcaatgaatctgatggacagcatgaccaggaaaactgcgatcaagttgtctctgtcaatgatcaggagaatgaaagggttccttctgattctagccagaagcattgtgatgttgatatgggtgttgtttcatcatctattagtgaaggtagcatggaaatcgagttgacaacttccacagtatcaatcgatgccgacctgtcaataattcagtttcacaagttgtttcagaaaataatagtt

SEQ ID NO: 1646 - DNA, 255 bp, Glycine max
  Clone ID: 701038990H1
cgagtatttaattcattccattggcagtagtagcaacgtcgttgtgtggcggtgacaaccatgggccgactcatctcaagaccttgaccaacttctcgatagtgctttggatgattttcagtccttcaacctcaatcctccccctccaagtggggaagcaactgcgaatagcaagaaggagagtccttctttgccgtcgggggttcaaattgggcatgggtttacccgatttgagaacgaagaaaaaggggaaac

SEQ ID NO: 1647 - DNA, 257 bp, Glycine max
  unsure (1)..(257): unsure at all n locations; Clone ID: 701038991H1
cactaagaccctacgcgcacatcttgcaactccaatcgacatagcagcaatgtnctacgctcgaaattgaagctcgagatgtcatcaagattgtgcttcagttttgcaaagaaaattcgttgcatcagacttttcagatgctgcagaacgaatgccaggtttctctgaacaccgttgacagcattgagacctttgttgctgatattaattggaaggtgggatgcaatattgcctcaagtttctcaactcaagcttcc

SEQ ID NO: 1648 - DNA, 256 bp, Glycine max
  unsure (1)..(256): unsure at all n locations; Clone ID: 701038992H1
gggaattgcaaagaacaggcagatgctagactctggnaaatttaatcttagagatctttncgcnnaggnnggncaccacangtnnannnttgggtctaataactttnccagagtctagcatctgcntgtncttcanagttattagacccaaggannacttgtggtgtccacntgggcaaaagatctctaagattaaatttgnaaganacgangacanatggaacttgtggaaacttcagagaaggaagttgtnatg

SEQ ID NO: 1649 - DNA, 257 bp, Glycine max
  Clone ID: 701038993H1
gcagcagccatccgttttgaggttgtaagaattgccggtgagtgattacaatggctcctgctaaggcggacaatgccaaaaaggctgatcccaaagctcaggctttgaagacagcaaaggctgtcaaatcaggtggccaagtgtttaagaagaaagctaaaaagatcaggacatctgttacatttcacaggccaaggacattgaagaaaaaggaaccctaagtaccctcgtattagtgctccacccagaaacaagtt

SEQ ID NO: 1650 - DNA, 260 bp, Glycine max
  unsure (1)..(260): unsure at all n locations; Clone ID: 701038994H1
aatccgagtgacactcctcactttgnggccatgggcttcactgaggtgcctccacttcaacccaccctcatcttcatcgcggttcagcgcttctcgccatttcgaaccgctgcttcaaccattcctcctgctgaaccggactctctccgtaaaccctcctcgaaccgctcctccacgcgccatggccaagcccagtttctcaactgcccaagctagtggcttctcctggcngattttgaatttgcgnncctntgaaaatt

SEQ ID NO: 1651 - DNA, 260 bp, Glycine max
  unsure (1)..(260): unsure at all n locations; Clone ID: 701038995H1
tgaagatatattatggcattctctatcttcaaacatgttctgtcgttattccttctttgcnttttgcttgcangaacctaccaatgcccttagaaagacctacattgtgtacatgggaggacattctcatggtccagaccctttgcctagtgatcttgaaacagccacaaattcccatcatgatttactcgcttcttacttaggaagtcacgaaggccaaggaagcaattatatactcgtacaataagtacatcnatggt

SEQ ID NO: 1652 - DNA, 264 bp, Glycine max
  unsure (1)..(264): unsure at all n locations; Clone ID: 701038996H1
ctaggacatgggtgatactccaaagcgttcaaacctttcacgaagaatagcatccttggtcaggttccgcgagaacacgcaaggaaagatgttttgacaagaaaattaggtattccgtcaganaagaggtagcacagaggatgcatcggaagaatgggcagtttgcttccttgaaggaaagcccaggttcatctaatncggattctgcacagagctggtcaagttggcacttctcattctgaatctgtacgtagatgtcaccat

SEQ ID NO: 1653 - DNA, 276 bp, Glycine max
  unsure (1)..(276): unsure at all n locations; Clone ID: 701039001H1
gaaaggccctttgancccccgtttccggggtgaacatgcactccgacgatatccaacaggagaggaacgctgcattgcttgcaaactttgtgaagctatatgtcctgcacaagcaatcacaattgaggctgaggagcgagaagatggaagccgcaggacaactcggtatgatattgacatgaccaagtgcatttattgtggattttgtcaagaggcatgccctgttgatgcgattgttgaagggccaaactttgaatttgctacagagactcatga

SEQ ID NO: 1654 - DNA, 195 bp, Glycine max
  Clone ID: 701039002H1
cgaagtcaccatgccttcgttattttctcttttggtttcttccagccatttagtgtgttaaactaaattgattagcgttgttggatgagttaccatagaatttgttatctatggtcttgtaatgcatttattgttacactgcatgattttgaagattagtgccgtcatgattttattaatgtttcaattttactt

SEQ ID NO: 1655 - DNA, 267 bp, Glycine max
  Clone ID: 701039004H1
tggaaaggcgttttagagtggaaaatggcaggaagcagcattaacagaggagaaagatggtctctcaatggaatgactgctcttgtcaccggcggcactcgtgggatcgggcactccatagtgagtgacttggctgcgtttggcgctgcagtgcacacctgttccaggacccaaacagagctcaacaaatgcttacaagagtggcagagtcaggggtttcaggtaactgggtcgctctgtgacgtgtcctcaccaccccagagagag

SEQ ID NO: 1656 - DNA, 265 bp, Glycine max
  unsure (1)..(265): unsure at all n locations; Clone ID: 701039005H1
tgccacttggatttgatttgtgtgcgcttataagaatagccaactaaggtggggcatggctacacccattctacactcgcctccttccaaaaccgcaccctccacacacctcttcctctttcgccccctcagattcaaaagacctgtccccccgctgaaagntcgatggcggagaccaacaacaacgttgccgtcgaggtccttganaaagaggatcttgccgtgtccctggccaaatacgtcgccgatctctccaacaaattca

SEQ ID NO: 1657 - DNA, 255 bp, Glycine max
  Clone ID: 701039006H1
cctatcttatcttaacattgtttcttggagttgattgaaatggcagtgcaacctgaaattgagcatcccaggaaggcctatggatgggcagctagggatacatctggtgttctctcccctttttggttctctagaaggaaaacaggggagaaagacgtgacatttaaagtgttgtattgtggagtatgccactcggaccttcacaagttgaaaaatgaatggagtgattccatctatccccttgtccctggccgt

SEQ ID NO: 1658 - DNA, 267 bp, Glycine max
  Clone ID: 701039007H1
gtaattaaagtggtgtgactattgagttctatgaaatgatgccaccaacaaccacacccactcattgattcatttggttccctcactttccccacttcctttgtctccatataaacccttcaccctgtgacccttttcccactcccaaacccctctcttcattccaattttggcaccacaccatgccaaccctcaaccatgtcctcacattcacattcttccttctcctctcttgccattgccacctcctcaatggccaagaggaca

SEQ ID NO: 1659 - DNA, 267 bp, Glycine max
  Clone ID: 701039008H1
cagctgtctgctgttagatctgtacccgcctagccattgatttggaaaagtccaacttcaaggatgagtaagcttcagagtgatgctctaagagaagctatctcaggaatcatggctgattccaaggaaaagaacaggaaatttgtggagaccattgaactccaaattgggttgaaaaattatgatccccagaaggacaagcgtttcagtggctctgttaagttgcctcatattcctcgccccaagatgaagatttgtatgcttgga

SEQ ID NO: 1660 - DNA, 264 bp, Glycine max
  Clone ID: 701039010H1
caacaaacttgattcaaccaaggacagagaacaaaagtctgccgggtcttattattaccttgatgactgagttcatactttggggctgttctttcaccaacacaaccttgcatctgtttgagcttttcatgggatctcagatttggttcagttcatgccttgaaatataagattgccatttttgccgatgaaagcatctttctcaatgaatagaggagcctgcatgcaattgcaagccctatgttggttggtgcattttgtata

SEQ ID NO: 1661 - DNA, 263 bp, Glycine max
  Clone ID: 701039011H1
cacaatacaagctggaggagtggacatattaattaagttactgacaactgggcagtctagcactttagccaatgtgtgctttttacttgcttgtatgatgatggaggatgcatctgtttgttcaaagttgttgacagcagagacaacaaaacaactcctcaaacttttaggccctggtaatgatgcccctgtcagggctgaggcagctggtgctcttaaatctctatctgcccagtgcaaagatgcaaggaaagagatagcca

SEQ ID NO: 1662 - DNA, 262 bp, Glycine max
  Clone ID: 701039012H1
gggtgcagaagcaaatggcggcgagaagcaattgaaatttctgatctacggtcgcagcggttggattggtggtctactgggtaagctctgcgaagagcgcgggatccaatatgagtacggcaccggcagattggagaaccggtcgtcgttggaggcggacatagcggctgtgaagcccagccacgtgttcaacgccgcgggtgtcacgggtagacccaatgtggactggtgcgaatctcacaaagttgaaaccatccgaacc

SEQ ID NO: 1663 - DNA, 260 bp, Glycine max
  unsure (1)..(260): unsure at all n locations; Clone ID: 701039013H1
tggagctgtatatttcctggaagcaagaaagtgagcaacaagacaaaggaagtggtgaactctactatatcaagcaatgcaggggagaagttgaggttcaaaacctttaacagcatcaaaataagtgcaattggcaacattttgcacattttattggctgcatatctccctactttgttgttagtcctttatgaggtgctaataattcaattttttgtncttttggaattttgaatttcatagagttaaggatgaggtca

SEQ ID NO: 1664 - DNA, 262 bp, Glycine max
  Clone ID: 701039014H1
tgactaagtcccaatatttgttgttgaacaaagcctatttccagtgaccaagcctcatctgttgttgaacaaaggctctttgtgtgagcatttggcagcaccagaaagaggaaaatggtggctagtgaagacatatatggtggggaggaagtttctcttgtccaaccagaccctgtggggttgcagattgatcgtttgcaaaaccaactcacagaaaaggttaaggaactggcaacttgccagagtgaaatcaaggccttaa

SEQ ID NO: 1665 - DNA, 267 bp, Glycine max
  unsure (1)..(267): unsure at all n locations; Clone ID: 701039015H1
ccctaaccaagttttaagtttttctcaacagaatggaagcaaccaacagaagctcttcctccactncctcttcctactgattgctgctccttccgagtccaaccccaacaagcccgacagaatcaaaggcccatggagcgccgaagaggatcggatcctgaccggactcgtcgaacgatacggcccacgaaattggtccctcatcagccgctacattaagggaaggtccggcaagtcatgccggctccgatggtgcaatcagcttag

SEQ ID NO: 1666 - DNA, 267 bp, Glycine max
  Clone ID: 701039016H1
aaaatacaagatgaagagcaagttcctttttgttttcctattattgggaattcttaactgtgaggcacaatatttcaatgccaacccatacgactatttacaactagccttaaggtggcctaattcctattgcttgacacatgaaggtggttgcagggaaatagtgccacaatattttactattagctaccttcatcccatgagaagaggaggccctgatctgcaaaattgcccctcaccatttaatatgccaaatagcactatgga

SEQ ID NO: 1667 - DNA, 99 bp, Glycine max
  unsure (1)..(99): unsure at all n locations; Clone ID: 701039018H1
ttaagaaaattagaagtgttganttaanttgcaattnacnaaaatattcgatacacgattcttcaaattgcaattnagacaattagaagtnttgattta

SEQ ID NO: 1668 - DNA, 266 bp, Glycine max
  Clone ID: 701039019H1
gtgattcatcacagcatattgtctctgaaattcagaaatgacatctgcaatgccaaggtgttggtggtgatgcattgccatcttacatgcgtggagctgtgtattgggaacccaacaagcctctcaccatcgaggaatttaacatgcctcgccccaaggccggtgaagttctcatcaaaaccaaagcctgtggagtatgccactctgatctacatgttatgaaaggtgaaattccgttttccagtccttgtgttgtggggcatgag

SEQ ID NO: 1669 - DNA, 268 bp, Glycine max
  unsure (1)..(268): unsure at all n locations; Clone ID: 701039020H1
ctcctcttcttctacttttcattcttctctctctctaaaccacgcctagagagagaacctcgccgccggcatccctgccggcgatgacatgaccgccggttccctcatcccttcctagacctttgatgcgccgatcgcatgcccgcactcgcagcgccgcctccaatctcaacaacaacaacgaaacaatggatccgatcaaaaccaaaacccgctcnaacaacctcttctctcgtaaccctaagccctcgnaatcgaggtccctccg

SEQ ID NO: 1670 - DNA, 262 bp, Glycine max
  unsure (1)..(262): unsure at all n locations; Clone ID: 701039021H1
cactttcattctctcttaaaaatctaaatccctttncgccttcatctncgcctctncnnccaggtatggtcttnnntatgcatcctganggnnntcaangatttncagaaggatcctcctacgtcatgcagcgcaggtcctgtggctgaagacatgtttcactggcaagccacaatcatgggacctgctgatagcccatatgcaggtggtgttttcttagtttcaattcattttcctcctgactatcccttcaagccaccaa

SEQ ID NO: 1671 - DNA, 267 bp, Glycine max
  Clone ID: 701039023H1
cttccttgctcaaaaaaaataaagagagaatagtactccaatcaacataccccatcactgtttgattaggaattcgggttgcacacctactccttctactttccaacaccgctgtctctgtctttctagtcacagttgggtgggttggtaccaaaggtgaggcagaggagactcagaaagagatggctgaacacggaagagttatggcaaactgtgtatatgctcccaatccctaccatgaatgcacggaggcttgcgtgcaaagaa

SEQ ID NO: 1672 - DNA, 265 bp, Glycine max
  unsure (1)..(265): unsure at all n locations; Clone ID: 701039025H1
cttcctcaccgattgctagantggaatttcgatgctcagtcanctcttttaccattctcttctctcttgctncttgcaggagagagccatgtccatgcatcgctacctgaggaagattattgggaagctgtttggccaaacactcccattcccactgcactgcgagancttctaaagcctctccctgcaggtactgaaatcgatgaactccctaagcaaattgatgatacacagtacccaaaaacattcttctataaagaagacc

SEQ ID NO: 1673 - DNA, 262 bp, Glycine max
  Clone ID: 701039026H1
gccgtcattgatcaggtttttggtgagaaagcttttgagaaatttggaaaaggtttaatttcattgcatttctccgaccagcaccctggtatacacaaaaagatattgttgttcaagtttgtgcttccagctgctaaggacatggctgatatgactcgactggtggctcttgttccgtattatattgacttgatcggacgatacaaattaagttctcaggctcggtctaaaacagaggctgcacgacaaaaggctgctctag

SEQ ID NO: 1674 - DNA, 264 bp, Glycine max
  unsure (1)..(264): unsure at all n locations; Clone ID: 701039027H1
gttcgcgactaatgttacgattctcaccttttctcgctactccccctactccttcttccctctctttctcctccaactgccacgtgtcctcttccgctcaagcaacnnnnnnnnnnnnnnnnnnnnnnnnnncccttccgcaaagctcacagctggtggcattggaatatgctgacctcaacctctcttacaacttggatctngntcacgtcaggntanngcagcatgttaatcccctannctccttctttntnggttnntcaa

SEQ ID NO: 1675 - DNA, 260 bp, Glycine max
  Clone ID: 701039028H1
agcaaagttactcacaggtcaagttgttgctgttaaaaggctcaacatattagactctgacgacattcccgctgtgaaccgccagagctttcagaatgagataagatctcttacaggagtgaggcaccgcaatataatcaagctttttgggttctgtacttggaggggacaaatgttcttggtttatgaacatgtagacagaggaagtttggcaaaagtattgtatggagaggaagggaaattgaagctaagttgggcta

SEQ ID NO: 1676 - DNA, 263 bp, Glycine max
  Clone ID: 701039029H1
agggatttcggccgtttgctccccaaaaaggaaagaagcagattccgtcctttgaaatcaacaagaaaagatgtcaggtgaagaggtagctgttgcagttgaggtacctgctacttcaattccaggtgagccaatggacatcatgactgctctacagcttgtgctgagaaaatctctggcctatggtcgtcttgcacgaggtcttcatgaaggtgccaaggtgatcgagaagcatgctgcacagctctgtgttctagcagaag

SEQ ID NO: 1677 - DNA, 259 bp, Glycine max
  Clone ID: 701039030H1
ggagattttggtttagctaaacttatggattataaagatactcatgtcactactgctgtaacgtggaacaattggacatatagcaccagagtacctctcaactggaaagtcttcagagaagactgatgtttttggatatggtgtgatgcttcttgaactaataactggacaaagggctttgatctagctcgacttgccaatgatgatgatgtcatgttgctcgattgggttaaaggacttctcaaagacaggaaattgg

SEQ ID NO: 1678 - DNA, 259 bp, Glycine max
  Clone ID: 701039031H1
aaaaattaaaatctacttttgtcaggagagcctctgaattcttgagaaattattttgctagtttggtggacttcatgataagtgataaaagttacttttctcagcggggacagttaaagaggcctgatcatgctgacctgcggtacaagtgcaggacatatgcacgtcttctgcaacatttgaagagtcttgacaagaattgtttgggtccattgaggaaagcttattgcagttctctaaacttgcttcttcgcagaga

SEQ ID NO: 1679 - DNA, 266 bp, Glycine max
  unsure (1)..(266): unsure at all n locations; Clone ID: 701039032H1
cagattcggatagccgagcttgtatagccgaagcgggagcnnttccggttttngttcggttccttaatgcggagaatccgagcctgcaggttaacgccgtcacgacgattttnaacatgtcaatattggaagcgaataagactaagataatggagactgacggcgcgttaaacggcatcgccgaggttttgatatcgggtgccacgtgggaggccaaggcgaacgcggcagcnacggtgtttagtttgtccggtgtggcggcgcac

SEQ ID NO: 1680 - DNA, 268 bp, Glycine max
  unsure (1)..(268): unsure at all n locations; Clone ID: 701039034H1
gtctccggtgagggaaaagtagtagaagagaagatgtcgaccgtaccaggacagctcatctgggagatcgtgaagaagaacaactcctttttggtgaaagagttcggaaggngcactcagagcgtgcagttcagcagagagcccaacaatctctacaacctcaacactttcaagtactccggtttggcgaaccagaaaactgtcactgttcaacctgctggtaaagaccagtccgtgttgctcgcaacaaccaagacaaagaagcaaa

SEQ ID NO: 1681 - DNA, 266 bp, Glycine max
  unsure (1)..(266): unsure at all n locations; Clone ID: 701039035H1
cttcgacgaagctgagacccttttggttgaagctcttaacaangatgccagggatccagaaactctagaccaatctagttgtatgctgtcttcatctcggcaaaccatctaacaaatcattcagccagctgaaactttctcacccagagcatgtattggtcaaacgggtatcatcagctgaagaaagttttgatagagcgctacaatcattttcctcatgagtgtcgatgattgaatttctttcaagagttgaatggtgtgaggtc

SEQ ID NO: 1682 - DNA, 265 bp, Glycine max
  unsure (1)..(265): unsure at all n locations; Clone ID: 701039036H1
ggccgattgaganagaaagagaaatgggagaacgaaaaggaatcccaatggctttggggcttcttngcgatgatcctcttcttcattgcttcctcttcctctcacctcgttcgcgcttccggtgacgccgacgacgcgatcttctacgagtcgttcgacgaggattttgatggacggtggattgtatccgacaaggaggattacaatggtgtctggaagcatgccaagagtgatgggcatgatgattatggacttcttgttagtg

SEQ ID NO: 1683 - DNA, 261 bp, Glycine max
  Clone ID: 701039037H1
ttccccaagcattagaagatgagtatggtggctttttaagtccgcgcatagtgaaagatttccgagactatgcggaactttgcttcagggaatttggtgatagggtaaagtattgggttacattgaatgagccatggagttacagccaaaatggctatgcaaatgggcgaatggcacctggtcgttgttctgcttggatgaatctgaattgcactggaggtgattcttcaacggagccttatttggttacacatcaccaac

SEQ ID NO: 1684 - DNA, 263 bp, Glycine max
  Clone ID: 701039039H1
gtgaaatcgaaaagggctcttcgttgaatttggactcaaggaatacaacatcctgatatttggaggacagattaaagagaaacatcgtggaggaaacaatggcagcaaggtattggtgtcacatgtgctctcaaatggtcaatcccatcatggatatggaaatcagatgcccgttttgccaaagtggatttgttgaagaaatgggtaacacccccagtagcagcagcattcccaatacatcagaatctgattttgaatctgat

SEQ ID NO: 1685 - DNA, 265 bp, Glycine max
  unsure (1)..(265): unsure at all n locations; Clone ID: 701039040H1
atgccttccantaattaccttgatgtttcctcaaataaatncactgggatgcgtttcaataacatgtcatgcaatgntgatcctccactttgtnaatttgtcttcaaatctnctgaaaggtgaacttcccacttgtttagaaccaaagaccagggttgttctgtatgctagaaactgcttatcanacaagaaccaagatcagcaccctncagatttctgcagcaatgaggctttggcagtgacaatcataccccatcagcagaag

SEQ ID NO: 1686 - DNA, 262 bp, Glycine max
  Clone ID: 701039041H1
aaagcctactcattctgcttcggaatgttctgatgatgaaaactctgttataggcagagaggaagggctggaatgcccaatatgctgggaatctttcaatattgttgaaaatgtgccctatgttttatggtgtggccacaccctttgtaaaaattgtatcctcggactgcagtgggctgttgtgaaatttccaacactgcctgttcaacttcccctttttatctcctgtccatggtgcaaccttctgtctttccgtttagtt

SEQ ID NO: 1687 - DNA, 261 bp, Glycine max
  Clone ID: 701039042H1
atactccatcaagaaatgctgcgatttttcatcatccaacacttggtgattttgaattgcagcatttacccatgggtgtgaatgaggccgatattgaagagcgaataattcaacatttgactgctgcagccgcaatgaggagatctcatcacctcagccggagggaaggccatcgaactaggccatctgctcatggccgtccacacttcttagtatactcaactcagcctagtgcaccaccatcagctgcaggagggggaa

SEQ ID NO: 1688 - DNA, 261 bp, Glycine max
  unsure (1)..(261): unsure at all n locations; Clone ID: 701039043H1
aaaaaaaattgttttcgtgtggaaacaaaaaaacaattcaaaaacaaacatatgatggtgaagccgagtagcgaaaagccagaggagcatagggattccaantactacaaaggggtccgaaagagaaaatggggcaaatgggtatccgaaataagactacccaacagccgtcagaggatttggttgggatccttcgacacccccgagaaggccgcgcgtgccttcgacgccgcaatgttctgcttacgtggccgcaacgcc

SEQ ID NO: 1689 - DNA, 250 bp, Glycine max
  Clone ID: 701039044H1
gtttttgctgccaattcccttcccttgcatgacaagtttcaatatttccaatttcaagattccaaaaccccttattattatttgtttatttttatctcttttgtactttgttctctgtagagtaccagatctttgcattccctggttataattccgaggctggtttcttgttaggaccgttaacttcttctcatggctcatcgctacgatagtaaccccttcgacgaagaagaagtcaatcccttctctg

SEQ ID NO: 1690 - DNA, 257 bp, Glycine max
  unsure (1)..(257): unsure at all n locations; Clone ID: 701039045H1
aaataccatcaaaccatgatgagttgtgaanaaccgggatggagtttaacaggtagtatgatggttataaagcaantgaggaagtggtgccctaagttttgtatgctagagcttanacaaatataatattgggggaggtgagggagaggctagaaactgattcgacttgggattgataatctctctggttgtccgagtttgcaacattctaatatgcttatcccattgcacatttttcctttattgaactcaattac

SEQ ID NO: 1691 - DNA, 258 bp, Glycine max
  Clone ID: 701039046H1
ggggatttatcaatcgttcactattttcttgaatgattatcactctccaagggtaattttttagagtagagacaagtcagtcttctatgttcggtggcaaagcttgtatgctttgtctctagaacattatggtttagttttgcgatccagcatttcgacacgatgataattgggagaaggggatatagtgatatcttgtataattagtgttttgaactgctacgagttcgtaaaatgtattgcccctttgatttctca

SEQ ID NO: 1692 - DNA, 261 bp, Glycine max
  unsure (1)..(261): unsure at all n locations; Clone ID: 701039047H1
attcttgggagataacagtgaggaatatactcctagtctaccaaagattatttttgctcaggctactggagggntcattgctggtgctactgcatcctgcattacaaacccattggatactatcaagacacgattacaggtgctgggacttgaaaagaaaatccctgtaaaacaagttgttaaagatttgatcgctgaggatggttggaaaggtgtatatagaggattaggtccaagacttttcagcacgtcagcatgggg

SEQ ID NO: 1693 - DNA, 264 bp, Glycine max
  Clone ID: 701039048H1
aagccgcagtgaaccaaaccatcatcatcgcgttaccggaataatcgacccatcattcaattagatcgaaatgaaggatgaggacgggcttccgacgacgaccgcggttacaaagaaggaaaacttggattcgagtctgtttggaaaaggcaggtacaaattctgggcgttagggccatcttgcttctggcgttctggtccatgttcaccggtaccgtctcgctccgctggtccggcactctcaattccctttccaacgacatc

SEQ ID NO: 1694 - DNA, 266 bp, Glycine max
  unsure (1)..(266): unsure at all n locations; Clone ID: 701039049H1
tcgtatatngnncnntattannnngtaaggataatccccgatgttcccagtgaagctgctgactaaaaccattcagggattatccttaccaaataatagctcctcttcgtgatcattggtcgtatattggaattttcattggtataatagggttatttcttaattgcatttacaggcccgtgttcaatattttgttttacccgaacaaactaatccgtaggagcagtttcaaaattcctttttagtggcttaaagtagattggtaa

SEQ ID NO: 1695 - DNA, 263 bp, Glycine max
  Clone ID: 701039050H1
aattacagagcattttccaacacgattacacgaccgaatcaaacccctctttctctccgaagctgcttttaatatcgtactggccttcgattgttctcctctttaatacatactgttctctcttcgatttgagggaacagtacaagagtctgagcatcggttaacccaactgcacaggtagtctccaaataatggagcctcatgatgagactggatgccaggctcctgaacgccccattctttgcattaataattgtggcttc

SEQ ID NO: 1696 - DNA, 262 bp, Glycine max
  Clone ID: 701039051H1
aaagggaggagccaagaggcacaggaaggtgcttcgtgacaacatccagggtatcaccaaacccgcaattcggcgtttggctcgcagaggtggtgttaagagaatcagtggtctcatctacgaggagacacgtggcgtcctcaagatcttcctcgagaacgttattcgcgacgctgttacctacaccgagcacgctagaagaaagaccgttaccgctatggatgttgtttatgctctcaagaggcagggcaggactctctac

SEQ ID NO: 1697 - DNA, 215 bp, Glycine max
  Clone ID: 701039052H1
atctgtgacgagcatcatggcctcgagagcagtgctattgttggctatgtgtgtgcttccggccatggttgtggccattcgcccagcaaagaaccctttttgcgtgaagggtcgcgtctactgtgacccttgccgtgctggttttgagacctcagcaaccacctacattgccggtgctgagattatgttgcaatgcaagagcagggttagcaacg

SEQ ID NO: 1698 - DNA, 262 bp, Glycine max
  Clone ID: 701039053H1
aaaataactgcatacatcttccatccaactatatatcaaaacactctatggcgaggtgtgaatccgtttccacgacaatgcccctgaatgcaaaaatattaatagcacttatattccttgcattcgcaatcacggctaccacttcaactcgaatgcttgatgaaatagaaacaccagaagaacccaacagtgctgccgaatcccctgttgtctctccacttccacttgttgcagaatccccagttgcggaagtcaaaggagt

SEQ ID NO: 1699 - DNA, 260 bp, Glycine max
  unsure (1)..(260): unsure at all n locations; Clone ID: 701039054H1
ccaatcgtagccgtcgcactttgcgttttctgcgtcatctccgattccccgacaatggccanccnaatgagcaaccagagaaagttcgtagctgatggagtgttcttcgctgaactgaacgaggttctgacaagggagttagccgaggacggatactccggcgtggaagttagggttacgccgatgcgcaccgaaatcatcatcagagccaccagaacccaagccgttctcggtgagaagggaaggagaatcagggaact

SEQ ID NO: 1700 - DNA, 261 bp, Glycine max
  unsure (1)..(261): unsure at all n locations; Clone ID: 701039055H1
ggagtngtaggagcccttacaccttgcagagtcatctcaacattcccaagggctcctactacgcaataacgccaagctcgatctcaaattaatatatcatttattcctcttaatcaaatattaaataagaaaagatgggagagatgtcaaacttccaattgggtgtgattggtgcactatttctctcggtggcttcttctgtctccattgtcatctgcaacaaagccttgatgagcaatcttggcttccctttcgccacaa

SEQ ID NO: 1701 - DNA, 258 bp, Glycine max
  Clone ID: 701039058H1
gacggaacaccattttgcttaaactccattgatcttatagagagtacaacagtcgcccaatcaagcttcagcaaatttgccatgactatccctgagatcaaatctggcagtggcatatttgcattcaacttgacatggaatgatataaaaatcttgaccccctcaatattgaacccttttgcaaaatacagattgttcaggaatccaagatctaagaatgctgggacattgttggcattatcagatttcttgtccttg

SEQ ID NO: 1702 - DNA, 257 bp, Glycine max
  Clone ID: 701039060H1
gttgctccttcgccacaactccctgccaacatgggtatctccagagattctatgcacaagaggcgtgccactggtggcaagaagaaggcatggaggaagaagagaaagtatgagcttggtcgccagcctgctaacactaagctgtcaagcaacaagacagtcaggaggatccgggttagaggtggaaatgtgaagtggagggcactgagattggatactggaaattactcctggggaagtgaagctgtaactcgcaa

SEQ ID NO: 1703 - DNA, 257 bp, Glycine max
  unsure (1)..(257): unsure at all n locations; Clone ID: 701039061H1
ctgggtcctgaccagcccgtgatcctccacatgcttgacattcctccagcagcagagtcgttgaatggggttannatggaattggtggatgctgcattccctcttcttaaaggtgttgttgctacaaccgatgtggttgaggcatgcactggggtcaatattgcagtgatggttggtggattccctagaaaagaaggtatggagaggaaggatgtgatgactaagaacgtctccatttacaagtcccaggcttctgc

SEQ ID NO: 1704 - DNA, 258 bp, Glycine max
  unsure (1)..(258): unsure at all n locations; Clone ID: 701039062H1
gtccgaactgcaaatcctacaatacacgacaaacatgaggctgagcaagtggccacgattattcattggtttcgtcaaangccttcacttgagttctcttgatgttgttgtgattcgtgaaggcagtgaaaatgcatgtgtgtccattgggtacgtggatgtgcacgtgggaatttgaatttggagtgcacgatgagccacattcaaagggatagaataaaggttctttttcttatatgttgatttggagtggggtag

SEQ ID NO: 1705 - DNA, 261 bp, Glycine max
  unsure (1)..(261): unsure at all n locations; Clone ID: 701039063H1
cagnaattanaatcnacttttgtcagngagagcctctgaattcttganaaattattttgctagtttggtggacttncatgntaagtgatanaagtnactnttntcagcggggacagttaaagangcctgntcatgctnacctgcggtannngngnaggacatatgcacgtctctgcaacatttgaagagtcttganaagaattgtctgggtcccntgannnnagcttattgcagttctctaaacttgcttcttcgcagaga

SEQ ID NO: 1706 - DNA, 263 bp, Glycine max
  Clone ID: 701039066H1
aagatattcctcaacgtaatccaatattcctatctaatagctaccaagctattattctgtcataagaaaaagaaacacacaaaagagaaacaagttgttagccacagcaaaagtcgatgcttactagtcttagttaggcctcagcgtcagttcatgaaaacttttgcttttataggaattttgctcagggaggattcttgttgtattgttgctgatagcctagaggtggaagttttagtctttggttggaactagttgttggc

SEQ ID NO: 1707 - DNA, 261 bp, Glycine max
  Clone ID: 701039067H1
aagattgcttgggttgatcattttagtccttgatagttgatattgtgttagtctttgattttataaagtgacactcatttagtgtcaaatgatagtagaaaataaagtaaaaaataaaaaaaccctgtaaagtgagagactaatagaggatatttaaagtcttagggattaaaaatgtagtagtactatgattctacaatctcgaggattgatgtgaagatttattccatttaattctcttgcacacttatctcgttggaa

SEQ ID NO: 1708 - DNA, 259 bp, Glycine max
  Clone ID: 701039068H1
tttttatgaatatctcttccttgaagtcagcttatattgagcttcaagctgctcatactccctacgaccctgataaaattcacactgctgataaacttgttattagtgagctgaaaaatctgtctgaactcaagcatttctacagggagaacaacccaaaaccagtgtgtgtttctccccaagactcacgtttagctgcagaaattcaagaacaacagagccttctgaaaacttatgaggtcatggtgaagaagttcca

SEQ ID NO: 1709 - DNA, 221 bp, Glycine max
  Clone ID: 701039069H1
gcagcgtccaggtgcatccccttcctccgtcaaacccacgcccatttcattcttctcaattcccaattccaaattagggttagggttttcacaatctcaatgaccttctcttcttccttcaccttacaatccctattccactaccgctactactactccctttgtcttcgtcgttgtcgttcgtaaggattaatcaattaacctatcgaatcgtttcagta

SEQ ID NO: 1710 - DNA, 259 bp, Glycine max
  unsure (1)..(259): unsure at all n locations; Clone ID: 701039070H1
atttgcctcatgactactacccctgttgttcaacgcatttcagaatgcttcgtcaaaccacatggtttaacccaantgtcaaaccaaatatgtcatttaacacaatgggatattgttatgttgtctatgcactatatccagaagggtctactcttcaagaaacccacacctcttgttgatcaacatgatttcatagagaatctcttggagaagctcaaacactctctttctctcactctctcccatttctatcctttgg

SEQ ID NO: 1711 - DNA, 259 bp, Glycine max
  Clone ID: 701039071H1
ctccccttgctgcggttgctccaccacctaatcacttcccctgtaaatcaagtttagttcgcacaaggttttaaaaaatggctgatgctgaggacattcaacctcttgttgttgataatggaactggaatggtcaaggctggttttgcaggtgatgacgctcctagggccgtgttccccagtattattgggcgaccacgccataccggtgtaatggttgggatgggtcagaaggatgcttacgtgggtgatgaagctca

SEQ ID NO: 1712 - DNA, 260 bp, Glycine max
  unsure (1)..(260): unsure at all n locations; Clone ID: 701039072H1
atttcgtataacatttcatttcacttcacttagggtggtgcattngcaaccctttaatttcctcacaaaaatggaggcacgtagtttgtactcactagtgtttcttgtgcttgctttggctattgtgaacaaagtgcatgggcaagggacgcgtgtagggttctattcgagtacatgcccacgcgctgagtccattgttaagtccacagttacaacccatgttaattctgatagtactttggctgctgggttgcttcgga

SEQ ID NO: 1713 - DNA, 256 bp, Glycine max
  unsure (1)..(256): unsure at all n locations; Clone ID: 701039074H1
tttctcttcgagggtttggntttctcttcctcccttggagaannagaagagccaccgctgcgacgccgttcgtgcatttttgaggtgccgctgtcatgtttgggcgtggtggaccaaggaggagtgataactccaaatattatgatattctcgggatttccaaaaatgccagtgaagatgaaatcaagaaggcctatagaaaggcggctatgaagaaccatccagataagggaggagatcctgaaaagtttaagga

SEQ ID NO: 1714 - DNA, 256 bp, Glycine max
  unsure (1)..(256): unsure at all n locations; Clone ID: 701039075H1
cgagcatcgaagctcacgaattgaattgaattgagtttctttgtctccagagatgaagaagggcgtccatccacagaagcaatggatatcctacgttacacaaacgggtaggttgatgcatgtgatgatgacaaagatacaccctgttggnaaagtttaccacttccgagctaagcgccaaatggccgagagtttaggacagattgctaagttcagacgtcgctttgggctagaaaatccagagggcaatgaaaaa

SEQ ID NO: 1715 - DNA, 257 bp, Glycine max
  Clone ID: 701039076H1
gcggaatcagctagaattttctaataatggccaaagacgttgagcaggttacagagcaaggtgaatacttccgcgaaggattaccatgacccacctccggcgccgttgatcgacccagatgagctcactaagtggtccttgtacagagccgccatagctgagttcatagcaacactccttttcctttacatcaccgtgttgaccattattggctacaagagacagagtgacaccaaaatccccggtaacaccgagtg

SEQ ID NO: 1716 - DNA, 257 bp, Glycine max
  unsure (1)..(257): unsure at all n locations; Clone ID: 701039078H1
cccacgcacgcgcccttccaagccgaagcctactgaaactggcttntgttgtgccgtttagcttcttcttcaccatattctccttcttttctcagattcagcagtaactatgaatcgcgttgcattgcccaaatccattgcccagcgtttcagaggcatccaccacagcccgcggaaccagtggtgtaataacaaccgttgcgaaacgcaggtccaaagtgctgggcccgtggcttctctcctcaagtcccgttccg

SEQ ID NO: 1717 - DNA, 256 bp, Glycine max
  Clone ID: 701039079H1
aacaaatggctatatattcatccatgctgaaggtggtctaaatcagcaaagaattgcgatatgcaatgcagtggctgtggcaaaaatattaaatgccactcttattttgcctgttttgaagcaggaccagatttggaaagaccaaacgaaatttgaagacatttttgatgtggatcacttcattgactacctgaagtatgatgttcgtattgtccgtgatatcccagaatggtttaccgataaatcagagctattt

SEQ ID NO: 1718 - DNA, 260 bp, Glycine max
  unsure (1)..(260): unsure at all n locations; Clone ID: 701039080H1
gcaaaatgcaacaaattcagaggcctcaaaccgagagaatacgctgccttgaaggactgcgctgaagaaatcagtgacagcgtcgaccggctcagccgtcgctgaaggaactcaaattgtgtaaggtgaagggtgaggacttcacgtggcacatcagcaacgttgagacgtgggtgagttcggctttgaccgntgagagcacttgcggcgatgggttcgccgggaaggcgctgaatgggaagattaaggaggcgattagg

SEQ ID NO: 1719 - DNA, 263 bp, Glycine max
  Clone ID: 701039081H1
tgtttccagaatagaatagatggctgcaattgtgtgccagtcaagattacacagacttatgttggcatccccaaaacctcctcctcaacaacccttcaagtcttgttgcttctgggaagaatccaattatgctaaaccacattatgacgatgaagacaattacaaagccgacgacaccccaacagattggagctccattcaagctctttcaagtactgtgactgtgagcaactctatatatgaggtgaaacaatcatcatcgc

SEQ ID NO: 1720 - DNA, 260 bp, Glycine max
  Clone ID: 701039082H1
ctcaatttacgtctatttatttttttgttagttttgagaaggccccttgaacaagcaaaattaagcacaaaagcccaaccctctctctcgctgttggtctctcctatttggcattcgcagatcgattacgaagtaatttcactgaatcttattgaagatgtttctcacaaggactgagtatgaccgaggagtcaacaccttttctcctgaaggccgtttatttcaggttgaatatgcaatcgaagccatcaagctgggat

SEQ ID NO: 1721 - DNA, 259 bp, Glycine max
  Clone ID: 701039083H1
ctcttccctctgccgccgcaccctgcaaattcaatggcttcagagaagaaactatcgaacccaatgagggaaataaaggtgcagaaactcgtcctcaatatctccgttggtgagagtggagatcgtctcaccagagccgccaaggtgttggaacagcttagtggccaaaccccagtgttttccaaagcaaggtacactgttcggtcctttgggattagaagaaatgagaagattgcatgctatgtcactgttagaggtg

SEQ ID NO: 1722 - DNA, 258 bp, Glycine max
  unsure (1)..(258): unsure at all n locations; Clone ID: 701039084H1
gcaggagccattactctccnccaccgccatgacggttgcaagcnccgcctcttcacgcaccaagaggctcgtcaagctaacgctctcgctcctccgcctcggcttcaactcctccaaatgcaaaacggcagcgaagatggcggtggcgaggatcaagctgctgcggaacaagagagaggtggtcgtgaggcagatgcgacgcgacattgcccttcttctccagtctgntcangacgccaccgctcgcatcagggttga

SEQ ID NO: 1723 - DNA, 257 bp, Glycine max
  unsure (1)..(257): unsure at all n locations; Clone ID: 701039085H1
aattaataacaagctagctattagttcgattttgtagtaagtgaggtgccaatatggtgaagatagctcttggtactttggatgactcttttagcgctgcctctcttaaggcttatttcgcagagttccacgcaactctgatttncgtgttcgctggtgttggatcagccatcgcttacaacgagcttacaaaagatgcagccttggatccaacggggctggtggcagtagctgtggcacatgcatttgcactgttt

SEQ ID NO: 1724 - DNA, 220 bp, Glycine max
  unsure (1)..(220): unsure at all n locations; Clone ID: 701039087H1
agagcgtcgtcgtttagttagggcagaaaaccccttttcggatcggtggagcgaancttcgccggcgagacccccgaggctgttcaatcggcgatcgagcaacggcgaaaagcgacgaagatgaaggttttcgtgaagactctcaagggcacgcacttcgaaattgaagtgaacccttcggacacgctttctgaagtgaagaaaaatatagaaactgttc

SEQ ID NO: 1725 - DNA, 258 bp, Glycine max
  Clone ID: 701039088H1
aaatattaatagcacttatattccttgcattcgcaatcacggctaccacttcaactcgaatccttgatgaaatagaaacaccagaagaacccaacagtgctgccgaatcccctgttgtctctccacttccacttgttgcagaatccccagttgcggaagtcaaaggagttgaccaacaacatcacacgctctcatttttcatgcacgacattctgggaggctccaaccccacggccagagctgtaacaggcgtggtga

SEQ ID NO: 1726 - DNA, 254 bp, Glycine max
  Clone ID: 701039091H1
cccctttactcgtgatagccacaaactcgctgcttattttgatttgaactttgaagttttgttattttgtgcaatggcagccaagagcaaaatcctagtccttggaggaacaggatacattggaaaattcatagttaaggcaagcgcagaagcaggacaccccacttttgccttagttagagagagcaccctttctcatcctgaaaaatctaaacttattgagagcttcaagacctccggagttactcttcttt

SEQ ID NO: 1727 - DNA, 250 bp, Glycine max
  unsure (1)..(250): unsure at all n locations; Clone ID: 701039092H1
tgctcctcaatttcatcagaagtcaactgctggtggcgccgttgttgatttgccttctcctgattcagtttctaggtattctcgatttcaatttctctatctggttttntctttgaattgttctgattgtaaatnttaatgttaagattggattgtctatttcattagtatgtngaatcatgttattacttatcgggtctggttatgagtgtatagggttagtaagggatttggttcttggcgatggttt

SEQ ID NO: 1728 - DNA, 253 bp, Glycine max
  unsure (1)..(253): unsure at all n locations; Clone ID: 701039093H1
ccgacttgcaaaatatttacctgactcctcatctgatggtatgtctatctgttttnttcgttatttaaattgtntgtgtatatgatatttaggacttatttatttgtngtntttagtccattaaacattcattttagcctgatttctcctttagatttatttggtgataacttttaaaaatgttgatagaagggaaaaaggccgacaagaaagaaacaggggatatgctttccaatcttgatggttcatcgtg

SEQ ID NO: 1729 - DNA, 257 bp, Glycine max
  Clone ID: 701039094H1
ctttcaattatccaacagaactgaagatatcgtagctggaaacgtctagcacccacaaatgggtaactcccatggacaccggcatcgcaaacacggtaactccgttcctcccaacacggttcctccctccctataaatacaatcctcacccaaccacctccaattccaccatgctttctcttccttacacccacgtcgacaccaccctccgctccctcgccgcccaagccgagggcttcggtcgcttcgctatcggc

SEQ ID NO: 1730 - DNA, 257 bp, Glycine max
  unsure (1)..(257): unsure at all n locations; Clone ID: 701039095H1
tttccggcaanaagcgacccntgccgtcgaattccgcgacggatttaaancgatcgcattcggaggttggngatgcttgatgaagggttgctcgcaggtttngcagaagcttatgaaacacaaacangggtggatcttcaacgctcccgttgatgttgttgggttgcaacttaccgattactacgatgtaattaagcaacccatggatctgggaacggtgaagtccaatctttccatgaacaagtacacgncgccct

SEQ ID NO: 1731 - DNA, 258 bp, Glycine max
  unsure (1)..(258): unsure at all n locations; Clone ID: 701039096H1
ggggttttncaatcccaaatccaaaaatccttgtctcagagatgatctaattctaaagaataaatgcatatactacatgtctattgcattgaatgttgtcctaagagtggcttgggtggagactataatgcacctcaaagtggggcctgttcaaactaggctactagactttttgttggcttcactagaggttattcgacgagggcattggaatttctacaggttggagaatgagcatctaaacaacgtgggtcattt

SEQ ID NO: 1732 - DNA, 284 bp, Glycine max
  unsure (1)..(284): unsure at all n locations; Clone ID: 701039101H1
gcaggggcataagtggtagttaacagcaagagagaggaaagcagaatgaagaaggcaagggcgttgagcgtggcagtgaacgtgttgtgtttggccatagtttgcagtgcgatcgagtcaccgcaacacacagtagtacactccgagtccgatttcgagatcaggctctatcgtacctctgtttggatgtccgctcctgccctcgacatttccttcgaaaaagccacctggaatggcttccacaggttgttccagttccacagaaggtgccaattganttctct

SEQ ID NO: 1733 - DNA, 280 bp, Glycine max
  Clone ID: 701039102H1
cttgctggcactaatggagaaaccaccactcagggtctagatggccttggtcagcgttgcgccaagtactatgaagccggtgcacgttttgccaagtggcgtgctgtgctgaagattggtcccaacgagccatctgagctggctatccatgagaatgcctatggcttggccagatacgctgtcatatgccaggagaatggcctggttcccattgttgagcctgagatccttgttgatggatctcatgacattcacaagtgtgctgccgtcaccgagcgtg

SEQ ID NO: 1734 - DNA, 279 bp, Glycine max
  unsure (1)..(279): unsure at all n locations; Clone ID: 701039103H1
gagtttgaaaatggtacttgtgctatggtcaagagggactaagaacatggacttcctaaccctcttcactcttctactcttgttattcattcatacagcactctcttctacccaatatcatgatnggaacatcttactcactcatcgtaagatcttccccaaacaggaagctatcacctcgtacgctgtcatctttgatgctggtagcactggtagccgtgtgcatgtcttccatttcgaccagaacttggatctccttcgtattggcaacgaactcga

SEQ ID NO: 1735 - DNA, 278 bp, Glycine max
  unsure (1)..(278): unsure at all n locations; Clone ID: 701039104H1
gacgattcanatcttagggtttcttcttcttttctttctgtggagccccattgaccatagccgccagccaganagagaagagaagccttcgatcgtaggttttcttaccctcctttctcccaaatcgggcctttccgcttctcgattcgcttccgcagctgagcgatctggaaaacccagaaaagaaccaaccgaacgttttatatgttncggataatcaatcaattgaagatgtctcgttgcttccctttnccccctcctgggtatagggcacgtgg

SEQ ID NO: 1736 - DNA, 276 bp, Glycine max
  Clone ID: 701039105H1
aaggcaatgaatctgatgcaggcggttcgctacgacgcctacgggggaggtcctgccggcctcaagcacgttgaagttggcgttcccagtccaaaggcaaatgaggttttaatcaaactggaagcagttagcattaaccccattgattggaagattcagaagggtcttctccgtcctttatttctccccagaacctttccccacataccttgcactgatgtggctggagaaatagttgagatcggaactcaagtcaaagatttcaaagttggcgac

SEQ ID NO: 1737 - DNA, 274 bp, Glycine max
  Clone ID: 701039106H1
ctggtggaggagtagagattggaggaccaggaaaaagggctcatctttacgagcacaagttcagttggtatttcgtctatacatgcttcgttggggcccttggcggttctctctttggctatgatctcggtgtttcaggtggggtgacttcaatggatgatttcctgaaggaattcttcccaaaggtttacagaaggaagcagatgcatctgcatgaaacagactattgtaaatatgacgaccaagtgctgacactgtttacatcatctcttta

SEQ ID NO: 1738 - DNA, 232 bp, Glycine max
  Clone ID: 701039109H1
cttcaattcttctccaatcccaaccgcaccctcttccgtccctttcttcacacttccttcaaaccacttccttcgtctttctctttccgaacagatcacactatggccacctcaaacgccaaatcagtccatgatttcaccgttaaagatgccaagggaaatgatattaaccttggtgactacaaaggaaaggtccttatcattgtcaatgttgcctcacaatgtggcttga

SEQ ID NO: 1739 - DNA, 233 bp, Glycine max
  unsure (1)..(233): unsure at all n locations; Clone ID: 701039110H1
ctcagctgtgtgatgattcatttctaaacccacnattctccttgtttccattgctgcttcattgttttttaagcaattccgagcattgatcaaatgggttttggttcacttccaattttctgaaacagcgtactctcaaaaaaaatatctgatcacattttctacttctgcaaattctgcatttttttccctctctttctttctggggtgtctgcagaacaagggatctcaca

SEQ ID NO: 1740 - DNA, 267 bp, Glycine max
  Clone ID: 701039111H1
gaaaactcctccaccgtggctccggcaacactctacaaagctctgacaaaagatgctgacactatcatcccaaagattattggggccatccaaactattgaaatcgttgaaggaaatggaggacccggaaccgtcaagaagataacagctagtgaaggtgaccaaaccagtttcgtgctgcaaaaagtggatgcattgacgaggctaacttggtatacgactacagcatagtgggagggacggggttgcatgaaagtttggagaagg

SEQ ID NO: 1741 - DNA, 266 bp, Glycine max
  unsure (1)..(266): unsure at all n locations; Clone ID: 701039112H1
gatatatagaaaaacaaaggaganaagataganatggagaagtttccagttgttgacatggggaaccttaataatgaagagagatcagcaaccatggagataatcaaagatgcctgtnagaactggggtttctttgagttggtgaaccatgggatatccatagagttgatggacaccgtggagaggatgacaaaagagcactacaaaaagtgtatggagcaaaggttcaaagaatggtagcaagcnaaggtttggagtctgctcat

SEQ ID NO: 1742 - DNA, 268 bp, Glycine max
  unsure (1)..(268): unsure at all n locations; Clone ID: 701039113H1
ggctaatctctcactcttgttcttcggtctcctcctattctccgctgccgtagccaccgtcgaacgaattcgacgatgaagacaaccttctgatccgtcaagtggtgccggacgcggaggaccaccacctgctcaacgcggagcaccacttctccgccttcaagacaaagttcgccaagacctacgccacgcaggaggagcacgaccaccgctttccgtatcttcaagaacaattgctccgcgccaagtcgcaccaganttggaccct

SEQ ID NO: 1743 - DNA, 270 bp, Glycine max
  unsure (1)..(270): unsure at all n locations; Clone ID: 701039114H1
ctctctcgttttttctcaaaaagttgcaagagttaaagcaaaaaccaaagtgagagagaaaatgatgaagccatcgatgctcagatctcttcactctgccgccacccgcggcgcctcccacctctcccgccgtggctacgcctccgagccggtgccggagcgcaaggtggccgttctaggtgccgccggcgggatcgggcnacccctctccttcttcatgaagtcaaaccccctcgtttncagcntctccctctaagnatatggcggnaa

SEQ ID NO: 1744 - DNA, 270 bp, Glycine max
  unsure (1)..(270): unsure at all n locations; Clone ID: 701039115H1
gcgctatgatggttggagttggaacctccgtcttctttcgatgaattcgaggaaatccttttatacttaattaacacttaacaaacacacaatctcattttgtttctcttcaatccaaacgcattcacattcacattcaatcaatgatggctcagcttctccacactcccttcatccgcttcntcctcctccgcgctccgccgcgccgccaccattccccaccgcaaaacgancttcgcctcgtcgttcgggccaagatccgggagattt

SEQ ID NO: 1745 - DNA, 273 bp, Glycine max
  unsure (1)..(273): unsure at all n locations; Clone ID: 701039116H1
ctgcnantttgaacttcttttctctattattattatctttctctttttcttcatctcttatcttccttcacctttttattgncaagannaaaaaantgagcaacataagcntggtagnggcaaagctggccaccaggattcaggtttcatccangagatgaagagcttgtgtgtgattacttgatgangaaggtgcaacanaangnttcccttctcttgatagatgtggaccttagnaagtgtgagccatgggntattcctgaaacagcatgt

SEQ ID NO: 1746 - DNA, 280 bp, Glycine max
  unsure (1)..(280): unsure at all n locations; Clone ID: 701039117H1
ggaaatgttgcagccttcatatctgaagccatacagggagtggggggtatcattgaattggctcctggttacttgccagttgtgtacaatgccattaaaaaagcaggaggactttttattgctgatgaggttcaggctggctttggtcgcactggtagccatttctggggatttgaggcccacaactnngttcctgacatagtcacaatagctaagggcattggaaatggcattccccttggtgctgttgtaactactccagagattgcagaggtcttaa

SEQ ID NO: 1747 - DNA, 264 bp, Glycine max
  unsure (1)..(264): unsure at all n locations; Clone ID: 701039118H1
cagnaagacagagtgagacgcttactcacgatggagggancgagtatcctacgcgcgcatnccctcgggtcaaaatccgcgagctgaaggacgactacgccaagttcgancctccgcganaccgacgcgagcatcgccaacgcgctgcggcgcgtgatgatcgcggaggtgccgacggtcgccatcgacctcgtggagatcgaggtcaactcctcggtgctcaatgacgagtttatcgctcacaggctgggcctcatccccctc

SEQ ID NO: 1748 - DNA, 275 bp, Glycine max
  unsure (1)..(275): unsure at all n locations; Clone ID: 701039120H1
gttaagtgtaccaagttaataggtctttatatttagttgttgacatcaacaaagtcatggaggaagttaatgtggttcaaaccaagaatggaactgttgcagtagcttctgcgtttgctggacataaggnagctatacagcaaagggaccacaaatttttaagaattgctgttgaagaagcctataaaggggtagactgtgaagatgggggtccctttggtgctattatagtatgtaatgatgaaatagttgctcgatgtcacaacatggttctg

SEQ ID NO: 1749 - DNA, 274 bp, Glycine max
  Clone ID: 701039121H1
gcggaaaacgttgttgagttcacagacttacccgtcaagaggccaagagaagaagaagaaggaaccaatggcgtctccaacgacgccgtttcagcgctccccaatgaccctcaataccctggcatctctgcggttattcccggttggttctccgaaatcagcccaatgtggcccggggaggcacattccttgaagatggaaaagattttgtttcaagggaagtctgactatcagaatgtcatggtcttccagtcatcaacatatggcaaagttc

SEQ ID NO: 1750 - DNA, 272 bp, Glycine max
  Clone ID: 701039122H1
agtggtgtcctaaagaaagaccatctttctcttttctgtatcaccgttggaagagactgagatgggttcaaaaaccaagacttttacctttgaagaggtggctaaacacaatcacaggaaggattgttggattatagtcaaagggaaggtgtatgatgtcaccccatttttggatgatcatccaggaggtgatgaagttttagtgactgcaacagagaaggatgccaccactgattttgaagatattggccacagtgattcagcaacacaga

SEQ ID NO: 1751 - DNA, 273 bp, Glycine max
  Clone ID: 701039123H1
caacactctcaccaggcgtgggtacgcagcagcgacacaaagcgcaacaagaggaggagctgcctccatcagcagcaagatagctcccaagtcaggggaagacaaggtaggaggaggtgctgaaaaggtttcgtgggtcccagaccctgtcactggttactacaaaccggagaacatcaaagagattgatgttgctgagctgagagccacggttttgggcaaaaaattcaaccactagctcgctagctagttaatttcaataacctttttggt

SEQ ID NO: 1752 - DNA, 271 bp, Glycine max
  unsure (1)..(271): unsure at all n locations; Clone ID: 701039124H1
gcatcgcagtatgtttattgcctcaagaaattgggacttgatcccagaaaggtcaatgtcaatggtggtgccattgctcttggacatcctttgggcgttacaggtgcacgttgtgttgcnactttgttgaatgagatgaaacgcggtggcaaggattgtcgctttggtgtaatctcaatgtgcatanggtcaggtatgggagctgctgctgtatttganaggggggacttttaaagatttgtgcaagtttagaatagttcataaaaatnac

SEQ ID NO: 1753 - DNA, 270 bp, Glycine max
  unsure (1)..(270): unsure at all n locations; Clone ID: 701039125H1
ctgataccaaatatagaagccaaaattgtgaacccagaaacaggggaagccatgtttcccggtgaacaaggagaactctggatcagaggaccttatgttatgaaaggttattctggtgacccaaaagcaacttcagcaactttggtggangggtggttaaggactggggacctctgttattttgatagcaaaggtttcttgtatgttgtagataggttgaaagagttgattaaatacaagggctaccaggttgctccggcagagctagaa

SEQ ID NO: 1754 - DNA, 233 bp, Glycine max
  unsure (1)..(233): unsure at all n locations; Clone ID: 701039127H1
aatcatgcantctcttnctantcttcttctttctatcataacataactatgatatcaacaccatataataattaatagcaataanttngtaatactctcttcagtgncaattccatcttcacttcacttcacttnctctgttctgtngaatantcaatcattcgcaaaacgcatactntgctctnnattctcagnttttnncttgcntnggtaattctcggttttccantcnc

SEQ ID NO: 1755 - DNA, 274 bp, Glycine max
  unsure (1)..(274): unsure at all n locations; Clone ID: 701039128H1
gcaatttggcattgctctttcnntccctttgtcccctctgtcctcgtgcgcttcctnccctgcaatttcgctcttacggttcgcacctgcaatacctgtctctctcaacnaaaccttacagatcttcttcccaacnatcantntttntcangaagngggcgttngtattggnccagaaatcagatgagtcatncattgnatttgctctctnctcttctcctggttgangttagttagcaacnaaagantnacagactgaatgtgaatnatggnt

SEQ ID NO: 1756 - DNA, 265 bp, Glycine max
  unsure (1)..(265): unsure at all n locations; Clone ID: 701039129H1
cgagaggagaggagagaagagagaaagcttttggggtttgaatctatagaatagaagcaaaccaaattgaaagaagatcgatcgatcgatcgatggctctggtcggagttgaagtgaagcatgcggcggagggcgcaccggaggagaattgcnccgccaagcccaccaagcagggcgagggcctccgccactactattctcacaacatccacgagcatcagctccttctccgtcaaaagacgcataacctcaacgtcttgaggnt

SEQ ID NO: 1757 - DNA, 264 bp, Glycine max
  Clone ID: 701039130H1
gttaaggctttccaaaagtcttacttcaacaagtatggtggtggggctaattccctcgctgctgggtacagcacaggtactggattgggtgctgagattattggaacctttgttttggtctacactgtcttctctgccactgaccccaagaggaatgccagagattcccatgtgccggttttggctccacttcccattggatttgctgtgttcatggttcacttggccaacatcccagtcactggtatggtatcaaacctgcta

SEQ ID NO: 1758 - DNA, 268 bp, Glycine max
  Clone ID: 701039131H1
ctcttctgtgtttcttagcagaattaagatggctaccttgactgtacctccagttcctccttcccccagagatgatgccatgcagctttaccgtgcttttaagggatttgggtgtgatacaagtgctgttatcaatatacttgctcatcgagatgctacacagcgtgcctacatccagcaagaatacaaagcaatgtattctgaggaactttccaagcgcttagcttcggagcttagtggaaagttagagactgcagttctgctctgg

SEQ ID NO: 1759 - DNA, 268 bp, Glycine max
  unsure (1)..(268): unsure at all n locations; Clone ID: 701039132H1
agaanagagcattacaagaagactatggagcaaaggttcaaagaaatggtgaccagcaaaggtcttgagtcagttcagtcagaaatcaatgacttggactgggaaagcacctttttcctgcgccatcttccactctccaacgtttcngacaacgcagatcttgatcaagattacaggaagacaatgaagaaatttgctctggaactggagaaacttgcagagcagcttctagacttgcnatgcgagaatctgggcctggagaaagggt

SEQ ID NO: 1760 - DNA, 278 bp, Glycine max
  Clone ID: 701039133H1
atcattgaagggtaattcacgagctcttgcaactgtcacagcaatcattgacggaaccggttctataggggctgcagttggacctttactaacaggttacatatctgcaaagagctggagtgctgttttcacaatgttgatggcagcagctttaattgcagggctgcttttgaccaggctagtactgtctgaggtggccacaaagattgaagagtcaaggtataatagagcacaagactgttcattcaatgtataagaataaacctaaagggtcacag

SEQ ID NO: 1761 - DNA, 254 bp, Glycine max
  unsure (1)..(254): unsure at all n locations; Clone ID: 701039134H1
actcaccaaatagttttctcacaaaggaggaagaatggcatctttcatttcactctcnttgttgcttctctttctcaattaccccttcctttccctctcaaccaaccctgaagggaacgctctgcatgctttgagaagcaggatttctgatcccaacaatgtgttgcagagttgggacccaacactggttaatccctgtacttggttccatgttacttgtgactccaacaatcatgtgattcgcttagacttgg

SEQ ID NO: 1762 - DNA, 275 bp, Glycine max
  Clone ID: 701039135H1
aaacatctcaatgggttcttcttctattacaacatcgcccgcaaccatgaccatggctgcgatcgtgctcctgttcacggtctttgccgtttcctccgccctagacatgtcgataatctcgtacgacagcgcccacgcggacaaggccgccacgttaccgcaccgaggaggagctgatgtccatgtacgagcagtggctcgtgaagcacgggaaggtgtacaacgcgctcggcgagaaggagaagcgcttccagatcttcaaggacaacctgcga

SEQ ID NO: 1763 - DNA, 273 bp, Glycine max
  Clone ID: 701039136H1
ctctctcataaattcaatgctctcatcgttttccctcataaaccgctttctcgtgttgtaacacactcatcactcatcatattcattcacacttcccactttccaatatggaatgctgcataatcgccaggctcaagacccaacctttatggttcgcgctgctcttcgttgtcggattgttaacgattctcaaattggctttcgttgttttcagatgggtctacgtcaatttcctccgaccaccgaagaatctcaaaaagtacggatcttggg

SEQ ID NO: 1764 - DNA, 273 bp, Glycine max
  Clone ID: 701039137H1
ctacaactagtaacaaagatccaacaagcagatcaatctctctctctgtctcccaatcaaaacagacatgggtttgaaggaggattttgagcagtatgctgagaaagcaaagactttgccaccgactcaatcaaacgaagacttgcttatcctttatggattgtacaagcaggccaccgttggacctgtcaacaccagccgtccgggaatgttcaacatgagggacagagctaaatgggatgcatggaaggctgttgaagggaaatccaagga

SEQ ID NO: 1765 - DNA, 270 bp, Glycine max
  unsure (1)..(270): unsure at all n locations; Clone ID: 701039138H1
cagaccacccagagctccgccgtggcgctgaagtgcctgancgtggtgcaccacgtgatcaagcgcggcagttcatcatgagggaccagcttccgtacagcggcggcggcaggaactaccttaacctctccaaattcagagacaagagcaaccccgtgtgctgggaactctcttcttgggtacgatggtacgctaaacacgtggaacagcttctctgggcttccagaattgtcgggttcttaccgacggaaaaagagagagtttcgggtc

SEQ ID NO: 1766 - DNA, 272 bp, Glycine max
  Clone ID: 701039139H1
ggcgcaagtgaggaacaagcaagtgcttctaaaggactatgttaccggttttcccaaagaatccgacatgaatattgtcgaaagtaccataacattgaagcttccacaaggttccaatgatgtcttgctcaaaaatttgtacttgtcttgtgatccgtatatgaggaatctcatgaacaagcccgaaggccctcccaatagtcgtgcttacactcctggctctccattaataggatatggtgtgtctaaagtcctggaatctgggcacccag

SEQ ID NO: 1767 - DNA, 272 bp, Glycine max
  unsure (1)..(272): unsure at all n locations; Clone ID: 701039140H1
cagtgaaagagaatccgaggcgaagagaagagaaaaattaagatggaggggaaggagcaggatgtgtcgcngggagcgaacaagttcccggagagacagccgattgggacggcggcgcagagccaagacgacggcaaggactaccaggagncggcgccggcgccactggttgacccgacggagtttacgtcatggtcccttttacagagcagggatagcagagtttgtggccacttttctgtttctnagacatcactgtctnaaccgtcatg

SEQ ID NO: 1768 - DNA, 268 bp, Glycine max
  unsure (1)..(268): unsure at all n locations; Clone ID: 701039141H1
ganaatgttccttgtgatgctggtggcagttgtgctaattatgatgctgatactgtacatgaagcttccattattcaaaagtngcctgtgcttcttcaacccgtggctgcaaatggcaaaaaagtccccctcggacaaagaaaactgatgtgtaatgatgactgtgctaagttagagcggaaaagggttcttgcagatgcttttgagattaccgctccaaatctggattcactccattttggtgagaattcggttgcttctgaattgc

SEQ ID NO: 1769 - DNA, 265 bp, Glycine max
  unsure (1)..(265): unsure at all n locations; Clone ID: 701039142H1
ggggattgcttttgctcagaagcaaactgttgctgcttaaatttccttgtcagcaggtggtttcttgggttatggatttatttgagcanaaatactacttagaggacttaggttgcagatttgttgtagcatctttactgcttccagaacttaggattcagactttctatgtatcaattctacttccagttttgttagtagaacgggaggacgcttccatttctgttctctaaaccgagcttaggttttggtcagaaatctcaaa

SEQ ID NO: 1770 - DNA, 266 bp, Glycine max
  unsure (1)..(266): unsure at all n locations; Clone ID: 701039143H1
ataatatggcatttaaaggctatttcgttttggggcctcatagctcttgttgtcgttggcacttccaaagttacatgcgaaatagaagcagataaagtttcacctattattgacttttccctcaatcggaacagtttccctgaaggcttcatctttggggcggcatcatncctcctaccagttcgaaggtgcagcanaggaaggtggtagaggaccaagtgtatgggatacttcacccataaatntccagataagatcaaggatgg

SEQ ID NO: 1771 - DNA, 263 bp, Glycine max
  unsure (1)..(263): unsure at all n locations; Clone ID: 701039144H1
tggaatttcgatgctcagtcatctcttttaccattctcttctctcttgctcttgcaggagagagccatgtccatgcatcgctacctgaggaagattattgggaagctgtttggccaaacactcccattcccactgcactgcgagagcttctaaagcctctccctgcaggtgttgaaatcgatgaactccctaagcaaattgatgatacacagtacccaaaaacattcttctataaagaagaccttcatccaggcaaaacantg

SEQ ID NO: 1772 - DNA, 263 bp, Glycine max
  Clone ID: 701039145H1
caaagaggaagaagacacagaaggagaggttcaacatcttcttcatctatggcgacgccggattctgacgctaccactcagcctcaagattccgacactgctcccaattccagtcctcccaacgccctcgtccccgccgctcccgccgtttgcctccttcgcttcgccaccgactccgccggcggcgctctcatgggtccgtctttggatacggtgctggattgtttaagaagaaaggttttaaaggatctttgtagaagcag

SEQ ID NO: 1773 - DNA, 267 bp, Glycine max
  unsure (1)..(267): unsure at all n locations; Clone ID: 701039146H1
cacaagtcttccttcccacttgcaccctctctctctcgccggtcgccgaatctttctccgcatccgcaacctccgccgtatccgcctttgattcttcaaccgatggatcggccggcgaccggacctggcgtggacatgccgatcatgcacgatagcgaccgctaacgatttcgttcgcgatatcgggttccgggaattttcggcgtcgcaangctttatganggataagcagacgcaagagcttgttgngntaagtatattgaacgg

SEQ ID NO: 1774 - DNA, 265 bp, Glycine max
  unsure (1)..(265): unsure at all n locations; Clone ID: 701039147H1
cctgantcaaagagctttagtgagcaaggtttgggaccaattccatcaaagtggagaggaatctgtgataacggaattgatcatacttttcactgcaacaggaagctaataggggcaaggtacttcaacaagggctacgcctcantngcgggcccactgaactcctcctttgactcgccacgtgacaagagggccacgggacccacaccctatcccacagctggcgggaacatggtcgcacgtgtcagcgtcttcggccanggnc

SEQ ID NO: 1775 - DNA, 275 bp, Glycine max
  Clone ID: 701039149H1
gtgagtgctttctttctgtaactaaccccaatcatcaactcagtcagcgaatgaatctgtggacggacgagaactcctcggtgatggaggccttcatgccatcctccgatctctcctccatctggccccctcccgctcctccgcagccgcaatccacggcggtcttcaatcaggacaccctccagcaccgcctccaggccttaatcgagggcgcccgagagacctggacctacgccatcttctggcagtcctcttacgactattccggctccatc

SEQ ID NO: 1776 - DNA, 275 bp, Glycine max
  unsure (1)..(275): unsure at all n locations; Clone ID: 701039150H1
aaagagttttccaagtttatggttgtnttgtgactgcacaagacatggttgaacccaaagatcccgtgaaagtgtttgacaaagcagactactatgcacatcctgagcattacaatcccactttccatgaaaaaatagcaccatatgcatctgntattgtcaattgcatgtattgggagaanagatttcctcanttgctgagctataagcagatgcaagacttaatgggccgggggagcccccttgttggaatagctgacataacgtgtgatcnt

SEQ ID NO: 1777 - DNA, 270 bp, Glycine max
  Clone ID: 701039151H1
agatttcttcgttgaactgtgggatgtctcaggacatgaacggtacaaagattgtcggtctctgttttattcgcagattaatggtgtaatttttgttcatgatctttcacaaagaagaacaaagactagcttgcagaagtgggcagctgagattgctgcaactgggacattttcagctcctttgggatctggtggtcctggtggccttcctgttccatatatttttattggtaataaagctgatattgctgcgaaagagggtacaagagg

SEQ ID NO: 1778 - DNA, 263 bp, Glycine max
  unsure (1)..(263): unsure at all n locations; Clone ID: 701039152H1
ctccagaacagcaaggggagaatcaattcctcatcgctgcaattctcatcttnccactctctagattctcannnnnnnnnnnnnnnnnnnaaagttcaaagtttttgttgttttccccccgagtctttctctctcttgctgtggacttgtggaatgctggggtcagagacttctgagacatgttctagcagacttttgttgaattgggtcactggtttctgtcataggtggtagagaatctgagtcctcagagatctaagcct

SEQ ID NO: 1779 - DNA, 269 bp, Glycine max
  Clone ID: 701039153H1
accgcgtgaggctctgtttctagggtttgttgggtctaaaaaatcgaagcgatttcgatggcggaagagcgattcacgggcgtggtgcagtggttcaacaatggcaagggcttcggcttcatcaagcccgacgacggcggcgaggatctcttcgttcaccagtcctccatcagatccgacaagtcccgcggccccttctggaacctcctccgcctcgtcttcggcggaatcgtgaaacccatccaaaccctcggtcagttcctcggccc

SEQ ID NO: 1780 - DNA, 268 bp, Glycine max
  unsure (1)..(268): unsure at all n locations; Clone ID: 701039154H1
ctctgatcctgtaacatcaatgggcctagtgcagcatgaaggcggtccctgtggcgtattggcagctattcaagcatttgtgctaaatacattattttcttcagtgatgagttgaaagatgtgtcatgcatgtcacagaagggtccgggtgcagcatttaaaagtcagtctgttccatcaaataatttttcttcgctcactgaaggtnaaaaagtaagagctcttgtaaaaagtatgggtgaaattttattttcatgtggaagtaata

SEQ ID NO: 1781 - DNA, 266 bp, Glycine max
  unsure (1)..(266): unsure at all n locations; Clone ID: 701039156H1
ttcttctcttgcggctagggttttagcgcantttcttctagatttaaggaagatgggtaaggaaaaggttcacatcagtattgtggtcattggccatgtcgactctgggaaatccactaccactggtcacctgatttacaagcttggaggcattgacaagcgtgttattganaggtttganaaggaagctgctgagatgaacaagaggtcttcaagtatgcctgggtggcggacanacttaangctgagcgtgaaagaggaatcac

SEQ ID NO: 1782 - DNA, 246 bp, Glycine max
  unsure (1)..(246): unsure at all n locations; Clone ID: 701039157H1
cacaaagcgggntactgncngntacaagctacnatctctcncctctctntcttagtgnctacctgccagangtnaaaatggccnaagaaactntnctattnnnatctgnttcagtgaacgaggggcacnctgacaanntctttgacgagatctccgatgctgtgntcgatgcatgcttggagcaggaccctgacagcaaggttgcctgtnaaacctgcncnaanancaacatggtgatggtttcgg

SEQ ID NO: 1783 - DNA, 262 bp, Glycine max
  Clone ID: 701039158H1
gccgccgtcgtcgaggacgtcaagaaaaaccccgacgccgccgtctccggcaccgtcatccgccgccgccttcagctcatgatgtacaacaacatgtaccgcataatgttcgaccggaggttcgagagcgaggaggatcccatcttccagaggctaagagccttgaacggagagaggagtcgcttggcgcagagctttgagtataactatggtgattttattcccatcttgagaccttcttgaagggttattgaagatttgc

SEQ ID NO: 1784 - DNA, 232 bp, Glycine max
  unsure (1)..(232): unsure at all n locations; Clone ID: 701039159H1
gttgggtcgttcccngcaattgttagtatncngcaaggnccccagttctagtggcactgatatgaancaccagtcttccttgaatcatgtgcaaaatgcagtagatttctgtttgtcagattataggggatcttctggtgagactgcatgtttacgtggtactggtcataatgttcagagcttcagtggctggaatactggtgaatctagttcaagactcaatctgatcaac

SEQ ID NO: 1785 - DNA, 260 bp, Glycine max
  Clone ID: 701039160H1
gtgtcatttacgcttctcttctctgcagcaactatgcctaaccctaaggtcttcttcgacatgaccatcggcggtcaatctgctggccgcatcgtgatggagctctacgccgacgtcactccccgcaccgccgagaacttccgcgcgctttgcaccggcgagaagggcgtagggcggagggcaagcccctccactacaagggctcgtccttccaccgcgtgatcccgagtttcatgtgtcagggtggcgattcaccgccg

SEQ ID NO: 1786 - DNA, 254 bp, Glycine max
  unsure (1)..(254): unsure at all n locations; Clone ID: 701039161H1
taattggtggattccagcaatggccgtggttcatgggcagttgggtcaagcttgatcaaagaggagaagggcaaggagcgagaagctcacatgctatagccatagtagcacagaaggtgtatgcntttggtggcgaattcgtgccacgtgtccccgttgataacaaacttcacgtgttcgacctagagactttgacttggtccgtggctgatgcatcaggggatgcccaaccgccagtgtcgtgtcacaatggc

SEQ ID NO: 1787 - DNA, 252 bp, Glycine max
  unsure (1)..(252): unsure at all n locations; Clone ID: 701039162H1
ccacactgagaggaagagggagtgagagtnttcttcgtttgctaccttctctcacaaatggttacgttcaggtttcaccagtaccaggtggtcgggagggctctcccaacggaagcagatcagcatccgaagatctaccgaatgaagctctgggccaccaacgaggttcgcgccaagtctaagttctggtattttttgaggaagctgaagaaggtaaagaagagcaatggtcaagttcttgtatcaacgaga

SEQ ID NO: 1788 - DNA, 264 bp, Glycine max
  Clone ID: 701039164H1
gcactgagcagttgaggaaatgggaacccttgggagagcgatctacagcgttggtaactggattcgagaaactggacaggccattgatcgtctcggttcccgtcttcagggcggttactacttccaagagcagctctctaggcatcgaactctgatgaacatatttgataaggctcctgttgttgataaggatgtatttgttgcgccaagcgcctccgtcattggagacgttcaacttggaagaggatcatccatttggtatgg

SEQ ID NO: 1789 - DNA, 214 bp, Glycine max
  Clone ID: 701039166H1
gcatgggggcaacaccaataacgatgataacagcaaggattccaaggctgctggcgacaagagattcaaaacgctgcccccagcagagtctcttcctaggaatgaaaccattggaggctacatctttgtttgcaacaatgataccatggctgagaatctcaagagacaactctttggtctgcctccacgatacagagattctgttcgggccatt

SEQ ID NO: 1790 - DNA, 271 bp, Glycine max
  Clone ID: 701039167H1
tgaccactacagttgctgccctgcagactatcccatctgcaacacttacgctggaacttgtctcaggagcaagaacaacccctttggagtgaaggcattaaggcgtactccagcgaaaccccattggaccttcggacgtaagaacaaggtcagcagtgcttaagcagtttaaggaaatgtgaacgtgcagaaggagccaatgatgaagtaaaagggaagacgaaggactaaagcaccagctggatgcacttcccccttcttcacataatgg

SEQ ID NO: 1791 - DNA, 268 bp, Glycine max
  Clone ID: 701039168H1
tctcggtctgagtggcagatccgcgccgatggtgtgagcgaaaacgttattggggcagaaataaaaaaccatagaatagatagagttattactccctataacatgtggcagtgatttggagatggcagacttaccagggtatcttcatgcctgtttgaacacagggaagcttgcctccttggcaattttggtgtctggaggaatcgtcttgcaaattttggcatgtgccttgtataataactggtggccgatgctgagtgtgttaacg

SEQ ID NO: 1792 - DNA, 269 bp, Glycine max
  Clone ID: 701039169H1
gccatttcaatccccagtttcttcttcaacgtcctcttacgagcagatcccaattctccttcccagtttcaaaccctaattccctcattcccatggcctcagaagagcccactgtcgcggtggaacccgctcccgaacctgccaccgccgagcctcccccggaggagaaggaggagcccaaacctgaagccaaggctaagaaaaccaaggaacccaaacctaaaaaggtttccagaccacgcaaccctcccactcatccttcctacgag

SEQ ID NO: 1793 - DNA, 245 bp, Glycine max
  unsure (1)..(245): unsure at all n locations; Clone ID: 701039170H1
tganaatgggttcttctttgtggcctttgtgtctaatttacggcttcactagcctcttcnncattctgtgcctttccacggaggccagtggatgttccattcggcagaaactacgttcccacttgggcttttgatcacatcaaatacttcaatggaggttctgagattcaacttcatcttgacaagtacactggtactggcttccagtccaaagggtcatacttgtttggtcacttcagcatgaa

SEQ ID NO: 1794 - DNA, 263 bp, Glycine max
  Clone ID: 701039171H1
tctgtcctcatacctaactcctatgtttggtaaagacaaaacctcagaggaaaggagaattgccatttgtatatttgatgatgttgctgagcatggtcgtgaagctgctcttaaatattatgattcttttcttccattcttacttgaagcttgcaatgatgaatatccagatgttcgacaggctgctgtttatggtgttggtgtttgtgctgagtttggtggatctgttttcaaaccccttgttggagaggcacttcaaggtt

SEQ ID NO: 1795 - DNA, 266 bp, Glycine max
  Clone ID: 701039172H1
ctctctctcaccaaagccttcctagaacgaaaaaaaaaagaagagcaattttccctcaccaaagaagaagaagcaaacaatggccgatcaacttaccgatgaacagatctccgagttcaaggaagccttcagcttgttcgacaaggacggcgatggttgcatcacaaccaaggagcttggaactgttatgcgttcattggggcaaaacccaactgaggcagagctccaggacatgatcaatgaagtggatgctgatgggaatggta

SEQ ID NO: 1796 - DNA, 265 bp, Glycine max
  unsure (1)..(265): unsure at all n locations; Clone ID: 701039173H1
gagacttagtatttctaaganttatgtgtttgtnaaaggcttctatganagcctcactgcttcaaaatagattcatgtatgtnagactcagaatctctggggaaaattgtgtgtggtgtggactacttgttcttgtttgtcattgagctatatcgctgttaattaggattttgtttcaaaatgatgcttatnagtngtaatctaggatttctccctttgaaatcctaggttgttcttgacatttgctatttcaaagaataaatat

SEQ ID NO: 1797 - DNA, 263 bp, Glycine max
  unsure (1)..(263): unsure at all n locations; Clone ID: 701039174H1
gggagacatcagctcttccaaggaggggganatagttaaatcaaaagatctcgagagcggaagtagttctgcagacaatgtcgaagcaggaactgcagtttttctcgtggagcttgaggaaaaaagagctattaaggtttttgggaagagcactttgattggattggctctaacattctttgctggactttgcttctctatgttctcaccagcattcaacatagcaacaaatgaccaatggaatactttgaaaaaaggggttc

SEQ ID NO: 1798 - DNA, 260 bp, Glycine max
  unsure (1)..(260): unsure at all n locations; Clone ID: 701039175H1
ctagtctctaatttgcnttttgattcattgattccttcatttccntgctgagagtgcgtgtgatttctctcgtctcctttagaattccgattggtatttctaacactgtgaaagacagagagatatggcaggnggtggtggagctccagcacctaagatcgatgagccacagccacatccaccgaaggatcagctaccgaatgtttcttactgcattacgagtcctcctccatggctgaggccatacttcttngttttcc

SEQ ID NO: 1799 - DNA, 255 bp, Glycine max
  unsure (1)..(255): unsure at all n locations; Clone ID: 701039176H1
gggttttaacaatggttctgtaccagcctcagcacaagctaactttcccatatttatttgcagtcagtaagttncttgcaggcagganccttttgaccttgtgggcactattatatacgagatagatganccatccatatcanancncctttttaatggcactgttgangttgtgaatctggtgcttttcttagcaggaatccgtttttcnnttactctggggttgcactcctgtcctcctggggctaggatcag

SEQ ID NO: 1800 - DNA, 260 bp, Glycine max
  Clone ID: 701039177H1
gaatcatggtgctgcagggcttcacagagggaggaaaactaagaaagatgagtcccagatggcgtcatcatggaaattcatgcgtccattcaagccatcaacagtaggactttccatggatttattatttaggagcaaataatcaatcagtttcttttgattttggcatcctagaatgaggacagtgatgatttaggccttgatacatcttttttgcatttcgcaatgggttttcatttattttttttcgtgtcagttcc

SEQ ID NO: 1801 - DNA, 259 bp, Glycine max
  unsure (1)..(259): unsure at all n locations; Clone ID: 701039178H1
gatgacttgcccaagactgttgtgatgactctcaaccaaggttcaattgtcaaaagcatggattgccatccactgcagcaaattctacntcttgttggaacaaacatgggcgatgtcatggtgtgggatataggcagccgtgaaaggatcgcacaaagaaattttaaagtctgggaacttggagcatggttctgtggcgttacaagcatctctttcccaatgnatactcagcatccatcaatcgggtngtgtggatctg

SEQ ID NO: 1802 - DNA, 206 bp, Glycine max
  unsure (1)..(206): unsure at all n locations; Clone ID: 701039179H1
ccaaaganaaggngttgttgtggagtaggnntttganaganctcgaattcgaaggantagaggngataggnntttgtnattctgatatagcgatgagtgagagtcacgggnacagcaggnggcgaaatgttgaagatcaagatctgggactgtacttcttggaggcgtgcaggggtagggagatganngagaaagaggaagaggca

SEQ ID NO: 1803 - DNA, 271 bp, Glycine max
  Clone ID: 701039181H1
gaaatgcacagtaactaaacatgtctgcttcttctaatgccaatgggccatttgagcatcctagcttgcatgtaaatgcaattggtttacacaggaactgtgaattagacacagccccagtttcatggggggatgttgcttgtgataatgatgcttttgaaaaaaatgaatctgcttctatatctagagaacatactgttttgagcagcaacactggactacgatcccattccaactctaacttaaggaatactatttcctctgatcattg

SEQ ID NO: 1804 - DNA, 266 bp, Glycine max
  unsure (1)..(266): unsure at all n locations; Clone ID: 701039182H1
ctacattctctcgacacatgctttgctagatcacaggttgttggctaatagtgttctgtgtcaganaatgttgtgaatgagagatgtgtattgctagcagtttgactgcacagttgaattagtatgctactaaggggattctgctggatgtcaaatgatgtttaagatttgatatacagtaaaaagaaattggagactatggaaganatacagtctcaatcagataattatagatctcgtcatcgtcggcnagcagcccggcaata

SEQ ID NO: 1805 - DNA, 269 bp, Glycine max
  Clone ID: 701039183H1
gcaaaagagaggaacagaacagaactgagagaagcaagtgaaaccctcaatcacctaggctaaaatcgtctcgtcttcattccttttttttccggtttatagaattgaaaagatttcattgataattgagcaaacacaatgagtgctccacctcatcatgatgatgacgacgacaacgaagaagttttccttgatgagtctgacatcatccatgaagttgccatggataatgaagatcttcctgacgctgatgatgattctgaactcct

SEQ ID NO: 1806 - DNA, 267 bp, Glycine max
  Clone ID: 701039184H1
cttgtctgagaaggaaacagatagaagctttgggttgagaaatttcaggtacattgagaccatcaaagaagctttggaaagagaatgccctggagttgtttcatgtgctgatatcctcgttctctctgccagagatggcattgtttcgctaggaggtccccatatccctcttaagactggaagaagggatggtagaaggagcagagctgatgtggttgagcagttcctcccagaccacaatgagtccatttctgcagttcttgacaa

SEQ ID NO: 1807 - DNA, 217 bp, Glycine max
  Clone ID: 701039185H1
tcaaatatccttgagccagacatgtacaggaacgctgcttcacgtcttagggtcatcagtgcccgttcgtgcagcagcagcaggatacctgccagtgccagatttgcaagttccgttgccacacaacaatcctcttcctggtttgggtggtttatttggatggctcactggagaccgatccagttctttaccatctctggatttcccgcttccgggc

SEQ ID NO: 1808 - DNA, 263 bp, Glycine max
  unsure (1)..(263): unsure at all n locations; Clone ID: 701039186H1
aagaagcgaaactaaagtcagcattcgaaaaanatgagtagcatcggtacaggttacgatctatcggtcaccactttctcccctnatggccgcgttttccagatcgagtatgccgctaaagccgtcgacaacagcgggactgttattgggatcaagtgcaaagatggggttgtgttgggcgttgagaagcttattccgtcgaaaatgatgcttccgggttccaatagaagaatacactccgttcatcgtcactctgggatggc

SEQ ID NO: 1809 - DNA, 262 bp, Glycine max
  Clone ID: 701039188H1
agattttgatgaccatctcgatgacataagcaaggattgggtaaacccagggcttttcaactgatcccagcccctttgtctccatttttgccctatttactttgcaagtggaggatattgaggcttattatggtgcatatgctggattctcaatgatgaacatttagggactatattttgaccctaggaaagttgcttcatgaagctttttcagttgtataagcaggatatttaccaccagtccgtaaaggattttggttgc

SEQ ID NO: 1810 - DNA, 260 bp, Glycine max
  unsure (1)..(260): unsure at all n locations; Clone ID: 701039189H1
gcctcgaacacggcattcagcctgatgggcagatgccaagtgataagactgttggtggaggtgatgatgcttcaacaccttcttcagtgaaactggggctggaaagcacgtgcctcgtgcgattnttgtagatctcgagcctactgtgattgatgaagttaggactgggacataccgccaactatttcatcctgagcagctcattagcggaaaggaggatgctgcaaacaactttgcccgtggccactataccattggaa

SEQ ID NO: 1811 - DNA, 82 bp, Glycine max
  unsure (1)..(82): unsure at all n locations; Clone ID: 701039193H1
ggagttttggggtgttgaggtgaaaagnnngataatccttcntccatctcnncggatccaacccttgagagattctccaact

SEQ ID NO: 1812 - DNA, 177 bp, Glycine max
  unsure (1)..(177): unsure at all n locations; Clone ID: 701039196H1
cgccgcctccggcgactccaaggtcttctacctcaagatgnagggagactaccacaggtacctcgctgagttcaagaccggcgccgaccgcaaggnagccgccgagagcacgctctccgcctacaaagccgctcaggacattgctaacaccgagctgcctccaactcaccctatcag

SEQ ID NO: 1813 - DNA, 285 bp, Glycine max
  unsure (1)..(285): unsure at all n locations; Clone ID: 701039202H1
caagggncnaaattntgggganaaaagtgagcaactaccctccttgttctcacccctgatctgatcaagggactaagagctcacactgatgctggtggcataattctactctnccaagatgacaaggtgagtggcttgcagctcctcaaggatgccagtggatcgatgtcccaccaatgcgtcactccattgtaatcaaccttggtgaccaacttgaggtcataaccaatggcaagtacaagagtgtgatgcaccgagtgattgctcaaaccgatggtaccagaa

SEQ ID NO: 1814 - DNA, 96 bp, Glycine max
  unsure (1)..(96): unsure at all n locations; Clone ID: 701039203H1
gtttctactctcacaactgtttannttcngcctctnctcaaactgtgttcgtgtgtatgcatttgagttgaaagcccagacttcaaggagctgaaa

SEQ ID NO: 1815 - DNA, 281 bp, Glycine max
  unsure (1)..(281): unsure at all n locations; Clone ID: 701039206H1
ctctgatgcttttgaagataccgatgatgatctgatgagtgatgactatgattcagatgctagtcaaaagagtcatgagacacgtaaganaatcaaatggtttaagaagttttttgagattttggatggcttgactgttgaacagataaataaccagaaagacagtggcattgtccagcttgccaaggtggtcctggagctattgattggtacagaggactgcagcccttggtgacacatgccaaaacaaagggatctaaaagggtgaagatcacagggag

SEQ ID NO: 1816 - DNA, 285 bp, Glycine max
  unsure (1)..(285): unsure at all n locations; Clone ID: 701039207H1
ggtgctgatggctcctggctttggtgcaccacagatgataccgtttatgcatgctgttanatcggnngancccaaagacaatggtggagctttggttgttgtgaaatcngatncgaataaggcaattgcagggattattactgaaaganattattaaganagatcatcgtgcagggaagatcatccaagtctancaaggntggagatattatgactgaagagaacanacttatcacagtcacccctgataccnaagttctacaggctatgcaatgatgacngntt

SEQ ID NO: 1817 - DNA, 281 bp, Glycine max
  unsure (1)..(281): unsure at all n locations; Clone ID: 701039210H1
gnggccctctctggaggccacaccatagggtttgcaaggtgcaccaccttcagaaacagaatctacaacgtaagcaacaacataatagaccccacgtttgcagcatctgtgaggaagacatgtccgaaaagcggaggagacaacaacttnatccacttgatgctacacccacaagagttgacaccacatactacacggatttgctgcacaaaaagggtcttctccattctgatcaagagctgttcaagggaaaaggcacagaaagtgacaaattggtgcaa

SEQ ID NO: 1818 - DNA, 277 bp, Glycine max
  unsure (1)..(277): unsure at all n locations; Clone ID: 701039211H1
tccttttctcttctctgtctaagnggtgccctgagatcacattgaacaatggtgaaggctgtggccgttcttggcagcagtgagggtgtcactggaactattcacttcgttcaggagggaagtggtccaaccaccgtaactggatccttgctggtcttaagcctggtctccatggtttccatgtccatgccttgggggacactaccaatggttgcctctcaactggatcacatttcaatcctaataacaaggagcatggtgcccctgangatgagaa

SEQ ID NO: 1819 - DNA, 280 bp, Glycine max
  Clone ID: 701039212H1
gaaatagagtaatatccccttctttgcttttctttgaatggaacaagctgggaagcaaggaattatggtgacgtctcagagtcagaaccctatagagcaaatccaagcgcgcttcaaggagttggagactggcttccgcctctggctctcaagcagtccctccccgtcgaggccgccgtcgtcaccaccaccagcgccgcccagggcgccgctatcggcgccttcatgggcaccctcaccgccgacgcctcctccaccttccccacccctccgcccaacg

SEQ ID NO: 1820 - DNA, 279 bp, Glycine max
  Clone ID: 701039213H1
attaattccaaaatcacactcctatatatcttcctatagcaatatatatgatgggtgacactgagatcaagccatcagttgaagtagtcgtatgtgcttccatgaacaataataatagcgcaaacaaccacaccctcccaaccgacataccaagccatcacaattaccaatcttgaccaggctccatgctggttactttttcatatgcctttcctttggagcacaagctttgctctggaagagtttgagtaaacacaacaaggactcacaaagtctctg

SEQ ID NO: 1821 - DNA, 59 bp, Glycine max
  unsure (1)..(59): unsure at all n locations; Clone ID: 701039215H1
caaaattcaggaaaaaaaaaaaaaancangggggnaaaggtgnanggnccaacccntgg

SEQ ID NO: 1822 - DNA, 147 bp, Glycine max
  unsure (1)..(147): unsure at all n locations; Clone ID: 701039217H1
caacaatggcttctgtgcctcaaccaaaaatctcccttcnaaccttattcttctgtcgcgtccttcaccatcattggcgcatgcaattgttccctcanaacgaaaccttanaaatttgagaactcaggtgaacttggaccctacatc

SEQ ID NO: 1823 - DNA, 279 bp, Glycine max
  Clone ID: 701039218H1
aacgagtgggtgatttgcagggtgtttcagaagagttcagctgggaagaaaactcatatctcggggataatgaggttggactcttttgctaatgaattgggttcttctgctctgccacccctttcagattcttcgccttctattggcacactaaacctctgaatgattcggcttacgtgccctgcttctccaatccaattgatgttcaaagaaaccaagaaggtgtcttcgattccgtcaccaactctatgtatgcggtttcttcaaatcctatggaca

SEQ ID NO: 1824 - DNA, 281 bp, Glycine max
  unsure (1)..(281): unsure at all n locations; Clone ID: 701039219H1
attgaactcaagttttttctcttctctcggtttcatcgccatggatgaagaagtgcgcaagatccttcagcaagtttcgacaagaacggcgacggcaagatctcgtgcgccgagctgaaggagatgatggtggcgctgggatccaaaacgagtcgnaggaggtgaagcgcatgatggcggagttgatcggaacggcgacggctacattgacctgaaggagttcggcgagttccattgcggcggcggcgacgggagggagctccgggaggcgttcgagctgt

SEQ ID NO: 1825 - DNA, 280 bp, Glycine max
  Clone ID: 701039220H1
gtcggagctgtgtctggggaaatttgcgttgtttttcgcggtacagctcacacacactgaacggtaagtatggcggacaaggctgttacaatccgaacccgaaagttcatgaccaacaggcttctttccaggaagcagtttgtcgttgagttcttcatccagggagggcaaatgtttccaaggctgaacttaaggagaagctagctaggatgtatgatgtgaaagaccctaatactgtatttgtcttcaaattccgaacacattttggaggtggcaaatc

SEQ ID NO: 1826 - DNA, 222 bp, Glycine max
  Clone ID: 701039221H1
cacaacatcacccgcatgcttgccaaacaccccggcttctccaccttcaaccactacctctccctcacccacctcgccgaagagatcaacgccgccagaccatcaccgtcctggccctcgacaatgccgccatgtcctccctcctcgacaagcacctctccctccccaccatcaaaaacgtcctctccctccacgtcctcgtcgactacttcggcgccaaaa

SEQ ID NO: 1827 - DNA, 278 bp, Glycine max
  Clone ID: 701039222H1
gtgatatggaaattgggaactcgtgttatgtaaagatgtgatgtggtgtggctagtgtgaaccgtttgcttgcttcgtgtatgtacattctctccggaggcaccgtcgtgagcttttctctctggtaggtccgtgttgctgaaaccttttgacctttccaataaagcatttgtttcaccctatcaatgagaggaaccattggaataaggatccaaaccccaatatttccaatgccaccagaaaaaccctagttccatttctacatcttccggttttgg

SEQ ID NO: 1828 - DNA, 280 bp, Glycine max
  unsure (1)..(280): unsure at all n locations; Clone ID: 701039223H1
tgatatcgtcaaccatcctttgcaattgcaagaatctttagtntttttatttcttcccatcagtgtctcttctcagttgagtgccttacttttaacgcaggtacaaagaaggaagaagcacgcgtgggggtgtgggtgaatatatggcnaaagagtaccagtaggagagttgttggtgttggtgttattattgttggcaccaaagacaaaggcaatgagcataacaagaggtcataataaaagcaggggcaaagagtcctctggttctagtgatgagggg

SEQ ID NO: 1829 - DNA, 279 bp, Glycine max
  Clone ID: 701039225H1
cgcaacaaaaagaaagaatcccaggcgaggagaaagatggaggggaaggagcaggatgtgtcgttgggagcgaacaagttccccgagagacagccaattgggacggcggcgcagagccaagacgacggcaaggactaccaggagccgcgccggcgccgctggttgacccgacggagtttacgtcatggtcgttttacagagcagggatagcagagtttgtggccacttttctgtttctctacatcactgtcttaaccgttatgggagtcgccggggcta

SEQ ID NO: 1830 - DNA, 277 bp, Glycine max
  unsure (1)..(277): unsure at all n locations; Clone ID: 701039226H1
ggtggtcgagtagttctctttgaacggacagatacaaaanatcattgcggatcaagaagggacttggagaggatggactattctattagtagacatcctgagttccgttataaaacagagtttcagagtcatgagcctgagtttgatatcttaagagtttggaaatagaagagaaaatnaacaaaatcaaatggtgccaaacagccaatggtgctttgttccttctatccanaaatgataanaccatcaaattttggaaggttcaagaaaagaaggt

SEQ ID NO: 1831 - DNA, 275 bp, Glycine max
  Clone ID: 701039227H1
ctccaccctttattctcttacgtctccaactaatcatacagatcgataatcataatcatatctatagctaattaacttaattattttcatccctctactcttcttctctcctctaaactctcttttccattcttgcttcctttgtggttgatgagttttctttccttcaatttaattgaaagatggcttgcttggtatctcgctcaggaagggaattgcagaggtacaacaacatgggtggccggcaagttgttgggtgagttcggtcgctattg

SEQ ID NO: 1832 - DNA, 234 bp, Glycine max
  Clone ID: 701039228H1
tcttagatctcttctttcttctacgccgcacgccgaaaccatggccggaaaaggagagggtcctgctatcggaatcgatctcggaaccacctactcttgcgtcgtgtgtggcaacatgaccgcgttgaaatcatcgccaacgaccaagggaacagaaccacgccgtcttacgtcggattcactgacaccgagcgtctcatcggtgatgcggccaagaatcaagtcgccatgaac

SEQ ID NO: 1833 - DNA, 278 bp, Glycine max
  Clone ID: 701039229H1
ttctatttcccataaagccatggaacattctcaactgtccattgtcattaccttctttgttttcttgctccttgcttaggctagttaaaaatccacaagccaaaatcgagtcacaagttgccccctggtccatggaagttacctatcatggtaaccttcatcaggtagcactagcagcttcacttccacatcatgctctccaaaaacttgcccgtaaatatggacctctcatgcacctccaacttggtgaaatttcaacactggttgtgtcctccccc

SEQ ID NO: 1834 - DNA, 279 bp, Glycine max
  Clone ID: 701039230H1
ggaccccgtgaccgtttccacgggcataacctacgaccgcgacagcatcgagaagtggatcgagtccgggaaccgcacgtgcccggttcaccaaaacggagttgacaaccttcgacatgatcccgaaccacgccatccgtaggatgatccaggactggtgcgtggagcaccgttcccacggcatcgaacggatccccactcctcgtatccccgtcaccccgtacgaggttgctgacacgtgtacgaggatcttgtcggcggcgcaacacggggacgaga

SEQ ID NO: 1835 - DNA, 282 bp, Glycine max
  unsure (1)..(282): unsure at all n locations; Clone ID: 701039234H1
gaaacgacggagactaaatctctaaaacgcttgaaaccctaaaactctgtgtcctccgccgttcacatcattgtcgacgttcgttcagttgctcacactctcaacagagaagagaagagagatgagaggaaggagctatagtccatccctcctcctccacgttacagcagaagaggaggagggaggagtcccagccctaggggccgctatcctccccgtccccggncaacaagntctccctaccaagccttcttgttcgtaacttcggcatgactggtangc

SEQ ID NO: 1836 - DNA, 224 bp, Glycine max
  unsure (1)..(224): unsure at all n locations; Clone ID: 701039236H1
gcgctcactaggtagcaatgccantttcgcagttatgtcnaaatatccattccgttcctcaaatcgtagcgtgcacccgcaangacaaaacggatcgaaatccgtttcggggagacccaaggtgagcccctcaactgaaccgttggtccagagcccganccgtacggttcggtcagaaattggaccggtccagtatgcgaactcagctaccggaacccaaccct

SEQ ID NO: 1837 - DNA, 280 bp, Glycine max
  Clone ID: 701039237H1
attcattcaagattcagcaagtgcgttttggaagcagagaccgaaatacttcgagatggcccgtacaaagcaaactgctcgtaagtcaactggaggaaaagctcccaggaagcagcttgcaaccaaggctgcacgtaagtctgcaccacaactggtggtgtgaagaagcctcatcgttatcgccctggaactgttgctcttcgtgagattaggaaataccagaagagcactgagctcctaatcaggaagcttccttccccagaggttggttcgtgaaatt

SEQ ID NO: 1838 - DNA, 282 bp, Glycine max
  unsure (1)..(282): unsure at all n locations; Clone ID: 701039238H1
cttatttcttatataatataaaatcgtcgctccgtgcacggttccngcagtgcttttccnccgtcgtcgcggtttcaaacttgaaannaagtnaaggatcttcagcagcagaaacaatggatgaagataaaacccaacaacttcccagaaaatgaccaggtcttcagcttcatcgtctccatccacttcaaataacatagttgcagcaaaagtaactagccttgancctctaacaatcaatgaccttttagttgggggagatcccatcagcctagatgacat

SEQ ID NO: 1839 - DNA, 280 bp, Glycine max
  Clone ID: 701039239H1
ctcccaccgaccaaaacgcgcaacacgttgtaattaaaacgacaccgaaactaatggggcgtcttcagcgaaaacccgaatccggacccggttgtgatccgccaggtttgggcttcaaatctcgaatccgaattccaactcatccgcgactcatcgaccactatccttttatctcgatggacacagaattccccggtgttgttttccgaccacacctggaccccacaaaaccctacaaccaccgcaacaacaatcgcaaccgccactccgaccactaccg

SEQ ID NO: 1840 - DNA, 276 bp, Glycine max
  unsure (1)..(276): unsure at all n locations; Clone ID: 701039240H1
aacaagatggcttcttttcatatccnatattcattccttgtgcttgtgttgctatggtgatcacattgatgaaccctaccaatgcaaccctctctccccatttctatgataaagtttgccctcaggcattgccagttataaagtagtggttcaacgagcaattatccgtgagcgacgcatcggagcatctcttctgcgcttgcatttccatgattgtntcgtaaatgggtgtgatggatcaatattgctagatgacacccgaaacttcactggcga

SEQ ID NO: 1841 - DNA, 277 bp, Glycine max
  unsure (1)..(277): unsure at all n locations; Clone ID: 701039241H1
ttgcaggaaaaatggtttcgctgaaactgcagangcngctcgccgcgagcntgctcaagtgtggcagaggaaaggtttggcttgaccccaatgaagtcaacgaaatctccatggccaattctcgccaaaacataaggnagctggtaaggatgggtttatcatcaggaagcccaccaagattcactctcgctcacgtgctcgtcgaatgaaggaagccaagaggaaaggacgtcactctggatacggtaagcgtaagggtacaagggaggcaaggctt

SEQ ID NO: 1842 - DNA, 277 bp, Glycine max
  unsure (1)..(277): unsure at all n locations; Clone ID: 701039242H1
catttccatgcgcatggcttccaacgaaacttcaccgtttgantctcgcgagatgctcgcatccttcgtctcgtccangcccctgcngtncggactcatggcgcctctgcacccaggccaacgccactcccttcctgaccttcgtgctgagcgtgtcggcgcctccgtgtatgtggctttctccggcgtccatatggccggcgagtccgacccgaactggagaaatttgactcctttgtacagcatcggcggcctgcctctgttttcgtctcggcgg

SEQ ID NO: 1843 - DNA, 182 bp, Glycine max
  unsure (1)..(182): unsure at all n locations; Clone ID: 701039246H1
atcggaaaaaagatcagatatcttgagatcttattgatgagatgcatgataaaggtgaacctatcaatataatcaagtcacctatagttccttaattaanagacttgagaatgcacaacaggttttgatcatctattntcttattacctattttctntcaattttagtggtgganantcgag

SEQ ID NO: 1844 - DNA, 274 bp, Glycine max
  unsure (1)..(274): unsure at all n locations; Clone ID: 701039247H1
gaaaggaggaaaatattaaagctcttgcaattctcatgaactgtggagtcgtgttgggtttctattgttggggttgggagttctaactgcccttcttctcttctctcatcaaccttattgatcattctctncttcctcttcttttcaaaaaccaatttctttttatacaaataaagaagataccaaagaaaaacatagcaaaaaaataaaaataaaaaaatggaaggaacaagcaataaggggttgttggaatgtggaaggaagtgcactccac

SEQ ID NO: 1845 - DNA, 154 bp, Glycine max
  unsure (1)..(154): unsure at all n locations; Clone ID: 701039248H1
ttttcgttcgcatcttctctctctctcagananntgaaggtggtcgccgngtatttgctcgccgtcctcggtggcaacaacagcccctccgccgatgtcatcaaggaaatccttggtccgttggagtagaagcagatgaagataggattgaatc

SEQ ID NO: 1846 - DNA, 274 bp, Glycine max
  unsure (1)..(274): unsure at all n locations; Clone ID: 701039249H1
caaaaccagagtggttctagtaatccggtgctgctagaggatgggaactagtgaatggcatatcgagcgaagatctagcttcggcactgaatcccccttagcaaganaggcaggaaatgtgcctgaaactgggtcactctctatgttgtgcttggcgcttctggggatcttgctaagaagaagacatttcctgcacttttccatctataccggcagggattcttaccagcagatgaagttcacatttttggctatgcaaggacaaaaatatctg

SEQ ID NO: 1847 - DNA, 277 bp, Glycine max
  unsure (1)..(277): unsure at all n locations; Clone ID: 701039250H1
cgcaaaagaggaaaaggagcatccaactacgaagaggcccagctcaaggatgagactgtgaaagtggtagtggtcgagaaggccctcaaaaaggttaaaagccttccaaagccagttctgaatcacgaacacatcctcaagaagaactctcttttggggnaaacaatttaccctccactttttggagtactaagcctcagcaggaggatgttgccgtggacgcngaggaagctcaagtttaaaccttcacatattaacacttgcacttcacgtgact

SEQ ID NO: 1848 - DNA, 278 bp, Glycine max
  unsure (1)..(278): unsure at all n locations; Clone ID: 701039252H1
gggaacacggagaagctgatgaaccagatcatggaattgaagttcacgtcgaaatcgctgcagcgggcaatcgcgtaagtgccgagaaggangagaaatcggagaagctgaaggtgaagaaggcgattgagaaaggcaacatggacgagcgcggatctacgcggagaacgcgatccgtaagcgcacggagcagatgaactacctccggcttgcctcgcgcctggacgccgtcgtggcccgcctcgacacgcaggcgaagatgacgacgatcagcaagt

SEQ ID NO: 1849 - DNA, 216 bp, Glycine max
  Clone ID: 701039253H1
tcggattggccccagagaataacatgattctcgagtacaagtgacgcatgggatagaataataattttgttggggtagcctatccgaatggtttatgttaataatatgtttgcttatgattttgcaagtgtaattgattgcatctctcattaatgctttagagcaggacatattctgttttctagggacatgaatgaatgtagtataattttgtgt

SEQ ID NO: 1850 - DNA, 277 bp, Glycine max
  Clone ID: 701039255H1
gttaaggatgttcctaacaatttgttgaggcacattaccttggacaacaatgagaacaaacctgtccactaacagtagggatacacaagaggttatgttggagcctgggctgaaattaattaaaattttcaaggaatataccagcagacatgcattttggatgattttggcttctatgaggctcgtcagaaaactattttggagaagaaagcaaagcaacaattcccaaagcaggtatgggaagggaaacctgctgatgagaagattgagataaatg

SEQ ID NO: 1851 - DNA, 274 bp, Glycine max
  unsure (1)..(274): unsure at all n locations; Clone ID: 701039257H1
attccaattctcaacactcaaactaactgcaacttgcattccctagagaacacacctctgttgccttccttcacttcagttagctgagtgtgttggtaagcactttccttctcctttgggtagttatgtcatcagcacctatgccgacaacaacaaggttcaaaacaaaggcctnnnnnnnnnnnnnnnnnnnnnnnnnnnngtgaggatagaggaagagatcatgaagcagggcatcataaccattttgaactcaaacacaaacacaaacaca

SEQ ID NO: 1852 - DNA, 273 bp, Glycine max
  unsure (1)..(273): unsure at all n locations; Clone ID: 701039258H1
aatggcccaaatgacactgttttcttattctcaaccccaaagtagcaataaatagatgtctccaattttnttcttcttgatcaaaagtcgtagaactagaaggttaggttgagggcgatatgaaggtaaccaaagggaaggaactaaaattgttctgacaaaacccttccaattggaaggtgaatcagatttagaaccgtcttatagagctcccaatctcctacatcgcttgttaagtttactcaagaacgtgcggccaggatcagatctcac

SEQ ID NO: 1853 - DNA, 271 bp, Glycine max
  Clone ID: 701039259H1
atacttgtcaaccctttgagagttagaatggctgctgctattgaaatccccacaatagtgtttccaaactcctctgcccaacagaggatgccagtggttggaatgggatctgcccctgacttcacatgcaagaaagacacaaggaggctatcattgaggccgtgaaacagggttacagacacttcgacactgctgctgcttatggctctgaacaggctctcggtgaagctctcaaggaagctatccatcttggcctcgtctcccgccaaga

SEQ ID NO: 1854 - DNA, 271 bp, Glycine max
  Clone ID: 701039260H1
taaactgatactttttggaacttaaaatttgaaaaggaaggatttttcattgtatcgttgattctagaaaggaggtcctaggttggttatcatgggagagaccaaacaacttgttacccttttgacacaatttcaagaggcatgaggatggtcaaggatatagtggaaaaaagcagatcgagtaaaacgagcaaacgattactaaggaaaaccctcaagaatatgactcctctactgcaggaaatcaatcaatacaatgaacacttggacc

SEQ ID NO: 1855 - DNA, 235 bp, Glycine max
  Clone ID: 701039262H1
ctacaacacacttttttaagtgattcgttcgcagaaacatgggcttcttcgtttctatccgcagcttcgcacgctgtctcaccctcttgttctctgtccaccacgacaagggaaagcccatgcttggaggcaacactttgagatttcacaaaggacccaattccttctctagttcaaggtctagaggtcggatctctatggctgttgcagttaatgtatctcggtttgaaggcat

SEQ ID NO: 1856 - DNA, 273 bp, Glycine max
  unsure (1)..(273): unsure at all n locations; Clone ID: 701039263H1
gctcaacaagcatcaccaaggagtacactgagtccaagaagcattcagagtnattcaattgatttggcaattgatggagtggtggatacctcaattgagcaattgtatcacaatgtgtgtgaaatgaggagctctgatcattcccctcaagggctagtttctactcttatgattatgatggcgagtccaggattgattcagaactaggccatcttgctggtgatattgtggatttggagatcacaaaggaggtggttacagagaataaagagg

SEQ ID NO: 1857 - DNA, 276 bp, Glycine max
  unsure (1)..(276): unsure at all n locations; Clone ID: 701039264H1
ggaaaaggttgcagaaagcaacnatagatacgccggagaaaggtggtgggtcttcacctttagagccccaggttgttcccgcatagatatagttgtttaatttgtgtttgttattgtacatggctttcatcttttttcaatttgcgacagagggacaaacaaaacgcatatgataaccgctaaataagaattattcgtttctgatttttctnatatgaatataccatagactggccaatcccaatactatnttcagttggtcgagccttgttactc

SEQ ID NO: 1858 - DNA, 152 bp, Glycine max
  unsure (1)..(152): unsure at all n locations; Clone ID: 701039265H1
acaataagcgaaaaaggaaacgatattgcgaattagnaatttcatgangcggtagcaatgcaggaggggatnatgacgagaatgggattgaaaggcctatgactcattccaaatattncccgtttgantattccttgantgngtgatcgtta

SEQ ID NO: 1859 - DNA, 273 bp, Glycine max
  Clone ID: 701039266H1
gttctgcccaagggagaaatgaaattagcttttggacaaaatatgaaacttgaaacatgaaaaactctaaagtctcttccggttgccgaggttacaaattctcaaccactatggtctgttatacatcatactatcatagtggtctatcttggaaacaatatgcccttctgcttattttgttactcacattttgcttggagattgacttattgaactaaactccttggatcctttgacttaagcctcctaatagcatccaggatattggccaac

SEQ ID NO: 1860 - DNA, 271 bp, Glycine max
  unsure (1)..(271): unsure at all n locations; Clone ID: 701039268H1
tggaagtatatggttatggctgatacttctgctggcttcagttcaatcactgggatctgagaggacggatgtggcatacgtgactctattgtacggagatgaattcttgttgggtgttcgagttctcggcaaatcgatacngacacgggatccaacaaagacatggtcgttttggtctctgatggtgtctctgattatgccaatacccttctccaggctgatgggtggatagttgagaagattagtttactggcaaatcctaatcaagtac

SEQ ID NO: 1861 - DNA, 273 bp, Glycine max
  unsure (1)..(273): unsure at all n locations; Clone ID: 701039269H1
ccagcccttcctccatttcctcctcatataaactcttctcaataaccagatatttcattgcatgaatattcaaaaaacaatggccatgctcaatatcatctccattctctctctcttactcactcaatcccacgccaaaatnccggcgtctattccggtgggccatggcaaagcgctcacgccactttctacggtggcagcgacgcctcaggaactatgggaggagcgtgtgggtacgggaacctatattcccaaggctacggtgtgaacact

SEQ ID NO: 1862 - DNA, 274 bp, Glycine max
  unsure (1)..(274): unsure at all n locations; Clone ID: 701039270H1
ttcaatcctcagtttctttcttcaacgtttccatcatacacagatcccaatcctctctcaagcnctaatttcccctcatttccatggccacagaagagcccactgtcgcggtggaacccgctcccgaacctgcctccgccgacctcccccggaggagaaggaggagaccaaacctgaagccaaggctaagaaaaccaaggagcccaaacctaaaaaggtttccagacctcgcaaccctcccactcatccttcctacgaagagatggttaaagat

SEQ ID NO: 1863 - DNA, 273 bp, Glycine max
  unsure (1)..(273): unsure at all n locations; Clone ID: 701039271H1
cgaggctcctgtttattctgtctgcccacattataaaganaacattcagttcatcttttcaacagtgttagatgggaaaataaaagcatggttgtatgacaatttgggatctcgtgttgattatgaagctcctggtcgttgggcacaaccatggcttatagtgctgatggtacaaggctcttttcctgtgggacaagcaaagatggggaatcatccattgttgagtggaatgaaagtgaaggagctgttaaaaggacttnccaaggatttcgt

SEQ ID NO: 1864 - DNA, 276 bp, Glycine max
  unsure (1)..(276): unsure at all n locations; Clone ID: 701039272H1
agcaacttcaggtttttnagtctttgcctcttggcattgattgcatcatctcatgctcaacttcagcttnggttttnatngccaagagttgcccaaaagctgagcaaatcattttgaaatttgttcatgaacatatccacaatgtccatcacnagcagctgcattgataagaatgcactcccatgactgttttgtaaggggaagtgatggatcggtgcttctgaactcaacaaccaatcaggctganaagaatgctcctccaaatctcacagtnag

SEQ ID NO: 1865 - DNA, 274 bp, Glycine max
  unsure (1)..(274): unsure at all n locations; Clone ID: 701039273H1
aacaaacacaaaccgaaaaggcgaaangggttttccgagtgagatctagggtttccatcgattcggngagaggatattgatacgaacgacctcagcgagcaaggacaggaggtggagtactagatcatggattcggtgccttgaattcgcatggaaacctcgatgagcagatttctcagctcatgcagtgcaaacccttgtccgagcaagaggtaagggtcttgtgtgataaggcaaaagagattttgatggaagagagcaatgtacagcctgt

SEQ ID NO: 1866 - DNA, 271 bp, Glycine max
  unsure (1)..(271): unsure at all n locations; Clone ID: 701039274H1
cttgattttntttccgctgaattaacattaacatgattgaaatttgaatattttgttttngattcatgggagacttgatttttgaatttctgtggctcgttaatttattaacggcaataaatattattactactaccttatgtaaaatgaattgtgtgtatattttgtctttaataccatatttaccctccaattttnccaactattatccttctcttccacgccgcacgccaacactcactcattcagcgcgattccgccggagaacgcg

SEQ ID NO: 1867 - DNA, 267 bp, Glycine max
  unsure (1)..(267): unsure at all n locations; Clone ID: 701039275H1
gttgttcctgcttnggtctggtctctcagctctgatagattggcaccgattctgggtgtgagccaaaaaagctttcttttgtttcctctgtttttcttttcggcaaagtagaagatatttgtnattttcttctgtgaatgaattcgagtcgttgcttctggcttcggtgcttgcngttttgttggcacaagttattggtccaattgaaatgaaagagtttgagtgaaaaggagacttagactgtgtggtctggccatggagaattct

SEQ ID NO: 1868 - DNA, 269 bp, Glycine max
  Clone ID: 701039276H1
gaaaaacgaacaagaaaaaatcggatgagctatacatttcttagcagaaacttcaccggacctgagaattgagaaagtgtagtttgagtttcacatcaaaagattgtgtgtaagaagcgttttcttcagatcgatggaaatcttgggattgatctaagctgcgccgttggatctctccgccacggccagttaccggagaaggactgcttgctccctctcatttccaaactcctcggctacgccatcgtcgcggcttccaccaccgtcaa

SEQ ID NO: 1869 - DNA, 268 bp, Glycine max
  Clone ID: 701039277H1
accaattagcctaaaaacactcacaacccaacccaagttttttcagtttttctcttcccaaagagttttgttttgtctattgttctcatgggtgggtttgaacagcagatgaaggatagagccaaggagctcaaggtctgctcaagaaaggggtgaagattgtgggagattcatgcaagaaggggtggaacaaagtcaaacacatcaaacgctagctgattagtgatttgtaatcatttgttgcatggcttattatcccaaagtctct

SEQ ID NO: 1870 - DNA, 271 bp, Glycine max
  unsure (1)..(271): unsure at all n locations; Clone ID: 701039278H1
ccaaaacatcagtcatctccttcacaggaaccctaaatctgaaactaccttgactccgctcagccacggctgagaaaatagctcgtcttcacgatccagcgattccgctctccaacgggactgcgcagggtgaagaatcgaaggccagccgccggtgaagaatcgcgcgattnctctggaaatcgcnnttccagcacgattcatgcccgatacagagatttaaccacgattcaggaacaaaaacgagacaacctccgattcgtactggtag

SEQ ID NO: 1871 - DNA, 271 bp, Glycine max
  Clone ID: 701039279H1
ctaccgtttctcctgcaaaacagagcttgattctcaatacaccattctttcttctcctttcgaagcactgccaaataaaaatggagtggcctgcgtgtacggacgaatacgaaaagctcataattcggatgaacactcccaggttgtcattgacaattccgttttctcctcagctacgctagtcaaggttgacagcgccagaaggcatggtattctattggatgctgtagaagtgctagctgacctgaacctttcaattaagaaagcgtat

SEQ ID NO: 1872 - DNA, 61 bp, Glycine max
  unsure (1)..(61): unsure at all n locations; Clone ID: 701039280H1
gnnntggaaacccctacntaaacccctccctgtcgctccatccacacancatacnantaac

SEQ ID NO: 1873 - DNA, 273 bp, Glycine max
  unsure (1)..(273): unsure at all n locations; Clone ID: 701039282H1
cagatatcttgctagggttttaggaaaagacactgtctcgcgagtnaacacaggttacagcaatgggctttctttggtagaattgggaatttattaagacagacagcaagcaggcaggttagttcagaattgcgatcatcccttcnntttttcaggctatacgcagtatgtcatctgctccaagcacaaagctgtttatcggaggtgtttcatattctactgacgagcaaagtttgagggaagctttttcaaaatatggtgaagttgttgatg

SEQ ID NO: 1874 - DNA, 273 bp, Glycine max
  unsure (1)..(273): unsure at all n locations; Clone ID: 701039283H1
gggaaaattagccncacaaaagcaaagatcaaacaaaccaaggacgagaacacgatgttgcttgaacttgcacttggtttattggttttggctctgtttctgcacttgcgtcccacacccactgcaaaatcaaaagcacttgccatctcccaaacccaccaagcccaaagcctcgtctccccttcataggacaccttcatctcttaaaagacaaacttctccactacgcactcatcgacctctccaaaaaacatggtcccttattctctctct

SEQ ID NO: 1875 - DNA, 270 bp, Glycine max
  unsure (1)..(270): unsure at all n locations; Clone ID: 701039285H1
aaatctcgaattagggttctgattttaactaattttccgttttgatggtacttttcaatttgggtnaatnccgatnaangatgatgattcatgatttgcatagtgattgtggaagctcaacagagggattggtactgtagaagggctaggagtccctgaaatgtatatgcctgtggctacctctgccacgctgcgcggcggattgcctactgacagtggggactctgttgtggcattagaccaagttcctcgatggaatgatgctgatca

SEQ ID NO: 1876 - DNA, 272 bp, Glycine max
  unsure (1)..(272): unsure at all n locations; Clone ID: 701039286H1
caattccactcccaccgaccaaaacgcgcaacacgttgtaattaaaacgacaccgaaactaatgggcgtcttcagcgaaaacccgaatccggacccggttgtgatccgccaggtttgggcttcaaatctcgaatccgaatncaactcatccgcgaactcatcgaccactatccttttatctcgatggacacagaattccccggtgttgttttccgaccacacctggaccccacaaaaccctacaaccaccgcaacaacaatcgcaaccgcca

SEQ ID NO: 1877 - DNA, 272 bp, Glycine max
  unsure (1)..(272): unsure at all n locations; Clone ID: 701039287H1
gagaagacatattgttgagggtattcttattgggtttgataattctggatggagtgattcgcataatacgtngnagcntcaagtaactcggctgcagcagctggtttacgtaatgcattcagtctctctgagaaacaagctaagctcttctggacattagccnaagaagactgtcccttcgtgagagtggaaactttgtggctgaaagtaaatctttgatggaacaaatttccaagttagaggaactgttgtccagcaggaaaaatatactg

SEQ ID NO: 1878 - DNA, 268 bp, Glycine max
  unsure (1)..(268): unsure at all n locations; Clone ID: 701039289H1
attccacaacagtgggagggngatccaaaaagagagagtggaaaagatggcgcggttgatcacagtggtgtggtgcgcggtggcggtgctattatgcgccgcggccggtgcgtcgtgggtggaggaggcggcgaacccgtacgaatggtgtctggcgtggaggcggaggtggttcgggtgatcggggagtgccggcgtgcgttgaagtttgctaggttcgtgagcaggttcgggaanagttaccaaagcgaggaagagatgaaggaga

SEQ ID NO: 1879 - DNA, 268 bp, Glycine max
  unsure (1)..(268): unsure at all n locations; Clone ID: 701039290H1
gcaacccacaaaagcagcacaagaacactcatcagatcccagtgatcaattcaatttgcgttcatcactggtaaggcaaacatgaggggcattctttccgtaaggacagccttggttcaacatcatagtgagaaattgtccttggtttcagagtatttagcactcagggtgcttccactgctagtaccnnnnnnnnnnnnnnnnnnnnnnnnnnnnnggagaaaacccattttggcggccttaaggatgaggacaggatatttactaa

SEQ ID NO: 1880 - DNA, 266 bp, Glycine max
  unsure (1)..(266): unsure at all n locations; Clone ID: 701039291H1
ctatcaacgaacccactgccgctgccattgcctatggattggacaagaaaggtggcgagaagaacattctagtcttgatcttggtggtgggacctttgatgtcantatcttgacaattgataacggtgtttttgaattcttgctacaaatggagatactcatcttggaggtgaggattttnatcanagaataatggagtacttcattaaattgatcaagaaaaagcatggnaaggatattagcaaggacaacagagcacttggaaa

SEQ ID NO: 1881 - DNA, 265 bp, Glycine max
  unsure (1)..(265): unsure at all n locations; Clone ID: 701039292H1
tcctttgtttctatggcttctgcagaagtagagttccgatgctttgttggngggcttgcttgggccaccgaccacgatgctctcgagaaagccttctctcaatttggcgaaatcgtcgaatcgaaggtcatcaacgtcgtgaaactggaagatccagagggtttggatttgtgaccttcgccacagagcaggcgatgagagacgcaattgaaggaatgaacggccagancctcgacggtcgtaatataaccgtgaacgaggctca

SEQ ID NO: 1882 - DNA, 267 bp, Glycine max
  unsure (1)..(267): unsure at all n locations; Clone ID: 701039293H1
aaaaatttctagagcgagaaagtgagaggagagagaaagtagctgatcctccatggcctccaccaaggaacgcgaaaactttgtctacaccgccaagctcgccgaacaagccgaacgctatgaagaaatggtggaagaatgaagaatgtggcgaactgaacgtggaatgccacggtcgaggagcggaaccttctgtcggtagggtacaagaacgtggtgggtgctcgtagggcttcgtggaggattctatcgtcgattnaacagaaa

SEQ ID NO: 1883 - DNA, 267 bp, Glycine max
  unsure (1)..(267): unsure at all n locations; Clone ID: 701039294H1
ccacgtcagantggtgatcttaccattatgtatgatgtgatcagaacttatgattcaaattactgggctgaggttaccgttgcaaaccataacccacttgggaggcttgataactggaggttgagctgggactggataatgatgagtttatatattcaatgaaaggggcttatccttcggttgtggatgcttctgattgtctctttggtaagcaaggaactttctatagggatcttgactttgcccttgtgttgaattgtgagagaa

SEQ ID NO: 1884 - DNA, 273 bp, Glycine max
  unsure (1)..(273): unsure at all n locations; Clone ID: 701039295H1
gtcctatctcagtattttcaaatcaggaccaagtagagaaggggtttgactttgagtttgatgattcatctncccctntctntccggcacaagctcaggtncgagaatccacagaggtaaccaaatattccaacccaatcctagatacataagcgncatacttcatggacgaggatgacgacttggagcgcanaccctgcatgttgcaggaatgtttgagactccangctgctgaanaatccttccatgatgccttctccatcaaaacccttc

SEQ ID NO: 1885 - DNA, 274 bp, Glycine max
  unsure (1)..(274): unsure at all n locations; Clone ID: 701039296H1
cgtgctgttgaatgtactggcagcatccaagccatgatctcagcattcgaatgcgtccacgatggttggggtgttgctgtacttgttggagtgccaaacaaagatgatgcattcaaaactcatccagtgaatttcttgaagagaggatctaaagggtaccttctatggaaactacaaaccccgcactgaccttccttctgttgtggagaagtacatggaatggggaattgggaactngagaaatncatcacttnacncagtnccattctctgag

SEQ ID NO: 1886 - DNA, 245 bp, Glycine max
  unsure (1)..(245): unsure at all n locations; Clone ID: 701039301H1
ggcatttcanttatcgtgtcttcttggctctctgtttaggatcgncatggatttcttttttccattggcantacttgtnatgatattaggcacaccatactctagtgcttctgganagagtgaaagtaatgtgaaaacanctgtttttctgtctcctaagtttgaacttggaccgggatcggttgaaaataaatatgattatnatattgattttccaagaggtcatatagcacttaagagtttca

SEQ ID NO: 1887 - DNA, 242 bp, Glycine max
  unsure (1)..(242): unsure at all n locations; Clone ID: 701039303H1
agaatcccaggcgaggagaaagatggaggggaaggagcaggatgtgtcgttgggagcgaacaagttccccgagagacagccaattgggacggcggcgcagagccaagacgacggcaaggactancaggagccgncgccggcgccgctggttgacccgacggagtttacgtcatggtcgttttacagagcagggatagcagagtttgtggccacttntctgtttctctanatcactgtcttaa

SEQ ID NO: 1888 - DNA, 73 bp, Glycine max
  unsure (1)..(73): unsure at all n locations; Clone ID: 701039305H1
cttcaggntatccatntagnaagtgtgctgccaatgaacaaaacacacttaagacaatcgccacaacagcgtg

SEQ ID NO: 1889 - DNA, 238 bp, Glycine max
  unsure (1)..(238): unsure at all n locations; Clone ID: 701039306H1
tttgttttgatactatataggaagaaaganaaactcttgaccgggagttagctcgtgccaaggtaacagcaaacagagtagctgtagtggttgcnaatgaatggaaagatgctaatgacaaagtgatgcctgtgaaacaatggcttgaagaacgacgattcttgcagggagagatgcagcaacttcgggacaagcttgctataactgagcgaactgcaaagtctgaagcacagttaaa

SEQ ID NO: 1890 - DNA, 237 bp, Glycine max
  unsure (1)..(237): unsure at all n locations; Clone ID: 701039308H1
ctcaaattaaaattaatttaagcaagccaaacactatatcaaggggaaaatggcagnggctaatgtngtgctgttggatttctggccaagctcttatggaatgagagtgaaaatcgctttggcagagaagggaatctcatatgagtgcaagcaagaagacttggaagctagaagctctctgcttttagagatgaacccggttcacaaaatgataccagttttgattcataatggaaa

SEQ ID NO: 1891 - DNA, 240 bp, Glycine max
  unsure (1)..(240): unsure at all n locations; Clone ID: 701039309H1
aagagaatggctcgnaagggtntaatctttttggctgtgttatgcttctcagcactgtcantgagtccgttgtcttgcggaggntaatggacttgttatgaacttctacaaggaatcatgccctcaggctgaagacatcatcaaagaacaagtcaagcttctctacaagcgccacaagaacactgcttncctcctggctcagaaacatcttccatgactgtgctgttcngngttgtgatg

SEQ ID NO: 1892 - DNA, 240 bp, Glycine max
  Clone ID: 701039310H1
gagaaaaacagatagtgtgggagagagaagagcggaagagaaaatgacgaccaggttcaagaagaacaggaagaagagaggtcacgtcagcgccggacacggccgtatcggaaagcaccgcaagcatcccggaggtcgcggtaacgccggtggcatgcatcaccaccgtatcctcttcgacaagtaccatcctggtttcttcgggaaggtaggcatgcgctacttccacaaacttcgcaa

SEQ ID NO: 1893 - DNA, 218 bp, Glycine max
  unsure (1)..(218): unsure at all n locations; Clone ID: 701039312H1
tcggtggttgccagacagttaccctctgtcaccacaacttgcggctgtncgggtcancgctgtcttgttggtgttatttgtaatggaaccctttacatagcaaaccttggggattcccgggcagttttgggaagagcagtcaaggcaactggcgaggttttanccatgcaattatcagcagagcacaatgcatcgatagagactgtaagacaggagct

SEQ ID NO: 1894 - DNA, 241 bp, Glycine max
  unsure (1)..(241): unsure at all n locations; Clone ID: 701039314H1
gaagccttattntgctctctgttctttctctcaacaatcgttccaacaaatcaagagagctgaattctgaagcttttgctacgtttctaccattcaggtttgtttctccgaacgcgaaaatctaatacttcttttagggtttgtgatggatgatctgcgagaatctatgttctatccgacttcatttatctcagtgaagttttctgcgcttccacgatgcaaatatagccgtttcgcgttt

SEQ ID NO: 1895 - DNA, 240 bp, Glycine max
  unsure (1)..(240): unsure at all n locations; Clone ID: 701039315H1
ggacatacaatccataagagctgcctgantganatgagagaacatttccagtattcgtgccctctctgcttganatcagtctgtgacatgtcaaaggtttgggagaaatttgatatagagattgctgctacaccaatgcctgagcaatatcaaaataaaatggtttggatcctgtgcaacgattgtggtaaaacttctcacgttcagttccattttgtggctcaaaagtgtccgaactgc

SEQ ID NO: 1896 - DNA, 236 bp, Glycine max
  unsure (1)..(236): unsure at all n locations; Clone ID: 701039316H1
ctccccctccccgattcgttttgcccctttcgtngccctaatttcaacacatgcctacgccgtagctnccggtggaagatctgcccgtcctgctcctcgtgcagcacctcgtcntgctccagttcaccatgctcctcctccagcccctgctcagagcggtggcggatctatgcttggtggcattggttcaaccatagctcaaggtatggcttttggcatggaagtgcagtggcaca

SEQ ID NO: 1897 - DNA, 241 bp, Glycine max
  unsure (1)..(241): unsure at all n locations; Clone ID: 701039318H1
cnaacttcaaatatagctagctaggtacaatacaattcaccggagcaaatactaaggaggtttagctcaattgattcagcaagtgtgtgagtnagttattgtaaactttctgatatctgtcttccatttttatgattaanaaaatcagagcaatgaatgttttatatttaagctcaagttcaagcctaagcatgtccaagccgtttcaattctcaagtaaacatcatcaaagagcttctag

SEQ ID NO: 1898 - DNA, 238 bp, Glycine max
  unsure (1)..(238): unsure at all n locations; Clone ID: 701039320H1
gtcggaactcggaagtgggtttgcgtcgtcgtgaggtttaacgagacgatganggcactgtttctgttcttcattctcttctctctcagctatgcctccgaacaaatcttccccgctcatatcggtagcatatttggtggtggcggtggtggccgctctcgcgaaccaaaatacaagattgaatttcatcccgaagatttcccttttcaccctgatgatgatcaggaatctatagtca

SEQ ID NO: 1899 - DNA, 237 bp, Glycine max
  Clone ID: 701039322H1
tctctctcccttagtcaaagggactcattgttcttctcccaggttatttagaaaagcaaaatggtgaagatttgctgcattggtgctggatatgtggggggtcctactatggcagtcattgcacttaagtgcccatccattgaagttgctgttgttgatatctctaaatcccgcattgcagcctggaacagtgaccagcttcctatctatgaacctggccttgatggtgttgtgaag

SEQ ID NO: 1900 - DNA, 234 bp, Glycine max
  Clone ID: 701039323H1
tagcagcggaagtctagcttgggcagcgaatcacaatggcgagaggattgaagaagcatttgaagaggcttaatgccccaaagcattggatgcttgacaaactgggtggtgcatttgctcctaagccctcatctggaccacacaaatccagggaatgcctgccactcatactcattttgcgaaaccggctgaagtatgctctgacataccgtgaagtcattgctattctgatgc

SEQ ID NO: 1901 - DNA, 238 bp, Glycine max
  unsure (1)..(238): unsure at all n locations; Clone ID: 701039324H1
gcctttcttattcttccttccaagaaaccactncannnacatcaacttccttagacttgcanaccctttgtgntnggnantagtaatctcatcctcttgntatcattcagattgatttctcncctagcacctcgatcaangggctaaaagtttaaactttgctgcttaaacttttctttcacggtttgatacatcttattgattttagtgctatttcaaaggggcgaaatttgagaca

SEQ ID NO: 1902 - DNA, 238 bp, Glycine max
  Clone ID: 701039326H1
ctccaattagggtttttgtgatctgcagctacgatgggtaagggaacggggagtttcggtaagaggaggaacaagacccacaccctctgtgtgaggtgtggccgccgcagcttccacctccagaagagtcgttgctctgcgtgcgcttaccccgctgcgcgcaccaggaaatataactggagcgtgaaggccattaggagaaagaccaccggaactggaaggatgaggtacttgcgta

SEQ ID NO: 1903 - DNA, 235 bp, Glycine max
  Clone ID: 701039327H1
accgcgcggtgggggctttcgtgagtcactgcgggtggaactcggtggtggaagggttgatttcgggggtggcgatgctgacgtggccgatgggtgcggatcagtatacaaacgcttctcctccccgaacctcagttcccgaacccgaagcaaaacgacaacccggaagacccaaacggcgttgtttcgttcccaaatctcccaaattccccattctacccctggtggcagatca

SEQ ID NO: 1904 - DNA, 135 bp, Glycine max
  unsure (1)..(135): unsure at all n locations; Clone ID: 701039328H1
cntcgcttgtngctnctagcattggtancaatcctcaccctcgcttttcttgttaccctcatttccacaagagaatccaccttcatcaccactgcaacttcttctgtgactccctctncaaataatgcnccagtt

SEQ ID NO: 1905 - DNA, 241 bp, Glycine max
  Clone ID: 701039329H1
ctcgcaagcaaaaagaaagaatcccaggcgaggagaaagatggaggggaaggagcaggatgtgtacgttgggagcgaacaagttccccgagagacagccaattgggacggcggcgcagagccaagacgacggcaaggactaccaggagccggcgccggcgccgctggttgacccgacggagtttacgtcatggtcgttttacagagcagggatagcagagtttgtggccacttttctgttt

SEQ ID NO: 1906 - DNA, 125 bp, Glycine max
  unsure (1)..(125): unsure at all n locations; Clone ID: 701039330H1
gcttcttctaatggccatagntcaccgaaatcagagttggaaactcaagaggttgagaaaattgcatcaggagaagttgaaactgcttctggctctcattctgtcactacttatagtgaacagaa

SEQ ID NO: 1907 - DNA, 87 bp, Glycine max
  unsure (1)..(87): unsure at all n locations; Clone ID: 701039331H1
gtgagtgagtcgnttctctgnactaaactggtttagccanttcnaaacagacgggctatgggtcgtggggtcagtgctggtggtggt

SEQ ID NO: 1908 - DNA, 90 bp, Glycine max
  unsure (1)..(90): unsure at all n locations; Clone ID: 701039332H1
cnaccactacctctccgtacacccacctggaccgaagagatncaaccgctcgccaganccatcaccgttcctggaccctncgacaatgct

SEQ ID NO: 1909 - DNA, 243 bp, Glycine max
  unsure (1)..(243): unsure at all n locations; Clone ID: 701039333H1
aggctctgatcgcntttgcnctcttagcttcccttttgctgtgcttgcaagcttcctccgatgtccccttcatcgtcgctcacaaaaaggcctccctcaacagactcaagtccggcgccgaaagggtctccgtcaccatcgacatctacaaccaaggaacctcgacggcctatgatgtaagcttatcagacgatagctggccaagtgatgcttttgatgtaatcagtggtagcacatcaaagt

SEQ ID NO: 1910 - DNA, 221 bp, Glycine max
  unsure (1)..(221): unsure at all n locations; Clone ID: 701039334H1
cagaaatcangaaacttgatgactggtgtgggtatagcngtagcatgaaaaggananacgtgccacaaaactatacgganccctatagactctggagtctggactgaaatcgaagtcgaagcaagcnatgggcaacgctcagtcaccttccaacaatgatcctncgatatgtttcagcaaccagagcttttactcaaaaggaattgaagacttgaggtctc

SEQ ID NO: 1911 - DNA, 238 bp, Glycine max
  Clone ID: 701039335H1
caaatgttgatttacgaatttatgcccaatggaacacttagggagagtttgtcagggagatctgagattcatcttgactggaagaggagactccgcattgctcttggttccgccagaggacttgcatacttacatgagcttgccaaccctcccataatccacagagacgtgaagtcgactactatattgttggatgaaaatttgacagcaaaggttgcagattttggctgtccaagct

SEQ ID NO: 1912 - DNA, 238 bp, Glycine max
  Clone ID: 701039336H1
ccaatatgtattggaaggcatgcgtttggtgatcaatatcgggctactgacactgtaattaaaggagctggaaagctgaagctggtgtttgttccagaaggccaaggtgaggaaactgaattcgaggtttttaacttcactggtgaagggggtgtttcattggctatgtacaatactgatgagtctattcgttcttttgccgaggcttctatggcaactgctttagagaaaaagtggc

SEQ ID NO: 1913 - DNA, 237 bp, Glycine max
  unsure (1)..(237): unsure at all n locations; Clone ID: 701039337H1
gngggatttatggatgaacaagtttgattgggaccaccctattcacttgcagccaactagtcctacaactgagnagaaagttagtgtggtttgggatgcatacgaggcaacaaaggatgcagatggtgtctgcattctcactgagtgggatgggttcaagactcttgattatcagaaggtgtatgacaacatgagaaaaccagcatttgtttttgatggaaggaacattgtggatgt

SEQ ID NO: 1914 - DNA, 235 bp, Glycine max
  Clone ID: 701039342H1
cttttccattccaacctctttcacacttcagatctgtttcttcatcggttgttcaagtaaatggcctttgtcaccactgctgaagtgtgtgatgcgaacccacagttaattttgagtggggagcttcgtgcccttcagccagtttttcagatttatggccgtcgacaggttttctctggacctatagttaccttgaaggtgtttgaagacaatgttttggttcgtgagttcctga

SEQ ID NO: 1915 - DNA, 179 bp, Glycine max
  unsure (1)..(179): unsure at all n locations; Clone ID: 701039343H1
ccaccactcactcactcactcacttccctcacaattcccaatcctcacgttgcctcnttcacatgaagctcctctcgcgctccgtgttttcgctctctccctgaatcatcatccttataataaataaattctctctctcgaagaagaaggagaaagaggttttcattgttcttgttgtt

SEQ ID NO: 1916 - DNA, 238 bp, Glycine max
  Clone ID: 701039345H1
caggtcctcaggctaagaagcttgaagggtctgtttctaaccttcttgatgaccagaactcacagaccaatcagtgccagtgaatatacacgagaataaaagcattttaggaagttgtgcaatctaagcaccacgattcatcgaccagtagaagttgccttttgctgaaatcacattctttggtaaccaaaatgtaatatcaatcttggagtcatagcagtgtttgtgagtgttgata

SEQ ID NO: 1917 - DNA, 239 bp, Glycine max
  Clone ID: 701039347H1
ctcaagttggatcttccgtatgcaatcctcctgttagtgtgtacaagggatactcgttgtcaaaggacaccgaggaatatcttgtctcacatggactgaagaatgctttatacacaattagagctactgatttgaaagaggatttgtttggcatgcttgttccttgccctttccaggaaccttctaccaaagagggcacatcaaataaggacgtatctaaacagagatctttgggagtg

SEQ ID NO: 1918 - DNA, 243 bp, Glycine max
  unsure (1)..(243): unsure at all n locations; Clone ID: 701039348H1
tgcgctgcggttagaagagattcaatctgaatctgaatggnagctatcagaaagcnagcctccaaacttcgagaacaggtcgcttcgtcaacaacaggctgtgcttaaacagtttggnagctgggggatatggaggttcagataatatggttactgatgaggtagagcttcagcaacatcagaaacttgagaagctttacatatcaacacgtgctggaaagcattatcaaagggatattgtcc

SEQ ID NO: 1919 - DNA, 238 bp, Glycine max
  Clone ID: 701039349H1
agttgtcttgtctgcgttctcaaacgttgttgcttgctgctgctgcatagttgatcgaaagcatgacaacatcattgtccagcatccttttcaagggaattgcagctcgttctttcaccgcccctctaactaggtcctgttatcatggaatgagatactttgctactgtatcaaatgatcctgacacacatgatgacttcaagccagctaataaacttgagaatccaacatttctttg

SEQ ID NO: 1920 - DNA, 231 bp, Glycine max
  Clone ID: 701039350H1
ctgactcagaaattccacaatcaataaggtgaaattaattgccacttctttgatctcgtgtccttttttctgatataacagatcaagctagctgaagaagctggaaatggttccaaggtcactagtaccaccacctcctccacttcccaaattctcaagaccaaaagcagaagagagtgtcacaaaccgagaaattgccaagttttggaggcaaaagaggatcgtggagga

SEQ ID NO: 1921 - DNA, 236 bp, Glycine max
  unsure (1)..(236): unsure at all n locations; Clone ID: 701039351H1
cgcgtcgctgctccgtaccagtttcactgcataaatttgagaganaactctgcaaacatgttggtttatcaggacctccttacaggtgatgagcttctctcggactccttccgttacaatgaaattgagatggaatgctgtgggaagttgaggggaagtgggttgttaagggagcaggcatgttgacattggtgcaaacccttctgctgagggtggagaagatgagggagtcgatg

SEQ ID NO: 1922 - DNA, 234 bp, Glycine max
  unsure (1)..(234): unsure at all n locations; Clone ID: 701039352H1
atgccttcaccccaaaaccagangcattgaatgaacagaaggcattttcagcatcagcatcaacatgggtggggattctattgtttctcatggtacagacgaaggttcttgtttggaggagaattttcccttgctttcatctcactcctcacctgctctcagggataatttgggcttgcaggatgaagacaacagaatgaaagcggagaatgggttaacttgtagtgaaatgat

SEQ ID NO: 1923 - DNA, 234 bp, Glycine max
  Clone ID: 701039353H1
gtgtgtttgcagattgatgacaagcaaccccattacgtggaagcctaagaggagaagacgacgaagaggacaaggttaactgaatcgccgcttctgtgtggcttcgttctttcgttttagttttttcatctttttagctttagagggtaatacattctttaaaaaaatggaggttttggtgggtcccgctttcaccatcgacgttcctcgtctccgccgcgggatggcggttcc

SEQ ID NO: 1924 - DNA, 237 bp, Glycine max
  unsure (1)..(237): unsure at all n locations; Clone ID: 701039354H1
cccaaattctcctgcaaactctgaagcagctcgaatgtttagtgagaacaagcgtgagtacaatcgaagagtgagggaaattgtggagcagagttggacagcagattaagttcatccttatatgcatgggaagctttgaaggcatgaatttggttgcagtgatggcaactataagantgattgtgcaaactcatcacatttatattctctgctgatatgnatgatagcatcatctta

SEQ ID NO: 1925 - DNA, 235 bp, Glycine max
  unsure (1)..(235): unsure at all n locations; Clone ID: 701039356H1
cnttatttgtctatcttattttgtaattntnaggctaganatcaataaacttttgatgcatgatgatatgatccatttttgattggntgattcaatgcataacatttttgctcttattttatacatgtaggnataattaattacgttttaatacataatttcaggacaaaccttacagcaagtngaccgaggccaaacccgcaaggntcgtaccattacggtatgataaacacga

SEQ ID NO: 1926 - DNA, 236 bp, Glycine max
  unsure (1)..(236): unsure at all n locations; Clone ID: 701039357H1
gnaaatgttgaggaaggaggagtggaggggaacggatctgctgggtgggactagataaagtgaagcaagctgacaagactaagggaagnttggatggtggaaatggaatcggcagctgaaaaccctaattacccggcggtggactacaagcgaccttccatcttgtcatttcctcggaggcccgccctcagagttacatccgagttcgatagtgaaagcgcagtcttcttccataa

SEQ ID NO: 1927 - DNA, 238 bp, Glycine max
  Clone ID: 701039358H1
ggccaggcaagccccactcaaccaccacacctctcctcgttcacgctacccctttctgctcttcttctacctttcaagttttaaaagtataaagatggcagagacattcctatttacctcagagtcggtgaacgagggacaccctgacaagctctgcgaccaaatctccgatgctgtccttcgacgcttgcctcgagcaggacccagacagcaaagttgcctgcgaaacatgcaccaa

SEQ ID NO: 1928 - DNA, 233 bp, Glycine max
  unsure (1)..(233): unsure at all n locations; Clone ID: 701039360H1
gtcggtggatcgaaggtgtcttccaagattggagttattgaatccttgttggagaaagttaatgttctcttgcttggtggaggaatgatctttaccttttacaaggctcagggttattcagttgggtctctcttgtggaggaagacaagcttagccttgcaactacacttcttgaaancgccaaggctaaaggggtttcttgttgcttccaactgatgttgtcatagcagaca

SEQ ID NO: 1929 - DNA, 81 bp, Glycine max
  unsure (1)..(81): unsure at all n locations; Clone ID: 701039361H1
cccggtttatgacgttgatgtccantntnatnactttntactaccacagggttacaatctantttnattcantcacgggna

SEQ ID NO: 1930 - DNA, 148 bp, Glycine max
  unsure (1)..(148): unsure at all n locations; Clone ID: 701039363H1
gncggaaccaacggagccatgcacgtcatcttccttggcaagggacccaaccaccgtgctccacccaaggcgcgagcccttacgagcacggcctcttgccgatcccgcgcctcatcttctccgacccggcgcaaaccctaattccgtt

SEQ ID NO: 1931 - DNA, 243 bp, Glycine max
  unsure (1)..(243): unsure at all n locations; Clone ID: 701039365H1
ctttgcgcagttccctacctctcctttcaagatgcatatcttcgtcaagaccctcaccggaaagaccatcacccttgaggtggaaagctctgacaccatcgacaacgtcaaggccaagatccaggacaaggaaggaattcccccggatcagcaacgtctcatcttcgccggaaagcagctcgaggacggccgtaccctncgccgactacaacatccagaaggagtcaacccttcaccttgtcc

SEQ ID NO: 1932 - DNA, 236 bp, Glycine max
  unsure (1)..(236): unsure at all n locations; Clone ID: 701039366H1
aaaacaagaaagtgttcgttgaatctgttgaaagtggtgacttgatttgatttattcacataaccaatttatcatctctccgatctttcaatggattctgacttctggacctcgcgtcttgctgccgctaaacgccaatacacgcttcagcatcaccatccaaattctcacttagatcggttgggnatcgatgattttgatgtggaagaagaggtgagacctgattttcctgcccg

SEQ ID NO: 1933 - DNA, 238 bp, Glycine max
  unsure (1)..(238): unsure at all n locations; Clone ID: 701039367H1
gncacgaaagaatttcttgttttctgctttcgaataaacgaataagaagccttcacaccgcttcgttgtgctgtgcttgcttctcttttattctttctattagtattcgtttcgttttctccgccgtttccgtagctcggcttcagcagcaccagaaccaggtgtctactatctgaatttnacatgtgctgttattgtcttccaattgggtgaagtctgattgaagagcaatgcagaa

SEQ ID NO: 1934 - DNA, 236 bp, Glycine max
  Clone ID: 701039369H1
cactaacccaggttatgttaacgaagaaggaaggttaaggattttgccttaccatgacttcaacaaagcttcccatggctgcaccttgtgtcctccaaatatgtgcaagggtttaatcattgatagaatccaagattcaatttcacaagagggtaacaagaggatgatctatcttggtgatggtagtggtgactattgcccaagcttgaggctaaaagagagagactatatgatgt

SEQ ID NO: 1935 - DNA, 235 bp, Glycine max
  unsure (1)..(235): unsure at all n locations; Clone ID: 701039370H1
cggcctaccacgagcagttgtcggtgccgganatcaccaatgccgtgttcgagcccgccagcatgatggccaagtgtgatccaaggcacggcaagtacatggcttgctgcttgatgtaccgtggtgatgttgtccctaaggatgtcaatgctgctgttgccaccatcaagactaagnggactgttcagtttgttgattggtgtccaactggattcaagtgtggtatcaactacca

SEQ ID NO: 1936 - DNA, 85 bp, Glycine max
  unsure (1)..(85): unsure at all n locations; Clone ID: 701039371H1
gcagcagaagaacgaaactggctggacctttccgtcgacgacgttactgtngcacgattttccagaagctcgggccgccatccga

SEQ ID NO: 1937 - DNA, 224 bp, Glycine max
  unsure (1)..(224): unsure at all n locations; Clone ID: 701039372H1
tccattcacaaccttaaaccnttccttcttgtaaactttattgattgattctnngaataganctaagagggtatagacatggctagcgcaattgcagcttcttttttggttctgcttctggctttccccactgtatttggagctgaccatgaagttggtgacactagtggatgggccctcggagttaattacaacacctgggcctctgggaaaactttcacagt

SEQ ID NO: 1938 - DNA, 235 bp, Glycine max
  unsure (1)..(235): unsure at all n locations; Clone ID: 701039373H1
cnatttgcaggcgttcanttatatggtggaccaagagccagtaacttattaaatatttctganacacactctttccatctggagtatagctcactggcttgtacagttgaaattgtagatgatgtatttgctgccattgaccacatacatcaccatggaagtgctcatactgaatgcattgttgcagaagactctgaagtcgccgaagctttcttaagtcaggttgacagtgctg

SEQ ID NO: 1939 - DNA, 234 bp, Glycine max
  Clone ID: 701039374H1
ctctttcttcctcttcctcagtagtgcgattttcgattctcttctctgcaactatgcctaaccctaaggtcttcttcgacatgaccatcggcggtcaacctgccggccgcatcgtgatggagctctatgccgacgtgactcccagcaccgccgagaacttccgcgcgctctgcaccggcgagaagggcgccgggcggagggcaagcccctccactacaaaggctcgtcttccac

SEQ ID NO: 1940 - DNA, 171 bp, Glycine max
  unsure (1)..(171): unsure at all n locations; Clone ID: 701039375H1
gagaaagaaaagaatggcaaagttaataanattctttgagttgaacacaggggccaagattccttctgttgggttaggcacttggcaagctgagcctggtgttgtagccaaagctgtcaccacagccattctggttggatacaggcatattgattgtgctcaagcgtataa

SEQ ID NO: 1941 - DNA, 232 bp, Glycine max
  unsure (1)..(232): unsure at all n locations; Clone ID: 701039376H1
tttatttaattttaatgctaaatgtagttttggtcactaaagggtctaaattgatattaattcttcttttttaagggaaattgatattaattattgtatctttaaaaaagtgattttgatcttgtattttgtacttggtcaactcgaaataaagtatataggccagggtctaaatntcttttaattcttgtatctaaaaaccattattttgataatctatataaactaaaat

SEQ ID NO: 1942 - DNA, 237 bp, Glycine max
  Clone ID: 701039377H1
gtttttgagtgcggtgcggcgatcctagcactctcttctgcagctttcgccgacagcttcattcaccatggctgagcaaaccgagaaggcttttttgaaacaaccaaaagtgtttctcagctcgaagaaaactgggaagggaaagagacccggaaagggtgggaaccgcttttggaaatccattgggcttggatttaagactcccagggaagccatcgaaggaacctacattgacaa

SEQ ID NO: 1943 - DNA, 238 bp, Glycine max
  unsure (1)..(238): unsure at all n locations; Clone ID: 701039378H1
cganaaatgaagtctttccatctcacagtgacagctttgtgctgtgtagtngttgtgcttggngtgcttccactctccctagatgcacaactagatccctccttttacagagacacttgtcccagggttcactccattgttcgtgaagtcgtcaggnacgtttcaaagaaagatccccgtatgcttgctagtctcattagacttcactttcatgactgctttgttcaaggatgtgatg

SEQ ID NO: 1944 - DNA, 121 bp, Glycine max
  unsure (1)..(121): unsure at all n locations; Clone ID: 701039379H1
ttgtgancttcagggcgaggnggcacgttggggtgcgagtttcgaacgcgctgataccaccagatggagggnagctcgtggagcttgtggtgacggattttgagagggatttgaaganggg

SEQ ID NO: 1945 - DNA, 82 bp, Glycine max
  unsure (1)..(82): unsure at all n locations; Clone ID: 701039380H1
gcatctttgttctctctctaacgatttcgccattcaacagcgatctttccgtctcntnccntcgtccatcaaagctcccatt

SEQ ID NO: 1946 - DNA, 123 bp, Glycine max
  unsure (1)..(123): unsure at all n locations; Clone ID: 701039381H1
gtantctcttttttcagtgtgtagcatctcnccctgntacaaggntgctattcntcnatgntcanataccnctatatctgtatcccttccttaatngaacaagcaagtcaagacnatttgagt

SEQ ID NO: 1947 - DNA, 235 bp, Glycine max
  unsure (1)..(235): unsure at all n locations; Clone ID: 701039383H1
ttctcttcaattttagcaacaacaacttcgacatgggttcttcttggcccgccaccagcgccgatcaaggcgaaaacgacccttcctcgctctggctcagcgatcccgaagttagggattccgttaacactgctgctgctaccccttcggtcatggttcctgcacagactcagggganttcgatttcaaagacgatgcagttagagagttctattcaaacccctggttcgagtac

SEQ ID NO: 1948 - DNA, 122 bp, Glycine max
  unsure (1)..(122): unsure at all n locations; Clone ID: 701039384H1
cgtaaatctatatcaattgtactgttattagtttgatttgctacctagaagaagttagatgtttcttatgntcaattcttgcaacaacattgtttgttataaatagcagcttattcttttac

SEQ ID NO: 1949 - DNA, 232 bp, Glycine max
  unsure (1)..(232): unsure at all n locations; Clone ID: 701039387H1
gttgagaccaagacacactcgttcatatatctctctgctcttctcttctcttctacctctcaagtttttgaagtataaagatggcagagacattcctattcacctcggagtcagtgaacgagggacaccctgataagctctgcgaccaaatctccgatgctgtcctcgacgcttgcctcgaacaggncccagacagcaaggttgcctgcgaaacatgcaccaagaccaactt

SEQ ID NO: 1950 - DNA, 234 bp, Glycine max
  unsure (1)..(234): unsure at all n locations; Clone ID: 701039388H1
ctgggccgtgctagaaggtttgattcaataancaagttgctagcgcagatggtcaaggatggatgccaanccaatgttgtaacatacaaccgccttattcattgctatggctgtgcaaactacctgaaagaagcactgaatgtgttcaatgaaatgcaggaggtgggatgtgagcctgatcgtgtcacatactgtacactcattgatatccatgctaaagctggatttattgat

SEQ ID NO: 1951 - DNA, 234 bp, Glycine max
  unsure (1)..(234): unsure at all n locations; Clone ID: 701039389H1
ganattgaggnaaganacangagaattaggtttgaggnggagactagggataagattgatganaaggngagggaaattaagggttacagacagaaggttgagggattggagaaggttgctgctgagaaaaaaacagaattagatgagttggttaaacagaaattgaggttggaggaatcacttagagaatctgaggagaaagtnactggtttggagtccagtattcttcaattg

SEQ ID NO: 1952 - DNA, 233 bp, Glycine max
  Clone ID: 701039390H1
tcaaacatgaaacccttgagactctctgtttctgaccttccaatgttgtcgtgtcactacatccaaaagggcgtgttactaaccgctccgccctcgtctttcgaggatatgatactctcttttaaacactctctttctatcgcgctctctcactttccggctcttgcgggaaggttagagacagattctcatggttatgttaatattgtctgtaacgacgctggcgtggattt

SEQ ID NO: 1953 - DNA, 235 bp, Glycine max
  unsure (1)..(235): unsure at all n locations; Clone ID: 701039392H1
cnaacagtctctgcagcagtgtggttcaaagaatggttcggatgatagcaggatttgttcttaatttgctaccaaaatgcaattggtgggaattagtgaatggccacactagccaacaccatagtgtgtgtgggtgtgtagaggggtgatagtgttgactgttgaaaaaaccttgtannagaagaaagaggcatntttagttgaaatgctgtagcattttgatggagtttactgt

SEQ ID NO: 1954 - DNA, 234 bp, Glycine max
  unsure (1)..(234): unsure at all n locations; Clone ID: 701039393H1
ccgattctgatgaaaggtcatgagaggccattgacgttcctgaaatacaacagggacggcgatctcctcttctcctgcgccaaggaccacaaccctaccgtctggtttgccgacaacggcgaacgcttgggcacttatcgcggccacaacggcgccgtttggacctgcgacgtctcaagagattcggctcgactcatcacgggaagtgccgatcagaccgccnagctatgggac

SEQ ID NO: 1955 - DNA, 236 bp, Glycine max
  Clone ID: 701039394H1
gcaaataagttctcagttatcagcccttcctattgtgttcctaactctcttaacctacaaattaacacagagaaaggtgttacttacaacgtaaagggtaaccgtgtattttacataaaagatactttgttcacatttcacggtcgtcgcgtgttatgtgatgataaaggaagtcccatcgtcactctatacaagaagaatgtgacattgcacgggcaatgcaaagttttcagggg

SEQ ID NO: 1956 - DNA, 213 bp, Glycine max
  unsure (1)..(213): unsure at all n locations; Clone ID: 701039395H1
ttttcctttggtcttctttccactctctgtcnctctgactgcttcttgttgttgtaactaaggaanaagagattgcttcttcttcccttttgttttcaaatttcaattttcatcgggttctctgaaatggagagagatttcatgggtctcaactcaaaaganctcttgctgtggtgcaggaggagatgcacgtttatggcttcgaagatctgg

SEQ ID NO: 1957 - DNA, 239 bp, Glycine max
  unsure (1)..(239): unsure at all n locations; Clone ID: 701039396H1
cnaatagtttggttttgtagtaagtgaggtgaggtgccaaaatggtgaagataactcttggtactttcgatgactcttttggtgttgcctctcttaaggcttatttggcagagncccatgcaactctgatttnccgtgttcgctggtgttggttcanccatcgcttacaacgagcttacaaaagatgcagccttggatccaacggggctggtggcngtagctgtggcccatgcatttgc

SEQ ID NO: 1958 - DNA, 284 bp, Glycine max
  unsure (1)..(284): unsure at all n locations; Clone ID: 701039402H1
taaaaacgctggcaataatattctattttcaaagggaaacccaaaaactgaagcgcgaggnagctaaaagtagcaacgagggatgagagaacaagaggattggaggattacgacagcgctgttaacgttgttgttggtgtttgtttcttcttttccggcgttgagntacggagttgttcctccttcgtantctgctcaataagctgtctcagggcagttatctcaccantcaggagcaatggttcaatcaaaccctcgatcattntctcnctatgatcaccatc

SEQ ID NO: 1959 - DNA, 274 bp, Glycine max
  Clone ID: 701039404H1
ggaatctgaatatggaggtggtcagtctgttcctgttggtggcattgcatactatatcactgcaccatccagcttagctgatatggcagccaatcctttccatgctctgttctatcttgtgtttatgctttcagcctgtgccttgttctctaaaacatggattgaagtctctggttcatctgctaaagatgttgccaagcagcttaaggaacaacaaatggtaatgcctggacaccgtgagtcaaattgcagaaagagctgaaccgatacattc

SEQ ID NO: 1960 - DNA, 271 bp, Glycine max
  unsure (1)..(271): unsure at all n locations; Clone ID: 701039405H1
ttgaactcaaggagatggctctgggaagaggcagtgcagtgnttctactactttgcttnttgctgcttcactctgcagatggctcgtgctgccacctacacagttggagattctgggggttggacctttaacactgttgcctggcccaaaggaaagctctttcgggctggtgacacacttgctttcaattatagccctgggactcacaatgtggtggccgtgaacaaggctggatatgatagctgcaagactccaagaggagccaaatgta

SEQ ID NO: 1961 - DNA, 270 bp, Glycine max
  unsure (1)..(270): unsure at all n locations; Clone ID: 701039406H1
atcactttggttagagngtgaaactaaagcagagaaaagggtggtagtggtnatcaacaagctcatgtggttggcttctgtctgtanttcagtgacgtttattgctgcttcttacatagttgtgggtaagaagaatgagtgggctgcaattttggttacattagttggaggggtgataatatctggagttattggcactatgacttactatgtagtgaggtctaaganaagcagatcaatgaggaagaaggagaagcaagctgccaggag

SEQ ID NO: 1962 - DNA, 272 bp, Glycine max
  unsure (1)..(272): unsure at all n locations; Clone ID: 701039407H1
ttcactcccattaacagcaaccatggtgcagaggctcacttatcgcaagcngcatagttatgctaccaaatccaaccagcaccgggttgttaagacccctggagggaagttggtgtaccagaccatcaagaagagagcaagtggacctaagtgccctgtcactggcaagaggatccaagggattccacacttgagacctgctgaatacaagaggtctagattgcctcggaaccgcaggaccgtaaaccgagcctacggaggtgttttatcag

SEQ ID NO: 1963 - DNA, 178 bp, Glycine max
  unsure (1)..(178): unsure at all n locations; Clone ID: 701039408H1
aagatggagaagtatcagatctggagcaggagaatagcgttggcagcgtttgcntttgcnctgctgttccaatcggcctcagcagacgacgtcgttgtgctctctgaagataacttcgagaaggaagttggtcaggacagaggagctctcgttgagttctatgctccttggtgtggac

SEQ ID NO: 1964 - DNA, 262 bp, Glycine max
  unsure (1)..(262): unsure at all n locations; Clone ID: 701039409H1
gttcctatanttttttttctccattagattaccaanctctgcaactttgnttctcaacatggagtatcgtctcctacccatttttactttactcaatattgcactggtggcaacccatgctgctttaccccctgaagtttactggaagtcggtgcttcctactacgccaatgcaaaagccatcactgatatcctttactctgattgggtggaagagaaaagcagctcagtgcatgttggaggtggaggcgtgaacgtgcata

SEQ ID NO: 1965 - DNA, 270 bp, Glycine max
  unsure (1)..(270): unsure at all n locations; Clone ID: 701039410H1
agtnattagggttttggtttggtgtttttcttaagcttgagatcaggaattaatttcagagngttcagagaatggcaacggattcttctaatggtaatgggcatcaccaaacaacaacaaagcaacctcctttgccgtctcccctgcgcttttccaaattttttcagtccaacatgagaatcttggttactggaggagctggattcattgggtctcacttagttgacagattgatggaaaatgaaaaaaatgaggtaattgttgctgaca

SEQ ID NO: 1966 - DNA, 267 bp, Glycine max
  unsure (1)..(267): unsure at all n locations; Clone ID: 701039411H1
cacgagtacaagccagagcttgacattatttccaatgctagctgcacaaccaactgccttgccccgctcgccaaggttatcaatgacaggtttggcattgttgagggtttgatgaccactgttcattccatcactgntacccagaagactgttgatgggccatcagccaaagactggagaggtggaagagctgcttcatttaacatcattcctagcagcactggagctgccnnngctgttggaaaagtcctccctgctttgaatgga

SEQ ID NO: 1967 - DNA, 264 bp, Glycine max
  unsure (1)..(264): unsure at all n locations; Clone ID: 701039412H1
taacaagattaattgagtctacgttcatccgagcttcatatctgatatccattcttcaccgtaccaatgtnctanttcttccatggccagcttgacttttgctgttggcattattggcactgtattatcccttttggtgtttgcctctcccatcaagactttttgtagagtggtaaagaagaaatcaacagagaattacaagggagctccatatataacgacgttcttgtgcacaagtttgtggacttcttatggagttctaag

SEQ ID NO: 1968 - DNA, 263 bp, Glycine max
  Clone ID: 701039413H1
cttctaaataaggctggtgcagctcttgaaaagtacaagatgcatgcagttgttgcaaatgaacttggcaagtcgaaaggagcaagtagtggttgtcactagtgccgagaaggttaccgttcagcgtgataatagtcagtctgataatgatgttgagaatcccctgattaaacttctttcggagaaacatgccacttacattgaggatctggtagatgagtctagggaatgactttggcttctcctcgttacagttacagttc

SEQ ID NO: 1969 - DNA, 264 bp, Glycine max
  unsure (1)..(264): unsure at all n locations; Clone ID: 701039414H1
cttacaatgtcactcctaatcaaccaactccaaaggatccttacatggctatccgatagtgaccaantcggtgtcctaggtcatgtagccattgtctacatatacgaagcaaatcccaacagcaacaccattgagagattgaggaantctcttagcaagcttttggtgtactactatccattcgctggcagattcagnttgacaaaaagtggtcgcatagaagtggattgtaacgcaaagggatgacattgnttgaagctaaaa

SEQ ID NO: 1970 - DNA, 265 bp, Glycine max
  Clone ID: 701039415H1
gcagaatttgtccaaggaggaattcgtacatatactgcgtcgccaaagtactggtttctcaagaggaagctctaaataccgaggagtaacactccacaagtgtggccggtgggaagctcgaatgggacaatttcttggcaaaaaggcttatgacaaggcagctatcaaatgcaacggaagggaagcagtgaccaactttgagccaagtacttatgaaggagagctgaaatctgcagccattaatgaaggaggcagtcagaatctt

SEQ ID NO: 1971 - DNA, 137 bp, Glycine max
  unsure (1)..(137): unsure at all n locations; Clone ID: 701039418H1
caacagtgctgtgttttttntttttnttttttctcatttgatccacaaaaaaagcaaactttaaggagaaagaagcgaaaaaaagtgntccttttcgacacccagntttcagtttcagtgattgtggganttggaaa

SEQ ID NO: 1972 - DNA, 230 bp, Glycine max
  unsure (1)..(230): unsure at all n locations; Clone ID: 701039420H1
accaatttgcgccccttctctcttttttnctctttctctctttgtgtcgcctggtcttggcatctccgcagcaccacccancccttnnccaggtcttcaacagagagaaagagaaggnnnnnnnnnnnnnnnnnnnnnnnnnnnngttaaactaacattttttattagtnagaagacatggctcaacccagttccaaggggntntgnataataaccagcagggtcaggtt

SEQ ID NO: 1973 - DNA, 260 bp, Glycine max
  unsure (1)..(260): unsure at all n locations; Clone ID: 701039421H1
atggctgggaagtcttctgaaagacgcggttatggtggaccacgaggtcntaccgtggtgcgtggtggtcgtcgtggaggtttcagcaatggtgaaactggtgaagctgaagaaggacgacctcgaagagcatttgatcgtcgcagtgggactggacgaggaaatgaattcaaacgtgaaggttcaggacgtggtaactggggagcccaaatgatgaacttgctcaggtaatgatgaggttgcgaatgaaactgaaaaga

SEQ ID NO: 1974 - DNA, 270 bp, Glycine max
  unsure (1)..(270): unsure at all n locations; Clone ID: 701039422H1
ctttctctctcttccaaaacctanttttcattttttctcttcaaacaanttttcaaaatgcgtgancatccttcacatccagggtggccaatgcggcaaccagatcggcgccaagttctgggaggtggtttgcgcgganacgggatcgaccccactggaaggtacggtggggantcagagcttcagctcgagaggatcaatgtctantacaacgaagccagctgcggccggttcgtgccgcgcgcngttctcatggacctcgaaccgggc

SEQ ID NO: 1975 - DNA, 272 bp, Glycine max
  Clone ID: 701039423H1
cggaaacataaagggtttttacagacagaagaaaaccaccgccaccaaaaaatcttccaaaaaatctccgattgcccgccgcggcccaatcaccggccctcatatcccacggcggaaaacccgacctcgaagatgagtacaaggagagcgaggtggcgctgcggcaattcgacctgaacatggcgtacggaccttgcctcgggatgacgcggctcgcgcggtgggagcgcgctcagaggctcggcttgaaccctccgcaggaaatcgatagg

SEQ ID NO: 1976 - DNA, 271 bp, Glycine max
  unsure (1)..(271): unsure at all n locations; Clone ID: 701039424H1
tnaattttcaagctctgccctcccgagcagctggtaactcattacaagattggaaccttcaaatttggtgatgttgatgactttctactgaagatagctacagttaggggcaagctcaagaagggtggaatagttgacattaatgctgctgcaagaatcgttcttcatgattggnatgaaggtaaaattatatattataccattcccccaaatagggatcaaggggaacctgcagaggttaagatagtttctgagttttcaaaggagttta

SEQ ID NO: 1977 - DNA, 267 bp, Glycine max
  unsure (1)..(267): unsure at all n locations; Clone ID: 701039425H1
gaaatttttggattcgtcgattccgggatgcatggnattcatgcactcacaagaaagccgtggctcttggcatcttcgggcttgtatggaatttatcatcagttgttgctcgcatttgggcagtgttcgtactatttgcagccttcagatattatcaacaacattatttggtgagagatgaatggggggaagatgaagcaggatgtgatgaaacatggcaagaccctgttggagttagaccgaaacaaggacctgcaaccaacttta

SEQ ID NO: 1978 - DNA, 268 bp, Glycine max
  unsure (1)..(268): unsure at all n locations; Clone ID: 701039426H1
cgcaatttgcaaagtgaactctcttctgttagtgacagtnaagaaactctctgttgaagaattcacgcgctgcagatttcgatttttctgaatgtggcaccttctcttactcgttgccgtggccggatccaccggtttcgccaccaaacgtttccttactcaccacagaaacaccggtgagggtgaaaacgtcaacctccacgatccaaatgagttagattttccggttccgaaagcattctcagacacatcacagtgacggggtctt

SEQ ID NO: 1979 - DNA, 266 bp, Glycine max
  unsure (1)..(266): unsure at all n locations; Clone ID: 701039427H1
ctttcttctctctgttttccttcttcctgcgcatcaatggagttngacggcgttctcctcggcatgtgcaaccctctcctcgacatctctgccgtcgtcgacgacgctttcttggaaaaatacggtatcaagttgaacgatgcgattctcgccgaggataaacacaaacctatgtatgaagaattggctaacaatcctaatgtggagtacattgctggaggtgctactcagaattcaatcagggttgctcagtggatgcttcaagc

SEQ ID NO: 1980 - DNA, 264 bp, Glycine max
  unsure (1)..(264): unsure at all n locations; Clone ID: 701039428H1
aacgctggctanttaattattagtttcacttcaatgactcaaagggatcgtcgcaccctatcattcccggcggttcacccatgcgaancatttctccgccgacacttgtcacntctctantcantctctcccaatccatntgcaatttccaaccccaatcattccccacccaacgaagganctccagggaaacaatacgccaaataagcattgtnttaatgttccttcaaganattcgactaatccccaantccantatcntnt

SEQ ID NO: 1981 - DNA, 264 bp, Glycine max
  unsure (1)..(264): unsure at all n locations; Clone ID: 701039429H1
gtgcactggaagcagttgtaaaggaaggaccacagaggctagcaaggcggggcaaggcatgccgggaatatgctgccaaaatgtttacagcaagaaagatggcattagcatacgagaggttattcctatgtataaaanatcgctcattctgcacctatccttgaagcttaggttagaatagaaactctttantacaantttctttcttccatttatttttctgttatttcagtatgataaaatcatatttanntttttaaacaa

SEQ ID NO: 1982 - DNA, 263 bp, Glycine max
  unsure (1)..(263): unsure at all n locations; Clone ID: 701039430H1
gcaatttccattgctaaggangaagccacaaaattggggacggtcatcgggattgatcttggaacgacctattcatgtgttggtgtttacaagaacgnccatgttgaaatcatagccantgatcaaggtaaccgtatcaccccatgcgtgggttgntttcaccgacagtnagagactanttggagacgctgccaataatctggcagntgtcaacccagaaaggaccatnnctgntgtcaagagacttnttggaaganagttcg

SEQ ID NO: 1983 - DNA, 264 bp, Glycine max
  unsure (1)..(264): unsure at all n locations; Clone ID: 701039431H1
cacaacggcgaagacgaagacaacgacgaggatttanatccttatggtggcttgttggacgacgaacagaagaagattctggagattaaagaacaactggaggagcctgatcagtctgaagattctttggtggagctgctgcaaagcctgcgcggacatggatataacattccaagggttaaaggagatgacatcgggaggcacgtgaatcggttacggaagcatccttcaaacgaccttcggcgattggtgaagttgcttgtc

SEQ ID NO: 1984 - DNA, 264 bp, Glycine max
  unsure (1)..(264): unsure at all n locations; Clone ID: 701039432H1
ggcctgnatggtggttaattgaattaaacacatctacaccatattctttgcagctgatggattgtggacttgaagagcttattgcactagtggcctaggggggttgagctgtatagtataacatacacatatatgaaaaggatcagggttgagcctgtgacatttggctttatgtgcaccccaaagctaggagaaagagacttcaaactaggtcgtccccaggcattgntaagcaagcaggtgctccttgttcatctctccttt

SEQ ID NO: 1985 - DNA, 183 bp, Glycine max
  unsure (1)..(183): unsure at all n locations; Clone ID: 701039434H1
cacgtcaatctccccgtcttaattgncctttnctcaatctttcactcttttgtgtcaggtcaaatatgcaacctcaatttagccagattancatctctgttacatggaggggaaagaaatttgttgtcgagatgaatataggagccantgtgaaggatctagggcaggaattgcaaaagttaa

SEQ ID NO: 1986 - DNA, 274 bp, Glycine max
  unsure (1)..(274): unsure at all n locations; Clone ID: 701039435H1
acaagaggaagcactgtgttcgacttcgtcaaaagcatcatgagccgctacgacanccgntccggcnacctagcttcctatcgtgatcggaggagtgattctgggctaggtgcacctacagggtttggtggttctgtacaacactcttcatcaaacaggagggattatgatgatggtgggtcaccaaagaggaacctcagtttggatggtttacctcattttgagaaaaattctacattgagtcaccagctgtaagggcaatgacagatgctgg

SEQ ID NO: 1987 - DNA, 52 bp, Glycine max
  unsure (1)..(52): unsure at all n locations; Clone ID: 701039436H1
ctctgaagcatcaccgtcaccatgantacgcaaaccacaagcccggtgatca

SEQ ID NO: 1988 - DNA, 270 bp, Glycine max
  unsure (1)..(270): unsure at all n locations; Clone ID: 701039437H1
agatggagaagtatcagatctggagcaggagaatagcgttggcagcgtttgcctttgntcctgntgttccaatcggcctgcagcagacgacgtcgttgtgctctctgaagataacttcgagaaggaagttggtcaggacagaggagctctcgttgagttctatgntccttggtgtggacactgcaaaaagcttgctccagaatatgaaaagcttggtagcagcttcaagaaagccaaatctgttttaatggcaaggttgactgtgatgag

SEQ ID NO: 1989 - DNA, 90 bp, Glycine max
  unsure (1)..(90): unsure at all n locations; Clone ID: 701039439H1
tcaaatgcataggcagtttttaggtgcgttaaatgctctgagttggacagacagtgataacctncaaatgcatatgcatttggctcgttt

SEQ ID NO: 1990 - DNA, 269 bp, Glycine max
  unsure (1)..(269): unsure at all n locations; Clone ID: 701039440H1
gtttcgctctctcagtttcttttccccaaattgtttttcatctancaatttactttgcagaacnctaaccctagnccccttcgcctancttgtaaccttcctttcgatccttcttctcgcagacaatgggtgaaactaaggacgaagcatacgaggaagancttctcgattacnaggaggaagacgacaaggcccccgantccgccggagctaaagtcaacggcgaagtaccaagaagggctatgttggaattcacagttcgggattag

SEQ ID NO: 1991 - DNA, 266 bp, Glycine max
  Clone ID: 701039442H1
gcttccattgtgctcactcatctcttacaacgaaaccctcttcatcttgttctatctgtgacgagcatcatggcctgcaagagcagtgttattgttggctatgtgtgtgcttccggcgatggttgtggccattcgcccagcaaagaaccctttttgcgtgaagggtcgtgtctactgtgacccttgccgtgctggttttgagacctcagctaccacctacattgctggtgctgagatatgttgcaatgcaagagcagggttagcaa

SEQ ID NO: 1992 - DNA, 94 bp, Glycine max
  unsure (1)..(94): unsure at all n locations; Clone ID: 701039446H1
aggctntttctgctgcttagnaaacaccctgctagccgnntctgaagtcntgatcaagaacccntgcccctgcncncaggccgntgcccaaaat

SEQ ID NO: 1993 - DNA, 265 bp, Glycine max
  unsure (1)..(265): unsure at all n locations; Clone ID: 701039447H1
cttcactcactcactcatgggctgcgtctcctcaaaacacatncaagaaagacctcaagcaagaagaagaagtgcantgttcaccaatggcggcggttacntgaaccacgtggtatccctgacttcntccacctatggagcactaatgctggacaaggagaaggagcaacttcaanttcaacccaccgtcgaagaagaatccaaaacatcccctcctcggattcgcgaagaacccgaagtcatcaacgcttgggaatcatggagg

SEQ ID NO: 1994 - DNA, 263 bp, Glycine max
  unsure (1)..(263): unsure at all n locations; Clone ID: 701039448H1
agagaggtgttggtgccctaatcgtgagaagaaaggaancnggaaaagaggaaaatggtgtgcataaggaaggcgacggtgaaggaccttctgggcgatgcaggcgtgcaacctgttctgcctccctgagaactaccagatgaagtantacctctatcacatcctctcctggccccagntcctctacgtcgccgaagantacaacggccgcatctcggctacgtcctcgccaagatggaggaagaaaccaccgactgccaggt

SEQ ID NO: 1995 - DNA, 275 bp, Glycine max
  Clone ID: 701039450H1
agacagggagacaagacagagtagtacagattactaccaatggctaccaaggtttacattgtttattattctacgtatggacatgttgagaagctagctagagagatagaaaaaggggctgcttctgtggagggagtagaagcaaaactgtggcaggtacctgaaacattgcctgaagaagtcctgctaagttgggagcacctccaaagagtgatgttccaattattactcccaatgagcttcctgaggctgatggctttttgtttggttttccc

SEQ ID NO: 1996 - DNA, 273 bp, Glycine max
  unsure (1)..(273): unsure at all n locations; Clone ID: 701039451H1
cacattggtttattttgaaaccctaaagtttgcccccttacacgttttttgtcttcttttttctcccatctttgtttcgagaagcatttgaacgaagagaagagacagtgaatcgcggtttcaattcaacccanttcatctcaggtgtttgaagttgagataaaaatgagcggaacagagaaagcaggatcaggaaccaccaaaacccccgccgatttcctcaaatccattcgtgggaggccggttgtcgtcaagctcaattctggtgttgat

SEQ ID NO: 1997 - DNA, 270 bp, Glycine max
  unsure (1)..(270): unsure at all n locations; Clone ID: 701039454H1
ctggccttttgttctcgtgtcaatttctanntccaccaccacaccctgctcttctattctctattattattatntccacacccttcactctcnctcantcttctctcgaatnttccaccgcaatggccaccncntgccgagaaactctccgctctcaaatccgccgtcgccggattgaacgaaatcagtgagaatgagaagaacggnttcatcagcctcgtcggccgctatctcagtggcgaacgcagcatgtggaatggagcaagntcc

SEQ ID NO: 1998 - DNA, 258 bp, Glycine max
  unsure (1)..(258): unsure at all n locations; Clone ID: 701039455H1
ggagattcatctctgcaggttgttttagaaaagaaaaaatggtgaagatttgctgcattggtgctggatatgtggggggtccaacaatggcagtcattgctctgaagtgcccctccattgaagtggntgttgttgacatctccaaatcccggattgcagcatggaacagtgaccagcttcctatctatgagccaggccttgatggtgtggtgaagcaatgtcgtggcaagaaccttttcttcagcactgatgttgaga

SEQ ID NO: 1999 - DNA, 268 bp, Glycine max
  unsure (1)..(268): unsure at all n locations; Clone ID: 701039456H1
ggactttgaagcagaagaaacatagantttacagagagaaagaaaatgttcaaacattaccggtggccccggttagtggttcataaacctttctctaagnttccgnntctctctctcttacggggtctttgcagtccgtggaagagcttgttgggttatctcagctttcacctttccaggctctgattcaaagaaaaatctcnacttccttcancaattcatctctacaatttctggatagtgtnttttttttagcnagaatggctca

SEQ ID NO: 2000 - DNA, 265 bp, Glycine max
  unsure (1)..(265): unsure at all n locations; Clone ID: 701039458H1
aaggtattcaaaattgggaggttttcgtttgaattgtgatgtccaagccactgctaggcataggggaggaggaaggtcaaagcaatgtcactttgttggtttcttcctcagtcatcatggaaagtgtgtgcctgaatagctcaaaattgaaagagcgcaactacatggggttatctgattgttcatctgtggacagctccgcgccgtccttctcagatgagactaaanccaatctgaaccttaaggctactcnactgagactggg

SEQ ID NO: 2001 - DNA, 262 bp, Glycine max
  unsure (1)..(262): unsure at all n locations; Clone ID: 701039459H1
ttctcactcgtcgtcttcgtctgcgccctaaccaaattcaattcaaactcttctcatcaaaatccaaggctcgttcttgaaaccctaattcgatatcctcctcctcagaagaagaaggatcgatgtgggcagcttcttgcctggcgtcatgctgcgcggcctgcgcatgcnacgcctgcaggaccgtcgtatcgggaatcagccgccgttccgccaggatcgcctantgcggcctcgtcgcnttntctctcgtcgtcgcntg

SEQ ID NO: 2002 - DNA, 261 bp, Glycine max
  unsure (1)..(261): unsure at all n locations; Clone ID: 701039462H1
gttagttctcctgttgttgttgtagcgctgattgaggtagcgctgattcgatcgcatcagaacattcattcacattcatatcctctctctccgatcccaatggcggatgagagccccaaaccagagaccttcgaactcaacaatggaagcatgcaggtcctcctgcaccaatctcggctgcaccatcatctccttatccgtacctggaaaagatggtgtgttatctgncgttgttcttggccttgaatctgttgaatccta

SEQ ID NO: 2003 - DNA, 261 bp, Glycine max
  unsure (1)..(261): unsure at all n locations; Clone ID: 701039463H1
cttgcatcggctggaggaggctaaaaagtatgatcacaggattttgggtgtgaaacaggagnttattcttgcatcatgaatggagcccgggaagctggttttttcttccgcaaggcactcggatctacaacaaactcatggacttcattcggaatcagtacagagacaggggctatcaagaggtcatatctcccaatgtatttaacatggaatgtgggtgcaatctggtcatgctgcaaattatagggaggatatgtttat

SEQ ID NO: 2004 - DNA, 128 bp, Glycine max
  unsure (1)..(128): unsure at all n locations; Clone ID: 701039464H1
cncggantcngccgagaaatcgcncttcacctgcgcctcactcggcgcgcgactcgtcgtcaantacacctcccaactcggcccaagccgantgcagtggcggcgcagatcaacgccggttccgccac

SEQ ID NO: 2005 - DNA, 280 bp, Glycine max
  unsure (1)..(280): unsure at all n locations; Clone ID: 701039465H1
ctcttggaggaactgcacaagagtttggtctcaanccgggaagcatctagcaattgccaatcctgcgttggcaagtgatttataanctaaaggcgaccaactttgtcacaagaattggaggaagggtcttcttgactattggagaagctattgactgcaagctggntttctgaattgctacggattgaaccgagtgttgtacctctgtcttgttaatagaactcgtgtgtggaaataaaatcttagcttttcatggctggtttgaatggaagttgtaaaa

SEQ ID NO: 2006 - DNA, 274 bp, Glycine max
  unsure (1)..(274): unsure at all n locations; Clone ID: 701039466H1
gtttgggaaccctagtttggcaaacatttcaagantcagagtcttttaccactctcaggtttagcattattatctgaaatggcatcggtgtctagtcagcaacagttccgttacacgcagccaccgtcaaaggttcttcatttgagaaatttgccgtgggagtgtacagaggaggaactaattgagcttgggaagccattgggaaagttgtgaacacaaagtgcaacttggagcaaatcgtaatcaagcttttattgaattgcagatttaaatc

SEQ ID NO: 2007 - DNA, 275 bp, Glycine max
  unsure (1)..(275): unsure at all n locations; Clone ID: 701039467H1
ttttcanttcccaaaatcctcacctttnctcgcagttttgctcgaaaaaaccctttgtttgttctttcatgggntcattctgggagcgccatgagcaaacgcaacactttctttcacaatctcatcaagcccttgcaaattcagccccagcaaagagggacaaagcgaagtagaagaantaaagaacctagctgcacaagagcaaaagatcttcccctacgaaacattggttgctgctaccaacanatttcacnttcttaacaagctaggtgagg

SEQ ID NO: 2008 - DNA, 274 bp, Glycine max
  unsure (1)..(274): unsure at all n locations; Clone ID: 701039468H1
gggttttccaattcgcagagcaactcaacacaacgaaccaaaccaacaatgtgcgcagccgcagcctgcagtccgcagccgcaacacnggcaagctgcgctggagcaggtgcagtgnttcggtcgcaagaagacggcggtggccgtgacctactggcaagctcgggcgcggcctcatcaagatcaacggctgccccatcgagctcgtcgagccggagatcctccgtttaaggccttcgagnccatcctcctgttnggaaacagccgttcgncgg

SEQ ID NO: 2009 - DNA, 268 bp, Glycine max
  unsure (1)..(268): unsure at all n locations; Clone ID: 701039470H1
cncaaacttcaacttgtaatcaagggagananaaaatttcaagcacaaaaaatggcgganaagaaagtggtgatcctaggaggtggtgttgccggtgccaaccttggcaaaaactatacaacatgcaagccaacgtcacccttattgatccgaagaatattttgagnttccatgggcaagtttgangggattggttgagccaanttttgctgaaaggatagtaatcaaccatagagagtacttcaaaaagggtaaccttgttgtatcc

SEQ ID NO: 2010 - DNA, 89 bp, Glycine max
  unsure (1)..(89): unsure at all n locations; Clone ID: 701039471H1
attcaatcacgcnctgctcttcccttcccttggcgcaatganttccaanttcantttgcgatttcgntgcttcgggcattcggntgcca

SEQ ID NO: 2011 - DNA, 265 bp, Glycine max
  unsure (1)..(265): unsure at all n locations; Clone ID: 701039473H1
ctcaccgattgctagaatggaatttcgatgctcagtcatctcttttaccattctcttgctctcttgctcttgcaggagagagccatgtccatgcatcgctacctgaggaagattattgggaagctgtttggccaaacactcccattcccactgcactgcgagagttctaaagcctctccctgcaggtnntgaaatcgatgaactccctaagcaaatgatgatacacagtacccaaaaacattcttctataaagaagaccttcatc

SEQ ID NO: 2012 - DNA, 263 bp, Glycine max
  unsure (1)..(263): unsure at all n locations; Clone ID: 701039474H1
gcactcgcggcgttggtgctactcgcggcgagtgtggcggtggatgctcaggagaactcggacgtgaagacgctggtgaagtacaagcacgggcagaagtactgcgacaaaggatgggaatgtaagggctggtcaatttactgttgtaacctcaccattaccgattatttccagacctaccagttcgagaatctgttctccaagcggaactcgccggtngcgcacgcggtcggattttgggataccantccttcatcgccgcc

SEQ ID NO: 2013 - DNA, 268 bp, Glycine max
  unsure (1)..(268): unsure at all n locations; Clone ID: 701039475H1
ctttcatcattcatcgcctttcaccacgcacgcagatcctttantcctatantccttccttgcgctcctgctgccaaatttncgactctttcgatcagatccgcgacacccaccccaccaaaaccttggcgcaacccatccatgacgcttggctcaggaggatccagtgtcgttgttcctaggaacttcagattgctggaggagcttgaacgtggtgaaaaaggaattggagatggcacagttagctatggaatggatgatggtgatg

SEQ ID NO: 2014 - DNA, 257 bp, Glycine max
  unsure (1)..(257): unsure at all n locations; Clone ID: 701039477H1
cnacgggcaatacgacgcgtacgcaggggacatatggagctttggggttagcatactggagttctacatgggaaggttccccttcgcggttgggaggcagggcgattgggccagtctcatgtgcgccatttgtatgtctcagcctcccgaggctcctccttctgnttcccctcacttcaaggacttcatcttgcgntgtcttcagcgcgatccctctcgccgctggtctgcttccaggttgctcgaacaccccttca

SEQ ID NO: 2015 - DNA, 261 bp, Glycine max
  unsure (1)..(261): unsure at all n locations; Clone ID: 701039478H1
ttttctgngcacacaagaaaagtgtgccacatgtggcaaaactgcttatccattagagaaggtaacagtggaagggcaggcctatgcacaaatcatgtttcaagtgttcacatggtggatgtcccataacgccatcgaattatgcagcccttgagggcattttgtattgcaagcaccacttctcccagctttttaaggagaaagggagntatantcatcttactaagtctgcatcagtcaaacgggcagccgcagccacag

SEQ ID NO: 2016 - DNA, 264 bp, Glycine max
  unsure (1)..(264): unsure at all n locations; Clone ID: 701039479H1
cggtgactgccgtgctctgctgagaaccgtagaagaagcnncaagancacgctgaactgcacctgcccactgccaacttctccgaatccaccgaaccggttctcaacctcatctgcaccgcttgctccaaaccctggccgatccaaaaccgagagtgatttgcacacgaaaagaaccggccataccgagttcgttgacaagacttccgaggccgttaaaccgattagtttggaggctccgaagtggatgcaactgcttcatcgg

SEQ ID NO: 2017 - DNA, 258 bp, Glycine max
  unsure (1)..(258): unsure at all n locations; Clone ID: 701039480H1
gcttcatcttgagatctgtttgaaggacttgcaggancnatttcatgggtggagctgagattatcaaatctgaccctgttgtgtcattcagggagactgttttggagagatcatgtcgcaccgtgatgagcaaatcacccaacaagcacaaccgtctgtacatggaagcaagaccattggaggaaggtctgctgangccatgatgatggcaagattggaccaagggatgaccccaaggttcgttccaagatcttgtct

SEQ ID NO: 2018 - DNA, 276 bp, Glycine max
  unsure (1)..(276): unsure at all n locations; Clone ID: 701039482H1
aaacagtaccgnaacctgcaaagaaagcacacatcattagaagtgactttacaaagnaattcnaaagcaaagcaagaatgcatganttccantatttgcaattggaaacaaaatcggttcttcccacagaggaagcaaagggggatgacacttacctctcagctttgacactatgnttcagccgaattttccctgcaatcttgaacgctgctgttgatctgaatttgtttgatatcatagccaaggcagagagttcatctttgtcagcctcggana

SEQ ID NO: 2019 - DNA, 270 bp, Glycine max
  unsure (1)..(270): unsure at all n locations; Clone ID: 701039483H1
aacagtaccgaaacctcaaagaaagcacacatcattagaagtgaatttacaaagaaattcaaaagcaaagcaagaatcatgaattccaatatttgcaattggaaacaaaatcaggttcttcccacagaggaagcaaagggggatgacacttacctctcagctttgacactatgcttcagccgnnttttccctgcaatcttgaacgctgctgttgatctgaatttgtttgatatcatagccaaggcagagagttcatctttgtcagcctcg

SEQ ID NO: 2020 - DNA, 263 bp, Glycine max
  unsure (1)..(263): unsure at all n locations; Clone ID: 701039485H1
aagtgcagttagtgccacacttgcacggactgcacctgtggccattaaggaatatgtatgaaaatgtaattgccatgtgtttggcaatacaaatatccaaataatgtantcttcgtatgaataaatgtgtgtgctgttatcctacttcaggtctgtgtagtcatgcagtctgaatcatttcaagttcntgtcttagttaatataacagccatggttgtggcatctatggtttattagactanaataagtgtaaatctccgttc

SEQ ID NO: 2021 - DNA, 62 bp, Glycine max
  unsure (1)..(62): unsure at all n locations; Clone ID: 701039486H1
ctcagtttgtacatganagccagtttcagntttgggntacagctaagttctttttttttttt

SEQ ID NO: 2022 - DNA, 267 bp, Glycine max
  unsure (1)..(267): unsure at all n locations; Clone ID: 701039487H1
cctcactctctcactctctcaggagtatataatctgagcgatgtcagatctgcgaggctcccttgcgccctaagaggaagaaggtttgggtggactattttgttcagtttcgatggatccttgttatttttgtggtccttcccatctccttcaccatttatttccttacataccttggggatgtaagatccgagtggaagtcntataagacgcgtcagaaggaacatgatgagaatgtgaagaaggttatcaaacgtctcaaacaga

SEQ ID NO: 2023 - DNA, 265 bp, Glycine max
  unsure (1)..(265): unsure at all n locations; Clone ID: 701039488H1
tnacaagaagcgccacgtcataaccacgcaaacggagcacaagtgcgtcctcgattcctgccgccaccttccagcaggagggtttcgatgtcacttatcttcccgttgagtccgacgggttgattgatttggatgagcttcgggcttcgattaggcctgacaccgggctcgtttcggttatggcggtgaacaatgaaattggagtggttcagcccatggaggaaattgggaggattgcaaggngtttaatgtgccttccacatga

SEQ ID NO: 2024 - DNA, 87 bp, Glycine max
  unsure (1)..(87): unsure at all n locations; Clone ID: 701039489H1
ggcacttgngntgtctcctttttcgncatatnctnacttcaaaagtgnnttttgnatggggaatgcaaagcncccaagtccttaaat

SEQ ID NO: 2025 - DNA, 260 bp, Glycine max
  unsure (1)..(260): unsure at all n locations; Clone ID: 701039492H1
tcgcaacacaanaaaaaaagacaacccagagagcgcgtcttaataaacgctnttctctgaaaacccccatttcttttcttctttcttcttctctttcgcttcttcgatcttcgatcttcgtcgctgaaaatgagagagtgcatttcaatccacatcggccaggccgggattcaggttggaaacgcctgctgggagntttactgcctcgaacacggcattcagcctgatgggcagatgccaagtgacaagaccgttggtgg

SEQ ID NO: 2026 - DNA, 257 bp, Glycine max
  unsure (1)..(257): unsure at all n locations; Clone ID: 701039493H1
attgatatgctgtttggttgctcaggaattcgtgatcaggtatatgcactgttaaaaaaaatacatatgcttttgcctctcttttttttcgtctttggatttattaggctttgattattcttatgtgaattaacttcataagaacaattttgtccataaaagaagaaagttgtaacagctaacaagttcagtggagaacccaaaagcgtgtatttatgggttagcgtttgcnaatttgattttgggtgaagaattgg

SEQ ID NO: 2027 - DNA, 78 bp, Glycine max
  unsure (1)..(78): unsure at all n locations; Clone ID: 701039494H1
ctgtctccatgctaccacttgggctttcagcgtgttaccttncggcagcgntgctttgntgctcctgaaccctaattt

SEQ ID NO: 2028 - DNA, 258 bp, Glycine max
  unsure (1)..(258): unsure at all n locations; Clone ID: 701039495H1
ggagataaaattgggggaagacatgggtatgggggcattgggaaggaatattcataagcaaaatatgttatttcttccctacacctcccataccactgtttttcctctatttctcccccttcccttgntttctgctgcctttccacatctcaaccttccntctcatctcataatcgtaatggtantgatatccctcttcttttattttttctttcactaaacatataggtttctgcatgctctctctattatgtggga

SEQ ID NO: 2029 - DNA, 300 bp, Glycine max
  unsure (1)..(300): unsure at all n locations; Clone ID: 701039502H1
accaatcatctttagttcttcagtaatttattgtgggattctattctaagattttnagaatgtctagctgtgggtgtggaagcagctgcaactgtggcagcaactgcggttgcaacaagtactcttttgacttgagttacgttgagaagacaaccacaganactctagttttgggtgttcgggcctgtgaaggccaattggagggtgctgaaatgggtgttgcatctganaacggtggctgcaactgtggatcnagctgcacctgtgacccatgcaatgcaataaggtcnagatgtataa

SEQ ID NO: 2030 - DNA, 276 bp, Glycine max
  unsure (1)..(276): unsure at all n locations; Clone ID: 701039503H1
ctcttctcctaagcactagcacttaactagacantattaattagcatttganagagagacnnggagtataaacataccccagtttaagatggcttcaaaaacttgttcctcccttgcccttttcctcacactcaacctcattttcttctcacttgtttctgcatgcggttatacaccatgccctggtccaaacccaaagccaaggcccaaccccaaccctaaccctaaccctagcccaagtggctcctgcccccgtgatgcactcaaattaggtgt

SEQ ID NO: 2031 - DNA, 298 bp, Glycine max
  unsure (1)..(298): unsure at all n locations; Clone ID: 701039504H1
gaaattccccanaggcaaaaaacaatacaagatgaagagcgagttcctttttgttttcctattcttgggaattcttaactgtnaagcacaatatttcaatgctaacccatacgnctatttacaactagccttaaggtggcctaattcctattgcttgacacatgaaggtggttgcagggaaatagtaccacaatatttcactattagctaccttcatcccatgagaagaggaggcccggatctgcaaaattgcccctcaccattaatatgccaaatagcatgttagtatatctcctgc

SEQ ID NO: 2032 - DNA, 277 bp, Glycine max
  unsure (1)..(277): unsure at all n locations; Clone ID: 701039507H1
aganaacacagtgagactactcaaccntgtagcacaacccacataaggaagaggctgctccanagagaccggctaggacccttttggggtggaaggataagaatcaagttgaggatgattcaccaatatttaggaacaaagagangctnntggtnanttgntgtaggcgcatcaattacaggtaccggcatttgatgttgaatttggtcacattttgcctnattgtaaganngataacnaagttgaatcaaaggacactaaaggagtcatcctcaac

SEQ ID NO: 2033 - DNA, 296 bp, Glycine max
  Clone ID: 701039509H1
tgccaatacaaatcctaccatttctactcctttccaaaagaaccagagccttcatttaccaaaactaaaatcatgatgaaaaagcaatgtctcttgtccttctcactagcactgctagtttcatttttgtatttcaccaccactttagcccaattatcaccagcttctgcccctcaaaaaccagcccaacctacccctacagcaccagctgcagctcctaaaccattggttccctcattgccacagtcaccaagtgattcaacccctgacagtactccagctgttgacattgttgg

SEQ ID NO: 2034 - DNA, 290 bp, Glycine max
  unsure (1)..(290): unsure at all n locations; Clone ID: 701039510H1
gcatcgcttcgctccctacccttgggctagggttttacttgtgcgtcttctccgaaagcaagctagggtttgtccgtgtggcagaatgggaaggtatcgaagccggagcaggagctatagcccccggcggcgaacaggagcccaccggcaccgcgcggacggaaccgctatgtcgacgatcgctacggtgacagcaggtcttacagagaccgccgctcacctcttccttccggcttgcttgttcgcaatcttcccttgatgccaggcctgaggttctaggnnccantttc

SEQ ID NO: 2035 - DNA, 158 bp, Glycine max
  Clone ID: 701039512H1
caaacgttcaaatccctacctgggacgcggacggaggaggagcactctccccgtacgatctcttccaatgctgacacgtgctccattattctcctccgaccatttccgaatgttccagttcaaggtgcggaactgtccacgtgtcaggtcccacgact

SEQ ID NO: 2036 - DNA, 291 bp, Glycine max
  unsure (1)..(291): unsure at all n locations; Clone ID: 701039513H1
aacagaactgagagaagcaagtgaaaccctcaatcacctaggctaaaatcgtctcgtgcttcattccttttttttccggtttatagaattgaaaagatttcattgataattgagcaaacacaatgagtgctccacctcatcatgatgatgacgacgacaacgaagaagttttccttgatgagtctgacatcatccatgaagttgccatggataatgaagatctcccctgacgctgatgatgatnccggaccnccnngaagggttgnggagggcgntngncgnaaatntncc

SEQ ID NO: 2037 - DNA, 267 bp, Glycine max
  unsure (1)..(267): unsure at all n locations; Clone ID: 701039515H1
tgtaactcgttcttcttcttttgaccttctgtgtttgtncttgttttttctctcacctcgaaaatgtcttgctgcggtggtaactgtggttgcggaagctcctgcaagtgcggcaacggctgcggaggctgcaagatgtacccagacttgagctacactgagtcaaccaccaccgagaccttggtcatgggagtggcacctgttaaggctcaatttgagggtgctnaaagggtgtncccgctgagaacgaggctgcaaangtccccc

SEQ ID NO: 2038 - DNA, 158 bp, Glycine max
  unsure (1)..(158): unsure at all n locations; Clone ID: 701039516H1
cncannttctcgcntcccatcgncacgagttgnacncaacgcntnaaacacaaaataaaaggtgggcaaaccaatagaaatgtccttctgtgttgtgatcttcgaacaagcgtganctccaaacacacaacaacacctgcttctggttcagacaaccc

SEQ ID NO: 2039 - DNA, 300 bp, Glycine max
  unsure (1)..(300): unsure at all n locations; Clone ID: 701039518H1
acacatttggtgccttgtagagcgtgttttggcaggaaggtggtatggcgaaggacgttgaggttgctgagcgtggctccttctctgggaaggactaccaggaccctccaccagcaccactcattgatgctgaggagctcacaaagtggtccttttacagggctctcattgctgaattcattgccactttgctcttcctctacattactgtgctcacagtcatagggtacaagcaccagactgacctcaaggaaaatggtgaaatctgtggtggggtggcattcttggcattnnatggnc

SEQ ID NO: 2040 - DNA, 284 bp, Glycine max
  unsure (1)..(284): unsure at all n locations; Clone ID: 701039519H1
agagaccgtggttacggtggtgatggtggttctcgctactctcgcggtggggaaggcggtggatccgatggaaactggagaaattaggcatatgaccctgtaaattagggtttatgattaanttcaattattttaaggtgttgtctgtgtgtggtttaagtttcggtatctgtgttggtttcgtttcgtgttcctgtggttttcgtttttgacctacaattctagttgtgtttatagtcgatcgaatgaaangatagtaagaaatatcgcatcaaattctatgg

SEQ ID NO: 2041 - DNA, 300 bp, Glycine max
  unsure (1)..(300): unsure at all n locations; Clone ID: 701039520H1
tgcgcatccaatcccttcactgttgttttcccccaattcccagtcccacatagcttagaacttacgatctacaattttacaaatacaaatacccttctccctcgctcanaacacaaacaagctcgcttcttncttctctcatcaacaacatgcagatcttcgtcaagactttnaccggcaagaccatcaccctcgaggtcgagagcagcgacaccatcgacaacgtcaaggccaagatccaggacaaggaaggtatccctcctgaccagcagaggttgatttttgctggtaagcagctgg

SEQ ID NO: 2042 - DNA, 292 bp, Glycine max
  Clone ID: 701039523H1
aggaattgcgtttctgcacgacaaggttaagccacaagttgtgcatcgagatatacgtgctagcaatgttctgctggatgaggagtttggagcacagcttatgggtgttggtctgtccaagtttgtgccatatgaggtaatgcacgagaggactgtgatggcaggtggaacttatggatatcttgccccggagtttgtgtacagaaatgagctcacaacaaagagtgatgtgtatagttttggtgtgctactacttgaaattgtaagtggacgtagacctgcacaggcagtg

SEQ ID NO: 2043 - DNA, 144 bp, Glycine max
  unsure (1)..(144): unsure at all n locations; Clone ID: 701039527H1
gcgaagttgaaanaccaaaacccttggcgagtnaagccctactncactagagctacacacttacgcaatggcggttgttgctcaaacccctgacatcgccggcgagcggcagtccggccaanacgttcgcacccaaaacgttgt

SEQ ID NO: 2044 - DNA, 282 bp, Glycine max
  unsure (1)..(282): unsure at all n locations; Clone ID: 701039528H1
gcacttcttacggcactcagcattgcttttctgaatgacagctttgcaggtacctttagtgagaaggtaacaagaacagttaggcaattttcaccacatttagctgccaaaatgagacctcctctcacgcctgttattcgtggacgtccatcatccaagagagcaatttatatatgtggccggccgcgttgggtatttgtctgatatnttcctctgcaatttctnctttggttggtttctgcgggncccctgaaagtttangggctctngcaatggnccccc

SEQ ID NO: 2045 - DNA, 287 bp, Glycine max
  unsure (1)..(287): unsure at all n locations; Clone ID: 701039529H1
gattatgggacctaattatgtccctggggagaaaaaggatttgtatgttaaaagtgtgcaacgaactgtcatttggatgggaaanangcaagacactgtagaggatgtcccctgtggtaatacagtggctatggttggtcttgaccagttcatcacaaagaatgcaacattgacaaatgagaaggaagtcgatgcccaccctatccgagctatgaagttttcngtctcaccngttgttcgtgtngctgttcaaangangggtnanatcggatctnccaaacnttngc

SEQ ID NO: 2046 - DNA, 204 bp, Glycine max
  unsure (1)..(204): unsure at all n locations; Clone ID: 701039530H1
atcttttccaaaacaccaaaaatgcctgcgacaacaganaacaacaaccaagggctcattcctgggtcgaataagcatccgcagaaaccaagtgatgtccatggacggaagccacgaccaagagatggaagacctggagcttttccagaagcacatcggagaccgcttctcggagctcttatcctccacctccgaagactcctc

SEQ ID NO: 2047 - DNA, 141 bp, Glycine max
  Clone ID: 701039531H1
tacaggtatccaaagttctccagggttttaactcaaattcagcttcatttcactttacctatgatttcctaaccatgaatcatactgagaggttagttactagttattgaaaaacagtgttacatgccattattccacaca

SEQ ID NO: 2048 - DNA, 142 bp, Glycine max
  unsure (1)..(142): unsure at all n locations; Clone ID: 701039532H1
gttacttgccaacaatgcactgctgtctggtgaaattccaaaattcagtcaacatgttgaagttgtatattctgggactggtctgataaataatacttcacctgacaacccaatanccaacaggcccaacactgtctctagg

SEQ ID NO: 2049 - DNA, 288 bp, Glycine max
  unsure (1)..(288): unsure at all n locations; Clone ID: 701039533H1
aaaagctcagaganaganaatggggaaaagacaaatcccagaccctccgaactttaagaaatacggcgttcctttctactccgttgcgtggattccccaacacgttgtcaaatcgcgccaaatcgaaaccgccgatgagtctcggactccgatcacagcacttcgccggcgancgaggcggagaaggaactgcgaggtcgccggtaactacctgctgtcgccggcggggngganagggcacagggtatncccaatgtttgttntgcgcattcgatgtcgcgtcgattc

SEQ ID NO: 2050 - DNA, 297 bp, Glycine max
  unsure (1)..(297): unsure at all n locations; Clone ID: 701039534H1
ctccattgtccattctttcattccaagaaancgagaattcaactgttctcggattggtaccagctggtgcatctttttttcttcaatttgttttttcggaattctttttggttcctaattttatcaggagaagctgaattttccgggaaaatttgcnttgtnttctcttccttgcgaccttcgccgccggtgctactgattcgtcaacggnaactcctaacgaggtgttttgcctgatttgttgatcctgcggagaaggtgcttggaataganggaagggaaaagacaganggaatc

SEQ ID NO: 2051 - DNA, 293 bp, Glycine max
  Clone ID: 701039535H1
aaaagaaaaacttcacttcacttgcatgccaaatgagaacaacctcttcttagaataatttcctcggtgtttaagcctgtcgatttccgaacaccaatccgagttaattaaacaatgagagtttcgacagaaaagttagagacagagccggagagcaaaaagataaaacgcattcgtggcggcggcggcggggactcgagcaataagcaccctttgtaccgcggcgtgcggatgcggaatgggggaaatgggtgtcggaaatccgcgagccgcggaagaatcgcggatatggt

SEQ ID NO: 2052 - DNA, 294 bp, Glycine max
  Clone ID: 701039536H1
atcatttccagcattgactacaaagttgaatctcccatccagcttgcttcccgccattgatatttcttacattcaagagaaatatgcaggtggcaatgcaccgtcttttgtgaagaataataacagcatctcatcaaagcatcaattaataaatgatacattgaagatatgggttccatcaaatccaagaggtgcagaaagattacctcctgagattattgaagctgagacggacttatatttgcgtagattgtggggtcagcccagtgaggatttaacatcaaagccaagtac

SEQ ID NO: 2053 - DNA, 289 bp, Glycine max
  unsure (1)..(289): unsure at all n locations; Clone ID: 701039538H1
cagaaccaaancaccaccaccattatantnnactccctgnaaaccctagaaacccaataatttgggggnacctacaacccaatcccagaaaccnaaatcggcntcgcaatttaacgaaaccgaggaagagaaatcgtgggcacccttcaaaattcgagatttccccgacaaaatgtcccaactgaagccatgtcgcatatagacagtgccccttcgacccnagggaagttcaaggtggaganagctncgnattcancgggtggggtggcaactggctgnnntantcgnc

SEQ ID NO: 2054 - DNA, 290 bp, Glycine max
  unsure (1)..(290): unsure at all n locations; Clone ID: 701039539H1
tcttaagctcccgtagttaaatctgcgagccattagttaaaganaaaaaaaccctaaaaagtttaagatgggttccaaaactncgntctttccttgctcttttcctcacgatcaacattcccttcnttgcccttgcctntgcctgngggacatgccctagccctaagccaaggnataataagcacnancctgttaanccaagtcnttcagtggctcaggtggttcgggtggttcaggaggctctggtggttcaggtggctctggtggttcgggtggttcaggtggctcgg

SEQ ID NO: 2055 - DNA, 140 bp, Glycine max
  Clone ID: 701039540H1
ttttatggctctcggctttactttcagcaagtaaattgattttctttccactttatgggaacttaaatttctgtttaaaagggtctttcaataaacttgtttatgtactccctccgtttcataatatttgttgtgtaaaa

SEQ ID NO: 2056 - DNA, 286 bp, Glycine max
  unsure (1)..(286): unsure at all n locations; Clone ID: 701039541H1
tcattttatcgcgtccttgagagatgaagtgcggatattgaaaganttgcctcccagactcaagatgaaagtggaacgcggctttctttacaccatgccacctattagttggtctgatatatcttactataaggaccagattctacccttgatacaaaagtacaaagttgttcacttaaatagaactgatgctcggttggccaataatggtcaaccgataganattcagaagctgcgttgccgggtcaattttagtggtctgagatttacttcccagatagaggag

SEQ ID NO: 2057 - DNA, 284 bp, Glycine max
  unsure (1)..(284): unsure at all n locations; Clone ID: 701039542H1
gtttcctctctacatggcagtgcccagaaaacaaacttagaatagagagaacatcaagcaagaacagtgttagcataactctccaagaagttgctgatatatctatcaatgttgtgcctgtgactaaggaagatagtagaatccataattaccaaattcctgatgatgattgctttgctcacttggaggtgcagttcaaattccatggtttgtctaacaaagttgaaggggttcttggaaagacttatcngccagattttcaganccctgcaaattgggagtgc

SEQ ID NO: 2058 - DNA, 151 bp, Glycine max
  Clone ID: 701039543H1
ctttttcaatttcagattcagaaggagacgatggaagaacccgtgaaggaacagcagcccctctctgctgggaactctgcgagacccaagcttcagagatacgcgcttcgttcctcctctaaatccaaggaaaacaagccagacgcacctg

SEQ ID NO: 2059 - DNA, 131 bp, Glycine max
  unsure (1)..(131): unsure at all n locations; Clone ID: 701039544H1
ggctggaagttctggccagtctaacngaaatctgcaaactacagaggactcctccttgcaaggntggaaaactttctgttgagcaaaggaaagaaaagatcaatagatacatgaagaaaagaaatgaaaga

SEQ ID NO: 2060 - DNA, 283 bp, Glycine max
  unsure (1)..(283): unsure at all n locations; Clone ID: 701039545H1
caacggtcatgaacggcggcgctgaggcctccgtcantcacaggcgcagacaccaagcagcttccgctaacggcgttaagatagcaaacggggccatggcgaacntncntcgacgctctgctacgacgcctcgttcatgaaatggaccgttgcggatgctgtccacgtggcgacgcatcattggntgccgtgcttattcncattagggcttctcttcttcatggccgtgganaancacgctcctnatgttccgcggtggtngcngcttncggatangggttnt

SEQ ID NO: 2061 - DNA, 280 bp, Glycine max
  unsure (1)..(280): unsure at all n locations; Clone ID: 701039546H1
cttggaaggggttgttaatgtagacaaaaatggtgctacacatgtgaggatggaagttatgcatcaaacatgtgctcaacaaggggtgaatgaccttcaaatacgggaaaatggagaggcatatganagtcaatcgcaagatgacttacccagcagcactagtatacctgattctttgtctattgagaggtcttgtactccacctgcatcatggagtttcacagcaaaagcactacagggagaaattancntcngggtgtgatgccnccaaaaaatggnc

SEQ ID NO: 2062 - DNA, 253 bp, Glycine max
  unsure (1)..(253): unsure at all n locations; Clone ID: 701039547H1
gttcttaggttttgttctgagacgcagtttttcattcttctaatggcccagtccttcggtcagaccgagatcaactgggacaagctagataaaactagattctatgtcgtaggagctggactctttacaggtgtttcggtggcactttatcccgtttctgttgngaaaactaggctgcaggttgccacaaaggatgctgtaganagaaatgtgtttnctgttgcaaaangatactnaaaacagacggcacccg

SEQ ID NO: 2063 - DNA, 150 bp, Glycine max
  unsure (1)..(150): unsure at all n locations; Clone ID: 701039548H1
tttgtataatgaggagtgctagcaacacactcctcctaacacacaccctatcattgcttgaaatttattgaanattacaaaatcatgagagagggacattaaagangatgtaggacccactatcttttatnatttccaagaagagaatgt

SEQ ID NO: 2064 - DNA, 293 bp, Glycine max
  unsure (1)..(293): unsure at all n locations; Clone ID: 701039549H1
cgaacctcaacaaacacaaataccgtctcccatcattccttacagtttcaaacacttgtttttcttctctcttctccttttgtntctgtgtggatctacacccactaagatgttacccctattctgaaaatggaaaacaatcatagtgcagctggaacacaagatagttctatgatgaagtctgttgatcaaagagtacgttcaaaagcgcgtaatgacataatgatcgacgtctgaagaatcgagaganacaacgaagatatagggcacgtaagcgtctagaagccgaaacc

SEQ ID NO: 2065 - DNA, 288 bp, Glycine max
  Clone ID: 701039550H1
aaatgcaatggggaccactgaggaggtaaagaagattgttactactttgaatgaggctaaagtccctggagaagatgtcgtagaagttgttgtgagccctccttttgtgttcctcctgttgtaaaaagtttgctgcgccctgatttccatgtttcggcacaaaactgttgggttcgcaaaggtggtgcttataccggtgaggttagtgctgaaatgctgttaatttgggaattcctgggttattatggtcatctgaacggaggcagcttttaaatgaatcaaatgagt

SEQ ID NO: 2066 - DNA, 290 bp, Glycine max
  Clone ID: 701039551H1
ccgagctttagacagcgtcgttgaggccatgaaggaggatgagaagagtgttttatctgttcttggtcggagcaatattgctgctttggttcaattgcttacagctacctctcccaggataagggagaaaacagttactgttataagctcgcttgcagaatccggtagctgcgaaaattggctagtttctgaaggagttctgccacctcttataaggctgttgaatctggcagcacggtggggaaggaaaaggccacaatatcccttcagaggttgtcgatgtcagccga

SEQ ID NO: 2067 - DNA, 287 bp, Glycine max
  unsure (1)..(287): unsure at all n locations; Clone ID: 701039552H1
ctaatgttcagcaagggcctcaggttgacaaaagcaatttgaaanaattcttcctacatcgagcatggaaaaagagaaggggccacccttttgacagggggcaaaagagtgggtaacaagggttactacattgagccaacaattttctctaatgttaaggaggacatgcntatagcacaagatgaaatattcggtcccgtgatagcactgatgaagtttaanacaattgaggaagcattaaaatgctcnacaacagcagatatggcctagtagcaggtgttgtgacc

SEQ ID NO: 2068 - DNA, 280 bp, Glycine max
  Clone ID: 701039553H1
attcttcctgattgcaaaactgttgtttacaacacagcaaaggttggttacggctggctgaaaaagatgactcctgtaaacagtgcatttgcttggcagtcatacaatgaagaacctgcctcatccagtcaagctgattccattgcagcatatgcactttgggagcaggtcaacgtgacccgcgattcttcagattatttgtggtatatgacagatgtcaacgttaatgctaatgaaggatttctaaagaatggacaatctcctcttctaactgtaatgt

SEQ ID NO: 2069 - DNA, 287 bp, Glycine max
  unsure (1)..(287): unsure at all n locations; Clone ID: 701039554H1
cgtctttctcttctgttaatactcttcttccatgatgcaccatccaactgattttctcctccaacccaatttgcactcgtggggtatctgcttccctcaacctagttttgctacttatgcttgttgtgtattgggtatggaagaaagtgcaagtngacaatagtgagaanagtgagagagaaggannccataatacngctntcntgnantacaaacacagtctggtttgtagcttagttatngtgtgttcaaccttttgttgtgcnaactaggcnacttgnnagngc

SEQ ID NO: 2070 - DNA, 287 bp, Glycine max
  Clone ID: 701039555H1
gggaagacactggttttctatcagggaagagctcctaggggatgcaagaccgattgggtcatgaatgagtaccgtttacctgacaattgcaaactacctaaggaaatcgtgttatgcaagatatatcgaaaggcaacttcgttgaaagtgctggagcaaagggcagcactagaggaagagagagagatgaagcaaatggttggttcccctgcttctccttcctccacggacaccatgtccttagcagcccacaggaagagcaaaacatgcccttgccattgttgcaa

SEQ ID NO: 2071 - DNA, 286 bp, Glycine max
  unsure (1)..(286): unsure at all n locations; Clone ID: 701039556H1
gaacctggttactatgacctccngagagnccaggataagattggagaatgtgcttattgtcaaagangctggtacaaatcctcaattttggtgatagaggttacttatcttttgaacacattacctgggcaccatatcagaccaagttgattgacctgaaccttctatgtcctgaggagatagattggctgaactcgtatcactccacatgcagagatattctagcgccatatttgaatgaagttgaaaatgcatggctgaaaaaagccactgaacccgtagtgca

SEQ ID NO: 2072 - DNA, 275 bp, Glycine max
  Clone ID: 701039557H1
cttgcaatatggacatgaattcctcaggtggtgcctgcggttggctttatgattatggctttgatatccctgttgctggttctgacttcatggcttcagactctggtggtttcagttgggggccccagagttacaacttcaagggtccttcaaatatgagcttggaaatggaatactcactggattcaactgtcatggaaaatggtcctcaaagcggttaaggactgaatcatgtgcatctggctccaaggcatgtcgtgagaaattccgaaggg

SEQ ID NO: 2073 - DNA, 122 bp, Glycine max
  unsure (1)..(122): unsure at all n locations; Clone ID: 701039559H1
caagtnanttgtagnagctctcgatgcaggcattggactggggacaccgtgcngtttgtaacaatttattgattactgtaaatccaaggtgtttactgtctgtagtaacgtttatgttgtat

SEQ ID NO: 2074 - DNA, 165 bp, Glycine max
  Clone ID: 701039560H1
caagtgagttgtaggagctctcgatgcaggcattggactggggacaccgtgctgtttgtaacaatttattgattactgtaaatccaaggtgtttactgtctgtagtaacgtttatgttgtatattgttagttcatggcaggagaaaaaagggagtaagttttcat

SEQ ID NO: 2075 - DNA, 133 bp, Glycine max
  unsure (1)..(133): unsure at all n locations; Clone ID: 701039561H1
gaaaatctgaanatttcatttctctctgtataaatatcctagtccttatcagnttcactatttcgnttganatcgccgaagaaggtattgacgtcgatgatgaaaatgaaattggtgaaaacattactgcttc

SEQ ID NO: 2076 - DNA, 148 bp, Glycine max
  Clone ID: 701039562H1
cgaaaccaagacaaaagtggcatccttgttgttcgcttcaaattcaatgttctacagaggtaaatttgccgatggtggtgatgggcgtgaaatggctgcaaaacgccagcgcactgttgatccaggatcttcattctatggtgcttcc

SEQ ID NO: 2077 - DNA, 145 bp, Glycine max
  unsure (1)..(145): unsure at all n locations; Clone ID: 701039563H1
cnaatncctccacncttgttcttcagtctcctcctattatccgccaccgtagccgccgccgaacggatcgacgatgaagacgaccttctgatccgtcaagtggtgccggatgcggaggaccaccacctgntcaacgcggagacag

SEQ ID NO: 2078 - DNA, 283 bp, Glycine max
  Clone ID: 701039565H1
gtctatcatagtcagaattgagaacaatcgttggtgtggaacgtgacaatggtggcgacgaacgtgaaggcagaaaccatgtctctgatggacaagcgcaggccttggaggctgagatgaacttccatcatcgcccgcctctcccagccaggcgctcctggctctccggaaatctcgtcgattccgaggatttccccattccgatatcgacgtccccgttgttcgagccgaagacgtcggctggcagagtgcgcaggaccacaacgaataactgataaaatac

SEQ ID NO: 2079 - DNA, 290 bp, Glycine max
  unsure (1)..(290): unsure at all n locations; Clone ID: 701039566H1
ttctacgtctgattccaaaacaacccttctttngctcttccacgtcttcaccttttcgatctcttctgcaccccaattccacgccccttctntccacncctccatttttgatccattgtttctcacacgggcactaccttgggttctgtgcctgattctacttccacgtgctgggggaagtgcaaaattttgttctttagctccaactagaagtgggttttcgctgtggcttcganaatcacaacatcnaagctaccataataggttttggtncanaaaactctttttnt

SEQ ID NO: 2080 - DNA, 292 bp, Glycine max
  unsure (1)..(292): unsure at all n locations; Clone ID: 701039567H1
accgaataaggattttctggttttgttgttggtgggtttcagcgttccgctttcaacttncaaattctcagtgaaaccaatttcagttcagtccaaatcccaaatccgaagtgagatttgcgatggagaggcttcagcgaatgttcgcaggtgcaggtggagctctagggcaccctcccccagattccccaactctcgattcctccgagcaggtctacatctcctcactcgctctcctcaagatgctgaagcacggaagggctggggttcccatggaagtgatgggtttgat

SEQ ID NO: 2081 - DNA, 286 bp, Glycine max
  Clone ID: 701039568H1
caacaacatagtcactgccaccaccatgaattcacaacactcatcacgtgacatttccttaatacaaaaccagttacatgatttacatccttccacagtgagcatggtaaccacggacacgtgtcacacatcaaacgtgcttcaagggtttgggaatttttccatggccagtgacttggcctgtgtgaatcagcagcaacaaatagatgggtcaatgcgggttttttatggattggaaaccatggacgtggcaacaaatggtagcacaaacactagtattcaacag

SEQ ID NO: 2082 - DNA, 285 bp, Glycine max
  unsure (1)..(285): unsure at all n locations; Clone ID: 701039569H1
ggcttccctggcattgccaagaagattccacattggtttctgccacattcttcaacacagctacgaanangcancaatctggtcatcctccattaagatggctgcagaagactacacttttgggccttacaagatacaccacactgaagtgttctactccaccaatctctcttacgccatggttaacctgcgtctcttcttnntggtcatgtgctcatctgtncaaagcgtgaagttaagcgtttcggtgatctcatgctgatgagattctgatttatggtcang

SEQ ID NO: 2083 - DNA, 284 bp, Glycine max
  unsure (1)..(284): unsure at all n locations; Clone ID: 701039570H1
cttttttgaaatactcttgtgaccaaccaaggtctcttatttctanacataggaggaggagagaagaattgtttctatttcaaagattcagcaaattaaggagcagaaaaaagtcacatattttgttgttgaattcatcaatatggctaagggaatcagaaacctaagttcgtggatggaggttgccccggcaccaataattttcccaacaaagccttctaattcgcctgctttggagaccatcacagaagaagttgctgaggatgatgaagctccatgaatac

SEQ ID NO: 2084 - DNA, 276 bp, Glycine max
  unsure (1)..(276): unsure at all n locations; Clone ID: 701039571H1
cataccactttcctttccccattaattaagcacttagtaacagtctaattccacccgcaacaanatgaccctagtnnnnnnnnnnnnnnntatncaccctcactctcactctnactctcactcanacacagccacacagggacgaaacgatacgatncatggcgatgatgatgcacactgcgcaccctcacctgcactaattaacactaatcgttanttaaatcagttaaaacgaggcatcagaataagtgcaagtgccagatctcgatctcgatg

SEQ ID NO: 2085 - DNA, 279 bp, Glycine max
  unsure (1)..(279): unsure at all n locations; Clone ID: 701039572H1
ccatattcaaacaaccatgatagcctttctactctttctactaactagtcttggtctagtaatcaatgcatcaancctttagtgcttgttcgaattgnggagactttgtagtcccatacccactcagcantaacgaggactgtggagacaataggtacaaagtctactgcaacgatggaaatttagagttcttgtcagcaacagggacttactataagatcctagaattgacccaagtgctaacaagcttgtcatagcccacctcctatatgnaaaaca

SEQ ID NO: 2086 - DNA, 277 bp, Glycine max
  unsure (1)..(277): unsure at all n locations; Clone ID: 701039573H1
ccgattccttcgtgcgtgcgattcttctgatattccaaggcgacgcanccgacaccggacccatcttccggcgacatctcaccgatctccggcgaatccccggtccccactttcttccctcgaaatgaatcccgagtatgattatctgttcaagctccttcttattggagactctggtgttggtaaatcatgccttcttctgagatttgctgatgatcgtacatcgagagctacataagcaccatggagttgattttaaaatacgtatgttgagcag

SEQ ID NO: 2087 - DNA, 275 bp, Glycine max
  unsure (1)..(275): unsure at all n locations; Clone ID: 701039574H1
aagaagaagatggctttaggtgttcctgctcttccgttgacatacgtggctcacgttctggcagttgttgccagcgtcttggtcgtggtctgggtcgtcaatttcaggggtggcttggcttgggattctgataacaagtccctcatcttcaacattcatccagttcttattgttattggcttactagttcatgggggtgaagctattataagttacaaagcttttcccctaaagaaggaagtgaagaaattgatacaccttgttttccatgcnac

SEQ ID NO: 2088 - DNA, 273 bp, Glycine max
  unsure (1)..(273): unsure at all n locations; Clone ID: 701039575H1
gttccatacatagcaaganaaacacactcacacacagtgcttgtttagactagtgatcttccatggctgtgaaggatagaatcctggtcttgggacccacaggagccattggaaggcacatagtttgggcaagtttaaaggcagggaatcccacttttatattggttagggacacccctgcctctgttaacaagccaaggcttgtcactgctgctaatctgaaaccagggaaganccnttcagagctccaaanttctggagttactctggtnc

SEQ ID NO: 2089 - DNA, 142 bp, Glycine max
  Clone ID: 701039576H1
ctcggctcttgcatcgatgaagaacgtagcgaaatgcgatacttggtgtgaattgcagaatcccgtgaaccatcgagtctttgaacgcaagttgcgcccgaagccattaggccgagggcacgcctgcctgggtgtcacacat

SEQ ID NO: 2090 - DNA, 141 bp, Glycine max
  Clone ID: 701039577H1
ctcagtagtgcgattttcgattctcttctctgcaactatgcctaaccctaaggtcttcttcgacatgaccatcggcggtcaacctgccggccgcatcgtgatggagctctatgccgacgtgactcccagcaccgccgagaa

SEQ ID NO: 2091 - DNA, 268 bp, Glycine max
  unsure (1)..(268): unsure at all n locations; Clone ID: 701039578H1
gacttttggcagcaagataaatggagtgggagcttccctgtaaagtggtacatgcataaaagatgtgtcaaatgcaaattttaggcacattatactagagaacaatgagaacaaacctgttactaatagcagagacacacaagagataatgtatagtaaaggtttggaaatgcttaaaatattcaaaaaccntccttgaagacatctttgcttgatgactttatgtattangaaaatcgtcagangatcatgctggaanaaaagcccc

SEQ ID NO: 2092 - DNA, 153 bp, Glycine max
  unsure (1)..(153): unsure at all n locations; Clone ID: 701039579H1
agaatattgaacgaggcagtgagcttcgttgctttctgcgtgctacgaccttgncgattttcntctatgtnttgttttcaaagctgtggatttgtgggttgangcagagttcagaccctgctattgttcctcggcgaaggnagccaataacga

SEQ ID NO: 2093 - DNA, 286 bp, Glycine max
  unsure (1)..(286): unsure at all n locations; Clone ID: 701039581H1
tttgtttgtggtgttccagatttgccagaaaacaatcccccacaagtcattgaggagccacaggctgctactgctactgctataagtnggagctgtggcagcagcagctcctgctcaactagcaatggtggtgctacttnnnnnnnnnnnnnnnnnnnnnnngtgtttgcnagtttgtttgcttcttcaacagcatctgtgaccctacaatctcaaacaccagcattcagtgacttgattagagccatggggcctccggaacaccctgcggatcaaatctcgggtc

SEQ ID NO: 2094 - DNA, 288 bp, Glycine max
  Clone ID: 701039582H1
ctctgtttctgttccaattcacagagaacaatgcaaatttctcttagcaatttagccttcaagacccctcaactcttcccaatacaccaccccattttccctccaaagccaccactgaaccaccaagtttcaacgcagagccatgtcaacaatgtcctgaaaggttcgtcggggtatttgtccgaaatcagcaaagtgattgatcacgaagaacagtaccgggtagcccggtcgcaggttagccgtaaagttttggacttggaaggttattccatagagggtctttca

SEQ ID NO: 2095 - DNA, 285 bp, Glycine max
  unsure (1)..(285): unsure at all n locations; Clone ID: 701039583H1
ggctccatagctgcagcattagggtttttcatctgcttcaatggggaagggaacagggagttttggtaagagaaggaacaagactcacactctctgtgtgaggtgtggccgccgcagcttccatctccagaagagtcgttgcgccgcttgtgctttccccgccgcacgcactaggaaatataactggagcgtcaaggcaatccgcagaaagaccaccggaactggcaggatgaggtacttgcgtaacgtgcctcgccgattcaagagtggntcagagaaggtacc

SEQ ID NO: 2096 - DNA, 282 bp, Glycine max
  unsure (1)..(282): unsure at all n locations; Clone ID: 701039584H1
gtgggagaggcagaaagaagagaaaaaaggggaatggcatggttgcagttgcaganaatcgtgaccaagggaggtgctaatttgatctcaccactcccactttcacgattcttctcgaaatcttcttccccctatgttgtgaaagttggaattccagagtttctaaacgggattgggaagggggttgagtcccacgttcctaagcttgaatccgaaatcggtgatttccagcaagcttctcctcatcgcaccctcaaactcangaagcttggcatcctgcaa

SEQ ID NO: 2097 - DNA, 284 bp, Glycine max
  unsure (1)..(284): unsure at all n locations; Clone ID: 701039585H1
tcaaatcttctttctttttcttccgcagtcccaaccttcnntggattctcactcacacatcattgcttggggctctggtgaagatggtcagctaggaatcggaagcaacgaagagaaagaatgggtctgcctcgtcaaanccctccagccccaccgtattcgctcccgtcgtcgccggcagcagaaactccctcgccatccgctgacgncggcaaattgttcacttggggttggaacnnaagggccacacttgggcaccctgctgagaccaatctgagaacaag

SEQ ID NO: 2098 - DNA, 278 bp, Glycine max
  unsure (1)..(278): unsure at all n locations; Clone ID: 701039587H1
ttcaacaacccttcttttgatctgtgcaagtgatcttgaaaggagggaacaacaatggtgaagtctataaactttctcctacttctgtctctactagcctttgctcccttatgtcactgtaaaaagnaaataggaggttacctctaccctcaattctacgacggttcatgccccagagctcaagagattgtccaatccatcgttgccaaggcagtggcaaaagaaccccgcatggctgcttcgttgctcagatacatttccatgattgttttgtcngg

SEQ ID NO: 2099 - DNA, 270 bp, Glycine max
  unsure (1)..(270): unsure at all n locations; Clone ID: 701039589H1
aagagacaaatggganacacnaaggacatanctacgaacaaacccgcggcaaaatggcctctcatcaaacccaaaaagaatcttcagnttagccgcctccgagntttcgatctcttcacggnccagaattttttctcntncgctgaatcaaaggcattcgttaaaattgcnnangaaattggntttantcatcaggggagtctaggtccaacttatggcgaacattcagagataatgatcgaatgttggtggatgacctgtcctngcaga

SEQ ID NO: 2100 - DNA, 275 bp, Glycine max
  unsure (1)..(275): unsure at all n locations; Clone ID: 701039590H1
tgatttcttgcttctatatattacttgcttcttttcttgatcatgtcccttgctggtaaaatcagctctgaaattggtgttcaggcaaccgctgcaaagtggttcaacctcttcacaacacaacttcatcacgttcaaaatcttactgatagaattcatggaaccgagctgcatcatggtgaagactggcatcacaatgagtcggtcaagcactggacttataccntagatggcaaggttacaacttggcaaggagagtatcgnntccgtggccc

SEQ ID NO: 2101 - DNA, 140 bp, Glycine max
  unsure (1)..(140): unsure at all n locations; Clone ID: 701039591H1
cttaacgccatcaccacctttggnttcctttaannatgtattttttcactgagaaaatgcacagtttgaagatgggcttccctgactacatccaaacattggaagangaacgccgtaagattcaggtgttctccanagag

SEQ ID NO: 2102 - DNA, 268 bp, Glycine max
  unsure (1)..(268): unsure at all n locations; Clone ID: 701039592H1
cgaagaagaagatggctttaggtgttcctgctcttccgttgacatacgtggctcacgttctggcagttgttgccagcgtcttggtcgtggtctgggtcgtcaatttcaggggtggcttggcttgggattctgataacaagtccctcatcttcaacattcatccagttcttattgtnattggcttactagttcatgggggtgaanctattataagttacaangcttttcccctaaagagggaatgaagaattgatacncttgttttcca

SEQ ID NO: 2103 - DNA, 143 bp, Glycine max
  unsure (1)..(143): unsure at all n locations; Clone ID: 701039594H1
cgcgttgtgcatggtattgatgtctttgatccaaaattcaacattgtctcccctggagctgattcaaaccatttncttcccccacactgaaaccagccgtaggttgacatccttccaccctgaaatcgaagncactcctttac

SEQ ID NO: 2104 - DNA, 119 bp, Glycine max
  Clone ID: 701039596H1
gtcgagctgagaataccagttgctccagtagccggcactaaacaacatggcggacaaggcagttcaccatccgaaccaggaagtttatgacaaacaggcttctctccagaaagcagttc

SEQ ID NO: 2105 - DNA, 291 bp, Glycine max
  unsure (1)..(291): unsure at all n locations; Clone ID: 701039601H1
ctatggacttgccattcctaaatgcctatcttgattcgttaggtttgccaaattttaggaagggatgcaactttgccgcagcagctgcaactatacttccagccactgcatcatccctctgccccttctcctttggggttcaggtgtctcagttcctccgattcaaagctcgggcccttgaattgatcgctaaaggcaggaaatttgataagtacgtccctgatgaaaatgtttttgagaagggattgtacatgtttgatattggcaagaatgatctggcngnagatttna

SEQ ID NO: 2106 - DNA, 289 bp, Glycine max
  unsure (1)..(289): unsure at all n locations; Clone ID: 701039603H1
gtggaagtggggagaaagatgagcgaggggatgagctccatgagtttcaagcttcaaggagttcttccagcctgggcccaatcaggccgacaagcttgtggaggacgctacttccgaggccctggacgagcccgaatgggccctcaatctcgatctctgcgacctcgtcaacaccgacaagctcaactgcgtcgaactcgtccgcggaatcaagaagcggatcatctcaagagcccttagggttcagtacttgnccttgtcctcctcgaaaacctagttcaagaattgg

SEQ ID NO: 2107 - DNA, 157 bp, Glycine max
  Clone ID: 701039604H1
ggccaggcaagccccactcaaccaccacacctctcctcgttcacgctacccctttctgctcttcttctacctttcaagttttaaaagtataaagatggcagagacattcctatttacctcagagtcggtgaacgagggacaccctgacaagctctgc

SEQ ID NO: 2108 - DNA, 119 bp, Glycine max
  Clone ID: 701039606H1
gatttcgaagatggctgaagcagaggatgccgtacgacgccgtaatgcggtcgccgagtatcgaaagaaacttctccagcacaaggaattggaatccagagtccgatccgtcagggaga

SEQ ID NO: 2109 - DNA, 136 bp, Glycine max
  unsure (1)..(136): unsure at all n locations; Clone ID: 701039608H1
gtgcccaaccgtgattgcccatcacatgctcagttcctanctacatatgttcacgctgnngatggtactccgttactcatcaagaacgcaatctgtgtctttgaacaatatggcagcatcatgtggcgtcacaccg

SEQ ID NO: 2110 - DNA, 156 bp, Glycine max
  Clone ID: 701039609H1
catttgaagattaaagaataatgggttgttacagagttcagcttgtggcaataatctcgttcatgcttttgctttcaaatacccacggttggggagatgatgggcatgccattgtttgtaagatagctcaggctcgcctcagcactgcagctgcaa

SEQ ID NO: 2111 - DNA, 155 bp, Glycine max
  unsure (1)..(155): unsure at all n locations; Clone ID: 701039610H1
aacaaagcagcacccatttggatcctctcttctcttctttgatctccgttaccctttttgttttctcannnnnnnnnnnnnnnnnnnatctttcgaagttcgtttgcgtgtgttgtgtggtcagtcaccgatggcagcaccacctgcgagggcag

SEQ ID NO: 2112 - DNA, 284 bp, Glycine max
  unsure (1)..(284): unsure at all n locations; Clone ID: 701039611H1
ggcactccgaggcaacttcacactccttttaatctttcatcctatctttgtattgttgaaccctccattctctgcaacattcttcgattcaattgctcttgtgaaattcctcctttattagcggctaaaccctaaatcagaactttggtgtggtgtgttgacttaattgagtgtagaaatagaataatggtgaaagcatatacacaggaacacgtctacaagcacccttgggaacgtgtaactngtggcatcttggcgnagttgcctgcncaagagaaaaaccc

SEQ ID NO: 2113 - DNA, 279 bp, Glycine max
  unsure (1)..(279): unsure at all n locations; Clone ID: 701039612H1
tagtaattaacctcactcaaactcgggatcacagaaaccaacaacagttcttgcactgaggtttcacgatgttgctggaacttgcacttggtttgtttgtgttagctttgtttctgcacttgcgtcccacaccaagtgcaaaanccaaaagcacttcgccacctccnaaaccctccaagcccaaagcctngtctncccttaattggcnacttcacctctaaaangntaacttcncaanaanccatcnnggttctccnaaaangngggccccttgnctcc

SEQ ID NO: 2114 - DNA, 284 bp, Glycine max
  unsure (1)..(284): unsure at all n locations; Clone ID: 701039613H1
gttttccgcacaactctttcacntcttgttttccccaatccttttcgcctttgtctgcgaatggcgtcgttcgatcaggcacctcccggcgatgtcaaatccggtgacaaaatcttcaggaccaagtgcgctcagtgccacaccgtcgaaaaaggtgccggtcacaagcaaggacccaatctgaatggtttgtttggaaggcaatctggcacaactcccggatattcctactcttcagctaacaagaacatggctgtgantggggaagaaaagaccntntncnt

SEQ ID NO: 2115 - DNA, 283 bp, Glycine max
  unsure (1)..(283): unsure at all n locations; Clone ID: 701039614H1
ttctccagaacagcaagggagaatcaattcctcatcgttgcaatttttctttcactctctagattctcatctttcctctcttctaccccttcagaaaaaaccatgtcttcatattatatgtatatctagctcttcatttttncttgctccaagattatgctgtaaaattctgaaactccacagtttcagccacattttngacttaaagatctgcgcgttgacccttggcaggttcagcttttgganttgttcatcctcataagcctttgattagtccaagttt

SEQ ID NO: 2116 - DNA, 286 bp, Glycine max
  unsure (1)..(286): unsure at all n locations; Clone ID: 701039615H1
caaaatgtatcgcgttcttcaccgcgctttctgcaccgccaccgagcccgccaccancgccaccgtcaccgtttccatcaagtaccatttcggaggatctgtacaaggaagtgaagctaaagaatgtggtggagaagttcaagaaagcctcggacatcgaccgcttccgcaaaaaaaccggcatctacgaagacaccgtccgccgcctcgccggcgcccgacgcttccggtggatccgcgacatcctcgagcaccagaagcagtactccgacatctccaacgaggg

SEQ ID NO: 2117 - DNA, 187 bp, Glycine max
  unsure (1)..(187): unsure at all n locations; Clone ID: 701039616H1
gtgatctgcagctacgatgggtaagggaacggggngtttcggtaagaggaggaacaagacccacaccctctgtgtgaggtgtggccgccgcagcttccacctccagaagagtcgttgctctgcgtgcgcttaccccgctgcgcgcaccaggaaatataactggagcgtgaaggccattaggagaaac

SEQ ID NO: 2118 - DNA, 156 bp, Glycine max
  Clone ID: 701039617H1
ggggtttcatctccttcagtggctgcaagctcagactcgtctcccaatgaggaaaccaaagagaaaaatgtggatgtcaaagatggtgagactgattcctcgttccctaaacctcttgtgactgttaacatcgagccggagccgaatgtggtgcag

SEQ ID NO: 2119 - DNA, 182 bp, Glycine max
  Clone ID: 701039618H1
ctctttcccactctttcaaatgcatcatcatcgttctgctaacaacgcttccgtcgctgctgccggcggagtggcgctgatcccagacttcgccgccaccaccattacatccttcataaggacagggctccggacatctccaactttttggctgatgcttctcccagttcccccgatcagcc

SEQ ID NO: 2120 - DNA, 277 bp, Glycine max
  unsure (1)..(277): unsure at all n locations; Clone ID: 701039619H1
ctaaacaatgagcaaacagcaacagagttttgcngcgacggcggcgggcgaaanggggtccttctccaccgagtagcgaccagattaaaaaaaaacgacgggaaactccgacaaccatactgtccctggaccccgacatcgtcaccaccatcttcgctttcctcgacatgttcgatctcgttcgctgctccctcgtttgtaaactctggaatgccatcgttgagtcccggtcgctgcgagaattctgtgagaggaagatgcacaagtcttttgctga

SEQ ID NO: 2121 - DNA, 120 bp, Glycine max
  unsure (1)..(120): unsure at all n locations; Clone ID: 701039620H1
aacgatccaaactcttttttcatttgcagcatcaaaatgagtggtagcaacgatggnngcgngcagtgggagctnctaggtttttgaaggtggctagtgcagctgccgctacanccgccg

SEQ ID NO: 2122 - DNA, 281 bp, Glycine max
  unsure (1)..(281): unsure at all n locations; Clone ID: 701039621H1
ctctcttcttcccttgctctgtgtcgccgtaacacaaaaaagggacgagagagaaagaaccacccatccaacagcttttgttcttaacaagacaaagcttcgcgtgtgtttgggtttcttttcatccttccagcttggaaggattgaagtttctgtctttttctgatctccgtgtgcgtggtttggttttgttgttgaagatgttggtagctaatagctttgatcctatggcgaagggncgntttttctctgnggcggaaaaggtcnaggattcagtgata

SEQ ID NO: 2123 - DNA, 154 bp, Glycine max
  Clone ID: 701039623H1
caacaaccatggggtgttggtacatggttaaaggaaattaaagacactactaaagaaggatatagttttgaagagctatgcatcaagaaagaagccattgagggagaagagaagttttgtgcaaaatcctgggaacagtaattggttttgccat

SEQ ID NO: 2124 - DNA, 279 bp, Glycine max
  unsure (1)..(279): unsure at all n locations; Clone ID: 701039625H1
ctctcacccagatcttgtagcaatggcgancgctcccactccacgcgaagagttcgtgtacatggcgaactggcggagcaggccgagcgctacgaggagatggtggagttcatggagaaggtctccgcctccgccgagagcgaggagctgaccgtggaggagcgtaacctcctctccgtcgcctacaagaacgtgatcggcgctcgccgcgcctcctggcgatcatctcctcatcgnccanaggagganacccgggcnaagagnnacaatttcccttnt

SEQ ID NO: 2125 - DNA, 153 bp, Glycine max
  unsure (1)..(153): unsure at all n locations; Clone ID: 701039626H1
ctgcaatgtaatgtcttgctattgctatatcttttctttctcatanatagatttagatctataaactcccttcgttgctgaacgcggttaaggttatgatttatgaatgcgatctaattaaggcacaatgacaaggagacaagcaagttccac

SEQ ID NO: 2126 - DNA, 99 bp, Glycine max
  unsure (1)..(99): unsure at all n locations; Clone ID: 701039627H1
ttccttctaaaaattgctttaacacnggataanacatttnccagccagtgtgctaaggagctacgaagaagaaaagaagttgaagaacaattggcaagg

SEQ ID NO: 2127 - DNA, 279 bp, Glycine max
  unsure (1)..(279): unsure at all n locations; Clone ID: 701039628H1
aattttttaatgggcctaggacgtaaagcaaaccaggtgtacatcattgactatggccttgcaaaaaaatatagggatcttcagactcataggcacataccatacagggaaaacaagaaccttacaggcacagcccggtatgcaagtgtcaacacccatcttggaattgaacaaagcagaagggatgatctggatctcttggttatgtgctcatgtacttcttaagaggaagtcttcccgnnagggctgaaggntggcnccaaaaaaacaaaatttgnt

SEQ ID NO: 2128 - DNA, 119 bp, Glycine max
  unsure (1)..(119): unsure at all n locations; Clone ID: 701039629H1
cagcttgctgcaagcttccccggcaatgctcaaggggtgagattcagtggcaaagcttctgcttccagcggaggctgancctgcgaaaccggatgcttctgctgctgaagatgatgatg

SEQ ID NO: 2129 - DNA, 153 bp, Glycine max
  Clone ID: 701039630H1
gccttgctttcttcttcacttcaaacttgccaatctcgaagatggcaatagaattggcatctcccaattgggttccaaccgcagccgcatgtttggcagccttggccgccctcctcctcttcctcctccgcggtctccgccgccgtaaataca

SEQ ID NO: 2130 - DNA, 286 bp, Glycine max
  unsure (1)..(286): unsure at all n locations; Clone ID: 701039631H1
cacaaactcgctgcttattttgatttgaactttgaagttttgttattttgtgcaatggcagccaagagcaaaatcctagtccttggaggaacaggatacattggaaaattcatagttaaggcaagcgcagaagcaggacaccccacttttgnccttagttagagagagcaccctttctcatcctgaaaaatctaaacttattgagagcttcaagacctccggagttactcttctttatggtgatcctactggatcatgaaagccttgttaangctatcaaggcntt

SEQ ID NO: 2131 - DNA, 154 bp, Glycine max
  Clone ID: 701039633H1
caaaagttagggtgtgtgttcgtgaaaaggaaatggcgcgattcagcgagagattgaaattgataagttgattgagggtgagattcaatgagaagtttaaactgatgagttgactgagggtgagattcaaacttcattcgtgattccgaagaag

SEQ ID NO: 2132 - DNA, 282 bp, Glycine max
  unsure (1)..(282): unsure at all n locations; Clone ID: 701039635H1
ttatgaagtcatacaaattgtcagagctgagtnatgctgagcttcgcagcctcatcgcttcgccctcgcattgatttctcttcggttttcgctctggtcaaccctatcgttgaccacgttcgcgaaagangcgatgctgctgtcaaagaatacacattgagattcgacaaagctgaattggataacatcgttgaacttgtctccgaccttcctgatccacaactcgatgcgcatgttaaggaagcttttgatgtcgcctacaacaatatatatgcctttcag

SEQ ID NO: 2133 - DNA, 152 bp, Glycine max
  unsure (1)..(152): unsure at all n locations; Clone ID: 701039636H1
atccatgtntcctctgggaaactagtccctggactatcatggaattactatttgttgacatgtccccaagcttgagaggattataaggaagcatcttgaggatgtcttcgagaaggacagtggagtagctcctggcatacttcgactcttct

SEQ ID NO: 2134 - DNA, 150 bp, Glycine max
  unsure (1)..(150): unsure at all n locations; Clone ID: 701039637H1
gcagtaaggtgagtcaaaatcaatcatgaagccatggtaaatgtgaagtaacccccatgattttagncanntcatggtgacactggttttgaggtagccaccatgattttaaaagatattcaaacatgattttaaaagatattcaaacat

SEQ ID NO: 2135 - DNA, 153 bp, Glycine max
  unsure (1)..(153): unsure at all n locations; Clone ID: 701039638H1
caccaccctttttcctcattctcttcctcactaaaacatcacnctttttttcatttcaccaaacaaaacagtaacaccacacagccatgacagacagggtgtacccatcggccaagcccgccgcggttaacggcgccgccgccaacccatctt

SEQ ID NO: 2136 - DNA, 150 bp, Glycine max
  Clone ID: 701039641H1
tagcacaggtcttttgcgaaataccatatgtgtttttccaaactgtttattacttcacttcatagtgtatgcaatggtgagctttgaatggaaagtggagaagttcttttggttcttctttgtacagctcttctctttctgtacttcaca

SEQ ID NO: 2137 - DNA, 151 bp, Glycine max
  Clone ID: 701039642H1
ccggtcgctccactccgaagaaggttctcaattttcgagaaaccgccacgtggcttctggaagcagcaagtttggtctagaaagatcccaaggagtcggtccgaacgaggatccacccccttccttgacgaacacagagacgtgtgttttg

SEQ ID NO: 2138 - DNA, 256 bp, Glycine max
  unsure (1)..(256): unsure at all n locations; Clone ID: 701039643H1
ccttcaatattaatattccgancaaaaaccaccaacaacaacattcaccaccaacaagaagaacaagattggcgttatgggtctcttcctttctaggaatttggcttgcaaattcatatacccttttcttttctccaagaaggtttccaaggatttgtttcccaagcagttggagaacatgatgtctctgatctctcctcgtactggcaggcatttgcagcgctatgacaatggctgtcgccaagttgtgggatgc

SEQ ID NO: 2139 - DNA, 277 bp, Glycine max
  unsure (1)..(277): unsure at all n locations; Clone ID: 701039644H1
aaatatttagagagagagagggtttcatcaagtaaacactgaaactaatttttcacaaatatcgcggcaatgtcaaattatgatcttccaccaccggatactcattcggaaacatcggttccccaatggacaccacctttgccaacatatccaccaccaacgtcttatttttcatcaacatttgatgattcagattcatcttcatccacatccacctttggcatcatcgtaggagttttggttggtgtctttggacttatttggttgtanggctttg

SEQ ID NO: 2140 - DNA, 275 bp, Glycine max
  Clone ID: 701039645H1
cgaaacgcacatttcactattcattctcgtttccctttcggtaatttccaattactagttactaatttctccatgctttcttcatcttacgcttaatccttatggtttcgtttaattgttgttctaattgctgcttgttgcagactgtgattgtttgttaactgaacttttcgagcaaaatgtctggacgtggaaaggggggcaagggtttgggaaagggaggagcgaaacgacaccgtaaggtgttgcgcgataacattcagggatcaccagcc

SEQ ID NO: 2141 - DNA, 148 bp, Glycine max
  Clone ID: 701039646H1
atttctcattctcccatttcctctcagaaccctcgatcactcccacgcgctcctatatcctctccttcaccgtcgctctctccaacgatcacaacaacatcgtcatcccatggcaaacgccgcatctggtatggcagtccatgatgac

SEQ ID NO: 2142 - DNA, 270 bp, Glycine max
  unsure (1)..(270): unsure at all n locations; Clone ID: 701039647H1
ctcgtagcatttcggcatccaaactaactctctcatcttctacagcattcttactgcaattcaaatcaaattttcaaaccatggcttcctccaccaacgctcttcctgcccaccggcaacggcctcatcgtgagcttcggcgagatgctcatcgatttcgtccccaccgtctccggcgtgtcccttgcggaggctccgggttcctaaaggcccccggnggcgcccccgcnaagtcgccatcgccgtcgcgaggctcggcggaaagggggc

SEQ ID NO: 2143 - DNA, 130 bp, Glycine max
  unsure (1)..(130): unsure at all n locations; Clone ID: 701039648H1
gtgatctgcagctancgatgggtaagggaacggggnntttcggtaagaggangaacaagacccatcaccctcctgtgtgcaggtcgtggccgccgcagcttcccacctgccagaagagtccgttgctctg

SEQ ID NO: 2144 - DNA, 280 bp, Glycine max
  unsure (1)..(280): unsure at all n locations; Clone ID: 701039649H1
gcctttctagctagttttctgtcacacccancaaaacatcatcatgtccatgcttagtttcctntncattctcatgcttttaccctcatttgaagccantccttcagatgaagaagtgtntattaatccctcagaagtccatacccaagacatgcaagccttgattgcacaagcctgcatggacattgaaaaccataactcatgcntcacaaacatncanaacgagctcaccaaaataggccctccaagtnccagttcngtggttagtgagaanctagca

SEQ ID NO: 2145 - DNA, 151 bp, Glycine max
  unsure (1)..(151): unsure at all n locations; Clone ID: 701039650H1
gtcatagttcaaacagtatgtgacctattctcaatacatagacttcatntaagcnaagcctttgncttttgtcttgntggnntnnaacatagcaagtnctcttntnctaatattntcnatctgnttccnngtaacagcaacagccatgggg

SEQ ID NO: 2146 - DNA, 152 bp, Glycine max
  unsure (1)..(152): unsure at all n locations; Clone ID: 701039651H1
agaganatngcggcgganatacacgtgctgtggaacanagtnttcactgtacgttntggtggatccataggnttggtccngcttcgcgggactaatggctggtctcactctcggactcatgtctttgggactcgtccgacctcnaagttctc

SEQ ID NO: 2147 - DNA, 146 bp, Glycine max
  Clone ID: 701039652H1
cagagttggaaaaagcttgccctggcgtagtttcttgcgctgatattcttacccttgcagctgaagtatcttctgttctggctcatggtccttatttgaaatttcccttgggaaggagggatagtttaacagcaaatagaaccctg

SEQ ID NO: 2148 - DNA, 145 bp, Glycine max
  unsure (1)..(145): unsure at all n locations; Clone ID: 701039653H1
aganaaatgaagtctttccatctcacagtgacagctttgtgtgtgtagtggttgtgttggngtgtttccactctccctagatgcacaactagatccctccttttacagagacacttgtcccagggttcactccatgttcgtgaag

SEQ ID NO: 2149 - DNA, 276 bp, Glycine max
  unsure (1)..(276): unsure at all n locations; Clone ID: 701039654H1
gggaaagtctgaataccagaatgtcatggtcttccagtcatcaacatatgnccaaggttcttgttttagatggagtaattcagctaacagaaagggatgaatgtgcctaccaagaaatgatcactcatcttcctctncgctctattccaaaccccaaaaaggttttggttatcggtggaggtgatggaggggtcatacgagaagtagcacaccattcttcagttgaaaagataganttgtgaattgacaagatggttgtngatgtctccaaacaat

SEQ ID NO: 2150 - DNA, 147 bp, Glycine max
  unsure (1)..(147): unsure at all n locations; Clone ID: 701039657H1
atcgtcttctagggtaaccacagcgcnactcgnacaagtgcggccattcccaacgcttctcttcctttctaaggggagtctgaatcccgtgagttttcaatatgacgtcgttcttgaagcctgagaatgctctgaaaagggcggaag

SEQ ID NO: 2151 - DNA, 139 bp, Glycine max
  unsure (1)..(139): unsure at all n locations; Clone ID: 701039658H1
tttgcataataagaggaatgattgtnttgttcttatccttgttgaataatatatatatctccccttctctctgggacaatattgtaattctgacagggtgaagacaacttaatgggagtgtgggacggttctgattaac

SEQ ID NO: 2152 - DNA, 146 bp, Glycine max
  unsure (1)..(146): unsure at all n locations; Clone ID: 701039659H1
cgttgctaaacattgccttgcagatgtggaacaaattttgatgggccagggtgccactaataatctgaagcaggtatgttcaattcgttcttcaaatctcactgaggcatcttgcccagtaaaanatgtgaatgatttttatgaca

SEQ ID NO: 2153 - DNA, 147 bp, Glycine max
  unsure (1)..(147): unsure at all n locations; Clone ID: 701039660H1
aaganggcgtcttcataaacgcctttcttctccgtntccgtttcctacgttngaattcgntttnngatctgcgaaaatgagagagtgcatctcgatccacattggtcaggctggtatccaggtcggaantgcttgctgggagcncta

SEQ ID NO: 2154 - DNA, 273 bp, Glycine max
  unsure (1)..(273): unsure at all n locations; Clone ID: 701039661H1
ctatggacttgccattcctaaatgcctatcttgattcgttaggtttgccaaattttaggaagggatgcaactttgccgcagcagctgcaactatacttccagccactgcatcatccctctgccccttctcctttggggttcaggtgtctcagttcctccgattcaaagctcgggcccttgaattgatcgctaaaggcaggaaatttgataagtangtccctgatgaaaatgtttttgagaagggattgtncatgttgaanatgggcaggatgc

SEQ ID NO: 2155 - DNA, 274 bp, Glycine max
  unsure (1)..(274): unsure at all n locations; Clone ID: 701039662H1
ctgaaacatggagccaatgctggacttgtaaatgcattgaaacttcttcagccgatcaaagacaaatattctggtgtgacatatgcagacttatttcagttggctggtgctacagctgtggaggaagctggaggcccaaaaatccctatgaaatatggaagagtggatgtatctggncctgaacaatgccctgangaagggagacttccagatgctggtccccctnacaccggctggatcatttgcnccaattttccacgangggtngnaanac

SEQ ID NO: 2156 - DNA, 157 bp, Glycine max
  unsure (1)..(157): unsure at all n locations; Clone ID: 701039663H1
cgtctacctcgttggcatgctngttcncgtnatactcttagtgtcttnggtcgnttttgtntacatggntactcttcggggacacggnaacantgagcccaacngcgcttacttggagtaccgcatggatnacttttctggntacctngtcgtaggg

SEQ ID NO: 2157 - DNA, 280 bp, Glycine max
  unsure (1)..(280): unsure at all n locations; Clone ID: 701039664H1
gnnttgttaagccaagaatcatggatagaantangtccangagtgagatgtctncnttgcgagaaatncgatgacaggttgtagtaaatgtcattaggttttcctctttctctattgctcagaagactcttggagctancagtacaacaaaggctggtccagggtctgatatggaccctgatgaggaaccactggttgctgttcctgatcagttcccagcagcaagcaaaaggtcacaacagccacagagccgnggncaaccccantatgngatggcccc

SEQ ID NO: 2158 - DNA, 146 bp, Glycine max
  unsure (1)..(146): unsure at all n locations; Clone ID: 701039668H1
ctctattcttggggataccatagactacatgaaagancttttggaaaggattggtaagttgcaagaggaagagggtacaagtcagataaatcttttgggcatttcaagggaacaactcaagcctaatgaagcaatatttgatgttg

SEQ ID NO: 2159 - DNA, 149 bp, Glycine max
  unsure (1)..(149): unsure at all n locations; Clone ID: 701039669H1
ctaaaaccataaattacaaaatccncctccatttctctctctaaaaaccatcatgtcctccaccgcgnctcccgtcctcnccatctccaanccccaaacaaccgcgggaaccaccggtgcaggcngcggcgccatcgaggctccggcca

SEQ ID NO: 2160 - DNA, 147 bp, Glycine max
  Clone ID: 701039670H1
cacaaataactctaaactaagcacttccatacacaaattttctctcccagaagaaatattttcatttcatttcgagtaaaagtaaaacacagttcctgatccatggcatctcgccgccgcatgttgttgaaggtcataatcctcgga

SEQ ID NO: 2161 - DNA, 145 bp, Glycine max
  Clone ID: 701039673H1
cgtgtgtttgtgaattgttgttgagatctgaatcaaaatcagaaacgataatgggctacaccggaccacctcttcaacctccgcaacaacttctacctcggcgcttaccaagccgccatcaacagcagcgacgttgccaacctct

SEQ ID NO: 2162 - DNA, 111 bp, Glycine max
  unsure (1)..(111): unsure at all n locations; Clone ID: 701039674H1
tggctcgtcactccttgctcttagccctcctcctcttcgcngangtngccacngcngcgatggcggtggcggcgtncgangccgacgacatcctgatccgtcaggtggtgc

SEQ ID NO: 2163 - DNA, 274 bp, Glycine max
  unsure (1)..(274): unsure at all n locations; Clone ID: 701039675H1
cacccttttccaaacccgagaaatctgattcgttcattgccattgccagggttggaaagacctcgttgatgaatcaatacgtgcacaagaagtttagtcagcaatataaggctaccattggggctgattctgtcaccaaagagcttcagattgatgacagacttgtcactctacaaatatgggacactgctgggcaagagagattccagagtctcggggttgcattttacagaggtgccgattgccgtgtccttgggnannangaaaatgngac

SEQ ID NO: 2164 - DNA, 272 bp, Glycine max
  unsure (1)..(272): unsure at all n locations; Clone ID: 701039676H1
cacacccccacatggatgcatacagaaagtgtgaaaatgaaagtcatggagtgggaagatgcatctgcagcttgcagatccacaaagaagtataaatgtttgattattatttagagggctctatctagttaaaattaaatagttattgtgcttttgttttattagacagttgtaaggcacgtgttctacatgtgtttgcagttgtctgcatgcattgtaattttcaagtcccgctttatcagccgnagncagncaanaattntncccccccc

SEQ ID NO: 2165 - DNA, 156 bp, Glycine max
  unsure (1)..(156): unsure at all n locations; Clone ID: 701039677H1
gaggagtaacaaaacaagtatgtcagaatcaaacgcaattggcaaatggtttggctggtgcaggtggtggaattattgctcaaatcataacttatcctcttcaaacggtaaacacgcgccanaaactgagagaacactcaagaggaacaagcaaag

SEQ ID NO: 2166 - DNA, 274 bp, Glycine max
  unsure (1)..(274): unsure at all n locations; Clone ID: 701039678H1
tntcactgtntgcacctcaaacatcttngaagtccnaattgagtctcaattccacaancatnaatgcancgttcaatttcacaatctgatatttttatcactgnttnccttgtaccccaagaagttccanttcaatttcaatttcaagatatganccaagaatgacaacaanatgccaatgaaccataggnataataacgttcaaatgcctcaaatcncatctttgggccangcntncanggtcgggacnaancnaagcnacngcaaacctcnt

SEQ ID NO: 2167 - DNA, 234 bp, Glycine max
  unsure (1)..(234): unsure at all n locations; Clone ID: 701039679H1
tctcttgctctgtatctttgatttgatcattnccaatcttccaatttttctatatatccatcaatccgctgagtgcaaagttctaatctttcgcctattgggttctactcctttctctcttcgtttccgatcgatccaattttcttcccatggctacgatcggacacaacaatctcaatgccaattggttcttctcggggacanggtgctggggaaatccagcccgttttgcgc

SEQ ID NO: 2168 - DNA, 146 bp, Glycine max
  Clone ID: 701039680H1
attaagcaacacacacttcaatttatcagcatggcctccgttcagtgccacaaaacctggcaaagtgagctgccaacaggaaaaccagcacgcctcgtttgggcagaaagtttctgacttgttcaaagggcatcaacataatgacc

SEQ ID NO: 2169 - DNA, 110 bp, Glycine max
  unsure (1)..(110): unsure at all n locations; Clone ID: 701039681H1
cttgctgaccctgcacaagccaaggctcctgttcaggctcattttgnagagctggacaattttgttggcttttcagatgttacagcggccaaggcattggaagagaagct

SEQ ID NO: 2170 - DNA, 273 bp, Glycine max
  unsure (1)..(273): unsure at all n locations; Clone ID: 701039682H1
ttcattgatttctccctcttcgctctctctcagtgaccagagacagatgatgatggagatggcgaacgaaacgctgtcgttgcggcactcgcggcgttggtgctactcgcggcgagtgtggcggtggatgctcaggagaactcggacgtcaagacgctggtgaagtacaagcacgggaagaagtactgcgacaaaggatgggaatgtaagggctggtcaatttactgttgtaacctcaccattaccgattatttccagactaccagttccgng

SEQ ID NO: 2171 - DNA, 144 bp, Glycine max
  unsure (1)..(144): unsure at all n locations; Clone ID: 701039683H1
cataaatgaaggttttattatcaatgtaattgtntcgagtaaaaagggtatatgcttcgttacattaccctgaaccagtattgttcgttcctttttgtttttactcctgtgtgatatagttctccattattcaaactgtgaagt

SEQ ID NO: 2172 - DNA, 144 bp, Glycine max
  Clone ID: 701039685H1
tgctttcctacactatggtgagctccacctacaatatccctgtaatccctgatccatcagtgccttatcaaaagggtacctgccctatagatgcacttaagttgggtgtgtgtgccaatgtgttgaacttggtcaatgttaaat

SEQ ID NO: 2173 - DNA, 125 bp, Glycine max
  unsure (1)..(125): unsure at all n locations; Clone ID: 701039686H1
gcgtagggaatggttcctccctcagttgcttccttcctcttgtgtccacgcagttccccctttcannttccattcnataattcaaanaccagttantggctacccttctattccaccacaattcg

SEQ ID NO: 2174 - DNA, 111 bp, Glycine max
  Clone ID: 701039687H1
aatttcgtgttttctctcttcttcttgttacaagagagagattcaaggatctggtgccccttcttccttccccttgtgttgtgttgttgggaccaattctttaatcagcga

SEQ ID NO: 2175 - DNA, 143 bp, Glycine max
  Clone ID: 701039688H1
atcttgccaaggttcagagggctgtgtgcatgatctccaattccaccagtgttgttgaggtcttctctcgcatcgaccacaaatttgacctcatgtatgccaagagggcttttgttcattggtatgttggtgagggtatggaa

SEQ ID NO: 2176 - DNA, 155 bp, Glycine max
  Clone ID: 701039689H1
taagttctcagttatcagcccttcctattgtgttcctaactctcttaacctacaaattaacacagagaaaggtgttacttacaacgtaaagggtaaccgtgtattttacataaaagatactttgttcatttcacggtcgtcgcgtgttatgtgat

SEQ ID NO: 2177 - DNA, 145 bp, Glycine max
  unsure (1)..(145): unsure at all n locations; Clone ID: 701039690H1
gttcccgatgtttccagggacattggatgctaccaggaggctatggtgcgtccaganttctggggtccgcagttttaaagagatggtggaatactttaatgaaagggcaaatgtatcagggaagtttcctattgggagttttaat

SEQ ID NO: 2178 - DNA, 259 bp, Glycine max
  unsure (1)..(259): unsure at all n locations; Clone ID: 701039691H1
ctgaaatcgagagggagacgaaaagttttagatcgagaganatgggaaaggagantagcaaagatacggttccggtgacgcagtggctgaatcgaatggtctcagaaccttactacctcttccatttcttaaccttcttctcctatttcgtcgttcgcagctccgcaacccaaatcttagngcctcatctcactnaccattccttngtcgngaattanaaacacgnnagtgtccgcnattgggtttncncaggnanaaa

SEQ ID NO: 2179 - DNA, 105 bp, Glycine max
  unsure (1)..(105): unsure at all n locations; Clone ID: 701039692H1
ctgattccaaaaaaaaaaaganaattctaactggttatggcaacgctangatatggtttncnctgaagcataacgtaacgaggaagctcctacaaggaaaaaatg

SEQ ID NO: 2180 - DNA, 142 bp, Glycine max
  unsure (1)..(142): unsure at all n locations; Clone ID: 701039693H1
aaaggggaagtcccagtgaatggttcattttctttatttacccccatcagttatcaaaacaatcctgacttgatacaaccanaaaacactccatctcctgtttctccaacaccaccagcagcttcttcaggtaacagtaata

SEQ ID NO: 2181 - DNA, 142 bp, Glycine max
  unsure (1)..(142): unsure at all n locations; Clone ID: 701039694H1
agcagctgaatatttgantgaactcactttaaacagtggaaaagagttcagggccaaggttgangagaaagatacttccggaggaaaagtgaaagggcagggaactgggacagtccttgctgtaactcttgttgccgtggat

SEQ ID NO: 2182 - DNA, 296 bp, Glycine max
  unsure (1)..(296): unsure at all n locations; Clone ID: 701039704H1
cgtcttttgaatttctcccatggcctaatcctctcaacactcttcatccactactctctagttgatgttgggcatgctgcccaatatggccctccctttttgccgaccacatgtttcggcagagacgcatcgcagtttccgtcaagtaacatgtttgctgcggccggggagggtatatgggacaatggtgccgcgtgtgggaggcagtatcaggtgcgctgcatcagcgctgcggcacccaggacttgtgttcctggccagacgnttcagatcaagattgttgatcgagcgcaatc

SEQ ID NO: 2183 - DNA, 294 bp, Glycine max
  unsure (1)..(294): unsure at all n locations; Clone ID: 701039705H1
aaaaataagacattgtttggtttggttacttgctcgaatttcctcgaatcgcttaatttngnatttnatnagttaaaccgcaacgcggaatctcttttctcgaactggctaactctcaggcaagtggttcggacgctgattccagcaacaagcggctggtgctcgcactgtatgacgccctaaactccggcgactccgacgccgtcgtccaagatcgtcgccgccgacctcgagtggtggttccatggtccgccctcacaccagtttttgatgcgcatgctcaccggcgactcc

SEQ ID NO: 2184 - DNA, 105 bp, Glycine max
  unsure (1)..(105): unsure at all n locations; Clone ID: 701039706H1
tcttngntctctctcttgcaaaacctaatttncatgttctnccctcanattgnaaaatggcgggaagnncntngaacntccagggtggccaatgncggcaaccag

SEQ ID NO: 2185 - DNA, 283 bp, Glycine max
  unsure (1)..(283): unsure at all n locations; Clone ID: 701039708H1
caggggcaatgaccaaaatggactggtttgagctggattttcccaaggctgaagtgttgntcttnaatttcacatcnagtgattactttttacctcccttcatcaataaaatgccaaatttgagggcattgataataataaactacagcacctcatatgcccgccttcaaaatgtttcagtttttaggaatttgaccaacttgagaagtctctggcttgaaaaggtttccatccctcagttatcaggcagtgtcttgcaaaactgggcaantattgtagtcct

SEQ ID NO: 2186 - DNA, 282 bp, Glycine max
  unsure (1)..(282): unsure at all n locations; Clone ID: 701039710H1
cagttattgantttcacttcacttcacttgcatgccaaatgaaaacaacctctttcccagaatcttgtcggtatttaactccctcgatttcacaacaccaataacaatgagagtttcaacagagacagagccggagactaaaaagataaaacgcattcgcngcggcggggactcgagcaagcaccctttgtaccgcggcgtgcggatgcggaactgggggaagtgggtgtcggaaatccgcgagccgaggaagaaatcgcggatatggctaggcacattccc

SEQ ID NO: 2187 - DNA, 286 bp, Glycine max
  Clone ID: 701039711H1
cggtgatgcagatgctgagggacagaaattttctggttggtgacttcgagatcaaacattgttccaaagcacgagtcccaagtcccaagtacggcgaacacatgaagcgcgaggacctcgtcatcaacaaatccaagaaggacaactccggcgaccagatctacgttttcttccccgacgaacccaaggtcggcgtcaagaccatgaagacctacaccaaccgcatgaactccgaaaacgtctacagagccatcctcgtcacccagaccaacctcacccccttcgc

SEQ ID NO: 2188 - DNA, 281 bp, Glycine max
  Clone ID: 701039712H1
caaaggcccctttgagaagttaattcgagggtcaaagttaagaacattggatggtcgtgaattacgtaagggcaggtatcagagaactgtgtggcacatatgcaatctgttgggacttacagtgatgaggaggaaaaagctattgaggaatttagaaatgctttcaaggatcaaaatttcccaccaggctccactgttttctacaaacaatcacccactggaacattggggcttagtttctcgaaagatgagacataccagaccatgagcatgcagtgata

SEQ ID NO: 2189 - DNA, 280 bp, Glycine max
  unsure (1)..(280): unsure at all n locations; Clone ID: 701039714H1
ccgtcccattctcgaattggcgtgtgcctcttgctatccctcaaaggtcttttgaagcagaagaatggacttctttactagagacataaatgaggactctatgcttagatgtccattcttgaggaacatcaatgagcctactaacttctcattcttttcacctttggctttaccaatgccttcctcgtggagctaaaggtccaatttttgaagatggtcccaattttgatttggcatttaggcttntccacgggagtgatggtgtagtacccttatctga

SEQ ID NO: 2190 - DNA, 279 bp, Glycine max
  unsure (1)..(279): unsure at all n locations; Clone ID: 701039715H1
ggaggttgagtagttcttcatcatagtcttaaacattaaaccttagcaaaactcaacaatgctagacatcaaaggctacctcgtactcttcttcctatggttcatatcaaccattctgatatnttccatcttcaagaaaccacagcgtctaagactcccaccgggtcctccaatttcaatacccttgctgggacacgcgccatatctccgttcactgctccaccaagcattgtacacgctatcactgcgctatggacccttgatccacgtcatgatcgg

SEQ ID NO: 2191 - DNA, 93 bp, Glycine max
  unsure (1)..(93): unsure at all n locations; Clone ID: 701039716H1
gaacaatctcttaaccctctctcaaactccttcagaatccccctttcnnngtnccccaaactncattncaaaatcaatnatgaagaaaatngt

SEQ ID NO: 2192 - DNA, 301 bp, Glycine max
  unsure (1)..(301): unsure at all n locations; Clone ID: 701039717H1
gtaaacataatggtagtagcacaactatttctccattagctggtaagctgtttgtngttattaggggctggnaggtcgctggggaaggcacttgcttatggtgcaaaagcaaaaggagctagggttgtgattgcaaaccgtacctatgaccatgccagaaaacttgcttatgcaattggaggagatgctttagcccttgctgatttagataattaccatccggaggatggtatgattcttgcaaacacaacatcaattggaatgcaacctaaagttgatgagacgcctgtttctcagcacg

SEQ ID NO: 2193 - DNA, 302 bp, Glycine max
  unsure (1)..(302): unsure at all n locations; Clone ID: 701039719H1
gcaactcatctgcttcccctagcaaccttcttcttacttctctccgcttcttatctccangattagctgggggcggaagcacaaccgttgactagtctcaaacttaactctcatattcttcaggagtctactgctaaagagattaatgaaaatcccgaggcaggatgggaggctgctataaatcctcgtttctccaattatacagttgaacaatttaagcgccttcttggagtcaaaccaatgcctaagaaggaacttagaagtacacctgctnatatctccacccaaagacgttgaaattg

SEQ ID NO: 2194 - DNA, 293 bp, Glycine max
  unsure (1)..(293): unsure at all n locations; Clone ID: 701039720H1
cattctgtgcctccaacttgtcattcaattccaccntgaagattgtgnctcaggtggttgcacagaagatgggctcactagaaagatcaaagaagaaagtccttctatggaaganggccatgctccatttttctctatgttttgtgatgggggttttcacaggcttggctccaacaggtaaatcttctctcttttccaccacagttagtgtcnccaaatagaacagaatttgcaccanaacccagtgaaatgttacacctcacaacanatgtcantagaagttggatagctcc

SEQ ID NO: 2195 - DNA, 293 bp, Glycine max
  unsure (1)..(293): unsure at all n locations; Clone ID: 701039721H1
cgcggcacttcattgaacactaagaggctggatgatgatactgagagtctagctcatgangaaggtggccaactgcaacttaagaaggctataatgcaagctaggatggacaaaaagcttactcagtctcagcttgctcaactgatcaatgagaagcctcaagtgatccaggagtatgagtcagggaaggccattccaaaccagcagataattagcaagttggaaanagctcttggagctaaactgcgtggcaaggacataagttgtaactaatgtcatggttgtgctgtngc

SEQ ID NO: 2196 - DNA, 98 bp, Glycine max
  unsure (1)..(98): unsure at all n locations; Clone ID: 701039722H1
ctgncgatccaancagaacaggctcnncgttgactgngntaacaacttcaganttcttgaagtggcttgtgnntggncnggaacagtatgcagttcca

SEQ ID NO: 2197 - DNA, 84 bp, Glycine max
  unsure (1)..(84): unsure at all n locations; Clone ID: 701039724H1
gttnatctagtcnctctgngtgganctgcagaagtggaagaannaggaaggtgcngtngtactttgtccgctgagctcctcacc

SEQ ID NO: 2198 - DNA, 279 bp, Glycine max
  unsure (1)..(279): unsure at all n locations; Clone ID: 701039726H1
ctagtctcatgtattctttttctcagagggatgacatagaagtgcntgatgagcccctctatggcaatttccttagagtaactggtcttgatagaccctacagggaggagctactctccaaaatggaagctgatggagataaggtcactaatgacataatttttgctccaggaaagaagaaatatagattctgtaagcatatatcaaagcaacggttacaaggtttgacagatgatctgatgaagaaaggaaagcacttcattctgataagaaatcctc

SEQ ID NO: 2199 - DNA, 80 bp, Glycine max
  unsure (1)..(80): unsure at all n locations; Clone ID: 701039727H1
cagctaaagtcctcatgantntnacgaattagtaaatcgnggctncgagtagtngnttggcagnttgggatcccccttnc

SEQ ID NO: 2200 - DNA, 280 bp, Glycine max
  unsure (1)..(280): unsure at all n locations; Clone ID: 701039728H1
aggcgttctatatattattgnnttgacaatgaggcctgctcttgctttgcttcctacntctatgtgctcttctngttagctgccactacagaatcaagaaaagatacaggggaatattggnaaatgatcatgaaagatcaggaaatgccaganggacttcaaggtcttgtttcatttcaatctgaaaataaccctaagactcaagagcagcttggtaaaggttccaaaaaccattgtgaagagtctctagttacaaatacacaagttaatagtgacttcg

SEQ ID NO: 2201 - DNA, 282 bp, Glycine max
  Clone ID: 701039729H1
aattaaaccagcaaaatcttatcttagcaatagctacccctatcacaacaatacttctattagggcaaaaacaccaaatgggagaggaaaaagagcagcctaagaatgaaaccgagaagaagcccgaggaggccgccgcagcccccaagaaagacgacggacccatccctgtcgtttacaagctcgccttgcattgcgagggatgcgtcaagaagattcaacgcacatgtcgccacttccaaggtgtggaaaccgttaaggcagatctatcgtcgaacaaag

SEQ ID NO: 2202 - DNA, 104 bp, Glycine max
  unsure (1)..(104): unsure at all n locations; Clone ID: 701039730H1
ggaaattgtgaggnacatgaaggaganactggcctacattgcttctgggattntgancagngagttggnaaactgcccaagaccagtttcagctgttgnnnaga

SEQ ID NO: 2203 - DNA, 276 bp, Glycine max
  unsure (1)..(276): unsure at all n locations; Clone ID: 701039731H1
cttgaattcacatttcaacaaccatagccatggctttctccttctccaaagcacttgtccttgcctgctccttctgcttatttgcgtcttggcttttggacgcgatttctccattgtgggctattcatcggaggacttaaagtccatggataagctcattgaactctttgaatcatggatgtcaaaacatggcaagatttaccaaagcattgaggagaagcttcttaggttcgagatttcaaggataacctaaagcacattgatgagaganacaag

SEQ ID NO: 2204 - DNA, 108 bp, Glycine max
  unsure (1)..(108): unsure at all n locations; Clone ID: 701039735H1
cgancaagcaattcagnagcttgtncacgacaacaccaacaaagtccaagantccctccataagnaatgatgctnagtaccaacacnctactnncccaccttctctct

SEQ ID NO: 2205 - DNA, 293 bp, Glycine max
  unsure (1)..(293): unsure at all n locations; Clone ID: 701039736H1
gttaggttggtggcggtgagttggagctttgaccagtttgagcacacgaananttcngtgggcatgtcnaatggcaaanaaacctgtganatactctctggttgacgcgtttactgagtcagtgttcanaggaaaccctgcagcagtgtgtttcttagaagagaagagggacaaaaagtggttgcaaggagtagctgcagagttcaatctatctgtgacatgttacttaactcacatcaccgagtcccatggaacaanctcttatcctcgttttgatctcangatggctcact

SEQ ID NO: 2206 - DNA, 291 bp, Glycine max
  Clone ID: 701039738H1
caattagttcattctctttgcgcagttccctacctctcctttcaagatgcagatgcttcgtcaaggaccctcaccggaaagaccatccacccttgaggtggaaagctctgacaccatcgacaacgtcaaggccaagatccaggacaaggaaggaattcccccggatcagcaacgtctcatcttcgccggaaagcagctcgaggacggccgtaccctcgccgactacaacatccagaaggagtcaacccttcaccttgtccttcgtctccgtggtggcatgcagatcttcgt

SEQ ID NO: 2207 - DNA, 281 bp, Glycine max
  unsure (1)..(281): unsure at all n locations; Clone ID: 701039739H1
ttctcttctacatcttccagtttatccgcgtcgttttgctctntactgtcatcgttttgntaagggncaggatggtcttttctcaaaccgtttttgcaggacagggagaagaaggtgttgatgattgtcatcccgcttcaggttctcgccaatttggcttccgttgtgatcggggaaacaggtcctttcatcnaagactgggttacttggaatcaggttttcttgcttgtggatatcatctgctgctgtgccatattttccctattgtgtggtccataagg

SEQ ID NO: 2208 - DNA, 280 bp, Glycine max
  unsure (1)..(280): unsure at all n locations; Clone ID: 701039741H1
aaaaaccaagtaatactagccaaaatatgtctcccaaatacatgtcccttttcctcctagtaantatagggatggcttttctggccactacttcccttgctgatcgtcgttttctttcggtggaagatggtcatgatcaccatcaccaccacccaccaaaaaaacactggcctccaaccacacaaaatgaaccttcaaacgtagaaaacaaggagaacactgaggtggaggatggtcatgatcatcaccatcacttacccacctaaaaaacactggcctc

SEQ ID NO: 2209 - DNA, 277 bp, Glycine max
  unsure (1)..(277): unsure at all n locations; Clone ID: 701039742H1
gttcgattttgtagtaagtgaggtgccaatatggtgaagatagctcttggtactttggntgactccttttaagcgctgcctctcttaaggcttatttcgcagagttccacgcaactctgattttccgtgttcgctggtgttggatcagccatcgcttacaacgagcttacaaaagatgcagccttggatccaacggggctggtggcagtagctgtggcacatgcatttgcactgtttgtaggtgtctccgtcgccgccaacatctcaggtggccatt

SEQ ID NO: 2210 - DNA, 274 bp, Glycine max
  unsure (1)..(274): unsure at all n locations; Clone ID: 701039743H1
catacattgcaagattttgcaatttttgttacacatgctctttagagtttccttcatttttccnccntccttttttaggtggtgtacctgcccttatgggctcatcttttcttgttttagcacttagtttgtgttccttgtcttgtctctcactcttggctgtgtttagcaagagtaaatacctagactttgttgcacttgaaatcagagagtgtgccaaattgtgtgtcttaaaatccacctaaagctttagtgttcgcatggcggctaatta

SEQ ID NO: 2211 - DNA, 281 bp, Glycine max
  unsure (1)..(281): unsure at all n locations; Clone ID: 701039745H1
ggcaagaccagcgagttctgcgcccccttaacctccttcgactggaacgatatncgaccccaancggcatngnncagctccagcatcgacaccacctgcaccatctgggacatcgaacgcaccctcgtcgaaacccaactcatcgcgcacgacaaagaggtctacgacatcgcatggggagaggtcagagtcttcgcctccgtctccgccgacggcncngttagaatcttcgacctacgcgacaaggagcantcnaccatcatctacgagagcccccacct

SEQ ID NO: 2212 - DNA, 100 bp, Glycine max
  unsure (1)..(100): unsure at all n locations; Clone ID: 701039747H1
canatccgaagagtgaaggttcgttgaatcccatggcgagantgaagcacacgccagcttattcgcaaatccgctaaanaagcaagcgccacgcgcaatc

SEQ ID NO: 2213 - DNA, 83 bp, Glycine max
  unsure (1)..(83): unsure at all n locations; Clone ID: 701039751H1
canaccatanncctatacanacnttgatcgtnctgcatgtggacgtatagctggngtacagtgncntagagcctgagcggtag

SEQ ID NO: 2214 - DNA, 251 bp, Glycine max
  unsure (1)..(251): unsure at all n locations; Clone ID: 701039752H1
catgatcatgtggatggnngtggatcaacnaaaacagtggccagnnaacatcactgaaattgtgaccaccccagaaggggaaaacttaggagaatggctgagtctaggcctcaaaggagacatcaacatgccagcagaagaacaaaactcatcatcaaggcctctccanagcaacaacaacatcggtattctccatgcaacttctgcatgagaaagttttacagctcacaagccttagggggtcaccagaa

SEQ ID NO: 2215 - DNA, 268 bp, Glycine max
  unsure (1)..(268): unsure at all n locations; Clone ID: 701039758H1
agacaataatattttcctgttgaattcaggctccccccttcgttctctttcggnnancnctctagcggatcctctcttcagncttcatttctctnttntnctcttcatatctncctttctctttctctgtgtagcttctttcgttctctttttcactctctccctctgcctttgaatttctgtattttgcaacatggccagcgacgaagcatggagaacctctgaagagcagaacgagtcaaacataatcggcactagcatatcgccc

SEQ ID NO: 2216 - DNA, 283 bp, Glycine max
  unsure (1)..(283): unsure at all n locations; Clone ID: 701039766H1
atgtggggattctcgctatcgacatctacttccctcccacctgtattcagcaggaattgctggaagctcatgatnggtgccattaaagggaaatatactattggacttggtcaagattgcatggcgttttgtacagaagtagaagatgtcatctcgatgagtttgacagtagtttcttcccttcttgnaaagtatgcgattgatcctaaacaaattggtcgtctggnagtaggcagtgagactgtgattgacaaaagcaaatccatcaaaactttcatcatgc

SEQ ID NO: 2217 - DNA, 278 bp, Glycine max
  unsure (1)..(278): unsure at all n locations; Clone ID: 701039768H1
tttcgttattcgcccgacacattttttctccgatcccctattcctctccattctccgttgtgtcgattttngttactcaaaagggaaattgatttgatagatagacagatagatcgtttctatgggttaaagtgaaatccgaatccgaatctgaatctgaatctgatccaatcattttcatgttagggcgtgcgatctccaatcaagcgcggttgtgtttaggtttcattttgttgggcgtgtgagtcgtagggggtttcgaagagcatagaataatg

SEQ ID NO: 2218 - DNA, 132 bp, Glycine max
  unsure (1)..(132): unsure at all n locations; Clone ID: 701039771H1
ggaaatcaaagacattgaatctcacacaacatgggtccaagcttcgangaaagctttnnacntanattcaggtgtgangaggcacatgaagggcntcagccnctgcaactacaaccctaaaagtaaatgggc

SEQ ID NO: 2219 - DNA, 204 bp, Glycine max
  unsure (1)..(204): unsure at all n locations; Clone ID: 701039773H1
cgcagcgaaaccaagacaaaagtggcatccttgtngttcgcttcaaattcaatgtnctacagaggtaaatttgccgatggtggtgatgggcgtgaaatggctgcaaaacgccagcgcactgttgatccaggatcttcattctatggtgcttccacgggttccaattttntgtacaatccatctccttacggatatgtcagccaa

SEQ ID NO: 2220 - DNA, 267 bp, Glycine max
  unsure (1)..(267): unsure at all n locations; Clone ID: 701039774H1
atggttattgccgtcacatctctctaattccaacactaatgatgcgnctttagaccattgggttcaagtttttgttcactaataaagtcaattttcttgtctatttccacttgttcttcagcanactcacaaccacaacccaaccaacccacctgaactactgaacaacaacctcttcttcttctctctctctctttagcataatcattcatcaccacacaagagaaaaaancaaaagaacaaagaacaaataaaccttttttttta

SEQ ID NO: 2221 - DNA, 269 bp, Glycine max
  unsure (1)..(269): unsure at all n locations; Clone ID: 701039776H1
ttctcagtctctgtgtttgcggctgaggattccgaacgagtgaccttcttcgtttctcgcnaagtttaaagtaatccatgggtaaggaaaaggttcacatcaacattgtcgtcattggacatgtcgactctgggaagtcaactaccactggtcacttgatctacaagcttggaggtattgacaagcgtgtgattgagaggttcgagaaggaggctgccgagatgaacaagaggtcattcaagtatgcctgggtgctcgacaagctcaaa

SEQ ID NO: 2222 - DNA, 267 bp, Glycine max
  unsure (1)..(267): unsure at all n locations; Clone ID: 701039778H1
gtcttcataaacgcctttcttctccgtttccgtttcctcgttcgaattcgcttnttgatctgcgaaaaatgagagantgcatctcgatccacattggtcaggctgntatccaggtcggaaatgcttgctgggagctctactgcctcgagcacggcatcgggcccgatgggcaaatgccaagtgacaagacagttggcggtggtgatgatgctttcaatactttcttcagcgagactggtgctggaaagcacgtgccacgtgcagtgt

SEQ ID NO: 2223 - DNA, 265 bp, Glycine max
  unsure (1)..(265): unsure at all n locations; Clone ID: 701039779H1
aacgtgttatctgacaagactttggaacatcacgctcctcacttttcaaaggtttcagttgtgacatcctccaagtgacaagagtggcacattcattcctttantggcacttnggttatatattaaattctgggctgtgagtatattagaacaaatgtccttccgcagtatagttcgtgnagtaagggatggatttggaagcctatcaaggaggagttttgaggtaaggcttcctggcccataacaggggcaagtnacgtagttt

SEQ ID NO: 2224 - DNA, 280 bp, Glycine max
  unsure (1)..(280): unsure at all n locations; Clone ID: 701039782H1
gcaaatanccgattgatcaatcgaatttttttgtnattcaatttcgctcttttttctcggcgcgagaaatccatggctttgggaacggtgactcgacggttngggaataaactcttgccggcgttatctccttctcccaggcttctacattctcacgccaccagtttcgggttcaaacaagtaaacgacgaagaaaaggctcgcatggttggtgacgtattcacgagcgttgcttcaagctacgatctcatgaatgacctaatgagtgctggtttgcata

SEQ ID NO: 2225 - DNA, 278 bp, Glycine max
  unsure (1)..(278): unsure at all n locations; Clone ID: 701039784H1
cttggaacccttctacgtgttctccattccctctctcactcctccatctacgtttcttcaaatccatntcctncnttctctctttctttatcttctcattttcctcattacactctttntcantctctcaacttttctcttattaaccatagttcacatattatatcatcacatatcatagtgatatattatatcatatcacaatttgtggcatacttgctgtgcttggttgctctgattcatctcaagccaaaagggttcgcgtccttgagctttct

SEQ ID NO: 2226 - DNA, 279 bp, Glycine max
  unsure (1)..(279): unsure at all n locations; Clone ID: 701039785H1
ctctgggatcagtacatatctagaatgaaaactgggcagaaggatatcntttacataaactgggnaacnaggcaaagaacaactggaaaactctcccttccttgagcggcttaagaagaaaaattttgaggttattttcttcacggatccagttgatgagtacttgatgcaatacctgatggattatgaagacaagaagttccaaaatgtgtccaaggagggtttganacttgggaaagattcaaaagacaaggaactgaaggaatcttttaaggatct

SEQ ID NO: 2227 - DNA, 271 bp, Glycine max
  unsure (1)..(271): unsure at all n locations; Clone ID: 701039786H1
cttccacggagatcatcatcntcacttcaattcagtttactcatcgtntgatttcatccaaagtnaggnaacatgagcttcttgaggccttctgcgttgtacaactttctgatcagttatcctgcgctgcgatggctgccatgtcagagttggggcttccttcgatggcccggccttgatgggttcttcaggcttttcgtggttgtgcttctgtggtctacactatccgagcttcgcttcataccctcatcttctatgtaccccacccttc

SEQ ID NO: 2228 - DNA, 270 bp, Glycine max
  unsure (1)..(270): unsure at all n locations; Clone ID: 701039787H1
caagactaacaatacactgaccattgttgacagtggtattggcatgaccaaagctgatttgggtgaacaacttgggtacaattgctagatctggtaccaaggaattcatggaagccntggctgctggtgctgatgttagtatgattggacagtttggtgtggggttctactctgcatatcttgttgctgagaaggtcattgttacaaccaaacacaatgatgatgaacagtatgtcttgggagtctcaagctggaggttctttcactgtc

SEQ ID NO: 2229 - DNA, 266 bp, Glycine max
  unsure (1)..(266): unsure at all n locations; Clone ID: 701039790H1
cgccgtctaggtttttctctcaaaatttcgaaaccccaattttctctcaattcgaatctgggattcatcgtaacctaaattattagatagttatattatctctctgcgtttctttcagcaattttctattttctcctctcatggcttcagattccaaaaaggatttccctgctgatgacaaagctggaacagaagagagtaaaacatccaaagatgagacttcatctaaagattctccagcagaacaaagagcncacagtnacttt

SEQ ID NO: 2230 - DNA, 266 bp, Glycine max
  unsure (1)..(266): unsure at all n locations; Clone ID: 701039791H1
ggatcactcaatcctaatattttatattccaattaaaatagtgagagtactagaaggnagtggagatccgcatagggnataatggaaacagaagtggttgaagatattgtgattgtgggagctggaattgctggccttacaacatccttagtcacttcacaagttgggtatcagaagtttggtgttagaatcttcagacactttgagggtcactgggtttgctttgtcaatatgggaaaatgcttggnaggcattggatacngtng

SEQ ID NO: 2231 - DNA, 264 bp, Glycine max
  unsure (1)..(264): unsure at all n locations; Clone ID: 701039792H1
ctcaggcaataccctcttctccatctaccgcnatcataatgggtcttggaaatgctatcaggggaatagtgaggagaacaaggagctggtgtttagtgtgcagaggaccctcaaaacaattactagagttgagttagaggtacttttcgaggctgagaggtccaatgatgaatgttgtgatttgaaagtgaagggttcccctttcaagagatcatgttgcatatataaacatgttgatttggtggcacagagtagcctgatgta

SEQ ID NO: 2232 - DNA, 263 bp, Glycine max
  Clone ID: 701039793H1
caggggcaatgaccaaaatggactggtttgagctggattttcccaaggctgaagtgttgatcattaatttcacatccagtgattactttttacctcccttcatcaataaaatgccaaatttgagggcattgataataataaactacagcacctcatatgcccgcctccaaaatgtttcagtttttaggaatttgaccaacttgagaagtctctggcttgaaaaggtttccatccctcagttatcaggcagtgtcttgcaaaac

SEQ ID NO: 2233 - DNA, 263 bp, Glycine max
  Clone ID: 701039794H1
tttgtttaaacatttacaggaaaaacttcttctcactgagtcaaagctaaaggagtcacaatatcaattgacaccttggcgttcagatatgaaccatgctaatgttgccacacaatcacaaccttcactcgattggtgcacctttgacaacttcaaataaaaatggccttgaactggtacctcagcatatgtactctcaagtaaagcctcaggtctctgttgatgctcaggcaggcactgaaccggatctattgggtcgccac

SEQ ID NO: 2234 - DNA, 265 bp, Glycine max
  unsure (1)..(265): unsure at all n locations; Clone ID: 701039795H1
tttctcccttctccccatttgctcattctcctccccattctgctcagacaccgcacagcgaaacaaatccaccattcattttcctttttcgcaacagcgcaatggctcgaagatccctcccgctcctgaagcacctcctctcgcggcggatcccggcccgatccgtgacgtacatgcaccggccgggcgatgngtcgccgcggccggtgacactgatcccgggcgacgggatcgggccgatggtgactggcgcggtggagcaggt

SEQ ID NO: 2235 - DNA, 266 bp, Glycine max
  unsure (1)..(266): unsure at all n locations; Clone ID: 701039796H1
cttngntgntacaatcagtgatgaaaaacttaaggaaatgtttgcccgactatggtacaataacttcttgcacggttatncgagacccgnctggaatcagcagaggatcaggatttgttgcatnttcaactcctgaggaagcaactcgagctcttggtgagatgaatggtaaaatgtttgctggaaaacctctgtatgttgcccttgcacagagaaaagaagagagaagagcaaggttacaggcacaattttcacagatgaggcct

SEQ ID NO: 2236 - DNA, 127 bp, Glycine max
  Clone ID: 701039803H1
caccattctgttggtgccagatattgctcgagaattttaattaaataacccttgcgaatgttgattatagtgacactacgctattttctatgtgatgtggacgcaatccaaattccaatttaatttc

SEQ ID NO: 2237 - DNA, 291 bp, Glycine max
  Clone ID: 701039804H1
gaaaattgccaagttaagcggtggtgtgataatatctaaactgttaaactatccagtcagaggccttgtctttgagggcggtcatacactagaggatttagcaaatgctgtttcagaagcctgcatctgccttcagcacaacaacatacctacaatgtacttatttcagattgtggaaggcaaatatttctcttaccacagtgctatgcagagaaacaagcccttggagaagtgagtcctgagcttctggagacccaagtgaatcctgctgtgtgggaaattagtgggcac

SEQ ID NO: 2238 - DNA, 290 bp, Glycine max
  unsure (1)..(290): unsure at all n locations; Clone ID: 701039805H1
ctctagtttctctgcatcgccttcgtcgatcgaagtggagcttccntttcatagccggcggtgaagatagatagttagcagacttggctgaccctgagcaggaggnataagaataagatgcctccttatgattgtatgtttctgtttaagcccatataaggaaggaagctgtcatggatttagttgtgagggtgggaaagcatgtgtgcagaagaaatggggttgtcactgatatcaagagtctcggaaaagttcagttgggctatggtgtgaaaaagctagatggcaga

SEQ ID NO: 2239 - DNA, 290 bp, Glycine max
  unsure (1)..(290): unsure at all n locations; Clone ID: 701039806H1
caagaatgtctgcaatggacagctctagcaggaatgctggggatatgcttgatcgtctcaccctcacctataacagaactcgtcaagcatcaatcaccactgaattgatagagattatctctggagcttcagcactggaaggttaattacggagagcaatctgtgtaatatattcaacagtggcgcgatattaagataanatcgttggattcttttgaaatttgttggtgtcatttttttaatcttacttgacttctgtaataagtgttccaaggtcaaacccattgtgg

SEQ ID NO: 2240 - DNA, 288 bp, Glycine max
  unsure (1)..(288): unsure at all n locations; Clone ID: 701039807H1
ccttctttctttttctgtgagcctttctttcaggttcttaacttgatcagtgtgcagtgtccanatcataagggtagttgcaaattgcaatggctaagcatgatgttgagggtggttccttctctgcaaaggactaccatgatcctcctcagcaccgttgattgatgctgaggaactcacacagtggtccttctacagggctttgattgctgagttcattgccacaatgctcttcctttacatcacagtgctcactgtgattggttacaagagccagagtgatgtaaa

SEQ ID NO: 2241 - DNA, 111 bp, Glycine max
  unsure (1)..(111): unsure at all n locations; Clone ID: 701039809H1
gaanaacacgctccggtcttcttctccaatggacgntttccgatgagcctgaaagtcgtagnnactgctnctacaatncagntccttccctgcgaccgcccgtaccctgcc

SEQ ID NO: 2242 - DNA, 231 bp, Glycine max
  Clone ID: 701039811H1
tatatcctttccgagttccgactctgttaatcattctccgttaagattctttcttctttcctctttccactcttggtcttatcttcttcacaatccacaaccactccttgttataaatcagatccaaacatggccgaagaacaccgatgccaagctcccgaagtcacagactctgctccaacaactgcggcttcttcggtagccccgccacaatgaatctctgttccaaat

SEQ ID NO: 2243 - DNA, 286 bp, Glycine max
  unsure (1)..(286): unsure at all n locations; Clone ID: 701039812H1
gagaaatgctcgtgaaaagagaaagctgggatcagatataactgnagaacagtctccatccaaagcgatttagagatgttggaaatccaaagaaagcacctgaggagaataactatcatgtgcagaacatttctcaggtgacaaaagtgaaggggtcaattggaagaatactaaaattgatgataatcccagtgagcaacagtttagccacgaaaagaacaggggatatctgaccagtgcaccgctttttatcaaatcttcatcctacggcaaatatgaacatatt

SEQ ID NO: 2244 - DNA, 287 bp, Glycine max
  unsure (1)..(287): unsure at all n locations; Clone ID: 701039813H1
ttcgccgtctgtngccgtgaagcgatcggcggcggccaagctgaggctgttggcgaagaaccgagccgacaaccgcgctctgatcggcgagtccgncgcggtggctgctctggttccgctgctccggtgcagcgatccgtggacgcaaaacacgcggtgacggcgttgctgaacctgtctcttctggaagagaacaaggcgcttataacgaatgccggtgcggtgaaggcgctgatttacgtgctgaaaacaggcacagagacttcaaagcagaacgcggcgtgcgc

SEQ ID NO: 2245 - DNA, 286 bp, Glycine max
  Clone ID: 701039814H1
caaaaagctacatatcaaggacaataggatgggatcaatacccacacgggcgttggggtgattcctgtaatccatcatatggtgcattatctgattatcagttcatgcggccacgtgcacgggacaagaagcttgttgaagaatgggcgttcccttgaaaagcattgaagatatatatgagaggtttagactgtattgtcttggaaagttgagaagcaatccttggtcagaatagatggtcttcagccagagacaaagataataaatgagctgctggaaaagatta

SEQ ID NO: 2246 - DNA, 101 bp, Glycine max
  unsure (1)..(101): unsure at all n locations; Clone ID: 701039815H1
agaaaagcttaggcangtttgggattgtggcagcaccctatntgattcctacgagctccaactcccttgcaaacgccnattaaacacggcaatagcgaatt

SEQ ID NO: 2247 - DNA, 134 bp, Glycine max
  unsure (1)..(134): unsure at all n locations; Clone ID: 701039817H1
caangctgttgacagaggaagagaactaagatcagattttaagatgatagcaaganctttgacaaggaaaggnaatgccttggtgaaattngcgaagtgctcaaaggattatgagcctgccattgagacatacc

SEQ ID NO: 2248 - DNA, 286 bp, Glycine max
  unsure (1)..(286): unsure at all n locations; Clone ID: 701039818H1
taggaggttgagtagttcttcatcatagtcttaaacattaaaccttagcaaaactcaacaatgctagacatcaaaggctacctcgtactcttcttcctatggttcatatcaaccattctgatacgttccatcttcaagaaaccacangtctaagactcccaccgggtcctccaatttcaatacccttgctgggacacgcgccatatctccgttcatgctccaccaagcattgtacaagctatcatgcgctatggacccttgatccagtccatgatcggttcgaagc

SEQ ID NO: 2249 - DNA, 275 bp, Glycine max
  unsure (1)..(275): unsure at all n locations; Clone ID: 701039819H1
gcaaaagagcgtcgtagtcgcaaccctaatcagaanaagcgcanttcaagcgagtnacagccaccagccatgggtcgtatgcacagccgcggtaagggtatatcctcttctgctttgccctacaaaaggacacctccagctggctcaagatctcttcgcaagatgtcgaagaaaatatctgcaagtttgcgaagaaaggtttgaccccgtctcagattggtgtcttctcagagattctcacggtattgctcaggtcaatagcgtcatggcagcaa

SEQ ID NO: 2250 - DNA, 255 bp, Glycine max
  unsure (1)..(255): unsure at all n locations; Clone ID: 701039820H1
atccctagctctgtcgttccgtcgtngacgatgacntttacgggtgcgaagcctgacctccgctctanctttcttctctctctcttgtccatcgcttccgccaatntcttcttcgagagcgtttcgatgacgggtgggaaaatcgatgggttaaatcagattggaaaaaagatgagaacgtggctggggagtggaaccacacctctggtcaatggaatggagacgctaatgacaaaggtattcaaaccagtgagg

SEQ ID NO: 2251 - DNA, 282 bp, Glycine max
  unsure (1)..(282): unsure at all n locations; Clone ID: 701039821H1
ctataggctaaggactttaggttgggatttgggaattagggttgttcgcgtggcgaagatgattgaggtggttttgaacgatcgattggggaagaaggtgcgcgtgaagtgcaacgccgatgataccatcggcgacctgaagaacttgtngcggctcagactggcacaagagccgacaagatccgcatccagaagtggtacaccatctacaaggatcacatcactctcaaggattacgagatccatgacggcatgggtctcgaactctactacaataaacac

SEQ ID NO: 2252 - DNA, 283 bp, Glycine max
  Clone ID: 701039823H1
ggttggagttggagtgagtaacccagcacagcaatggcattgagactgagactcaaagtgtcttcaattgggtcaccttttctgcagttaggttcttctgcaagtgcagcatgctctgtttccaaacttggttttcatccaccagcttgcaactcaacaaaaattcacacccaataaggctttttgttcgggctgctagaattgagtccaaaggtgttaccttgggtttcaggaccccacaatttcagcttccggagccccttaccgggacgacctggacatt

SEQ ID NO: 2253 - DNA, 278 bp, Glycine max
  Clone ID: 701039826H1
ctttttccttcaagtcactaagataatggcaagcatttataacattccatcacacataaaagctcagggtctattatgaatatggaaacatagaagagattctcaaatttgaatctaacatacccataccagacatcaaggaaaccaagtgctcatcaaggttgtggctgcagcgcttaatcctgcagattatatgagggctcttgggtttttcaaggacatgatgcacccttacctattgttccagggtttgatgctgctggtgtggtggtgagagt

SEQ ID NO: 2254 - DNA, 278 bp, Glycine max
  Clone ID: 701039827H1
ttaatcaaacatggctagggttagtgctttgtttcactctttgctcttgatttcttcccttgtattggcttctcaaatccatgtttcctctgggaaactagtccctggactatcatggaattactatttgttgacatgtccaagcttgagaggattataaggaagcatcttgaggatgtcttcgagaaggacagtggagtagctcctggcatacttcgactcttcttccatgactgctttcctaatggatgcgatgcgtctatattgttgaatggaga

SEQ ID NO: 2255 - DNA, 130 bp, Glycine max
  unsure (1)..(130): unsure at all n locations; Clone ID: 701039829H1
gtcctttgtntccttcaacctcatttcanttctnctctcccattcttttcttcaccttctccncctcctcttcttcatntccttnnctttctctgcactccatctttntnnncaaaacccacccttttct

SEQ ID NO: 2256 - DNA, 277 bp, Glycine max
  unsure (1)..(277): unsure at all n locations; Clone ID: 701039830H1
angacagcatcagatgctgtctttttaggcttcttcgaagcttaaaacgtatgtggttttatcttctcttggaactccacactacgatcccactgcagctgtatgcgcttctaatttctgaactaattatcctgaaggccattagtgacattgtctatgtaaataaattagttctctttcgctcttctggttacggttgcttcaagactgcagcataacttaaaanatcgtatcatacacaaataatggttgtttaagtgaaaccatcctatttcat

SEQ ID NO: 2257 - DNA, 282 bp, Glycine max
  Clone ID: 701039833H1
tctggctcccgtggttggtactgtggaaacattccttgggaggccatggaaggagtactcaaggactgtttatatgcagtctttcatggatagtttgatagctccggctggttggcatgaatggaatgggaatttttcactgacaccttgtactacgcagagtatgataacacaggtcctggttcaaacatgccaaccgagtcaactggcctggctatcatgttattgatgctactgatgcagctaattttactgtctctaattcttggttgggaatgatgg

SEQ ID NO: 2258 - DNA, 275 bp, Glycine max
  unsure (1)..(275): unsure at all n locations; Clone ID: 701039834H1
ggtgatctatgcaatctcaggaatctcaatatgacaagctgtgcaaggtgtgaattgccgtactcagtaaccaatcttgagaatttaaaagtggtggtatgtgatgaagagacagctgcttcatgggaagcatttgaagctagcttccaaatctgaagttagaggttcctcgagttgaggttaacttaaactggcttcatcaattagctcttaagacatgtctgcttcatggaaagcattgaagctatgtttcccatctcagtttgaggtnctca

SEQ ID NO: 2259 - DNA, 246 bp, Glycine max
  unsure (1)..(246): unsure at all n locations; Clone ID: 701039835H1
tgtttgtttcttctggaacagaatggcggtggtacttaaagacatgtgtttcttcaacaacaaggacattctggttataaagcctcagaagaaatcaccactgttgtaaggatgtcggtgttgatcttctcaatggtgtgtggtgttttcatttgttccgtgtgtctaaagcagataagcactcatgcaaggactatgcttatggagttgcanattgagaagccttctcggagtagtagtagtaga

SEQ ID NO: 2260 - DNA, 278 bp, Glycine max
  unsure (1)..(278): unsure at all n locations; Clone ID: 701039836H1
gtttctacttgcttggcttggacaacacatcccctacctttgcatcagccatccagaactctgtcccagccattacatttctcatggcagtcatactcaggatcnaccaagtncggctgancccgaaaggntgggntatcgaggtggcgggatcgatattctgtntggctggggcaacggtgactacactatacaagggtccaacaatatatagcccnatccacctctacacagtgagagaccnccagtagttgactttggaacatctcatgggagat

SEQ ID NO: 2261 - DNA, 279 bp, Glycine max
  unsure (1)..(279): unsure at all n locations; Clone ID: 701039838H1
cgcattttccctcttctttctctctcacgttttccgcttcagttttctcgggaaaatcatggtgaaaggtccaggcctctactctgacattggcaagagagctcgcgatcttctgttcanggattatcagaatgaccacagttcaccatcaccacttacacttccaccggagtggaaatcncttcaactggagtcaggaaaggtgagatatatttggccgatgtcagcactaaggtgaagaacangaacatcacaactgatgtcaaagtggacactaac

SEQ ID NO: 2262 - DNA, 96 bp, Glycine max
  unsure (1)..(96): unsure at all n locations; Clone ID: 701039840H1
cacnaccccatctacgntctanaactccgatncctnacttaaccnaaccaggacntctttcctcgcgtctgncgcagggcacntcgtccctacgcc

SEQ ID NO: 2263 - DNA, 92 bp, Glycine max
  unsure (1)..(92): unsure at all n locations; Clone ID: 701039842H1
gatgangaggtggacgccgtgtancatccctcttccgancgggtttgcacgtgcacatgggcggtgaaggccgncggagangcggaaancat

SEQ ID NO: 2264 - DNA, 260 bp, Glycine max
  unsure (1)..(260): unsure at all n locations; Clone ID: 701039847H1
gaggatagtgatctttgtcttcgccaacaacatcgtccacttgaacaaaaaatcaaaaagaccctgaaatatctgaacttaaaagccgcactttttatttgttgtgtgtgagattttgatttgagggaaaatatcttgaatctgcggcgaggctggcggagtatcgcggattgtgtcatctgctgcgaanccaacaggccaaagagagcgctacccagatcgcccaaccgtgtggcgactcctcgaagtgcgaacccatt

SEQ ID NO: 2265 - DNA, 278 bp, Glycine max
  unsure (1)..(278): unsure at all n locations; Clone ID: 701039850H1
ctttaccagtcgacaacagatggaaataaatttgtggattgcctccgcgatcagaacattgtgcccggcatcaaagttgataagggtctggtccctctgccagggtcaaacaatgagtcttggtgccaagggctggatggttggcttctaggtctgctgaatactacaagcaaggtgctcgatttgccaagtggaggacagttgttagcattccatgtggtccttctgcattagctgnggcggaagcagcgtgggggcttgcacgttatgctgctatc

SEQ ID NO: 2266 - DNA, 276 bp, Glycine max
  unsure (1)..(276): unsure at all n locations; Clone ID: 701039851H1
gattcttcagctaccatcttatctgcgccaaaaaggaagagggaaaaagaaattgaaacatgggttggattccctgttctggaagttcaaacagtaagaagaagttgaagaagaaattggagaagatggaagcgcagaacgcctcgttgatccgatcaaagccaccccagggaaattgnagaggaattcatccatgaattccaaagagtcctccaaaaatggaaaccctgagcacntgctgcacagacttctcattccgtgaattggcaatgcaat

SEQ ID NO: 2267 - DNA, 277 bp, Glycine max
  unsure (1)..(277): unsure at all n locations; Clone ID: 701039852H1
agaaatgtcccaagtgagccagttggtcacatgcatacaacatcacaccaacagcgtgcatttgacaacgatcagaagtctgagcattcaanggggggatcaaaaccagctgatggtctgctgattgacgaccatgaaaggtgttacaaacttctcagacacatctgaaagatattcaagcaaaatctcatagtggttctgctagaagttgcactaaagttcacaagaaggggattgcgctcggtaggtcagtggacctcacaaaattcagtgatta

SEQ ID NO: 2268 - DNA, 270 bp, Glycine max
  unsure (1)..(270): unsure at all n locations; Clone ID: 701039858H1
gtgggttttgcgaagatactgtttcaactctattggctaaattgaaagatggtgacactaagctacagataattgggacatcactgaaggggtgcaattcagtggagaagtatgctaagtgcaaganaatggtttcgagtatggacccttggtttttgacaatgcagagaaattcctggagagcacagatatatgcactgccatatatgccatgcaaatcttcaacagtggctgggcagcaaacctttctttcagattcttatggaaaca

SEQ ID NO: 2269 - DNA, 272 bp, Glycine max
  unsure (1)..(272): unsure at all n locations; Clone ID: 701039859H1
ggagagagaagagcggaagagaaaatgacgnccaggttcaagaagaacaggaagaagagaggtcacgtcagcgccggacacggccgtatcggaaagcaccgcaagcatcccggaggtcgcggtaacgccggtggcatgcatcaccaccgtatcctcttcgacaagtaccatcctggtttcttcgggaaggtaggcatgcgctacttccacaaattcgcaacannttctacatccgatcatcaacatcgacaagctgtggtcctctcccccag

SEQ ID NO: 2270 - DNA, 96 bp, Glycine max
  unsure (1)..(96): unsure at all n locations; Clone ID: 701039863H1
aagaagcttgttctcgttcnntctcanngaagtctgttgctgctggcaagctacgttaaggtacaaaaactnctttcaagctacgncaccgangna

SEQ ID NO: 2271 - DNA, 272 bp, Glycine max
  unsure (1)..(272): unsure at all n locations; Clone ID: 701039865H1
ctgaattgcactggtggtgattcttcaacggagccttacttggttncacatcaccaacttcttgctcatgcagctgctgttcgtgtgtacaagaccaagtaccaggcatctcaaaatggtgtgataggcataaccttggtagctaattggtttttgccgctcagagataccaaatctgatcaaaaggctacagaaagagcattgacttcatgtntggnnggttatggatccataacanctggagatatcccacanctgngtcacttgtgang

SEQ ID NO: 2272 - DNA, 275 bp, Glycine max
  unsure (1)..(275): unsure at all n locations; Clone ID: 701039866H1
tctcactctctcaggagtatataatctgagcgatgtcagatctcgaggctcccttgcgccctaagaggaagaaggtttgggtggactattttgttcagtttcgatggatccttgttatttttgtggtccttcccatcccttcaccatttatttccttacataccttggggatgtaagatcngagtggaagtcctataagacgcgtcagaaggaacatgatgagaatgtgaagaagttatcaaacgtctcanacagaggatccatcaaaagatggt

SEQ ID NO: 2273 - DNA, 278 bp, Glycine max
  unsure (1)..(278): unsure at all n locations; Clone ID: 701039867H1
ctctttctctctctagaattctcagatttgcggggcgagatgatgcagcagccaggacccggcatggcacctacccaccatgggccagcagccgccgcaacagtaccnnnnnnnnnnnnnnnnnnnnnnnnnnncctagtcatgatgccgccgcangcccangccccgcaggccatgtgggccccctccgcccagcctccgcctcagcagcagcccgccagcgccgacgaggtccgaaccctctggatcggggatctgcagtactggatggacgagaa

SEQ ID NO: 2274 - DNA, 267 bp, Glycine max
  unsure (1)..(267): unsure at all n locations; Clone ID: 701039868H1
cctgattcattaatttgatagcagttaaacggcacccgcgttccgtccctcctctnctctnctgngtggttaacagaaagaacaangctganatccaatcacaatcattcattttcattcataccgtcgcaacacgatcactatttctgcgacgatggtggcacattcgagttcttggggcagggcactcgtggccatctcgccctanaccttctctgccatcggcatcgccgtcgctatcggcgtctccgttctcggcgccgcctg

SEQ ID NO: 2275 - DNA, 120 bp, Glycine max
  Clone ID: 701039869H1
ctccctcatcatctaaccctgctttaactttagcataaggctcagggtcaaacggtggccatatgagtagggggaaaaaaaaattgtacacagaaatacagaatcttatactatcgcaat

SEQ ID NO: 2276 - DNA, 272 bp, Glycine max
  unsure (1)..(272): unsure at all n locations; Clone ID: 701039870H1
tcattgctaccctgttggtggataacaaaacttcagcaacccctttgcatctgatctaagaatcccaacttcaagtacccatttttcgtcatttcatgatctaggtgatagatcgtgaaaatgacaaggatgaccatgattttggggatactatgcaganagatgcagtgccggtngtgtcggccgatgtaatatttgcttctcttcggtttcctaattacnaaatcggagttaataatcagatcatggcgacanaggatgatccgtnntgc

SEQ ID NO: 2277 - DNA, 272 bp, Glycine max
  unsure (1)..(272): unsure at all n locations; Clone ID: 701039871H1
tgcagatcaagagtggttcctgttcctccacttagtttctccatagtatccaaaatagttcttcttggggtgataggaagttcatctcaggtactgggttatgcaggcattagctacagttctccagcacttgctcatcaattggcaatctggtacctgctttcaccttcatccttgccgtaatttgcaggatggaaaagttagctgccaaaagtagaagtagtcaagctaaggtgattggnagcataatatcaatagcaggtgcatttgta

SEQ ID NO: 2278 - DNA, 273 bp, Glycine max
  unsure (1)..(273): unsure at all n locations; Clone ID: 701039872H1
ctttctcgtctccgtcngtgcaacctgggaagcaatggcttggagaggaaatcttttgaaaaacataaaagaacttaggtttttgatgtgccagtcatcnccctgcaagctcagccacaagggcttttgtggaaagaattataaggaactaaagacattgaacccaaaattgcccatattaatccgtgagtgcagtggagttgaaccccaattatgggcaagatatgatttgggtgttgagaaaggcatcanattggaaggcttgtccgaggc

SEQ ID NO: 2279 - DNA, 264 bp, Glycine max
  Clone ID: 701039873H1
ttggggtcttgtttagtttgttccaatccaacgttggttgtgtgtgtttgtgttgggaggattgggattgggattggaatcagcgaccccatgcgacctcagagaacgtcgatccacgccgtcacgacatggtgaggcgacagcccccaaaggtgaaggcttttctcgccgtcgtttccggcatggcggccctcgtcctccttcgcttcatcgtccacgatcagacaacctcttcgtcgctgccgaggctgtccatccctcgga

SEQ ID NO: 2280 - DNA, 268 bp, Glycine max
  Clone ID: 701039874H1
gtgaaacaaaccaaccacccacctatggcggcctctgttgtagtgtctacctctactgtctgtgtgtttcaactatggctatcatcgtcgtccatccatttccgctctctcttgttattcgaattccatcaccaaacaaacctaaaactcagttcgcaatgtttctccaactcgaattcggtagccccgatttattgccgcaagtttgttgctcgcacttcaattggagaaaacgagagcgagaggagaaggagttagggttcgtggg

SEQ ID NO: 2281 - DNA, 267 bp, Glycine max
  Clone ID: 701039875H1
tggcctatgacacgaaacatcttcgtgtcccagagatacaatgggcttggagcttttccttctgattctgagagatattttgttccgaatcagtgtctccttccattgactgctgaagacaaaagaaaagttgagccatgctacttagatgctaccttgaaagggaggtaccacaatggaggttggagctacagttgattctgcaaagaggagtaaagtttgagattgaagccttatctgtgcagcatttcatcttgtcagagtctt

SEQ ID NO: 2282 - DNA, 210 bp, Glycine max
  unsure (1)..(210): unsure at all n locations; Clone ID: 701039876H1
ganaaggatatccatgcaggtggttttggagttatgaagtctaatctaatccttaaaattgtaagcattggttagtctagtcccgaccttaaaaatctccactttaatttctgactttgtaaaacatcgttccaatggtccttttcgatgtaaaattatagagttaaatgaagtggaaaannaaattacattttgggaaatcaaaaaaaa

SEQ ID NO: 2283 - DNA, 271 bp, Glycine max
  Clone ID: 701039878H1
cggaacgtggaactgcggaaaccggaatatctcacttctcagatcagatcaatccgacgtcgttgcagttataatggctccattccagcggcgatgagacggcaccgtttttcggcttccttggagccgcagctgcctcgtcttctcctgtatgggagctgcctatggcacagcgaagagtggcgtgggcgtggcttcgatgggtgtgatgagaccggagctggtgatgaagtctattgtccctgttgttatggctggagttttgggtatt

SEQ ID NO: 2284 - DNA, 91 bp, Glycine max
  unsure (1)..(91): unsure at all n locations; Clone ID: 701039880H1
cnaaaaganaaaaatgcatgcncatcatcatcaaaccattctctggtcctgatcctaaatagggttagggtttatgcaattcgaactccca

SEQ ID NO: 2285 - DNA, 87 bp, Glycine max
  unsure (1)..(87): unsure at all n locations; Clone ID: 701039882H1
cttttttccccttancnancngttaacataggcaaagagtatgaaatgtnttggggataccccataaaattggaagtaaactttgcg

SEQ ID NO: 2286 - DNA, 273 bp, Glycine max
  Clone ID: 701039883H1
cagctgtctgctgttagatctgtacccgcctagccattgatttggaaaagtccaacttcaaggatgagtaagcttcagagtgatgctctaagagaagctatctcaggaatcatggctgattccaaggaaaagacaggaaatttgtggagaccattgaactccaaattgggttgaaaaattatgatccccagaaggacaagcgtttcagtggctctgttaagttgcctcatattcctcgccccaagatgaagatttgtatgcttggagatgccc

SEQ ID NO: 2287 - DNA, 271 bp, Glycine max
  unsure (1)..(271): unsure at all n locations; Clone ID: 701039885H1
caaagatattgggaaaggnaggtgcactttttgttccatcaggcactatggccaaccttatatcagtgcttgtgcattgtgacataaggggaagtgaagttattctgggagacaattcccacatacacatttagagaatggcggcattgcaacccttggaggggtgcatccaagaacagttagaaacaatgaagatggaaccatggacattcatttgattgaggctgccatcagagatccaaagggggagctagtatatccnaccacaagg

SEQ ID NO: 2288 - DNA, 251 bp, Glycine max
  unsure (1)..(251): unsure at all n locations; Clone ID: 701039886H1
gagaaagtagcagatcctccatggcactccaccaaggaacgtncanaacttcgtactacgtcgccaagctcgccgaacaagccgaacgctatgaagaaatggtggaagcaatgagaatgtggcgaactaaacgtgganttgacggtagaggagcggaaccttctgtcggttgggtacaagaacgtggtgggtgctcgtagggcttcgtggaggattctttcctcgattgaacagaaagaagaagctaaagg

SEQ ID NO: 2289 - DNA, 268 bp, Glycine max
  Clone ID: 701039887H1
gttcggtggtttgcaaggatggggaacacgttctgcttcttctgtggttgcgttgctcaatccagcgtcggcgtggtcgagcagtggggtcgcttccaccgcctcgcccaaccgggcttccactttttcaacctctcgccggcgaatgcctctccggtatcctctccaccaggatctcctccctcgacgtccgcatcgaaaccaaaaccaaggacaatgtttttgtgcagttgctgtgttcgattcaataccgagtgattaaggaaaa

SEQ ID NO: 2290 - DNA, 269 bp, Glycine max
  unsure (1)..(269): unsure at all n locations; Clone ID: 701039888H1
gctttcctttccagttcatacttcatcctattattactttccctctttgcattccaaatggccactgttgangttgcacagcaaacaccaacaactgtgacagagaatgaaacaacgactgaggtaaccaagttgaggaaactaccccagaacagccagccaccgaggttactgccccagaaacagtcaacgaagaagcaaaagaggaagcagcagttgngactaatgaggcaacnccngttacagaggangggaaggctgagaaaaca

SEQ ID NO: 2291 - DNA, 269 bp, Glycine max
  unsure (1)..(269): unsure at all n locations; Clone ID: 701039893H1
ctctcaccaccccaccatccagntccngatcaaatggcagccatggctatgttgcgtttatacaccactctctggtcaaaaccatgcactttctttcccatcatcaccatcaccaccacctaagcttcagaacgtcctctgtatctcaccaatttgcctcatttgccccaaaggttgaaactttccttcgccggcgggacggcggagatggggtgggacgtggtggcggtggcggtggcggaggtgaaagctggggtgatgaaggaaaa

SEQ ID NO: 2292 - DNA, 268 bp, Glycine max
  unsure (1)..(268): unsure at all n locations; Clone ID: 701039894H1
ctttcattttccctcactttctcgctcgccaaacgcccctctctctcctccaatggccgaccagctcaccgacgaccagatcgccgagttcaaggnggccttcagcctcttcgacaaggacggcgatggtttattactactaaggaacttgggactgtgatgcggtcactagggcaaaacccaactgaggcagaactgcaggatatgattaatgaggttgatgctgatggcaatggaaccatcgacttcccagagttcctcaacctga

SEQ ID NO: 2293 - DNA, 91 bp, Glycine max
  unsure (1)..(91): unsure at all n locations; Clone ID: 701039896H1
acgaaatcgcgnaacagaanagcaaccgnnaacaatgggttctcgctacgaggtgganctgaagnccctncatacggcacgcgctactcca

SEQ ID NO: 2294 - DNA, 293 bp, Glycine max
  unsure (1)..(293): unsure at all n locations; Clone ID: 701039901H1
tgcgtttccctttcattttccctcactttctcgctcgccaaacgcccctctctctcctccaatggccgaccagctnnccgacgaccagatcgccgagttcaaggaggcttcagcctcttcgacaaggacggcgatggttgtattactactaaggaattgggactgtgatgcggtcantagggcaaaacccaactgaggcagaactgcaggatatgattatgaggttgatgctgatggcatggaacnatcgattcccagagttcctcaacctggatggctcgcaagatgaaaga

SEQ ID NO: 2295 - DNA, 306 bp, Glycine max
  unsure (1)..(306): unsure at all n locations; Clone ID: 701039904H1
aagaaaaagncatgnacgcnattgnaggttgcanagcattctagtgctnaaccaatgggcgatgggacttcgatttgcaacgccaangcaantccanagantcncatagcgaaggncaaanaagccggcnctgccattaggctcggacccgaacttcgagnattcctggttatggctgcgaagaccacttcttagagctcgacacagttaaccattcatgggagtgcctgaaagatttactgncntggagatggactgatggcatgtgtgtagctttggcatgcccgttatcaaaggctccgagcg

SEQ ID NO: 2296 - DNA, 294 bp, Glycine max
  Clone ID: 701039905H1
gttcatcaacggagagtccagcctgccgcttcatgagatggaaggaggaagaacttactatctgggaatgtttttgggtggggcttacgaggaggcgctcggtggagtccacaacttgttcggcggccccagcgtggtcagggtgtcgcagagcgatggccctcacagctttgcggtcacgcgtgccgtgccggggccatcctgtggagatgttcttcgagtgatgcagcaccagcccgagctcatgttcgagacactcaagcaccgcgcgcaggagtatgtcagccacgacaa

SEQ ID NO: 2297 - DNA, 295 bp, Glycine max
  unsure (1)..(295): unsure at all n locations; Clone ID: 701039909H1
gtctctctctcacctcaacaaactccttctgcatgcccccgctcaactcttcacctctctatttcggccaccaacgcagcagcgttcgganntttggaccaaacctgtcggaaggccgaggctactggtgcgtgtccgagcggtcacgagcgacgacgagtgggggccggagaaggaggaggcgtacggcggcggcgtagggtggaggagaaaccgacgaatgnagacggagacggagaagctgaagaaggccttggtggattcgttttatggcaccgatcgtggactgaaagca

SEQ ID NO: 2298 - DNA, 265 bp, Glycine max
  Clone ID: 701039910H1
gtcgtcgtcaaaccaaaccaaatcctatatctcgcattctcattcatctgcccccaattccaaatccccattccctaaccctaaccctaaaaccgaatcttctcatgaaacctcccacgccacactcctccgtatcagaatcaggttcgattccctaaccctccacaaatcgctttcttctctttgcagtttctccatggagggctctgcagaggatttcggagcccccgagtcatgggaggtcgctgatttggacgagtccatg

SEQ ID NO: 2299 - DNA, 286 bp, Glycine max
  unsure (1)..(286): unsure at all n locations; Clone ID: 701039911H1
ttgtattgtacgtggtacaatggtaatacttttcttanagcgacacacaggatacacattctttgttattaaanactgatgtatttnattgtaaaanatgaagcagggtaaacaattcctttggctttaactatcatggaaatgagccattaggagtgggatagttgagtttgggtggtttgcttgaggtcataaaatcaaacctcagctttgccattgtacacgcacaaaaaaaaaggtactatattgaatagaaagtgtgtatgttgtattgtattctgcngga

SEQ ID NO: 2300 - DNA, 283 bp, Glycine max
  unsure (1)..(283): unsure at all n locations; Clone ID: 701039912H1
atgaatttgagaaaaaacttcttgctgatgttattccgccaaccgatattggngtcacatttgatgatattggagctttagaaaatgtgaaggacaccttgaaggaattggttatgcttcctcttcagaggcctgactngttttgcaaaggacagctgaccaagccttgcaagggaatattgctttttgggccccctggcacaggaaaaacaatgcttgcaaaggctgtagcaactgaagctggagcaatntcataacatttcaatgtccagcattacttcaa

SEQ ID NO: 2301 - DNA, 288 bp, Glycine max
  Clone ID: 701039913H1
aacaaaaaaaaatctttccttattgttttccgtgtttcctttgtttcatagcttctgggttttgggtttcagatcccacaatacaaagttcacaagtgtgtgtaaagattgaagaagaaaatgaccgtagagaagaaaatgaatgattccggcgacgagtttcccgtcggaatgcgtgttctcgccgtcgacgatgatcccacttggcttattggttctggaaactctcctccgaagatgtcaatatcatgcaaccacgactaatcaagcaataaaggcgttggcgct

SEQ ID NO: 2302 - DNA, 281 bp, Glycine max
  unsure (1)..(281): unsure at all n locations; Clone ID: 701039914H1
aaatatgctcgcttgcccccagcttgggcatatcgaccaggtgtatgcatgcnttcttgctcntcatgaggctcccatttaggtctaaaggattacaaaaatgaaaacataaaaactaggaattaagagcaaaaaaatagtagcgtgtttctttgtttattatttttccatatgtttccaatatactgtccccgagtattatttaacacgtacaatgtaacatttggtcgaagggtttgtttgcgggttgattgtnattgtagtgtgaaaatttgtttgtg

SEQ ID NO: 2303 - DNA, 280 bp, Glycine max
  unsure (1)..(280): unsure at all n locations; Clone ID: 701039915H1
atgaatcgaagctgaaacgcttcatcaccggattctcgctctcaactcagataccaattcggagtttcggactcatcgcctccgattcaaaaccctaactcggacctcaaactcaatcgatttcatacaacatggnttgtaatgctgatatggaggactatggatttgagtactcagatgaggagcaagaggaacaggatgttgatattgagaatcaatattacaattcanaggtttggtcgaaatgatccagaaggtgcacttgctggttttgtgaggt

SEQ ID NO: 2304 - DNA, 294 bp, Glycine max
  unsure (1)..(294): unsure at all n locations; Clone ID: 701039917H1
gaaaaggttcgttcagagacaaaaccccaacgatccaaacggtcattgagcntttcatggtgcgagtcactgagttgaatcggataggaatctgagtttgtgatcgtttgacacggtcatgggtgctgcgggctccaagctcgagaaggctctcggagaccaattccccgaaggagaacgttactttggcctcgagaatttcggcaacacttgttactgcaacagcgtcttgcaggcactatacttctgtgttccgtttcgcgaacaattactagagtattatggaaataacaa

SEQ ID NO: 2305 - DNA, 293 bp, Glycine max
  unsure (1)..(293): unsure at all n locations; Clone ID: 701039918H1
agttttctgagtttcataggagganaaaatgacagaagaacaaaccaaaacngctgngtcagaancagtgacaccaccagctggtgctggtncttgcanaggnatcctgccagctggntgaggctgaacatgttcctgnaggctccaaaggatgtggctnagggagaantctgtaattcccagtgccttcttctgatgacaancctggtgggtccaaggcactgntctggtgaagaanatcanagtantnnccgaattgaaaccaatngaggggnttgcaacgggngtcntgt

SEQ ID NO: 2306 - DNA, 295 bp, Glycine max
  unsure (1)..(295): unsure at all n locations; Clone ID: 701039919H1
cagcaaaggagtgatttgggagtttggagcgantgaactaatcattaatttgcactcgctgtttcagtttcatcacccttctttngcatcatttatatctcttgagaaatggcacaagaaacctttctattcacatctgaatctgtaaacnagggtcaccccgacangctgtgcnancagatctctgatgcagtacttgatgcntgccttgancaggaccctgacagcaaggttgcctgtnagacatgcaccaagaccaacatggtcatggtcttcggagagatcacaaccaagg

SEQ ID NO: 2307 - DNA, 292 bp, Glycine max
  Clone ID: 701039920H1
ctcggttcgaagttgtaagcgttcaacgataaggagccgtcgtcggaactcggaagtgggtttgcgtcgttgtgaggtttaacgagacgatgagggcgctgtttctgttcttcgttctcttctctttcagctatgccaccgaacaaatctttcctgctcatatcggtagcattttcggtggtggcggtggtggccgctctcgcgaacccaaatacaagatcgaatttcatcccgaagattccccttttcaccctgatgatgatcaggaatctatagtcatgccggataaaat

SEQ ID NO: 2308 - DNA, 271 bp, Glycine max
  unsure (1)..(271): unsure at all n locations; Clone ID: 701039921H1
agcaagaatacacagggnccaatcaccnagatttgtatnttcatccagatggaggatcttantagattgcatgacaggaatganactctatattacagagttcttattgataacatcaaagagtttgctccaataatctatactcctacagttgggttantgngtganaattattccgggttatttagacgcccgcgtggaatgtatttagtgcgaaagataaaggagagatgatgtcaatgatctataactggccatctgatcaggtaga

SEQ ID NO: 2309 - DNA, 291 bp, Glycine max
  unsure (1)..(291): unsure at all n locations; Clone ID: 701039923H1
angtgttctcctacacgttgccattgttcaggcagctcttccccaaggaattgtcccatttgtccttgctaagggaatataatgtacatcctgatattctcagcacagctgttatttttgggatgctgattgctttgcccataactctagtgtactacatcttgttggggttgtgaatgaaaganatgatggatgatacagaagattcacgtgtggcatccatgcaaagcttggttgaggttgttgagaatgagagaaaaaaaaggtcataaagcaacaatagaaaagaag

SEQ ID NO: 2310 - DNA, 289 bp, Glycine max
  Clone ID: 701039925H1
gacactactaaagaaggatatagttttgaagagctatgcatcaagaaagaagccattgaggggagaagagaagttttgtgcaaaatccttgggaacagtaattggttttgccatttcaaagctgggaaagaacattcaagtactttcaagttcctttgtcaataagcaagaccaatacactgtggaaggagtgcagaatcttggagacaaagcagtgatgtgtcataggctaaatttcagaactgcagtattttactgccatgaagtccgtgaaacaacagctttcatg

SEQ ID NO: 2311 - DNA, 285 bp, Glycine max
  unsure (1)..(285): unsure at all n locations; Clone ID: 701039926H1
attattttgattttnattacatcacgtaacaataataatacagacaagcacgcacgcacgcaccccacaggcacaagtctctccaactcaacttcttccactctcactaatggcnctcaccaatgctttcctcgctccttccttcgccgtccacggtgttggtagggtttccgatccgcgctccattcctctcttctctcttccctccgacgccttcttccgctccccaacctccctctccagggacaagaactttctaaaagcttctgcttatgattgaagcag

SEQ ID NO: 2312 - DNA, 284 bp, Glycine max
  unsure (1)..(284): unsure at all n locations; Clone ID: 701039927H1
caaaaaccatcgatgatgtttctctgagtctgaggattcacgcgttactgttactgttactcaactcttattcccttccttgattccaattctccgcacttcatttcattngaattctgaaaaattaggattagggttttctttctttcagtgannnnnnnnnnnnnnnnnnnnagtggttttggagaaatggttgagcaatcggtgctggtgctcgaaaagcaagggccaaatccagtgttatcagaaggaatccacgattgggtgtttgagtgccatgggct

SEQ ID NO: 2313 - DNA, 61 bp, Glycine max
  unsure (1)..(61): unsure at all n locations; Clone ID: 701039930H1
cttgatcaccataaccatgttcaatgggnaacaanatncnccttcagannggcctgttncc

SEQ ID NO: 2314 - DNA, 290 bp, Glycine max
  unsure (1)..(290): unsure at all n locations; Clone ID: 701039934H1
cnacagagtagtacagattactaccaatggctaccaaggtttacattgtttattattctacgtatggacatgttgagaagctagctagagagatagaaaaaggggctgcttctgtggagggagtagaagcaaaactgtggcaggtacctgaaacattgcctgaagaagtccttgctaagttgggagcacctccaaagagtgatgttccaattattactcccaatgagcttcctgaggctgatggcttttgtttggttttcccacaagatttggatctatggccgcncaat

SEQ ID NO: 2315 - DNA, 297 bp, Glycine max
  unsure (1)..(297): unsure at all n locations; Clone ID: 701039935H1
aacaatgattatccgtatcccattcctcccttgnntatccttcgtttacttttnntttgctgggcattttcaatntcagtggcatgtctgctgcctttgagactggtttagataaattaattgcttactttcaatttttcnanagacaattctgatnaggaagaatactataactggaattgaatatagaaatgaccccaccatttttggttgggaattgataatgaactcggtgcctnactgatccntctggtgatatctncaaagattggatagaggaaatgtcagctttgtcaa

SEQ ID NO: 2316 - DNA, 291 bp, Glycine max
  unsure (1)..(291): unsure at all n locations; Clone ID: 701039936H1
gggaattttcgtcattcttactttaccttccttcctcaccttctaattcttccaacaagtttccaaactttcaaatctcaccgtnccaaaaattcttttttggttacccatttgactttagcctctgcaacagagtctcagatctctgcattccaattcccatggctggtcgctatgacagtaaccccttcgatgaggaagaagttaaccctttctctaatcctggaagtgttcccgctgccataattcaaggttccacctcttaagccagaactgttgatataattatgg

SEQ ID NO: 2317 - DNA, 290 bp, Glycine max
  unsure (1)..(290): unsure at all n locations; Clone ID: 701039939H1
catcncagagagagaganatccatcgatcaattaatttncaatggccgttcagctcaaccgacgaacagatctctgagttcaaggaagcctttagcctcttcgacaaggacggcgatggttgtattaccaccaaggaacttnggactgtgatgcggtcgcttgggcagaacccaactgaggctgagctgcaggacatgataaatgaggttgatnctgatgggaatggtaccatgatttcccagaattcctcaatctcatggcgcgcaagatgaaagacactgattcagag

SEQ ID NO: 2318 - DNA, 292 bp, Glycine max
  unsure (1)..(292): unsure at all n locations; Clone ID: 701039940H1
acttcctctaattgacacccanctaaaccatggcttcccacttcctcaaatccctnccttctcctgtgccanntatggccctcaccatctcaggagaatacacaggcttcgtgggaacactagacccaaagtccataggcatacaccacaagaaaaccctaagccacttcaggttctactggcacgaagtcttcagcggagaaaaccccacatcggttagaatcattccctcactccccaaatanaacgcaaccacaaccttcggctccgttggaatctttgacaccccttt

SEQ ID NO: 2319 - DNA, 281 bp, Glycine max
  unsure (1)..(281): unsure at all n locations; Clone ID: 701039942H1
ccctaacgcgtgcatagcagagtcagagacagagacgcagccatngggcggagacctgcgaggtgttataggcaaattaagaacaagccataccccaagtcacgtttctgccgtggtgttcctgatcccaagatcaggatttatgatgttggtatgaagaagaagggtgttgatgagtttcctttctgtgtccatctggttagttgggagaaggaaaatgtttcaagtgaggccctggaagctgctcgcatgcttgcaacaatacatggccaaattgctgg

SEQ ID NO: 2320 - DNA, 281 bp, Glycine max
  Clone ID: 701039946H1
cagaatcaaagcattttgtgttgataaattcagtaaagttgtggaatggactcaaccactatccaccattccatggcactgtcagagatggcaattcccactgttgctcactggtcagagaagtacaaccatgtgatcaaggccatgactcaaaagggttacagtttcgttgggtatctacctttgattcccattgaagagatagccaaggcattcaagcagggagaggctaacttgaaaggagataatgcagcctctgaggaacagagatcagaatcatc

SEQ ID NO: 2321 - DNA, 285 bp, Glycine max
  unsure (1)..(285): unsure at all n locations; Clone ID: 701039948H1
gcaaaaaagcggagaacttncagaagaatttacaacgagaaagggattcttcctgcagagaccatttcaagatcgactgaagaatttgattgcctcgtcccctgtgatgctgttcatgaagggtancccagatgcaccaagatgtggttttagttccagagttgctgatgcccttcgacaagagggcttgaattttgggtcctttgatatattgactgatgaggaagtgagacagggattgaaggtatactcaaattggccaacctatcctcaactctactacaa

SEQ ID NO: 2322 - DNA, 231 bp, Glycine max
  unsure (1)..(231): unsure at all n locations; Clone ID: 701039955H1
aanntgttctcctacanggntgccattgttgcagngcagntnttccncaaggaattgtgccatttngtcgtgncgaaggaatnngttgtanatcctgatattgctcagcacagctgttatttntnggcatgctgattgcnntgcccataannctaatgtatacatcttgttggggttgtgaatgaaagaaatgatggatgatacagaagattcacgtgtgggcatcccanc

SEQ ID NO: 2323 - DNA, 279 bp, Glycine max
  unsure (1)..(279): unsure at all n locations; Clone ID: 701039957H1
gtttggttttgtagtaagtgaggtgaggtgccaaaatggtgaagataactcttggtactttcgatgactcttttggtgttgcctctcttaaggcttatttggcagagttccatgcaactctgatttncgtgttcgctggtgttggttcagccatcgcttacaacgagcttacaaaagatgcagccttggatccaacggggctggtggcagtagctgtggcccatgcatttgcactgtttgtaggtgtctccgtcgcagccaacatctcgggtggccatt

SEQ ID NO: 2324 - DNA, 281 bp, Glycine max
  unsure (1)..(281): unsure at all n locations; Clone ID: 701039958H1
gtttcttcggctgcgtgctgatgctcttgtnttctcacagtcacacaacagcaatggnagcaatcacagagggagtgaacaacatcaacatctctgattcttacaagaagaatcgcattcaggtctccaacaccaaaaagcctctcttcttctacgtcaatctcgccaagaggtatatgcaacagcataatgaggttgagctctcagcactaggaatggctattgctacagtggttactgttgctgaaatcttgaaaaacaatgagcttgctnttgaaaag

SEQ ID NO: 2325 - DNA, 277 bp, Glycine max
  unsure (1)..(277): unsure at all n locations; Clone ID: 701039961H1
ttagacgaaaatgaccctgatggaatagacaatgatgangaatctgatgaagaaggtggtgcagatgaactcgaatccaaaatgaagaaccttgtagttgatgattgactaagcagttgcagtcttctttcatgttctgctgcgcaagtaactctcgtgacagtagagggtttttagaccattttattcgtagtagtttatgtaactattaagacgcatcaatttgacagcagtcaattattgaggggacataaaatgtctgcaatatttatcgaaa

SEQ ID NO: 2326 - DNA, 277 bp, Glycine max
  unsure (1)..(277): unsure at all n locations; Clone ID: 701039963H1
gttttnntcttcccttttctctttctccgggcgacgatctcagattccggccactcntcttcgccggcgagcccttactcttccctcctccgtcgagccctctccgattcgaatcgttcccagcctcgcaccaccatgaatcccgaatacgattatttnttcaagcttttgctgattggagattctggtgtaggcaagttcatgtcttctcctgaggtttgctgatgatcataccttgacagctatatcagtaccatggagtggatttaaaatccgc

SEQ ID NO: 2327 - DNA, 281 bp, Glycine max
  unsure (1)..(281): unsure at all n locations; Clone ID: 701039965H1
cattgttattcttatttccaactttgctggtagatcatgctcttgcaataagcagcagaatttcttncgctaccaacagcagagttaatgtatgtgtagtcttncttnnttgnattgatgtactttttcatngntntnctcaatttaatggcatttttcctcncaaaaaannnngtaaangggaannaanannanntnaagcgtacngcaagatgggagttgccaganngggntaaanatcggggaacggnaggntgggggggggggccnctntgnccccc

SEQ ID NO: 2328 - DNA, 289 bp, Glycine max
  unsure (1)..(289): unsure at all n locations; Clone ID: 701039967H1
atttcctctctctcagtttccaagaatcttaagcnatgggaaagtctacccaaccgtgagcgctgattancaagaaggccgttgagaaggcgaagaagaagcttcagangcttcatcgctgagaagagatgcgctcctctaatgctccgtttggcatggcactctgctggaacttacgacgtgagctcgaagaccggtggtcccttcggaaccataaagcacccctccgaactcgctcacggcgctaacaaggtcttgacatcgctgttaggcttttggagccatcaaa

SEQ ID NO: 2329 - DNA, 286 bp, Glycine max
  Clone ID: 701039970H1
gcaaaaagaaagaatcccaggcgaggagaaagatggaggggaaggagcaggatgtgtcgttgggagcgaacaagtttccccgagagacagccaattgggacggcggcgcagagccaagacgacggcaaggactaccaggagccggcgccggcgccgctggttgacccgacggagtttacgtcatggtcgttttacagagcagggatagcagagtttgtggccacttttctgtttctctacatcactgtcttaaccgttatgggagtcgccggggctaagtctaagt

SEQ ID NO: 2330 - DNA, 280 bp, Glycine max
  unsure (1)..(280): unsure at all n locations; Clone ID: 701039971H1
gctatgcttccactgatcggttaaatnttcaagctacaagcccagangcagatttaactggatcagactaccaattacattcaaatggatcaagcactgtcagtagccgtagtgcagggcacactaaacagagtcagccagattcaacaaatagaaatgggagcagaactaaggacagtgatcccgtaatgaaactgaatgggttgaacaagatgaacctggtgtatatatcacactcacctcccttccgggaggtatatagtcttaagagagtcgcttc

SEQ ID NO: 2331 - DNA, 284 bp, Glycine max
  unsure (1)..(284): unsure at all n locations; Clone ID: 701039972H1
attgaaatgatgtcatcaactatgttctaaattcaccaacccaacgtcttgtaagctccgcccctgggacaaaatcaaggtcccatttatgcaagctttgattcacattcctgttcgtttttccttcgcaccttttcttcttcttcgctccgtgccatgtcttcctctctcgctcttccttccactcccttcttcgccaatggaacaagaatcttcgctctcaagcactctctccctcgctctagggtttccatgancgtctccgctggatctcaggcttccgt

SEQ ID NO: 2332 - DNA, 281 bp, Glycine max
  Clone ID: 701039973H1
gcaagcaaaaagaaagaatcccagggcgaggagaaagatggaggggaaggagcaggatgtgtcttggggagcgaacaagttccccgagagacagccaattgggacggcggcgcagagccaagacgacggcaaggactaccaggagccggcgccggcgccgctggttgacccgacggagtttacgtcatggtcgttttacagagcagggatagcagagtttgtggccacttttctgtttctctacatcactgtcttaaccgttatgggagtcgccggggcta

SEQ ID NO: 2333 - DNA, 278 bp, Glycine max
  unsure (1)..(278): unsure at all n locations; Clone ID: 701039974H1
cccatgttgtgggtttgaactcttacagaagttttgangcaggggtgcaacctggcaacaaccaaaggggaggttcaaacagttaaacagggttatctgttaaaacgatcatcaagctcacgtggagattggaaacggaggttctttgtacttgataaccagggaatttatattattacagagtgaagggtgtcaaacccatgggctctcagtcatataattatactcgctcgtctgaacaaaacagtggcatgtttggtagattccgtacaagacgc

SEQ ID NO: 2334 - DNA, 276 bp, Glycine max
  Clone ID: 701039975H1
cccccaacaccgttaatttggacgtgagaacccccgtgaagttcgacaacatgtattacatcaacctcttgaaccgccaaggagtgttcacttctgaccaggacatcgcgggcagccccaaaaccaaggaaatcgtgaaccagttcgcttcagaccagaaactgttttttaagaaattttccgatgcttttgtgaaggtgagccagctagatgtgataacggatcgtattgggaaaggggagattcgtgataagtgctttgttgcaaataagagaa

SEQ ID NO: 2335 - DNA, 282 bp, Glycine max
  unsure (1)..(282): unsure at all n locations; Clone ID: 701039977H1
cctttctntcttgtaaactttattgattgattctgagaatagaactaagagggtatagacatggctagcgcaattgcagcttcttttttggttctgcttctggctttccccactgtatttggagctgaccatgaagttggtgacactagtggatgggccctcggagttaattacaacacctgggcctctgggaaaactttcacagttggtgacactttggtgttcaagtatgactccactcatcaagttgatgaggttgatgagagtggatacaacagctgc

SEQ ID NO: 2336 - DNA, 274 bp, Glycine max
  unsure (1)..(274): unsure at all n locations; Clone ID: 701039978H1
aagatggagatgtatcagatctgggagcaggagaatagcgttggggagcgttcgcgtttgttctgcttttcctatcggcctcagcagacgacgtcgttgtgctctctgaagataacttcgagaangaagttggtcaggacagaggagctctcgttgagttctatgctcctggtgtggacactgcaaaaagcttgctccagaatatgaaaagcttggtagcagcttcaagaaagccaaatctgttttaatcggcaaggttgactgtgatgagcac

SEQ ID NO: 2337 - DNA, 278 bp, Glycine max
  unsure (1)..(278): unsure at all n locations; Clone ID: 701039979H1
ggctacccgctgagtttaagcatatcaataagcggaggaaaagaaactaacaaggattcccttagtaaacggcgacatcaacacccgccagaccatcaccgtcctcgtcctcaacaacgccgccttctccgccgtcgccgcgaaacaccccctctccgtcgtcaagaacctcctcagcctccatatcctcctcgactacttcgacaacacaaagctccaccagatcaccaacgggaccactctttccaccactctctaccaanccacaggtaatgcca

SEQ ID NO: 2338 - DNA, 118 bp, Glycine max
  unsure (1)..(118): unsure at all n locations; Clone ID: 701039980H1
cctttctntcttgtaaactttattgattgattctgagaatagaactaagagggtatagacatggctagcgcaattgcagcttcttttttggttctgcttctggctttccccactntat

SEQ ID NO: 2339 - DNA, 283 bp, Glycine max
  Clone ID: 701039981H1
gtcaccatgactttcaagcgcaggaatggaggtcgcaacaaacacggccgcggccacgtcaagttcattcgatgctccaactgcggcaaatgctgccctaaggacaaggctatcaagaggtttctggtgaggaacattgttgaacaggctgcagtcagagatgtgcaggaggcttgtgtctacgaacaatacacgcttccgaagctgtatgtgaagatgcagtattgtgtttcctgtgctatccactctcatgttgtgagggttcgatcccgcatgataggag

SEQ ID NO: 2340 - DNA, 284 bp, Glycine max
  unsure (1)..(284): unsure at all n locations; Clone ID: 701039982H1
ctcgacctagaggctctgatgatggatattcaagcgattcggtgctaaaacacgcatccagtgatttcaagaaaatggggcaaagaatatttatattccattgttggtggagcgaccagatctgagcttaggatatgccacaagcttactggcaagctgaagagggaagttatactaggctcgtcaagtattgatgatcctgcacaatatatcacgaattgaagatgctgacagcacaggactttcattggatgatcncnagatatgacgatgtcacccacttg

SEQ ID NO: 2341 - DNA, 284 bp, Glycine max
  unsure (1)..(284): unsure at all n locations; Clone ID: 701039983H1
ccgctactctcatctcttcacttcccttctatcactcttctcacttctgagatacttgtacgaaaagaaagcanaacttacttctgaaaaattcttttgcatcagttagcatgggagatgaaaagccatttgacttcctacgcattttatttgagggcgttattgcaggaggtacagctggagttgttgttgaaacagctttatacccaatcgacacaataaaaacacntctgcaggctgctcgcggaggagaaaaactaatattgaagggcctttattccgga

SEQ ID NO: 2342 - DNA, 284 bp, Glycine max
  Clone ID: 701039984H1
gaaaagttcacccccaagcactaaattcctctaccacttgcaagcaagagacgtttaccctatgggatgaaatctctggtactgaacggaaagggatgcaccgtgtttgattcaaatggccaaattgcataccgagttgataactacaactgcaggcatagagatgaagttcatctcatggatcaaaatggcgatattttgttcactatgctgaaaaagcaatataagttgtccaggttttgggagggttatagatttccagttccaggaacaaggaatgacca

SEQ ID NO: 2343 - DNA, 281 bp, Glycine max
  unsure (1)..(281): unsure at all n locations; Clone ID: 701039985H1
cagttaagaagaaacggggtaggccgaggaaatatgggcctgatgggtcagtcactatggcattgtcaccaatgccaatttcntcgtcggctccgccttctaatgacttttcctccgggaagcgggggaaaatgcgggggatggactataagccatcaaaaaaagttggtttggattatctaggtgacttgaangcatgctctgatggtacaaattttatgccgcatatcatcactgtcaatgctggcgaggacatcacgatgaaggtgatatccttttct

SEQ ID NO: 2344 - DNA, 246 bp, Glycine max
  unsure (1)..(246): unsure at all n locations; Clone ID: 701039988H1
ggcaacgaaggcaagctgctgttgcagcnggagaggtggctcagccaantcacnacaatgagcttggtgtanccgtcgctcccatctagttatagcccaaatttgtaccttaggggaacaacacttgtatagcggtggaaataagtgcatttgtagataggtaggaacactcctttcgcaccagttcatttaacctccaaannnnaanannnnanancancnaaagnngnangannnngngngnag

SEQ ID NO: 2345 - DNA, 107 bp, Glycine max
  unsure (1)..(107): unsure at all n locations; Clone ID: 701039991H1
gttgatttagtaccagatttctgtgcctaagtaagannagancaggggctggtagttnnttggcaaccaggatgcccttcaggcagtgcacaaccattcatttcctt

SEQ ID NO: 2346 - DNA, 276 bp, Glycine max
  unsure (1)..(276): unsure at all n locations; Clone ID: 701039992H1
cttnnnganngnatnnntannttgtangattntggntgcncccatantnancccgncataactngtgtnanaatngatnggnctccacctgcaatcganggnacatttcacagnaanngnattacaaggaagaacattctcagggagtggtgcatccaagaaatggtagtcatggttctgggcctgctcaacatgctatccatattatatttcaggagttgttaatcacgttatgatgccatcatcagcacaactgtatcanaagaatatccagga

SEQ ID NO: 2347 - DNA, 277 bp, Glycine max
  unsure (1)..(277): unsure at all n locations; Clone ID: 701039995H1
tgcntggtanatctgctacctncctanncattgatttggaaaagtccaagcntcaaanatggantaagncttcatantggangcgcttngagaagctatnnncaggaatcatgactgnttccaaggaaaagaacagganatntgtggagaccattgaactccaaattgggctgtnaaactatgatccccagaaggacaagcgntttagtggntctgttaagttgcctcacattccgcgnnccaagatgaatnnngtatgcttggngatgcccaacac

SEQ ID NO: 2348 - DNA, 279 bp, Glycine max
  unsure (1)..(279): unsure at all n locations; Clone ID: 701039996H1
ctcaccgattgctagaatggaatttcgatgctcagtcatctcttttaccattctcttctctcttgcttcttgcaggagagagccatgtccatgcatcgctacctgnggaagattattgggaagctgtttggccaaacactcccattcccactgcactgcgagagcttctaaagcctctccctgcaggtgttgaaatcgatgaactccctaagcaaattgatgatacacagtacccaaaaacattcttctataaagaagaccttcatccaggcaaaacaa

SEQ ID NO: 2349 - DNA, 312 bp, Glycine max
  unsure (1)..(312): unsure at all n locations; Clone ID: 701040001H1
tgcaacaccgcgatatgaacgatgacaaaatagtttcagatacgtcgcgttgattgattgatatgaagtggttgactttctggaactgcatatctatcctcgtgttgtcttttgctttcttcttcttctattgtcacacatacacatctactccttccctcatggctgagcaatcttccaagtccatttacgatttcanagtcaaggacatcagtggaaatgatgtgagtctgaataattacagcgggaaggttctnactgattgtgaagtcgcctcacaatgtggtttgacacagacaattacaaagaatt

SEQ ID NO: 2350 - DNA, 305 bp, Glycine max
  unsure (1)..(305): unsure at all n locations; Clone ID: 701040004H1
ttattntatgatggttaagtctttggttgtattatggagggnatacctacgtgtgaccanaacnacttggctcnacatcagcgtgncttaccacgtggtgacatgagnnattctaggagtngtgtattgangtnngcaagctgctgctggtgctggagtttagggatgagggtttattttattggcagggttacatgagtttgtgatgatgtgttactgtgtttctttaggtttgaataaatgatatnactttaaaanacaaaannncannaagaccnaagaaaannacacccatncaaagcggc

SEQ ID NO: 2351 - DNA, 308 bp, Glycine max
  unsure (1)..(308): unsure at all n locations; Clone ID: 701040007H1
ggaattcttaantgtgaggcagaatatttcaatgccaacccatacgactatntagcanctaagcctnaangtggactanttccantggcnngacacatgaaggnggcagcagggaaagagngccacaagaggttaccaggagccaccnncatcccatgagaagaggaggccctgatctgcaaaattgnccctcaccatttaatatgccanatagcactatggagataaacaagaatgacctactcaaatactggcctgatctgagaanctgttaattttatngngagcaagtcattanggagnggccc

SEQ ID NO: 2352 - DNA, 269 bp, Glycine max
  unsure (1)..(269): unsure at all n locations; Clone ID: 701040010H1
gagattactctcctcgatggaaaatcattattagcttgtattgttcgcactattccagctggtggcccgaatttcgaataagttcaacgctcccnaanaggcngggcaagacgcctgcaccacgacaatggcacgannacaaaaggaagcatgggaagcnggatgattttgtggctagccatnctgaattattcttgattgagggtgactatattcagctccgtgaaggtgcacagaaaatngttgctgcaactgcagcagttgccaaa

SEQ ID NO: 2353 - DNA, 293 bp, Glycine max
  unsure (1)..(293): unsure at all n locations; Clone ID: 701040011H1
ccgatgagagggccggcccagtagatccagtggaattgctgggcttatctacgaggttgtcttcatgcaggccacacccacgagcagcttcccagcactgactacnagaggggacnnnnnnnnnnnnnnnnnnnnnnnnnnnnnattattgaatttctccggaatcttcttctgtgtatggttttccttcctttgtgtttnctttcctgttgaatcggtggccgttgatctttggttggatggttgatgatcctgaagttttcttttaagttaatttaattatcattttgngc

SEQ ID NO: 2354 - DNA, 317 bp, Glycine max
  unsure (1)..(317): unsure at all n locations; Clone ID: 701040012H1
gcgaagaagagagtgaaagagaatataggagactctgattctgngagtcgagacgagtgagngagtgntagntcgtcttatgaaatnaaatgnantcatnagtgctctggttctgatttntctgacaccaaaanggtgaatcctcgaantccacgttcaaggatnnatcantttcacacttttcacttantcntatntcnatngttctgtgnanttgagtncgagganntngataatnnnngangacncagtangganacagacnagaagagaaggaggcacgcgggncggaaagagtagaagngagaaggaagang

SEQ ID NO: 2355 - DNA, 281 bp, Glycine max
  unsure (1)..(281): unsure at all n locations; Clone ID: 701040013H1
atcacacataatataattccacaatcactcctattancnatagcaatatgatgggtgacactgagatcaaaccatcagttgaagtagtcatatgtgcttccatgaacaataacaatagcgcaaacaaccacaccctcccaaccgacatcaccaagtcatcacaatcacacttaccaatcttgaccaagctccatgctggttactttttcatatgcctttcctttggtgcacaagtttgctctggaagagttggntnnacacgagagggctcccnnccnccc

SEQ ID NO: 2356 - DNA, 301 bp, Glycine max
  unsure (1)..(301): unsure at all n locations; Clone ID: 701040014H1
ctgcctacaaaaccataaagctgaagctatgctacgcgcccattagccaaaaggaccgcggcgtggagaaagaccgaggacgagctgaaaagggacaagacctgccagcacaagatcgtggccaaaccctacgacgcttccaacaagaccgtgcagaggttcgagtggctggtcgagcgcgacgtgcccaaagccacgtactttgtacncgcctacgcttcgactccaacgacgaggaatggcttacggccagaccaccgacgccaagaagagcaccaattgttcgagatcaagngtcngc

SEQ ID NO: 2357 - DNA, 301 bp, Glycine max
  unsure (1)..(301): unsure at all n locations; Clone ID: 701040015H1
caaaaacgaacagtgtgattcttcttgccgtagatctattccattttgccattcatccatgggccgacgaattcaaattcgccgacaaagtccctccttccttcgatcacgtggctacattaattttggattgccatttcaagagcatcatattcaaactggttgtggtattatgtctatcatagtctatgacgatcctgacaaactagctctgatcacttatccagatttggctctaaatatatatccnggtttcaagggatatttatgtccagaagcnnnttctntaatgttcnnaanc

SEQ ID NO: 2358 - DNA, 304 bp, Glycine max
  unsure (1)..(304): unsure at all n locations; Clone ID: 701040016H1
gcgttggggtgattcctgtaatccatcatatggtgnattatctgttatcagttcatgcggccacgtgcacgggacaagaagcttgttgaagaatgggcagttcccttgaaaagcattgaagatatatatgagaggtttagactgtattgtcttggaaagttgagaagcaatccttggtcagaactagatggtcttcagccagagacaaagataataaatgagctgctggaaaagattaacacaaagggcttcctcaccatcaatagcctcgccagctgtcaatggggaaaagtcagattctccc

SEQ ID NO: 2359 - DNA, 308 bp, Glycine max
  unsure (1)..(308): unsure at all n locations; Clone ID: 701040017H1
attctctcactctcttactctttcactctacttctgctctncctattgcggctncngntaggtttttntttcaagcgtnctccgttcctttcaatncntcttattctctttcatctctgatggagacgttgcgggtttagttctaaggggtggttctggccttgggtttttggaacgtacggtgtcgttttggggttgggaaaacaaattctgagagatggcaaccacgaacccttttgatttgttgggtgacgacgctgaggaccctctcagctcatcgncgccgagcaactcaagcggnggctgcc

SEQ ID NO: 2360 - DNA, 306 bp, Glycine max
  unsure (1)..(306): unsure at all n locations; Clone ID: 701040018H1
acttaagtttcatcaatgttgtgtccatatttttctagtttctcctaaaaaaaaatacatncaaaagaggctgatttcttcaagcaacaaactctgtaccaaatcatctacagctagtttagctcaaataattttcaattcggaaagaaaaaaaaagtcctttccaaaatttcattgtcatccatcatcaagaagatacaaatcatcacaggcaaagtgctgttattactagattgcttacacaggcttaagggcagctatgaagatgtacccaaanccaagngtgnttaagntaganncanagnc

SEQ ID NO: 2361 - DNA, 300 bp, Glycine max
  unsure (1)..(300): unsure at all n locations; Clone ID: 701040019H1
caaaaagagagagtggaaaagatggcgcggttnatcacagtggtgtggtgcgcggtggcngtgctattatgcgccgcggccggtgcgtcgtgggtggaggaggcggcgaacccgatacgaatggtgtctggcgtggaggcggaggtggttcgggtgatcggggagtgccggcgtgcgttgaagtttgctaggttcgtgagcaggttcgggaagagttaccaaagcgaggaagagatgaaggagaggtacgagatttctcgcagaatctcagttcatccgctcccacaacaagaacgtttg

SEQ ID NO: 2362 - DNA, 304 bp, Glycine max
  unsure (1)..(304): unsure at all n locations; Clone ID: 701040020H1
ctagaatggaatttcgatgctcagtcatctcttttaccattctcttctctcttgctcttgcaggagagagccatgtccatgcatcgctacctgaggaagattattgggaagctgtttggccaaacactcccattcccactgcactgcgagagcttctaaagcctctccctgcaggtgttgaaatcgatgaactccctaagcaaattgatgatacacagtacccaaaaacattcttctataaagaagaccttcatccaggcaaaacaatgaangtacaattcaccaagcgtccctatgcacaact

SEQ ID NO: 2363 - DNA, 302 bp, Glycine max
  unsure (1)..(302): unsure at all n locations; Clone ID: 701040021H1
tgttgttgtatttgttggtgttaatggtgttggaaaatctactaatctagctaaggttgcttactggcctnttgcagcacaaggtcagtgttatgatggctgcttgtgacacatttcgatcaggggctgttgagcagctgcggacccatgctcgaagacttcagatccctatatttgagaagggctatgagaaagatcctgccgttgtggcaaaagaagcaattcaagaagcttcacgcaatggttcggatgtggttctcgttgatacagctggtcgtatgcaggataangaancattatnc

SEQ ID NO: 2364 - DNA, 303 bp, Glycine max
  unsure (1)..(303): unsure at all n locations; Clone ID: 701040025H1
ctcgagcgctagtatccgatcctctgtcctctcgaagctttcatcgtttcaacatatncttcaccatctcagtncatgggccngccatcngtacgtngggctaccgnccngagancaatgngccanaggaagcgcnggcaaggcaaganncccggagacgaacaatntncaacgaaacttgatttcgtctggtggcaatgaatcgtattatgggtattttaacaggagatcatacacttcactttatatgggaactggaactgtgggtgggattacaagtgctagaatcagggtgccaaatgt

SEQ ID NO: 2365 - DNA, 301 bp, Glycine max
  unsure (1)..(301): unsure at all n locations; Clone ID: 701040026H1
ttgggtttagaatcttcaatcttgtttgggagagagatgtanatagcttccatgggaaggtctttcaaggatncnttgaaantgcnnngaagcnganagncaccaggcnnanaccctggcgacaganangccaagggaataagaacggngcgngccggcagangagaatggcanatagtccagcagcacacctgnttctctttttggtgcaatggacagactgcaatcttgccggagcccttggactgttaagaatcctaatatacaaggtgtatgcggatgggacaactaccatgtctac

SEQ ID NO: 2366 - DNA, 301 bp, Glycine max
  unsure (1)..(301): unsure at all n locations; Clone ID: 701040028H1
gtttgaaaagaagccggtgctgtctccttgttctccatncgtaagatataactaattatttttatatctnncatcaagatgcgccgagggagaannnnnnnnnnnnnnnnnnnnnttgtggatcccacgccggaccaggccaaggagacgacgcggttccgtggcgtgaggnagcggccgtgggggcgattcgcggcggagattcgagatccgtggaagaagcagcgcgtttggctggggacttcgattccgccgatnatgcggagcnagttnctaanacagtngcnnntctcnnnntgcc

SEQ ID NO: 2367 - DNA, 304 bp, Glycine max
  unsure (1)..(304): unsure at all n locations; Clone ID: 701040029H1
gcgttgngtagaacagagnaaaagaaagtaccaatttcttgagagagaaaacccgaagaagagtcntgnnttcnaacttgcgacgccttcncccgtcgacgacgaccanttcgccgccccctccgccgctgacaccttctccggctacggcgacttctctactttcccctccgacgatgtcnccgtcgaccacgccgccaccgcgggtncgccggagatcttcggattcagcgatcccgatccaggntactccccgtntcccttcgagcaagtgcacgaataggaggnatangnnacccccaac

SEQ ID NO: 2368 - DNA, 192 bp, Glycine max
  unsure (1)..(192): unsure at all n locations; Clone ID: 701040030H1
cctcagtttggtggattttgcgtgcaacangaattcatcttccatattgcacgcaaactggaagatgaattcatgttttttcagcaanaagctncagtttctgagtccagtgttgtttagtgatgtanttggaattcagttcctagttatgaccctagtgtaattcttttacttaggtctaccttattatta

SEQ ID NO: 2369 - DNA, 298 bp, Glycine max
  unsure (1)..(298): unsure at all n locations; Clone ID: 701040031H1
caggcctgagcacagtcgggatgagaaagtgaaggttcttgaatcagtgctccctattaatgatgangaggntgttctggacaatatganggctataaagatgacccaaccgtacctgatgagtctaacaccccaacatttgcaactgttgttctgcgaatacacaatgaaagatgggaaggtgttcctttcatactaaaagcagggaaggcactaaattctagaaaggcagagataagggttcantcaaggatgtccctggtgatattttcaagtgtaaaaagcagggagaaatgag

SEQ ID NO: 2370 - DNA, 305 bp, Glycine max
  unsure (1)..(305): unsure at all n locations; Clone ID: 701040033H1
ctcatacactgatcntgggactggatttaagacaagtggtggcgggtgncctcaccctcacnatggnccgtacangcngatacacatgatcaaaaganaccattttcatgctgttgatgataaacttcctggaacggaggatgtcagcnttganagtacaaactttgatactactcatgttagaaagaacatcgggatttggaagggcgatggnnatgagtnaaanccaggttggctnnagccatcngaagataacgtggntcacactgangngtgagtnnacngtnctnnnngcaatggncnna

SEQ ID NO: 2371 - DNA, 300 bp, Glycine max
  unsure (1)..(300): unsure at all n locations; Clone ID: 701040036H1
cccttttctatttgagcatcatcatgtccaccgcagcgcagcccanggccaagaaaacgggcgtcgtccaagaagcccctctcccatcctaccttcgccgtgatgatagcggaggcgataggagtctgaaggagagaaccggttcgagccaatacgcgataaccaaattcatcgaaggcaagcacaaggagttgcctccaacctacaagaagcttgttctcgttcatctcaagaagtctgttgctgctggcaagctcgttaaggtcaaaaatctttcaagctcgcaccgataagtctgtc

SEQ ID NO: 2372 - DNA, 305 bp, Glycine max
  unsure (1)..(305): unsure at all n locations; Clone ID: 701040039H1
tttggaaggaagagagaaagagtttctggttttcctttcaacgatgagaagtttgattcattttngtnctccgtacgcntnngtgngctggagcntccgaccgaaagggcngcaacgggccgaacgncgccaacggangccgcggcaaggagtccaccttcgacctcgccactcagggctgctgcggttctcgtgtttacaacctctcctctggcgagcaatgctgcggtgacagcctcttcaaccccgtcaacaanacttgctgcggtgtcggatcnagcgcccgagtcgnctctggtttgggc

SEQ ID NO: 2373 - DNA, 299 bp, Glycine max
  unsure (1)..(299): unsure at all n locations; Clone ID: 701040042H1
cgtgagacaagcagaaatcgcggcggctacggcgatttcttcagctaggctgtttttccggcgtccaccggaagtcgcacctccggcgccgctcggnctcagggcccggcnccgcgcaccaagtcancggnnggcangaggcnggagaggcatgacacggatactgctgggtctgatatcanaaatacactaagttatgcagttgatgtgtcaaagctacatgttgaagaaaagaagaactcatattcaanaaaagatggccatgatgctgaaaanatagggtttggagaggcaacaca

SEQ ID NO: 2374 - DNA, 299 bp, Glycine max
  unsure (1)..(299): unsure at all n locations; Clone ID: 701040044H1
gttgccgattctantnacgacatgantngtggtttagaccagnanattaangaaataaaagaggtcattgantnancaatcnaaacatcctgaggctgtttgganagattggaattgcacaaccaaagggtgncctgctctatgggccacctggtacaggaacnacattgttggctaggggcagtcgctcatcatactgactgtacattcatcagggtgtctggttctgaattagttcagaaatacattggcgaaggttctagaatggtcaggnanagntnaagnngaaaagaacancc

SEQ ID NO: 2375 - DNA, 250 bp, Glycine max
  unsure (1)..(250): unsure at all n locations; Clone ID: 701040049H1
gagaaagtgcagacagataagttnantgtataactacgttntggnatncngagatntgtnacaanccaangngatcatnactggagcttgcagggtgnggnaatganccnnctagtacatgtaggcatggctgagncccattgngaaggatgaagtcagaaaaggtgttactaataancctggaattgcagctnggcnagtnagagatgcatgttcatgantgcttnattagagggnaagcgngcnngca

SEQ ID NO: 2376 - DNA, 243 bp, Glycine max
  unsure (1)..(243): unsure at all n locations; Clone ID: 701040050H1
caacctcatatgagtcatgaagatcgtagcttagaggttgcttctatttatttggtggccatttttcaagtgttgttcttactaagttcaaggaagcgncaaatcaaaaagattcaagacaaggaagcaagattagaaatgttgatatcaattcaggctgctttagagctttcttatttgttctctttgtagattaatatggttgattgtgtatgatttcatcaaattattgtgaaattcttt

SEQ ID NO: 2377 - DNA, 299 bp, Glycine max
  Clone ID: 701040051H1
ttcaatgccgttatactcaagagattgttcatgagcaaggttaacaagcccccattgtctttgtcaaggttgattaagtataccaaggggaaggaagataagattgctgtggtggtgggcaatataaccgatgatattcgtgtttatgaagttccagccttaaaggtcacagcactacaggtttacagagactgctcgggcaagaattgagaaggcaggtggtgaatgcttgacgtttgatcagttggctctcagggctcctctgggacagaacacggtccttcttagaggcccaaaga

SEQ ID NO: 2378 - DNA, 301 bp, Glycine max
  unsure (1)..(301): unsure at all n locations; Clone ID: 701040054H1
cgaggatccattggagggcaagtctggtgccagcagccgcggtaattccagctccaatagcgtatatttaaagttgntngcagttnaaaaagctcgtagtnggaccnngggttgggtcgancggnccgcctccggngnccaccggtcggctcgtcccttctgccggcgatgcgctcctgtccttaactggccgggtcgtgcctccggtgctgttactttgaagaaattagagtgctcaaagcaagcctacgctctgtatacattagcatgggataacnccacaggattctgancctatcnc

SEQ ID NO: 2379 - DNA, 302 bp, Glycine max
  unsure (1)..(302): unsure at all n locations; Clone ID: 701040057H1
ttttntctctcgttttttctcaaaaagttgcaagagttaaagcaaaaaccaaagtgcanagagaaaatgangaaggccatccgatganacanatntctagcactcagncgccacccgaggngcctcncancacncccgccgaggcnacgcctccgagccggngccggagcgcaaggtggccgttctaggtgccgccggcgggatcgggcaacccctctcccttctcatgaagctcaaccccctcgtttccagcctctccctctacgatatcgccggaactcccggtgtcgccgccgatgtca

SEQ ID NO: 2380 - DNA, 297 bp, Glycine max
  unsure (1)..(297): unsure at all n locations; Clone ID: 701040058H1
gcagaagaggccgtaacttgtttgttgggaacttgacctatcccaaganacgaatatcaaccaaacccattatttcatnatanggaatataaggnanccccntcanccccgacgcgcctanggnnttgngagcaacccgaanccaccccaacccaaccctattgaattgaattgggggaagaagaacatagaaagaagaagaaaaatctgcacaattgttgtaattgaacgatgtctgctgcggtgtgcggaagcaagagatctttgttcgaagagcttcccccttccccgccagta

SEQ ID NO: 2381 - DNA, 294 bp, Glycine max
  unsure (1)..(294): unsure at all n locations; Clone ID: 701040059H1
ctcactttcatttctacatccctggctctgttccgtcgatgacgatggcgtttagggtgngannccctgacatnccgctttctcatncttcnctctctcttgtccatcacttccgccaaggtcttcttcgaggagcgtttcgatgacggatggggaaatcgttgggttaaatcagattggaaaanagatgagaacctggctggggagtggaaccacacctctggccaatggaatggagacgctaacgacaaggtattcanaccatgaggntgcngntncanngnctatttccac

SEQ ID NO: 2382 - DNA, 294 bp, Glycine max
  unsure (1)..(294): unsure at all n locations; Clone ID: 701040062H1
acagaacaaagggaaggctacaccaactatcaacagcacatgctttggatgcataagtagttgaaggaagctgctcgcgttcggggcaaaaagaataatgcatctgctgaaaaattacgaattatgagtccattactatgattttntagatgagtttattaaggtttcctagggatccataaagattatgattttctcatgctcgcgttcgggccatgattgtcataaacctcaatgaggtttaatgtacttattacttatcgctatcaacactaaatttgggttgcnggtaac

SEQ ID NO: 2383 - DNA, 299 bp, Glycine max
  unsure (1)..(299): unsure at all n locations; Clone ID: 701040065H1
cttttctcttctctgtctnaggggtgccctgagatcacattgaacaatggtgaaggctgtggccgttcttggcagcagtgagggtgtcactggaactattcacttcgttcaggagggaagtggtccaaccaccgtaactggatctcttgctggtcttaagcctggtctccatggtttccatgtccatgccttgggggacactaccaatggttgcctctcaactggatcacatttcaatcctaataacaaggagcatggtgcccctgaggatgagaatcgtcatgctggtgatcttggga

SEQ ID NO: 2384 - DNA, 294 bp, Glycine max
  unsure (1)..(294): unsure at all n locations; Clone ID: 701040066H1
gcgaagaggcgcacgtnagcagtaactcgtggaattgctagcaatgngcgaggntcaaggtttacgagctgaggcagaagacgaaggctgatctgttgantcagctgaaggaccncaaggccgagcttgccttgcttcgtgttgctaaggtcaccggcggtgcacctaacaanctctctaanatcaaggtggtgaggttgaacattgcccaggttttgacggtgatttctcagaagcagaaggccgcgttganggatgcctacangaagaatantatnncctcactccncntnc

SEQ ID NO: 2385 - DNA, 297 bp, Glycine max
  unsure (1)..(297): unsure at all n locations; Clone ID: 701040067H1
cttagccgaggtcacgaggagnancagctagtttcacaatttncaaatggntaggggttgangaagcatctcaagaggctcaatgctcctaagcattggatgcttgacaaactgggtggtgcatttgcgcccaaaccctcatctggaccacacaaatctagggattgccttcccctcatactcatcctacgaaaccggctaaagtatgctctgacttaccgtgaagtcatcgntattctgatgcagagacatgttcttgttgatgganaagtcaagntggacaagatttancctgct

SEQ ID NO: 2386 - DNA, 296 bp, Glycine max
  unsure (1)..(296): unsure at all n locations; Clone ID: 701040070H1
cagtgagctcattatatgttcctgttttctatttattgaaagcagagagaaacagccaanatattatcttaaaaaaaattgtgttattgctgatgatgcattatagtctttaactgccatgttgagagattgattttttactgaactctgtattgtagtngcctcgtttagctgtacataaacatgttcctgtgtctttcataaaccattttgtaaattaagtctaatgtttatcaatagtgtgttaatgtttgaactttgaaaaanaaaaaaaaaannggggggnngcngantat

SEQ ID NO: 2387 - DNA, 293 bp, Glycine max
  unsure (1)..(293): unsure at all n locations; Clone ID: 701040073H1
gnaacgcgttgcgttgtcggaaaatcaccctncacctggggttttagtataccaatttgaaggtttttaatgantgangccgaaactctggnctgaactcangganatgnaagancactgtggaaggcncnaggngatggccggatcagaacctgttagggcagagggagagactatggctgtggatgctgccccaaggaagccccggattctacttgctgcgagtgggagtgttgctgctgtcaaatttgcaaatctttgtcatgtttctctgaatgggcagatgtaagagc

SEQ ID NO: 2388 - DNA, 299 bp, Glycine max
  unsure (1)..(299): unsure at all n locations; Clone ID: 701040074H1
gtgggagtcatcaagaacgtggagaagaaggatcctactggagccaaggtcaccaaggctgcccagaagaaggaagtgaatcgtggcggttngggncancagggggangncgaatccnangggngacaanaaaagnnngggcnncntgcccatgagactncgtttctaggtagcttgtttttcggacatagtttgaagtctccaccatcatctcgcaacttttgttcccagaattgggttcttgatcgacggtggcaagactccttttatcattctgttttaatgtgttgtgtttgtga

SEQ ID NO: 2389 - DNA, 294 bp, Glycine max
  unsure (1)..(294): unsure at all n locations; Clone ID: 701040075H1
aatttcttatcttgaaattttgcgcagtttcagatttagaattgttgatcagaaaaggttgagggtgangacnagagactcagtgaaaagcaagtatggggatggactactatgggattttggaggttgacaggnatgcctcagatgaagagttgaagagagcctacagaaagcttgcaatgaaatggncaccctgacaagaacccaaccaataagaaagaggctgagattcaattcaaacagatatctgaatcctacgaggttcttagtgatccccagaagaganntttgtcg

SEQ ID NO: 2390 - DNA, 291 bp, Glycine max
  unsure (1)..(291): unsure at all n locations; Clone ID: 701040076H1
ctcgcatcanaatcacaggttcagtttctgtggattgttgtaaaanatttcctttaggttgaaanntggagtgcncggctcaggatattatgatgaatggaaatggtactcagactgagtattggggcgaaagttcgggttcaacttcccatagcagtcagcaggatgtggaggatgacaggatgattgctcttgtgctgtcagaagagtatgccaaattagatggagcagttggtcggcgccttaccaattggaacctgttcctcatgtaccccggataaanncctttnc

SEQ ID NO: 2391 - DNA, 303 bp, Glycine max
  unsure (1)..(303): unsure at all n locations; Clone ID: 701040078H1
tnngaagagaagcaagtgtttgatggagannaggctaatttgctagttaaagatctnagggaganctttaattcanggnatgncataaagcagctatggatggaggggttcccagttggaagccatagctacgatgttagaagagnaagagaaggaaattactgaagctctatataaggnccttgganaacctcganntcnaagcatttatnaccggagnttcnccangnnaaatcctcatgtnantcaaggacttaaagagnnnnnnncatgggtgaaagcctgagaaggtnanttcttccc

SEQ ID NO: 2392 - DNA, 295 bp, Glycine max
  unsure (1)..(295): unsure at all n locations; Clone ID: 701040079H1
cactgttgcagaatccagtttgtgacaccaaatccaaatcactattcactatgactacttcagacccaagaggagcttcttgctcaacatctcgaacagcaaaagatccatgatgatgaacctgtcgtcgaggatgataatnnnnnnnnnnnnnnnnnnnnnnnnnnnnnnnnnnnnnnnnnngatgaccatgccgacggactagaaggtgatgcatctggtaggtccaagcagaccagaagtgaaaagaagagtcgcaaggcaatgcttaaacttggaatganacctgtaacag

SEQ ID NO: 2393 - DNA, 118 bp, Glycine max
  unsure (1)..(118): unsure at all n locations; Clone ID: 701040081H1
gcctcanaaaagcaaaganccaaacaaaccanggacgagaacacgatgttgctgaacttgcacntggtntattggttttggctctgtttctgcacttgcgntcccacacccactgcaa

SEQ ID NO: 2394 - DNA, 295 bp, Glycine max
  unsure (1)..(295): unsure at all n locations; Clone ID: 701040082H1
tacaatctatgccccatgatgcacatnccatgggtgtgttgtnaatgncatgagtgctcttnctgtttntcatcctgatgcaaatcccgctctcagaggtcttgatatttatgacncaaagcaaataagagacaaacagataacacgggttattggaaagataacaacaattgctgctgcagtttatcttagaatggcaggaaggccacccgtgcttccatccaacctcctttcntacacagagaacttcctatacatgctagattctttggcaatcggtcatatnaaacccnat

SEQ ID NO: 2395 - DNA, 293 bp, Glycine max
  unsure (1)..(293): unsure at all n locations; Clone ID: 701040083H1
aaatccactgaaggtttccagtcacttccttatgttgtngcactgttcagtgcaatgctttgganttactatggctttcgtgaaaagggaaactgccctccttctcattaccattaacacatttggaattgttgtggagtcaatttacctttctatcttcctaatttatgccccaaggaagccaaggcttacaaccatcaagcttcttctcttactgaatgtgtttggattcggggccatgcttctatcaactctctacctgtcaaagggagcaaagcgtcttgctatcatag

SEQ ID NO: 2396 - DNA, 298 bp, Glycine max
  unsure (1)..(298): unsure at all n locations; Clone ID: 701040084H1
gaaattcaaaagcaaagcaagaatcatgaattccaatatttgcaattggaagacaaaanangggntantncncagaagaggaagcaaagggggatgacacttacctctcagcctttgacactatgcttcagccgaattttccctgcaatcttgaacgctgctgttgatctgaatttgtttgatatcatagccaaggcagagagttcatctttgtcagcctcggaaattgcttctttgctgcttccaaatccacacccncaattggtcaataggttgaacgcatattgcctgtgtggaa

SEQ ID NO: 2397 - DNA, 96 bp, Glycine max
  unsure (1)..(96): unsure at all n locations; Clone ID: 701040085H1
caaacccantntgtgtgtccaaatagaatctcagtggtaaccacaagagtcttgccacctnnanncncaaggncantttgcggtccacagnanacg

SEQ ID NO: 2398 - DNA, 297 bp, Glycine max
  unsure (1)..(297): unsure at all n locations; Clone ID: 701040086H1
gcaagtgtagctgggcaaggcatatgagctaggcttggctactcgtctccctcgtcctccagaatcttggacaagtatnctgagagccgcaagtannnctcccgtcnacagnaaccataggngaattanggggcaagtcacttgactttggctgtaataaacacatgtcttggtggcatgtgtgagttgttttatgtaacttatgcataagtgagtggttttatgctatttattatgaaatcaccaaaactgcaggtgaagtatgcttttggtnagggcaaacaacatgnagcnctt

SEQ ID NO: 2399 - DNA, 292 bp, Glycine max
  unsure (1)..(292): unsure at all n locations; Clone ID: 701040089H1
tctgtcactttttcactgctattcgtgggtgctnagtggtgggttcagcaatttgggaagtcttngcncanttnaacatcgncnccgnatgcnnncnggaagcccnaanantcaaagcaaggcagtgtccaaagacancccnggagnnacaccaacagtcacatgcaatgtnagtaatgtttatnangttgtgaaggcnaanaacggaagcatgccanttgcnttngcaatgctttanccatttgttgtactcgtgggangngtgcttgtntgggattatttgtcgncatta

SEQ ID NO: 2400 - DNA, 294 bp, Glycine max
  unsure (1)..(294): unsure at all n locations; Clone ID: 701040090H1
gggtttgtctctcttcatgaaacaaacagaacagagcactctggttctctttctctccacttnccccaccatgccccgccccggttccaaacctttacgattgcctcaaaagagcctggcacagtgaaatacaccaacccatcagaggaactctcattcaagaaattttcagggttgtcaacgagatacatgggtcttctactaagaagaacaaagagtaccaagagaagctacccgttgttgtgctcagggcagaggaaattatttacttctaaagccattccgaggctgaat

SEQ ID NO: 2401 - DNA, 291 bp, Glycine max
  unsure (1)..(291): unsure at all n locations; Clone ID: 701040091H1
ctttagcaaagcttgatcctgaatatggnctctatacgagtgtggtgccanctcttatnctangcnttaatggggaacttcaagaganatagcaattggacccgtggccgtggtatcgcttcttttgtcatcaatgattcagaaattaatagaccctgccattgatccaaatgggtanagaaagcttgttttcactaccactttctttgctggcatatttcaagctgctttggactcttcaggttggggttccttgtggatttccggtctcangnggnnatttgnggntcc

SEQ ID NO: 2402 - DNA, 291 bp, Glycine max
  unsure (1)..(291): unsure at all n locations; Clone ID: 701040092H1
ttctttntcttttgatttgggctttcggtttcacgtaacatancgcatccgtttgcagaaaagccaagcttgtcttcagtttctctttgtccgctagtanacagaatattacaaagtaacggctttctgagtggagcgcttgatttcgtttggtgggtcaacttcaagtttcgattttnttcatttttctctcgtcgattganaaggctcagttgcagagacagtgggggtgggacggttatggcttttgcccaattttgnttgcggaaatggttcgactcgcaagngacc

SEQ ID NO: 2403 - DNA, 295 bp, Glycine max
  unsure (1)..(295): unsure at all n locations; Clone ID: 701040093H1
attttgtaagacatnagatctcctcacgaatgctggtgncccaaagccaaaacggacncacanaggaagataacgncgtcgtatggcaaccctnaaatgaagtgcaagaaacatacctcagaccttagcagcaccgtcggngtctgcgcctcctgtctaagggaacgcctcatatncctcgccgccgcccaggcccaagcccaagcncatcacccgcaggnccaattaacgcgagtcatctccacgngcctccgacgattattccagaaattcagacctgaaccttncccacgtt

SEQ ID NO: 2404 - DNA, 290 bp, Glycine max
  unsure (1)..(290): unsure at all n locations; Clone ID: 701040095H1
caaataaacatatattgagaatggagggttgtgtgaagaagttgctatgncttgttgggtttgtggtgcttgtnagtactattngtggggtggagagtgctggtgaatgtgggaaatctacaacccctgataatgaggcttataagcttgcaccatgtgcctcagcagcacaagatgagaatgctagtntttctcagagttgctgtgctcaggtgaagaaaattgggcagaaccctattgcctctgtgcanttcttctctctaacacagccnaaatggctggcgtcaacc

SEQ ID NO: 2405 - DNA, 85 bp, Glycine max
  unsure (1)..(85): unsure at all n locations; Clone ID: 701040096H1
ctttgatttcggttccgaagggaacaaccaacgaccancctctcttctgacnccacttnttcgaancttccanacatgnncacgc

SEQ ID NO: 2406 - DNA, 249 bp, Glycine max
  unsure (1)..(249): unsure at all n locations; Clone ID: 701040101H1
ctctttcttccattctctaacgctactcagcatcaacacagtgtcacatccattaacgtgctntggtgtttagttaggaaacaccggtggtaaaattgtacgaagcagaaagaacatggctccgtctagcaaggctgagaaaaaggctgccgtggatgcagctgcatggatgttcaatgttgttacatctgttggaatcatcattgtaaacaaagctttgatggcctcttatggcttcagttttgccac

SEQ ID NO: 2407 - DNA, 270 bp, Glycine max
  unsure (1)..(270): unsure at all n locations; Clone ID: 701040103H1
gganatggggcttcaccaagtttagccgttctgattatctcaagttnccctggtcgtcaaaagattattgttaggcaggaaatgggggnttcaccaagtttagccgttctgattatctcaagttcaagtcagagaatagaattgtgnccgatggtgtgaatgctaagcttcttggttgccatggnccattngccaaccgtgaacccggaanggcctttttggaatantgnnactgggnncttaggccggttggnaattggaaaagctagc

SEQ ID NO: 2408 - DNA, 267 bp, Glycine max
  unsure (1)..(267): unsure at all n locations; Clone ID: 701040104H1
ggnactgactcanacccacaatagtcgggggcagcttcaaagtacctccacattggnctcctnantcttactgttctcttctcttctcatcatttgtattttttccaatcaaaccaaacaaaacataagcaccgctcttttctctccgaaatccccatctcccttcacttctgagctctggacgagatcccagatctcaccatctttcacgcactcttccatcngattcaccctttcgtttaacgcaaactcataacttgaaggtta

SEQ ID NO: 2409 - DNA, 264 bp, Glycine max
  unsure (1)..(264): unsure at all n locations; Clone ID: 701040106H1
cggggactgggaaganttnccttctgtgctgtnctattgcgntaantgatggatatgcagtgatgcctggaatgagtttgagctttttctgaggaagattttatggatgggtgtagtagtcaagatggtancatcattggacacgaatctcactcaaggcggtctaggaagcnctcaggaagtcgagcatgggaaagaggtagtgaggcagatcaaggagagggtggctatgatattattttgatgacagagattccatactct

SEQ ID NO: 2410 - DNA, 253 bp, Glycine max
  unsure (1)..(253): unsure at all n locations; Clone ID: 701040107H1
cgaaagctttgtttttnctgcgatcattttccattgggtggaagaaatntctcaacctttagtcgaaagagcaaggatctgagtgagtgagcgatcatgtgtggtggtgcgattatctccgacttcattccancgggtcccgccggcggggcgcagcgcgtgaccgccgacatcctgtggccgaatttnaggaagcggttctcgaagtcgctgctggacgatgattcnaggcagggtcanagaantcgaggat

SEQ ID NO: 2411 - DNA, 266 bp, Glycine max
  unsure (1)..(266): unsure at all n locations; Clone ID: 701040109H1
cttcaatcacactaatggctgtcaccttctcagatcttcacaccgnagagggcattcaaatccctcgatccaattcctttctgggaaaacctatatctctggggatcaattgacaaaggatgatatcaaagtgtatgcagctgttgtggaaaagccaggagactcttttcctaatgctgctaagtggtacgatgccgtctcttctcaacttgctccaagcttccctgggcacgctcaaggggtaagattcagtggcgctgctgctc

SEQ ID NO: 2412 - DNA, 261 bp, Glycine max
  unsure (1)..(261): unsure at all n locations; Clone ID: 701040110H1
cggcttcaaccttgtagttattctctttcttcttttttagccanccctctcttgaaaaatctagatctcgttcttccttgatctacgttacgcttttagtgaccggatctgtatggatctgaaccagatctacacgccgatggtggttttggcctggtacaataaatcttccatcggagttttgctctgtataggttcgatccatcgttattagcgtcttgatattgttatattcatttgtcatataggtcttcatagatc

SEQ ID NO: 2413 - DNA, 262 bp, Glycine max
  unsure (1)..(262): unsure at all n locations; Clone ID: 701040111H1
cgaagtttcacatcagccttatccagtttagggtttcggttccttaccctaccttttgacgtatcgaaaccttaaatttgggattaggtctgagcaatctggttggtagaacctttggtcttagagagtcaagttttatgtctggattagacgatcaaattcctactnccttcgatccttttgctgatgcaaatgctgatgactcgggtgctgggtcaaaggagtatgtgcatattcgcgttcagcagcgaaatggtaggaa

SEQ ID NO: 2414 - DNA, 261 bp, Glycine max
  unsure (1)..(261): unsure at all n locations; Clone ID: 701040112H1
ctgctgttcctgcgcgtgaacaagcctcaggtaagccaaagccatngttaagcctaaccatgttatccccaacggacacttccgtaagcactggcagaactatgtgaagacctggttcaatcagccagcacggaagacaagaagacggttggctcgtcagaagaaagctgtgaagattttccccagacctacagctggacctcttagacccattgtacatggtcaaactttgaaatacaacatgaaagtgagagctggaag

SEQ ID NO: 2415 - DNA, 263 bp, Glycine max
  unsure (1)..(263): unsure at all n locations; Clone ID: 701040114H1
gtacttagcgatctccgtgaatacatagtaacacaataaaccacctccgcgccgagncaancctacccagtgaaccctaccgcaccgaaacaaaaccctcgcaaaccctaaccctaatctcataggaacatggacggcgacgacgagacctcggntccgatgatcgacgaaatctacgccaacggggtggcgtcggcgacgacggagacaagcggagccgccgcgcaatcatgagcggcgaccagctcgacatcgaggcgtac

SEQ ID NO: 2416 - DNA, 262 bp, Glycine max
  unsure (1)..(262): unsure at all n locations; Clone ID: 701040115H1
ctcacgcgaanagnaaacacgaactaagaatccatggcgacaccaacgacgacgaagagaaaaccggtgttcgtgaaggtggatcagctaaaacctggcaccaacggccacacgctgacggtgaaggtggtcagctccaagccggtgaagacggtgaccactcgcggcggtcgatcgtcggtgctcgcggcgcgcccgtcgcgcatcgccgagtgcctcgtcggagacgaaaccggaaccataatcttcacagcacgcaacg

SEQ ID NO: 2417 - DNA, 261 bp, Glycine max
  unsure (1)..(261): unsure at all n locations; Clone ID: 701040116H1
tcttgcttcttgcttctattacttgcttctttcttcaccatgtcacttgctgggaaaatcaccactgaaattggggttcatgcaaccgctgcaaagtggttcaacctctttgcaacacaacttcatcatgttcaaaaccttactgatagagtacatggaaccaagctgcatcaaggtgaagactggcatcacaacgagacagtcaaacactggacttataccatagatggtaaggctacaacatgtctggagagtantgaa

SEQ ID NO: 2418 - DNA, 263 bp, Glycine max
  unsure (1)..(263): unsure at all n locations; Clone ID: 701040118H1
cttttgtctctgaatactctctactcaatacattgcgctctagtctcgtctcaaatattaattttaggttcttcgttacgcgttgtgttgcgttgtgcgtgagaaagtgcgcgtggtgaaaaagcatggcttctcagctcctgagacgaaccttcggaagtcgtttccttgcaaaccctaaggccttctcctccgctgcttccactccgatccgcgccnctctcttccccggcnaggcatcggccccgagatcgccgattccg

SEQ ID NO: 2419 - DNA, 264 bp, Glycine max
  unsure (1)..(264): unsure at all n locations; Clone ID: 701040119H1
gcttcagatggtggtgttggagctgattaggaaggtttgtaggagcaataagggggagaaggggaagtacattaagatcattatatcccttttgaatgctccttccactgctgttatttatncaatgtgctagcacccttgtgtcactctcttctgcacccactgccattagggctgctgctagtacttactgtcagcttttactttctcagagtgataacaatgttaaactcattgtgcttgatcgtttgaatgagctcaaga

SEQ ID NO: 2420 - DNA, 263 bp, Glycine max
  unsure (1)..(263): unsure at all n locations; Clone ID: 701040120H1
gnnatttgtgggacaatgctactttggaattccttganatgtngantgaaggagttggctagtatttgcattgatgaaattatattttgcccagagnttttaatcacaaggagtgtaagggaaataaaatataataaaaattcagaaaagtacaagtcaaacccctctaattcatcagggtgaacatgttgtcgttccctttccctcctntttgaattacaaattgtccgcttnatnttgttctttcaattttgctagttata

SEQ ID NO: 2421 - DNA, 265 bp, Glycine max
  Clone ID: 701040121H1
gaaatctcagtcgaagcaagcaatgggcaacgttcagtcacctcccaacaatggatcctcgatatgtttcagcaaccagagcttttactcaaaaggaacttgaagacttgaggtctctgttcatcaatctggcaaatcaatcccagagcaacgggaaatacatctctccctccgtttttcagtcatattttggacttcatggccctcttggggagaggatgtttgatttagttactcaggagcgcaaggatcagaggctaacctt

SEQ ID NO: 2422 - DNA, 262 bp, Glycine max
  Clone ID: 701040122H1
ttgtatttaaggttgagttgaatactaaggaacatcgccacccactactccaagtttgcttcttcttggtctttgttgtctcgccattcctcaatcctcaaccctctctctgtgtctttttcttcatttcatagccaaggtgttggtggtgatgcattgccatcttacatgcgtggagctgtgtattgggaacccaacaagcctctcaccatcgaggaatttaacatgcctcgccccaaggccggtgaagttctcatcaaaa

SEQ ID NO: 2423 - DNA, 264 bp, Glycine max
  Clone ID: 701040123H1
ctaacactcattaattgcaagaatggcacttcgttgcttggtgatgtccctttctgttctcttcactcttggtcttgcgagagaaagccatgccagagacgaagatttttggcatgctgtttggccaaacactcccattccaagttcattgcgagatcttctaaagcctggccctgcaagtgttgaaatcgatgatcaccctatgcaaattgaagaaacacagtacccgaaaaccttcttctataaagaagaccttcatccagg

SEQ ID NO: 2424 - DNA, 263 bp, Glycine max
  unsure (1)..(263): unsure at all n locations; Clone ID: 701040124H1
gtttgttagaaaaaggctacgaacttgtatctggtggaactgacaaccatttagtgttggtgaacttaaganacaaggtaaatgatgtgatccttttctctgaaaatttcttggttatatttgtctcataaagaaacccagatagtgccanattgtgtttacatgtcaaatagacctgttcagagcagcctttctatgcttggtttaaatcatacattgagtacttggtgagaatggaaaatcagctattagtatggataaat

SEQ ID NO: 2425 - DNA, 264 bp, Glycine max
  unsure (1)..(264): unsure at all n locations; Clone ID: 701040125H1
gttccccttcgcgtctctctccaaacaaaacagaactgaactcgctgactgaanctccgcaaaaattagggttttgcagtgatggcactgtccaaccgcgtccgatcgggaatctctctcttcaccaaatccacgttcctcactttcgagcgatccactctccaacgatcccttgttgccccttccatttccttcgnctccagaaattacgccaacgtgccggggcaaaaggaaaacaaagttaaggtccctctggctttgttt

SEQ ID NO: 2426 - DNA, 264 bp, Glycine max
  Clone ID: 701040126H1
agaatatcaaattggtctcttgtcttcctcctcatctctacactactccacatagaggcccagcctctcaagcccaagcccaagcccaagcccaagcccgttcataaaatcctcctgcagcagcacccagtacccagccctctgcgtctcatccctctccgtctacgcctccagcatccaacaggaccctcaccaactggttcagacagcactctccctctccctgaaccgcacccaagccaccaaaaccttcgtggctaactg

SEQ ID NO: 2427 - DNA, 264 bp, Glycine max
  Clone ID: 701040127H1
cactgcgagagcttctaaagcctctccctggcaggtgttgaaatcgatgaactccctaaggcaaattgatgatacacagtacccaaaacacattcttctataaagaagaccttcatccaggcaaaacaatgaaagtacaattcaccaagcgtccctatgcacaaccttatggtgtatatacatggttaacggatattaaagacacctctaaagaaggatatagttttgaagagatatgcatcaagaaagaagcgtttgagggag

SEQ ID NO: 2428 - DNA, 262 bp, Glycine max
  unsure (1)..(262): unsure at all n locations; Clone ID: 701040128H1
gaaaaaaatggagaactatcagtacccggcgtcgtaccctgactccggcgagttcctncccgcgctcgcgcgagatncgacttcgagaacccgccgccgtgggacgagcagcagaaccaaaactacaaggccaagttcatgtgcagctacggcggcaagatccagccccgcacccacgacaatcagctctcctacgtcggcggcgacaccaagatcctcgccgtcgaccgctccgttaagttctccgccttcctctccaagc

SEQ ID NO: 2429 - DNA, 262 bp, Glycine max
  Clone ID: 701040129H1
caacaagcacttctcttatttcctatcacaccctattacagattcacaagcgcagacacttcaaatggctctggaagctcttcaatcacccagaactgccactccatcgtttagtccctttgaagaaaccaacctcagttacttggagacaccgtggaccaaaggaaagcgttctaagcgtagccgacatggagcagcaactgcaacactcttcatgcaccgaggaagagtacctcgctctctgtctcatcatgctcgctcc

SEQ ID NO: 2430 - DNA, 209 bp, Glycine max
  unsure (1)..(209): unsure at all n locations; Clone ID: 701040130H1
gccatgggntctctccaaaaccacctccgaatccgacgtctctgtccactcaaccttcgcttctcgatatgtcagaacttcgcttcccaggtttaagatgccggaggagtcgataccaaaggaggcagcgtatcaaataataaacgatgagttgatgttggatgggaacccaaggttgaacttggcatcattgtgacaacctggatgga

SEQ ID NO: 2431 - DNA, 161 bp, Glycine max
  unsure (1)..(161): unsure at all n locations; Clone ID: 701040131H1
ataggctttccataaaccaaatgttacttttaaatgcccaaagcttatcaagcctcttttcttgaatggggattggcactctttattgaggttttgacatgagaaattttatatcttctgatttgatttgatggatattttctgcaaaaaaaaaaanaagg

SEQ ID NO: 2432 - DNA, 260 bp, Glycine max
  Clone ID: 701040132H1
gttgaaattgcaggtattgtttgtctgtgaatgtaatcgcatttgtatacgctgcgtttcaagcgtgtgatctggcgtatcaggtagtaacgggaagacgcataatcaatcaccacctgcgttaccactttgatttcttcatggatcaggttttggcgtatcttttggtatcggctgcatcatctgctgctacacgcgttgatgactggcaatcgaattggggaaaagatgatttcacagagatggcgagtgcttcaatt

SEQ ID NO: 2433 - DNA, 266 bp, Glycine max
  Clone ID: 701040133H1
gcggggaagagttagtttcttctctcttcgatggaaggcggggaagaggttctcccttcgggccaccgccacctccgccgccaccggcaatcccaccgcttcgcctcctccgctcgctgatcttgtcggtgctcccgatctcgctgctgcctcggacgacgtcgttacgcaacctgaaattcacgcgctgatttcagacgaagagcacgatcacgagcatgaacatgacgatgacctcgagcacgagcacgagcagcatgagcatg

SEQ ID NO: 2434 - DNA, 263 bp, Glycine max
  unsure (1)..(263): unsure at all n locations; Clone ID: 701040135H1
tgatcatgncatgtcttnancctccatancaatgttctttcngcaaagaancaactcnttgttganatctaatnatgcaactctcttctctgatggtcatcaccaattcacaaatgttgagcttctcttctccaaagtcagattctttgttgatagataaggcttcctcaaatgccacattgcctttntcttcccaccaattgnctagctacaccagaaatacaggttacaattcaggaagcataagcatgcatggggctttg

SEQ ID NO: 2435 - DNA, 261 bp, Glycine max
  unsure (1)..(261): unsure at all n locations; Clone ID: 701040136H1
cttttactctccncctctttctcattttccggtganatggagtccnagtggggtggcgcccccgccagcatcatggcggcgaatttcgacgacttcaagtggatcgcctccatgttcgatcccggaaacgacgacgtcaagcccttctccgacgcagctttccaaaaccaggatgcagtaactgcattttcaacttgtggtggagtaacagatgataccctgttcgttcccaaaacctcactcccattcaatccaccattt

SEQ ID NO: 2436 - DNA, 261 bp, Glycine max
  Clone ID: 701040137H1
caagggtttctctgtctgcttcttcactttctctcgtttcaatcgaaaccaaaacaaaatcatgggcagaaaattcttcgttggtggcaactggaaatgcaatgggaccactgaggaggtaaagaagattgttactactttgaatgaggctaaagtccctggagaagatgtcgtagaagttgttgtgagccctccttttgtgttccttcctgttgtaaaaagtttgctgcgccctgatttccatgtttcggcacaaaactg

SEQ ID NO: 2437 - DNA, 263 bp, Glycine max
  Clone ID: 701040138H1
gcgagagaaagccatgccagagacgaagatttttggcatgctgtttgggccaaacactcccattccaagttcattgcgagatcttctaaagcctggccctgcaagtgttgaaatcgatgatcaccctatgcaaattgaagaaacacagtacccgaaaaccttcttctataaagaagaccttcatccaggcaaaacaatgaaagtacaattcagcaagcctccctttcaacaaccatggggtgttggtacatggttaaaggaaa

SEQ ID NO: 2438 - DNA, 259 bp, Glycine max
  Clone ID: 701040139H1
aaacctgagaagatgaaggccactagagatgtgcttagtgaatatgggaacatgtcaagtgcttgtgttcttttccatcttggatgagatgaggaggaaatctgctgaaaatggacttaaaaccacaggtgaaggacttgaatggggtgtgttgttcggttttggacctggacttaccattgaaactgttgttctgcgcagtgtggccatctgagatgcctaatatattatttcatatgtgtaccacttttcaaacttg

SEQ ID NO: 2439 - DNA, 253 bp, Glycine max
  unsure (1)..(253): unsure at all n locations; Clone ID: 701040140H1
cgctttggattcactcactcacgagtctcacgcttttcacgatgggcttcatnntcggagtggtggtcggaataattgtgggcctggccatcatagtgggcttcgtccgcggcgagaactcccgggccgcccaacgctcccagctcgccaccaccgttgccgccttcgctcggatgaccgtcgaagattccagaaagatcttgccgcctcagttctacccttcctgggtcgttttctcttccagccagaagtt

SEQ ID NO: 2440 - DNA, 259 bp, Glycine max
  unsure (1)..(259): unsure at all n locations; Clone ID: 701040141H1
ttttaatggtgtctgaattctgaaacacnatttttattatgccattcagattgcgttactnaatgattctnttgttctgtttcattgtttgcttgttccttaaagatctcaaagggtccacaatcgcacaatttgtgaactgctcacgggataaaatggaatgcccttcaagttggatatccacaaacacatagatcttgtattctttgtagtatatttaataggacattgagttatccactcacccaccacaacacat

SEQ ID NO: 2441 - DNA, 259 bp, Glycine max
  unsure (1)..(259): unsure at all n locations; Clone ID: 701040142H1
gaaggagaatccagattacagggaagagtgagaggaaccacagtggtgatgcttnttcttttgttccaagtgtctgaacagtagttagttaaaatgtatttgaaattgtgccaaaatgtagaagaaattattttaaatcatttcttcgtttggatagaaagattataagtgaatcttctagctctcgacagtttttaatttctattgatccgggagcataatcttgcacgagtactcaaccatgaaatatcgnttgatt

SEQ ID NO: 2442 - DNA, 261 bp, Glycine max
  unsure (1)..(261): unsure at all n locations; Clone ID: 701040143H1
gctatggcggcgatgcagaggccactcaagagaaccattgcnatcgncaancttacgcgcgtgcttttcctctctccgacccgccgncgccgccgacatcgtcgcgtctcctccgccgcagctcccgccgttcgatcaccagccgcacccttacaacggtcccttcgccgatgaagtcctcgccaagcgcaaaacgttcctcggtccttccgtcttccactactataaganacctctgaatatcgtggaagggaagatgca

SEQ ID NO: 2443 - DNA, 257 bp, Glycine max
  Clone ID: 701040144H1
gaacgtgtgagtctctagcgttcctattttggctccacttcccatcggatttgctgtgttcttggtccacttggctaccattcccatcacaggaactggcattaacccagctaggagtctcggagctgccatcatctacaacagagaccatgcatgggatgaccaatggattttctgggttggacctttcattggagctgcccttgctgctgtgtatcaccagatagtcatccgagccatccctttcaagacaaggg

SEQ ID NO: 2444 - DNA, 261 bp, Glycine max
  unsure (1)..(261): unsure at all n locations; Clone ID: 701040146H1
taatttcntctcttctttgtaacttgtaagcatggagtcctcaaagatctatgcttaacctcttcctttgcatgctcttcctctcctcgcgcaantcccattctnggttgtggntactggggaaaacccccaaaanggcaanacncgggnaacaccaaagncacccacagtacccgttgttaagccaccagtcacaatccctcccattgttaatccaccagtcacaatccctcccattgttaatccaccagtganagttcc

SEQ ID NO: 2445 - DNA, 259 bp, Glycine max
  Clone ID: 701040147H1
gcagaaagtacagccgggaatgaatcaaccaattccacaatttgtgatgaagtctgccagattaaatccatctcttctagagggaattttagtgggtatagttttgctaataattttgatatcgggcctttgctgcatgatgggaattgacaccccaacaagatttgagacgccacaagagtaatgatccatttgctgaagctaataaatgttgtgatgctctcggtctactggattaaaatattactgctatattatt

SEQ ID NO: 2446 - DNA, 258 bp, Glycine max
  Clone ID: 701040148H1
ttcttcttcatcctttctgatctgtgctgttttttcagggtacaacaaaattgggtgctttcggttaaactgtgatgtctccgccagtgctgagcataggggaggaggagggtaaaagcaatgtcactttgttggtttcctcatcaaccaccatggaaagtgtgtgtctcaagagcttagaatttaaagagcgcaactacatgggattatctgattgttcttctgtggacagctcggttccgtccttctctgaagaga

SEQ ID NO: 2447 - DNA, 215 bp, Glycine max
  unsure (1)..(215): unsure at all n locations; Clone ID: 701040149H1
gtttgtagtaatcatcaactcactcagttgccgtnggttgtcgtgatccatcancaacactttgtcactgaaattncagananatggcatcagcaatgtttcgtaggaacatcatcacccactactccaagtttgcttcttctttgtcttcgttgcctcgccattcctcaatctacnaccctctctctatgtctgtttctcatttcatagcgaaa

SEQ ID NO: 2448 - DNA, 260 bp, Glycine max
  Clone ID: 701040150H1
atttcctctctactcactccctccgggatcgatattttcaagaacagaccgaaaagctgttcatcgatctgttggatctgcgagtgaattgggcgaaagaaaatggttaccaaatcagaggaaactcaactgagcaggctagaaaatcaggtcgataacggcggcggcggcgcgtgggagtacctctgcctcgtgcgaaagctgaaagttcggcggtcggagaaagttctgaagcatggtctctctatccttaacgaccc

SEQ ID NO: 2449 - DNA, 260 bp, Glycine max
  unsure (1)..(260): unsure at all n locations; Clone ID: 701040151H1
ttgcatctcagaggccaattctttcgccgcttctatctctctttccanacgcttccccctgtggtgntctcgtgntgctggnancaatatggntgtngacgctttgaatgaggatttgagaatcaacggagcagttgaaccgttgcctgaggactttgatgcaacagctgtaatcatagatcccgtgcctttggcagttgtagacaatggcattgtcaaggaggangcgcagatcattaaaggaaaagaganaagagaat

SEQ ID NO: 2450 - DNA, 262 bp, Glycine max
  Clone ID: 701040152H1
tgcaacaccagcatccatgggcaagtaggaggtgtctgcgagcgttaacgcaaaaaacgacaccgttttctcttccgaaacgcatcctctctccgctcactcaccgtgcctccgtttcccaacgccaacgcttcttcccccgttttcaccgtacgcgcctctgtcttcgcgcaatggccccacctccgctatttctcttccgagaaaaaagacgaccacagcgacgaagacgatgatggcgatgaggattacgatgatgaag

SEQ ID NO: 2451 - DNA, 259 bp, Glycine max
  unsure (1)..(259): unsure at all n locations; Clone ID: 701040153H1
acactcttctatattcctagtnctttgaagagatattgaaataaacaacaatggccaattccatgagctttttcctgcttctttcttttctagcttttgctcccttgtgcctctgtcactataaccaagagggttacctctaccctcagttttatgactattcatgcccacaagctcaacatattgtcaagtctgtccttgctaagtatgttgcagagcaacctcgattggcggcttcgattctcaggcttcatttcca

SEQ ID NO: 2452 - DNA, 261 bp, Glycine max
  Clone ID: 701040154H1
tggaaatattgccttctactttggtccttttcattttgaggaagcttcctccccaagcgtggtatcactccaatatcacccaattcgctgaaaagattagcatatggagaaaatttagtcaggatttcctgagtgcatgctcctctgctttctttgatgtttctctcccctccgcaaggataatttctagaggacagagaagtcggtctttcttctgttgagtgacaaagctaatatcattgtcttaaagttctcataagg

SEQ ID NO: 2453 - DNA, 210 bp, Glycine max
  unsure (1)..(210): unsure at all n locations; Clone ID: 701040155H1
tgaatcgcgattgttctgtgcgaganaaagaagagagagatcgaaaatggcgttggctttcgacgagttcggaaggccgttcataatcctgaaggagcaggagcagaagagcagactccgaggattggacgctcagaaagccaacatctccgccggcaaagccgtggctcgcatcctccgaacctccctcggccccaaaggcatggacaa

SEQ ID NO: 2454 - DNA, 260 bp, Glycine max
  Clone ID: 701040156H1
ggagattgtaaaagttataactacaaaaatactccagcagccaaatgaaaagcctgctgtgcgattgaagattatgatcagcctgtacaaccttttggacactccatactgccagttttatgtctacatgaagttactgaatttagctgttgatgggaaagtcacagaacacattataccttcattcaataagattgataacttcttgaaagactggaaaattgggataccagaacagagagagctctttcttgctgtct

SEQ ID NO: 2455 - DNA, 259 bp, Glycine max
  unsure (1)..(259): unsure at all n locations; Clone ID: 701040157H1
ctcaatgtcattgtaaccatgctttcattgaaccaccttattttctatataaangcttttncagttttcaatttntcatcctatcctgtctganttttctctctnaatatatataacttacatatgaaggtagagtgatatcatgaagaagcaagtctgagtacaagtttcataaaaagaggagttacctttgtatcactagttcaaagttcaccttctcagaagctacatagatacactgatggagaagcttgtaagg

SEQ ID NO: 2456 - DNA, 257 bp, Glycine max
  unsure (1)..(257): unsure at all n locations; Clone ID: 701040158H1
ctcgtggccacacgagctttaccactactagggcggcaaaaccactgttcttagcttctggcatgtgaagtgaattctncgcaatgcttccttttctccacggtgagcatgaataacaacaattgctggttcttgtaattattattattgcaattccattttgtgacttccctgttgcttgttaattagtgtgacccagatggtgttttgagtatttgtttggagatcatcagtattttgagagatttgtatgataa

SEQ ID NO: 2457 - DNA, 257 bp, Glycine max
  unsure (1)..(257): unsure at all n locations; Clone ID: 701040159H1
cacatttccaaacccctaaaccctattctctcctcaatgggaagcaaccaagccgccatttccttcctcaccaacgtcgcccncgcggccttcggccttggcgcggcggccaccgccctctcctcctccctctacaccgtggacggcgggcagcgcgccgtcctcttcgaccggttccgcggcntcctggactccaccgtcggcgaggggacccacttcctggtcccatgggtccagaaaccctacatcttcgacat

SEQ ID NO: 2458 - DNA, 256 bp, Glycine max
  Clone ID: 701040160H1
cttccacaaggtatggggacttttttgatggaaaaactgccagcttgtgtgtggcgtcgtgctgtttattatgatcctgagacaggaaaggaagatccttccaagaatggcatttgtagcaattttttgtgtaactcaaagccaggagacaaaattcagatcacaggcccttcggggaagataatgcttttgcccgaggatgacccaaatgctacccatataatgattgccacaggcactggtgttgctccattca

SEQ ID NO: 2459 - DNA, 257 bp, Glycine max
  Clone ID: 701040161H1
tgggttcttcttctattacaacatcgcccgcaaccatgaccatgggctgcgattcgtgctcctgttcacggtctttgccgtttcctccgccctagacatgtcgataatctcgtacgacagcgcccacgcggacaaggccgccccgttgtgcaccgaggaggagctgatgtccatgtacgagcagtggctcgtgaagcacgggaaggtgtacaacgcgctcggcgagaaggagaagcgcttccagatcttcaaggaca

SEQ ID NO: 2460 - DNA, 257 bp, Glycine max
  unsure (1)..(257): unsure at all n locations; Clone ID: 701040162H1
gattaatctgancaagttgcgtgtccctgctgtcactgctctctgagcaaaaccagaagancacatcaatccaaccctgccaaaatcaatccccagataccattccccttcccataacaaagacaacccaatcattgtttgttcacatccgaatccacaaaatactgttataattattctgattcacgaaanacaggaaaacccgaatctctctctttgttcctctcggggtcacganaatgggcacagagacctca

SEQ ID NO: 2461 - DNA, 257 bp, Glycine max
  Clone ID: 701040163H1
ctttgagctcttgcctccccctgggccagtcacagattgacactagtgagaaaggagggcaatttagcttgcacatactcaagcattccaccattgtggcaaagccaaggtcattttagactccaccacatgatcatgatcatatgatcaatccccttaattttttcttttttcttttcccttttctttactctgtattgtatcaatgcttgaaaatggggttgttccaaaaatgtcatatatatttggcctgctaa

SEQ ID NO: 2462 - DNA, 259 bp, Glycine max
  unsure (1)..(259): unsure at all n locations; Clone ID: 701040166H1
ctctcattctctttccctcttcaactcaaccacacactccttagatccaaaagctatctttgttgctttgagtttgaacctnnnnnnnnnnnnnnnnnnnnnnnnnnnnnnnnnnnnnnnnnnnnnnnnnnnnnnnnnnnnnnnnnnnnnnnnnnnnnnnnnnnnnnnnncaaagtgaggatgagatggaccttcgaagaggtcctggaccgtcgatgaggaccttggctctcatcaattacattgccaatcacggtga

SEQ ID NO: 2463 - DNA, 259 bp, Glycine max
  unsure (1)..(259): unsure at all n locations; Clone ID: 701040167H1
gttttagcgcanttncttctagatttaaggaagatgggtaaggaaaaggttcacatcagtattgtggttattggccatgttgactctgggaagtccactaccactggccacctgatctacaagcttggaggcattgacaagcgtgttattgagagatttgagaaggaagctgctgagatgaacaagaggtctttcaagtatgcctgggtgcttgataagcttaaggctgagcgtgaaagaggaatcacaattgatattg

SEQ ID NO: 2464 - DNA, 258 bp, Glycine max
  unsure (1)..(258): unsure at all n locations; Clone ID: 701040168H1
tagnaaccatggatcagaaggatttttatggtcgaacaatcggcgtggaaattgcaagactgggttgggatgattttggtgcatccccaagggcctcaggacccccaaagaagtgggatttgccagagcaaggggaagtggtagattgctggtactgatcaaaattcatgattgagtaaagctgtagaagagaaaatgatggaacaacagatctcaagttatacaagaatggccatactataggattgatggaacatt

SEQ ID NO: 2465 - DNA, 259 bp, Glycine max
  Clone ID: 701040169H1
caagattcaggtactgcgtttcggaagcagacacagatggctcgtacgaagcaaaaccgctcgtaagtccacaggaggaaaggctcctaggaagcagcttgcaaccaaggctgcacgtaagtctgcaccaactactggtggtgtgaagaagccccaccgttatcgtcctggtaccgttgctcttcgtgaaattaggaaataccagaagagtaccgagcttttgatccggaagctccccttccagaggctggttcgtgaa

SEQ ID NO: 2466 - DNA, 259 bp, Glycine max
  Clone ID: 701040170H1
ccgaagctttgttggcggcaaggcaaatctgcattgcgatggcgcctccgaagcttcttcgtctttgcgctttcctgtaaccctaattttcgccatcgttggggccgaagccgatatttccatcgaaggaagcactccagagcctgatacctccgccatcaggatccaattagatcaactcaattccaagatccaaattctcgagtctcaaatcagcgaaaagttggaagaagtgaagaagaaggacgaaattatagca

SEQ ID NO: 2467 - DNA, 260 bp, Glycine max
  unsure (1)..(260): unsure at all n locations; Clone ID: 701040171H1
ggtnangtaaacttganttgaagtgaagaaggagatggctgcaacctcttccttgtgcttcatcgaccctccaatcccagatcaatggattcttccttcacaaaacctctctttcccatactccttccctcactttctccaggaggaaaatttcaaccacagtgaaggctacatctcgagtcgacaagttttcaaaaagcgatatcattgtctctccgtccattctttctgcaaacttttcaaaattgggagagcaggtg

SEQ ID NO: 2468 - DNA, 257 bp, Glycine max
  unsure (1)..(257): unsure at all n locations; Clone ID: 701040172H1
tctaatagtgttaatttgtctttctctatctctatcggtcatgggtgcttttgcntttgatgaggaaaactcctccaccgtggctccggcaacactctacaaagctctgacaaaagatgctgacactatcatcccaaagattattggggccatccaaactattgaaatcgttgaaggaaatggaggacccggaaccgtcaagaagataacagctagtgaaggtgaccaaaccagtttcgtgctgcaaaaagtggatg

SEQ ID NO: 2469 - DNA, 216 bp, Glycine max
  unsure (1)..(216): unsure at all n locations; Clone ID: 701040173H1
ctacttcaccactccaaacccaccacaccaccattnttcntaatctcnttctctaaccctntcactgctgccttactcactctctactttgctcntcatcgtanatgaaccaacacttctagtctctcttactttataaccatgtaaanatnagtcacctaatgaaaaattagtagcttcttgttgtgctttttattttgtttgtgttgagataaa

SEQ ID NO: 2470 - DNA, 236 bp, Glycine max
  unsure (1)..(236): unsure at all n locations; Clone ID: 701040174H1
gaaaagcacggaagaaagtgagaagnactccaagttttgttgnngagtgatgagtcttgaaacatgaagcagnatgatcggcgaagggagtgtttgtctaattcgaattcagaaagttgttctttctcattgatgggaagagaaccccctcagaatttgttaccttccaaacacgacttccccagacttgtccttgtggttgnactcgcatcgctagttgcttggacctgcaactt

SEQ ID NO: 2471 - DNA, 255 bp, Glycine max
  unsure (1)..(255): unsure at all n locations; Clone ID: 701040175H1
ggcttctgaagcttatcctaacgtggantacaccaccgtcgatgaatatttgantncagtttgtctgatttttgagtaattgatgcaatttttgttgctctgcaaagtgctcaataaaacctatgccttttcttttttgcgaaattggttgcttttgtcctatgtttcggaaaccatccacattaatgtaatctttttttttttntnncctnaanaatacncnaatcnggggtcggaagcnctgtttanattttt

SEQ ID NO: 2472 - DNA, 256 bp, Glycine max
  Clone ID: 701040176H1
attccgtccaaggctaaatactggcgagagaccgatagcgaacaagttaccgcgaagggaaagatgaaaaggacattgtggtggcatgcacactcaggagttttacgtgccacggttcatggtgcttttatcattcaccctcgttcgggtctgtttccttttcctaaaccctacaagcaagtaccaataatattaggtgattggtatgacggtaatgttgtggatatttatcagcaagtactgcttctcggggatg

SEQ ID NO: 2473 - DNA, 258 bp, Glycine max
  Clone ID: 701040177H1
ctcattaattgcaagaatggcacttcgttgcttggtgatgtccctttctgttctcttcactcttggtcttgcgagagaaagccatgccagagacgaagatttttggcatgctgtttggccaaacactcccatttccaagttcattggcgagatcttctaaagcctggccctgcaagtgttgaaatcgatgattcaccctatggcaaattgaagaaacacagtacccgaaaaccttcttctataaagaagaccttcatc

SEQ ID NO: 2474 - DNA, 254 bp, Glycine max
  unsure (1)..(254): unsure at all n locations; Clone ID: 701040178H1
caatttcatctccaaattgcaccccattttattgttgaatttcaagctctaccctccccttccctccactttcctccctcttcttcttttgcttctgtttgagaggtgaagatggaattgtaataaagctcggaatttaattggggaattgtggganaaganaaaggagggaatcatacacaatgccggagttcccctcgagctcgaggtggnaaaggtgccaaatagcgagagaaagagtggntctttggtgt

SEQ ID NO: 2475 - DNA, 258 bp, Glycine max
  unsure (1)..(258): unsure at all n locations; Clone ID: 701040179H1
cgtattgttataaccctagctcggaagaactaccatctctcgtccattgtctgcgtctgcantcattnctcaactcttcctctcttttcttccaaacccgaatctggattctcctctctcccgatttcaattctcacggtcttcaccgatcgccagatctctaagcaccgctcttgttttcatcgattaaataacaaacaaaaattggctcaattttattttaacatcctaaccaaaaacaaacttttcacccgattt

SEQ ID NO: 2476 - DNA, 256 bp, Glycine max
  Clone ID: 701040180H1
gaaaaagtatggaggggtgttgccaaagaagcctccactaatatccaaggatcatgaacgtgcttactttgactctgctgattgggctttggggaagcaaggagcacaaaagcctaaaggaccacttgaagcactccgcccaaagttgcagccaacacaacaacatgctcgttcaagacgctcagcttatgctccagcagatgataatgaagttgatggctgcagcagtgattcatcagcagagcatcagagtgcc

SEQ ID NO: 2477 - DNA, 257 bp, Glycine max
  unsure (1)..(257): unsure at all n locations; Clone ID: 701040183H1
ggagcatacgtggtggtgacagattatggcgagggagacagaaacagacttcataatgagtcccacgtgcctactcaagattgggaagtaacgcagatgcatctgcagaactattcaaatacggtgtagtggatgtagaatacagaagggtcccctgtagatacggtggctataacctcttggttaaggttcatgaacagagcagaaaccctcactanttagncatgncatctccancttggtggaactacgacgta

SEQ ID NO: 2478 - DNA, 257 bp, Glycine max
  unsure (1)..(257): unsure at all n locations; Clone ID: 701040184H1
gaaaatcgtactatagattctgttgcataggcgttgtctgtggcggttgtcatacaaacgtggtcggggtggaggaagaaactaaaacatgatattaactaaggaatttcactcttcgtctctctcatagtacttcttctggtgccaagaagacggcagtttgcctgcactgctcagttcttagagcatgaattcagcatccccgcagtttgtttcctcaagnaggatgagtgtgtacgatccgatccaccagatta

SEQ ID NO: 2479 - DNA, 257 bp, Glycine max
  Clone ID: 701040185H1
gggagccgtagcagcggaagctctagcttgggtagcgaatcacaatggcgagaggattaaagaagcatctgaagaggcttaatgccccaaagcattggatgcttgacaaactgggtggtgcatttgctcctaagccctcatctggaccacacaaatcgagggaatgcctgccactcatactcattttgcgaaaccggctgaagtatgctctaacataccgtgaagtcattgctattctgatgcagcgacatgtcctt

SEQ ID NO: 2480 - DNA, 244 bp, Glycine max
  unsure (1)..(244): unsure at all n locations; Clone ID: 701040186H1
atcaaaaccagagtggttctagtaatccggtgctgctagaggatgggaactagtgaatggcatatcgagcgaagatctagcttcggcactgaatcccccttagcaagagangcaggaaatgtgcctganactgggtcactctctattgttgtgcttggcgcttctggggatctgctaagaagaagacatttcctgcacttttccatctataccggcaggattctaccagcagatgaagttcaca

SEQ ID NO: 2481 - DNA, 259 bp, Glycine max
  unsure (1)..(259): unsure at all n locations; Clone ID: 701040187H1
cctanctctcctttcaagatgcagatcttcgtcaagaccctcaccggnaagaccattcacccttgaggtggaaagctctgacaccatcgacaacgtcaaggccaagatccaggacaaggaaggaattcccccggatcagcaacgtctcatcttcgccggaaagcagctcgaggacggccgtaccctcgccgactacaacatccagaaggagtcaacccttcaccttgtccttcgtctccgtggtggcatgcagatcttc

SEQ ID NO: 2482 - DNA, 255 bp, Glycine max
  unsure (1)..(255): unsure at all n locations; Clone ID: 701040189H1
ggncaattcatttgggcnctgtctctgttccaaanncctaatcggtcttccagaaaatggctgattctccccttgcaaggaattcaaggtccccttccccgtggaaagctcagtcgagatctaggtctaggtcaagatctaggtcgaggtctaggcctagacaaaggccaagatcccgttctagaagtcatggcaggtcaagatcaccaattcatggaaggtcaaggtcacccattcatggaaggtccgancctt

SEQ ID NO: 2483 - DNA, 245 bp, Glycine max
  unsure (1)..(245): unsure at all n locations; Clone ID: 701040190H1
gttctcctaggcgagaccactatatctaaagaaaagagtcnagattnctgtgagtgcaattttgagtggaaaccaagatggccaatttttcaagtcactacggaatgttggtgtctctcttgcttacgtggatccaaatccaagccaaggtgttttgctaccaatacaaagttggagatctagatgcttgggggataccctcctcagaaaatccacaagtctacacaaaatggtccaaatatcac

SEQ ID NO: 2484 - DNA, 253 bp, Glycine max
  unsure (1)..(253): unsure at all n locations; Clone ID: 701040191H1
gaaaagntccttactgttagagagtttctcacacttctaaattattacactgcncagtttgctggatccagattgagangtgtgagaaactctctaacagtaaggatccagcaaagctgcgcagtgtaataatttagagtttcttttacttgcaaattgttctgataaattgtcatttnccnggattttagtaaaaactttcattgggacagtttagttcactgtttgtgtcaactgtncaggcatttagatt

SEQ ID NO: 2485 - DNA, 253 bp, Glycine max
  unsure (1)..(253): unsure at all n locations; Clone ID: 701040192H1
ttcatttctgtnttctctcacactcnntctctcctccttccccttttctgttttgctctcacgtcccccgaccaccaccatctactccctccgccgcgaaccccaccccactcccactctctcctccctccgatgcgatcccccacactctccttcctccccttcgttctcatcaacaacatgcagagacagatttggtgctcagcaacccaaatctgtcttcttcttcgtttgtttaattttgatttcattt

SEQ ID NO: 2486 - DNA, 255 bp, Glycine max
  unsure (1)..(255): unsure at all n locations; Clone ID: 701040193H1
tggcactactgttgaaggaatttgtggctggcaaactgaaganatctggactaaattgtattcctgatgagccctanaatgctgatttggttaatcttctcccagaggatatctctaaaaggatttctaagcttganaaatacngccngtatgatttgatttcagctgctaagaggcagagtccattcttttaccaggtatcaagaacgcacatganaaatgatctctttatcaaggaangctgtggccagntac

SEQ ID NO: 2487 - DNA, 253 bp, Glycine max
  unsure (1)..(253): unsure at all n locations; Clone ID: 701040194H1
cctttgttcactcttcttctcttgcggctagggttttagcgcantttcttctagatttaaggaagatgggtaaggaaaaggttcacatcagtattgtggtcattggccatgtcgactctgggaaatccactaccactggtcacctgatttacaagcttggaggcattgacaagcgtgttattgagaggtttgagaaggaagctgctgagatgaacaagaggtctttcaagtatgcctgggtgctggacaaact

SEQ ID NO: 2488 - DNA, 257 bp, Glycine max
  unsure (1)..(257): unsure at all n locations; Clone ID: 701040195H1
cttcttaatttcctcactcacaaggaacnccaatgacaaagctattcaatttcctcccttttcctctttcctcaacatcttcatccaaacaatttcagcccaagtagcaccggcaccagcgggacccaccaacatcacccaagtgcttgagaaagcaggacaattcacaaccttcatcaaactcctcaaagcctcacaaatagctgatagaatcaattcacagctaaacaactcaaaccaaggcctaaccgtgtttg

SEQ ID NO: 2489 - DNA, 299 bp, Glycine max
  unsure (1)..(299): unsure at all n locations; Clone ID: 701040204H1
ggtcatcctcggcacacaatacgccggggaaatgaagaagggtcttttcggtgtcatgcattatctcatgcctaagcgccaaatcctctccctacactctggatgcaatatgggcaaagatggggatgtggcactcttctttggactctcaggtaccggaaagaccactctttcgaccgatcacaataggtatctaatcggagatgatgaacactgttggggtgacaatggtgtctccaacattgaaggtggttgctatgccaaatgcattgncctctcacgggagaaagagccagata

SEQ ID NO: 2490 - DNA, 301 bp, Glycine max
  unsure (1)..(301): unsure at all n locations; Clone ID: 701040205H1
gtcgggtgtactttcttgcgaaaccgagagagcgaaggggcaaacacaattttttttatcttcttttttattttttgtnnnnnnnnnnnnnnnnnnnatgttggggatcttcagcagttcagtggtgtcgccgccggaggagctggtggccgctggcagcagaacgccgtcgccgaagacgacggcggggaagctgctgaaccggttcgtggagagcaaggcgtcggcggtgtcgctgcaggtgggggaacacgtgcagttggcttacacacaccacaacgaatcaccgtggcatcccaga

SEQ ID NO: 2491 - DNA, 301 bp, Glycine max
  unsure (1)..(301): unsure at all n locations; Clone ID: 701040206H1
ctaaagtctaagcaaagaaaaaaatgatccttccctcttcttcccttttattcactctcacaatcctcttgtgttctttcctttcttttgtttgtgccaaccgtctcatccaacaaacatgcaagaattgctcaaaaaatgaccccaacataagctacaaattttgcgttacatcattccaatcagaccatagganccactacgccaaaaacctccaagaactaggactaatctccatcaagataacaaggcacaacgtgacggatactaatgctcatatcaatgagttttgaagaaaaac

SEQ ID NO: 2492 - DNA, 306 bp, Glycine max
  unsure (1)..(306): unsure at all n locations; Clone ID: 701040207H1
gtcagttcctcggccccaaacgcccctcctcctcntcncnncacgtccccttcctnnnggcaccttcctccncccccctcgccgtcggcaccgacgacgactccgacgccggcgtcacccaccactccccgacgcaagtcctcaaaaacttcaacgagattcgcctcctccggatcgagctccccagcggcgagctaggcatcgaagacggcgtgctcctcaaatggcgcgccgatttcggatcaactctcgacaattgcgtcatcctcggcgcctcctccgtcttccaccccaaagacaacctaa

SEQ ID NO: 2493 - DNA, 301 bp, Glycine max
  unsure (1)..(301): unsure at all n locations; Clone ID: 701040210H1
gggcaatgcggtaaccagatcggagcgaagttctgggaggtgatatgcgacgagcacggcatcgaccacaccggaaagtacagcggcgactccgagctccaattggagcgcatcaatgtttattacaatgaagccagcggcggaaggtacgttccacgcgccgtcctcatngatctggagcccggcaccatggactccgtcagatccggcccctacggccagatcttccgccccgacaacttcgtctttggccagtccggcgccggcaacaactgggccaaaggtcatacaccgaaggcgc

SEQ ID NO: 2494 - DNA, 120 bp, Glycine max
  unsure (1)..(120): unsure at all n locations; Clone ID: 701040213H1
ctcccctttgncgctgttgttgttgctgcaccaccgaacaacttcccctgtaaatcgcgttcgtttgtgcnangtttaaaaagatggtgatggtgaggacattcaacctccttgttgtng

SEQ ID NO: 2495 - DNA, 297 bp, Glycine max
  unsure (1)..(297): unsure at all n locations; Clone ID: 701040217H1
ccgaatcggagagattttagtgtttccggttcgaattggggtcttgctaggaattttagcactagtttttgtgtcaacattggtagttttaggcctagggttgtgtccttgataccgcatgtagcgtcggattttaggaatcactctacatcagttgattctaatgctaatgacacgagctttgagaagattttcattcaaagcagcttgaatgtcaagccattgataattganaganttgagactgatcaaagtaaattggaggaagtcgctgaagaaagatgtgacgagtcaaat

SEQ ID NO: 2496 - DNA, 294 bp, Glycine max
  Clone ID: 701040218H1
gaaaatttggatttggattttgctctaaatcacattctttgcttcttttttcttactttcttgttccttcttcagcttggatttttggcgtaacgaggaaggggttattgttgagaaaccctagcctaaacctaaaccatggcgcataggttgctgagagaccacgaggccgacggctgggagcgctcagatttccccatcatctgcgaatcctgcctcggcgacagcccctacgttcgaatgacaaaagcagagtatgacaaggagtgcaagatttgtacaggccatcatgtt

SEQ ID NO: 2497 - DNA, 304 bp, Glycine max
  unsure (1)..(304): unsure at all n locations; Clone ID: 701040219H1
angctcctnnagcnggnntcacnccctcntnnaacactatnacttccttcttctcttnctctccatagagctccaagcgtacaccccagaagacaacttcaccatcagttgcggcaccaccgggatagtcttcgacggccaaaggacatggacgggggacgcaganacaaagtatttatctggtggtcaaggcagnaccgttttaaccgaagcagcaacacaagatccttctgtcaatcaagctccctanaccacagcacggttatcccgttcnccagttcaattactcnttccccgtttctgc

SEQ ID NO: 2498 - DNA, 266 bp, Glycine max
  unsure (1)..(266): unsure at all n locations; Clone ID: 701040220H1
ctcattcccgttgtagcagncacttcgcgacacgatgcataggcaatccctgggttctccctctcccaagctccccaagtagagacgctcgtcaccgacgaagacgatgctcccaaacctcaacgtcttagcctctccccggcggcttcaacggcgnanaagttcgtccaactcattcctgncctcantctcctctgnttcttcgtnctctanctcttcttccananttcctctccatcagattgaatcatttcaccggnttcaac

SEQ ID NO: 2499 - DNA, 298 bp, Glycine max
  Clone ID: 701040222H1
ctttgacggtttctagagagagaaagtgatggccggagttaatccaaacggcgtcgccgattttgcggcggttccgacgcatggcggacagttcattcagtacaacatatttggcaacctcttcgaggttacgacgaagtaccgtcctccgatcatgcctatcggacgcggcgctacggaatcgtttgctcactgttgaataccgagacgaacgagctggtggctgtgaagaagatagcgaacgctttcgacaatcacatggacgctaagcgtacgcttcgtgagattaagcttctta

SEQ ID NO: 2500 - DNA, 262 bp, Glycine max
  unsure (1)..(262): unsure at all n locations; Clone ID: 701040224H1
tttcanctgtctgctgttagacctgtacccgccctagccattgatntggaaaagtccaacttcaaggatgagtaancttcagagtgatgctctaagagaagctatctcaggaatcatggctgattccaaggaaaagaacaggaaatttgtggagaccattgaactccaaattgggttgaaaaattatgatccccagaaggacaagcgtttcagtggctctgttaagttgcctcatattcctcgccccaagatgaagatttgt

SEQ ID NO: 2501 - DNA, 298 bp, Glycine max
  unsure (1)..(298): unsure at all n locations; Clone ID: 701040225H1
gcaaaataagaatgatgagttgcaaagaaaatgaggaggatgacacttacctctcagctttgacactatgtttcagccgaatttttccggcaatcttgaacgctgctgttgatctgaatttgtttgatatcatagncaaggcagagagttcaactttgtcagcctctgagattgcttctttgcttccaaatccacaccctcaattggctaataggcttgaacgcatattgccggtgttggcaagttactctcttctcaattgctccattcgcaccactgaagatggtgtgagagagag

SEQ ID NO: 2502 - DNA, 299 bp, Glycine max
  Clone ID: 701040226H1
attgatttaatctttcctcatcatgaaaatgagattgcacagagctgggctgcagaccatgatagccatgtcagttattggatgcataatgggcatgtcactaataacaatgaaaagatgtcaaaatccttaggcaactttttcactattcgccagatcactgagcgttaccattcacttgctttgaggcactttttgatcagtgcccattacagatctccactaaattactcaatttcacagctggagaactcatcagatgctatttactatatatttcagactcttcaagattgtaa

SEQ ID NO: 2503 - DNA, 300 bp, Glycine max
  Clone ID: 701040227H1
cccaattccactagggattcaattccgatgcgattccgagcttgttagatccacgacaacgtttcgtttcccagattcttttgtaaaaaaaaataatcttcctttgcccaacaggtaagttggaaaaaaatggaccatgacaagactgggtgccaagctcctcctgaaggtcctatattgtgcatcaacaactgtggattttttggaagtgcagctaccatgaatatgtgttctaaatgccacaaagacatgttgctgaaacaggagcaggccaagcttgcagcatcatccattgggaat

SEQ ID NO: 2504 - DNA, 153 bp, Glycine max
  unsure (1)..(153): unsure at all n locations; Clone ID: 701040228H1
gcctgataacccataaccgaccgcaccaccgttttcctttgctttgcgttctacaatgtcgaaaacctcagagattattacatgcaaagctgctatttgctggggaataggaaaacctgtgactgtggaagagntacaagtagaccctcccca

SEQ ID NO: 2505 - DNA, 299 bp, Glycine max
  unsure (1)..(299): unsure at all n locations; Clone ID: 701040233H1
aaagcctccantatnagncctntttcaggcgtggtttttacctaaccntacaattcgccgatccttccagttggggttttncgctttcagcgaagagcggtgtatatagaaacnctattccccctatgcaccaggggaattgaatatagaaataagaaaaaggcaaaaaaannccaggttgaaaaagttgtatgttaaataggtaattctgttgtttttcgtgtttctggactcaggagctgagctgtttccagggnaaagcatgtacagtatgaactctaaatgcagtgctggggatt

SEQ ID NO: 2506 - DNA, 294 bp, Glycine max
  unsure (1)..(294): unsure at all n locations; Clone ID: 701040234H1
gcgtgatccattgacgaagatggtgcagcgtctcacctaccgcaagaggcacagctatgccaccaaatccaaccaacacagggtcgtcaaaacccctggtgggaagctcgtttatcagaccaccaagaagagggccagcnggcccaagtgccccgtcactggcaagaggattcaggggattccacacttgaggcctgcagagtacaagagatcaaggttacccagaaaccgtaggactgtcaaccgtgcatatggcggagttttgtcangaatgctgtcagggagaggattatc

SEQ ID NO: 2507 - DNA, 296 bp, Glycine max
  unsure (1)..(296): unsure at all n locations; Clone ID: 701040235H1
gtgctgcaatggcttcaagtcaggaagaggtgactcttttgggagtaattggaagcccatttgcttgcagggtgaagattgcccttaagttgaagggagttgaatacaaatatgtggaagaaaatttggccaacaagagtgatttgcttctcaaatccaanccagttcacaagaaagttccagtttttattcacaatgagaagcccatagcagagtctcttgtgattgttgagtacattgatgagacatggaagaacaaccccatcttgccttctgatcctaccaaagagcctggc

SEQ ID NO: 2508 - DNA, 298 bp, Glycine max
  Clone ID: 701040236H1
ccagaggaggctaaacaacaagaggaggaggaagctccggcggttgattatgccatcacggatttcaatgcaggtgctattgctgctgatggccagtggcctggtacaattgatcaatcatggagtgatgcagttcctcaacctattccagcagtacctggtgtcaactggggggcacctgcagaagcacctgctgctgcaggaggagattggggggaagctgttccaccaccacaacaaatccctgtacctccctctggaattgatactgtccaaccatctggctgggattaaacta

SEQ ID NO: 2509 - DNA, 297 bp, Glycine max
  unsure (1)..(297): unsure at all n locations; Clone ID: 701040237H1
aaatgcccactttttttcttccaacgctcctcctccttctcatagccttcgccacctctgtctccggccgccgtgacctcgtcggagactttctccggctgccctccgaaactgataacgacgacaacttcaagggcacccggtgggccgtcctcctcgccggttccaatggttactggaattacagacatcaggctgatgtttntcacgcctatcaaatattgaggaaaggtggtctgaaagaagaaaatattattgtttttatgtatgatgacattgcattcaatggggaaaacc

SEQ ID NO: 2510 - DNA, 297 bp, Glycine max
  Clone ID: 701040238H1
tccctcctggggttctgctttgagaatggcaaacttcttctcgtttatgatttcttatcaagaggaagccttgaagagaaccttcatgaataggtaataagaaaaattcacttgtgtttggttggtccgagagatataaggtagcagtaggtgttgctgaggctttagattatctgcattctaaagatgatcaacctgtgatccatcgggatgtgaagtcatcaaatgtattattatctgagaattttgaaccccagctctctgattttggactggcaaaatgggcatcaaccttgt

SEQ ID NO: 2511 - DNA, 297 bp, Glycine max
  unsure (1)..(297): unsure at all n locations; Clone ID: 701040239H1
tttgattcagcttccaaacgcgccattcccatttctctctctcngcttcttcttcagatacctaacctaatctccnnnnnnnnnnnnnnnnntcaaccttatcaatatcgtttaaataaattttgatcgcgcacgcgctttgagatagatcatgctgcgtttgtgctacggccctctggattgcngcttcggacgccgtggtggccgcgccgccgacggacttctctggcacaccgacttgaagccccacgcctccggcgacttctccatcgccgtcgcccaggcgaattacagtct

SEQ ID NO: 2512 - DNA, 295 bp, Glycine max
  Clone ID: 701040240H1
aaagggttggattataaacttcaagtagggattggacacttttatcatatattctacgagggatgtttagcaaattttgaaattggagaggaaggagaagaagcatccaagctttaccctgaagtgaattacacacgcatggacgagtacctaaaaatttatgtgtaaaaggaactcattcagtaggagttcagtgattcaaacaggaacacggtttttagctacaataaccttaatttaaggagatgattttgtgctataattcgatggggaaactggatttttcggatctgaa

SEQ ID NO: 2513 - DNA, 246 bp, Glycine max
  Clone ID: 701040241H1
ttcaatgccaacatctgtccttgcaggtgctgttgctaatttaagaggttgtggaagggatgcagctgctgtactgttttgggttcatatttttgctatattctcaatggcaggatggattattctatatctaaacatactcttctgagactgtatatagcaatttgatccaattcattttgatgctagattagtggagaaacaccaatattttatacaaagagcctttatatgatgatcacgatc

SEQ ID NO: 2514 - DNA, 298 bp, Glycine max
  unsure (1)..(298): unsure at all n locations; Clone ID: 701040242H1
cagacactcagtttctgcctcttatttttcttttcctcactttctctctctnctttttctcctttatttctagtcttctctgtctatcatagatcttgaactatcctggcaagaactcagagcactaacatcttgcagccacaaaaatgggcttctttctgttaccaaaagcaactccttgcattttgttcttggctctgctgtcttgtacttgctttacttctacagatgcttatgatccactcgacccaaatgggaatatcacaatcaaatgggatattataagttggaccccaga

SEQ ID NO: 2515 - DNA, 298 bp, Glycine max
  unsure (1)..(298): unsure at all n locations; Clone ID: 701040243H1
gtggaaggtcttctcttgtcttgctcgcgatcggagactttgaaaccctcccttccttctcctttcacctattcatcccaagcattcgacaatgtctccgttctcgaagctcttgtttctgatactgatggtgttcgtctcatccgcgatcgcctccgacgacganagagtgagcgaattggtgtccctgcaatcgagatccaaatcgggcctaatccggctgaacgaccaatccctggcccgcttcctcaccgccgtgaaaacccctcgcccttactccatcctcctcttcttcgac

SEQ ID NO: 2516 - DNA, 128 bp, Glycine max
  unsure (1)..(128): unsure at all n locations; Clone ID: 701040244H1
ctctacttgaganatagtnataattgaggccatgtcaaaaatgtctagccccaatggtccagagatagaagagaagagagttacaaaggaagntaaattcaaatctgctaaaactgcaatgggtgagg

SEQ ID NO: 2517 - DNA, 295 bp, Glycine max
  unsure (1)..(295): unsure at all n locations; Clone ID: 701040249H1
gttgtttacaatgaaggctactctgaagggaaagtacgatntcgaccaaaaacggcgctgnctttgccaacatcgncgtcaacgccggcgacgtcaagttccgtgcctccgtaacggaagccactttcattaacggtcccagcttcaccggcttggcgctcgccgtcgagaaacccggttccttcatcgtcgactacaacgttcccaaaaaggactttcggtttcagtttatgaacacggttagggttggggagaggccgttgaatttgcctacgcgcacagcaggggcgacaac

SEQ ID NO: 2518 - DNA, 294 bp, Glycine max
  unsure (1)..(294): unsure at all n locations; Clone ID: 701040250H1
ataagctttacttaattagcaaatcnaaatatggcactttcttcttcatcatcttcaacatccatatttgctttagctttgttcactcttttgcttataggaagttcttcagctcaactctctgagaacttctatgatagtaaatgtcccanggttttctatgccgtaaaatccgttcttcaatctgctttggctaaagaacctcgccagggagcatctatcgttcgcctcttctttcatgactgctttgtcaatggttgtgatggatcagtactacttgatggccctcctcag

SEQ ID NO: 2519 - DNA, 297 bp, Glycine max
  Clone ID: 701040251H1
gccccactcaaccaccacacctctcctcgttcacgctacccctttctgctcttcttctacctttcaagttttaaaagtataaagatggcagagacattcctatttacctcagagtcggtgaacgagggacaccctgacaagctctgcgaccaaatctccgatgctgtcctcgacgcttgcctcgagcaggacccagacagcaaagttgcctgcgaaacatgcaccaaaaccaacttggtcatggtcttcggagaaatcacgaccaaggccaacgttgactacgagaagatagtgcgt

SEQ ID NO: 2520 - DNA, 293 bp, Glycine max
  Clone ID: 701040252H1
ctcagttagtgtgacacggagggtgaaaaatgttgggccaccaggcacttatactgcaagactcaaagtaccagcacgtctttccatatctgtggagcctaatgtgttgaaatttgacaacattggtgaagagaagagctttaagttgacagtggaagttacaagaccaggtgagactactgcatttggaggtataacttggtcagatggcaaacgtcaagtgaggagtccaattgtagttgggggggttagagggtagatcattatcaagtgataacacataattaattagg

SEQ ID NO: 2521 - DNA, 295 bp, Glycine max
  Clone ID: 701040253H1
ggtttgtttgaggtcttgtatgtggctgcagatatccaaaccttaaattcggtcctcgaatctttctgatcattggttgttttttattctttcaaatacattccaaaatctcttggaaattgcgagattcactgcttatcctagcagcagattttgggttctgacccaattattcattttccccaactgggtcttgtggattttttgttggggttttaaatttcgtgttgctgggtttgaaagttatttcctttcttccccgtctggattcaactcccaagtatttgctctaatt

SEQ ID NO: 2522 - DNA, 298 bp, Glycine max
  Clone ID: 701040255H1
cttgaatgctgatccagcattgtgctcagggatagaacatgcttcattagcttcaattttaatagaaaattcgcccctgcttccatttttggcacaacatgcattcctctttcgaacattttctttaaaggaattctcaatctttagcccacattaagcgcaaatgagattccctaatcccacgtgaatccaatgatgtcaaaagagcatcaaaggcctcttcagaatcaataagcctccacttgccatcatgatattcaacaaagatcctgcctgaaccaggatcattgctagaagc

SEQ ID NO: 2523 - DNA, 295 bp, Glycine max
  Clone ID: 701040256H1
gcaattccttcttctcccagaatcggtcactaaatccgcaatcatgaagctcgataccaccggtctcgaatcgtttcccacactgcttgcgcctcaaaacgacgtcgttggagaactctccgccgctccatccttcgaccttccgaattccaacgatttcgatgggtttgtgaaagaagctattcagatggtgaagcccgcgaagggtactacgactcttgcttttatatttaaggagggtgttatggtagctgctgattctcgagctagcatgggaggatatatatcatcgcag

SEQ ID NO: 2524 - DNA, 292 bp, Glycine max
  unsure (1)..(292): unsure at all n locations; Clone ID: 701040257H1
ttccgtgaagaatttcgtgcagtatggcgtaattatagtgagctgnagcttacataaaatttgttggacttggatgtgctgctgctttattgttgaagtattttccattaattggaatggaacattctatagcaagctgccggccattggagactaccagcagattgtaaattttcaggaatcttgtttttgtaaagtacactgttttcgttgttttattatgtctagcggaagcattggaatattgatacacgctgtaacctagacattgtcataattctagttgtcaaaa

SEQ ID NO: 2525 - DNA, 297 bp, Glycine max
  Clone ID: 701040259H1
acgctctctcactcacaaacacacactgaactaaaaaacatcaaaagagacatggctgagcaaaccttcatcatgatcaagcctgatggcgtccaaagaggccttattggcgagatcattagcagatttgagaagaaaggtttctacttgaaaggtttgaaacttgttactgtggaccgtccttttgctgagaagcactatgctgatttgtctgccaagccttctttagtggtttggtggattacattatctctggccctgttgttgccatgatctgggagggcaagaatgttgtta

SEQ ID NO: 2526 - DNA, 295 bp, Glycine max
  unsure (1)..(295): unsure at all n locations; Clone ID: 701040260H1
acagaaactatcaatgaagggggaagtgcagcttcagcctccagcggttatgcaaaaccctagtgattcggacctttggctccataaccnnnnnnnnnnnnnnnnnnnnnnntcaccgggaagctctggtgagatcaagaatgaggaagaagacgttgaggctggattactcccctgttgtcgaatttgcctcgaaagcgattccgacccagaggatgaattgaatatcccgtgcatgtgcaaagggacccaaaagtttgtccatngtcaagtctgatcattggggcncataaag

SEQ ID NO: 2527 - DNA, 295 bp, Glycine max
  Clone ID: 701040265H1
gtttctcttcctccctggaagaaaaagaagagtcaccgctaacgacgccgttcgtgcttttttgaggtgccacagtcatgtttgggcgtggtggaccaaggaggagtgacaactccaaatattatgatattctcggggtttccaaaaatgccagtgaagatgaaatcaagaaggcctatagaaaggctgctatgaagaaccatccagataagggaggagatcctgaaaagttcaaggagttaggtcaagcatatgaagttttaagtgatcctgagaagaaagacctgtatgaccc

SEQ ID NO: 2528 - DNA, 293 bp, Glycine max
  unsure (1)..(293): unsure at all n locations; Clone ID: 701040266H1
cggatactgaaaganttgcctcccagactnaagctgaaagtngagcgcgggtttctttacaccatgncgcctattagttggtctgatatatcttactataaggatcagattctacccttgatacaaaagtacaaagttgttcatttaaatagaactgatgctcggttagccaataatggtcaaccgctggagattcagaagctgcgttgccgagttaattttagtggtctgagatttacttctcagatagaggagttgggcagaaaggtgatcaggcttcttaggcaaaaggg

SEQ ID NO: 2529 - DNA, 293 bp, Glycine max
  Clone ID: 701040268H1
cacaaacataatcatcaagcacacacaatctcactactcgaaacagatcgaatagaaatatatatagttagagagagagaatattatacagagagataagtgcaataatggagtgttgtaagagggtatatgagtggttatgcaattcaaaatcatacttgataatattgagcttgcaatttggctccgccggcatgtaccttatcaccatggatgctctcaataagggcatgagtcatatgtgtttgtcgtttaccgcaatgtcatcgccactattgctctggccctttcgc

SEQ ID NO: 2530 - DNA, 289 bp, Glycine max
  Clone ID: 701040269H1
caagatttgaagggaaggttgactgttcacttccaaggggaggagggtattgatgcaggtgggcttacaagggaatggtatcaattattgtccagagttatttttgataaaggagcactgctttttactacagtgggcaatgaatcaacatttcagcctaaccctaactctgtttatcaaacagagcatttatctatttcaaatttgttggtagagtggttggcaaagcattatttgatggtcaactcttggatgttcatttactcggtcatctacaagcacattctgg

SEQ ID NO: 2531 - DNA, 292 bp, Glycine max
  Clone ID: 701040270H1
aacagtgaagaggtgtgacagagagacaaaagaaaagatgtcagggcctcaatgctgttcaaatccaccaagcttgaaccccggtggaggagttgggcatgtggacaaagtgggtggtgttgattcctatttcactggatctcctcactccaaactcgctgttcttatgctctccgatgtttttggatatgaagcgccaaatttaaggaagcttgctgacaaagttggggctgctgggtattatgtagttgttcctgacctcttggatggcgaacccttaatcctcagaatt

SEQ ID NO: 2532 - DNA, 191 bp, Glycine max
  unsure (1)..(191): unsure at all n locations; Clone ID: 701040271H1
agtaatcgagcaagtgcagtgcttcgggcggaagaagacagcnggagcagtgacctactgcaagcgtggtcgaggcctcatcaagatcaatggctgcccgatcgagctggtggagccggagatcctccgtttcaaggccttcgagccaatcctcctcctcngccgccaccgcttcgccggcgtggacatgc

SEQ ID NO: 2533 - DNA, 293 bp, Glycine max
  Clone ID: 701040272H1
gttggagaaggcgaaaggcaaagaaggagatttcaaaactcgtgaaaaaccagagagagggcttttcatcgttctctctctctttgctcgtttgttcccactgaaaccccagcgccgtttatttcatgccgttgttcttgtctcgcacgcaatcgtgccggcgacactgaacttccggcgccgggaatgggctttgagccgccgccggataacactgtgttgaatttagctaagctagggtttcggttggatttcggattcgcagtctctctcaactaattaattaaccgatt

SEQ ID NO: 2534 - DNA, 291 bp, Glycine max
  Clone ID: 701040273H1
aaaacttggggagggttttataggggcatctgttaccaccatcatctctgcatttatgcttgctaacatcatgggtcgctctcagtggctaacgtgtccaaggaaggatttgtcaactggttggcttcactgtgatcctggtccactgtttaagccagaatcttatcccttacctggatgtatttctcactggttttcttggaaagagatatcaatcctaccaattcaatggcattctttatgtctaggcttgtttgcttcaattattgcaccttttggaggctctttgca

SEQ ID NO: 2535 - DNA, 294 bp, Glycine max
  Clone ID: 701040274H1
aatgcaaataccacaaagacttatgctacaagaaccatatttttcttgaaagatgatggaactttgacaccattggccattgagttaagtaagccacatcctcagggtgaagaatatggtcctgttagcgaagtctacgtgcctgccagcgaaggagtggaagcttatatttggttactggcaaaggcttatgttgttgtgaatgatgcatgctaccatcaaatcattagccattggctaagcactcatgcaattgttgagccatttgtcatagcaacaaacaggcaactgagt

SEQ ID NO: 2536 - DNA, 81 bp, Glycine max
  unsure (1)..(81): unsure at all n locations; Clone ID: 701040275H1
catgaattaaaataatgaatatncaatccttaatggngaaatttatattccatgaattaaacatttcctcattaagattta

SEQ ID NO: 2537 - DNA, 292 bp, Glycine max
  unsure (1)..(292): unsure at all n locations; Clone ID: 701040282H1
cccaaatcaggaaacactttctcatcttccctttcccagtttcacaccctacctcatggaaggctctgtcaacgaacgtcttcattttgggaagattggatatggatgcaatcattacaggagaagatgnaggattnnnnctcnctgctgcnacgnngatctactcatgcngtcactgtcataacgnggncgcgagcttgttgaagaatccctttgancgccacgagctcgttcgccaagatgttaaacaagttatttgttcagtttgtgacatgagcaacctgttgctcaa

SEQ ID NO: 2538 - DNA, 293 bp, Glycine max
  Clone ID: 701040284H1
ctgcttcttcctctttttttcatttctcttcaacttcctcttctttcaattctcttcagtctctctccgccttcccaaaatggtgaaccctagatgcttcctcgacgtcagcatcggcggcgagttagaaggccggatcgttgtggagctcttccacgacgtcgttcccaaaactgccgagaatttccgcgccctctgcaccggcgaaaagggcatcggtcccaacaccggcgtccccctccactacaaagtcattcattaattctacaagctggttttgtagggttgagtta

SEQ ID NO: 2539 - DNA, 292 bp, Glycine max
  Clone ID: 701040286H1
tttctctctctctgtgatcttatctccttttaattattcactcacccctttacactggttgatgcaaaaaaacatggtaccctctattgttggttgttgctgacactcttcatagtcgcaaagtaggtgactagcagtagcatgtgagtgaaggagcctgcagtttttttttatcgtactgtactatgtttgttatgtaatggtatcatggtaagctgaccaaagtgacggatttgttccatcactgccttcagggaaagaagttaactcatagcaggtccatacaaacatg

SEQ ID NO: 2540 - DNA, 294 bp, Glycine max
  Clone ID: 701040287H1
ctggaattggccctggtgtctatgacatccactccccaagaataccaccaactgaagaaatcgctgacagaatcaataagatgcttgcagtgctcgagaagaacatcttgtgggtcaaccctgactgtggtctcaagacccgcaagtacactgaagtgaagccagccctcacaaacatggttgccgcagcaaaactcatccgtaacgaacttgccaagtgaatggtataagaaagtagaatctacaagttcattggttctgcttttataatacaccaaagaaaaattttctata

SEQ ID NO: 2541 - DNA, 292 bp, Glycine max
  Clone ID: 701040288H1
gtttccttctcgctcccgtctctgaaatctcgagggtttcatcgttgctgaatcaacaattcggaaccagttagcaatgttcagattctggggatcacaagagcaacaatcgcaggatggttcttcgcagtcacagtcgtggtatccgccatcggtggtgagttcacctacttcatcgaggcctgttacaccgactgcatcttcttcttcattatcgcagaggccttcgtctcatgttccaccttccgaagctgctgcagttattgccgttttgaaggacaagagtgttgat

SEQ ID NO: 2542 - DNA, 293 bp, Glycine max
  Clone ID: 701040289H1
gcattccaatcgctcccaaaatcttttctaatttgttcataacttcaataatttctcatcatgggctccttgattgttccaggtgaacatgatcacaaactaaagcttgtttctcttccctttgtatcaaccagtcacctcattcccgtagtagacatagctaggctctttgccattcatggtgttgatgtcaccataatcaccaccacagccactgccgccattttccaaagctctatcgatcgcgaccgtgaccgcggccacctattagaacccacgttgtcaagttccca

SEQ ID NO: 2543 - DNA, 293 bp, Glycine max
  Clone ID: 701040290H1
caagcaaaaagaaagaatcccaggcgaggagaaagatggaggggaaggagcaggatgtgtcgttgggagcgaacaagttccccgagagacagccaattgggacggcggcgcagagccaagacgacggcaaggactaccaggagccggcgccggcgccgctggttgacccgacggagtttacgtcatggtcgttttacagagcagggatagcagagtttgtggccacttttctgtttctctacatcactgtcttaaccgttatgggagtcgccggggctaagtctaagtgtagt

SEQ ID NO: 2544 - DNA, 297 bp, Glycine max
  Clone ID: 701040291H1
ctaaactccagtggatccgaagccaccttcagctctgagtgtagaatccaaatcctgaacctcaacaacctccggcatcacgatctgctggatcatcatctgtgcaaccctgtcaccaacttttacttcaaaatcagtgtcttaatggttgaacagtatcacccctacgggacccctgcaatccgcgtcgatcacgcccgctcccacatcgatcgagtgcttccatgataatccagatcgcggtgctgaaaaacaaaacaaaacggggagatttaaagttagccctcggctgggaaa

SEQ ID NO: 2545 - DNA, 291 bp, Glycine max
  Clone ID: 701040301H1
tatattccattctctctgtgtatttccctacctctcccttcaagatgcagatcttcgtcaagaccctcaccggcaagaccatcacccttgaggtggaaagctctgacaccatcgacaacgtcaaggccaagatccaggacaaggaaggaatccccccggaccagcaacgtctcattttcgccggaaagcaacttgaggacggccgtacccttgctgactacaacattcagaaggagagtactcttcacctcgtcctccgtctccgtggtggcatgcagatcttcgttaaga

SEQ ID NO: 2546 - DNA, 287 bp, Glycine max
  unsure (1)..(287): unsure at all n locations; Clone ID: 701040302H1
acantgttnanagctctgaagangaggaggatagtgaaagttcagattctgagattgattctgagatggaganaattatngntganaggnctnggaacagaattagtgggaagagaggttcttctagaaagangggggatttggatgatgatggatccgacaaacattctggcaagaggagaaagagaggtaggtcaaagaagaggagtgctaagagggaagttagtgattcggatgattcaggtgaagaaagaaggaggaggaagagaaggcnngnaccccatgaa

SEQ ID NO: 2547 - DNA, 285 bp, Glycine max
  unsure (1)..(285): unsure at all n locations; Clone ID: 701040303H1
tgaccacaacatctctctganaatcactcacacgcaaaagagagagagaatcgaaacaccccgtaagcagcacggcacaatcgcaacgcaaganattaataatcaatttgcatcgatcgatcgatcgttggttaggtttttgttttgggggaatatgggcgagtggactcaggcggaggtgtactcgcctcggactcagcaagtgtggagggcactgttgagttggttggccttcttctttcagatcttcttccagattataagagcctnaggtcactaccctct

SEQ ID NO: 2548 - DNA, 284 bp, Glycine max
  Clone ID: 701040304H1
ggtgcattgtgcatacaacagcttgtggatgggcaatttcatccacccagattgggatatgttccaatctactcatccttgtgctgccttccatgctgcctcaagagccatatctggtggccccatttacatcagtgacacagttgggaaccacaactttgagctgcttaagaccttggccttgccagatgggtccatcctcagatgtgagcactatgcactcccaaccagggactgtctctttgctgaccctctccaggatggcaaaacaatgctcaagatat

SEQ ID NO: 2549 - DNA, 236 bp, Glycine max
  Clone ID: 701040305H1
tggagtccacagaatcttcatacgtgtcttctcccgagggtccgaggaagcacgctgcatcgcctcctccgaaatcgccttcgctagattctgaggagaagccaacatacattaggtttctagtatcaaactctgcggctggttcagttattggaaagggcggttcaactatcactgattttcagtcacaatctggagcacgaatccagttgtcacgtaatcatgaattctttcct

SEQ ID NO: 2550 - DNA, 283 bp, Glycine max
  unsure (1)..(283): unsure at all n locations; Clone ID: 701040306H1
cttattcctctttcctcttcattctcttcccaaataaaactatantcagtcttcagtgatcgtcaacacttaagacccaagtgtaaatgaagaaagtggtggtgaagttgaatttgcacgatgacaaagcaaagcaaaaggccatgaagtcggnctctagcctagcaggcatcgattctatctccatggacatgaaggagaagaaactgactgtcgtgggtgaaatagancctgtcgatgtggtgagcaaattgagaaaaacttgggcacccagaaattgtaa

SEQ ID NO: 2551 - DNA, 279 bp, Glycine max
  unsure (1)..(279): unsure at all n locations; Clone ID: 701040307H1
ctctctctcaccaaagccttcctagaacganaaanaaaaagaagagcaattttccctcaccaannaagnagaagcaaacaatggccgatcaacttaccgatnaacagatctccganttcaaggaagccttcancttgttcganaaggacggcgntggttgcatnncaaccanggagcttggaactgttatgcgttcattggggnaaaacccanntnaggcatncctccnggnnttgntcactgaagtggatgctgatgggntggtgccattggttccct

SEQ ID NO: 2552 - DNA, 280 bp, Glycine max
  unsure (1)..(280): unsure at all n locations; Clone ID: 701040308H1
tctggctaaccaaccctgacactccttcttctccgcttcctcttcgatcatcgcttcagaatgccgccgaagttcgacccctcccagatcgtcgacgtcttcgtacgcgtcaccggnggtgaggtcggcgcggcgagttccctcnccccgaagatcggtcccctcggtctctcccccaagaagatcggagaagatatcgccaaggaaaccgccaaggactggaagggcctccgcgtcaccgtcaagctcaccgtgcagaaccgtcaggccaaggtcacgg

SEQ ID NO: 2553 - DNA, 220 bp, Glycine max
  Clone ID: 701040309H1
atcacatttcctgaactataagctatatagcacttccataatcttacaacaatggaggggaccagcagccaaagcacgtttgccttcatccctagcacaattgagacaccaagtccaagcatccctgagatatcatcatcatcttcccctggctctcttgcaagaattgcacaaagttaccctcccggctttcccagaaaggtgttagcggagattatag

SEQ ID NO: 2554 - DNA, 272 bp, Glycine max
  Clone ID: 701040310H1
gcgtctttcaaggagagagagaaaatatagcacgccgaaaaacacgctcccacttgtaacttagtataacgacctccaacaactgatacatacaatctcctttccttcgtgttggacaacaacaatggcggcgaaatctagttcgagttcgacaacaaacgtggtgactctgaaggcggcgtgggttctcccgcagcgcacgcagaacatccgtgaggtgtacgaggtggggcggaagttggggcagggtcaattcgggactaccttcgagt

SEQ ID NO: 2555 - DNA, 269 bp, Glycine max
  Clone ID: 701040312H1
aacggtgttagggttagaagtaggattagggttagggttcctctttactttacccgcgtaattctaccttccttccaacaataacaacaataatgttcggctccatcaaccagatcgtctccgccgaagacaccgacggccccgtctccgaccaccacatccattacagttcccacaccatcgaagacgacggcgccgcctccgatcaccacatccattacagttcccacaccatcgaagaagacggcgccgcctccgaccaccacatc

SEQ ID NO: 2556 - DNA, 272 bp, Glycine max
  unsure (1)..(272): unsure at all n locations; Clone ID: 701040314H1
cacctttcttccctatcttctacatttaagccgattcatcaaccttttcaacttgagatgccccttttctccactcactttgtttcacattgctgctaaagcaaaattctttttttttnggttcacctcagcatacatacaatagcatatgatgaagaagaacaacctcagttgctgtgtgttgttgcacttcctttgctgttgtctcctttngccagctctngttctctcccaccacatccatggaaaccctgcaagtaacatttttgaca

SEQ ID NO: 2557 - DNA, 278 bp, Glycine max
  unsure (1)..(278): unsure at all n locations; Clone ID: 701040317H1
ctaaagtaagcngcgttgcaacgctgtttcctttctgtttcttttcttcttccttccgacgagatctacaacgttgttgttgtttagatcttgaatagtgttttggtgttcggtgagatggaagaaaggaagcaatcacgttatgtgaagttgactaaagatcagacacctctcgaagacattacccctggcgaactcaaccagccaattcaggttcctcagttggacgttcgcaagtgccctnaangtagacagccgctacctgaaagctatgctcc

SEQ ID NO: 2558 - DNA, 284 bp, Glycine max
  unsure (1)..(284): unsure at all n locations; Clone ID: 701040318H1
gttttcttttcctccaactgtttcctcnaacactacaccttcttntctttacttctcttctctccaactcaaacatttatttcttccttctccgacaagttctatatcttccttcctttcattcatctctcgttaatcaatctttacccttccctctttggtttggtatcaaccgtttcnttcgtgttttctctagtgctacggaacccaaccaagttagtttgaaggttattgtgattggttgagtatgacttctcagctgaggaatggaagtgggagttcga

SEQ ID NO: 2559 - DNA, 283 bp, Glycine max
  Clone ID: 701040319H1
gacacattatggccacaccagcatccatcaccaatgtcactgtggagttccttcaattccccgcggtggtgacacctcctgcctctaccaaatcctatttccttggtggcgcaggggtgagagggttgaatattgaagaagaatttgtaaagttcacgggaataggtgtttatttggaagacaaggccgtgtcatcactcggtgccaaatggaagggcaaaagtgcagctgaattgctggactcacttgacttctacagagatatcatcaaaggtccgtttga

SEQ ID NO: 2560 - DNA, 281 bp, Glycine max
  Clone ID: 701040320H1
gtggtcttgttaccatgcctttcatcattgcaaatgaggcacttgcgagggtggcaagtttgggccttttgcccaacatgatactgtatttgatggggacctacaggcttcaccttgcccaagcaacccagatacttctctggtcccatgctaccagcaatttcacacctgtggtgggtgctttcattgctgattcttatctgggtcgattcctcgctgttgggttgggttcggccatcacttttctgggaatgacactgctgtggttaacagctatgatc

SEQ ID NO: 2561 - DNA, 281 bp, Glycine max
  unsure (1)..(281): unsure at all n locations; Clone ID: 701040321H1
ggntcttagcaccaccaccagcttctgcngtagctttaagctacgaaagattctccttgaccatggggcaanagcctttngtgacggtgttctgtntatgggctttaacatgttcccatcttccatcttnctcctttggaattcngagaanngggttgaagaagagacctctagatcntgntagtagaatggcgctagaaaggccngaganggtctaagatctgtaagaccantgatgggtgcngtgattcagttatnggtaagtcataagngnaggtcnc

SEQ ID NO: 2562 - DNA, 196 bp, Glycine max
  Clone ID: 701040323H1
atgaagcctgaggaaattgacatgggagagaatccagggctagtcacatacatgaggactccaatacaagctgtggtttctcctaggctcccctcacatttatacaaacgtgtgcctgctgagatctaatctttcttttctttcccttggtctactctttgttgcattaagaaaaatgccttgtggcactactttt

SEQ ID NO: 2563 - DNA, 276 bp, Glycine max
  unsure (1)..(276): unsure at all n locations; Clone ID: 701040324H1
gcaaagttataganataacatactcaaagggccgtggcaagaaagggttggaggaagccttggataggatatgtgcggaagcacatnnatgcaattantgatggctacactacccttgtgttgtctgatagagccttcncaagganacgtgttgctgtgagctccctgctggctgttggtgctgtccatcaacatctagtgnaaacacttgagcgtactagagttgccttagtaatagaatctgctgagccacgtgaagtgcaccatttctgcaca

SEQ ID NO: 2564 - DNA, 272 bp, Glycine max
  Clone ID: 701040325H1
gggcagtgccggcgcgcgctgaagtttgctaggttcatgagcaggttcgggaagagttaccgaagcgaggaagagatgagggagaggtacgagatattctcgcaaaacctcaggttcatccgctcccacaacaagaaccgcttgccctacactctctctgttaatcattttgctgattggacttgggaggagttcaaaagacacagactaggcgctgcccaaaattgctctgccactcttaacggcaaccacaagctcactgatgctgttct

SEQ ID NO: 2565 - DNA, 264 bp, Glycine max
  unsure (1)..(264): unsure at all n locations; Clone ID: 701040326H1
agtcgaaactatcagtcagcattcgnaaaagatgagtagcatcggtacaggttacgatctatcggttcaccactttctcccctgatggccgcgttttccagatcgagtatgccgctaaagccgtcgacaacagcgggactgttattgggatcaagtgcaaagatggggttgtgttgggcgttgagaagcttattccgtcgaaaatgatgcttccgggttccaatagaagaatacactccgttcatcgtcactctgggatggctg

SEQ ID NO: 2566 - DNA, 265 bp, Glycine max
  unsure (1)..(265): unsure at all n locations; Clone ID: 701040327H1
ctcttcttctcttgcggcnagggttttagcgcanttcttctagntttaaggaagatgggtaaggaaaaggttcacatcagtattgtggtcattggccatgtcgactctgggaaatccactaccactggtcacctgatttacaagcttggaggcattgacaagcgtgttattgagaggtttgagaaggaagctgctgagatgaacaagaggtctttcaagtatgcctgggtgctggacaaacttaaggctgagcgtgaaagaggaa

SEQ ID NO: 2567 - DNA, 267 bp, Glycine max
  Clone ID: 701040328H1
cacacaccacacacatagtagctattatactctctagagtaattgcggaatctgctagaattttctaataatggcgaaagacgttgagcaggtcacagagcaaggtgaatactccgcgaaggactaccatgaccctcctccggcaccgttgatcgacccagatgagctcacaaagtggtccttgtacagagccgccatagctgagttcatagcaacactcctttttctttacatcaccgtgttgaccattattggctacaagagaca

SEQ ID NO: 2568 - DNA, 269 bp, Glycine max
  unsure (1)..(269): unsure at all n locations; Clone ID: 701040329H1
cttttttattttgagaaaaaaaaacattggacatagtaaagccatggaagagatcaccaagaacctatcagggacttctcttttggtaccatcagttcaagaattggctaaagaaaagatatctaatgttccacaaagatacattcancctcaacatgaagaagacattgtgatcctctctgaagaagctaatagtagccttgagattccagttattgacatgcagagcttgctttctgaagaatctgggagctcagaattggataaac

SEQ ID NO: 2569 - DNA, 262 bp, Glycine max
  unsure (1)..(262): unsure at all n locations; Clone ID: 701040330H1
cttcgagtcaaaggctgatgctggagcatcncagacatttccccagcaanctggnaccanccgcaaaaacggttacattgtcatcaagaacaggccatgcaaggttgtggaggtttcaacttccaaaactggcaagcatggacacgcaaagtgtcactttgttgcaattgacatcttcactgggaaaaagcttgaggatattgtcccatcttcccataactgtgatgttccccatgttaatcgcattgactaccagctcatt

SEQ ID NO: 2570 - DNA, 270 bp, Glycine max
  Clone ID: 701040331H1
ctgggaagttggaagcgagactgtgatagacaaaagcaaatccatcaagacattcctgatgcagatcttcgagaaatatggaaatactgacattgagggtgttgattcaactaatgcatgctatggaggaactgctgctctgtttaattgtgtcaattgggtggagagcaattcatgggatggacgctatggacttgttgtctgcactgacagtgcagtttatgctgaagggcctgctcgacctactggaggagctgctgctattgccat

SEQ ID NO: 2571 - DNA, 272 bp, Glycine max
  Clone ID: 701040332H1
aacaggcaactgagtgtggttcaccctatttacaaacttctgtttcctcactaccgtgacaccatgaatattaattcacttgcccggaaagccctggtcaatgcagatggtattatagagaaaacattcttgtggggtaggtactctatggaaatgtccgctgtcatttacaaggactgggttttcactgatcaagcattacctaatgatcttgtaaagagaggagttgctgttaaggacccatctgctccccatggagttcgtcttttgat

SEQ ID NO: 2572 - DNA, 286 bp, Glycine max
  unsure (1)..(286): unsure at all n locations; Clone ID: 701040333H1
ctctcttttgcgtttcgatgggacccttcagtttctgcacacaccatcatancntttaaaatcttcacgaatcagcaaaatcccctcacacactctcttcctcccaaagatcttttctctttcgatattttatctctctctcttttcctcatggctgagaacttggacgacggcgagttctggctcccgccgcagttcctcgccgacgacgacgttttgccgacaccctttgaagcaaagttcccatctttgcccgacgacactgttttgttcccctccgagtggc

SEQ ID NO: 2573 - DNA, 242 bp, Glycine max
  Clone ID: 701040334H1
ccgccgccggccaatctcgacgccggatcgcgtggcctcatgattccctctcccagcgagtcacgcaagatcgagttgtactcccccgccttctacgccgcctgcaccgccggtggaatcctcagctgtggcctcactcacatgaccgtcactcctcttgacctagtcaagtgtaatatgcagattgaccctgctaagtacaagagcatctcgtctggttttggagttttgcttaaggagca

SEQ ID NO: 2574 - DNA, 281 bp, Glycine max
  unsure (1)..(281): unsure at all n locations; Clone ID: 701040335H1
tccacagacttcttctgataaaaataccacnattgggtctatcagtactaaggaactttgatgtttatgctaaaaaagattggtactggattggagctgctgctcttcttggtttcacagttctgtacaacgttctcttcacccttgcgcttatgtacctaaccctcttggaaagaaacaagcaattatttctgaggaagatgcaagtgaaatggagtctggaggagacaccaatgaagaacccagacttgtaaggcccccatcaaacagagaatcaatgc

SEQ ID NO: 2575 - DNA, 275 bp, Glycine max
  unsure (1)..(275): unsure at all n locations; Clone ID: 701040338H1
attaatctccgatccgaaaccgaatggggattctgtacgcgctggttggtcgtggatcggtggtgctggcggagttcagcggcaccaccaccaacgccagcgcaatcgcgcgtcagatccttgaaaaaatccccggcaacaacgacacgcacgtttcttactctcaggatcgctacatcttccatgttaaacgcaccgatggactcancgttctctgcatggccgacgacaccgccggaaggnaattccttttgcgtttcttgaggatattcatc

SEQ ID NO: 2576 - DNA, 275 bp, Glycine max
  unsure (1)..(275): unsure at all n locations; Clone ID: 701040340H1
cctgcgcatcttcaatttggtggctcttatcctgatacatacataataaatagcttttattattgaaattngcttttgttttaagcaccagataaaattaaaaaaaaatagtgttgattttgagccacatgaatgactgggcttataattagaaatttagataatattcaaaggtaataacaggagtagtgtcagttgttaatttgagcatatatatttggccagcagaactgaatgtttcaatcaaatttgtcatacactgttgtttatttttc

SEQ ID NO: 2577 - DNA, 270 bp, Glycine max
  Clone ID: 701040341H1
gggaaaaaatggtgtcgctgaaactgcagaagcggctggccgcaagcgtgctcaagtgtggcagaggaaaggtgtggcttgaccccaatgaagtcaacgaaatctccatggccaattctcggcaaaacatcaggaagttggttaaggatgggtttatcatcaggaagccaaccaagattcactcacgctcgcgtgctcgtaggatgaaggaggcaaagaagaagggccggcactctggttatggtaagagaaagggtacaagggaggcga

SEQ ID NO: 2578 - DNA, 267 bp, Glycine max
  Clone ID: 701040342H1
ctcattcttcacctgcaactatttggattgctgatttttgttaataccatatttactgatattggcgcatttctttgagaaagttactaattcctagatagaggcaaaaatgttgggaattttcaaggagaagttggttaaagcacccaaagagctgaacagtccagcttcgttgaattcatgcactaagcctaagctaagtcacgaaatccttcaggatttcatgtcctgcaattcctccaatgctttctcaatgtgctttgggaa

SEQ ID NO: 2579 - DNA, 265 bp, Glycine max
  unsure (1)..(265): unsure at all n locations; Clone ID: 701040343H1
cctagctctgtcgttccgtcgttgacgatggcgtttcgggtgcgaancctggacctccgctctctctttcttctctctctcttgtccatcgcttccgccaatgtcttcttcgaagagcgtttcgatgacgggtgggaaaatcgatgggttaaatcagattggaaaaaagatgagaacgtggctggggagtggaaccacacctctggtcaatggaatggagacgctaatgacaaaggtattcaaaccagtgaggattacagattct

SEQ ID NO: 2580 - DNA, 263 bp, Glycine max
  Clone ID: 701040344H1
gttaattactatgacattagaaagaaatgtgtgggagttctgtgttatgacttctctgtgatggaggatttcttaaacgagaagacagtgagagatgctttaggtgttggggacttggacttcgtttcatgcagtagcacagtgtatagtgctatgatgcaagactggatgagaaatctggaagttggtattcccacacttcttgaggaaggaatcaaggtgcttgtgtatgctggagaagaagatctcatatgcaattggct

SEQ ID NO: 2581 - DNA, 264 bp, Glycine max
  unsure (1)..(264): unsure at all n locations; Clone ID: 701040345H1
cagagagggaaacatttgagaagcaacatggttgggttataaagacaatggaaagagagccttcactggttagagatgagtatgcaccggtgatatttgtgcaaganactctctcttacctcgaatctattgatatgatgtccggggaggaggaccgagaaaatattttganggctagggccactgggaaagctgttctcactagtccttttaggctgttggggtctcatcatcttggtgtggttttaacatttcctgtttata

SEQ ID NO: 2582 - DNA, 269 bp, Glycine max
  Clone ID: 701040346H1
agaacaactacttcttcaaacaacaacagattcaagttcatagttttttttggtaaaacagaaatggcctaccactcttctcaaaattcccaacctgctctccctatgcacctatgtttcttcttgctcaccttgttcatgttccttagtttctcattttactcaagctacgagccaataatggagagtttcatggaccaagtgaagttggttctaatggtttctccccttctgcttctgctagttgtgcacttcctttgcaactatgg

SEQ ID NO: 2583 - DNA, 266 bp, Glycine max
  unsure (1)..(266): unsure at all n locations; Clone ID: 701040347H1
ganaaatggagttgttcttctacgcggtgttcggcggtttgggagcggttgttgcagtgacggagctgagcaagagcaacaaggaccgaatcaacacctcttccgcattcaattccttcaagaacaactacctcatcgtctattccctcatgatggctggagattggctacaaggtccatatgtctactacctttacagtacatatggatatgggaagggagacataggacaactcttcattgctggttttgggtcttccatgctc

SEQ ID NO: 2584 - DNA, 270 bp, Glycine max
  Clone ID: 701040348H1
atctccatctaatagtgttaatttgtctttctctatctctatcggtcatgggtgcttttgcttttgatgaggaaaactcctccaccgtggctccggcaatactctacaaagctctgacaaaagatgctgacactatcatcccaaagattattggggccatccaaactattgaaatcgttgaaggaaatggaggacccggaaccgtcaagaagataacagctagtgaaggtgaccaaaccactttcgtgctgcaaaaagtggatgcaattg

SEQ ID NO: 2585 - DNA, 198 bp, Glycine max
  unsure (1)..(198): unsure at all n locations; Clone ID: 701040350H1
cagaaaccctcaccaatgactgcgtcantgcccgcngtggagccgtcaccggagccctncgncggagccgtcaccggagcctccagcgtctgatctcgtgtttgacgacttctcctccaacttcaacgccttcctcatcccctccatggactcgctcttcaacaccactgacgngcgaaanttcgcctccgatctcga

SEQ ID NO: 2586 - DNA, 278 bp, Glycine max
  Clone ID: 701040351H1
gttgagaagagagaatggctgtggcgtcgtcatcatcccttatcacgttgaaggtgaaaccttgcattttcgggtctcctcggagatccgcggtggttcggaattgtgcgaagtcaacggcggggacaatatcgacgagttggagcctggacagctggagggcgaagaaggcgcttcagcttccggagtacccagatgcgaatgaattggacctagtcctccaaaccctctcttcttttcccccaatcgtcttcgccggcgaggcgaggaatctggag

SEQ ID NO: 2587 - DNA, 281 bp, Glycine max
  unsure (1)..(281): unsure at all n locations; Clone ID: 701040352H1
tcaanactcanaacttctcttttctttcattctntnctcttttattcttatcattcacaatgccttcaattcccgnagancccctacctggctccgaacccggatcgcttctgcatgttcccaatccaatacccccaaatctgggaaatgtacaagaaanccgaagcctcgttctggacggcggangaggtggacctctcccaggacctccgccactgggactccctcaccgacggngagcgccacttcgtnacccacgtcctcgccttcttcgccgcctc

SEQ ID NO: 2588 - DNA, 279 bp, Glycine max
  unsure (1)..(279): unsure at all n locations; Clone ID: 701040354H1
gttgtttcggagttagggaccttacgcagccatgngccactgctacgaatgccgccgccgccccaccacgccagcttctcccagaaggaagctgacatccagatgatgttggccgccgacgtccacctcggcaccaagaactgcgactttcnaatggaacgttacatcttcaagcgccgcaacgacgggatttacattattaaccttgggaagacgtgggagaagnttcagcttagcagctaggggtatagttggcnattgagaacccccaggatnncc

SEQ ID NO: 2589 - DNA, 209 bp, Glycine max
  unsure (1)..(209): unsure at all n locations; Clone ID: 701040355H1
tagtgcctccttgccagaagttaaaatggcccaagaaactttcctattcacatctgaatcagtgaacgaggggcaccctgacaanctctgtgaccagatctccgatgctgtgctcgatgcatgcttggagcaggaccctgacagcaaggttgcctgtgaaacctgcaccaagaccaacatggtgatggttttcggagagatcacaacca

SEQ ID NO: 2590 - DNA, 273 bp, Glycine max
  Clone ID: 701040356H1
tttcctccttctgcaaccatcaatgtcggcaatcgcggctccccaacaagatgcaggtcctccagcccgccgccaagatgctcgtcgagctctccaagtcccaggactccgccgccggcgacggcaccaccaccgtcgtcgtcatcgctggcgccctcctcgagcagtgcctcctcctcctttcccacggcatccaccccaccgtcgtctccgacgccctccacaaggctgccgtcaaggccgtcgacgttctcaccgccatggccgtccccg

SEQ ID NO: 2591 - DNA, 264 bp, Glycine max
  unsure (1)..(264): unsure at all n locations; Clone ID: 701040357H1
ttncgtncaganttncgtgcagtatggcntaantntagtgagctgtagcttacataaaattngttggacttggatgnggtgctgctttattgntnangtantttccattaattggaatggaacattctanagcaagctgccggccattggagactaccagcagattgtaaattttcaggaatcttgttnttgtaaagtacactgttttcgttgttttattatgtctagcggnagcattggatattgatacacgctgtaacctag

SEQ ID NO: 2592 - DNA, 262 bp, Glycine max
  Clone ID: 701040359H1
gaggttgctgcagcaggtgtctaatgtgtaccaatctatgaagattgaaaccttatcggggatgatccccttctttgatttctctcaagtggaaaaggtttcggtagatgctgttaagcagaagtttgtatcgatgagagttgaccacatgaaaaatgctgtgattttttgcaaaaagagtcttgagtctgatggcttaagggatcacttggccaattttgctgaacaattaaataaagcaagacagatgatttatcctcct

SEQ ID NO: 2593 - DNA, 265 bp, Glycine max
  Clone ID: 701040360H1
caaaataacaataacagttcaaaatcaaaatcaaatctacgtctcatcgaataatttcagatctcgtcgatctgagctcaaaacaatggcgaaaccaaggtactctcgtcttccacctcgcaagtcatcgtcgtcttccacgctgattctgactctgttcctggtcttcaccttcctcgttctcattctcctggctctcggcatcctctccattcctagctcctcgcgtggaaatttgcccaaacctaacgatctcgcatccatt

SEQ ID NO: 2594 - DNA, 253 bp, Glycine max
  unsure (1)..(253): unsure at all n locations; Clone ID: 701040361H1
tcttttctttttctgtatcgtttttactttccatcacttccattttcngtcatcacggaggatgctgctgcttctgctaatggtaaaattcttcataaattattgccttttgcttctacttttgtttcccttatgcttaataatcgaccctcttcaattcttgtcgttagtgtgttcaactatgtagtgtaatatggaggcaaaaacagatcgtgctttgattacggatgaaaaccagattcaatgtttacat

SEQ ID NO: 2595 - DNA, 264 bp, Glycine max
  unsure (1)..(264): unsure at all n locations; Clone ID: 701040363H1
gtaatgggccacctgtattttctgctgggnccatgccaggtncccaacgctttccggttagcagtgttccacaacattcagttgntactccaccaacaatgagagctnctcccggccctcctgttcagccccagcccccatatcncaatgtaactcaaggaataatgcagcctccaagttcaccttttggagcacctacttggcagatgcnatctcagcagtagcaccacctcctccagttcctggtcttcacaggtctcggat

SEQ ID NO: 2596 - DNA, 277 bp, Glycine max
  unsure (1)..(277): unsure at all n locations; Clone ID: 701040366H1
ataaaattctctcttcctttttgggttctcctattccaagcttcaatcttttctctcttctcacagccttcttcactcacaggaggtgaagatgtcgactccggctaggaagagactgatgagggattttaaaagattgcaacaagatcctcctgctggcatcagtggggctccccaagacaataatattatgctttggaatgctgttatctttggcccagatgacaccccttgggatggaggtacgnttaagttgacacttcagtttacagaggat

SEQ ID NO: 2597 - DNA, 281 bp, Glycine max
  unsure (1)..(281): unsure at all n locations; Clone ID: 701040367H1
cttttctcccccaaacaccatcctccctccgcctctgccgccaccaccaccgtatccttctcccacaaaccaccgtcagactccaacagcgctgccacccctcgccgcccctccaaaccccccaaagccacaccaataactcctccctcaaaccctctcgctaacaagctatggctcacaagcaaactctnnnnnnnnnnnnnnnnnnnnnnaccncncaccgccaccaccggaaattgacaccgaaaccaaaaaagagagcggcggtgaaggcgcggatt

SEQ ID NO: 2598 - DNA, 276 bp, Glycine max
  Clone ID: 701040368H1
cctttttgtggcggatgttaacacccagttgaagaacaagaacatcaccactgatatcaaagtggacaccggttccaatcttttcacaactatcactgtcaatgagcctgctcctggtctcaagactatttttagctttagagttcctgatcaaaggtctggaaaggtggaagtccagtacttgcatgactatgctggaataagcaccagtgtgggtttaacagcaaacccaattgtcaacttctccggcgttgtaggaactaatgtacttgccct

SEQ ID NO: 2599 - DNA, 275 bp, Glycine max
  unsure (1)..(275): unsure at all n locations; Clone ID: 701040369H1
ctccttaatttcctccttctttcaaacttgacaaagccacaactcttctctcatctcatataaatacccttccacgacaccaatttctncatcctctcattgaaaaacaaaattaatcatcttacttatttattctccgaaaatggttgatttacattggaaatcaaagatgccaagttccgacatgccttccaaaactctaaaactctctctctccgacaacaagtccttaccctctttgcaactacccttccgcaccacagatatctctcacg

SEQ ID NO: 2600 - DNA, 271 bp, Glycine max
  unsure (1)..(271): unsure at all n locations; Clone ID: 701040370H1
tcacactggtctttgcttctcgttactcatttctcacctaactttctattcttctcagtctcagatcagaaccttggccatggcagcgttccagaagatcaacgtcgccaaccccatcgtcgagatggacggagatgaaatgacnagggttatctggaagtcaatcaaggacaagctcattttgcccttcttggagttggacatcaagtattatgacttaggccttccttaccgtgatgagaccgatgataaagttacaattgaaagtgcg

SEQ ID NO: 2601 - DNA, 257 bp, Glycine max
  unsure (1)..(257): unsure at all n locations; Clone ID: 701040371H1
ctcgggattcacagtgttagggttctncnaattttctccgattnncatcaaacattcacacaccacnccaccaactatacgtcagcattgaaccctaaaatacatgactcagaagcagagaaccagaatcnccagattccatggaaacccagtacgaggagagtgagaaagacgagtcttcctcttcttatagttcctcagaagacgaggaggaagagatagagaaggagctggctgatgtaacgtttgaggagttg

SEQ ID NO: 2602 - DNA, 269 bp, Glycine max
  unsure (1)..(269): unsure at all n locations; Clone ID: 701040372H1
cgtctctcacacacaccactttatatacgnacacgagagtcggaagcactactctcttcgcnnnnnnnnnnnnnnnnnnnnnnnnnnnagctttgactttggtggaaactaaagactagtcaaaatggtgaagttcacagctgaagagctgcgtcgcattatggactataagcataatatccgtaatatgtctgtcattgctcatgttgatcacggaaaatcaaccctgactgattctcttgtggctgctgctggtattattgctcaag

SEQ ID NO: 2603 - DNA, 262 bp, Glycine max
  Clone ID: 701040373H1
agagacacaaggcatctgtgttgggcacacacttctggaccaaggattgaaaaagtggaatacgagtaacccatggacgggttattctcctgttgcagttgcttggactgtgaatgtcaagggagttcttgattatatcagggagctattgatgaaaccctgaagtataggctataggcatttgtactacccatctgacagacaaaagcttggaaagtgatagaaacgatagcttcttatttgcaaaaacatgtataaggtc

SEQ ID NO: 2604 - DNA, 264 bp, Glycine max
  Clone ID: 701040374H1
gttaatttgtctttctctatctctatcggtcatgggtgcttttgcttttgatgaggaaaactcctccaccgtgggctccggcaacactctacaaagctctgacaaaagatgctgacactatcatcccaaagattattggggccatccaaactattgaaatcgttgaaggaaatggaggacccggaaccgtcaagaagataacagctagtgaaggtgaccaaaccagtttcgtgctgcaaaaagtggatgcaattgacgaggcta

SEQ ID NO: 2605 - DNA, 260 bp, Glycine max
  unsure (1)..(260): unsure at all n locations; Clone ID: 701040375H1
taacaacaatcctcacatgatgtctactganatggttgcatgtattgcaantgaggctatctccatattagagaagatgcattctagaggatatgtgcacggtgatgtaaaacctgagaactttttgctgggaccccctggaactcctgatgaaaagaagttgtttctggttgatcttggattagcaactcggtggcgtgatagttctactggccttcatgttgactatgatcaacgtccagatgtttttaggggcacag

SEQ ID NO: 2606 - DNA, 260 bp, Glycine max
  unsure (1)..(260): unsure at all n locations; Clone ID: 701040376H1
cctttttcaacttcgcggtgtgagtnagacggagagtgctaagcaatcgtcttctcttctcggagcttggctttgcttatcgattctctctcctctcgtttctctaattccaaggtttgtaaaagatggcagatgccgaggatattcaaccccttgtttgcgacaatggaactggaatggtcaaggcaggatttgctggtgacgatgctcctagggctgtctttcccagtattgttggccgacctcgacatactggtgtt

SEQ ID NO: 2607 - DNA, 260 bp, Glycine max
  unsure (1)..(260): unsure at all n locations; Clone ID: 701040377H1
gatttgttcaccagtttcccaaatgctggccaagtgcttatatgatcatatatttagtagctgtcctcttattttgctgaccattgatattctttatgcctttggaaggttatggtnnnnnnnnnnnnnnnnnnnnnnnnnnnnnnnnnnnnnnnnnnnnnnnnnnnnnnnnnnnnnnnnnnnnnnnnatgtctctttaataactttttgttttattattcctaccattaaatatgtagatattgattcaacgatcacac

SEQ ID NO: 2608 - DNA, 268 bp, Glycine max
  Clone ID: 701040378H1
cttccaaggaaggaagaagatgggtggcgtgacctcttcaatggcggcgaactgggcgttcttccctccgtccccggcgtcctacaaggtgctgaaggaggaggcgacggggctgctgctcatggagccgttcccgcaccgcgagaacgtggagattcttcggttcccgaaccgccgcggcacggagatcgtggccatgtacgtgcggcaccccatggccaaatccaccttgctctactcgcacgggaacgccgccgacattggccag

SEQ ID NO: 2609 - DNA, 261 bp, Glycine max
  unsure (1)..(261): unsure at all n locations; Clone ID: 701040379H1
anttgatttgcttgtcttgtgttaaatctcttacaggatttgatttttgaagccaactgggatgtaacagacagaaacagcattcttttgggatacccctttgatatctgattctggacacaagctgtaggtgttacttcaactggattctggataaataatatattagatacagcttgaagttatgtctgcgtatggccatcaagtggagcggatgaatctacaaggagtctctcaggtggtggttcgagttgcggagga

SEQ ID NO: 2610 - DNA, 253 bp, Glycine max
  unsure (1)..(253): unsure at all n locations; Clone ID: 701040380H1
aattagttcattctcnttgcgcancncnctacctctccttncangatgcagatctttcgtcacagaccctcaccggnaagaccatcaacccttgaggtggaaagctctgacaccatcgaccaacgtcaagggccaagatccaggacaaggaaggaattcccccggatcagcaacgtctcatcttcgccggaaagcagctcgaggacgggccgtaccctcgccgactacaacatccagaaggagtcaacccttc

SEQ ID NO: 2611 - DNA, 233 bp, Glycine max
  Clone ID: 701040381H1
tcttagatctcttctttctctacgccgcacgccgaaaccatggccggaaaaggagagggtcctgctatcggaatcgatctcggaaccacctactcttgcgtcggtgtgtggcaacatgaccgcgttgaaatcatcgccaacgaccaagggaacagaaccacgccgtcttacgtcggattcactgacaccgagcgtctcatcggtgatgcggccaagaatcaagtcgccatgaa

SEQ ID NO: 2612 - DNA, 272 bp, Glycine max
  unsure (1)..(272): unsure at all n locations; Clone ID: 701040382H1
aatattgagtccaattctccttcgctttccctctttatctgaaaggtatggagtgttttgacttctggaagagataatggtgcagtgcctagacggattaaagcatttgtgtgctgctctggtaaattgttgtgatgccgattcgtcaaagtaacctacaggtttaganaatccagaagttcttgcaagagaaacagtgtttagtgtaagtgagattgaagcgctgtatgaattgttcaagaagatcagcagtgcagtgatgatgacggact

SEQ ID NO: 2613 - DNA, 273 bp, Glycine max
  Clone ID: 701040383H1
atagattgaaggcaatcaaatcatctttatacaaagattcttcttcatcgtctatgttttcctgcatattcagttttaaggttcaagcatcttcttgaaactcttctcaagctcgacgggaatttctcagcttttctctcgttacctcacccatcaaagtttcctcttctgggtgtttgtttatcggatccggggcattgcaagatttgatcatttcacgaatcatatcattatcaaacactcccattttctgggtacttaattgggatgggt

SEQ ID NO: 2614 - DNA, 271 bp, Glycine max
  unsure (1)..(271): unsure at all n locations; Clone ID: 701040384H1
ttcaatttggggaaataaaaatagggggaaacattctagagagagtgtgtagaaaatatggttgtcgatgatatgacgctgtgcatcatcgtcggctatggaggttcctcttcttctcgtttctccgatgcttatcccaaaaggggtttgatggaggggagatatagtggggattgatatgatgaaggtgtttataaggttgttttgttgaaattgtgtttntgggatggcaatattgtacgaaccagcaataaaactcatcgaccagatg

SEQ ID NO: 2615 - DNA, 245 bp, Glycine max
  unsure (1)..(245): unsure at all n locations; Clone ID: 701040386H1
atccaccagctggtgatattgatgtccatggctccatccataaatactactaagtgaaccacaccatgcagattccaactccaaccttggaataaaaggtgaaaaaaaacagcaactttaacctaagacaagagagtagtatctaggaagtttcaccttccttggagattccaactcacatcaaaatntgaggaagatctcaaccacttcactttccaagaggaggtgaggcntcatggctcaaa

SEQ ID NO: 2616 - DNA, 267 bp, Glycine max
  Clone ID: 701040387H1
agcccttctaaaacgccttactctgtatcttctttcatcatccaaaaaaaaccattcacacaaagaaaacctttgggtttcccaagatgtcatcatcggaactctcttctttctttctcctgcccctatcagccatactcagtttcgatgctttgctcggagttatgtttctagtggccgtgttcggctactggctggttcccggtggtcttgcttgggctttgtccaaattcaagcctgcgattcccgggccttgcggttacccgg

SEQ ID NO: 2617 - DNA, 266 bp, Glycine max
  Clone ID: 701040388H1
cattgcacagtgctttgcgtttcttgtttgtacaaagtggcacaatccaactattcatggaggctgtcatattacagaaccgtgttcatcatcaaataccataagatacctagacttgaggacaggaggcttagttgtttacacagatgaagatagacagcaaaatgggttctgcaatctgcaggatatcggcagccatattatgaaaattccattcattggtttccaaatacttctttttatgcatttagagggaacaccatcca

SEQ ID NO: 2618 - DNA, 261 bp, Glycine max
  unsure (1)..(261): unsure at all n locations; Clone ID: 701040390H1
agggtccaatnctnttgaaaattattaccatcattcatattcatcaacgacccctcttctgtgcccacttccaaatcttctcctctcgctatgggttgcggctcctcccttccagataggggctcaaggcagttgggtcgacccaattcagagaatggtggagggcaggacgccaagaatctgagggtcaagcttgttctcttaggtgattctggtgttggtaaaagctgtattgttctacgatttgttcgtggtcagttt

SEQ ID NO: 2619 - DNA, 260 bp, Glycine max
  unsure (1)..(260): unsure at all n locations; Clone ID: 701040391H1
taaaatcgcaggcgaangtncacagtcactccctctcctcacacgaaaaaagtntccccccaacccaccccaccccacccccaaccctcaacttagggttcttcnnnnnnnnnnnnnnnnnnnnnntaaccaaacaacaagaaaaaaaaatcacattccccaaaacacccttctcgctccgcatggcgaaaacgaggccaggcagaaaggacgtggactcgtacaccataagaggaaccagcaagatcgtccgagctgga

SEQ ID NO: 2620 - DNA, 258 bp, Glycine max
  unsure (1)..(258): unsure at all n locations; Clone ID: 701040392H1
angaggagaganaaacgaagaagaanaccccttctcacatcacatggcctccttgcccttggggnnnnnnnnnnnnnnnnnnnnnncggcggcggcggctatacatccgtcgcaaccgccgcagtctcagccgcaacccgaagttcctcgccggagctccgatatggagacagataaggatatgtcagctactgtcattgaggggaatgatgctgtcactggccacataatctccaccacaattggaggcaaaaatgg

SEQ ID NO: 2621 - DNA, 261 bp, Glycine max
  unsure (1)..(261): unsure at all n locations; Clone ID: 701040393H1
gcaaaactacggagaaaaagttcttgttcagtttgaagattttgcaaaccacaatgcttttgagttgcttgcaaaatatggcacaactcatcttgttttcaacgatgatattcaggggactgcatctgttgttcttgctggggttgtggcagccttgaagctcattggaggtactctggctngaccacacattcttgtttcttggtgctggagaggcaggaactggaatagcagaactaatagctcttgagatgtcaaagc

SEQ ID NO: 2622 - DNA, 265 bp, Glycine max
  unsure (1)..(265): unsure at all n locations; Clone ID: 701040395H1
tctcaccaaattcttattagaacgaaaaaagaaaagaaaagaaaaaagagcgatttttccctcaccaaagaagaaccaaaatcaatggcggatcaactcaccgntgaacagatctccgagttcaaggaagccttcagcttgttcgataaggacggcgatggttgcatcacaaccaaggagcttggaactgttatgcgttcattggggcaaaacccaactgaggcagaactccaggtcatgatcaatgaagtggatgctgatggga

SEQ ID NO: 2623 - DNA, 269 bp, Glycine max
  unsure (1)..(269): unsure at all n locations; Clone ID: 701040396H1
cttaatttcctcactcacaaggaacaccaatgacaaagctattcaatttcctcccntncctnttcctcaacatctttcatccaaacaatttcagcccaagtagcaccggcaccagcgggacccaccaacatcacccaagtgcttgagaaagcaggacaattcacaaccttcatcaaactcctcaaagcctcacaaatagctgatagaatcaattcacagctaaacaactcaaaccaaggcctaaccgtgtttgcacccactgataatgc

SEQ ID NO: 2624 - DNA, 280 bp, Glycine max
  Clone ID: 701040501H1
tccacccttctcctcagaagccatggtcgtaaatctctctccctctccctctccacctttacattccagttccataatcagattggcaaattcaaagtcacccatttcagaaccatggttgagactcaaaacccacttcccaaaaccactcctttccccaacaagtgtgaacttcacttgcaacaagaatcaatttttgcacggtaaaaacaggaacaggttggatttcaggacttggtctatgctggttttgattatggaaactttgaaggggctcagt

SEQ ID NO: 2625 - DNA, 278 bp, Glycine max
  unsure (1)..(278): unsure at all n locations; Clone ID: 701040502H1
cgtggacactgcaaattatctgagaattgcttccggaagcagagctgaagtgcaacaagtgancaacggagaaggccaaagcccgttactcttgcttcttcagttgacttaatccgtctctagggcatacgtcagcgcgtgtgcttaatcgagagttgacnaagaagatggagaataatccgaaggancaagcggagcagcaaagggtcaatttcaacggagaccctcacattcacgacaatggcaacgtattccaccacttncaanngnaacncgng

SEQ ID NO: 2626 - DNA, 275 bp, Glycine max
  unsure (1)..(275): unsure at all n locations; Clone ID: 701040503H1
cttatctatcttcacctccatcttttaacagttcccctcgaaacttctgaagatgggtggcantgcattgcggacgcttggatgattctttcagtttaacctcaatcaaggcctatattgctgagttccattcaaccttgntctttgtttttgccggtgttggttcagccatagcctatggtaagttgacatcagatgcagcacttgatcctgctgggttactggcagttgctatttgccacggttttgcactctttgtngcagtttctgttggt

SEQ ID NO: 2627 - DNA, 274 bp, Glycine max
  unsure (1)..(274): unsure at all n locations; Clone ID: 701040505H1
agaaaacgaaaaggagaagatgaaatgggatatgcagatggaggaaatcgaagcgattatggagaaaatttgggacctccacgataagctcagcgacgccattcactccgtctccagatcccactttctcacttccgtcaaaaccctcaaactcaacaactctccaccgacaccttcccaacgccgccgtcgccgctgccgatgaccgctcctccggtttcgttttcgtcaaggactttagaccgctcgcngtcgccgataacgacaacgatga

SEQ ID NO: 2628 - DNA, 270 bp, Glycine max
  unsure (1)..(270): unsure at all n locations; Clone ID: 701040506H1
cttctttctttcgatcagggtttcccctcgtctccgggctcgttncgttctcgaataatgcgatctacgataatgactcgcggtagccagagggatcgtgatcgcgaaagggctcaggctagaactggtgctaaaggcaagcagaaagatgatggattgacccctgaacagcgcagggaaagagatgcaaaggcgctgcaggagaaggccgcaaagaaagcngcacagggtgcaggagggaatatgcagctggaagcaaaaaataggcat

SEQ ID NO: 2629 - DNA, 267 bp, Glycine max
  unsure (1)..(267): unsure at all n locations; Clone ID: 701040508H1
atttttcattatttacttctcccagaactaacttggttttgtctcctgtggacagagaatgccatgataagtgttacagntttcaaagtctgcgcgccgggtatcagatnttagantcagagataanccantgcannanatatggcaaggctcactnncantcccagatttgtgcttctgtaacttgcactcctgattgtggacggtgccaatttttatcagatgcagtactacctttcantttacttcgtttgtnanctgantgga

SEQ ID NO: 2630 - DNA, 86 bp, Glycine max
  Clone ID: 701040509H1
cgtgtcgtcgacgttgttggacggtgcctccttcccgatcctcttcgacaacgaccaaggttcgagaagctcaacgttctcgacgg

SEQ ID NO: 2631 - DNA, 273 bp, Glycine max
  unsure (1)..(273): unsure at all n locations; Clone ID: 701040510H1
gccgttcccatccccttcccttccctctccgcaaccccactcgctcacctccgctgcttcctgcacgctctccccacgcgccttcaagatcgttcttttcaactccgaccaccacccagacgcngccggcaccgccggaaactgggactgcggctctttctctctctactctagggttgttggtgttngtgatgacaccatggaggagttttgtcggattcttgccggaaaaggttggagcttttacaaaaccaagaaaaacccttcttccga

SEQ ID NO: 2632 - DNA, 272 bp, Glycine max
  unsure (1)..(272): unsure at all n locations; Clone ID: 701040511H1
ttctcacactacttactctctttctctctactaaagggtttccnttgntctcttccancttccaannnntgncgattatntcangcagnngcatctgtnacatgncaagactagatgcagcaaaagtatcnggtgctttgctagagaaaggccaaaatgcgtgtcatagatgcttcacttacacttattncgagaaagagcaaagcttaaggganaacttgtgcgtgctttgggaggtgctaaagcaacttcaactttctggagttcctttg

SEQ ID NO: 2633 - DNA, 273 bp, Glycine max
  unsure (1)..(273): unsure at all n locations; Clone ID: 701040512H1
tctaaagaccgagtccgactcggagggngaagaaggcaaactcagtaacctttccttccttcactacacgcgataacagacctcagtgtctgagacgcacgcaacgtgcattttcccatacgaaggacaccatcacgcngttttcgcgtccccgtcgtttcggatccatcgtgcatcgtttttgtcttcttcttccattagtttagttgagaatcaatcccaagacaccgagctggagcntccgcncgcnaccgcgctgcctccaaggtcaga

SEQ ID NO: 2634 - DNA, 272 bp, Glycine max
  unsure (1)..(272): unsure at all n locations; Clone ID: 701040513H1
gtttgtntcacccaatttcaaaatnagttttnnntcctttccctcctcaattactagaatattaattactgttcaaagtctggaggtcttccactgtcaattccgttatttcagcgtttatttgggatcgttcttacttttcgactgtaacggatttattggatcatctcccacgcccttttcaattattttttggggaatttcatttcgttttatttgtctcgcctgtgatttgaggcaaaagggttgtgttcacgagtgaacggtgttga

SEQ ID NO: 2635 - DNA, 275 bp, Glycine max
  unsure (1)..(275): unsure at all n locations; Clone ID: 701040514H1
gatggcacgcttgtnactgctcattttcgcgttctgcgccgtcgcngtcgncgtcgcgggctccctccttccgatgatgccaaccctatcccgtttaggcgtcggacttggagtcgcangtgctggacgtgatcggacagagccgccacgctctctccttcgcccgcttcgctcgcngccacggcaagcgctaccgttcctcgacgagatccgcaaccgcttncggatcttctctgataatcttaaactcatcagatccaccaacaggaggtctc

SEQ ID NO: 2636 - DNA, 146 bp, Glycine max
  unsure (1)..(146): unsure at all n locations; Clone ID: 701040516H1
cttggctggcaactgtatataaggcaatgtattttcactttgaccgcactgatttggttgtccttgatgaagcatgtctgttgntngctccacaaacaaggccttgcaatgacttatactaatgttacaaggccttgtttgtgagc

SEQ ID NO: 2637 - DNA, 273 bp, Glycine max
  unsure (1)..(273): unsure at all n locations; Clone ID: 701040517H1
cttctgaaagatctcattgttcagtgtntgnttagactgaaagaaccttcagtcctattgagatgtcggaaagatgacctggcacttggtagagcatgtgctggattcatctgcacaggantatgctgagaaagcaaatgttgatcncccagagatcattgttgacaaccaagtttatcttccacctggacccagtcatcacaattctcatgatctctactgctcggtggggnggtgttggttctcgtgatggaaagatgtgtgcgaaaatac

SEQ ID NO: 2638 - DNA, 276 bp, Glycine max
  unsure (1)..(276): unsure at all n locations; Clone ID: 701040518H1
cttagncacacgtactcttccacaatgtcttcctcaaagctcttcaccacttttcttttctncactaaacttagctctccttctccaaacatcttttggagccgaccctctcttccatttctgttcaaattctgagaacttcacagccaacagtccctatgaatcaaacttgaaaacactcatcaactcactcatctacaagaccccttcaactngttttggtgttggctctgtnggccaataccaaaaccaaaaggcatatgcgcttgccctttg

SEQ ID NO: 2639 - DNA, 88 bp, Glycine max
  unsure (1)..(88): unsure at all n locations; Clone ID: 701040519H1
gtactcgttncaattanaaacaatantgaagnattttgncctacttgagcccaaaaacaacatgcgtttttgtagttntttcccnncg

SEQ ID NO: 2640 - DNA, 273 bp, Glycine max
  Clone ID: 701040520H1
tttcgggagaaaaagcaatccactcagagagctagaagaattcaacgatgcctccgctatgatgataaatacggcaatacccgcctctatgtggggcacttatcttcgaggactcgttcccgggatctggagcgtgccttcagcagatatggaagagttcggggtgtggatatgaagaatgatttcgcctttgttgattttagtgatcctgcgagatgctgatgatgcaagatataacttggatggtcgggatgttgatggaagtcgtattat

SEQ ID NO: 2641 - DNA, 272 bp, Glycine max
  Clone ID: 701040521H1
gagggagagtgttgacgctccatcaagatgggtatttctagggattccatggcacaagaggcgtgccactggtggcaagaagaaggcatggagaaagaagagaaagtatgagcttgggcgtcaggccgcaaacaccaagttatcaagcaacaaaactatgccggaggattcgtgttcgaggtggcaatgttaaatggagggcattgaggttggataccggcaattactcatggggtagtgaagcagttacttcgcaagactcgtattctaga

SEQ ID NO: 2642 - DNA, 270 bp, Glycine max
  unsure (1)..(270): unsure at all n locations; Clone ID: 701040522H1
atccagacgcgttggcaaaggcattcgtggagcactactacagcaccttcgacaccaacaggaacggcttagcgaatctctaccaggagggttccatgctcactttcgaagggcagaagatccaaggcgcttccaacatcgttgccaagctcacctccctcccttttcagcagtgccaccactgcaattctccaccgtcgactgccagccctccggcgtcaacgccgggcatgctcgtcttcgtcagcggaaacntcagctcgccggcga

SEQ ID NO: 2643 - DNA, 266 bp, Glycine max
  Clone ID: 701040523H1
ttgtagttattctctttcttcttttttagccacccctctcttgaaaaatctagatctcgttcttccttgatctacgttacgcttttagtgaccggatctgtatggatctgaaccagatctacacgccgatggtggttttggcctggtacaataaatcttccatcggagttttgctctgtatagatactgtagataatcgatgagaagaacgcagatccagccgcttccgcttgttcgatcactacagacgcttgtatcggattatc

SEQ ID NO: 2644 - DNA, 269 bp, Glycine max
  Clone ID: 701040524H1
cttaaatcagaaatggaagcaatgcgtgattgtgaccctttatctgctcgtcactggattgttaggaacactaggactgtaaaccgaactgggcatctaactggttacaagctagtacctggctcaaattgtttacctttagctggctcagaggccaagtttttgagaagggcagctttcttgaaacacaacctttgggttactccttatgcacgcgatgaaatgcatcctggaggagagttccctaatcaaaatccacgtgttggaga

SEQ ID NO: 2645 - DNA, 272 bp, Glycine max
  unsure (1)..(272): unsure at all n locations; Clone ID: 701040525H1
tcaaatttcactgctaccaagacttcagcacagactgttgtcaacaagactccatccgtgatccccattacagatactgtgaaggttgatgttcagannggcaatagcagcagtagtaataacaaccagaacgcaagttcttctttcaagaatcagccctcacaatctgaccattcctcaggacatcntaattatcagagaggtggtgtttctncagagaaatcnnnnnnnnggcgaatggtcccatcgtagagtgtaccaaggaagaaatc

SEQ ID NO: 2646 - DNA, 251 bp, Glycine max
  unsure (1)..(251): unsure at all n locations; Clone ID: 701040526H1
agcaatttgcnagttgcaatgagacaacgaaaaggctccttcatcagcttcttcgagtagcnacgagttgagcaaaggcatcaatggcctcgacaaggttattcttcgcgacgcacgtggtagctccgctgaggtgtacttgtacggtgctcacgtgacttcatggaagaatgaccatgccgaggaattgctttttnctcagtagtaaggctatctttaagccttccaaagccattctggagggatcccaa

SEQ ID NO: 2647 - DNA, 259 bp, Glycine max
  unsure (1)..(259): unsure at all n locations; Clone ID: 701040527H1
aagccatcccatatccttttgttttgttctcttcagtctgtttgcgagtgcgagtgaaaaaaaatgggtgggggaggagctatgaggtcggcggcgaagatagccggaattggcgtgtccaaggcggcgctccggccttcggngctccctacggagcagacggtccgcaacgctcgcgaccaacggcggtctccggagtgtcgtcgcagtcggcgaaatccgcggaggtggcgccgtgcacacggcactgcctgggacg

SEQ ID NO: 2648 - DNA, 242 bp, Glycine max
  unsure (1)..(242): unsure at all n locations; Clone ID: 701040528H1
anttattcattntctccaccaagccataatgaataataatnaagtgttatagnaatacctattgaaattganagtagcaanaagcaaganaccacaaacctgcaaagcttgtccatatatatttnccctttgtttggtggtggtttttgtgttccgatgggaaacggnatagggnagctaanggtgtgttcaccggaaacggtggagggggtctcggaagcaggatatatcctttttaataa

SEQ ID NO: 2649 - DNA, 270 bp, Glycine max
  unsure (1)..(270): unsure at all n locations; Clone ID: 701040529H1
aggttgagtagttcttcatcatagtcttaaacattaaaccttagcaanactcaacaatgctagacatcanangctanctcgtactcttcttcctatggttcatatcaaccattctgatacgttccatcttcaagaaaccacagcgtctaagactcccaccgggtcctccaatttcaatacccttgctgggacacgcgccatatctccgttcactgctccaccaagcattgtacaagctatcactgcgctatggacccttgatccagtcat

SEQ ID NO: 2650 - DNA, 269 bp, Glycine max
  unsure (1)..(269): unsure at all n locations; Clone ID: 701040530H1
gccagctgaagcatcaccggtggtgtcaaagcagttgtctgacaccatttcctagttccaaaatgattgatttgaaagaattgtccttggtcagtggaaaagctgcatggatggcttacctggatanctactgtttggatgccgatggtgctctttttgatgctgcattactttctgccgttgcttcctatctcatttgcaaattcctgttgttgccatgaatgatgatggcaaaatagtactcgtgtctgaagaanaggacaaaagcg

SEQ ID NO: 2651 - DNA, 274 bp, Glycine max
  unsure (1)..(274): unsure at all n locations; Clone ID: 701040531H1
gcatcatggcctcganancagtgctattgttggctatgtgtgtgcttccggccatggttgtggccattncgacccagcaaagncccctttttgcgtgaagggtcgcgtctactgtgacccttgccgtgctggttttgagacctcagcaaccacctacattgccggtgctganattatgttgcaatgcaagagcagggttagcaacgaggttgtgtacaccaagaaggggtacactggactcaactggagcatacacaatgtacgtggacgagga

SEQ ID NO: 2652 - DNA, 283 bp, Glycine max
  Clone ID: 701040533H1
gttgttgttctaaaacgtccacacattctccgtcgccacaacaacaatggctccgaagaaaggtgtgaaaggttccgttgtagcagcgaagaagaaggttcaggagaaggtgacgaatcctttgttcgagaagcgtccgaagcagttcgggatcggaggcgcgctgccgccgaagcgggacctgacgcggttcgtgaagtggccgaagaacgtccaaatccaacgcaagaagcgcatccttcaagcagagctcaagtccctcctgcattcaaccagttcacca

SEQ ID NO: 2653 - DNA, 272 bp, Glycine max
  unsure (1)..(272): unsure at all n locations; Clone ID: 701040534H1
cttctccattgcctccttcgtcttaccatccaggttataggctgaaaagggaaggggggagagagagtgtttgcggcaatggaggaaccgagcaaactgaagcgtgccatgattgattccttggctggggcaatttctggtggaatatcacgnactgttacatcgccccttgatgttattaagattcgattccaggtccagctagagcccacatcttcatgggcattactacgcaaggatttggcttcagctacggctgcagcatcaaaata

SEQ ID NO: 2654 - DNA, 270 bp, Glycine max
  Clone ID: 701040535H1
aaacgctcggcgcaccttagcatataggctggcaggagctctgtcttcgtcaaccgcaagcgcgtctcgctgtcgcttcgcattggcgttgcaccacgccaaacaaaccgtacccattcctcacccggcgagtttcgcggttcggactcaatcttcgggttcgggttactcgcccctgaacgacccctccccgaactggagcaaccgtcccccgaaggagaccattcttctcgatggctgcgactacgagcatggctcatcgtcaggagt

SEQ ID NO: 2655 - DNA, 239 bp, Glycine max
  unsure (1)..(239): unsure at all n locations; Clone ID: 701040537H1
caggaaaagaagctgtgtgcagttattcaattaccatncacagacattgctactatctgtttctgacaaagccttccgcttgattgggatgctttttcctggggatatggtcgtatttaagccgcaattgtcgagtnnnnnnnnnnnnnnnnnnnnnnagatgcaaaaccaacagcaacatcttccgcagttgcaacaacagcagcagctacctgcacatgcagcaacaacaacttcct

SEQ ID NO: 2656 - DNA, 242 bp, Glycine max
  Clone ID: 701040538H1
tttcacagcagcagtagccactgtggttgcgagctccacctaaagatttcagactcgtcaagcaagaatgggccgctataagaatccaaactgctttccgcgccctcttggcaagaagggctttgagggcattgaagggagtggtgaggattcaagctcttgttcgggggagacaggtgaggaagcaggctgcggtgacattgaggtgcatgcaggccttggttcgtgttcaggcccgagtt

SEQ ID NO: 2657 - DNA, 263 bp, Glycine max
  unsure (1)..(263): unsure at all n locations; Clone ID: 701040539H1
gcctgtatctcaagaagcttccaattatgatgaggtttttatgcagcagagcttgctctttgatgatagtctgaaggatttgaagaatctgagagcacaattatattcagcagctgaatattttgaactctcatactccaatgatgaccaaaaacaaatagtggtagaaacattgaaggattatgccatcaaagctctgtaaatacagtggaccattaggttccgtgacctacaaagtaaatgnattgttgggtgagaaagtt

SEQ ID NO: 2658 - DNA, 267 bp, Glycine max
  unsure (1)..(267): unsure at all n locations; Clone ID: 701040540H1
gattcagccattctaataaatganatgggggtcaatggagattgttatgatggtagaaacaaggaagttaacccagttcttggcgaaagctcagaatgggaaattcaatgggaggatcttgatattggtgagcgtattggtattggttcttatggtgaagtttatcgtgctgattgcaatggcactgaagttgctgtaaagaagtttactggaccaagattctctggtgatgcgctagctncagttcaaatctgaagttnagatcag

SEQ ID NO: 2659 - DNA, 270 bp, Glycine max
  unsure (1)..(270): unsure at all n locations; Clone ID: 701040541H1
ccaagatattcctcaacgtaatccaatattcctatctaatagctaccaagctattattctgtcataagaaaaagaaacacacaaaagagaaacaagtcgttagccacagcannagtcgatgcttactagtcttagttaggcctcagcgtcagttcatgaaaacttttgcttttataggaattttgctcagggaggattcttgttgtattgttgctgatagcctagaggtggaagttttagtctttggttggaactagttgttggctttgt

SEQ ID NO: 2660 - DNA, 269 bp, Glycine max
  Clone ID: 701040542H1
cttctatgagacatatgggtttgtcattcaacatactcagtggccttgtctgcaagttggcaatgcacagagaccaaactatttgccaatggaggtttgcaagatagtggagggtcaaaggtactcgaaaaggcttaatgagaggcaaatcactaatttgctgagagttacatgccagcgtccttctgagagggagcgtgatatcatgcagacagtacaccacaacgcataccacgaagatccttatgctaaagaatttggaatcaaga

SEQ ID NO: 2661 - DNA, 271 bp, Glycine max
  unsure (1)..(271): unsure at all n locations; Clone ID: 701040543H1
attctcacactacttactctctttctctctctaaagggtttcctttgntctcttccaacttccaagaaatnnacgatnatatcacgcagaggcatctgtnacatgccaagactagatgcagcaaaagtatctgntgctttgctagagaaaggccaaaatcgtgtcatagatgcttcacttacacttattcgagaaagagcaaagcttaagggagaacttgtgcgtgctttgggaggtgctaaagcaacttcaactttcttggagttccttg

SEQ ID NO: 2662 - DNA, 270 bp, Glycine max
  unsure (1)..(270): unsure at all n locations; Clone ID: 701040544H1
cctcgctctatttctcagtctctgtgtttgcggctgaggattccgaacgagtgaccttcttcgtttctncgtaaagtttaagtaatcatgggtaaggaaaaggttcacatcaacattgtcgtcattggacatgtcgactctgggaagtcaactaccactggtcacttgatctacaagcttggaggtattgacaagcgtgtgattganaggttcgagaaggaggctgccgagatgaacaagaggtcattcaagtatgcctgggtgctcgac

SEQ ID NO: 2663 - DNA, 270 bp, Glycine max
  Clone ID: 701040545H1
tcaaaagtcataaacccaatttccatttctacaaaccctatctctcttcttacctaatatatacaaatatctcaccaattaagttttccaaccttcctcaaggatatatctctatacaaacactttgggagcaaagtatagctatgagattgtagattactatataatcataaagaaccatttcaagtttgaattcattcattttattcttttctcaattcatcaacaatgacccttatgaaaaccctatggaaatcaatcttccccggt

SEQ ID NO: 2664 - DNA, 271 bp, Glycine max
  unsure (1)..(271): unsure at all n locations; Clone ID: 701040546H1
ttcttcctctgcgcaggaattaggaatattcgacaggtagagtttcttcaatggctcctaaagttgataagaagaatgatccanaggcccaggccttgaagactgctaaggcagttaagtcaggtgctacctttaagaagaaggtaaagaagatccgaacttctgtcactttccacaggccgaagaccttgaagaaggataggaaccccaagtacccttcgcattagcgccccgccgaggaacaagcttgatcntatcagatcctgaaata

SEQ ID NO: 2665 - DNA, 270 bp, Glycine max
  unsure (1)..(270): unsure at all n locations; Clone ID: 701040547H1
gctactctagactctagtagtagcagagtagcatcatcgtcatcatcaaaccttggtgaatcaaaaanaaaattagaagncaaagatgttgttggggaaganacctcgtcctccaattatgaanagaacaacaagcatgtcggaaataaccttcgatctgaacacgtccttggacgatgatccgaacaactccgtgaagggaccaggaggagatgggcctctgttgggctcaacggtttagatcagaacagggtttgggccatggtttca

SEQ ID NO: 2666 - DNA, 272 bp, Glycine max
  unsure (1)..(272): unsure at all n locations; Clone ID: 701040548H1
ggaaggttgcttgtattggtgcctgggcatcctggcaagagnttcattcactgttgccagggctggtcagaatggataccaccaccgaacagagttgaacaagaaggtttacaagcttggcaaagctggagatgaatctcactctgctcttactgagtttgataggaccgagaaagacattaccccaataggtggtttccctcactatggtgttgttaaggatgattatatcatggtcaagggagctgcgttggtcccagaaaagggttant

SEQ ID NO: 2667 - DNA, 271 bp, Glycine max
  Clone ID: 701040549H1
gtactttcttgcgaaacagaagggcgaaggggcaaacacaacttttttgtttttttgtagagcgagagagaaaaaaatgttggggatcttcagcagttccgtggtgtcgccgccggaggagctggtggctgccggcagcagaacgccgtcgccgaagacgacggcggggaagctgctgaaccggttcgtggagaacaaggcgtcggcggtgtcgctgcaggtgggagaacacgtgcattggcttacacgcaccacaacgagtcaccgtggc

SEQ ID NO: 2668 - DNA, 266 bp, Glycine max
  Clone ID: 701040550H1
gcttctgtcagcagaaaccgtagcactataattgttccggctggaagctccagggatgaaggatgggcagcattcaggaacattttggcagagatcaatgaagcctcaaggcttttcattctgcccaatcaggtttccttcttttgaaacagacatttttcttcctgcttagccacaagaatagtcaaagttgttgcttttttttattcatctatttgcttgtttgcatccgcaatagcaaaatctgaatcctcagagcatctgtt

SEQ ID NO: 2669 - DNA, 271 bp, Glycine max
  unsure (1)..(271): unsure at all n locations; Clone ID: 701040551H1
cagaggtgtactctaaggaattaaaaggtgctatatctgccttgggcctcacttcaaggccatctattaatagcatctggtccaaaaattanncctgcacaagtggaatggcactgagttgaatggtattgcattttttgacgcaccgccattacatgttgtgagcttaaacattgtaaagaacttcatccttattggcgatatccataaaagcatatactttcttagttggaaagagcagggtgctcaattgagcttattagccaaggat

SEQ ID NO: 2670 - DNA, 271 bp, Glycine max
  unsure (1)..(271): unsure at all n locations; Clone ID: 701040552H1
gacacacctgtcggcaaccccaacactaagcaagagaaaggaaaaacacttcactccaattccaaacctgttgctgaaaccccaaaaaaacttagcaacattctatgtttctgttcagaggaaaaaagaaaaaaaacatagcgttgttgtgttgagttgaaaccgnttcagctcaagactcaggtcaatccaaatacacatttagaagtttcaattcaatttttcaactcaatgatggtccaagagcgttcacttcccaaatcagtgaacc

SEQ ID NO: 2671 - DNA, 264 bp, Glycine max
  Clone ID: 701040553H1
tggaagtctcagcatatcgtccgttcctgagaaagattttcatctcccatccaccagcagtagagattctcccttccaagacagttcacactgaaaaagataatggggagaatatagatcattttaagggtttagttagtgttgccgatattgttggattcagtggttcagagacaatatccttaaaacctgatggttatctgaaatcctggactagttccatgatctgttagtgttcttaagcatgagatcgtgatggacaac

SEQ ID NO: 2672 - DNA, 266 bp, Glycine max
  Clone ID: 701040555H1
atgagaatggtgaaagacagtaagaatgagagattaactttgcttcttgaagaaacaaataaactactggtaaatttaggagcagctgttcaacgtcaaaaggacaacaaatattcaaatggtattgaacccttggaagattctgaagctgatttactggagtcagatgcttctaagaatggagtttctaaggaatcacctcttggatgaagatatagatttgatagattctgatcatatggtgattctagtgatttacttgaagg

SEQ ID NO: 2673 - DNA, 268 bp, Glycine max
  unsure (1)..(268): unsure at all n locations; Clone ID: 701040558H1
tncccactagacctttctgctctcatggccttctctcctgtaccaactgctctggantncttgccagttgaagaaagctacaacactgaggccaatgctttttttgattcaaggtttgggtctgggaaaaggcagaaaattgaaaatctccttgatgctaaaagcttactttttgctgaaccttggtacaagactgttaataacttgcacctgtggaatgcctctttcatgatgttgtattaatatccagtccaatgggtattatggg

SEQ ID NO: 2674 - DNA, 267 bp, Glycine max
  unsure (1)..(267): unsure at all n locations; Clone ID: 701040559H1
gatacagagagcactgttgatgatgatatcttggaagatgangtggttcgcagcttgagaacaagcccaatccattcttcaagggatcgcacctctattgatgactttgagattataaaacctatcagtcgtggggcatttggaagggttntcttggctaaaaagagaacaactggtgatctttttgcaataaaggttctcaagaaggcagatatgatccgtaagaatgctgtggaaagtatattagcagaacgtgatatcttanta

SEQ ID NO: 2675 - DNA, 270 bp, Glycine max
  unsure (1)..(270): unsure at all n locations; Clone ID: 701040560H1
ctttaactcatgcttttncccacttgcaaactccaaattcactctctgncagtttttggcagccanttaagaagaacttaacagacatatanacatagtgatcgtncatgtctacgcaaccaaagcttggtcggatttccagtancaganaccgagttgaagacactctctgctgctcaccgtaacgaactcatttctctctctccaggtatgtggctcaggggaaagggatttgcaaccccataatttgattgatgaacttgacaacat

SEQ ID NO: 2676 - DNA, 267 bp, Glycine max
  Clone ID: 701040561H1
gttgatttgtgcttatagaggtacttcagattttgggggtccaagttttcctgttaatgagataaagccagtcgtacaccccccgtcctttgttcaacccaaatctactgctcagcctggtagtatggttccacctgttattgatctaactggacttgaagtttcagataatggccagaaaatgattactgaccttatgactaactatgacacaaatgttcgaggcaacaagaagacaagttcctgtaatcacttagctgcagaaaa

SEQ ID NO: 2677 - DNA, 269 bp, Glycine max
  unsure (1)..(269): unsure at all n locations; Clone ID: 701040562H1
ggaagtgagccagcagaggaaggactacgtagacnctcngccagcccccctcatcgacttggccgagattaagctctggtncttctacagagccctcatcgccgagtttntcgccacantcctcttcctctacgtcaccgtcgccaccgtcattggccacaaaaaacagaccggaccatgtgacggcgttggccttctcggcatcgcatgggccttcggtggcatgatctttgtcctcgtctactgcaccgccggcattctggtggaca

SEQ ID NO: 2678 - DNA, 266 bp, Glycine max
  unsure (1)..(266): unsure at all n locations; Clone ID: 701040563H1
aaactgggaagagaaggtggtggtcttgttgccattctgatctaaagcttgtgtctttctgcttcgtttgcatcttctngctgcgtaaagtngattctnttctgattcttccgtagatttcatctctgaaactagttctantacttnatctacagatctctatattctaggtgaaggtttgcntttgatccggctgggagttttgatagacttgatttaactcttaagagccatatgctcncagtggtcggatatagtacatcaga

SEQ ID NO: 2679 - DNA, 276 bp, Glycine max
  unsure (1)..(276): unsure at all n locations; Clone ID: 701040564H1
gtcactgtggatggtagcatgtcaaactcatttanaggaaatgaccaggtttcaaaaaaccagattgtgagaaagagaaagcagcctggatcctcatcaggtcctgacaatagttcaggaacgggcaaatacaacaggtccatcaccaagttcagcacccttcaactccgtcgacttcatacgcctgggagatgngatatcaatggcctgccttgccgcatagtggtagttcttcaaagcctctaatgatgtttagcacagtggtatggaaccctt

SEQ ID NO: 2680 - DNA, 271 bp, Glycine max
  unsure (1)..(271): unsure at all n locations; Clone ID: 701040565H1
cttaattcccagtttgctagaacacaaatctcttctatgcaaggnggaggacctactcctacgctggtcaaggccgaggttccgtggtctgctagaaggggaagtctatctgaaaaggatcgcgtcataaaaactgtgaaaggaatactgaataagttgactcctgaaaaatttgatatcctgaagggtcagttaatcgattctggcattacatgcagctgacatcttaaaggatgtcatttcatttttntgataaggctgttctagaacc

SEQ ID NO: 2681 - DNA, 269 bp, Glycine max
  Clone ID: 701040566H1
attttcaattgttgcccctaatgtgtcagaaagggtgttgggtcctgcaactggcagcaacccatttggacctgatatttataggggggcagttttgtcatcttctcccgcagtgccatatcaatctgcaccatttcagtatcctgtcttccctttcaattccagctttcctcttccatcagcatcattttctggtggatcaactccttatgtagatacaacttcaggagggaggctttgcttccctgtagtaaatcacagcttatagg

SEQ ID NO: 2682 - DNA, 269 bp, Glycine max
  unsure (1)..(269): unsure at all n locations; Clone ID: 701040567H1
gttcatttctacacatccctagctctgtcgttccgtcgttgacgatggcgtttcgggtgcgaancctgacctccgctctctctttcttcncctctctcttgtccatcgcttccgccaatgtcttcttcgaagagcgtttcgatgacgggtgggaaaatcgatgggttaaatcagattggaaaaaagatgagaacgtggctggggagtggaaccacacctctggtcaatggaatggagacgctaatgacaaaggtattcaaaccagtgag

SEQ ID NO: 2683 - DNA, 268 bp, Glycine max
  Clone ID: 701040568H1
ctcgtctgtctttttttctctttctctctctagattttctttcttcttcttctctatgagccctaactcggggccccatagtcgtcgctgctagctagccatgtcgctgaggaaggtcttccgctcccgcaagttctccaaatcgttcaaagaggtgctgccggcggagggcgccgccgtcgagggcggggtcgccggcaccgtcgaggaggcggcgaatgggaataataatgggtggtctagcatgctgccggagatcctcggcgag

SEQ ID NO: 2684 - DNA, 257 bp, Glycine max
  Clone ID: 701040569H1
cgttgaacgtggacatattttatgacccaacaaatctgccattagacgacaaattattctcccctgtccatgcacatttcccaacagatttttattatcaagctaacaatcaatcagaacttcagtatggtacaaatgagaatatttcagaattttttgactcggttgttaattgggatgcgttctctcatgatactagcagtctagatctgagctcatccttccttattaataatacggacaatggatcaggcagt

SEQ ID NO: 2685 - DNA, 215 bp, Glycine max
  Clone ID: 701040570H1
aaatagatagaaggaatttagattaattaaaacaacctttcattcattctgttgtgttgggaaatatgatgttcgactttgccaggatttggacccgaaacacgttaataggtctcggcttgggtcagtttctttctcttctcatcacttccaccggcttcacttcctctgaattggctaaaaaaggaattaatgctccaacttcacagtcgttt

SEQ ID NO: 2686 - DNA, 262 bp, Glycine max
  Clone ID: 701040571H1
ctctcatcagattcgggtcgggttagcgttatcggataacttcgcccataaattctctgtttacggggcgaaaatgacagtattcttagccacgaggctcgtgtttcggagatccccgccgcttctctggcggcgcagttttctcgggcggcggtagaggccgaaaaggacactgttgccgtgccgtcgcttccgttgttcgattactctccgcctccgtatgcggggcccaccgctgacgagattctggcaaagcgcagga

SEQ ID NO: 2687 - DNA, 270 bp, Glycine max
  unsure (1)..(270): unsure at all n locations; Clone ID: 701040572H1
cttcactcttcactcttcactcccaaccctagccaaacgcaaaccattcattcattcagttcagtaactcacctgcaccatggccgcatccattacattgtccaggctcgtctcttccaccctcaccactgcctctttcttcccacccataaccctgccttccaaactctcctctctccgactccccacccgccgncaccccaagccacttcagattctccttcctccaccatcaccgccaccatctccgtcggcgacaagctcccggag

SEQ ID NO: 2688 - DNA, 274 bp, Glycine max
  unsure (1)..(274): unsure at all n locations; Clone ID: 701040573H1
gatcaatcggcgttcaaaaagtttctctgactcttggcagcgcgaagttgngaggagcaccgtttgtncatgggcggttccaccatgcggaaactgaacnccgttgagaaaagaacattcctttcacaattttactgctcactatgctcggaaaccgaatccacgctctctatccctacttctccacaatttcttgtncaccttcgttctccgcttcagatcaacgcnnncgtcgggaatgtctccctcttccgntaccttcctcttcactcga

SEQ ID NO: 2689 - DNA, 257 bp, Glycine max
  unsure (1)..(257): unsure at all n locations; Clone ID: 701040574H1
cttagntttgattctntgttntctgtnnngntctgnntcgcgtattnncttcatacangaacttgaacaatgncagaatgctagggcaagggntnagcaatggccttcaaaagaatcactgaagcccgttntatgnccgtaatgttggaaagcggnacgcttccggtaaggcctgggagaagtagtgcaccaaagaagganaagaaggccaatnnagacnccancaagnntatnngaccanccatgcttnntttgtg

SEQ ID NO: 2690 - DNA, 270 bp, Glycine max
  unsure (1)..(270): unsure at all n locations; Clone ID: 701040575H1
ctctctgtgtatttccctacctctcccttcaagatgcagatcttcgtcaagaccctcaccggcaagacccatcacccttgaggtggaaagctctgacaccatcgacaacgtcaaggccaagatccaggacaaggaaggaatccccccggaccagcaacgtctcattttcgccggaaagcaacttgaggacggccgtacccttgctgactacaacattcagaaggagantactcttcacctcgtcctccgtctccgtggtggcatgcagat

SEQ ID NO: 2691 - DNA, 268 bp, Glycine max
  Clone ID: 701040576H1
gctcgctaaccccagctacttctccctcatccactcacaaaatgtgccaggccctctccgccccatcgcctccgtgtacggcgcttctctccttccttttcttcctcctcacggtggtgggcccggtctcggtctcggcatggcggccgtggccccagaaaaacaatatgaacaccaccgattacgccttcggggactccaagaaatacgaggggtcctcggagttcgtgaagctgaggtaccacatgggaccggtcctcacgaccaa

SEQ ID NO: 2692 - DNA, 271 bp, Glycine max
  unsure (1)..(271): unsure at all n locations; Clone ID: 701040577H1
tgcatatgggatganatgatgtgtcttgcatggcgataacaatacgccaacaattgacaaatacggaagacattncgtcgcatacggaaaaaagctccttgcactcgtcatgagattttaatgattcaaagacaatttttggaggatgaaattttccatgaaccaatatttatggatttgtctactgntttgactattctgcgaaatgagacatttgatctgactggaatcaaggttattgagtatggtttagntagttcttctgtagaaa

SEQ ID NO: 2693 - DNA, 268 bp, Glycine max
  Clone ID: 701040578H1
gttgttgattcaccatgctgtctggtgactggagaatacggttggactgcaaacatggaaaggatcatgaaagctcaagccctaagggacaacagcatggcaggatacatgtcaagcaagaagacaatggagatcaaccctgagaacccaatcatggaggagctcaggaagcgtgcggatgctgacaagaacgacaaatccgtgaaggaccttgttctgttgctgttcgagactgctcttctcacttctggtttcagccttgacgaac

SEQ ID NO: 2694 - DNA, 266 bp, Glycine max
  unsure (1)..(266): unsure at all n locations; Clone ID: 701040580H1
gttgagaagaaagaccccacccggagccaaggtcacaaaggctgccgccaagangaagtgattgcatttggcaattttgctagcacatgtgatcatcaacgtggtttcaaaaaaacttgttccttncagtagtttatctttgcagagtctaggtgtttgttttaccagttatattttgaagtgtccgccgatttcagtagccgtagccttcaaaactgggttcttgatcggcggtaacatttcgttgctgtttgtttttgatgagt

SEQ ID NO: 2695 - DNA, 249 bp, Glycine max
  unsure (1)..(249): unsure at all n locations; Clone ID: 701040581H1
gcctaaagtacctgaattgtctaaacccgagttgcctaaagncacctgagttgcctaaggtacgtgaattgcctaagcccgagttttctaaagtccccgaattacctaaggttcatgaattgcctaagcccgaaatacctaaaatacttgagtttcccaaggttcctcaatttcctaaagcattttcaaccagcaatccttgagtttgaattatgccttatgttgtcctgttctcaggtcgttactggc

SEQ ID NO: 2696 - DNA, 270 bp, Glycine max
  Clone ID: 701040582H1
cgagatcgtgaatgaagagattgacagcgcgcgcgagaatttggagtggaagctgacgatggagaacggattcgctcgcatggacgacgaggttaatcgcaggagccagagcaaccagaccttcacctgcaggtgcgagctccagactccccactgcgacgccgtcggatccaccgccgtcgtcgccatgcgtcacgccggacaaactcgttcgtttccaactgcggcgactcccgcgccgtcctctgccggaaaggcgtaccattccct

SEQ ID NO: 2697 - DNA, 268 bp, Glycine max
  Clone ID: 701040583H1
caagaatggcacttcgttgcttggtgatgtccctttctgttctcttcactcttggtcttgcgagagaaagccatgccagagacgaagatttttggcatgctgtttggccaaacactcccattccaagttcattgcgagatcttctaaagcctggccctgcaagtgttgaaatcgatgatcaccctatgcaaattgaagaaacacagtacccgaaaaccttcttctataaagaagaccttcatccaggcaaaacaatgaaagtacaatt

SEQ ID NO: 2698 - DNA, 271 bp, Glycine max
  unsure (1)..(271): unsure at all n locations; Clone ID: 701040584H1
agaagattttaaaggagggaaggatagtcagagagtttgttggtttcagcaaccagaagcagcttggaagatgaaacgcatttaagaatccatatgaaaatgacagggccggactcacactaccattcatgcttgcgctctcacttccaaacaaacgaaaaacncttactattaccacttaggagtttacttccttcatcgnctcacatcacaattcactaggaagctgtaagaaaaaggatcttcagtgtttcgagacctctgaagaaga

SEQ ID NO: 2699 - DNA, 263 bp, Glycine max
  unsure (1)..(263): unsure at all n locations; Clone ID: 701040585H1
ccgaaatgggaganttgaaaatgtctttggggtttttgtagttgttatgagggtgaagctaaaattatgagatgtcttcctctgtcaccaatggcgatgattctctcactggccacatcatatctacaactattggaggcaaaaatggggaacccaaacagactattagttacatggctgaacgggttgtaggaactggatcatttggaattgttttccaggcaaaatgtttggaaactggggaagcagtggccattaaaaag

SEQ ID NO: 2700 - DNA, 268 bp, Glycine max
  unsure (1)..(268): unsure at all n locations; Clone ID: 701040586H1
cttgcctattgccttttcctatttcgtccatntctgggggcttccangcttcaattacagtggcatctgctgcaaaggggcctgttgttccacctgaaaacccattgcggattaanggggagcttggttggaaagggtcagccgctaccagtgcatttcggccagctgaacctaggaaaaatgctgagacagcatccactactantgntattgcttctgttgacggcacttctatcaaacaaggtcgcctcccntagatttgnactta

SEQ ID NO: 2701 - DNA, 266 bp, Glycine max
  unsure (1)..(266): unsure at all n locations; Clone ID: 701040587H1
gagatccactgctgncagaatccaatttgtgacactaaatctaagttactatgactgcgcagacccaagaggagcttcttggcgcaacacctcgaacagcaaaanatccatgatgatgaacctgtcgtcgagnnnnnnnnnnnnnnnnnnnnnnnnnnnnnnnnnnnnnnnnnnnnnnnngaccatgacgaaggactanaaggtgatgcatctggtaggtcgaagcagaccagaagtgaaaagaagagtcgcaangcaatgcttaa

SEQ ID NO: 2702 - DNA, 243 bp, Glycine max
  unsure (1)..(243): unsure at all n locations; Clone ID: 701040588H1
aaagaacataagataacaaacagaaagcgcttataaatggctttccacgaccatctaccgcacgaaatcacgttccagccgtttaccgaggagcagcagttaggtcagagcagggacatgcagcggctgctcccgctctccggcggggngccgacgtggctgaacaacagcaccgcgggcgacgctccgccagcagaatttcctccacctgcagccggaatccgccgcaacgacgcagcaaaa

SEQ ID NO: 2703 - DNA, 270 bp, Glycine max
  unsure (1)..(270): unsure at all n locations; Clone ID: 701040590H1
tactctaaccactttgcttcagctatggagtttcgttgccttccattggttttntctctcaatctgatcctgatganagctccatgntgccatacctccagaagtttactgggaaaggatgcttccaaataccccaatgcccaaagcaatcatagactttctaaaccttgatcaacttcctctttggtatggtgctaaggaaacccaatctcacagatcaaatattcctgtatgatgctaagaaaacccaatcaacagatcaagttcctc

SEQ ID NO: 2704 - DNA, 264 bp, Glycine max
  unsure (1)..(264): unsure at all n locations; Clone ID: 701040591H1
ctttttacttcccctatggctcgtcactccttgctcttagccctccncctcttcgccgcngtnncccatcgccgcgatggcgtggcngcgtccgacgccgacgacatcctgatccgtcangtggtgccagatgttggcgaacgnggaggaggacaacctgctgaacgccgagcaccacttcgcgagcttcanggccaagttcgcnaagacctacgcnaccaaggaggagcacgatcatcgcttcggcgtcttcaatccaactcc

SEQ ID NO: 2705 - DNA, 267 bp, Glycine max
  unsure (1)..(267): unsure at all n locations; Clone ID: 701040592H1
aagaanatgaaagtccttgttttctttgttgcnatagttctagcagcatgggcattgccatggctcagaccatgaccatgaccatggccacacctaccaaattttccctctgagaatgaaaactggccatggtggccactacattccggaggtatcatgccaaagttggaggcttggtgtggaagcacacaacgtcattgactggaaaaccgttcctcaagattgcgagggatatattgggaatacatgcttggcgaacaatataga

SEQ ID NO: 2706 - DNA, 267 bp, Glycine max
  unsure (1)..(267): unsure at all n locations; Clone ID: 701040593H1
gaaacctaacaacgccatagcgtttcctaacccatcgtgcgaggtcccttcgacctccgcacaaccccaactnccaaggggctgtgcctgtngccgtcgtcttccacgctcatgtcggaancccgacatccacgcgccgcngttntgntcnagcgntcgncgctcctgcagtcggcntcgccactcttcaagcagcgatcgtngtcgtggaannnttccgcgatgaggcgtggctccgggngcaagggaactgcaagaaccgccgca

SEQ ID NO: 2707 - DNA, 266 bp, Glycine max
  unsure (1)..(266): unsure at all n locations; Clone ID: 701040594H1
ttaaatacaataaatacaatacacttttgtaattatgtgatgtgcgtgtgtgtgtaaagcncttagctatattatagccatcatccaactcaattttggaacaaaganaaaaaggtgaaggatgangatagatgattttngcacntcaaatggtgagtggtgtgaccccacgggaagaaaanaaaaaaanagggggnnaaaaaatttcaaagaggttatggnatttggaagatgntgaggatgacgggggtcaaggaactgaggat

SEQ ID NO: 2708 - DNA, 270 bp, Glycine max
  unsure (1)..(270): unsure at all n locations; Clone ID: 701040595H1
cgcatgcggttttttgagtgtaatcggtcttccaantatggctccttgagaagaatgagtagcagatgaccccttatttgcttcttttacaattacaaaagctcatctccgttttcgtcatcttccccaaaccctcgccgcaaaggccaaatactcccacacccaaattcctcaacttcaacacaccacacaataataacggnatcccttcttccgtttgatcccacttcctatgcccaaaagggttagcgctaacaacagagaaggana

SEQ ID NO: 2709 - DNA, 280 bp, Glycine max
  Clone ID: 701040601H1
agtaattggtggattccagcaatggccgtggttcatggcagttgggtcaagcttgatcaaagaggagaagggcaaggagcgagaagctcacatgctatagccatagtagcacagaaggtgtatgcatttggtggcgaattcgtgccacgtgtccccgttgataacaaacttcacgtgttcgacctagagactttgacttggtccgtggctgatgcatcaggggatgccccaccgccacgtgtcggtgtcacaatggccgtagtgggagaaaccatatatg

SEQ ID NO: 2710 - DNA, 278 bp, Glycine max
  unsure (1)..(278): unsure at all n locations; Clone ID: 701040602H1
aaatctttgtttaattttttgaaggaggttgaagaaagcaaaaggttgttgttttgttttaagtttctttgaaatggttttcatgtctgagatattattgttccctgaaaaaaaaattgaggaaggagagtgggagaaggagagataagaagaagaggagaagaatacctacccagcaagcaggattagagaaaaaaaaaaaagnttancaaactgttgatttgatttattttgatctgcttctnctgggnggttggcaatgtctgcncccatgatca

SEQ ID NO: 2711 - DNA, 274 bp, Glycine max
  unsure (1)..(274): unsure at all n locations; Clone ID: 701040603H1
tcagggtttatacaattttcgatggcttcttcagatgttgagtaccgttgctttgtcggtgggctcgcttgggccactgacgaccaagcttctcgagagagccttctctcagtacggcgaaatcgttgaaacgaaggtctgtttgttgcaggcatcacatctgatctcacacgattcggattcggaattttctcgatccctttctgatctgtgatctctgatctgtttgcgttacttgatcttatgatacttgtgttactatatgatcnttatt

SEQ ID NO: 2712 - DNA, 154 bp, Glycine max
  Clone ID: 701040604H1
gaagggcttttattttattttttacttagtagtacttctattaagtcttgcttccggattgcgttgtctctgtcatgatctggaaatacctctacgagagcatgagtaatttttgcttaactaataagttgtataatattgtgaagtaagcttg

SEQ ID NO: 2713 - DNA, 223 bp, Glycine max
  unsure (1)..(223): unsure at all n locations; Clone ID: 701040605H1
ccttactagaggggccaattcctcacatgtggggtatattaaggtgcctaataagtaaaatattaaaaccttgatattgcggttttatacagttttacttcaattaattcctaatactagtttaagttgaaataaagttatggtatgattctgtcctccgtgaagagaaggacatggatgtacaataaagaagtttgtaataaagttttgattggttnggctt

SEQ ID NO: 2714 - DNA, 273 bp, Glycine max
  Clone ID: 701040606H1
ctctgacacaagaattaagttgtgagatggagagaagtagtgaagaggagatgttaataacgaaaggtccatggacagagcaagaggattctcttctcttcaattacatcactgtccacggcgaaggtcactggaactctgtcgctcgctacacaggcatgcaaagcattaattatattcatcatcttaatcctagcttctttcttactcacacttcatcacgttttcaatcacaggtctaaaacgaacgggcaaaagctgcagattaagatg

SEQ ID NO: 2715 - DNA, 271 bp, Glycine max
  unsure (1)..(271): unsure at all n locations; Clone ID: 701040607H1
ggcntccattttaaagctctcaacgccatctccagcngcatccttatnanaagcacttcgccccaaaaattctngcttcctctccttcancccttcttccaacgctattaattacaaaattaacctctccgcttccctccgatccattcactccctccctcttaaaacctccttgcggatcaaatgctcccaaacagatgggaatggaagtcctggcaaagaggacagtgcttcatgatctttatgngnaagaagggcagagtcctggtat

SEQ ID NO: 2716 - DNA, 266 bp, Glycine max
  unsure (1)..(266): unsure at all n locations; Clone ID: 701040609H1
cattggttggtagttgtctcaaaaatctcttcttgccctttggccataatcaaaagccaagacactgttcatacagctgctcaattatcaagccaaccttgctcggttccactncagaatttcagtttattcttatctaggtagactccttataagtgcgcagaagttcaagtgtagagaatgagtcagcctaagattaaacgccgagttggtaaatacgaggtggggaggaccatggtgaaggtacatttgcaaaggtgaatttg

SEQ ID NO: 2717 - DNA, 271 bp, Glycine max
  unsure (1)..(271): unsure at all n locations; Clone ID: 701040610H1
gaagatggggtcagaggtgtctaaacagatggagcgaagaaagacaatccagacggagaagaagagtctgttccgatctgaaaagcagcggagaagactaccctggctccgactaccgtccccaagacagaaaaaactggatgtcccatctcgacnctcagaaactccgcatcaaccaaatcgtctggcccggcacccacgactccgcaaccaacaaaattggcatccctctcctcactcgccccttcgcccagtgccaatccctctccat

SEQ ID NO: 2718 - DNA, 268 bp, Glycine max
  unsure (1)..(268): unsure at all n locations; Clone ID: 701040611H1
ccgcacttcaccgcccctcgtttcttcacactctgccgtgctctttcggcgcaggtcaagagattcgcaatagaaagtgagaaaaaaaaatgagtcgaggaagtgcaactgctgcgaagggcaagaagaagggtgcgacattcaccattgattgcncgaaccggtggaggacaagatcatggacattgcgtctctcgagaagttccttcaagagaggattaaggttggtggcaaggccggtgctctcggcgactccatcaccgtcgta

SEQ ID NO: 2719 - DNA, 268 bp, Glycine max
  unsure (1)..(268): unsure at all n locations; Clone ID: 701040612H1
attcaatatgagtggcttaccttcactcagtgagaagttagaaaaattccttactctactgagatctgaagatggcaaactagaatcccagatagtcaatgtcctgcaagatattgtagaaattatcatacaggatgttatgtttgatggccatttgttgctgcaaacacctcagcaaacaccttcacgaatatcatgtagagagagggcagaagtttgtncaacattgacacttcttttacacataatacatcggtgatggaaaagg

SEQ ID NO: 2720 - DNA, 263 bp, Glycine max
  Clone ID: 701040613H1
gatttgttgcatgaagcagaatctgaagttgctactcttaaagagaaggtggaattattagaaatgacaattgggagacagagagcagatgttgaggattcacaacgccaactttgtaaggctaaggaagaaagtcttgaaaagtcaaaggaagttgaggctctgacatctgaacttgagagggttaaggaagagaaagcacaggctctgaacgatgaaaagctgctgcttctagtgtgcaggcctattagaagagaaaaaca

SEQ ID NO: 2721 - DNA, 266 bp, Glycine max
  Clone ID: 701040614H1
ctgcttttggtggcatagtttcctgggagggagaaggggcaccttttggggaatctgaccagagcatttctccatcagattgttgacagggaagcacaaggacatcggttcctctcaagagaatacgttcaaccacagtgggtatatgactgtgtgaatgcacgaattattttgccaactgacaattatttggtgggaaggactcctccaccacatttgtcaccttttattaactacgatgaagaaggagcatacattcctgatta

SEQ ID NO: 2722 - DNA, 265 bp, Glycine max
  unsure (1)..(265): unsure at all n locations; Clone ID: 701040615H1
ttttgcntttccttctctctctgtgtctgtctctttcaagttcaaacctcaaaccctagccgtagccttttcaatctttcatgctccttctcggtgagtcactttgcatatgtnacggtttttggggtctttcaattctccttcacgccgcgctttctgggcttctggggctatttcaggtttggtgttataatcattaaagagattcaaggcaaccaattgatttggtggagaactatgactgaagagaaatctggaggatgac

SEQ ID NO: 2723 - DNA, 269 bp, Glycine max
  Clone ID: 701040616H1
acttgaaaacacaattcatttccttgtttccttcccaatcaacacatagaaccagagtgcaaagcttttgcagttcagcaagagaaccaaaaaaaatcccacaccatggatttgctcctagaactgaaaaccgcactggaaccgttccgcgaaacactattgttcacaatcccattgactctattgctgctgggcatagtgtcccgaatccgcagaaaaacggcgccgtatccaccgggcccaaaaggctccccctaataggcaacatg

SEQ ID NO: 2724 - DNA, 277 bp, Glycine max
  Clone ID: 701040617H1
aagaaaacgcgatggttgacgtggactttggaacctcgggctcgccgaagcgccacaaccacaacggcttcatcgtaacaatctcggcgatcttggcgctgttaaaaaagcgcaaagcagcagtgaaggcgagcaaagaggatgaattgaagaagtcgtcgcggccgaagaagcttctcagcaacataagcagcaaagcgcttttcggtcacaagaagaataataagaagcagctgcgaacgtgggaagagacacaacaagcacaagggtggggaaa

SEQ ID NO: 2725 - DNA, 271 bp, Glycine max
  Clone ID: 701040618H1
aaaggatcggtacattctcggcgagcaattgggttggggacagtttggtgtcataaggacatgttctgacaaattgacaggagaggttttggcctgcaaatcaattgctaaagataggttggttacttcggatgatttgaagagtgtcaaacttgagatagagataatggctaggctatccgggcaccccaatgttgtggatctcaaggcggtttatgaagaggaaggttttgttcacctggtgatggagcttgtgctggaggggagctgt

SEQ ID NO: 2726 - DNA, 272 bp, Glycine max
  Clone ID: 701040619H1
ctttcaaatcaactctagagattcaaccaagaaatatagaagctaccggttttgttacatttgtgttagcacgcaaaactttgcaaatatggagagcagcttaggagacatgttggttaaggttgtggtgttcattctagttcaagccttggtttaccttatcctctccaattcatcaaacgtgttcaacaagaacatgaagaaatctaacagcttcaggccggcacgttcggtgagcattcgccggatgctcgctttgatctctgattttc

SEQ ID NO: 2727 - DNA, 264 bp, Glycine max
  Clone ID: 701040620H1
gttgagaccaagacacactcgttcatatatctctctgctcttctcttactcttctacctctcaagtttttgaagtataaagatggcagagacattcctattcacctcggagtcagtgaacgagggacaccctgataagctctgcgaccaaatctccgatgctgtcctcgacgcttgcctcgaacaggacccagacagcaaggttgcctgcgaaacatgcaccaagaccaacttggtcatggtcttcggagagatcaccaccaag

SEQ ID NO: 2728 - DNA, 269 bp, Glycine max
  unsure (1)..(269): unsure at all n locations; Clone ID: 701040621H1
gaacgttccagaccacatacagagntttctctagtgatcttcgttcttctgtggagatcttgttttttcatctcacttttcttctaattaaggaacaagctttccgcagttgaaaaccctagctagctagcttccaccaatttgaatcaccaatggctcgctctttctctaacgtcaaggttctctctgctcttgtggccgacggattctccaacactctcaccaggtaccacaatcgtttctcatctcaatttttatcaaaaaactgt

SEQ ID NO: 2729 - DNA, 271 bp, Glycine max
  unsure (1)..(271): unsure at all n locations; Clone ID: 701040622H1
ctctctttctttttcaaaaccctcgctctcaccgtcgcgccggaatcttccccggcaatgtcggcgccggcggaggctccttccttcactgcctctcctncgtcaganactactccctcacctaactccactgccctctctcctccgnctccctccaccatcaatgccaccgtttctccctccgccgccggaggnccntcaccctnngaccagtaccgttaacagcgggttgtcgacgggtacagtgagcggaatagttataggggccgtg

SEQ ID NO: 2730 - DNA, 266 bp, Glycine max
  Clone ID: 701040623H1
gttgagttgacatcggcgagcaataacaagaagaatgatgatgctaatccgatcaaaatgcaaacttgtgaaaatgtgtggtgtttgcgtttgtgggtctctcgaaatgtgcatgtactcgacggaaagcgtggtggcgagtctcgaaaatcgcgtgtttaaggttggggatccagtgattccagtgagtcctattctgaagcagtgggtggaagaaggcagagaagtcaccaaacttcagctcgaaaatctcgtttaccgcctca

SEQ ID NO: 2731 - DNA, 267 bp, Glycine max
  Clone ID: 701040624H1
aaaaaagtggaattgcttgcatctcgcaaaggccacacacaccgcaaatacaataacactccatcttccaaaacaaagacttcgcgtccaagcaatttctgagtgataacaaaacaaaacaaatattatcaaaaggggcaaactttgaaaccaaaatcagattttattttttatttttttggtgaatctgaatagatcagaaggtgatgtcgtgttcgtcgtcatctgggtcggaggaagacgatgagggattcgactcttaccgga

SEQ ID NO: 2732 - DNA, 265 bp, Glycine max
  Clone ID: 701040625H1
gtgacccctaaactcatggcattggacatttcctttaacaacttttctggcagcattccaccagcttttcagaatactagaagactcacttggttgtatctccaaaacaattctatatctggagctattcctgacttcaaccttccaagtctcaagcatttgaacttgagcaataataacttgaatggctcaattccaaattccataaagacatttccttacacttcttttgtaggaaattctctcttatgtggtccacctctca

SEQ ID NO: 2733 - DNA, 243 bp, Glycine max
  unsure (1)..(243): unsure at all n locations; Clone ID: 701040626H1
cataaacagaccccgttgatgttacgctgtgatgcatggnaagactggttgtgttgagaanctattcatgccggagcgaatatattgatgtttgattctatacgtcgaagaacttgcttgcactacgctgcttattatgggcatatagactgccttaaggccattctttctgctgctcattccacacctgttgctgatncctggggatttgcaagatttgtcaacataagagatggaaacggt

SEQ ID NO: 2734 - DNA, 197 bp, Glycine max
  Clone ID: 701040627H1
ttcagcttcaaatcaaatccaattgaaatcaaaaataaaaaggaaaaaagaaaaagtaaagacctctcaacacatggctgcttcaatcccatttacaggtatcaactcctcaagggtgcttcccattcctagagaaccacaccacccattttcccatttgctctcaaacatgtcaaagtttgcatctttgagaaccc

SEQ ID NO: 2735 - DNA, 262 bp, Glycine max
  unsure (1)..(262): unsure at all n locations; Clone ID: 701040628H1
tcattgctaccctgttggtggataacaaaacttcagcaacccctttgcatctgatctaagaatcccaacttcaagtacccatttnncgtcatttcatgatctaggtgatagatcgtgaaaatgacaaggatgacccatgattttggggatactatgcagaaagatgcagtgccggtggtgtcggccgatgtaatatttgcttctcttcggtttcctaattacaaaatcggagttaataatcagatcatggagacaaaggacc

SEQ ID NO: 2736 - DNA, 263 bp, Glycine max
  Clone ID: 701040629H1
taatcaaccacaccaagagaaacaacaaacaagggaaaaatactacatcatacatgtctccaattccaaagcagtttataggtgatctcataagcaagccactttcacttgatcttgaaacttgagagaggaccaaacatatagaatttcttcaatggatcttattctgatggtggattgttgcacttatttggctaattagcttgaaaacttagcacagctaaatcatgaaacaacactttgatcttgaagtggtggcctca

SEQ ID NO: 2737 - DNA, 257 bp, Glycine max
  unsure (1)..(257): unsure at all n locations; Clone ID: 701040630H1
aacggctactgcggcgtcgaactcaacgacctctaccgtcatgtgcacctctaccttcaacgccgcgaaccacgcccccgccgccgcgtgccgccgattaactctctcctgctcgccgtcgtcgaaccgtatctccttcgccgttgcgccgaaccacaccgtccacgacgccttccgcggccaccgcgtcgggtggacgcaccacgtggagactgcgcaggactncgctcgaggagaggcgcagtttcacgctccgt

SEQ ID NO: 2738 - DNA, 254 bp, Glycine max
  Clone ID: 701040631H1
gtgccttctctgggaaggatcctaccaaggttgataggagtggtgcctacattgtgaggcaagctgcaaagagcattgttgcaaatggacttgctaggagggcaattgtgcaagtttcctatgccattggtgtgcctgagccctgtctgtgtttgttgacacttatggcactgggaagatcccgacaaggaaatcctcagcatgtgaaggagagttttgactcagccggcagatctccatcaacctgatctcaa

SEQ ID NO: 2739 - DNA, 267 bp, Glycine max
  Clone ID: 701040632H1
tggattcataaggagattgagaggcaaaggagacaagaaatggctaccttctatgcctctcttagatccctttctccctcttgagttcatcaagggaaagcgttcaatatctgaccacatgaacgaggcagtgaattacataaagcacatgcagaaacatatcaaagagcttggtgccaagagagatgaactgaagaaactctccaatcattccaataatatggaaaataaccatgagggcttgcatacatcttgcaattcactgtc

SEQ ID NO: 2740 - DNA, 276 bp, Glycine max
  Clone ID: 701040633H1
cctaactttagcaaccatccaagaagttgatcagttccttgtctctccttgaattataaaaccattcacagtcttgaacccaatttcactctttgcacctcaaacaccttataagcctcaatttcacaaccaaaaatgcaaagttcaatctcacaatctgagatttgcatcactgattaccttctaccccaagaagttccatctcaatttcaatttccagatatgagcaacaataacataccaatgaaccataccaaccttcaaatgcctcaaatc

SEQ ID NO: 2741 - DNA, 274 bp, Glycine max
  unsure (1)..(274): unsure at all n locations; Clone ID: 701040634H1
cnccccgatactttctcctccctctntccccttttttctttcccggtcctcaacnnnnncccancctttancttcttcctccaccncacctccacnccnctccgcncgcngctcccctctccgtgcgccccttccctcngcgcgcngctcctcggagccttattgcagcaaatagggagaggaaatgggccttagaggaaataggaacaaatatgaaacacaactggctcaaagaaatttcaaaagcaatgatactcagaatcacatanaggaa

SEQ ID NO: 2742 - DNA, 268 bp, Glycine max
  unsure (1)..(268): unsure at all n locations; Clone ID: 701040635H1
ggttttgatccaatgccttctgaaattcagaggttaagatgcaaatgtaatttccatgctttgaagttcgcgcctacaattcaacaaattggctcgctattgatccaaaggattagaaaatatggtgctcgacgcagcatgttagacactcaattgctggggaagttcatccgcaacaatgaatatcatgaagctaaaaggggctcagcaaaatatcttgctttgcacctgaggtttganatagatatggtggcctattcctatgtga

SEQ ID NO: 2743 - DNA, 268 bp, Glycine max
  unsure (1)..(268): unsure at all n locations; Clone ID: 701040636H1
gtcaaccgcaaaccatctccacttcttatctccggtctccgacgaactctccttgnnaatttgtactgcagaggtgctgccttttacaccaccagattttgcagattttagtttttaaggttatgctttttgggttctgcgactaatgttgacgatgatcatcactgcgctcatcactgccatacttgcgggactttgcattggcccaatcaacggcaggcggcggaggaagagggccgtggcgttcttccatccgtacaccaacgac

SEQ ID NO: 2744 - DNA, 266 bp, Glycine max
  unsure (1)..(266): unsure at all n locations; Clone ID: 701040637H1
ctttttctctgttgaggttgtcattgggagcactcaacctaaacnattcaagttgtgaaagcacattcacaagaaaattcgcaagcgatggatccgaagctaaaagaggtttctcagctcttcgatcgctttaaggcttcctttatcaggaacgactttgatacctgttccaatctcctttctcagctaaaggtgttacttacaggtttcagaagcctccaccgttgtttgcagatacacctaatgcagttcatgaataacaatag

SEQ ID NO: 2745 - DNA, 265 bp, Glycine max
  Clone ID: 701040638H1
caattattatcatggaaggaaattcgggttcggatcctgcgcgtcctcttctggctaatcgtgacaataactccgccgagaacggtggtcagagaagccggctcagtcgccggatatcggttagctcgctcagagcctctttcacgtccaagcttcccgacaaggtccgttctggccttgactccgagtctcccttcgacgttgatctctcctccaccaccgccttaagcaaaggggagaaagagtactatgaaagacaatttgc

SEQ ID NO: 2746 - DNA, 84 bp, Glycine max
  unsure (1)..(84): unsure at all n locations; Clone ID: 701040639H1
atctcatttctctctttctctntttctctntcctttgggagaaaacccactcttcttttctctgntnntngnacacaacanagg

SEQ ID NO: 2747 - DNA, 268 bp, Glycine max
  Clone ID: 701040640H1
cggccagctcctgaagggccgcatcaccgtcaatctcatctggtacggcacctttcaccccgattccaacggtccataatcgtggacttcataaactcgttaagcagcgcgccaaacgcgcctctcccctcgaccgccacgtggtggaaaaccacggagaagtacaaggtgggaggaggatcccctgcgctcgtcgtagggatgcagttcctacacccggcttacacgctagggaaaaatctcaaaggaagagatcttcctcgcactc

SEQ ID NO: 2748 - DNA, 263 bp, Glycine max
  Clone ID: 701040641H1
attacaattactactttctctctctttgtaacttgtaagcatggagtcctcaaagatctatgcttacctcttcctttgcatgctcttcctctcctccgccactcccattctcggttgtggctactgtggcaaaccccccaaaaagcacaagcctggtaaaacaccaaagacacccacagtacccgttgttaagccaccagttcacaatccctcccattgttaatccaccagtcacaatcctcccattgttatccacagtgaca

SEQ ID NO: 2749 - DNA, 264 bp, Glycine max
  unsure (1)..(264): unsure at all n locations; Clone ID: 701040642H1
cgcagagaaaatgtcgaccgacctgcaattgaagtcgagttgtagcggatgcggatcaacgacggatctctacggaagcaattgcaagcacatgactctgtgcttgggctgcggcaaaaccatggcggccaaacgcgccaaatgcgttgattgtggcgccaccctcactcgtttncattcgagaatataatgttcgtgcaagttcccccaatgataagaattacttcattggaaggttcataaacggtttgcctgatttttcga

SEQ ID NO: 2750 - DNA, 263 bp, Glycine max
  Clone ID: 701040643H1
caacagcatcggcggcgacagtcactctccgacaacaacacttccgcggcgaaaaatgtctctggtggcgaacgaggatttccagcacattctgcgtgtgctgaacaccaacgtggatgggaagcagaagataatgttcgctatgacctccatcaagggtattggaaggagattcgccaacatcgcttgcaagaaggccgatgttgacatgaacaaaagggctggtgagttgagtgctgcagagttggatagtgtgatgactg

SEQ ID NO: 2751 - DNA, 261 bp, Glycine max
  unsure (1)..(261): unsure at all n locations; Clone ID: 701040644H1
gagacacaaagaagaatcatggaggtgaacaaccaaatcgtggagaggagcaagagggttaaagggagagtggttttnatgaagaagggtgtgttggacttccacgacatcaaagccaacgttctcgatcgagttcacgagttattaggcaagggtgtctctcttcagcttattagtgctactactcctgatccagcaaaggggttattgagagggaaggtggcaaacttggagaggtgggtttcgacgattacctctttg

SEQ ID NO: 2752 - DNA, 258 bp, Glycine max
  unsure (1)..(258): unsure at all n locations; Clone ID: 701040646H1
tgcatagcttggttaggttttgtgtntgggattccatcttggttggagttggaagttcatggaattagaaatgttgaaattcttctcatgattgagctgggaaaatgcgcatatctgttgatgttttatttagaaataataattgttcatcaatgtttganatctaaggtggccggcatacttcttttttaaaatagaatgagtcagtttggaagtgtttatggagtaagaatggtggacttcttctgttgtttgggg

SEQ ID NO: 2753 - DNA, 262 bp, Glycine max
  Clone ID: 701040647H1
ctcttggtttctctgactaaactgaaaaaacctttgtacttattctctctcagtttcacataaactgacaccataattctttacttcaactgaaaaaattaagaatttatttcctccaaagtccaaacactgtcacagaaactgacttgttaaccattgttagttacattctgtttcttgccactttataagtgcatcatcaccctccactggttttcattaacaaaccttcttcaaagtcccaccacttggttttcataac

SEQ ID NO: 2754 - DNA, 263 bp, Glycine max
  unsure (1)..(263): unsure at all n locations; Clone ID: 701040648H1
tttctcttctctcgtcccgcaagtattcctccaatctccgtcgatcaccaccaccatgtcgtggctcctccgatccaccaagtctaagttcctctcttcctcttcctcttcttctctttctagaaccttcccctctctccctcgccctcagattggagccatctctcccctccccgatctcttccaccgcaacaccgccancatgcctttngcgaaggaaaacgcttccggtggaaacttgaccggtcttcccaaagttcccg

SEQ ID NO: 2755 - DNA, 255 bp, Glycine max
  unsure (1)..(255): unsure at all n locations; Clone ID: 701040649H1
tctctgtgtgtgtgcgtggattggtgaatttgagattgaagaagatgatgcaggctggacccggcggcatggcccaacaagcgaaccagcaatacgcnnnnnnnnnnnnnnnnnnnnnnnnnnnngcctanatgatgatgccgccgcagcctcagccccctcagatgtgggccccatcggcccagcctccgtcccaattcggtagctncctccgcaacccaccagcgccgatgaggtccgtaccctctggatcgg

SEQ ID NO: 2756 - DNA, 268 bp, Glycine max
  unsure (1)..(268): unsure at all n locations; Clone ID: 701040650H1
ttcactttggaaaaacatggtcgcatagatgttttgttcagcaacgcggngaataataggttccttatctgggatccttgaccttgatctgaatgagtttgacaacacaattgccacaaatgttcgcggtgtagccgccacgattaagcacacggcacgtgccatggttgctaaaagcacccgtggatccatcatatgcaccacaagtgtggctgctatgattggtggaatggacctcatggctataccacatcaaaacatgctcttc

SEQ ID NO: 2757 - DNA, 265 bp, Glycine max
  Clone ID: 701040651H1
tgattattgaaaattaagttcaattggggggtctcatcctcagagaatttggcttttgaatcatatgatttttccataggggatgaaatgacccgagtgatttggaaactgataaaagataagcttatttttccttatttggagctggatattaagtattttgaccttggccttcctcatcgcgatgccactaatgatagagttactattgaaagtgctgaagctacactcaagtataatgtagctatcaaatgtgctactataa

SEQ ID NO: 2758 - DNA, 266 bp, Glycine max
  unsure (1)..(266): unsure at all n locations; Clone ID: 701040652H1
ctcaagcatgaacctgcttttagggctgcaatcataatgttccagaganaatttgccatgagactggttgctcagcctggtgataaactatattgtcgtctcacagtcaacactcaactacatgctcgagtcttccacctcctncaaagttggaagaaacaacttcaggccccctcccaaggtggattcctctgtggtgcgaattgagcccaggaaaccccgtattgaagttaagcaaaaggagtgggatgggtttttgcggattt

SEQ ID NO: 2759 - DNA, 263 bp, Glycine max
  Clone ID: 701040653H1
gcccggtggaaccaaacgaagaagacgttccgttttccctctgcttttccaagttttcatcgactcaaccatgctattcttacataactagggttaggagttagggcgttcttatcgttttcgctccgttaattacaacaacggccaacatggttgttctttcgctttcacctcccagcctctctaccgctttcctcgcaaagaaactgtctccccaagaacacgcggtgaagctagcgacctttcgcaacaattcatttcgc

SEQ ID NO: 2760 - DNA, 262 bp, Glycine max
  unsure (1)..(262): unsure at all n locations; Clone ID: 701040654H1
aaatattgtacacataaatctagctccaattcctaatcacctggttaatttcttcacatagagctatcaagatccaacgttaacatgaagaatgttttagtaaggtcagctgcgcgagctctgcttggcggcggtgggcggagtactaccgccagctctcaacggcggcgatcgtggaacagagacaccagcacggtggcggcgcgtttggnagcttccacttgcggaggatgtccactcttccagaggtaaaggatcagca

SEQ ID NO: 2761 - DNA, 260 bp, Glycine max
  unsure (1)..(260): unsure at all n locations; Clone ID: 701040655H1
agaagagaagcgtggtgcttcagaagggcaagccaataaataccttgatgatgtatctaatnctgacatcagaacttgaggcaatttcaagcacgagcctcaaccctcgaaactactctgcaagcggctaatganagaggnaaggaattagaagattcttgaatggcagtgacagaaganaagaaaaatttagaagatgctctatcagtttgaatgagaagctgctgagaaaganaacctattggaattttgagggatgt

SEQ ID NO: 2762 - DNA, 266 bp, Glycine max
  unsure (1)..(266): unsure at all n locations; Clone ID: 701040656H1
aaaagagaaagaaggaaggcgaagccancaaagaaaganaacaatagtttcagaagcagaaagaggttttccgttccgaaacgatgtcctccatggccatcaccaccagagacagagatcgagagcttctcatccccgtcgccgacacccccgccggcgatgccgccgtcttccccttcccccaagccatcgtcgtcggcgtcgtccccgcatcattccggacgcgagactttttacaaagttgttagaagctgggcatcaaaaaa

SEQ ID NO: 2763 - DNA, 260 bp, Glycine max
  Clone ID: 701040657H1
cttacttagtagacattctcaagccatgacttgtaaacttgtgatctacttcactttcttcttctgcttgctttttaccttggttccttatgttcatatgtatccctcgtacccctatagtggaaattaccagcttgacctcaatttctatgatagatcatgcccaaatttgcaaaggattgttggatatggtgtttggttagccttaaaaaatgacaacagaatggccgcgtccctccttcggttgcactttcacgatt

SEQ ID NO: 2764 - DNA, 259 bp, Glycine max
  Clone ID: 701040658H1
aaattcctgaatattggatcggaggccaaattaagaaagaccactgaaattttaaatgaatttgttttcaagctaatcaacactagaattcttcaaatgcagatttcaaagggagattctggtagcaaacgaggagatattctgtcaaggtttctgcaagtgaaggaatatgatccaacatacttacgagatataattctaaactttgttattgcggggaaagacacgacggctggccacacttctggttcagtacatg

SEQ ID NO: 2765 - DNA, 259 bp, Glycine max
  unsure (1)..(259): unsure at all n locations; Clone ID: 701040659H1
cttcaacaaggaatctctggtggaagcgttgttagggaagaagcttcccaaggaatttgggcacatcaagggtttgaaagatatgattnatgttcagctttctgcgattcctggagcggaggatggggcaaagtttcagtgccccattgcagggcttgaatttaacggaaagtataggtttttcgcgctgaggaattgtgggcatgttttgagtgccaaggctctgagggaggttaagtcctcttcgtgtttggtttgt

SEQ ID NO: 2766 - DNA, 259 bp, Glycine max
  Clone ID: 701040660H1
gaacaacggaagttgaatcctccattttcgacccgcgcgacgatggaacctctgaccactggatccaacggaactcttcccttgtccgtttaacgggaaagcacccgtttaactcggagccacccctccctcgcctcatgcaccacggcttcatcaccccggtccccctccactacgtccgcaaccacgggccagtcccccgggcccgctgggaggactggaccgtggaagtcacgggcctggtcaccaggaccacatg

SEQ ID NO: 2767 - DNA, 258 bp, Glycine max
  Clone ID: 701040662H1
aagcaagcaacattagcagctgaagcaaaagctcaatcccttgcgttaatggtggattgccagatttaattcgattttggaaacaacttatcgatcccccaatccgctgtgaacagatcgagggcgtggcctgtttgatttgaactgaatttcggattgaaggatctcattttcttggagcattaaagcagaaatttctagcgctatggggtttccagcagcagcggtggccgaatgaccaaacacctttcttaacct

SEQ ID NO: 2768 - DNA, 239 bp, Glycine max
  unsure (1)..(239): unsure at all n locations; Clone ID: 701040663H1
cgaggagtcaacaccttttctccacaaggccgtttgtttcacggttgagtatgcaatcgaanccatcaagctgggatcaactgcgattgggttgaagaccaaagaaggagttgtccttgcagttgaaaagcgcatcacatcgccgctcctggagcctagtagtgttgagaaaattatggaaattgatgagcacatcggttgtgcaatgagtgggttgattgcagatgctcgaacacttg

SEQ ID NO: 2769 - DNA, 261 bp, Glycine max
  unsure (1)..(261): unsure at all n locations; Clone ID: 701040664H1
cattctctctctctatatatatatggtaaaaagtngttagttccaggatcaactcccataantncgatgaagcatttgatgattcattcctgaagtccgtgaaacaacagctttcatggttccattggtggctggtgatggaaccaaaactcaggcacttgctatttgccacncaaatacttctggaatgaatcatcaaatgcttcatcaacttatgggagttgatcctggaactaaccctgtttgccatttcctggnagc

SEQ ID NO: 2770 - DNA, 252 bp, Glycine max
  unsure (1)..(252): unsure at all n locations; Clone ID: 701040665H1
tctctgtgtgtgtgcgtggattggtgaatttgagattgaagaagatgatgcaggctggacccggcggcatggcccaacaagcgaaccagcaatacgcnnnnnnnnnnnnnnnnnnnnnnnnnnnngcctacatgatgatgccgccgcagcctcagccccctcagatgtgggccccatcggcccagccttccgtcccaatcggtagctccctccgcaacccaccagcgccgatgaggtccgtacctctggatg

SEQ ID NO: 2771 - DNA, 266 bp, Glycine max
  Clone ID: 701040666H1
ttcactttggaaaaacatggtcgcatagatgttttgttcagcaacgcggggaataataggttccttatctgggatccttgaccttgatctgaatgagtttgacaacacaattgccacaaatgttcgcggtgtagccgccacgattaagcacacggcactgccatggttgctaaaagcacccgtggatccatcatatgcaccacaagtgtggctgctatgattggtggaactggacctcatggctataccacatcaaaacatgctct

SEQ ID NO: 2772 - DNA, 263 bp, Glycine max
  Clone ID: 701040667H1
tgattattgaaaattaagttcaattggggggtctcatcctcagagaatttggcttttgaatcatatgatttttccataggggatgaaatgacccgagtgatttggaaactgataaaagataagcttatttttccttatttggagctggatattaagtattttgaccttggccttcctcatcgcgatgccactaatgatagagttactattgaaagtgctgaagctacactcaagtataatgtagctatcaaatgtgctactat

SEQ ID NO: 2773 - DNA, 263 bp, Glycine max
  unsure (1)..(263): unsure at all n locations; Clone ID: 701040668H1
ctcaagcatgaacctgcttttagggctgcaatcataatgttccagaganaatttgccatgagactggttgctcagcctggtgataaactatattgtcgtctcacagtcaacactcaactacatgctcgagtcttccacctcctcaaagttggaagaaacaacttcaggccccctcccaaggtggattcctctgtggtgcgaattgagcccaggaaaccccgtattgaagttaagcaaaaggagtgggatgggtttttgcggat

SEQ ID NO: 2774 - DNA, 261 bp, Glycine max
  Clone ID: 701040669H1
gcccggtggaaccaaacgaagaagacgttccgttttccctctgcttttccaagttttcatcgactcaaccatgctattcttacataactagggttaggagttagggcgttcttatcgttttcgctccgttaattacaacaacggccaacatggttgttctttcgctttcacctcccagcctctctaccgctttcctcgcaaagaaactgtctccccaagaacacgcggtgaagctagcgacctttcgcaacaattcatttc

SEQ ID NO: 2775 - DNA, 260 bp, Glycine max
  unsure (1)..(260): unsure at all n locations; Clone ID: 701040670H1
aaatattgtacacataaatctagctccaattcctaatcacctggttaatttcttcacatagagctatcaagatccaacgttaacatgaagaatgttttagtaaggtcagctgcgcgagctctgcttggcggcggtgggcggagtactaccgccagctctcaacggcggcgatcgtggaacagagacaccagcacggtggcggcgcgtttggnagcttccacttgcggaggatgtccactcttccagaggtaaaggatcac

SEQ ID NO: 2776 - DNA, 259 bp, Glycine max
  unsure (1)..(259): unsure at all n locations; Clone ID: 701040671H1
agaagagaagcgtggtgcttcagaagggcaagccaataaataccttgatgatgtatctaatctgacatcagaacttgaggccaattcaagcacgagcctcaaccctcgaaactactctgcaagcggctaatgaaagaggaaaggaattagaagattcttgaatgcagtgacagaagaaaagaaaaatttagaagatgctctatcagtttgaatgagaagcttgctgagaaaganaacctattggnnattttgagggatg

SEQ ID NO: 2777 - DNA, 259 bp, Glycine max
  unsure (1)..(259): unsure at all n locations; Clone ID: 701040673H1
ctcttcctcaccgattgcnagaatggaatttcgatgctcagtcatctcttttaccattctcttctctcttgctcttgcaggagagagccatgtccatgcatcgctacctgaggaagattattgggaagctgtttggccaaacactcccattcccactgcactgcgagagcttctaaagcctctccctgcaggtgttgaaatcgatgaactccctaagcaaattgatgatacacagtacccanaaacattcttctataaa

SEQ ID NO: 2778 - DNA, 260 bp, Glycine max
  unsure (1)..(260): unsure at all n locations; Clone ID: 701040674H1
cactcaagagactgatagatatcagcatgggggttataactcctttgacagagcagctaacaaagccattacccaatgccatggttctagtaaaccttaaggaaatatctaccggagcttataagcttttgccacaaggaacacgcttggttgtgtctgtccgaggtgatgagccttatgaagaactggacattctaagggtgttgatgctactatgcttntcccatgancttcccttatacagnaggacnggattagcc

SEQ ID NO: 2779 - DNA, 259 bp, Glycine max
  unsure (1)..(259): unsure at all n locations; Clone ID: 701040675H1
gaaatgtcaaagatagaattgagatcaatgtacagtctgttatgtcaagatgacatgccaatggttagaagatctgctgcttcaaatcttgggaagtatgctgctactgttgaatatgcccatttgaaggcagacactatgtncaatttttgaggatcttactaaggatgatcaagactctgttagattgttggctgtggagggntgtgctgctcttgggaaactgctggagcncacaagattgcatcacacatatact

SEQ ID NO: 2780 - DNA, 218 bp, Glycine max
  Clone ID: 701040676H1
tattgtatggccgccaattccagtagccgagggatcaccgccttagggaagcgagtcgccaaccggatctggacttccaacgcacctcctctcacttcaaggaggggagcatacagtagcggctcagtgtacgacaagaaccctgatgatgagatccagtctgggcaggtcccagacgatgtgatccaggcggcaacacaatccggcaaatatgggcc

SEQ ID NO: 2781 - DNA, 253 bp, Glycine max
  Clone ID: 701040677H1
gcctaggcaacaatgtgaggtctatgccttctgtggtggatttgggagctgcactgagaatgccatgccatattgtaattgtttgaatggttatgagccaaagtcacaatctgattggaatcttacggattactcaggagggtgtgtgaagaagaccaagtttcaatgtgagaatccaaattcctctgacaaggaaaaggacaggttcctccaattctcaacatgaagttgcccaatcattcgcaatccatag

SEQ ID NO: 2782 - DNA, 260 bp, Glycine max
  unsure (1)..(260): unsure at all n locations; Clone ID: 701040678H1
cggcctcggagggggatcaanatgtactacaggtacatgggatcactcactgncacctccttgcactgaagacatcatttggaccgcntgataagaaggtaagaactgtntcaagggggcaagtgaagttgctcaaggatacggtacttaaatattatgccaaatggaatgcaaggccgctgcagcccctaaatcaacgagcgatacaactttacgtcccanagacaaagataaacccgtgtattagtttttcttgtntt

SEQ ID NO: 2783 - DNA, 257 bp, Glycine max
  Clone ID: 701040679H1
agaactttgtttcccaatttccattgcctccgcttccacctcgcaaccatgatcatcccggagaagaaccgcaaggagatctgcaaatacctcttccaagagggagtttgcttcgcgaagaaggacttcaatttggccaagcaccctgagatcgacgtgccgaatctgcaggtgattaagctgatgcagagtttcaagtctcgcgagtacgtgagagaaacttttgcttggatgcactattactggttcctcaccaa

SEQ ID NO: 2784 - DNA, 257 bp, Glycine max
  Clone ID: 701040680H1
ggaggtggaactgggtctggaatgggtaccttgcttatctcaaagatcagagaagagtatccggataggatgatgttgactttctcagtgttcccgtccccgaaggtctctgacactgtggttgaaccctacaatgccactctctctgttcatcaactagttgagaatgcggatgaatgcatggtcctcgataatgaggcactctacgatatctgtttccgaacactcaagctcacaaatccaagttttggtgatct

SEQ ID NO: 2785 - DNA, 263 bp, Glycine max
  Clone ID: 701040682H1
cgaagtttccctcaggatagctggagcccgcgggcgagttctatcgggtaaagccaatgattagaggcatcgggggcgcaacgccctcgacctattctcaaactttaaataggtaggacggtgcggctgctctgttgagccgcgccatggaatcgagagctccaagtgggccatttttggtaagcagaactggcgatgcgggatgaaccggaagctgggttacggtgcccaactgcgcgctaacctagaccccacaaagggtg

SEQ ID NO: 2786 - DNA, 260 bp, Glycine max
  Clone ID: 701040683H1
atttaagtgaagtatacctatttgatttgcctcattagatcgggttggctacgaatttttttcgaaacccttctcttttctcaattgggtttccatctttgattggatttcattgccatggctccaaaggatcccaagcaagttgctgctgcttctggtggtgggggtggcttttttgcttctattgcttccagtttgtccaattttggcagtgccatgtcccaaatccgttaatggtttggtgggctacgaggggctgg

SEQ ID NO: 2787 - DNA, 264 bp, Glycine max
  unsure (1)..(264): unsure at all n locations; Clone ID: 701040684H1
ctgaaacgggcgtttgcntttgcntttgcgtttgcgtttgcattgttgttgctgttgctgttgctgctgttcctatctgttgctctgaaatctgaattcaagaaataaaaaataaaataaaatagcataacatggcccaggattctgagaagagattccattgccatcatggacaagctgctttccatcctcccaaacccccttcagcctccagttcattctggagtgcagttaccagggagtagtaagaaacgtccttaccag

SEQ ID NO: 2788 - DNA, 257 bp, Glycine max
  unsure (1)..(257): unsure at all n locations; Clone ID: 701040685H1
ccccttgtttggggaccataatttngccatccatagagatggcaaatcagttcacctttcacttgatgaaagaacaggttctggatttgtgtctcatgacctttaccttcacgggtatttcagtgcctcgatcaagctgcctgctgattacactgctggagttgtggttgcattttatatgtcaaatggtgaaatgttccagaacaaccatgatgagatagactttgagtttttggggaacattagaggcaaagact

SEQ ID NO: 2789 - DNA, 258 bp, Glycine max
  unsure (1)..(258): unsure at all n locations; Clone ID: 701040686H1
ctttgattttgcatcctttggagtgagctctgatactcttggattngctgttcactttcagacttccaaattgcaaacgatgatgaagaagaatcagagcaagcaagttaactcgttgaccacgacacgtttgtcaccattggcgaaacccttcacgctcaaccgttctaccctccaaccctgctcaagttcccctttttcagggtacccttttcttgaatcgccaaaagaatgtgactttgatgggtttggggagga

SEQ ID NO: 2790 - DNA, 259 bp, Glycine max
  unsure (1)..(259): unsure at all n locations; Clone ID: 701040687H1
gtcaggttcttatgatgaagaaagaacttgaaaaggatccagcacttgcccaggagaactgggataggttcctccaaaattcaagaagaaaaatgttaagcaaaagaaggttaacactaaacagaagaaaccatacactcctttccctccacctcaacagcccagtaagattgatatacaattagaaactggagaatactttttaagtaacaaaaggaaatncagcaaagatatggcaagagaagcaagagaagcaggc

SEQ ID NO: 2791 - DNA, 255 bp, Glycine max
  Clone ID: 701040689H1
gcacactccaaagcttatttgttgctttgtgcttaatggaagggccttgagcttttctttctctctttctttgctctcttttcttttaggtttccactctctctcacacacacactctgcaataatctctcttctcttcttcagtctctcaactactgcctaaccaaaccttccatttccgtcggcagtttcttaaattggagtctgatgtctccgccactgctggttactgaagaagacgaaggacagagcaat

SEQ ID NO: 2792 - DNA, 256 bp, Glycine max
  Clone ID: 701040690H1
gtgaaacactagctagggtattgggagctctcgttgtttcggagttagggaccttacgcagccatggccactgctacgaatgccgccgccgccccaccacgccagctctcccagaaggaagctgacatccagatgatgttggccgccgacgtccacctcgggcaccaagaatgcgacttccaaatggaacgttacatcttcaagcgccgcaacgacgggatttacattattaaacctgggaagactggggagaagt

SEQ ID NO: 2793 - DNA, 291 bp, Glycine max
  unsure (1)..(291): unsure at all n locations; Clone ID: 701040691H1
gtttccgttctagattgcaaccttccttcgtactccgtgtttacgtcgttcgtgtgtggaaagtgggaaaagataacaccccaatttcgaagccccattggctctttccttctccccctaatccaattggccttcacacacacactttgcaagatctaattgttnccagaggaattcagggggatgggcgggatgnatggacaaaggcgggtaggggggaaggtggagaacgnaaaagaggaccgaacggggntgggttaacccagttcctttnccnggggaagttgggaa

SEQ ID NO: 2794 - DNA, 252 bp, Glycine max
  unsure (1)..(252): unsure at all n locations; Clone ID: 701040692H1
gagaactgaagaagggtttgaatccaccatcactcacaaatctggtatttgtgtcgccttacatgactacagctgtcaaaactggcattgtcgttggcatcatatcacttgcggaaggaatagcagtaggaagaagctttgcaatgtacaaanaattacaatattgatggcaacaaagagatgatagctattgggaccatgaacgtagttggttctttcacctctgctacctcacaacaggaccattttcgc

SEQ ID NO: 2795 - DNA, 252 bp, Glycine max
  unsure (1)..(252): unsure at all n locations; Clone ID: 701040693H1
ggagttcttgagagaaaacggcgacaacgaaaaccgttccgtctcgcggagtgacttccctcccaacttcatcttcggagttgccacttctgcatatcagatagaaggtgcttgtaaggagggtggtagaggtcctagcatatgggatgcctttacacacacggaaggaaaaattcttgacaaaagcaatggtgatgttgcagttaatcattatcatcggtacatggnagatattgatctatagccaagttg

SEQ ID NO: 2796 - DNA, 285 bp, Glycine max
  unsure (1)..(285): unsure at all n locations; Clone ID: 701040694H1
caaagacacagagtgcgttcgttgacgacaaacacacacaaacacacaacaaaagcnccgccggaaaatctttctgccggcgacctggaattccgacgaaggtagttgcggctccttcgtncccgaaactgaggtccctcaaagtataaactttggtggtggtgggtagggatctggcggtgtatggatggggatcttggcatntggccccgttgggagnactnccgggcgaggtttgncttttngggaaccaacaaaggctttnctttcccgttncatnaaagc

SEQ ID NO: 2797 - DNA, 254 bp, Glycine max
  Clone ID: 701040695H1
aacacaataaactccttcctcatttctcatttctcattcaacaccatggcaagaaaaaccaagtccattttcttggccttcttactactatgctctttctcactgggggtagtggtagtagcccaagaggaggcaatagcaaaatccgaaagtgaagcattaggggaaccagagaaaagagaaacacttgaaatcatcattggtggaggtggttcacctgctccttctccctctccccctacatattgcccacc

SEQ ID NO: 2798 - DNA, 257 bp, Glycine max
  Clone ID: 701040696H1
ccattttcaagctctcaacgccatctccagctgcttccttatcagaagcgcttcgccccagagattctcgcttcctctccttcaatccttcttccaacgctattaattacaaaattaacctctccgcttccctccgatccattcactccctccctcttaaaacctccttgcggatcaaatgctcccaaacagatgggaatggaagtcctgcaaagaggacagtgcttcatgatctttatgagaaagaagggcagagt

SEQ ID NO: 2799 - DNA, 201 bp, Glycine max
  unsure (1)..(201): unsure at all n locations; Clone ID: 701040701H1
cgacaccccaaccaacctcactctctctttctctctgttttctggtaattcatcaattgattcaaaatgcagaggctcaaactgcaactagtgctattcctctcaatctcaacttgtcacactgttttctccttcactgatgggttgtngccaaatgggaacttcgagcagggcccaaagccatcacaattgaaggggtcc

SEQ ID NO: 2800 - DNA, 198 bp, Glycine max
  unsure (1)..(198): unsure at all n locations; Clone ID: 701040703H1
ctttctccaccgagagagaaatggaagcagcatcatggccgacantaattctactactgatcattatgatatgggcatggaagatgctgaactggttatggctgaggccaaagaggcttgaaaggcttctgagagaacaaggccttcaaggcaactcatacacgctttttgttggggacttgaaggagtttggcaaga

SEQ ID NO: 2801 - DNA, 196 bp, Glycine max
  Clone ID: 701040704H1
ctcctcagtttctccaaacccaaactttcacgacagggacctgtcagatttagttaaggtttttgcatcatcactgtgtgaagataatatagatatggaaatctcccatgacatcaagatcaaggatgacaagctaggtgatgtaaaggaagagaagattaaggcagaagcggaactgaagcataaatcagttgag

SEQ ID NO: 2802 - DNA, 198 bp, Glycine max
  unsure (1)..(198): unsure at all n locations; Clone ID: 701040705H1
tttgtattagaatcgagaaaagcgttaatctccgatggcttcgtcgagggacaaggaacccgcgccgccacatcatcacccacctcttctgagcagcctcgtcgtccgcccctcccacaccgaggccgttcgcagccggtggtggtcgcgtcgccgacttcgagcntggcgaactccancgtgatccccctcctcctt

SEQ ID NO: 2803 - DNA, 198 bp, Glycine max
  Clone ID: 701040706H1
ttccatgctttcttaattctcacccccctcactccttcaaacaacacccttttttatttctttctcctctgtttctactctctactgctgtgcattctggtggcatcacagagagagacacagttgagtgagccaccaccttctccaattcatctactttctctccaattcttcaaaagggttgtctccaattcttca

SEQ ID NO: 2804 - DNA, 192 bp, Glycine max
  unsure (1)..(192): unsure at all n locations; Clone ID: 701040707H1
caggtctgcaaatggttcagaacaaaatattaaaaggaatgaggaaaatgattatgatcctgtgcttagtgagcttaaagctatgacttctaatgggaatgatgcagacaggcttgcaatacggattccagaagctaagggttctgggccttctggcagtaatggncaaatggatgcaacctnanngggggt

SEQ ID NO: 2805 - DNA, 195 bp, Glycine max
  Clone ID: 701040708H1
gccagtcttaggatccaacatgtctcaaacactaagctgcagaagactacacccaatggactcaactttgatgaagtcaatgtcccacaatccaaaaaagtcctattctaccgcattcacaaggcactttgccaaaaaatctggttttttgatcaagatcatggcttctgctacacctacagcagctgctatcac

SEQ ID NO: 2806 - DNA, 195 bp, Glycine max
  unsure (1)..(195): unsure at all n locations; Clone ID: 701040709H1
gaaaaaccctaattacaagaagttgcaaaactaagtggaataagagctgaaaaaccctaataacaatgggaggaaaatgtccgcacaggaacgtgaagaagagaagatattctcacaagaccgcgcggcgaaccaaatttgagctgaaaggggacgacatggtttatgcgcanttcaacaaacccgatcaagaga

SEQ ID NO: 2807 - DNA, 192 bp, Glycine max
  Clone ID: 701040710H1
caggtctgccactcgctcggcggcggaacgggctccgggatggggacgcttcttatttccaagatcagagaggagtatcctgacaggatgatgcttactttctccgtttttccttcgcccaaggtctccgacactgttgttgagccttataacgctactctctctgttcaccagttggtggagaatgctgat

SEQ ID NO: 2808 - DNA, 192 bp, Glycine max
  Clone ID: 701040711H1
ggacgtgacaatggcagcatgtggttctgggattggaagagtggtcataatttccagcaatcccaaacaattgtacagcctggttccctggatagtgaagctggtatttatgcttgtacctatgatcttactggctcgaggcttataacctgcgaggctgacaagacgataaaaatgtggaaagaagacgag

SEQ ID NO: 2809 - DNA, 194 bp, Glycine max
  unsure (1)..(194): unsure at all n locations; Clone ID: 701040712H1
cctcgagctctctcaagctctgagcgatttctccgcctgtagtagcgatatctccggcganctnccagaggctcgccaccgtttcctcctcccaacctcctcctgctgctcctcacgtcgacggccaaccccaacctgagcacgagccctgcctagggtttctccagagggagagcttctccaccgagatcata

SEQ ID NO: 2810 - DNA, 192 bp, Glycine max
  unsure (1)..(192): unsure at all n locations; Clone ID: 701040714H1
ggcgaagacccctttttctggttattaacagagtcataaaanaccaaagttttctattctctgtagctcacatgatgggctaagaatatctgactttggggtggaaagtatggttggcaaggagagtttgagaactgaggtctgaacttgagctttgagaagctatgatggttgaatgtggtggaaatagtg

SEQ ID NO: 2811 - DNA, 195 bp, Glycine max
  unsure (1)..(195): unsure at all n locations; Clone ID: 701040715H1
gaagaatgactaggtgtgaccataagaagaattttggaaacgaaacctcgtaaaggcttctcactaacaaacaatggcggctgagngctgagcttccggagtacttaaagtgtccgatttccctggaaattatgtccgaccccgtcatcctctcttccggccacaccttcgaccgctcctccatccagcgctggc

SEQ ID NO: 2812 - DNA, 82 bp, Glycine max
  Clone ID: 701040716H1
gtgctgttaggatgcagtgtgctttgatgatgctttgatgaatatgcagtgtgcttttttaagtctattattttctttattc

SEQ ID NO: 2813 - DNA, 202 bp, Glycine max
  Clone ID: 701040717H1
aattagccaaacacaccacagcaccaaactagttgggctcaattctctttgaatggctttggaggctttgaatttaccaacagcagccaccactcccttccgtggttaccaagaagaggaggaggaggttgaccttcaacctacgcgagccttgggcccaagagaaaacgctccaaacgacctcgttttgagtcggaggaag

SEQ ID NO: 2814 - DNA, 199 bp, Glycine max
  unsure (1)..(199): unsure at all n locations; Clone ID: 701040718H1
cacgaatatccctgttgtttggagcgatccgagaanaactctgtaaacatgttggtttaccaggatctccgtanaggtgatgagcttctctctgantccttccgttacanggaaattgnctcatggaatnctgtggnaagttgaggggaagtgggttgttaaaggagcagtngntgtagacattggtgcaaacccttcc

SEQ ID NO: 2815 - DNA, 201 bp, Glycine max
  unsure (1)..(201): unsure at all n locations; Clone ID: 701040719H1
agagcttctaaagcctctccctggcaggtgttgaaattcgatgaactccctaagcaaattgatgatacacagtacccaaaaacattcttctataaagaagaccttcatccagggcaaaacactgaaagtaacaattcaccaagcgtcccctatgcacaaccttatggtgtatctacatggttaagggatnttaaagacacc

SEQ ID NO: 2816 - DNA, 195 bp, Glycine max
  Clone ID: 701040720H1
ccttatattgccggtcacacccgagtctgtaggagcaagagaggaagatgaattcagttgtcctattaaaagcggagaagaagcggcagagcctctgttaaggcaagagactccagttgaggagaaagaagcagttgggttcatagaggcatggaaaattcctggggttgctccttttgctctgtgtctcttttt

SEQ ID NO: 2817 - DNA, 201 bp, Glycine max
  unsure (1)..(201): unsure at all n locations; Clone ID: 701040721H1
ctcactctgcacccaccattactcagcactgccattcttcaatcaacactaatggctgnacaccttncttcagatcttcacaccgaagagggcatcaaattcccttcgatccaattcctttctgggaaaacctatatctctggggatcaattgacaaaggatgatatcaaagtgtatgcagctgttgtggaaaagccagga

SEQ ID NO: 2818 - DNA, 194 bp, Glycine max
  Clone ID: 701040722H1
caaaaacacaccatgaagtccaatccaaaatcaaaaccaccaccccacttattatactttctaataatcctctccctatcgttctttttcccgtgtgtatcctcctctagaaaacaacaattcaaagaagcccctcaattctacaactccccaaactgcccctccatcgaacaccacgacatattaagctcctc

SEQ ID NO: 2819 - DNA, 193 bp, Glycine max
  Clone ID: 701040724H1
ttaagtctctgcattattctcttcccttttctatctccctctgcaaaaacgaagtaaatgggtcggcttaatctcctacttgtgtggtcactctctttaacacttttccttaattatctacacccaacctctgcccagctcagtccaaaccactatgctaacatatgccccaaccttgaaagcatcgttagac

SEQ ID NO: 2820 - DNA, 191 bp, Glycine max
  Clone ID: 701040725H1
ctttgggaatagtgctgcaatggcttcaagtcaggaggaggtgacccttttgggagctactggaagcccatttgtgtgcagggttcatattgccctcaagttgaagggagttgaatacaaatatgtcgaagaaaatttgaggaacaagagtgaactgcttctcaaatccaacccagttcacaagaaggttc

SEQ ID NO: 2821 - DNA, 191 bp, Glycine max
  unsure (1)..(191): unsure at all n locations; Clone ID: 701040727H1
aattggatgaganaanaaaatcctttgaagatggattgnagaataaattggtggnagtggnnaagnangaagctganatccactcacatggaggagaaagttgcgaaacggaaacaagccttgggaaanaaagcagagnagcttaaagagaaagagatagngtatgnacaaanagtgcanagtttgaggga

SEQ ID NO: 2822 - DNA, 191 bp, Glycine max
  unsure (1)..(191): unsure at all n locations; Clone ID: 701040728H1
cttttctcactaaccaaacatgaatatcaaacccatcatcatccnagctttcttaatttccctctctttaacaaacgtcgtcgtttcagctcgactctttcccaacgtctcctcctggctcaacgcccacgcccctactggaggcgcgtgggatgcctttctcaactttaccggttgtcaccgcggcgaca

SEQ ID NO: 2823 - DNA, 191 bp, Glycine max
  unsure (1)..(191): unsure at all n locations; Clone ID: 701040729H1
ctaattcatccaggaatatggctgtctacgctagcataataccaggagaccctattgatccttctcctggttctcctggttcttggtaatttatttcctcaccaatctctcatcatatatgtgacattatttacttgtgtttttcnttatatagtttaatttgacttggaaatagacaaacttaaaaaatg

SEQ ID NO: 2824 - DNA, 191 bp, Glycine max
  unsure (1)..(191): unsure at all n locations; Clone ID: 701040730H1
cggnacctctttctcaggttttataaaatctcatgtctgttcaaagctttcttattcttcgtattcatcatacaccacgccaaatcacaatacccttcagtttttgggaattttggctcagttgagatctctgtgaaacgggtttggaaaattttttgatcttgaggtttatnagattttaactgtggaag

SEQ ID NO: 2825 - DNA, 194 bp, Glycine max
  unsure (1)..(194): unsure at all n locations; Clone ID: 701040731H1
gaaaggagtgggtttcattaggtgaaaganaaacaagttgaccttaaagttaaagtcttaaagtatgataaacgagatatagaaattagaaagcgtgaggaggattttgcctggttttatacgcgccgaatgtgtgagagagaagggagagctggatacagctaaatggctanggttananagncgccatcccc

SEQ ID NO: 2826 - DNA, 197 bp, Glycine max
  Clone ID: 701040733H1
atttgactcttgttctgaacgacttttcaagagaatcaaaccatgggcagtgaaagtatacggtccccactgtgcttccaccaagcgggtgctggtttgtctggttgagaaggaagtcgaatttgaggttgtccctgttgatgtcactaagggggagcagaaggatcctgagtacctcaaactacagccatttggag

SEQ ID NO: 2827 - DNA, 177 bp, Glycine max
  unsure (1)..(177): unsure at all n locations; Clone ID: 701040734H1
caatgtttggaactcgattgcctnccagtaattggngggtactacacctttgttccaaccacaatctcaattatccttggctggccgattcagtgatganccagatcctatagagaaatttcaagaggataatgaggtcaatccaaggtgctcttattgttgcttcgactcttcaaa

SEQ ID NO: 2828 - DNA, 191 bp, Glycine max
  Clone ID: 701040735H1
tgaagggccatgactttaggctacttccattcgggtcgggtcgacgagtatgcccgggtgcccaacttggtatcaacttggcagcatccatgttgggccacctcttgcaccatttctgttggaccccacctgaaggaatgaagcctgaggaaattgacatgggagagaatccagggctagtcacatacatg

SEQ ID NO: 2829 - DNA, 193 bp, Glycine max
  Clone ID: 701040736H1
attctctctgtgtatttccctacctctcccttcaagatgcagatcttcgtcaagaccctcaccggcaagaccatcacccttgaggtggaaagctctgacaccatcgacaacgtcaaggccaagatccaggacaaggaaggaatccccccggaccagcaacgtctcattttcgccggaaagcaacttgaggacg

SEQ ID NO: 2830 - DNA, 192 bp, Glycine max
  unsure (1)..(192): unsure at all n locations; Clone ID: 701040737H1
aaggcaaaggggatcgctgaaatcaattagtctggttgtagtgggaaaagaaaagaaaatgaaaatgggtggtgggtgcaagtgtttggtatcgttggtgttggctttggtgttgatgaggagtttggcggaangcgcaatcgggcaccagcaccacttgcgcccaggnncnaatnccatgtgtganctttc

SEQ ID NO: 2831 - DNA, 190 bp, Glycine max
  Clone ID: 701040738H1
tttggacccaattaatgttaagattgctgagctcagagaggcactagaatctgttacagctgaacaaaagtacttgaaagctcgtgatgcgagacatcgccatacgaatgagagcacaaggaagcgtgttgtattctacactgtgggagagtaccttctcttggctgctgttagtgcactgcaagtcata

SEQ ID NO: 2832 - DNA, 104 bp, Glycine max
  unsure (1)..(104): unsure at all n locations; Clone ID: 701040739H1
ctccttcttcacacccaattncacanaattcacccaaaagcaccactggctattgagagagagggattccagaaagacaaacattcaaaattcacatctacaac

SEQ ID NO: 2833 - DNA, 189 bp, Glycine max
  Clone ID: 701040740H1
taactaacgacttaccagtaaagagacattaattaatttgcaaaaagaagaagcattgagattgggattgggagatggagcggaagtggagcagtgaatctggtgggaatgtgatatcgtcgccatcacactcgcgtaatgggcattctcgctcctctcgctcactatccccggaggaggaatttcaac

SEQ ID NO: 2834 - DNA, 190 bp, Glycine max
  Clone ID: 701040741H1
aaaagttggcaatcttcacagcacttgctttttcccagaagctgtctggtctcccaccagaaactgtgttccaaccacttcttaaagataaccttgtggccaaagggctagttctgtcatttatgactgacttctttaaggagtatctgattgacaacagtcttgatgatctatttcaattctaaaacgg

SEQ ID NO: 2835 - DNA, 180 bp, Glycine max
  unsure (1)..(180): unsure at all n locations; Clone ID: 701040743H1
cccttcctcatttttnttcttttccgttcacgaaatcgatggattttctggtgggtcccactttcaccatcgacgtcgcctcctccccgcctccgtacgacgccgacctccccggtgtcgccaccgccgccgaccgaccgtacggactcttctccggccactcctccgacagcgagtcct

SEQ ID NO: 2836 - DNA, 189 bp, Glycine max
  unsure (1)..(189): unsure at all n locations; Clone ID: 701040744H1
ggaaaaatggcacctttncgtttccctctctttgttgcttctctttctcaaccaccccctcctttccctctcaaccaaccctgaagggaacgctctgcatgctttgagaagcaggctttctgatcccaacaatatgttgcagagttgggacccaacactggttaatccctgtacttggtttcatgttac

SEQ ID NO: 2837 - DNA, 188 bp, Glycine max
  Clone ID: 701040745H1
ccaacatgacgcggtcaacgcttccaccctcatctccgatctccctcttcgtgtcgctcatgtgcgttgctttcgcgtgcgccacatcgttgaacaaaattgagcactgcgagttggattgtgcaagttccacggtggaggggctgaacgtggttggtgactgcgaacccaagtgttctcaggggttg

SEQ ID NO: 2838 - DNA, 192 bp, Glycine max
  Clone ID: 701040746H1
cgccattctctccgcgcaccgttttccggcgcagtccccggcgagtacaccgtcgtttccgccggcaagttctctctcaccgttgccatcctccttcagagaagttgagaaaatggacggccatatgggaatgaggaaaatcagctctcactgctctatccctgatttggatgattctgatatcttacgttt

SEQ ID NO: 2839 - DNA, 189 bp, Glycine max
  Clone ID: 701040747H1
tgaccttatatgcggaatacgttgtggagaacttgaggcggtagagcttggaattttgtttggttgtgaagacatacatgctttcaaaggctgctattataattgcgattatgacgataagaaaacctttctatccttgtcgcgtgtgcatttggtctcagggctggcaacatgcatattctgcacatg

SEQ ID NO: 2840 - DNA, 192 bp, Glycine max
  Clone ID: 701040748H1
gaaaatctcaggatgagttttaagaagatatgtgtgagtggggacaatgccactctatctgagtttgaggaggtgctgaaagcaatgaacatgccatcactgatccctctagcaccgcgaatatttgacttgtttgacgacaaccgagatggaacagttgacatgagagagatactatgtggtttttccagc

SEQ ID NO: 2841 - DNA, 172 bp, Glycine max
  unsure (1)..(172): unsure at all n locations; Clone ID: 701040749H1
gaatcacactctccacagtgcgattcattcaccaatggatcgcaacggtgttctctctcttgcattcatctgcattgtagtcgccggcgtcggaggccagtcctcccgccgcagcgccctcgaacactccggcaacccccgccgcngccactncgcgcccaagcaccttcca

SEQ ID NO: 2842 - DNA, 192 bp, Glycine max
  Clone ID: 701040750H1
atttctccatttccattttctctctcacttttcaagaatcgtaagctatgggaaagtcttacccaactgtgagtgctgattaccagaaggccgttgagaaggcgaagaagaagctcagaggcttcatcgctgagaagagatgcgctcctctaatgctccgtttggcatggcactctgctggaacctttgaca

SEQ ID NO: 2843 - DNA, 190 bp, Glycine max
  Clone ID: 701040751H1
gcgactgcgcttcagcacaatgggtgcctacaagtatgtttcggagctatggcgcaagaagcagtctgatgttatgagattcttgcagcgggtgaggtgctgggagtatcgccagcaaccttctattgtccgtttgacaaggtctactcgcccagataaggctcgtcgcttgggtttcaaggctaagcag

SEQ ID NO: 2844 - DNA, 191 bp, Glycine max
  unsure (1)..(191): unsure at all n locations; Clone ID: 701040752H1
aaaattaatcatcttacttatttattctccgaaaatggttgatttacattggaaatcaaagatgccaagttccgacatgccttccaaaactctaaaactctctctctccgacaacaagtccttaccctctttgcaactacccttccgcaccacagatatcttccacgccgcaccttctgtntnctacnact

SEQ ID NO: 2845 - DNA, 188 bp, Glycine max
  Clone ID: 701040753H1
gcagaatttttggagtcaaacacggcgttaagtgtgcaacaagagaatcggttaaagcaaatgggggcaacagttaggaatggagggtcatacgttgagagactgaagctgaatgaagtaagggaaaaaatggccaaaaatgtaatgggaaagatgtcagtggagcaattgtctgatctgctctcttt

SEQ ID NO: 2846 - DNA, 187 bp, Glycine max
  unsure (1)..(187): unsure at all n locations; Clone ID: 701040754H1
gtgatttcagtgagtgatcggtgttcacttgatctcatcataatcgtcagcgtcaattgaagaagatgccgatcagaaacatcgccgtcggaaggcctgaagaggcgactcaccccgacacgttgaaggcggctttggctgagttcatctcaaccttcatcttcgtgttcgccggctcaggntccgg

SEQ ID NO: 2847 - DNA, 188 bp, Glycine max
  unsure (1)..(188): unsure at all n locations; Clone ID: 701040755H1
cctatccccttcttctctctcaaacagaatgggaagtgctggaagaactgattatggtgcatacacctatgagaatcttgagagagagccttactggccatcagagaagcttaagatttccatcaccggtgctgggggttttatcgcatcacacatagctcggcgcctcaagacagaggggcnttact

SEQ ID NO: 2848 - DNA, 189 bp, Glycine max
  Clone ID: 701040756H1
tgtcactggagatgatatgcagacacaggttatcatcaatcaccaggctcttccttgccttctgaatctgttgaccaataattataaaaaaagcatcaagaaggaagcttgttggaccatatcaaacatcacagctggtaataaacagcagattcaggctgtgattgaggctaatctaattgctccttt

SEQ ID NO: 2849 - DNA, 188 bp, Glycine max
  Clone ID: 701040757H1
gcgggagacagtagcaaatagaaccaagccaacaatgggtaccgacaagccaaaccgggtcgggtcgtttatatacatcactgatccgattcgtgttttcctctccggcgcgtcgaaagacgcgaactctctccgacgagcttcgacgaacatcctccgatctgctcctccaatcggatgtaccctac

SEQ ID NO: 2850 - DNA, 185 bp, Glycine max
  Clone ID: 701040758H1
gcgttgttgccgttgaggtcaccggtggacctgaagttcccttccatcctggaagagaggacaaacctgagccaccaccagagggtcgcttgcccgatgccactaagggttctgaccatttgagagatgtgtttggcaaagctatggggcttagtgaccgagatatcgttgctctgtctgggggt

SEQ ID NO: 2851 - DNA, 186 bp, Glycine max
  unsure (1)..(186): unsure at all n locations; Clone ID: 701040759H1
cttagttctttccttatcctttcgctatccagacatgtaatctcncctttaccaagtaaatccatccttcttccattcatttctcatccctttgtnctacatttaatcacctcatttactaattttnctttctttcttagacctttgctcgatctgattttgaaagcttgactttgggtttaggtt

SEQ ID NO: 2852 - DNA, 189 bp, Glycine max
  unsure (1)..(189): unsure at all n locations; Clone ID: 701040760H1
gaagtactgccagagcgtttggagtccctttgagtacaantgccttgcacagaaatgggagactataagacctgaggacctcaaaattgatnggagtgaagtaactgtggttaactgnntgtancagattgnngaaccttttccgatgaaaccgtgactgcaaactgtcccaagagatgcnttgcngag

SEQ ID NO: 2853 - DNA, 188 bp, Glycine max
  unsure (1)..(188): unsure at all n locations; Clone ID: 701040761H1
caaagcagcacccatttggatcctctcttctcttctttgatctccgttaccctttttgttttctcannnnnnnnnnnnnnnnnnnatctttcgaagttcgtttgcgtgtgttgtgtggtcagtcaccgatggcagcaccacctgcgagggcacgtgccgattacgattacctcatcaagcttcttctt

SEQ ID NO: 2854 - DNA, 187 bp, Glycine max
  Clone ID: 701040762H1
cttcagtgatctttgattagtactaagctaaaccatttcttattccctcaaaatcaaaacctttttctttctagctatttcccttttcaaatcatgccacctaacatcaccaccgttgttgccaatgtcaccaccgagcaattacccaaggctcgtggaggaagtgggcgtgccttcgtgacctttc

SEQ ID NO: 2855 - DNA, 193 bp, Glycine max
  unsure (1)..(193): unsure at all n locations; Clone ID: 701040764H1
ctttttcacgcgacgccctagttcatttttcttctccgtncctctnctctctctgttcttcactcactctcattcattcaccatgacgaaacaacatgccaattggtctccttacgataacaacggaggatcatgtgttgcgattgctggagcagattactgcgtcatcgccgcagatacgaggatgtccacc

SEQ ID NO: 2856 - DNA, 182 bp, Glycine max
  unsure (1)..(182): unsure at all n locations; Clone ID: 701040766H1
ttcttccctcaaatagttaaagagatgaaaatcttggagttaggagaatggtggctttgcaacaccacttgtgatcttgagcctggagcacttgccatatctccaaggttcctcccaattggcncattgatggaaagtgacaccaacaaaaattcattctgggaagaggacataacttgcct

SEQ ID NO: 2857 - DNA, 190 bp, Glycine max
  Clone ID: 701040767H1
ctcagtttctttcttcaacgtttccatcatacacagatcccaatcctctctcaagccctaatttcccctcatttccatggccacagaagagcccactgtcgcggtggaacccgctcccgaacctggcctccgccgatcctcccccggaggagaaggaggagaccaaacctgaagccaaggctaagaaaac

SEQ ID NO: 2858 - DNA, 187 bp, Glycine max
  Clone ID: 701040769H1
ttcagaaataacgacctatgaacacacaagtattgcttttgcaccttatggagaatattggagacaggtacgaaaaatatgcgccatggagcttctctccccaaaacgtgtcaactcattccggtcaattagagaagaagagttcaccaatcttgtcaaaatggttggttcacatgaagggtccccc

SEQ ID NO: 2859 - DNA, 165 bp, Glycine max
  Clone ID: 701040770H1
acaaaacttagctctgtttttaattattccttgcattctcttgtattaagatggaagcaactaccatcaccaatgggagccaaaacggttcgttttgcttgtccactactaagggaagtagtgatccgttaaactggggagcggcggcagaggcgatgaagggga

SEQ ID NO: 2860 - DNA, 159 bp, Glycine max
  unsure (1)..(159): unsure at all n locations; Clone ID: 701040771H1
caagaattaggtgcctcgagttaggaggacgatagtctaagcatcttttctcacagggatttttgagtcagtttcnntttatatttattatatgcataattggtttttatgtttgcagtacactcagaaatcagaatgtttttattgtttgaggtgatt

SEQ ID NO: 2861 - DNA, 184 bp, Glycine max
  unsure (1)..(184): unsure at all n locations; Clone ID: 701040772H1
ctttcttctttccaagattctggcagttactgtcagattcattatcnaagatgcagaggagaagaaggcctcttttaatccaaggccacttttcagattattcatcaactggcttctagatcttggttcacttgagccgttactgatggtgcaaatctcagattttaactgcttttgccaatnc

SEQ ID NO: 2862 - DNA, 185 bp, Glycine max
  Clone ID: 701040773H1
atttaattcactgtactttatccttttgtgtggggaattatggtaattgattttgagggtttgactactcatggattatgatggtatgagaaaaccttccaaaaacttatttcactctcgcttctcccttttgggttctattgctgggattgggagttcttgaccgctctcctcctttttagttc

SEQ ID NO: 2863 - DNA, 184 bp, Glycine max
  Clone ID: 701040774H1
ttagaatgttatgccatgtggccaaggaagagatggatgcaaaaattcacataaactctgcatttgatcttttcaacaaaataaagaatatgctttgcaaatcccttaacctaatcaataaatttcaatctgcgggagtactgggagcaaaggcttcagatggagagggtagagagggttaagc

SEQ ID NO: 2864 - DNA, 155 bp, Glycine max
  unsure (1)..(155): unsure at all n locations; Clone ID: 701040775H1
gtcaaggtctattcgggcaggcactatatggatcaactgctangccatacttggcnttgttagcactcttnnntgcttcncnantgatggcnctggagaagttcaagnccactgaggcnncaattaagagtnccaannntaccnngtatggccta

SEQ ID NO: 2865 - DNA, 184 bp, Glycine max
  Clone ID: 701040776H1
gtgcgatctcacgggcaaataaagttgtgtctatgagacagcaaaggcttttgcagatgaaattggaattcccttcatggaaactagtgctaaaaatgccaccaatgttgaacaggctttcatggccatggctgctgaaattaaaaacagaatggcaagccagccagtgaacaatggcgaggcc

SEQ ID NO: 2866 - DNA, 117 bp, Glycine max
  Clone ID: 701040777H1
ggttggtaatttgcgtaaatcaaaatggtagtactaattaatctactaatagattaatttgcaagtgaagatatatgggtttgtataatgtaaatataggatagtatgaagcaagat

SEQ ID NO: 2867 - DNA, 189 bp, Glycine max
  Clone ID: 701040780H1
gccggtggaacaaaacgaagaagacgttccgttttccctctgcttttccaagttttcatcgacttcaaccatgctattcttacataactagggttaggagttagggcgttcttatcgttttcgctccgttaattacaacaacggccaacatggttgttctttcgctttcacctcccagcctctctaccg

SEQ ID NO: 2868 - DNA, 191 bp, Glycine max
  unsure (1)..(191): unsure at all n locations; Clone ID: 701040781H1
ggcgtcttcataaacgcctttattctccatttccgtttccttcccggaattcgatttttcatctctgnaaatgagagagtgcatctcgatccacattggtcaggccggtatccaggtcggaaatgcttgctgggagcnctactgtcttgagcacggcatcgggcccgatgggcaaatgccaagtgacaaaa

SEQ ID NO: 2869 - DNA, 188 bp, Glycine max
  Clone ID: 701040782H1
tctgggattagctgttcattaagggaattcatccccaattcttcacttctgaagagagttcagttttccctccctttggataagtctaagctagacactgtaaattggatttaattatcatgatttagttatcctctacatttatgtagagtaactattaagataattgtgctcttcagaagagaaat

SEQ ID NO: 2870 - DNA, 192 bp, Glycine max
  unsure (1)..(192): unsure at all n locations; Clone ID: 701040783H1
ttcaaacccaaanaanattncaaanatncctnncaagacaaacaangggcttaacgcantaccnaannccacagtttcaatcancatnctctctgctctctcctctttctcgcaaatntntactttctgggttntctatttgagattcgttgttcnaatgagcgatccattggtggtgttcgttgaccgncc

SEQ ID NO: 2871 - DNA, 184 bp, Glycine max
  unsure (1)..(184): unsure at all n locations; Clone ID: 701040784H1
accttggatcaggtttagggaatggctgcaatcttagctcgaaaatcactccttgctcttcgtgcgcgccaattggctgtaagcggtcaagggctgcacagctcccaatactatggccttcggttaagtgcacactccttctctaccaaaagagaggntgangaaagggagcaactcgcanagg

SEQ ID NO: 2872 - DNA, 70 bp, Glycine max
  unsure (1)..(70): unsure at all n locations; Clone ID: 701040786H1
acgggaacggatctgctgggtgggnctagataaagtgaagcaagctgacnagactaagggaagattggat

SEQ ID NO: 2873 - DNA, 184 bp, Glycine max
  Clone ID: 701040787H1
ttcccttctaacctcccattccgttttctctgcagtactcaattgatccctttgtttttctattcgttctgagagctttgtgtgtatggccggcatagacttgggttcagcatcacattttgttcatcatcgccttcaacgccctgaccttgaagacgatgagaaccaacaagaccaagacaac

SEQ ID NO: 2874 - DNA, 186 bp, Glycine max
  Clone ID: 701040788H1
gggaaaaggcacagaaagtgacaaattggtgcaactatatagtagaatccctttggcttttgctagagattttaaagcttcaatgatcaagatggggaacatgaagcctctcactgggaggcagggagagatcagatgcaattgcagaagggtcaactagttggattgcaaggtctggattacaat

SEQ ID NO: 2875 - DNA, 183 bp, Glycine max
  unsure (1)..(183): unsure at all n locations; Clone ID: 701040789H1
gcatgaggcaatttcaaagtttatacaaggnactgttgctgatggtgcaccagtagtacctatttcagcacagttgaagtataatattgatgttgtgtgcgaatatattgtgaagaagatcccaatccctgaaaggnactttgtttctccacctaacatgattgtnattcggtcatttgatgt

SEQ ID NO: 2876 - DNA, 174 bp, Glycine max
  unsure (1)..(174): unsure at all n locations; Clone ID: 701040790H1
ctctgtttctccctttctctctgtctctctctcgctcttcttctcatccagcaccgagtcacagactcaccgatcttccgattccctttcgtcttggtttatgagctcgaaggagagacccactcttggtggcacgcggattaagacccgcaaacggnatattgctgcgccgct

SEQ ID NO: 2877 - DNA, 182 bp, Glycine max
  Clone ID: 701040791H1
gtagaggagaatcttttggacattttcccccctacaaaaagatctaatgaagccttctctgagcatttcaccaaggaaggactggtggccttggtggagtataatgaaaagaaaaattttgaggtgaaacttaaggaaatgaagtcttctttaacagcacagttaacagacgaggctgatac

SEQ ID NO: 2878 - DNA, 181 bp, Glycine max
  unsure (1)..(181): unsure at all n locations; Clone ID: 701040792H1
ctgttcaccattttcaattcattcctgtgttagattccaagtggtttggtttgntttgacataaataaacctttcaagatctcagaggggcagaagatcaaagccaagacaacacactctcatatataaaagagtgtctctgataatttgatctttgtttctctctttcnctccttgagat

SEQ ID NO: 2879 - DNA, 184 bp, Glycine max
  Clone ID: 701040794H1
gcgtttgctcacgacttggagttggaatcctcttcttcccctctggtgttctcagtacggaggagtgaaccggagctggtggctccggccaagcccactccccgcgaaattaagatcctatctgagatagattctcaggcgggtcttcgtacccaaattccaatcatacagttctaccgtaacg

SEQ ID NO: 2880 - DNA, 188 bp, Glycine max
  Clone ID: 701040796H1
gacaaatgcaaggtgttggtcaacattgagcagcagagccctgatatcgcccagggtgtgcacggtcacttcaccaagcgcccagaggaggttggtgctggtgaccagggtcacatgtttggctatgccactgatgaaacccctgagtacatgcccctcagccatgtccttgcaaccaaactcggtgc

SEQ ID NO: 2881 - DNA, 206 bp, Glycine max
  Clone ID: 701040821H1
cctcgctctgtttctgtctctgtgtttgcggctgaggattccgaacgagcgaccttcttcgtttctcgcaaagtttaagtcctcatgggtaaggaaaagactcacatcaacattgtcgtcattggacatgtcgactctgggaagtcaactaccactggtcatttgatctacaagcttggaggtattgacaagcgtgtgattgacag

SEQ ID NO: 2882 - DNA, 207 bp, Glycine max
  Clone ID: 701040823H1
attcgttgattccttcatttccttggcagttttgttgctgagtgtgtgtgaaactgtgaaagagagttatggcaggaggtggtggagctccagcacctaagattgatgagccacaacctcatcccccgaaggatcagttaccgaatgtttcttactgcattacgagttcctcctccatggcctgaggccatacttcttggttttcaa

SEQ ID NO: 2883 - DNA, 207 bp, Glycine max
  unsure (1)..(207): unsure at all n locations; Clone ID: 701040824H1
ctgacttattgaccttaccttccacagtgtcagtgaacaacctntctctcacctacctacccacttcaaatgcttgtattatcttcatttgtataaaaccaaagacctctcaatccatcatttgtctccagctcatgagaagtgcatcatagttagaagcaaacccacccttttcatccaattttgattatagatggaaaaccagcc

SEQ ID NO: 2884 - DNA, 204 bp, Glycine max
  unsure (1)..(204): unsure at all n locations; Clone ID: 701040826H1
gaaaccttgtcttaaggagattccttggctccactctcattttagtgtgctagtggtgtcagttatataagtaaggggtggtgaaggggatagttcccacttgtgaatcatcattatcattattaccaaacttctctacaanaccaaaacctccaagcccttaacttttgagtcaaaatttatcatttcaaagcactctccaat

SEQ ID NO: 2885 - DNA, 204 bp, Glycine max
  Clone ID: 701040827H1
cggtctctctcggtttcaactgtgaactgtgagctggtaatggtttcataaatctcactgcatccatggcttcggagaagatttcctcgattcctcttgttttctgctgtaattttgcttgtccgtgatgctccttctgccatagctggggacatagttcacgacgacgattcaactcccaaaaagcccggttgcgagaaccag

SEQ ID NO: 2886 - DNA, 189 bp, Glycine max
  unsure (1)..(189): unsure at all n locations; Clone ID: 701040828H1
gtctaattaacgacaaagtatatatgtattgttatttgtttttgtntttgntttttcgtttttgggtcttatgaacgaaccacgtctatagttttaatttggatgaccttttgtatacaaagtcacatgtgacgtcttacagcttttgattattattaagatttaattatatgagtccttaacttaaaa

SEQ ID NO: 2887 - DNA, 206 bp, Glycine max
  Clone ID: 701040831H1
gtttgtttgtctgtcacgagactgcatacattgtgctgccaattatagtaactctctatttctctttccatgctctcaagttctgaagaagaaacatgtgtggaggtgctatcatctcagacttcattggtgtgaagcgtggccgcaacctcgccgcgcaggaactatggtctgagcttgaccctttctctgacttccttggcttc

SEQ ID NO: 2888 - DNA, 205 bp, Glycine max
  unsure (1)..(205): unsure at all n locations; Clone ID: 701040832H1
ttttgtggtggctacttgcgattccaacaattcgtgagtacaactcataccttcaagacagaaagccagtgaaaaaggttggggcatattgttggctctctcttgccattngcattgtggaacttctgatttgcattaagtttggacacggcttgtatccaaaaccaatgcctatatggctggtaatattctggtcgggtgttgg

SEQ ID NO: 2889 - DNA, 210 bp, Glycine max
  Clone ID: 701040834H1
acttttatagtatatggaatgagtataggtacttgattttatgaaataaatatcagtacgtgagaggtattaattcataaccttttacatataaaagtgttgcaacaactccttggtaaaaatccattccattaatgtcaattttcttagcctagtcagtaccctgccttacatctgcgcaaatcgaacttgtaaacctttgcttcacta

SEQ ID NO: 2890 - DNA, 187 bp, Glycine max
  unsure (1)..(187): unsure at all n locations; Clone ID: 701040835H1
aaatactcccgctcccgtctccacatatttgcgaacccactttctttgtgagagacccgntatcagagaatccnnnnnnnnnnnnnnnnnnnacgacagagcaagaaggaaatggcgaccaacattgggatcatggatgcggcttacttcgtcggcagatctgagattctttcttggatcaactcaa

SEQ ID NO: 2891 - DNA, 209 bp, Glycine max
  Clone ID: 701040836H1
aagaaatgtacttggaagaaatcaaggagcatgaacaaggtaatggctcagaaaacaccaaattcaaaagaatcgagcaaggagttgggcttcaacagcaaatgttgcactcgatcatctccaatcaaaacatgaaagcttcaacaaccaaaatacttccccaaccgagatctcaacaagctcttcaatgtctccaatgggagggtccc

SEQ ID NO: 2892 - DNA, 205 bp, Glycine max
  Clone ID: 701040837H1
tgaagatatattatggcattctctatcttcaaacatgttctgtcgttattccttctttgcattttcttggcaggaacctaccaatgcccttagaaagacctacattgtgtacatgggaggaacattctcatggtccagacccttgcctagtgatcttgaaacagccacaaattcccatcatgatttactcgcttcttacttagga

SEQ ID NO: 2893 - DNA, 204 bp, Glycine max
  Clone ID: 701040838H1
atggggaacacggagaagctgatgaaccagatcatggaattgaaattcacttcgaaatcgctgcagcgtcaatcgcgtaagtgcgagaaggaggagaaatcggagaagctgaaggtgaagaaggcgatcgagaaaggcaacatggacggcgctcgaatctacgcggagaacgcgatccgtaagcgcacggagcagatgaactac

SEQ ID NO: 2894 - DNA, 203 bp, Glycine max
  Clone ID: 701040840H1
ctagtcccaaagagctaacaagagattcaagaccggcatggctaatgaagaggaacagaaaaaccacctcttcggcatcaaagatctcggtcacaagactctccttcagagtgatgcactctatcagtatatacttgaaaccagtgtctatccaagagagcacgagtgcttgaaagagatacgcaagatgactgcaaaacacc

SEQ ID NO: 2895 - DNA, 201 bp, Glycine max
  unsure (1)..(201): unsure at all n locations; Clone ID: 701040842H1
gctggccatgctgaagcagctcattgcgcanttncaacacctctttgacacttaccactctcaatcttctctcatctttcaacaacaacaccccagatggacgacctcccttgacattgaagataactctgtagatgacttctgtggccttgtaatgacagctggaaagtctggcagtttcaggatgtcggagcctggaaa

SEQ ID NO: 2896 - DNA, 204 bp, Glycine max
  unsure (1)..(204): unsure at all n locations; Clone ID: 701040843H1
ctaacttctnctctctctctctttggcggctctcaattctccaacccccaaccctagttccatttttttttaatcctaaatncatgcatactccagacacctagtttcatttcatgcattacacgcacaccttatttatttatatggaaaaaaaatcaaatcaatagagccagacaagtgttgtgttgttgaggttgaggttga

SEQ ID NO: 2897 - DNA, 190 bp, Glycine max
  Clone ID: 701040844H1
ccgccaacgcctccctctcggtggccttcgtggcggctccgcccaatcccggcgactgggtgtcctgggggatcaaccccagcggcaccggcatggtgggggacaggtgctggccgcgtacaaggcggagggcaccggtgccgttcaccgtgaaaacgttggaccttaaatcttactctgccattgttcc

SEQ ID NO: 2898 - DNA, 180 bp, Glycine max
  unsure (1)..(180): unsure at all n locations; Clone ID: 701040845H1
gttttttcctcggtcaccattttngcagttcctgaagaggaacttgaattttatcaccatccaattcacctccctcgcgaatttcaatctcatatcttgtcttccttcctttcatcactactactcaacttaatatataggaagctagctgttagtcctctactgcttgcatcacttcaa

SEQ ID NO: 2899 - DNA, 203 bp, Glycine max
  unsure (1)..(203): unsure at all n locations; Clone ID: 701040846H1
atccgtgttcctctctctcatctctctttctctctgttccctcggtttccttactttaaagtttaatccaatccaataatccaataactacatacaaagttgaacaataccaccatcatagcgtatncatcatcagaattccaaggtggatttgcttcatcttttactccggcttcatgttgcatgagtaaaggccgttatgt

SEQ ID NO: 2900 - DNA, 203 bp, Glycine max
  unsure (1)..(203): unsure at all n locations; Clone ID: 701040847H1
ccgganccctcctcgccggcggcctctactggttcgtgtgcgttctgggccccgccgagcagaagggcaaacgcgccaccgatctttccggcggctccatctccgccgagaaagtccaagacaactacaaacagtactggtcttcttccgccgcccaaaggagatcgagaccgccgacaaagtccccgacttcgtcgacacct

SEQ ID NO: 2901 - DNA, 206 bp, Glycine max
  unsure (1)..(206): unsure at all n locations; Clone ID: 701040848H1
cgaaatcgcgaacagaacagcaacgttaacaatgggttctcgctacgaggtggaactgaagctctcatcgggcacgcgctcttcaagaacgtgaactggcgccatggcccgaancgcccatacgttcgtcgtttgggtcgacccaagcaacaagctctcgacgcgcgtggacgaaagcggcgacactgacgcgaattgggaccaaa

SEQ ID NO: 2902 - DNA, 206 bp, Glycine max
  Clone ID: 701040850H1
gaacaagcccgaaggccctcccaatagtcgtgcttacactcctggctctccattaataggatatggtgtgtctaaagtcctggaatctgggcacccagattataaggaaggtgatttagtgtggggctttaccaaatgggaagagtatagcttgttaccctcagctcaaatactcttcaaaattgagcacactgatgttccactta

SEQ ID NO: 2903 - DNA, 204 bp, Glycine max
  unsure (1)..(204): unsure at all n locations; Clone ID: 701040851H1
gtctttatgtctttcttttcttcctttgctttcctttccccttgtatntttgcangatttgttttctttttttgtttgaagttccttccatttagatctaagaccagcacagtttcctcaaccttagaactagttgcgccagaagggctcactcaaagctcaactttgccatagttctacttttttaatgccccacttgtttgg

SEQ ID NO: 2904 - DNA, 205 bp, Glycine max
  Clone ID: 701040852H1
ttccaatatattccattctgctctgtgtatttccctacctctcccttcaagatgcagatcttcgtcaagaccctcaccggcaagaccatcacccttgaggtggaaagctctgacaccatcgacaacgtcaaggccaagatccaggacaaggaaggaatccccccggaccagcaacgtctcattttcgccggaaagcaacttgagg

SEQ ID NO: 2905 - DNA, 182 bp, Glycine max
  unsure (1)..(182): unsure at all n locations; Clone ID: 701040853H1
gcctggtcttggcatctccgcagcaccacccaccctggaccaggtcttcaacagagagaaagagaaggnnnnnnnnnnnnnnnnnnnnnnnnnnnngttaaactaacattttttattagtaagaagacatggctcancccagttccaacggggatctgnataataaccagcagggtcaggtt

SEQ ID NO: 2906 - DNA, 201 bp, Glycine max
  unsure (1)..(201): unsure at all n locations; Clone ID: 701040854H1
tctctctccatgagcacagtaccgtaacgtaacgtaaccacgagatgcctctattctagcacttggaaccccaaatccgtgccaattcctccgctccttttcgcagacgaaggcacattctgacgttcacaagattggaaggcaagactaaagattccaccacctgatacaagctagaaaacagaggtttganatggctgt

SEQ ID NO: 2907 - DNA, 201 bp, Glycine max
  Clone ID: 701040855H1
agcgacacgtatcttcatcaataatcgcagaagcagtttccggtgcatctcatcgtcttccaaaatgaacgacgcagatgtctcgaagcaaatccagcagatggtgcgtttcatccgccaggaagctgaggagaaagccaacgagatctctgtatctgccgaagaggaattcaatatcgagaagctgcagttggttgaagc

SEQ ID NO: 2908 - DNA, 203 bp, Glycine max
  unsure (1)..(203): unsure at all n locations; Clone ID: 701040856H1
caattttnagctagtcatgaagatccactgcgacgtgtgtaacaagcaccaggcctcttnccttctgcaccgccgacgaagctgccctatgcgacggctgcgaccaccgcgtccaccacgccaacaagctcgcctccaaacaccaacgcttctccctcacccacccctctgcgaaacattttcccctctgcgatgtttgccag

SEQ ID NO: 2909 - DNA, 197 bp, Glycine max
  Clone ID: 701040858H1
aattggccttggggccaaggatcctgttgatgtcattgcggttgtagagctcatagtcaaagcctactttttcaacaccctctatgaacctttccgagaaggtgcagattttgttcgcggttaccccttcagtctccgggaaggtgtaccaactgcagtttctcatggtctttggctcaacatcccagattacgatg

SEQ ID NO: 2910 - DNA, 197 bp, Glycine max
  Clone ID: 701040860H1
cacaaacagaggctacgtacgatcaaattaattaagatggcggaagtgaggaacaaacaagtggttctgagggactatgtgagtggttttcctaaggaatccgacatgaacatagttgaaggaaccacaatattgaagcttccacaaggttccaatgatgtgcttctaaaaaatctctacctttcctgtgaccctta

SEQ ID NO: 2911 - DNA, 198 bp, Glycine max
  unsure (1)..(198): unsure at all n locations; Clone ID: 701040861H1
ttttgttccaaacaaaaacgtatgaattggtcggtttttntccggagtcgtcttcacttttctccgagtttttattatcatcatctctctcgtgcccctgtctccatctccatctcttagtttcttcttcaaatggcagaagttgaagacatagacaaccctcatcacgaccaccatcattacctttcttcttctaca

SEQ ID NO: 2912 - DNA, 201 bp, Glycine max
  Clone ID: 701040862H1
ggcaatattatagtggacattgaatactttaaagaagccctttccaaagtagactctcagatgaaaaatcttcctgcaacagctcaggtagctgcacaacaaggagtctatcttgcagactgtttcaaccgcatggaggagtgtgagaagtatccagaaggccctctcaggttcaggggagttggacgccatcggttccgt

SEQ ID NO: 2913 - DNA, 203 bp, Glycine max
  unsure (1)..(203): unsure at all n locations; Clone ID: 701040863H1
gttactacaaaaattcgaggagtggatcatgaaaattgaattggatctttatccataagaaacagaatgagaganagaaaaaggatgagaaaaccatttcagaattcataatcatacctttttccactctgacgccatttncattattcattcatattaatattagggctctcaccctccattccaattgctattagattctg

SEQ ID NO: 2914 - DNA, 200 bp, Glycine max
  unsure (1)..(200): unsure at all n locations; Clone ID: 701040864H1
tgagtctacgtgtttgagagaaaggttgagctatagcctaaagggagagacacataaatagtttctactttctattcatagatagatggctggnccaattatgagacctcagattgtgctatttggctcctccataattcaaatgagcttcgacaatggtggttggggtgctattctagctaacttgtacgctaggaagg

SEQ ID NO: 2915 - DNA, 207 bp, Glycine max
  unsure (1)..(207): unsure at all n locations; Clone ID: 701040865H1
cacaagctcacagagcaagaacactgttccaatacggaatctaaggcaaagcaaaccaaacatcttgaatcatgggttcaacaggtgagactcagattaccccaacccacgtatctgatgaagangcaaaccttttcgccatgcaactagccagtgttctgtccttccaatgatcctcaaatcagcacttgagcttgatctgttgga

SEQ ID NO: 2916 - DNA, 202 bp, Glycine max
  Clone ID: 701040866H1
gaggtgccaatatggtgaagatagctcttggtactttggatgactcttttagcgctgcctctcttaaggctatttcgcagagttccacgcaactctgattttcgtgttcgctggtgttggatcagccatcgcttacaacgagcttacaaaagatgcagccttggatccaacggggctggtggcagtagctgtggcacatgca

SEQ ID NO: 2917 - DNA, 204 bp, Glycine max
  Clone ID: 701040867H1
ccgaaagcaacagcagcagagttataaggttccacagcgtcatcaagtgttcgtggttgaagccaagggcaaaaagggaatgatgtctcgtcaatttcagcgcaatgctcctcctcctttacccaagattgaagacgatggcaatcccaaattcgtcatcttcattcgcatggccaatgtatacctttggtaccctcttagtat

SEQ ID NO: 2918 - DNA, 201 bp, Glycine max
  Clone ID: 701040868H1
atctatttcgtataacatttcatttcacttcacttagggtggtgcatttgcaaccctttaatttcctcacaaaaatggaggaacgtagtttgtactcactagtgtttcttgtgcttgctttggctattgtgaacaaagtgcatgggcaagggacgcgtgtagggttctattcgagtacatgcccacgcgctgagtccattg

SEQ ID NO: 2919 - DNA, 201 bp, Glycine max
  Clone ID: 701040869H1
attgaatacaagcccccaccagccatgaaggctcaacaacctactaatgcatcagcagctgtctctattttcagactcacgcgtgaccagctcaacacactgaaagccaaatccaaagaagatggcaacacaatcagctatagttcttatgagatgttggcgggtcacgtgtggcgaagtgtaagcaaagcaagagcactt

SEQ ID NO: 2920 - DNA, 202 bp, Glycine max
  unsure (1)..(202): unsure at all n locations; Clone ID: 701040870H1
gcttacaatcccttcttgtagggcgagggggattgcatttggacagaaaaatggcgtagntgtttntcataaatttagctacttctcaagttggaagggaggaaattgtatctactcctggactcattggtgcattggcttcgatattggacaccggtgagctcatagaacaggagcaagctgtctcttgtctcctaatttt

SEQ ID NO: 2921 - DNA, 197 bp, Glycine max
  Clone ID: 701040871H1
gtgcttccatggcaaaaccaaagcttcacttgctgtcctttctcttctgcagcatcttgctaagcttcttccactgcacattttcactgatcaacccagaggatgagcccagctggattggcatggaaactgaagacattaacattgtaagaacccggagagatacttggaaaaaatgtgactactctgttggaaaa

SEQ ID NO: 2922 - DNA, 198 bp, Glycine max
  unsure (1)..(198): unsure at all n locations; Clone ID: 701040872H1
cagaattcgaaacagaaccatcgaataataaaaaaggaaaactaaaattccaaaaacgccactttcattcagctaagctnnnnnnnnnnnnnnnnnnnnnnnnnnnnnnnnnnntctacctttggatcctttcactttggcgtgaccgaaccattccactccctcgcaaaacggtgtcgtgtcgatcgcgttcggttc

SEQ ID NO: 2923 - DNA, 194 bp, Glycine max
  Clone ID: 701040874H1
tgatgaaccttcctaggacttggtcccttacttaccttttggatatgaattacttgggtccaattttatctgatggctcttattgctcaaccttggattttcaaattaacaatggggattagaccctttgtgaaatctcaaccggttgaaatgaacaattatgtagcagattcagggaagtaccaagtgaaaca

SEQ ID NO: 2924 - DNA, 197 bp, Glycine max
  Clone ID: 701040875H1
attttgtttatcataggaggatctgatgtactcgctcgtggatctcaactatatttcacgatcatgatggcccttgaaaattctgaaaatatgcaaataaactgtgaggcatctttaaaatgcctccagggcaagggatttccttgcaattttcagagtaatgggagttctatggaaggctttacagagcttaaaaa

SEQ ID NO: 2925 - DNA, 200 bp, Glycine max
  unsure (1)..(200): unsure at all n locations; Clone ID: 701040876H1
gcaantaagaatggatgagttgcaaggaaatgagggaggatgacactttacctctnagcttgacactatgtttcaagcccgaatttttcccggcaatcttgaacgctgctgttgatctggaatttgtttgatatcatagacaaggcagagagttcaaatttgtcagccctctgagatgcttctttgnttccaaatccaca

SEQ ID NO: 2926 - DNA, 59 bp, Glycine max
  unsure (1)..(59): unsure at all n locations; Clone ID: 701040878H1
ctgtgtgcatcgacgctctcacacaacaacttctcngtccatgcgatgatgatcttctt

SEQ ID NO: 2927 - DNA, 150 bp, Glycine max
  Clone ID: 701040880H1
tagtgcctccttgccagaagttaaaatggcccaagaaactttcctattcacatctgaatcagtgaacgaggggcaccctgacaagctctgtgaccagatctccgatgctgtgctcgatgcatgcttggagcaggaccctgacagcaaggt

SEQ ID NO: 2928 - DNA, 87 bp, Glycine max
  unsure (1)..(87): unsure at all n locations; Clone ID: 701040881H1
taccgcactgccgctccaagatgctatagctaaagcaaacccagttgtcaagggctgnaaagttgataagatctaagatttgaagtt

SEQ ID NO: 2929 - DNA, 200 bp, Glycine max
  unsure (1)..(200): unsure at all n locations; Clone ID: 701040883H1
ctcacgacaaattcacatcctccttctttcatctctctcnntctctctnnctctctgtcttttcctttgcccgtgcgtgtgaaagatcgcagcaacttccaccaccatcacaacagcaccgtaancgatttccaaggttgagttatttgctggtctaacttaaccatactgtctattttgactctgagattgctagtgag

SEQ ID NO: 2930 - DNA, 107 bp, Glycine max
  Clone ID: 701040884H1
gtgattgtgggaaaagatgccttcagaggcacttcgaagaacaaacaaacgatcttcggcgtttcttcaacgtacgaacgagaagcggaaaacttagggttatggta

SEQ ID NO: 2931 - DNA, 198 bp, Glycine max
  Clone ID: 701040885H1
tcaaagcgaaaagagattcgaatccaaggaagggaaaggaaagtaagagaagagaagaatggccgaagagggacaagtgattggtgtccacagcgtggaggagtgggaggaacatcttcaagaagggacaagagtccaagaaattgattgtggtggattttactgcttcttggtgcggcccatgccgtttcattgccc

SEQ ID NO: 2932 - DNA, 197 bp, Glycine max
  unsure (1)..(197): unsure at all n locations; Clone ID: 701040886H1
ctccttctccccctgtttttgcttgctgcgtaatacgaaataaattnttaaaaaaaaacgttcgctggttaatggttttaattttattgttctcagattaacctttctctttgtgaatcctattcaaacgtcgattgtgaatctgagtgtttttttactttgattcgattcgatatgaagcgagcgaggaaatccaa

SEQ ID NO: 2933 - DNA, 177 bp, Glycine max
  unsure (1)..(177): unsure at all n locations; Clone ID: 701040887H1
cagaatgtgattttggattcaaaancagaagcttgagttatacccgcaacanaatgcaggaaanggttctatataanagcagatgcgataattcgactaaatgagattacggaaagggcatctgcggataagcgtgaggcagaatcattgggcaagantatgaagagaaatacaaac

SEQ ID NO: 2934 - DNA, 197 bp, Glycine max
  unsure (1)..(197): unsure at all n locations; Clone ID: 701040888H1
tctcagtccatgacccaagcnggcctcactcgctacggttccgcccccggttctcttctcaccagcacggttgattctcttattggtggatcccgtcccagtccctacttttccggagagtcttctgagtctccctgcaaagagcaaagatctttccacaaccaccccccctccttcgcttcctccttgctccgcca

SEQ ID NO: 2935 - DNA, 193 bp, Glycine max
  unsure (1)..(193): unsure at all n locations; Clone ID: 701040889H1
gcgatatcttgctttcatatggatcttcttagcgaantgaagctgcattacgtcctgccgatgagcctggtgcagaggttccaaacggtgcagctggtcattatctattagggctctttacagatgcactgacagaaggaaaaatgccatacaacatttcaagcaggcactgtcaatggatcctcttatgtgg

SEQ ID NO: 2936 - DNA, 195 bp, Glycine max
  unsure (1)..(195): unsure at all n locations; Clone ID: 701040890H1
gaggagcatcctgagtgggagattaagaatgatagtgtctttttccaaaaggcaaaagaatctgcaccttgcaaagaaataccctctctgcagctcatncaaccagacacttagttatgctagggagttggagaggattgtctgagtcgaaatgcaatggcggcttttgtgtttccaaaatttttaggtgtctgg

SEQ ID NO: 2937 - DNA, 194 bp, Glycine max
  unsure (1)..(194): unsure at all n locations; Clone ID: 701040891H1
cgaaaagggcttgattgcacatccttttttctttctgggntggnagaacttttccgataaaagattgattcactanaaaaatggtgctggatccagcaaggctggtgctggtgcttttgattcagcacctgcattttggccatcaatggtgacacagatccaaatgacgttacttctctaaaggttttgtttca

SEQ ID NO: 2938 - DNA, 195 bp, Glycine max
  unsure (1)..(195): unsure at all n locations; Clone ID: 701040892H1
ctgttcaccattttcaattcattcctgtgttagattccaagtggtttggtttggtttgacataaataaacctttcaagatctcagaggggcagaagatcanagccaagacaacacactctcatatataaaagagtgtctctgataatttgatctttgtttcttctctntctctcctttgagatttttcagcaccc

SEQ ID NO: 2939 - DNA, 195 bp, Glycine max
  Clone ID: 701040893H1
gaaaaagaggattggagggtcgccacgtttagcaacaaccaaaccctctctactctttcttcttctcttcgctagggttttagcttcttcctcttcacttcgttcttctggcctctacaatgagcaacgacaaggacaccttcaacgtcgctgatctcacttccgctctcaacgaggacaatagagcagaccttg

SEQ ID NO: 2940 - DNA, 197 bp, Glycine max
  Clone ID: 701040894H1
atcacaagctcccaatatagcaagcagcaaacatgatttcttccgtgtcctttccagcgtctcttcccgccgttaacttctccggcaacgccatgggcttcgccgtcgtgccgcgtcaaatcccggccaatagtcgccttcgccaccgccactgccaccgctgaagctcgctcttcctggacggagcaaccgagacc

SEQ ID NO: 2941 - DNA, 136 bp, Glycine max
  unsure (1)..(136): unsure at all n locations; Clone ID: 701040895H1
ctttttcttttagttggttggtatgcttccacgtttttctttatgncacaaatgttagttgttaatattgttagtttttgttagaggggatttgaatctgtgtgtaatgctgagaatgacatgatgtggttgctta

SEQ ID NO: 2942 - DNA, 197 bp, Glycine max
  Clone ID: 701040896H1
aagagctcttaaccagttactgagaatgagtgatgttcttcttctaacttctgaggaggctgaggaattaaccggcataaacgatccaatattagcagggcaggagtttctcaaaagagggattcgcacaaaatgggtgattgtaaaaatgggttctaagggttcaattcttataacagcatcgagtgtagcttgtg

SEQ ID NO: 2943 - DNA, 293 bp, Glycine max
  Clone ID: 701040901H1
tcttctccctttcttagattctccctcttttctctctgccctccgccatgactgaggataaggagatgtcttcctctgtcaccaatggcgatgattccctcactggtcacatcatatctacaactattggaggcaaaaatggggaacccaaacagactattagttacatggcagaacgggttgtaggaactggatcatttggaattgttttccaggcaaaatgcttggaaactggggaagcagtggctattaaaaaggttttacaggacagaagatacaagaatcgcgaactt

SEQ ID NO: 2944 - DNA, 246 bp, Glycine max
  unsure (1)..(246): unsure at all n locations; Clone ID: 701040902H1
ttgtngtttgtgtgtttgttttttctctcacctgaaaatgtcttgctgcggtggtaactgtggttgcggaagcgcctgcaagtgcggcaacggctgcggaggctgcaagatgtacccagacttgagctacaccgagtcaaccaccaccgagaccttggtcatgggagtggcaccagttaaggctcaattcgagagtgctgaaatgggtgttcccgctgagaacgatggctgcaaatgtggagctaa

SEQ ID NO: 2945 - DNA, 213 bp, Glycine max
  unsure (1)..(213): unsure at all n locations; Clone ID: 701040903H1
tgattgaagaagatgccgatcagaaacatcgccatcggaaggcctgaagaggctactcaccccgacacgttgaaggcggggttggctgagttcatctccaccttgatcttcgtgttcgccggttcaggttccggcatcgcctacaacaagctcaccgacaacggcgccgcnantcccgccggcctnatctcggttccatcgcccatgntnncg

SEQ ID NO: 2946 - DNA, 281 bp, Glycine max
  Clone ID: 701040904H1
cttttacacattcagttcatttccttattttctcaacaaaacaaacgagagttcgtcatatctgtatctgtatatatacctatacctatacctatatcgtatccgcatttccgaaaggatatatcttatttagggtttttgtgactgtgctccacaaccgagtcgccatggcgtcgcaggagagtatcgaaaagatgcaggcacggcagaattaccggaatttatggcacaccgatctcatgagatccattcaggccgatactccttattgttgcctcgcg

SEQ ID NO: 2947 - DNA, 278 bp, Glycine max
  Clone ID: 701040905H1
atttgatcatgcttcaaatatatctgatattctgcataaactgggagtttgtcaacgaagaaacctttggcttgcaatttttgttaaagacaacattgagttttgtgatgcttacagattttgagtaactatggcatctcatcctgaatggcttcattttgtatccagatttgcttcagtggtgatccactaactaattatcgtcacttatgtttttttatcagtaaatgttagtttgttagttttgttggaaatgtcagtagggagattcaaaatca

SEQ ID NO: 2948 - DNA, 276 bp, Glycine max
  Clone ID: 701040906H1
ctttatcctctctctctatctctctctcaaaagcttttatttgtttccgtcgtacgttgtatgcttgggagcacaacacaatgaaagaaaacgtaggaaaccctctgcacctaaagtctgtgaaccatatctctctcatctgtacctccgtgaaagaatctatcaacttctaccagaaccttctcggattttttcccatcaggaggccgggatcatttgattttgacggggcatggctattcggatacggaattggaattcacttgctgcaagccg

SEQ ID NO: 2949 - DNA, 276 bp, Glycine max
  Clone ID: 701040907H1
atggctcccaagggtttaatctttttggctgtgttatgcttctcagcactgtcactgagtcgttgtcttgcggaggataatggacttgttatgaacttctacaaggaatcatgccctcaggctgaagacatcatcaaagaacaagtcaagcttctctacaagcgccacaagaacactgctttctcctggctcagaaacatcttccatgactgtgctgttcagagttgtgatgcttcactgttgctggactccacaagaaggagcttgtctgagaag

SEQ ID NO: 2950 - DNA, 276 bp, Glycine max
  unsure (1)..(276): unsure at all n locations; Clone ID: 701040908H1
caagtttgagcgttaatacacttagaagtgaaatggcttctcgacccttggtctctatttataatgagaaaaatgagccaaccggcaagcaaatcaagcttccggccgttttccgggctccaattcggcntgacattgtgagcttcatccatgaccaaattcgcanaaacaagcgacaagcgtatgctgtgtcaaccgctgccggtcatcaaacttccgccgaatcgtggggcactggtcgcgcatggcgcgtattccgngcgtccgtggcggtgg

SEQ ID NO: 2951 - DNA, 236 bp, Glycine max
  Clone ID: 701040909H1
gcgctttctgcaaaccgaacatttcatctccaaagggatcaacaggtcgaaggagaaatggggctgacattcacgaagcttttcagccggcttttcgcgaagaaggaaatgcgaattctgatggttggtcttgatgctgctggtaagaccactatcctctacaagctcaagctcggagagatcgttactacaattcctaccattgggttcaatgttgagactgtggaatacaagaa

SEQ ID NO: 2952 - DNA, 146 bp, Glycine max
  unsure (1)..(146): unsure at all n locations; Clone ID: 701040910H1
aatagtgttaatttgtctttctctatctctatcggncatgggtgcntttgactttgangaggaaaantcctncaccgtggntccggcnacantctacnaagcgctgacannanangctggcactatnntcccaaagattnttnggg

SEQ ID NO: 2953 - DNA, 270 bp, Glycine max
  Clone ID: 701040911H1
attatttcattgatttctccctcttcgctctctctcagtgaccagagacagatgatgatggagatggcgaacgaaacgctgtcgttgcggcactcgcggcgttggtgctactcgcggcgagtgtggcggtggatgctcaggagaactcggacgtgaagacgctggtgaagtacaagcacgggaagaagtactgcgacaaaggatgggaatgtaagggctggtcaatttactgttgtaacctcaccattaccgattatttccagacctacc

SEQ ID NO: 2954 - DNA, 270 bp, Glycine max
  unsure (1)..(270): unsure at all n locations; Clone ID: 701040912H1
aagtggtaagaaaacaactccttaaacctctccgttctacttttctaacaccctaactcttgccacactcctccgttttctacgctccgcataagttaattcattcgataatggcatcgcgagcaattttgagaaggaggagaagtttaatccatcaatacttgaataactgtnttgcttcttcttcgccgtctcccagtaatcgntctctggaattcgctatagctacgacgtcacctttgtttccttgtaagcatggaacgacgccgt

SEQ ID NO: 2955 - DNA, 276 bp, Glycine max
  unsure (1)..(276): unsure at all n locations; Clone ID: 701040914H1
gccatttattcctctcagcaccaaagcgtgacactatttgctttcttaccttccattctttcattctctctcttgcattacagcgacactgttcaaatctcttttctttctaaaaattaaaagcaaagaatttacgtaagagactgagattgagtgagtnaatggagtttagtaacctcactctggagatcttctccaaactggagcaaaaatggntctcacattgtaaagccaccaacaaaactcgnattctcagcattgacggcggaggaacca

SEQ ID NO: 2956 - DNA, 278 bp, Glycine max
  unsure (1)..(278): unsure at all n locations; Clone ID: 701040915H1
aacttctgaatgtctggaggaatcaggggtcaactgccaatgaaggaggttgaaggnaccatcttttcgaaccgagagcctgatattattggaactcctgctaaaggaaaaaaattgcctcaggaagagctttctctacaacagaaattatcagttgcagatgtgacangtacaatgtgcaagcaactgctctttcatcctgtagttcttaattgtggtcatgtgnactgtcaaatttgtgtcatcaacatagatgacgagatgctcagatgtaaagt

SEQ ID NO: 2957 - DNA, 271 bp, Glycine max
  unsure (1)..(271): unsure at all n locations; Clone ID: 701040916H1
gggataccccaatacggaggcagcatggctgggaacgtgttgtacccaaaggacaacaaaaagggttgcaaggagttcgatgagtatgggatttccttcaaatccaaacccggtgctcttcccactatcgttttgctcgatcgaggaaattgcttctntgctttgaaggnatggaatgcacagaaggctggagcttctgctgntcttgttgcggatgatattgtggaaaagttgataaccatggacactcctgaggaggatgtgtcatctg

SEQ ID NO: 2958 - DNA, 285 bp, Glycine max
  unsure (1)..(285): unsure at all n locations; Clone ID: 701040917H1
ctgcaacacaactctgaaattnttgtgagtatttggatgatgaantctcgtgtcgttcgaagtgtttcagaatgttttatcaaaccgttgggccaagctaaagagtcaaacctaatatgtcatttaacaccatgggatattgctatgatgtctttgcactacatccagnaaggtctactcttcaagnagcctgcaacacttgttgatccacaagattcatgggagatctgttagagaagctgaaacatctccttctctcaacctcttccattctanccttggnag

SEQ ID NO: 2959 - DNA, 284 bp, Glycine max
  Clone ID: 701040918H1
cctcagctaataacaacaatgcttctgcttcattgggtgtccatcgtcgacgacgcaggaagaaatcagaaataaaaaggagagatcctgctcatccaaaacctaacagaagtgggtacaatttcttctttgctgagcagcatgcaagactaaagctacttcaccatggaaaggacagagagattagtaggatgattggtgaactctggaacaagttaaaagaatcagaaaagacggtttatcaagagaaggccatgaaggataaagagaggtacagagtagaa

SEQ ID NO: 2960 - DNA, 279 bp, Glycine max
  unsure (1)..(279): unsure at all n locations; Clone ID: 701040919H1
tgaggtgaggtgccaaaatggtgaagataactcttggtactttcgatgactcttttggtgttgcctctcttaaggcttatttggcagagttccatgcaactctgattttcgtgttcgctggtgttggttcagccatcgcttacaacgagcttacaaaagatgcagccttggatccaacggggctggtggcagtagctgtggcccatgcatttgcactgtttgtaggtgtctccgtcgnagccaacatctcgggtggccatttgaacccagctgttactt

SEQ ID NO: 2961 - DNA, 279 bp, Glycine max
  unsure (1)..(279): unsure at all n locations; Clone ID: 701040920H1
ccgcacaccacttcgttgcgccatcttctttcaacaatcagccacagctcttctcccactttcccnaacttcgaggccaccaacttctcatatttcaagacaaaaggaatggtgggtttatctcttggagaaacgcatttcatccaaggtggcattgctcaagatcttcgttgtgatggtagaaagagattgacatatcgaccaatctctgttgaaactggagtgattccccagaccaatggttcagcaagagtcagaatgggtgccacagatgttatt

SEQ ID NO: 2962 - DNA, 275 bp, Glycine max
  Clone ID: 701040922H1
aatatattccattctctctgtgtatttccctacctctcccttcaagatgcagatcttcgtcaagaccctcaccggcaagaccatcacccttgaggtggaaagctctgacaccatcgacaacgtcaaggccaagatccaggacaaggaaggaatccccccggaccagcaacgtctcattttcgccggaaagcaacttgaggacggccgtacccttgctgactacaacattcagaaggagagtactcttcacctcgtcctccgtctccgtggtggca

SEQ ID NO: 2963 - DNA, 271 bp, Glycine max
  Clone ID: 701040923H1
ctcactgtgattggttacaagagccagagtgatgtcaaggccgggggtgatgtgtgtggtggagttggcattcttggcattgcttgggcctttggtggcatgatcttcatccttgtttactgcactgctggaatctccgggggtcacataaacccagcagtgacatttgggctcttcttggctcgcaaggtatctttgattagagccataatgtacatggtggctcaatgcttgggagccatatgtggagttgggttggttaaggcatcca

SEQ ID NO: 2964 - DNA, 275 bp, Glycine max
  Clone ID: 701040924H1
ccgtgactagacactcatctcactcgcgccatcgtagggtttctccttttgtttcgcaacatggttgccgctaagaaaactaagaagacccatgagagcatcaacaacaggctcgctcttgtcatgaagagtggcaaattcaccctcggttacaagaccgttctcaaatctcttaggaactccaaagggaaattgattatcattgctaacaactgcccccctttgagaaagtcagagattgaatactatgctatgttggcaaaggttggagttca

SEQ ID NO: 2965 - DNA, 272 bp, Glycine max
  Clone ID: 701040925H1
agagagtgagagagtgagtgagatagagagagacgcttcgcaaatctcaatcgaatctcagaaaaatgagagaaatcatcagcattcacataggtcaggccgggatccaggtcggaaactcctgctgggaactctactgcctcgaacatggcatccagcccgacggcatgatgccttctgactccaccttcggtgtagcccacgacgccttcaacaccttcttcagcgaaaccggatctggcaagcacgtcccccgtgctgtcttcgtcgac

SEQ ID NO: 2966 - DNA, 269 bp, Glycine max
  Clone ID: 701040927H1
gctggatcatcagagcttaagctacggcttgatggtgttcagaagaaatggggtaaaccaatgtattcgtcttcaacatcatctgcctctgtctcgtattctacttcccaaaaaccaacgaatggggcaactcaggtggatggtgctacaactgtcaattcaaaagtgcgtgatagttatgattcaagaaagacacaggttgagattactccagaaaagcaaaagcttgctgcttctttgtttggtggttcaactaaacctgagaaaag

SEQ ID NO: 2967 - DNA, 269 bp, Glycine max
  Clone ID: 701040928H1
ctgcatgcctgttgcagcctctggtggtctggtttgctaccgcaaactgttgggaaactttgttgtgtgcaatcccgttaccggatcctgtagcgaactccctccattgcattttgccctggaaaaccagtctctcaatgcggttgtgatgagtacaactttcaatgatcaaatgtcctataagattgtgttagtcttcggtgaactccctaaccttttgtttaaagtctacaactctggttctagctgttgggaagatgaggctgcgc

SEQ ID NO: 2968 - DNA, 271 bp, Glycine max
  unsure (1)..(271): unsure at all n locations; Clone ID: 701040929H1
gcccatggacactatcaggacggtaatggtagcacctggtggtgaagccttgggaggtgtgattggtgccttccgccacatgatcaaaacagagggcttcttttctctttacaagggtttannaccctccattatcagcatggcaccttcaggtgctgtctactatggtatttatgatattttaaagtcagcatatctgcattcacctgaaggaatgaaaagaatccaacacatgaaagaagagggtgaagagctgaatgcactggaacaa

SEQ ID NO: 2969 - DNA, 274 bp, Glycine max
  unsure (1)..(274): unsure at all n locations; Clone ID: 701040930H1
acgactttgaccgagtcaaacgctggaaggccaaggattgggcccggcccatggccctcatttccngcgacggctcctccgacctcgtcgaccaggccgtcgccatggcctttggtcagtgccgcagcaccaattatgtccgcattcaggcaaatgggtcaagtatggggcgatgtggacccaatgtggatacagattcaagtcccggcaatgtgaagatnctgataggaatagcagaggagatgttgaagcaggagaatgtagagtctgttct

SEQ ID NO: 2970 - DNA, 276 bp, Glycine max
  Clone ID: 701040931H1
gtcgataagcaccgcgatgctaatgtctctggcgacgatgcctttgccagactctacgcctccgtcgacgccgacatcgaggccctacttcagaaagcagaaagtgcttccaaggagaaaggtaaggcatcagctgtagcgatcaatgcagagattcgtcgtactaaggctcggttgctggaggaggttcccaagttgcagagattagctgtgaaaaaggtaaaggggctttcatcacaagaatttgctgcccgtaatgatttggttcttgcattg

SEQ ID NO: 2971 - DNA, 286 bp, Glycine max
  Clone ID: 701040933H1
atttctccctcttcgctctctctcagtgaccagagacagatgatgatggagatggcgaacgaaacgctgtcgttgcggcactcgcggcgttggtgctactcgcggcgagtgtggcggtggatgctcaggagaactccggacgtgaagacgctggtgaagtacaagcacgggaagaagtactgcgacaaaggatgggaatgtaagggctggtcaatttactgttgtaacctcaccattaccgattatttccagacctaccagttcgagaatctgttctccaagcgga

SEQ ID NO: 2972 - DNA, 87 bp, Glycine max
  unsure (1)..(87): unsure at all n locations; Clone ID: 701040934H1
ctctctctctcagttctcaaattccacacganacgnganntncagcncnacnttctagggaagcgtaacccaaaattccnttcccag

SEQ ID NO: 2973 - DNA, 279 bp, Glycine max
  Clone ID: 701040935H1
aggacataaaatattattgtcctttgacttgtttcatcaattatagcaaaaatgagaacccattttcactctctcccattgatttttttgttcaccctttcccttctattgggtaaaacccgacccgaccctgatccacttcaagattattgtgtagcagatagcaaaagtgaatttttcattaatggggtgccttgcattgacccagataaagtttcctcctcccattttgtcacatctgctttatcaaaaactggcaacactagcaaccaatttggc

SEQ ID NO: 2974 - DNA, 275 bp, Glycine max
  unsure (1)..(275): unsure at all n locations; Clone ID: 701040936H1
agctttcccccttttttctctaaactctgatttcaatacccgaaacttaaaactacgatattttcctcagctgttcgtttattccctttccgattctccaacgacatcccttcaacttcgtgtttaaactcctacttgctgcgctgttaatatattcttnattctnttttttcctcccgtttctagcttgatccctcacacagagctcaaaagttgttccanttccccaagaattcgaacacgagattagttcctagctctctctgttcgagttc

SEQ ID NO: 2975 - DNA, 273 bp, Glycine max
  unsure (1)..(273): unsure at all n locations; Clone ID: 701040937H1
tcttagatttagctgtttccaatcgtttcgaccaaaacccattaaccccttttgcagaaaagcaagattgtgctctctgcaagggtcaacgagtgtgaaaagcagaaaaagtttggtgctttgtgctaccaacatgactatagcagaggatagtttgttgcaggtggtggaggangaagagggtcctcctgattttgctttgcttgatcctgaggacaattctaggcctcgtagaattgctctcttcgttgagccttctccttttgcatatgt

SEQ ID NO: 2976 - DNA, 271 bp, Glycine max
  unsure (1)..(271): unsure at all n locations; Clone ID: 701040938H1
ccacactacaccgatatttccaccaaacccgtttgcnttgttgtttgcgaataaatggcgactaagaggagcgtgggaacgttgaaggagggtgatttgaaggggaagagggtattcgtgagggtcgatctgaacgtgcctttggatgacaaccttaacatcaccgatgacactagagtccgtgctgctgttcccaccatcaagtacttgactggttatggtgctaaagtgatcctttctagccatttgggacgtccaaaaggtgtaacac

SEQ ID NO: 2977 - DNA, 271 bp, Glycine max
  unsure (1)..(271): unsure at all n locations; Clone ID: 701040939H1
ttacaaaagtttgttttcaaagtgtgttttgtttcccaaatccanctcttgtgaccagaacccttcctcctctttcttttgaaacctctttttttctattccccaaccaaacaagcaaacgctactcactcatcatcactgagatcatggctcctaatatcaccactgtcaaaaccaccatcaccgacgctcaagccaaggtcgccaccgatcatggtcgtgcctacgtcaccttcctcgccggaaacggtgactatgtgaaaggtgtcgt

SEQ ID NO: 2978 - DNA, 270 bp, Glycine max
  unsure (1)..(270): unsure at all n locations; Clone ID: 701040940H1
gaggagacaggggtacgccgttcaaagctanaggcggtggccgtggtggccgcggaggaggcaggggtggtggccgtggcggcggcagaggtggaatgaanggaggtagcaatgttgtggttcagccccataggcatgatggcattntcattgccaanggtaaagaagatgctcttgttactaagaatcttgtncctggtgaagcngtttacaacgagnnaaggnttaccgttcagaacgaagacagttccnnagatgagtacanagttt

SEQ ID NO: 2979 - DNA, 269 bp, Glycine max
  unsure (1)..(269): unsure at all n locations; Clone ID: 701040941H1
gatagagagatagagagatagaggagaagatgaacggtggtgaatcttacggtgctattgagacacaatacataaggaggcatcacaaacatnnnccaagggaaaaccagtgcacctctgcacttgttaaacacataagagctcctgttcaccttgtgtggtcgctggtgagaagatttgatcaacctcagaaatataaaccatttgttagcaggtgcatcatgcaaggggatcttggcatcggaagtgttcgagaagtgaatgttaaa

SEQ ID NO: 2980 - DNA, 271 bp, Glycine max
  unsure (1)..(271): unsure at all n locations; Clone ID: 701040942H1
ggncacatatatgggccacaccagcatccatnaccnangtcactgtggagttccttcaattccccgcggtggtgacacctcntggctgctaccnnanccnatntccnnngnggcgcnngggtgagagggtnnaatantnnngaagaatttgtaangtncncgggnanaggtgnttatttggaagacaaggccgtgtcancactcggtgccaaatggaanggcaaaagtgcagctgaattgctggactcacttgacttctacagagatatca

SEQ ID NO: 2981 - DNA, 258 bp, Glycine max
  unsure (1)..(258): unsure at all n locations; Clone ID: 701040943H1
ctagaagtggcaaganaagcttcaantcacattcatctaccctaccttaaccntaaccaaatcccaaatattaaccccccctttttttaatgttgatgtaaggaactaatttgaagggtggtggtgattaggttattagcccttagggtttataaatgttgagtacctctncttattctgtcttcacccgttcctttctccccantccaattaagggtatcccccgaccagctacacttcgaccttttcctgggatct

SEQ ID NO: 2982 - DNA, 267 bp, Glycine max
  Clone ID: 701040944H1
gtttatgctaagattagtctgaccagtaatcctgagaccaccatgtctaccaaaaccatcaatggaggaggaaggaaccctgttttcaacgagaatcttcgtattgatgttaggactgttgatgcatctctcaagtgtgagatatggatgcttagcagggtgaagaactaccttgaagaccagttgcttggttttgctttggtacccttgtctgaagtactggtccagaatgggaaacttgagaaagagttctctctttcttcaact

SEQ ID NO: 2983 - DNA, 270 bp, Glycine max
  unsure (1)..(270): unsure at all n locations; Clone ID: 701040946H1
caggtacaaaagatagagatactcaggcaggcaattttagcttggagcagatcagagttgctactgatgactctcttctgctaataagattggggaaggtggttttggtcctgtatacaagggtcaattgctagatggtacttttatagcggtcaagcaactgtcatcaaaatcacggcagggaaatcgngaatttataaatgaaataggcttgatatcttgtgtgcaacaccctaaccttgtaaagctttatggatactgtgctgaagg

SEQ ID NO: 2984 - DNA, 268 bp, Glycine max
  Clone ID: 701040948H1
gcagagacaaagcctcacgctgtgttcactccatatccacttcaaggccatattaacccattgttcaaactagcaaagctgcttcatctgaaaggctttcacataacctttgtccacactgagtacaactacagacgcttcctcaattcaaagggtcccgacgcccttgatgagcttcctgattttcgcttcgaaaccatcccagatggccttcctccctcggatggtgatgtcagtcaagacataccctctctttgtgactctctca

SEQ ID NO: 2985 - DNA, 284 bp, Glycine max
  unsure (1)..(284): unsure at all n locations; Clone ID: 701040949H1
agcagctcccacaaaaaccagacatgtccgagtcggaagtagcaggtcagaggtaccgtgtgggctatcctctccaaggcaagaaagtcgaaagcttcattcaaccctcactcctcgatcacgccaaacaacacagcatcgatctcgtccaaatcgaccccaccgcacccttacaacaacaangtcctttccactgcatcattcacaaactccacacccaacactggaaaaacctcctccaacaattctcatccaaacacccaaacaccgtaatcatcgaccct

SEQ ID NO: 2986 - DNA, 229 bp, Glycine max
  unsure (1)..(229): unsure at all n locations; Clone ID: 701040950H1
cacttttgcattttcttgtgaaaaaaaaaatcctcagaaccaaaatcggttttcttctgtctctgatctctcaaagcttcaaattctccttgtttggtttgtntgtgtgtttggagtatgatgtcgccgccggcggtggtaacggaggaggaggggcggacaacgtgtcgtcgaccgtggcgtccggttcttcgnaatccttggaccgtttctctcagaatggggngga

SEQ ID NO: 2987 - DNA, 276 bp, Glycine max
  Clone ID: 701040951H1
agaaaaaccatggcaataacactcaacaatggcttcaagatgcctatcattggattgggcgtgtggcgcatggaaggaaacgaaatcagggacctaattctcaattccatcaaaattggttatcgccattttgattgtgctgctgactacaaaaacgaagcagaagttggagatgcgcttaaggaggcttttgatagtggccttgtgaagagagaggatctcttcattaccaccaagctttggaattctgatcaaggccacgttcttgaggcgtgt

SEQ ID NO: 2988 - DNA, 271 bp, Glycine max
  Clone ID: 701040952H1
attctggtagtcttggaaggtaccctctacgttggttttgtcgcgtccaatcaaaacgacaaccggttattcaccaaggtgttgtacaagggtgatgtgtttgtgttcccaatagggctgattcacttccagcaaaacgtaggttatggaaatgccgtggccattgctgctcttagtagccaaaaccctggagttattacaattgcaaatgctgtttttggatctaaacctcctatctctgatgaagttctcgccaaagcttttcaagtgg

SEQ ID NO: 2989 - DNA, 270 bp, Glycine max
  unsure (1)..(270): unsure at all n locations; Clone ID: 701040953H1
cctcatatatcaataatggatttnatctgattctggctcaacgttcatgacgatcaccacccactactccattccgggaanctctgggtatctggacatatacccagagaggaaagtctctgcctttcaaaacccttacattatgggcttcantgctgtcgctagcattggtggattgctctttggctacgacactggtgttatatctggagcccttctctatatcaaagatgattttccggaggtcaggcacagtaattttctccagga

SEQ ID NO: 2990 - DNA, 269 bp, Glycine max
  Clone ID: 701040954H1
aagatggcttcttttcatatccaatattcattccttgtgcttgtgcttgctatggtgatcacattgatgaaccctaccaatgcaaccctctctccccatttctatgataaagtttgccctcaggcattgccagttataaagtcagtggttcaacgagcaattatccgtgagcgacgcatcggagcatctcttctgcgcttgcatttccatgattgtttcgtaaatgggtgtgatggatcaatattgctagatgacacccgaaacttcac

SEQ ID NO: 2991 - DNA, 269 bp, Glycine max
  unsure (1)..(269): unsure at all n locations; Clone ID: 701040955H1
attctcactctcgtttaccaagagcgaganatctatttagatctctgaaanacagagtttcatttcaattcagtcttattattagggtttgccgattganagagaaagagaaatgggagaacgaaaaggaatcccaatggctttggggctcttggcgatgatcctcttcttcattgnttcctctncctctcacctcgntcgcgcttccggtgacgccgacgacgcgatcttctacgagtcgttcgacgaggattttgatggacggtgga

SEQ ID NO: 2992 - DNA, 269 bp, Glycine max
  unsure (1)..(269): unsure at all n locations; Clone ID: 701040956H1
ttctttcatcgcttcggatcttcaatctcatctccgatctcaaaatgcccgctgtttatggagctccgcttgaccaccttcgaagactccgagaaggagagtgaatacggttacgttcgcaaggtttcaggacccgtcgtcgttgcggatggcatggctggngctgctatgtatgnactcgtgcgtgttggtcatgataatctcattggtgaaattattcgtctcgaangggattctgctaccatccaagtttatgagganactgctgg

SEQ ID NO: 2993 - DNA, 266 bp, Glycine max
  unsure (1)..(266): unsure at all n locations; Clone ID: 701040957H1
gtttctttctctctcatgttgtagtatctcacttgtgtttttcattccgtttctgaaccacacaaacatcaccaccgaacaatgccgacggggttaccggcggcgaattccttagtggcgccggangaagaggggtgggtgtgggggcanatcaaggcggaggcgcgccgcgacgncgagtcggagcctgctttggcgagctacctctactcgacgatcctctcgcactcgtcgctcgagcgttctctgtcttttcacctcggaaa

SEQ ID NO: 2994 - DNA, 269 bp, Glycine max
  unsure (1)..(269): unsure at all n locations; Clone ID: 701040958H1
tngatgttacaatggncacgaaagcaantcagctcctaacgctgggntccgcaagtgcgatcatcgacccttccaaggtcaaacaagtttcgtggaaaccgagagctttcgtttacganggntttctgacggaattggaatgcgatcacttgatttccatcgccaaatcggagctnaagagatccgcggtggccgataatttgtccggcgagagcaagttgagcgaagtcagaacgagctccggcatgttcattcccaagaacaaggat

SEQ ID NO: 2995 - DNA, 261 bp, Glycine max
  unsure (1)..(261): unsure at all n locations; Clone ID: 701040959H1
ttgcggctagggttttagcgcanttcttctagatttaaggaagatgggtaaggaaaaggttcacatcagtattgtggtcattggccatgtcgactctgggaaatccactaccactggtcacctgatttacaagcttggaggcattgacaagcgtgttattgagaggtttgagaaggaagctgctgagatgaacaagaggtcttcaagtatgcctgggtgctggacaaacttaaggctgagcgtgaaagaggaatcaccatt

SEQ ID NO: 2996 - DNA, 266 bp, Glycine max
  Clone ID: 701040960H1
aagaaattagagatgttttggacacatttcatgtcatagcagaactaccaccagacaactttggagcctatatcatatcaatggcaactgcaccatctgatgtgcttgcagttgagcttctacaacgtgaatgccacatcaagcatcccttaagagttgtgccattgtttgagaagctagctgatctagaggctgctcctgctgctttggcacggttgttctcgatagactggtatagaaataggatcaatgggaagcaagaagtg

SEQ ID NO: 2997 - DNA, 269 bp, Glycine max
  unsure (1)..(269): unsure at all n locations; Clone ID: 701040961H1
cccaattcaaaactctcactccgttagaagcaccaaatcctgatggcaccaaaggcagagaagaagccagcggagaagaagcccgcagaggagaagaagtccacggtgggagacaaggctccggcggagaagaagccaaaggccggaaagaagcttccgaaggagggaggcgccggcggcgaaggnnnnnnnnnnnnnnnnnnnnnnnnnagcgtggagacatacaagatctacatcttcaaggttctgaagcaggttcaccctgacat

SEQ ID NO: 2998 - DNA, 271 bp, Glycine max
  unsure (1)..(271): unsure at all n locations; Clone ID: 701040962H1
attgtnnttctctctttccgcgggcctagatctgagcagtttggaaaccctaactgctctcaccaacgacatcaccactctctccgatcaactacctctttcgtcgccctaagtcatggcaggaattgcacccgagggatcacagtttgangctcgtcaatatgataccaagatgaatgagctgcttacgtccgatggacaggatttcttcacatcctacgatgaggtttatgacagttttgatgctatgggcttgcaagagaatctcctg

SEQ ID NO: 2999 - DNA, 271 bp, Glycine max
  Clone ID: 701040963H1
ggaaattaagggagtggatattaagcacaagagtgagatcaagagcgatcaacatggtatcttggtgtcggcaaacagcattggtgtttaccacgaccacttctacatttaccatcttgaccttgacattgatggtgttgccaactcttttgagaagacaagtttgaagactgtaagagtgacagatggaagttcgaagaggaaaagctattggacaactgaggttgaaactgccaagactgaaaatgatgcaaagataatacttgggttg

SEQ ID NO: 3000 - DNA, 279 bp, Glycine max
  unsure (1)..(279): unsure at all n locations; Clone ID: 701040964H1
ggtgactcagagaaatctattgaagaaaacaatgtgaatgaattgagaacaagcaacaaagcagaaatgacaagtgattcagtacagcaatctagtgagaattgttgtgctgacaaagatggtgctgaaccagctattagtattgttgaggacaagaatatcaaaataggtgagtgtcaggnaaatgctttgcagggtcatttttcaaatttgtcctgcaaaacatttttaggcagcaattttgacacggattccaatattgaatgctcagtgatgtat

SEQ ID NO: 3001 - DNA, 280 bp, Glycine max
  Clone ID: 701040965H1
gttcttccacccccgtaccgtctctgcctctctgcaatccacagccgaaaatgcctttcaagaggtacgttgagatcgggagggttgctcaaatcaactacggcaaggaatatggcaggctcgtcgtcatcgtcgacgtcattgaccagaacagagcacttgtcgatgcccctgatatggtgaggtcccaagtcaatttcaaaaggctttcccttaccgacatcaagattgacatcaagagggtccctaagaagaaagatcttgtcaaagccatggagga

SEQ ID NO: 3002 - DNA, 275 bp, Glycine max
  unsure (1)..(275): unsure at all n locations; Clone ID: 701040966H1
ttttnttggtctctggagttacaccacagccacnnagctctaggacctgctcattaggtagttttttatttagaggctaacntgagctttgctgcgccatcacttggttctgctggtggtagatctgctagaagagcatttgagtttgggagaacctatgttgtcaggcctaaangtaaacaccaagcaactatagtctggttgcatggcctcggggataatggctccagttggtccagctattagagacccttcctcttccaaatattaaatgg

SEQ ID NO: 3003 - DNA, 275 bp, Glycine max
  Clone ID: 701040967H1
caaacataacttggcagtaatggcttcaatgaataaccaaaaagaaattgagctctttgagggccaatctcttctgtacatgcagctatatgggcacctaagacctatgtgtcttaagtgggctgttcaactaggtattccagacataatacagaaccatgccaaacccatttctctttctgacttggtctctactcttcaaattccaccagctaacgctgcttttgtgcagcggttcatgcgcttcttggcacacaatggaatctttgagatcc

SEQ ID NO: 3004 - DNA, 266 bp, Glycine max
  Clone ID: 701040968H1
agacttttgctgcagtatacaggaaactttcgggcaaagatattgtgtttgagtatcctaccaccgaggcttaggttctatttgttagctttgcatttgtttctgaattatatatggtggatgctggttttgttaagttggctttaattctggattttcttaggggtggtacttatagaaaatactgtctcctggtatatcaatgtagaatttgatatattttcttataacaaatgatgcccgtatttctactattatgtcagtgc

SEQ ID NO: 3005 - DNA, 269 bp, Glycine max
  unsure (1)..(269): unsure at all n locations; Clone ID: 701040969H1
ctccgccatttcccgagaaaatctcgccaggtttggtatgctagctcaaatctcatgctttccaaataattctcatggtggatgtatctgcttttaacacatgcttccaaaggatgatagttggtattgatatttgattatcagttacatagcagactaaaaaganaganttgaatcttgcactgctaatcagtgaaagttttcctacagttatntctntgantctgatataccatctgcatccctttntnntcttctatgtntgtntc

SEQ ID NO: 3006 - DNA, 265 bp, Glycine max
  Clone ID: 701040970H1
caaattaatcaaacatggctagggttagtgctttgtttcactctttgctcttgatttcttcccttgtattggcttctcaaatccatgtttcctctgggaaactagtccctggactatcatggaattactatttgttgacatgtcccaagcttgagaggattataaggaagcatcttgaggatgtcttcgagaaggacagtggagtagctcctggcatacttcgactcttcttccatgactgctttcctaatggatgcgatgcgtc

SEQ ID NO: 3007 - DNA, 268 bp, Glycine max
  unsure (1)..(268): unsure at all n locations; Clone ID: 701040971H1
gcttctttacttattctatagagagtgctttgtgttgttagtnagttcagtttccatggatcgtacgcttgttatgtcttcacctaatgtcngttcaaacactaatggtggaaatctcatgtcgcagganacattccaccatggccancaatatatactataccgacttcttgngtatcacaagctcacaatgccagaggcnaacnctcatagantgnnatcntttgaggtcacnacagncaatnntgagtcancnttangaatgcat

SEQ ID NO: 3008 - DNA, 269 bp, Glycine max
  unsure (1)..(269): unsure at all n locations; Clone ID: 701040972H1
gccatttcaatcctcagtttctttcttcaacgtttccatcatacacagatcccaatcctctgctcaagccctaatttcccctcatttccatggccacagaagagcccactgtcgcggtggaacccgntcccgaacctgcctccgccgatcctcccccggaggagaaggaggagaccaaacctgaagccaaggctaagaaaaccaaggagcccaaacctaaaaaggtttccagacctcgcaaccctcccactcatccttcctacgangag

SEQ ID NO: 3009 - DNA, 153 bp, Glycine max
  unsure (1)..(153): unsure at all n locations; Clone ID: 701040973H1
gttatngtcttcctctgcactctccttctcttntattctncgtcaattcgtgcctccgacgatgacgtggcgctgnacgcgaanaagctcancagggnccncnncttgtnccccnncgctgangtcaacatcgttcnngntggtaattncacc

SEQ ID NO: 3010 - DNA, 262 bp, Glycine max
  unsure (1)..(262): unsure at all n locations; Clone ID: 701040974H1
caatattattgctataggcatggatgattcttccatacaaatatataatgtccgcgtagatgaggtaaaaagtaaacttaaaggccatactaaaagaataactggtcttgctttttctcatgtgttaaatgtgctagtttcatctggggcagatgctcagatttgtgtncggaatactgacggatgggaaaagcaaaagtctagattcttgcaacttcctgctgggaggactccaccagcacaagcagatacccgtgtacag

SEQ ID NO: 3011 - DNA, 259 bp, Glycine max
  unsure (1)..(259): unsure at all n locations; Clone ID: 701040975H1
tctcatcacatctcgcgaatccaagccgaaggggaagggggtttgataaaggttgacattgaaatttgaagccatggttcttgactccattctgacatctcctcgtctcaagtctccatctttcaggagacagtntaaaaaggatgaactgggtagttggtccacacttttccagaggcatcgcttcctcttatctgctcttgttctgctaatctcctctgcactgtttatctttactttgctgtcactttaggggcta

SEQ ID NO: 3012 - DNA, 262 bp, Glycine max
  unsure (1)..(262): unsure at all n locations; Clone ID: 701040976H1
tctctctcaccaaagccttcctagaacgaaaaaaaaaaagaagagcaattttccctcaccaaagaagaagaagcaaacaatggccgatcaacttaccgatgaacagatctccgagttcaaggaanccttcagcttgttcgacaaggacggcgatggttgcatcacaaccaaggagcttggaactgttatgcgttcattggggcaaaacccaactgaggcagagctccaggacatgatcaatgaagtggatgctgatgggatg

SEQ ID NO: 3013 - DNA, 111 bp, Glycine max
  unsure (1)..(111): unsure at all n locations; Clone ID: 701040977H1
acaatccctgcttcgttagagaatctagggtttcnnnntcccaaactcattcttcaccntctaaacaaacgcaggagncaacatggcatttcttgtttccacacaacatag

SEQ ID NO: 3014 - DNA, 184 bp, Glycine max
  unsure (1)..(184): unsure at all n locations; Clone ID: 701040978H1
cagatttgattcanattatgnttngncttcttnnatctccttgtgcaaattaagatannatatcnanaaagatantaggatgaagagaggggacgangaaganaagtngggggggcccatgttcccaaggctgcatgngaatgatgcagngaaaggagggccnanagcacnaccagngngnaag

SEQ ID NO: 3015 - DNA, 269 bp, Glycine max
  unsure (1)..(269): unsure at all n locations; Clone ID: 701040980H1
aaattatngtgtantggctngggtggntaatcatgcaacattaatcangngggaagatacatcctggaatttggcagggcaagagcatttaggacntntctgcccactgtatgtntnnntaataggggtattgaatttttattcccaccancttctgnagctagagattcaatgtntgatgaggcttagctcatgcattaggtgctactgaattcttcacctggncanatcaatgtttagcttttgcccatataggtgctactaaattt

SEQ ID NO: 3016 - DNA, 273 bp, Glycine max
  unsure (1)..(273): unsure at all n locations; Clone ID: 701040981H1
gtctcgctgttccaagangggtgtggctgaganccattcccgatatggaggagggtaccttggagattggaatggaatacagaactgtatctggagttgctggaccnttggtcattcttgacaaagttaagggncccaaatttcaagagattgttaatattcgtttaggagatggaactactcggcgtngacaagttctagaggttgatggcgaaaangctgttgttcaggtatttganggcnatctgggatcgacaatagtttncaatgtgc

SEQ ID NO: 3017 - DNA, 269 bp, Glycine max
  unsure (1)..(269): unsure at all n locations; Clone ID: 701040982H1
aaattagttcattctctttgcgcagttccctacntctccttncaagatgcagatcttcgtcaagaccctcaccggaaagaacatcaaccttgaggtggaaagcttctgacaccatcgacaacgtcaangccaagatcnaggacaangaaggaattccccaggatcagcaacgtntcatcttcgncggaaagcagtcgaggacggacgtaccctcgaggatacaacatcaagnagggtnaactcttcacttgtccttcgtctcgtggtgg

SEQ ID NO: 3018 - DNA, 268 bp, Glycine max
  unsure (1)..(268): unsure at all n locations; Clone ID: 701040983H1
gcttcttgcaagaagtttctgagcttttatatcctctatatatagttctctggcaattaaggtctcatccaaataagnacnaatgggtanccagagttacttcaaggcttgattatttgccttatagcactaattggatcaactcaagctcaattgcagcttggtttctatgcnaaaagntgtccaaaggctgagcaaataattctgnaagtacgttgttgagcatatccanaacgctccatcacnagcagctgctctcataagagtg

SEQ ID NO: 3019 - DNA, 268 bp, Glycine max
  unsure (1)..(268): unsure at all n locations; Clone ID: 701040984H1
atggctctatccctgatgctcttcagattttcccgaattcttcctttgagggtaactnctctatgtggattacctctaaagtcatgctctgtagtctcctctacacctccancanntcctgtctcaccatccactcctgcaagacacanntccannagtntnctgngnnaggcagcnatcatnncanttncagtnggtgggggtgtgctattgctngtagtagctctcatcantgtnctnngctgttngnagaannaagangantgna

SEQ ID NO: 3020 - DNA, 255 bp, Glycine max
  unsure (1)..(255): unsure at all n locations; Clone ID: 701040985H1
gtgtacactgcatacgttagaaccggttcggtgttgaagggcggaacggactnnaagatcgggctgaagctgtacgacaagtacggctactacatctacattaaaaacctcgaagcatggggcggcttgatgggcaagggctacgactacttcgagcgcggcaacctcgacatcttcagcggaaggggaccctgtcttgacggacccgtctgtgccgttaacgttacttctgacggatcggttctcaccacggct

SEQ ID NO: 3021 - DNA, 263 bp, Glycine max
  unsure (1)..(263): unsure at all n locations; Clone ID: 701040986H1
aaagagcccctctcttggaggctgagcgtgctggaagaggaaaganggatggtgcctcggaaggtcaagcctcagaccttgagcatggtgatgcagtgccggcggcaaatgtgggattctgtagggtgctttcacttgcaaaacctgaggctggaaagttggtgatcggtactgtggctctgtngattgcagccacatcaagtatcttagttcnaaaatttggtgggaagataattgacattgtctctagggnaatganaact

SEQ ID NO: 3022 - DNA, 263 bp, Glycine max
  unsure (1)..(263): unsure at all n locations; Clone ID: 701040987H1
cctgagaagaagtgggtgtttttcttctttgctttcaatcaagtctcaaactttttttaagctcttgtggatttataaaactgtgaaaatgggtttctttctttttgtatggttttattgggttaagttgaatttttctattgcttctcaaaccataagaagaactgtgtgattgcaggtgttccttgttaagatctgtggtttggttttcgggaggaaacaaaaaaaggatanaannaanaanannannaagnaancnngnt

SEQ ID NO: 3023 - DNA, 263 bp, Glycine max
  Clone ID: 701040988H1
tagctgggatggccctccgcaacagtactactagagaagaggtggttgtgaagcttaagaagggagatgttataccagtacctattggaagtgtctcgtggtggttcaacgatggggactcagatcttgtcattgtttttcttggagaaacttcaaaggctcttattcctggcgaaattagttatttctttctaaccgggcttcaaggagttataggaggcttctctaatgagctcacaagcaaaatatatggtttggacaaa

SEQ ID NO: 3024 - DNA, 266 bp, Glycine max
  unsure (1)..(266): unsure at all n locations; Clone ID: 701040989H1
ctttangtgttcctgnctcttccgtngacntacgnngntcacgttctggccagttgttggccaagcgtcntgggacgtggtcnggggtcntcnatttcaggggtggcttggcttnggatttctgataanaagtccctcatcttncaacattcatccngttcttattgtaanggggctactaattcatgggggtgaagctattataagttacaaagcttttcccctaaagaangaagtgaaggaattgatacacttggtttccatgc

SEQ ID NO: 3025 - DNA, 260 bp, Glycine max
  Clone ID: 701040990H1
aatttccaatcttaaaaaacaaaaagaagagctttgaggaggtgtaacataattcctcatgtggtgttgagttcacgttcacgcccatcccagtaaaggtggaacccccatggctgctacagcctctagctttggaactacatggtgtcttagaagagcagctcaggcttttgctatctctcattctcatattctccgcaacaatgttaaactctctttgcagaggaacttttgctctcatcttctctccgtttctactt

SEQ ID NO: 3026 - DNA, 260 bp, Glycine max
  unsure (1)..(260): unsure at all n locations; Clone ID: 701040991H1
attngatcagattaatttattacatgttacttccatctctaaattaatctgatcaaatgcacaatataaactttcgagaacaagcacgtgttgagaaatgaaatgcttttaaagttaaggcgtntacagctttggagtaatattatgggaaattgcaactgaaaagataccttgggataatctcaactcaatgcaggtgattggagctgtaggattcatgaatcaacggctagagattccaaaaaatgttgatccacggt

SEQ ID NO: 3027 - DNA, 264 bp, Glycine max
  unsure (1)..(264): unsure at all n locations; Clone ID: 701040992H1
aacaaaacgtacttcacttcgtgccttcagaaacntaattcccaaatctcaaacgaaccatggaattcaccaagaagcgcaaaaccgaagagaacggcgacaccaccgattatccgccgcagcaatccaccgaagaatccccaatcgccgccgtagcccccgcccccctcgccgccgaagacatccgcaagatcctacaaccgttctcccaggagcagctcctcgacctccttcaatcggcatcgctccgccaccccgacgtct

SEQ ID NO: 3028 - DNA, 262 bp, Glycine max
  unsure (1)..(262): unsure at all n locations; Clone ID: 701040993H1
ctgtgttcaatcttcaaagacttgaattcttcttacttaggttctgaatggctggaatttgctgtggtgttgtcggagaaggtgacactccggctccactcgagccaactactcgnccctccaggcgccggagtttggacatcttacccttaaaatacatcgctgacatggcggtgncgccgtcggatggttcacggaaacgtcccaagctggntctcagggaccgcgataacnnagttcanaatgngacgaatccactgga

SEQ ID NO: 3029 - DNA, 265 bp, Glycine max
  unsure (1)..(265): unsure at all n locations; Clone ID: 701040994H1
gccttggtcagcgttgcgccaagtactatgaagccggtgcacgttttgccaagtggcgtgctgtgctgaagattggtcccaacgagccatctgagctggctatccatgagaatgcctatggcttggccagatacgctgtcatatgccaggagaatngcctggttcccattgttgagccngagatccttgttgatggatctcatgacattcacnagtgtgctgccgtcaccgagcgtgtccttgcagcatgctacaaggctttgaa

SEQ ID NO: 3030 - DNA, 267 bp, Glycine max
  Clone ID: 701040995H1
aaaatggcacctgcaacactgtctctgtctctcctcctcctgttctcactcagcatcgccgtaaccgttagatcgagcgactacgactacgattgtgtgtacactgcatacgttagaaccggttcggtgttgaagggcggaacggactctaagatcgggctgaagctgtacgacaagtacggctactacatctacattaaaaacctcgaagcatggggcggcttgatgggcaaaggctacgactacttcgagcgcggcaacctcgat

SEQ ID NO: 3031 - DNA, 283 bp, Glycine max
  unsure (1)..(283): unsure at all n locations; Clone ID: 701040996H1
ggnganaccnggtantctnttngngatanctgnnggaacactagnagagcagagcagcatggngntcatactcccgngcatcaatggnttccattcnacgcgcagtcttcacnanttcctcttccttcgttcctttctgtacctacacggttcccgacgctagcaggcgtcgaaacggcaacaccggcagtcgttccactcacaaaatcactcctttgcgtaaggagaancatcccaatgaacagaaattgnagctcgaccatcaaaaccaaaaccccttgaa

SEQ ID NO: 3032 - DNA, 291 bp, Glycine max
  Clone ID: 701041001H1
gttctgcatcatcacccacaagctcaatctcaccgttgggatcatcccttctcttaatgttgctgctggcttgttggggttcttctttgtgaggacctggactgggttgttgaccaagatgggatttttcaccaagccctttactaggcaagagaacactgttattcagacctgtgttgttgcttgctatggccttgccttcagtggggggtttggttcatccttgattgccatggatgagagaacatatgaactcataggccctgattaccctggtaatagagctgaaga

SEQ ID NO: 3033 - DNA, 288 bp, Glycine max
  Clone ID: 701041003H1
gaaggggtcatcagaaaaagaagggaaattgaagtataacatgaatgatttgttgccttatggcaaggttggatatgaagccttcctcatattccttggctatgtatatactggtaaactcaagccctctccaatggaggtgtctacttgtgttgacaatgtttgtgctcatgatgcgtgtagacctgccattaactttgctgttgagttaatgtatgcctcttccatttttcaaataccagagttggtatcacttttccagagacgtctacttaactttataggaaa

SEQ ID NO: 3034 - DNA, 289 bp, Glycine max
  unsure (1)..(289): unsure at all n locations; Clone ID: 701041004H1
aaaaaagaaaaaagaaaaaagaaaagcactaaaaaaaatgaagaagggtttctcccttgtgctgctgattcttctgatccagtacaacaacgttgtnnnnnnnnnnnnnnnnnnnnnntgtgtcacagaggattgcctcatcggcaacaaggatttggaatcagagttctactttggatcccatgtggccagaatgctctacgatgtgagccaatctgtgagtggcaaaacaggcaataaaaataacaaagctgttaattgtccaaataagcaaggctaccgaagctgc

SEQ ID NO: 3035 - DNA, 287 bp, Glycine max
  unsure (1)..(287): unsure at all n locations; Clone ID: 701041005H1
tgtggctgatgtcaacacccagttgaagaacaaaaacatcactactgatatcaaagttgatacagattctaatctcttcacaactatcactgttaatgaacctgctcctggtctgaaggctatttttagcttcaaagttcctgaccaaaggtctggaaaggtggaagttcagtacttgcatgactatgctggaataagcaccagtgttgggttgacagcaaacccaattgtcaacttctctggtgttataggnataatgttcttgctcttggtgctgatctttcttt

SEQ ID NO: 3036 - DNA, 287 bp, Glycine max
  Clone ID: 701041006H1
gttcgatttcagactcttcattcgggatttgccatagcgattccttggttctcattcattcgttgcgtgctcgttcggctgttctcgtcgttccagtgaagagttccgtttcagtcatacaaccttgcatgagaattgatggcgccaatcctgcagagctctcagccatgggtcgagaaataccggccaaagcaagtgaaagatgttgcccaccaagatgaagttgttcgagtactaacaaacacccttgaaacttgcccccacatgctcttctatggtcctcctgg

SEQ ID NO: 3037 - DNA, 287 bp, Glycine max
  Clone ID: 701041007H1
ggataatagcttttgacctagctaatagcacacaataatgggaagatccccatgctgcgatgagaatggccttaagaaaggtccctggactcccgaagaagatcagaaactagtccaacacattcagaaacatggccatggaagttggagagccctccctaagttagctggtctcaatagatgtggaaaaagttgtaggctaaggtggactaactatttaaggcctgatatcaagagggggaagttttctcaagaagaggagcaaacaattctgcatctccattcca

SEQ ID NO: 3038 - DNA, 177 bp, Glycine max
  unsure (1)..(177): unsure at all n locations; Clone ID: 701041008H1
ttctcacttctcagcactcagcagcgatatcagttgaagaaacagnnacaaacncaagnggcagaagatgttgtgggtggacaaatatcgtcccaaaaccctcgaccaggttatggtccacaccgacatcgctcgnaatctcaagaattggtaacggaacaggattgcccccattta

SEQ ID NO: 3039 - DNA, 289 bp, Glycine max
  unsure (1)..(289): unsure at all n locations; Clone ID: 701041009H1
ctatttctcagtctctgtgtttgcggctgaggattccgaaacgagngaccttcttcgtttctcgcaaagtttaagtaatccatgggtaangcaaaggttcacatcaacattgtcgtcattggacatgtcgactctgggaagtcaactaccactggncacttgatctacaagcttggaggtattgacaagcgtgtgattgagaggttcgaganggaggctgccgagatgaacaagaggtcattcaagtatgcctgggtgctcgacaagctcaaagctgagcgtgaaagat

SEQ ID NO: 3040 - DNA, 287 bp, Glycine max
  unsure (1)..(287): unsure at all n locations; Clone ID: 701041010H1
ctctttttttctaccttanattccttctccaacaatggctcctcgacgtttccactacttcttcctctnncagcagctgctgcagcttctagctccttcttctctcgtctcggatcttcctccgacgcaaaagctcctcaaatcggttcgtttcggtttccgtttnggtcgcttgtntcgtctgttgttgtcaatgtaactcaacgacgctccttggtgaggccactcaacgccgaaccgcaacggaagattctattgttcctcttgcagcaactatcgttgctcct

SEQ ID NO: 3041 - DNA, 286 bp, Glycine max
  Clone ID: 701041011H1
gggagccgtagcagcggaagctctagcttgggtagcgaatcacaatgggcgagaggattaaagaagcatctgaagaggcttaatgccccaaagcattggatgcttgacaaactgggtggtgcatttgctcctaagccctcatctggaccacacaaatcgagggaatgcctgccactcatactcattttgcgaaaccggctgaagtatgctctaacataccgtgaagtcattgctattctgatgcagcgacatgtccttgttgatggcaaagtcaggactgacaaaa

SEQ ID NO: 3042 - DNA, 286 bp, Glycine max
  unsure (1)..(286): unsure at all n locations; Clone ID: 701041012H1
ccccgttatagatctttctccctccctctccggcgagtgggacccacttctctgcgccgaggtcagccgcagcctcagggaaaccggcgcgctcctcgtcaaggaccctcgctgcaccgtcgaggacaacgatcgcttcatcgacatgatggagcgctacttctcaaaaccccgcgacttcaaacaccgccatgagagaccccacttgcattaccaggttggggttacaccagagaaagtagaagttccaagaagcttggttgatgangaaatgcaggagaaactg

SEQ ID NO: 3043 - DNA, 283 bp, Glycine max
  unsure (1)..(283): unsure at all n locations; Clone ID: 701041013H1
anaagctacctagagcttgcacctattggtatcttctacaatatcctctcatagtgcnnnnnnnnnnnnnnnnnnnnnntatcaagatgtctttgctttcggatctcatcaacctcaatctctcagaatccacagaaaagatcgttgctgagtacatatgggttggtggatctggtatggacctcagaagcaaagccaggactcttcctgggccagtgagtgaccctgcaaagcttccaaagtggaatacgatggctctagcacagaccaagctccaggggat

SEQ ID NO: 3044 - DNA, 282 bp, Glycine max
  unsure (1)..(282): unsure at all n locations; Clone ID: 701041015H1
aacgctgctgccgaaacccttccggaaccctaaggtaagtgagtaatcagtggttgagaatggtgnnnaaggcgaagggtagaaaggaggaggtggttacccgtgagtacaccattaacctccacaagcgcctccatggctgcacatttaagaagaaagctcctaaagctattaaggagataaggaaatttgcccaaaaggccatggggaccaatgatgtgagggtggatgtgaagttgaacaagtttgtctggagccagggaatcaggagtgttccaagga

SEQ ID NO: 3045 - DNA, 288 bp, Glycine max
  unsure (1)..(288): unsure at all n locations; Clone ID: 701041018H1
ttccctttctctctctcattctcttctccatcgcgcgtaagaaacacattttagttgctactaatgggaactgttgaagctgcaaacaaggatgcaaatggaagtctcctagagaaaaatccttcagttgtttttgtgttaggtggcccaggaagtggnaagggtacccaatgtgcaaatattgtccaaaattttgggtatactcatctcagcgctggtggatcttctgcgagcagaaatccaatctggttctgaaaatggtacaatggttcngaatatgatttnagg

SEQ ID NO: 3046 - DNA, 288 bp, Glycine max
  unsure (1)..(288): unsure at all n locations; Clone ID: 701041019H1
ggcttcttcactgggtcgaagaagaacccacgctcccaaatcttcctccaccctaaacgacgacgtttcctgcgaggaatgcggcgnaggccactctccttcgaagcttcttctctgcgacaaatgcgaccgtggctaccacctcttctgcctccgtcccattcttccctctgtccccaaaggctcttggttctgcccctcttgctccaatcacaaacctaagtgtttccctcttgtgcagaccaaaatcattgacttctttcgaatccaacgctcgcccgaggcatt

SEQ ID NO: 3047 - DNA, 285 bp, Glycine max
  Clone ID: 701041020H1
gcaaaaggaaagaatatcaacaaggtaaagtagattccttactagacatggcgttgaaggacacattctacatatctcatggatcaccaactttgtccatagatgaatccattcaggccaggaagttccttcagtcatggaagaaggacgtgtttcctcaaagaccctcttcaattcttgtcatctctggtcattgggaaaccgcagttcccacggtcaacgtcgttgactccatcaacgacaccatctacgatttctatggcttccccaaacaaatgtaccagc

SEQ ID NO: 3048 - DNA, 285 bp, Glycine max
  unsure (1)..(285): unsure at all n locations; Clone ID: 701041021H1
tctaatcctgaaggtgaggcaacaagcngaatcttgctctgttcaagtgctttgtcctgttaaatgtaatggaatgtggatggttttatctgtcaagaagcaacgatgtcttttcaacagtgttcaagaattggcagctcaattatgtaaaagtaatcttttgatctatacaactggaaagtgttttcttttatcataaaacgcttagcccttgcatctcttgataatttcttagaaactgtnattaaaatgctagttatttgaaaaaagaaaaagatttataga

SEQ ID NO: 3049 - DNA, 284 bp, Glycine max
  unsure (1)..(284): unsure at all n locations; Clone ID: 701041022H1
cttgctggttgccacactacaccgatatttccaccaaacccgttnncgttgttgtttgcgaataaatggcgactaagaggagcgtgggaacgttgaaggagggtgatttgaaggggaagagggtattcgtgagggtcgatctgaacgtgcctttggatgacaaccttaacatcaccgatgacactagagtccgtgctgctgttcccaccatcaagtacttgactggttatggtgctaaagtgatcctttctagccatttgggacgtccaaaaggtgtaacacct

SEQ ID NO: 3050 - DNA, 287 bp, Glycine max
  Clone ID: 701041023H1
ctaacacccaccaaagaaccatggctacccagttcctcaaatccctccttctcctctccaccttaaccctaaccatctcagcagaatacacaggctttgtgggcacaatagacccaaagtccataggcataaagcacaagaaaaccctaagccacttcagattctactggcacgaagtcttcagcggagaaaaccccacatcggttagaatcattcccgcactccccaaatacaacacaaccacaacctttggttcggttgggatcttcgacaacgctttaactgtg

SEQ ID NO: 3051 - DNA, 76 bp, Glycine max
  unsure (1)..(76): unsure at all n locations; Clone ID: 701041024H1
atgaccntantgctgttcggaangataccncgcntttactcactagggggncaaaccattctaatgcncacgagtt

SEQ ID NO: 3052 - DNA, 285 bp, Glycine max
  Clone ID: 701041025H1
gctttcttcaccagcaaagcagggattcgaatgcaatgagctccaatgattctaaacatgggatatgcatgcagactagccttgttggtttattaattgggaattcttaactcatcagccttctgcaacagctacaaaagaagccaacaacaaccttcggaatttcgtatctgggtttgctcattggatcctgcaagaaatgacaggagggtggaaccaattctgttaaagttttactatgcttatgtcaaccgagcgattggtttggggtctcaagtggttttt

SEQ ID NO: 3053 - DNA, 282 bp, Glycine max
  unsure (1)..(282): unsure at all n locations; Clone ID: 701041026H1
cagaatgctactgggcccaaatcagncttgtttgttccagaagtgccatttgaagnccttgtgcgaaggcaaatatcacgtctattggatccaagtcttcaatgtgccaggtttatatatgatgaattaataaagatcagccatcgctgtatggngacnnnactgcagcgattccctttcttgcggaagcgcatggatgaagttatagggaactttctacganaaggccttgaaccctcagagaacatgatgcgcacctcatagaaatggagatggactaca

SEQ ID NO: 3054 - DNA, 282 bp, Glycine max
  unsure (1)..(282): unsure at all n locations; Clone ID: 701041027H1
caaagacttgagatctcagattacaccctttcttcctttgttttctcattcctgtcctttctcagacaacaccannnnnnnnnnnnnnnnnnnnnnnagggtttttgtaatgggtctcggtaacgacgaagaagaggataacaataacaatgataaggttgtggatgacggagatgttggaggaggaaagtctttcggttcagtgtcgtgttccatttgcctcgaggttgttgccgataatggggatagatcctggtctaagcttcaatgcggtcatcaatt

SEQ ID NO: 3055 - DNA, 283 bp, Glycine max
  Clone ID: 701041028H1
tatagaagagccttccatatatagcctcccaaaaaaatgaagagtactacctctttgggctctctttctactttgtgccctaacttcatcatatcagccttcagccaccgctgatattgtattcgacaccgaaggcaatcctattcgaaacggcggcacatactatgtgttgccagttataagaggaaagggcggcggaatagaatttgccaaaaccgaaacagaaacatgccctctcactgttgtgcaatctccctttgaggtctcaaagggtctaccatga

SEQ ID NO: 3056 - DNA, 284 bp, Glycine max
  unsure (1)..(284): unsure at all n locations; Clone ID: 701041029H1
gattgctagaatggaatttcgatgctcagtcatctcttttaccattctcttctctcttggctcttgcaggagagagccatgtccatgcatcgctacctgaggaagattattgggaagctgtttggccaaacactcccattcccactgcactgcgagagcttctaaagcctctccctgcaggnnntgaaatcgatgaactccctaagcaaattgatgatacacagtacccaaaaacattcttctataaagaagaccttcatccaggcaaaacaatgaaagtacca

SEQ ID NO: 3057 - DNA, 282 bp, Glycine max
  unsure (1)..(282): unsure at all n locations; Clone ID: 701041030H1
ctttcattgatttctccctcttcgctctctctcagtgaccagagacagatgatgatggagatggcgaacgaaaacgctgtcgttgcggcactcgcggcgttggtgctactcgcggcgagtgtggcggtggatgctcaggagaactcggacgtgnagacgctggtgaagtacaagcacgggaagaagtactgcgacaaaggatgggaatgtaagggctggtcaatttactgttgtaacctcaccattaccgattatttccagacctaccagttcgagaatctg

SEQ ID NO: 3058 - DNA, 282 bp, Glycine max
  unsure (1)..(282): unsure at all n locations; Clone ID: 701041031H1
aaacaaagaagtgaaaataacagcaaaaagtagcagctgctgcagctcccccgaagcttatctcagcagcagatactcaaccctgtttgagtagccgagaataacaccaatgggagaggaggaaaagaaaccagaggaacaacccaaggcagaggagaaaaaaccagaggaagagaagaaganagaagaagcagcagcagcggaaaaaccaagcgaagagacaaaaccggaacaagagtcgaaagaggaattgctgttcggccacggccacggccacgggcg

SEQ ID NO: 3059 - DNA, 102 bp, Glycine max
  unsure (1)..(102): unsure at all n locations; Clone ID: 701041033H1
aagataacgattttnacttgaatgcattggaaanccttaaaaatcttcncatgtcccagccangtaactaattcacctcatcggntcactntncgagncnnc

SEQ ID NO: 3060 - DNA, 187 bp, Glycine max
  unsure (1)..(187): unsure at all n locations; Clone ID: 701041034H1
ttcggcatggatttcgacaacaacggggaattcgaaatncaccttcgacgaactcgacgaactcgacganatcttnatgcccntccgacgccgaggatttnctcntncccgacntntgtnacttctaattacgatancgcttcgccgccgatcgangcanagaattccgattcggnggattcngnng

SEQ ID NO: 3061 - DNA, 284 bp, Glycine max
  unsure (1)..(284): unsure at all n locations; Clone ID: 701041035H1
cnaatgactcaagcccagattcaaccagttaaacttggaacccaaggctttgaggtactattaactacattacttgctcctattttgataattgatacaattaatctcattctaggtttcaaaattgggattcggatgtatgggccttactggagcgtacaatgaccctctccaagaacaggatggcatatctgttatcaagtatgcgttcagtaagggaatcacattttttgatactgcggatgtttatggagccaatgctaatgaacttttggttggaaagg

SEQ ID NO: 3062 - DNA, 282 bp, Glycine max
  unsure (1)..(282): unsure at all n locations; Clone ID: 701041036H1
gatgtgtcattgagacagaagaagaagangaaattggagggggtgtgtgatcgggtcctcaggtgaagatctgaggctgtnggtgtctcttttcttttctccgagttccaaagatgagcgcttctaggttcatcaagtgcgtcactgttggggatggtgctgtgggcaaaacctgtttgcttatttcctncaccagcaacacttttcccaccgattatgtgccgactgtttttgacaatttcagcgcaaatgtggttgtcaatgggagcattgtgaatctgg

SEQ ID NO: 3063 - DNA, 283 bp, Glycine max
  unsure (1)..(283): unsure at all n locations; Clone ID: 701041037H1
ctggtgntgaaatggantatgcggcngacgataatgntatggcngnngtagaanangatangtatnaccggggcanagcatttggtgaatcagattcagangatgacgacgnctacnaanatgaccctttgganaaccgnatatcagataccactgcngctgaagctangagggggaaggatatccaaggtataccttgggataggttgagcatagtcgtgannnatatanacaaactngactagnccagtacaagaattatgnnnncatancacaatcaggg

SEQ ID NO: 3064 - DNA, 283 bp, Glycine max
  unsure (1)..(283): unsure at all n locations; Clone ID: 701041038H1
cnaatcctcaaaagcggggaaaggaagattggattctgggactttgacgttgtttcaattgtggtcgtgtcggtgcccgatctcaaacgacgatgtcatctttatatagaggagaatccaggnggtacaacaataaaccaagaggacgtcatantttgacaacgcagaagaagcaggagattaaggaagcctttgagttatttgntactgatggctcaggaactattgatgccaaagagctgaatgttgccatgagggcccttggntttgagatgacagaaga

SEQ ID NO: 3065 - DNA, 282 bp, Glycine max
  Clone ID: 701041039H1
cagtactaggtgatacctaaatggtaagctgacctaagcgaaaatttgttccattctttccaatttcttaaaagaagttagctcacagcagatccatacaaacatgatgactccaaacttgaatctggaaccagaaggtggtttaaaagtcctcagccaagtaggtttcgataaatcaatacaagagacatctcatgatcttaccaaggacagcactgctacttcctcctgtcttaccaaggctgatcctgacccaggttctgtttcccttgacttgtccct

SEQ ID NO: 3066 - DNA, 288 bp, Glycine max
  unsure (1)..(288): unsure at all n locations; Clone ID: 701041040H1
gncctcactctggctttgccttcnccttctcttctncgccaaatcccaatcttcaatcccgaaaaancatttcactggttnncctatncctccccctncctccaacaatggtccgacacccttaaaaaatcaaaacctcaaaaaccaaaaaacatcaaancatgtnttccttccctcacaatgtcntnctacccatccttgtctttccaatcattatttgttgcngctccgcctcnttgtngggtcggagcaatgcgacgacaatctacgaggncctgagcgagcagg

SEQ ID NO: 3067 - DNA, 283 bp, Glycine max
  unsure (1)..(283): unsure at all n locations; Clone ID: 701041041H1
tttcttatctgtgtttttcttcgaattgcatgacgtgggtttttctagggtttggaggctatggccgaanaacgggttaaataagctcggaaaatgattctcacaaagcagtaccgatgcatacactcagctagttgtcaatgtactaaagggcatttaagtgaagatatgatattcttagtatttcataatttgaattggaatcccaagctaattgcaactctatcatgtgtgtgcaaatggtttgatgatcttgccaagcgagttctatggaaagagtttt

SEQ ID NO: 3068 - DNA, 227 bp, Glycine max
  unsure (1)..(227): unsure at all n locations; Clone ID: 701041042H1
gttgttattgntattaaaaattatgacggaagtgcttcagttgccttcatcctcaagctgttcgcgtcggccatgtggtggtctcacacccacngatgggtatntnncaattccccttattaacgctcccactgtggaagaacaacaaagtgtggaaattgaagaagnagaagagaaagacagggaaagggagngnncaganttcncatttgaccctttgnatgctt

SEQ ID NO: 3069 - DNA, 278 bp, Glycine max
  unsure (1)..(278): unsure at all n locations; Clone ID: 701041043H1
cncgttttcatgtgaaaatggattgagaatctctttctatcgtcatatttncnttcgggtcnattagggttttttgctggcgtgnttctgaaagcttggatctggatatcttcttngcntctttgctatggaagactcggattcagttgctacattgatagattctactacttctaagatacaacagctgcngaaggcatttgctgaacttgaaagttatcgggctgttactcttaacttgaaatggaaagaactagaggaacatttccatggtcttg

SEQ ID NO: 3070 - DNA, 277 bp, Glycine max
  unsure (1)..(277): unsure at all n locations; Clone ID: 701041044H1
aaatttaataaagtgctgagggtttctgctaacgtgaacaatgcaggtaggaccaagtggccaggatatgcttgcaaattagtttacagctatttttttctttaaagtgtcagagctcttgccattttttctctttaccttaataatatattgacagagttttcaatttttgccattttttaaatataacgaatgcatttgcaattatatatcaggagttacaaaaggtcatggccttttttaccacagantcatttacaggngttttattttattt

SEQ ID NO: 3071 - DNA, 279 bp, Glycine max
  unsure (1)..(279): unsure at all n locations; Clone ID: 701041045H1
gggaagccggctattcagggnntcatggctaaggttntggctcagtctattantgtccctggtctattggctgagcataggncatggtcagcataaggcatcaggaatattantccgatcgnccagaatgatnagngctttncgaanaantggattangaatntcaggnntctcagggnttcgtactttcnatccttnggatactatgttgagncntggaatngatntcactctncggtntccattgcaacttcttccacggcgcgcnngantaccaga

SEQ ID NO: 3072 - DNA, 281 bp, Glycine max
  unsure (1)..(281): unsure at all n locations; Clone ID: 701041046H1
ctcttccttcagcaactacgatcttcgatagtgatttanccagattcttcctttgcggtcgaatcatggagcccatggacatcgttggtaaatcaaaggaagacgcttcgcttcctaaagcaacaatgacncaaattattaaagagatgttacccccagatgtacgtgttgcaagagatgcccaagatctattgattgagtgttgtgtagagnttataaaccttgtctcgtcagaatccaatgaagtctgtaatagagaggataaacggacaattgcacct

SEQ ID NO: 3073 - DNA, 277 bp, Glycine max
  unsure (1)..(277): unsure at all n locations; Clone ID: 701041047H1
tgatctctctgctgttgtgttttgttaatctcattcagacaatcacagttatactctctctactctcactttgatcactgatctcatctcaattttcagatatgtcgacatctgataagccagaagaggtggaaaggggtagcaaggatgaaaagcacaaggnagatgatcaagaggaggggaagggtggattcattgagaaggtgaaggatttcattcatgacattggtgagaagattgaggaagctattgggtttgggaagccgagtgccgatgt

SEQ ID NO: 3074 - DNA, 278 bp, Glycine max
  unsure (1)..(278): unsure at all n locations; Clone ID: 701041048H1
cctttctcctaaaacatctccagtgggttcttcttcttctattacaacaacgtcgtccaagaccatgaccatggccatggccacgatcctgctcctgtncacggtcttcgcggtttcatcggccctagacatgtcgataatctcgtacgacaacgcccacgccgccacgtcgcgcagganatgggagctgatgtccatgtacgagcagtggctagtaaagcacggcaaggtgtacaacgcgctcggagagaaggagaagaggttccagatcttcaagg

SEQ ID NO: 3075 - DNA, 284 bp, Glycine max
  unsure (1)..(284): unsure at all n locations; Clone ID: 701041050H1
ctgcgcttcacgatnggtgcttacaagtatgtttcggaactatgncgcaataagcagtcttgangttatgagattcttgcacccagtgangtgcttggaataccgccagaaacctncnattgtccgnttgacnaggtctantcgcccagacaaggctcgcngnttgggtttcaaggctangcanggttatgtgantncaccgtnttcgtgtacgaaagggttgncggaagagaccacttccntaaggcattgtantggtaatcccnccaaccaaggtgttactc

SEQ ID NO: 3076 - DNA, 280 bp, Glycine max
  unsure (1)..(280): unsure at all n locations; Clone ID: 701041051H1
gatcattgcttgagatctgcccttgttatgcttcttctggattcttcccagattatgaacattgnaaaaaccaccactcttcaaagccaagatatagcaaaagttagaaatccttcaagtagttgatgcctatgttcatgaattgactttctgagagaaggcttgttcaacgttctcaagagatgcaaagatggagaaganaaganagattgtgcagtatagggngaggctggataggactcttgcctcacctgntcttgcaaatgatgagangcncaaa

SEQ ID NO: 3077 - DNA, 279 bp, Glycine max
  unsure (1)..(279): unsure at all n locations; Clone ID: 701041052H1
tctcttccattcacaaccttaaacctttctttcttgtaaactttattgattgattctgagaatagaactacgagggtatagacatggctagcgcaattgcagcttcttttttggttctgcttctggctttccccactgtatttggagctgaccatgaagttggtgacactagtggntgggccctcggagttaattacaacacctgggcctctgggaaaactttcacagttggtgacactttggtgttcaagtatgactccactcatcaagttgatgagg

SEQ ID NO: 3078 - DNA, 280 bp, Glycine max
  unsure (1)..(280): unsure at all n locations; Clone ID: 701041053H1
ctcttcttcttcctcgcanctcttttgcctctttctntctcaaaccctttttcttattcctcgggatccagttcaagaaccacgtgtctcgttgcttctgttctatgtttataagtaacttgagttccttctttctcttctctttttgcattgaaatattgtgtctgatttggttaagttgggagatatatatactgtntagttaacttgcatcatatctcagtgtcaaagaccagttcatcatttttctgagacattaagggatttaatttgcatcttt

SEQ ID NO: 3079 - DNA, 281 bp, Glycine max
  unsure (1)..(281): unsure at all n locations; Clone ID: 701041054H1
ctctttctccgagaacaananaaaanccgtgattcggtctnctctaccgantaanccacaaaacnancaaacgagaagaggagtgancgaagatggggttgtcgttcacgaagctgttcancaggttgtttgcnaananggaaatgaggnttcngatggnaggtctcnntgctgctggtaagacaaccatcttntncaagcncaancttggggaattcgncaccaccatccccaccatcggntttaatgttnagactgtggngtccaaaaacatcancttc

SEQ ID NO: 3080 - DNA, 281 bp, Glycine max
  unsure (1)..(281): unsure at all n locations; Clone ID: 701041056H1
ctccaagtggctaanagaagaaanggtttnttganctaacntgcntnttctaanactgactccgacccgagcnaacacattccngtaattgtgcttcaccnattgtggatgtgccttatcatattttcttcttggcaactgttattggactantacctgctgcttatgtcactgtcaaggtncgtagctatcagcataatanttnnnntttaganntgttattnatatttnatnntaanaagagaganangatagngnaaagtgagatgnnattnatgatg

SEQ ID NO: 3081 - DNA, 278 bp, Glycine max
  unsure (1)..(278): unsure at all n locations; Clone ID: 701041057H1
ttttctacgattattcatagtgaggcaatagtagcngcaattcacactggtctttgcttcctcgttactcatttctcacctaactttctattcttctcagtctcagatcagaaccttggccatggcagcgttccagaagatcaacgtcgccaaccccatcgtcgagatggacggagatgaaatgactagggttatctggaagtcaatcaaggacaagctcattttgcccttcttggagttggacatcaagtattatgacttaggccttcctaccgtga

SEQ ID NO: 3082 - DNA, 278 bp, Glycine max
  unsure (1)..(278): unsure at all n locations; Clone ID: 701041059H1
aacagtctctgatgagctgaaggtagtttgcagccaaaaaagatattgangcaagcactgtagaaggaagataaaggtaggaaattcacaagagtccagctttttgaattctgaagcaaaatcactattgaagttttacacacctcagtgtgttttgagctttaattggtattgaactctgttctgcttcctggtattttctgcctctgctggctctacttcaggactggaccatagtccaacatatctgctccaatagtttagtatatcatcaaagt

SEQ ID NO: 3083 - DNA, 217 bp, Glycine max
  unsure (1)..(217): unsure at all n locations; Clone ID: 701041060H1
tgttgttgttttngngccattcccagtgtttctttatggaagangttcccgacacggcggcgaaccggtccgagccggggctcagggcggagatcgacacatcggcgccgttcgaatcggtgagggaagccgtcacgcgattcggtgganttgggtattggaaacccattctcaacggtcttagtancaagcattttgctgccactgagccacatca

SEQ ID NO: 3084 - DNA, 277 bp, Glycine max
  unsure (1)..(277): unsure at all n locations; Clone ID: 701041061H1
gcgcgtatattcaagtggagatgtctatccaagctcttctaatcttcccaanggagaatatattttacagttatatttgaggcatgacaatgtgcagattttggaaaagatgaggcatttggtgttattcattgagcgaaatttggaagagaaggatgtcattcggctaagctttttctctcaacccgatggctcgctgatgggaaatggttcctttaagtcctcatcactagttccaggtataaaagaaggaatatatcttggtccaccaccaaaa

SEQ ID NO: 3085 - DNA, 276 bp, Glycine max
  Clone ID: 701041062H1
gtggaatctacagtgttcttaaccagaagcgtggacacgtgttcgaggaaatgcagaggccaggtaccccactatacaacatcaaggcatacctccctgtcatcgagtcctttggtttctcgagcacattgagggctgcaacatcaggccaggccttcccacaatgtgtgtttgatcactgggacatgatgtcttctgacccattggaggctggatcacaagctgcacagcttgtcactgacattcgcaagaggaagggcttgaaggaacagatga

SEQ ID NO: 3086 - DNA, 279 bp, Glycine max
  unsure (1)..(279): unsure at all n locations; Clone ID: 701041063H1
gnaaatcacaaccaccgtgacgtgcttattcttccgccctcggtggaggcttctgatcgagagcatctgccgngaccagatcaagcctccgctcgattacagcacccgccaccgtctcnaactacagggcgaggaacaatcccttcgcattctcaacaaaatngccgnnacccgtatccgattatctttncgcaggcttcgtcaaccacatgctcggngacatcnnccaccaanacaataatngtantaacnntnacnncaatancnccnntcnccctt

SEQ ID NO: 3087 - DNA, 277 bp, Glycine max
  unsure (1)..(277): unsure at all n locations; Clone ID: 701041066H1
caaaganggcgtcttcataaacgcctttcttctccgnttccgtttcctcgttcgaattcgcnttttgatctgcgaanatgagagatgcatctcgatccacattggtcaggctggtatccaggtcggaaatgcttgctgggagctctactgcctcgagcacggcatcgggcccgatgggcaaatnccaagtgacaagacagttggcggtggtgatgangctttcanaactttccttcacngagcntgntgntggaaaccacgtnccagttgcattgtt

SEQ ID NO: 3088 - DNA, 278 bp, Glycine max
  unsure (1)..(278): unsure at all n locations; Clone ID: 701041068H1
caagaagtgttggttgttaaagacattatagagtggtggattggtagaaagangcttgagnaacntcctccnngtggctttgggtgcttcctctggagggtatttcgnntctgngcttgccaccgccatgaagtttagtagtactgtgctcatgattnctgaggggatgnttgagcanattgatgttaaaggggatacccgccgcaccctttttgttcacatgcccaaagatctttataggcagcataaaatagatgaatatgtggaggttttaaaag

SEQ ID NO: 3089 - DNA, 279 bp, Glycine max
  unsure (1)..(279): unsure at all n locations; Clone ID: 701041069H1
caatggcaaagtgccggnngctgttccagcttaatcttgtnttataatgtatatactcatgattggacagaaaccttaagctttatgtatnctcctgctaagntacatacnccnggcccaatttaatnntaatactaataattaaaactctggggangcacangcacaganncantgnctctctctgnatntatggcnttanncagnctcttgcncttatggtgcnttgtgcatgccanctcncctgtaatataatgaatgtggntgngcnnaggcnga

SEQ ID NO: 3090 - DNA, 193 bp, Glycine max
  unsure (1)..(193): unsure at all n locations; Clone ID: 701041070H1
caacagcaangaggcgntnccctgattaaacttnttcctccgttccgctttcgcttcnaacactcctctgctctttcaaaaaccatttntntncnggnntattcgacagangcatctcctggcatagagagagtgacacnngangtcctganaganntnctngccactgntgaaaatgcaccaacnttcaatg

SEQ ID NO: 3091 - DNA, 88 bp, Glycine max
  unsure (1)..(88): unsure at all n locations; Clone ID: 701041071H1
gggaatgtagccccaatcgggcggtaaattccgnccaaggctaaatnntggcgngangaccgatagcgancangtaccncnagggaga

SEQ ID NO: 3092 - DNA, 276 bp, Glycine max
  unsure (1)..(276): unsure at all n locations; Clone ID: 701041075H1
gtatttccctacctctcccttcaagatgcagatcttcgtcaagaccctcaccgggcaagaccatcacccttgaggtggaaagctctgacaccatcgacaacgtcaaggccaagatccaggacaaggaaggaatccccccggaccagcaacgtntcattttcgccggaaagcaacttgaggacggccgtacccttgctgactacaacattcagaaggagagtnctcttcacctcgncctccgtctccgtggtggcatgcagatcttcgntaagacat

SEQ ID NO: 3093 - DNA, 276 bp, Glycine max
  unsure (1)..(276): unsure at all n locations; Clone ID: 701041076H1
cacacccttcatttcctttgctccctctcattgtgctatatttccattacacaattactagtcctctttctttgtnggtgacacacccttttgcttattaaacacatatcataacaaggtataccaaaatgtgcggctctaagaccanagtgacgattggcttagaagtcatcgctgctgctactactanaacaactgctaagccttcagtggctagaatcaatggaaggccagtcctccaaccnacttgtaaccgtgttccaaaccttgagagga

SEQ ID NO: 3094 - DNA, 274 bp, Glycine max
  unsure (1)..(274): unsure at all n locations; Clone ID: 701041077H1
gtgatgtggtgcgatgcctaatgannaattggaagattgatcaatctactatnanccagaaagactgtgatgggaacacaccgttgcntttggnttcanaaaatntatttcntaangtttgtactttattacacaanataggaggactaatatgaatctcttgnatancaangggttaacagctcgagatatcgntnacaannntcnatggcgnttcgnaagtttctagccnatcgagtgtnacnancanctggggtccccttngaaggtanna

SEQ ID NO: 3095 - DNA, 277 bp, Glycine max
  unsure (1)..(277): unsure at all n locations; Clone ID: 701041078H1
ctgataccgattacnnaacnatattagnngccattngcggcgacgtcgtcgntttagatggntttagntnccattacctatctcggatttttgagcccaggaaacaaaccaagaccatggatcgcaagannccgcggaggaagcccaagctcgagcgccgtaacgctcttaaatactcctcctccgaatacgacgtcgtatcctccccntccgacgacacgctctacacgcgctccatggagttctacgaccgcacgagcttccgaatcgagggcgt

SEQ ID NO: 3096 - DNA, 274 bp, Glycine max
  unsure (1)..(274): unsure at all n locations; Clone ID: 701041079H1
cagaccagcaacgtctcatcttcgccggaaagcaacttgaggacgggcgcancctcgccgattacaacatccagaaggaatcaacccttcacctcgtcctccgtctccgtggtggcatgcagatcttcgttaagaccctcancggcaagactataaccctagaagtcgagagctccgncaccatcgacaacgtcnaggctaagatccaggacaaggagggtatccccccagaccagcagaggctgatcttcgccggcaagcagctcgaggacgg

SEQ ID NO: 3097 - DNA, 275 bp, Glycine max
  unsure (1)..(275): unsure at all n locations; Clone ID: 701041081H1
gtcctagtgctggaaccagttctggaatgcccccggctgttactaatgctgataggcatacnggaaggggaaaaaggaagactccntgctttggtttcagtggattcctcgaggcgcagaatgtcagggcccattttaaatactttatcaagtgccaatgccttgggtcagtcaagtggatcatctaggagggttgctgtctctagtagccgtgatgcattgttggtgctgagtcagatatccgtatcgcatgctgaggctagcctggagcagca

SEQ ID NO: 3098 - DNA, 280 bp, Glycine max
  unsure (1)..(280): unsure at all n locations; Clone ID: 701041082H1
ccgaaggtgaaggaagagaaactatgcgcgagagtgaaccgagagagaggcacagttgagtagcaaagcantgagcgcagtgggtgggtttactctcactctcagtcccatcaatttgaaactcccccttctcccttccaatcgcctctttaaccgnactcccttcaaatcttccatttccttctccctacgctccaacgacgagcaacaacccctcggcctcgacatcgccgcactaaggtcagcttccgtgaggctccttgatggggaatcagatcat

SEQ ID NO: 3099 - DNA, 276 bp, Glycine max
  Clone ID: 701041083H1
attacatagcctcaataatctgagagagaaacaaaaacaatgaaggtttccattgccaagttccactcccttcccctatgttttttccttctcttggccttcaacacaaaacccctcctagcagcagaaccagagccagtggttgataagcaagggaaccctttggagccaggagtagggtactacgtgtggccactttgggctgatgaaggaggcctcacactaggccaaacaaggaacaagacatgccctctttatgttatccgtgacccttca

SEQ ID NO: 3100 - DNA, 277 bp, Glycine max
  Clone ID: 701041084H1
aaatcttagtcttcttagtttcctcactcacacaaatggcaaagctaatccatttcctccttttccttttcatccaaacaatttcagcccaaacaccagcagcaccagcgggccccaccaacatcacccaagttctagagaaagcaggacaattcacaaccttcattaaactcctcaaagcttcacaaatagctgatagaatcaattcacagctgaacaactcaaaccaaggcctaaccgtgtttgcacccactgataatgcattctcaagcctcaa

SEQ ID NO: 3101 - DNA, 275 bp, Glycine max
  Clone ID: 701041085H1
atgacctgaatgaaattgttcagcttgtgggcaaggatgctttagctgaaggagataagatcaccttagaaactgcaaagcttttgagagaggattatcttgctcaaaatgcctttacaccatatgacaaattctgccccttctacaagtctgtttggatgatgcgcaacattatccatttctacaatttggcaaatcaggcagtagagaggggagctggttcagatggtcagaagatatcttacacccttatcaagcatcgtatgggagatctg

SEQ ID NO: 3102 - DNA, 271 bp, Glycine max
  unsure (1)..(271): unsure at all n locations; Clone ID: 701041086H1
tccttttcttcccttcaacaaaacacaggggaagggaaagtattactagtagtaaggnacgaaaccccaaaacatgggtggtggtttcttgttaccattgccaaccctcttgntgtgtctctttgttgtgttaatttattattccctccaaacaaaagctgaggaatttgatgagtccttgttgttcaatggaaaaaacgtttccagtttcagcngtggcaganagcttggtgcaggaagatgcaattgttccgtgggaaatgggtttatg

SEQ ID NO: 3103 - DNA, 258 bp, Glycine max
  unsure (1)..(258): unsure at all n locations; Clone ID: 701041088H1
ctcacttcaaactcgggatcacagaaanccnncaacagttcttacactgaggtttcacgatgtacgctggaacttgcacttggnttgtcngtgtnagctttgnttctgcncttgcgtcccacaccaagtgcannatccnaaagcacttcgccacctcccanancctccaagcncanagcctcgacttcccttcattggccaccttcacctcttaaaagatanacttctccnctatgcnctcatcgatctctccnaana

SEQ ID NO: 3104 - DNA, 272 bp, Glycine max
  unsure (1)..(272): unsure at all n locations; Clone ID: 701041090H1
cnatcaaattcttnncgttgaacacaggggccaagnttccttctcttgggttanggacttgngcnagctgaacctggtgttgtagctgaagctctcaccacagccattcaggttggatacaggcatattgactgtgctagtgcgtataagnatcaagcagagattggttctgctcttaagaagctttttgatgatggtgtggtgaagcgtgaggacttatggatcattccaaactctggtgttcagatcatgcaccagaagntgtgccaaaa

SEQ ID NO: 3105 - DNA, 273 bp, Glycine max
  unsure (1)..(273): unsure at all n locations; Clone ID: 701041092H1
caagatcagggttgctacatgtttggtgctggtcaagttgtgaaagangaacctcagaaaacggttcatcgcttctttgatgaatggccacacaaaggaagagaaggctcttggcttgatttggatgacaaatcttccacaacccaactttcaatttccatccccacatcttctcatgatttttcaactttcagttccagaacccaccatgatggttgagtgtaggtttccaataatgggtcctctgtacggaaatcaaaggccaaaaatgta

SEQ ID NO: 3106 - DNA, 275 bp, Glycine max
  Clone ID: 701041093H1
gtcccgttgtcatccctgtattactcacacacacacaactgctatctggctctctccaaaccgtgcagcaattcctctcttccctctatccacccctcccatggcggaaccaatggctgtcgactccaatcccgaatccggtctcgacttcgagtcccctttcgcctgggggaagaagcgaggcatgggaggcaaaaagaaggacgtgcagttctacgagtcattctccttcgacggtgccgagtacgccataaacgacaccgtatgcctccaga

SEQ ID NO: 3107 - DNA, 270 bp, Glycine max
  unsure (1)..(270): unsure at all n locations; Clone ID: 701041095H1
ctggctttcatcttctaaattggttgtnaaacctgacatgttattnngaaagcgtggcaaaagtggtttggttgccttgaatttggattttgcacaagttgtttcatttgtgaaggagcgtcttggaaaagaggttgagatgagtggatgcaaaggacccataacaactttcattgttgaacctttcatcccacacaatgaagagttccaccttaacattgtctccgagagacttgggaacagtataagcttttcagantgtggaggatt

SEQ ID NO: 3108 - DNA, 228 bp, Glycine max
  unsure (1)..(228): unsure at all n locations; Clone ID: 701041096H1
gttcgccgtacatttacccaaaccctacatcantcttccctctcatcgcgtngattcctcttccctctctcccatgccatcgtccctcnctccacccgcgtcgccggaatccggtgccgcgttaaccgngccggagactcggcgtactcaccgctgaactcggggtcgtcgtcttcgtcgttcagcgatgcccccccacggagatggcgncgtcttccccggctgcga

SEQ ID NO: 3109 - DNA, 257 bp, Glycine max
  Clone ID: 701041101H1
aaactccgcaaatactggggcggcaatgacgaagaccctttggcctctgatgactatatgtggaacaaggagtttatgggtcgcttccaaaagttgattgaggaacccaatgctcaaccccctcctgcaaaggaagagccttcagggtttctaagcttaaatagagtcatgagcctggacagtttggaagttgatttgagcaaagaactcgcagctcctgtaaatcataatgcacacctgcaaattgatgcagaaac

SEQ ID NO: 3110 - DNA, 251 bp, Glycine max
  unsure (1)..(251): unsure at all n locations; Clone ID: 701041103H1
cacagcttttgttctcgcacttcgctgtctgaggttctggattctcagtgtttgcgaangctgcatcatcctttacgggaagaatggatcatcaagggcatagccagaacccatctatgggggtggttggtagtggagctcaattagcatatggttctaacccatatcagccaggccaaataactgggccaccggggtctgttgtgacatcagttggtaccattcaatccacacctgctggagctcagcta

SEQ ID NO: 3111 - DNA, 250 bp, Glycine max
  unsure (1)..(250): unsure at all n locations; Clone ID: 701041104H1
cttttccaatggcctccaacggcgacgcgttcatccccacccttccaaaaagatcaaactcttcagcaattccattaactcaactaattcctcgtttatcacccatgccgagatcgaatcggaattctcccaccaccaccccacggtggcgcgcctcaacaacggcgccttcgggtgctgcccggcntccgtgatcgccgtgcagcgcgagtggcagatgaagaacctccggcaaccggaccacttctac

SEQ ID NO: 3112 - DNA, 247 bp, Glycine max
  unsure (1)..(247): unsure at all n locations; Clone ID: 701041105H1
gttgacttctttcaacctaacccatcgttcgcacggagccgtggtggttctggctctgtccttttttcctttctctcnttaccagaaccagnagaaccatttgtggccaacatggatttggaccagtggatctccaaggtcaaanagggccagcatcttcttgaagacgagcttcaacttctctgcgaatatgtaaaagagatccttattgaggagtccaatgtgcagcctgtcaatagtccagtga

SEQ ID NO: 3113 - DNA, 247 bp, Glycine max
  unsure (1)..(247): unsure at all n locations; Clone ID: 701041106H1
ttcattccattcccaantccnactcaaccaccaaannctattcancatttcccncaaatnancgtcacaccatgngctccttccgngatggtgttggacccgaaaccctcatcggagcctccgccgttcctcccgtcnacgaaatcggantancttcaaggnagcttcggcggcgacgcaaccgcctccgacgaggacgacctctacagccgcctgaaatccctccagcgccagtggagttcatcga

SEQ ID NO: 3114 - DNA, 247 bp, Glycine max
  unsure (1)..(247): unsure at all n locations; Clone ID: 701041107H1
cccagttgtggatcaaaaggaacagattattcaagatgcatctacctgtgatccttataatgagcagggtatggctagaggatataagagnagaaatcttaacattggggaattatttctaattgaaaagataaagaccaaagttgatgttgtttggcaaaatggtgaacatactttgggattggatccacacaactagtcggttcngaatgtcataaacactcatgaattttggccccagcagttt

SEQ ID NO: 3115 - DNA, 246 bp, Glycine max
  unsure (1)..(246): unsure at all n locations; Clone ID: 701041109H1
gacaggtcaatctctcaagtgaaattcaaggatgacgtagggtgtgtttctgtaaaaagagtaattaagtgcttattgaataagtgcttatcatgtaaaanctttactgcaaaatcagacaagatgaaaagtcgagtgaggttaaaaggcggtgaaagaatgttaggtcaaacttgattcttatagtggctgtaaaccttgtattggtgctattgtttgtgttggattgaccaatgatagttttgg

SEQ ID NO: 3116 - DNA, 245 bp, Glycine max
  Clone ID: 701041110H1
gttcttgctttcgaagcaggaagaaagcgcaaaattagagtcaatactatatctgctggtccactgagaagtcgggctgcaaaggctattggattcattgatatgatgatcgattactcatcagccaatgcacctctacagaaagaactatcagcagaggaggtgggcaacacagctgccttcttagcatcacctttggcatctgctatcactggtactgttctatacgttgacaatggtctgaa

SEQ ID NO: 3117 - DNA, 247 bp, Glycine max
  Clone ID: 701041111H1
cgcactctcaactcttcacttgttaatgcttcctcctgaaagttctaaactcaacgcaatggagcttagcaaagtcacgttagagatcttttcaaaattggagcagcaatggctctcgcactacgaagcatcaaccaaaacgcgcattctcagcattgacggcggaggaaccaccgccattgtcgccggcgcctccctcgtccacctcgaagaccagatccgcgcccaaacctccgatcctcacacg

SEQ ID NO: 3118 - DNA, 246 bp, Glycine max
  Clone ID: 701041112H1
tcatcatcacagaagaacaacaacagaggaaaaaagaaaaagaaaaatgttagaggtgaagagaatcggtgtggtggggagtggccaaatgggatcgggaatagcccaagtcgctgccatgcacggcatcgacgtttggcttcacgacctcgaccctcaagctctctccaaagcctcctcttccatctcttcctccatcaaccgtttcgtttccaaaaaccacatctctcaggttgcgggtgctga

SEQ ID NO: 3119 - DNA, 246 bp, Glycine max
  unsure (1)..(246): unsure at all n locations; Clone ID: 701041113H1
gttagaccatctattacaatttctgatcatacgggaattctttttaccacaagaaagcatcccaaaacaaaggatctancnccagaagatttctggatcagtgtaccaaagaaaggaattgtggtttttgccctaccaggagagcctggnctagcagagttggtaggagacttcaaaattcagtttcaagatcgacagggagatttctactgttggatgaatacaacgatgacaganaaccgaaaa

SEQ ID NO: 3120 - DNA, 249 bp, Glycine max
  Clone ID: 701041114H1
cacatagtagctattatactctctagagtaattgcggaatctgctagaattttctaataatggcgaaagacgttgagcaggtcacagagcaaggtgaatactccgcgaaggactaccatgaccctcctccggcaccgttgatcgacccagatgagctcacaaagtggtccttgtacagagccgccatagctgagttcatagcaacactcctttttctttacatcaccgtgttgaccattattggctaca

SEQ ID NO: 3121 - DNA, 251 bp, Glycine max
  unsure (1)..(251): unsure at all n locations; Clone ID: 701041115H1
caagttgcaactgaaccaatcaacaactttcttgtattccaaattatcttcaccattacaatcctcaaagtcaaaaagtgaagaccttaacataaaacaaaacacaatggtaatgtgggtatttgggtatggttctttgatctcgaaagctgggtttcactatgacgaacgtattgttggtttccnnaaaggctatcgacgagtcttctaccaaggctctactgaccacagaggaacccctgagttccctg

SEQ ID NO: 3122 - DNA, 255 bp, Glycine max
  unsure (1)..(255): unsure at all n locations; Clone ID: 701041116H1
ttagctttgcgtatctgagaaactaagccatgtcaaaacccttttgcgccctctttgcactgtccatcatccttgtgacatgtcatgctcaaacccttaatacatcaacaacatgtgaaccttctaaatgtggtaacctcaacattagctaccctttttggaaganatccaacaccaacgttcaagaattttgcggttaccctgaatttggccttgaatgtttggatgaccaagccatcatgatttttccaactg

SEQ ID NO: 3123 - DNA, 249 bp, Glycine max
  unsure (1)..(249): unsure at all n locations; Clone ID: 701041119H1
cttttctccaaaaccatccaacaagggaaacagaatattattccanttttcaattatggcatcctcaactcaattctccaccactctggttacactatgtctcttccaattcctagcaggttcgtattcaacgacattcacgattgtgaacaagtgcagctacacagtttggcccggcattttatccggcgccggaacctcgccgctccccaccaccggcttcgtcttacaacccggcgagtccaacgt

SEQ ID NO: 3124 - DNA, 238 bp, Glycine max
  unsure (1)..(238): unsure at all n locations; Clone ID: 701041120H1
tgtgtggcggtgacaaccatggccgactcatctcaagaccttgaccaacttcancgatagtgctttggatgattttcagtccttcaacctcaatcctccccctccaagtggggaagcaactgcgaatagcaagaaggagagtccttctttgccgtcgggggttcaaggattgggcncgggtttacccgatttgagaacgaagaaaaaggggaaacagaaggcttccaaagacagccac

SEQ ID NO: 3125 - DNA, 237 bp, Glycine max
  unsure (1)..(237): unsure at all n locations; Clone ID: 701041121H1
tttcgattctattgttctatggaaccgcagcttcagcccaagctggagcccgcnccagagcttgtgagcgctggcgctgaggattccgagaagtcgcatgtcagtgatgtcacggaggttcgccacgttgccatggctgaggcaaacgccggttgttgcncttccgttttgaaacggaancgtggccgtacggccaagggaagccgcgttccgaaagggatgactccgccgtcgagg

SEQ ID NO: 3126 - DNA, 243 bp, Glycine max
  Clone ID: 701041123H1
tgatttgaggattgtgagtgatgcaaacatgtttttcattgagaccattctgaagcacttgggaataagggaatacttctcggagattaacactaacccaggttatgttaacgaagaaggaaggttaaggattttgccttaccatgacttcaacaaagcttcccatggctgcactttgtgtcctccaaatatgtgcaaggtaaatacaatttgttttttttggttatctattaccttatcatc

SEQ ID NO: 3127 - DNA, 244 bp, Glycine max
  unsure (1)..(244): unsure at all n locations; Clone ID: 701041124H1
attagattcaaaccttattggcgtcgtagcagaactcaaaagttaacatccttaatctcttcaaacacggttgttcatagcatatggaaacgaggatgttgcggctttcgattcaacgagtgaggaagttgaactttctgaggcctcagatctctgctttgggaaggtcccatttgtcaactgctgctgaaccatcttccagtaagagcnatccacctagggttccaaatcttattgggggcag

SEQ ID NO: 3128 - DNA, 242 bp, Glycine max
  unsure (1)..(242): unsure at all n locations; Clone ID: 701041126H1
ctttaggtgttcctgctcttccgttgacatacgtggctcacgttctggcagttgttgccagcgtcttggtcgtggtctgggtcgtcaatttcaggggtggcttggcttgggattctgataacaagtccctcatcttcaacattcatccagttcttattgtnattggcttactagttcatgggggtgaagctattataagttacaaagcttttcccctaaagaaggaagtgaagaaattgata

SEQ ID NO: 3129 - DNA, 235 bp, Glycine max
  Clone ID: 701041127H1
cacagagagaagagaagagaacttgtattttctgccagtttcccagtatggctgccacaagcacaaatcaatccgagttagaaacaagtaagaaggattccacttatgacagaatagctgaagtcaaagcctttgatgaaacaaaacttggtgtgaaaggcctcttcgattctgggatcacaaagataccacgcatgttccatcatgccaaggtggaggaccacactgaaaccat

SEQ ID NO: 3130 - DNA, 244 bp, Glycine max
  unsure (1)..(244): unsure at all n locations; Clone ID: 701041128H1
cttcccacttatctaccccccacactcttcaatgctagctgctctncttccatttataaatccaactcgatcctttctccctctcttgtcttcctttctaccctttctttccctaactttacaaaatcacaacacacacaaatcttctttttaacatttatcatcgtatctgaaactaccaactatcgatggccccttcattcgacacaagtactcacacggtatgcgtgatggatgcttcggg

SEQ ID NO: 3131 - DNA, 242 bp, Glycine max
  unsure (1)..(242): unsure at all n locations; Clone ID: 701041129H1
tgcaagataatcttaggaagagtttcgcgaancatgggtgcatgacttgtttaacctttacagttcttgctttggctgtgggtgctgctgtttccttgtcccccaatttggaatctttggattttaagaagctctctgaacttttcaacgttcagcactgagtactctggagaatattccgcattaccgcagttggttgcttccaaacggcaattttcttttcagcccatctcattcacaaa

SEQ ID NO: 3132 - DNA, 248 bp, Glycine max
  Clone ID: 701041130H1
cattggtatggctatgttactccggatgacgtggcagccttgttggaccgacaaattgccaagggagaggtcataaaaaaactttggaggggtcaaatggggccacccggtgccgaaatcaaggtagcagatgaccataaacttgctaacggagtttataataacaaggccaatctaagcaacaatgaaaatgttacaggatgctgtcagggtgttaatggggtttcttgctgcaggactgcaagttt

SEQ ID NO: 3133 - DNA, 251 bp, Glycine max
  unsure (1)..(251): unsure at all n locations; Clone ID: 701041131H1
tcatcgtcaaggttcctcaaaatgtctctgtcttttgtgttgctcttcctcatctcaattccaccttctttctcctctccaattcaccccacaagcaacgaccttcgtttttcttcaacagcagaaaaactcataagagggcttaacctgttcccgaaagaccccattaacacactcgagaatgnccctctttttgtgtcaggaagcattgtggagaagagcttcactttccctagtcttgctgcttcttc

SEQ ID NO: 3134 - DNA, 255 bp, Glycine max
  Clone ID: 701041132H1
aattatcgtgttttgatcagaatctgaggagaaaatcacataatttcgaatttgagttttcgtgtagaaaaaggaagagaagaaaatggaatcggaggatttggtcaaacaggaattggaggaattgcagaaacaattggggaagaagcaaaagtttgaagcttctgtttcgtctcttaaaacccttctccaacgcacttacccatcagcttccccggcgcttcgtaaatcctttattcagttctatgccgagtt

SEQ ID NO: 3135 - DNA, 250 bp, Glycine max
  unsure (1)..(250): unsure at all n locations; Clone ID: 701041133H1
gatcctagaaataaggagattgatcttgatagttcaatgtatganaaaattcctgacctaactgaggaagatatgaaaaaacaagaaggagattacatctaccgttatcgttacaatggtgggggtgcaactcaagtttggctaagctctggcagatttgtggtgattgacctttcggnagggccatgcacttatggtaagattgaagctgaagagggaagtgtctgttctagaaccctgccaagattac

SEQ ID NO: 3136 - DNA, 246 bp, Glycine max
  Clone ID: 701041134H1
cgaaactgaggtcgtagaaagaatggcgaaaacgacgtcgttgttgctctttacactgctcctcttcggaaccttagctctcatccaggcgaagaaatcgaaggaggatttgaaggaagtgacccacaaggtttactttgatgttgagattaatggaaaagaagcaggtcgtattgtgatgggtcttttggaaaggctgttccaaaaactgcagaaaactttcgagctctttgcactggggaaaag

SEQ ID NO: 3137 - DNA, 178 bp, Glycine max
  Clone ID: 701041135H1
tcacagtgccaatggcggatccaatcgcgaaggttctgatcgcgtttgcgctcttagcttccctcttgctgtgttcgcacgcttcctccgacgttcccttcatcgttgctcacaagaaggcctccctcaacagactcaagtccggcgccgaaagggtctccgtcaccatcgacatctt

SEQ ID NO: 3138 - DNA, 221 bp, Glycine max
  Clone ID: 701041137H1
gggaattcaagtgagagtgaagtaaaagggttgaaaattttgaatatgaagatcagtattttgctatgtgtggtgcttttgggtttccttggggtttgtcaaggaggcagcctaaggaaaaagttctaccgggattcctgccctcaagccgaggacattattaagaccaaaacccagcagcatgtgtctgctaatcccgatttgccagccaagttgcttag

SEQ ID NO: 3139 - DNA, 242 bp, Glycine max
  Clone ID: 701041138H1
ctcctcattccttcatttttaaacctagctccatctccctccactcaccataacatggcatcagaagcaaatgctgccaacaccaacttctgtgtaaatgttagcaacaatggctacattagtgctaatgaccccttgaactggggtgcggctgcggaggctatggctgggagccacctcgacgaggtcaagcgcatgctagaggagtaccggaggcccgtcgtcaagctcggtggagagac

SEQ ID NO: 3140 - DNA, 240 bp, Glycine max
  Clone ID: 701041140H1
aagacgaagatgaagagatggaaaatgatgcagaaagtctagaactggaagagattaagtctgagactgaccaggagggagatgatgagattgaaataaatgctggtctgggaacttttgaacgtgaagaccagaatgagtttgctgtcaaaattgccattggtggtcttgttcagaaactttctggtaatctatcctctagagatttgcttcgagtccctgctatgctggagatgaagg

SEQ ID NO: 3141 - DNA, 239 bp, Glycine max
  unsure (1)..(239): unsure at all n locations; Clone ID: 701041141H1
ctggctcaagtatgaacccctttctggataatgacgagtctggtaggcctcaagtaggcagccctaatcttagttctccttcaaatggggaatccgtaccttcaaatgggttgccaactactagcgattctatcaatgggaacagtgactcaagtccaacatctgtagcggtaccctcgctatttgaagaggatgtggaatttgtaggtgtagaattagaaggtacagagaaggcaang

SEQ ID NO: 3142 - DNA, 240 bp, Glycine max
  Clone ID: 701041142H1
ccggatcccccttcgaagtgaattatattgcagcgaatcacacacactctgaacaacgcccaccatgcaggccagtgataggtttaacatcaattcccagcttgagcatctccaagccaaatatgttggaactggccatgccgatttgaacagatttgagtgggcagtgaacattcaacgagatagctatgcatcatatattggacactaccctttactgggattctttgctattgctga

SEQ ID NO: 3143 - DNA, 238 bp, Glycine max
  unsure (1)..(238): unsure at all n locations; Clone ID: 701041144H1
ccgcgtgtatcgtactcgtcgcattttccgtgtctcatcanaccctggttatgatcggtcaaacgcaaagtttgttcttatttcgccgatcgaacctcgatctggttcttagggatgattttcgttggaggtttcggcggcaccggtgattatcgtacgtgatctttctgcggtggatgtngatggtctcgtgtcgaaagactcgaatcagagtaattaacgccagattcgctgtgta

SEQ ID NO: 3144 - DNA, 239 bp, Glycine max
  unsure (1)..(239): unsure at all n locations; Clone ID: 701041145H1
aatagaagccttattttgctctgtgttctttctctcaacaatcgttccaacaaatcaagctacgtttctaccactcaggtttgtttctccgaacgcgaaaatctaatacttcttttagggtttgtgatggatgatctacgagaatctatgttctatccgacttcatttatctcagtgaagcttagggttcctttcaatttntttatttcggggttttcataaggatcggcaatacccta

SEQ ID NO: 3145 - DNA, 225 bp, Glycine max
  unsure (1)..(225): unsure at all n locations; Clone ID: 701041146H1
aaagaactttgttctttgaggataacngtccgcaacacacaacgctggaaaacgtgtgggtactcacactgtgctggttggaaaatctcagagaattaaaggagcagattatgcattagaaagcatccacaaccttagggaggcagtgccagaactatgggaagatgacataaaaaaagatgctagcagctttcaaatctttgacatcattggccattttgctca

SEQ ID NO: 3146 - DNA, 251 bp, Glycine max
  unsure (1)..(251): unsure at all n locations; Clone ID: 701041148H1
acgtnatcagcatgctagatgacaccgtttccgtttccctcggaattgannnnnnnnnnnnnnnnnnnnnnnnnnnnnnnnnnnnnnaatctgaagtcagcattttggagtggcaagttttattgaactccaccaatttggaaggaccgaattcggagccttatttcggagatagcgaggatttcgtttacaccgcggagtacgaaatgatgttcgggcaattcaacgacaatgcatttaatgggaaacct

SEQ ID NO: 3147 - DNA, 179 bp, Glycine max
  unsure (1)..(179): unsure at all n locations; Clone ID: 701041149H1
ctcttcttctcttgcggcnagggttttagcgcanttcttctagatttaaggaagatgggtaaggaaaaggttcgcatcagtattgtggttattggccatgttgactctgggaagtccactaccactggccacctgatctacaagcttggaggcattgacaagcgtgttattgagantgt

SEQ ID NO: 3148 - DNA, 212 bp, Glycine max
  unsure (1)..(212): unsure at all n locations; Clone ID: 701041150H1
anacagaagaagcacttagcaatgctggaacgcctttccaaacgcacccaaagcnttcgcaaaaccccgattcctcatcatcagaatcctccacttcctccatcctttcacgcttcacccacttaaaatcctcgattgagtcccaactcgcccaatcccaatccatttcctccgaccccctccaacctcaaactccacttcaatcaaatctc

SEQ ID NO: 3149 - DNA, 242 bp, Glycine max
  unsure (1)..(242): unsure at all n locations; Clone ID: 701041151H1
ctcagaattctctaaaagagatctttttctgctctttgaagaaagaagggtctttgcttgattttggagatgtctctgctctcagatctcatcaaccttaacctctccgataccaccgagaaggtgatcgcngagtacatatggatcggtggatcaggaatggacctgaggagcaaagcaaggactctcccaggaccagttagcgacccttcagagcttcccaagtggaatatgatggttcc

SEQ ID NO: 3150 - DNA, 242 bp, Glycine max
  Clone ID: 701041152H1
catttctccatttccattttctctctcacttttcaagaatcgtaagctatgggaaagtcttacccaactgtgagtgctgattaccagaaggccgttgagaaggcgaagaagaagctcagaggcttcatcgctgagaagagatgcgctcctctaatgctccgtttggcatggcactctgctggaacctttgacaagggcacgaagaccggtggacccttcggaaccatcaagcaccctgccga

SEQ ID NO: 3151 - DNA, 240 bp, Glycine max
  Clone ID: 701041153H1
cgagtttgagccaaaacccgaaataattgagccacaattggaattcagttttccaaccacacgctgcaaatcgagtcgaaggccgtcgctgcaaatctctctcccgaagaagaccgagtggatccaatttggagagcccgaggttaccgaaacggtgtcgcagagtaacccgaacgcggaagagaagaagcactacagaggagtgcgacagagaccgtgggggaagtttgcagcggagat

SEQ ID NO: 3152 - DNA, 240 bp, Glycine max
  unsure (1)..(240): unsure at all n locations; Clone ID: 701041154H1
ctcacactcgcaagtctcaagcaactcacacaggaagcggcaaacanagcacacagaaagtaaaaagcggaaattaaggagcggtggtgacggtggtagtgaataaataaaagcagcaccataccatggggggagaagaagtagcaagagtcaaagcagagttgttcgacgacaacgaaagcgatcgcaacgacgacgacgttttgagcgagagcnaggactcgggagtgacgacggctc

SEQ ID NO: 3153 - DNA, 241 bp, Glycine max
  unsure (1)..(241): unsure at all n locations; Clone ID: 701041155H1
caagtngcgtgtacctgctgtcactactccctaaggaaaaccagaacaacacagttgttcctattagaaatacgcccacatcaatccacgccacccctgtcaaaatcaatccccagataccattccccttccnataacaaanacaaancaacccaatcattgtntgttcacatccgaatccacaacacactgttaataattattctgattcacgaaaaacaggaaaaccccaaaactctct

SEQ ID NO: 3154 - DNA, 236 bp, Glycine max
  unsure (1)..(236): unsure at all n locations; Clone ID: 701041156H1
agcctttgagggttaatgttctgttccaacatatacaaaatatgctgtctggtgaaactgctgtaattgctgagacaggggactcctggtttaattgccaaaagctgaaattgccaaaggcatgtgggtatgagttccaaatgcaatatggttcaattggatggtctgttggtgctactctgggttangctcaagccgttcctgagaagcgagtgattgcctgcattggtgatgga

SEQ ID NO: 3155 - DNA, 238 bp, Glycine max
  Clone ID: 701041157H1
gtttttgagaaagccaaaggtgtcaaaaaaggaagaggatgaaatttgtgtgccaataaatggtggttacaatgacgatgatgcagacatagagtccttgcttcttcccagaaggttcgggaactctacttctcttgctgcatccattcctgtggcggaataccagggaaggttgcttcaagatttgcaaggaaagggaacacaaggaaggccagcaggttctcttgccgtgcctcgc

SEQ ID NO: 3156 - DNA, 175 bp, Glycine max
  Clone ID: 701041158H1
actctcaatctccaatctctcctcaaaatcccttccaatctcgcgtgcgccacagatctgatagttagattacactgaatcgaatcgaatcgaatcgactcgctgaatcccaatgtcgcagcaattagggttcgcgatcgagctatacctagaccctgcgttggagaatcaggtt

SEQ ID NO: 3157 - DNA, 239 bp, Glycine max
  unsure (1)..(239): unsure at all n locations; Clone ID: 701041159H1
acgagggagacaatcactcagtccccaacaatgtacaaaatatagccaagcctgtcaaaatagatggatcttcccatgcattgcagaatggcatagattcagcaatacgccatactcacagaattttagcaattttagaggcgctgttttcattgaagccatcttctgttggtacctcatggagttacagctcaaatganatagttgcagctgctatggttgctgcacatatttctgaa

SEQ ID NO: 3158 - DNA, 238 bp, Glycine max
  unsure (1)..(238): unsure at all n locations; Clone ID: 701041160H1
cacttcaggttncgaaaaangttacgaatgatatgaagactaagaatcgcaccgatagaactggagttgttngtgctattgaaaaagaaactccggcaagttcacgcgtgttcttctaaagcaggacctccaaaatttgaacttcaaatgggncgcaaatgggttgttgagaatcaaattgagaagaaagactggtgattgaagattgtgattcaaagcagtctgtatatatttatgg

SEQ ID NO: 3159 - DNA, 241 bp, Glycine max
  Clone ID: 701041161H1
caaacatgtccaccgcaacaactcacgtgctcgcttatcccttccctacctccggtcacgtgatccctctcttagacttcaccaaaaccctagtctctcgcggcgtccatgtcaccgttctggtcacaccctacaacgaagccttacttccaaaaaaactattcccctcttctccaaacgcttctcctccccgaacctcagttcccgaacccgaagcaaaacaggctcgtatccatggtaa

SEQ ID NO: 3160 - DNA, 243 bp, Glycine max
  Clone ID: 701041162H1
cgccctgcgtgaagcgcgtggtgtaacttcgactccgacctcgtactcgtcgacgacatcgccaagctcgcgacaacctcgttgggagaaaacaacaacgttttggcggcgcggaatattgcaacgcgaacttcacctcgtacttcactcccacgttctggtcgaacccttctctgtcgctaacgttcgcggacagaaaacagaaagcgtgttactttaacacgggggtgatggtgattgatt

SEQ ID NO: 3161 - DNA, 246 bp, Glycine max
  unsure (1)..(246): unsure at all n locations; Clone ID: 701041163H1
ancaatatttatatcgcttggtgcttcttatttatttaagctacaattgcatcttaccattcactcactgataaacgctgaattcattcatagcagcaaacccatctccaacaacatgagttcccaaacacgcaacctcaactttgttctgtttcctctgatgtcccagggccacatgatccccatgatggacatagcaaaaattctggcacagaacggtgttactgtcacagtggtcacaaccca

SEQ ID NO: 3162 - DNA, 248 bp, Glycine max
  unsure (1)..(248): unsure at all n locations; Clone ID: 701041164H1
tagtatagctcttgacccttcttcccacctttttctggtccctcatccagaaatggcttccaattccattctncttctttgtatctttcttgtggttgccacaaaggttttttcctatgatgaagatctcaagacagtggttcctgcanctgctccaccagtgaaggcaccaactcctgcctctccagtgaaatcaccatcttaccctccagggtcagtgaccacaccaatgttaaggtgccccctcc

SEQ ID NO: 3163 - DNA, 245 bp, Glycine max
  unsure (1)..(245): unsure at all n locations; Clone ID: 701041165H1
tttttgagcaacagcagttaaaagagaaaagggattcagcgaagatgacatcngttggtgtggcaccaacttcgggtttgagagaagccagtgggcatggagcagcagctgcggatagattgccagangagatgaacgatatgaaaattagggatgatagagaaatggaancctnagttgttgatggcaacggaacggagacaggacatatcattgtgactaccattgggggtagaaatggtcag

SEQ ID NO: 3164 - DNA, 243 bp, Glycine max
  unsure (1)..(243): unsure at all n locations; Clone ID: 701041166H1
atcgaatcgaatctccgaagatggccgcgagcgatcgcacagtgttgcaattctcttcatcatnttcttcttcgcagagcttgtccncgaaggtccaccctctggtcatcttcaacatctgcgattgctacgttcgacgccctgaccaagccgatcgcgtcatcggaaccctactcggctccgtccttcccgatggaaccgtcgatatccgcaattcctatgcngttcctcacaacgaatcta

SEQ ID NO: 3165 - DNA, 242 bp, Glycine max
  unsure (1)..(242): unsure at all n locations; Clone ID: 701041167H1
ctctgaattcctcttattcaggaatttggagagtattgatatatcaaggtaggataaaccagtagccaaggaagatatggagttttctatgatttncattgttagcaacattatgctgcttttcagttcagcatttgccaaaactgctagtcctccctctctgagcccaactccagcaccagcnccggcaccagacttcgtgaacctcactgagttactcagtgttgctggtccgtttcaca

SEQ ID NO: 3166 - DNA, 239 bp, Glycine max
  unsure (1)..(239): unsure at all n locations; Clone ID: 701041168H1
agaaagtgaggcttttatttgattctaaaaatgagacgtgctcttgctttgcttcctcttctcttcctgtttgtagcgattggggaatcaagaaaagatggaggaaaatattggaaaatgaacacgaganatcatcagatgccgaaaaaaattaaggctctcctcaaccaaaactnngagatccaatctgaaaagattctcaaaaccaaggaacaaattcttgaaggttctaaacatga

SEQ ID NO: 3167 - DNA, 217 bp, Glycine max
  Clone ID: 701041170H1
gggttttgtgattttttgaagaataccgttttggagttagtacggagatggagctgtcgactccgaattcttcctcgaagcacttgtccattacgccgggttctagggttttgagaaaccctctctccgacgaacagatctggaagcgcctccgtgacgctggcttcgatgaggaatcgattaagcacaaagataaggctgcgcttattgcttacat

SEQ ID NO: 3168 - DNA, 236 bp, Glycine max
  Clone ID: 701041171H1
agaaaagtagtccctttcgaggagcttccatcaagtcttccagccgccaagcttgcatcaggtgatattgatgtgagaatgaatcttgatgatccattaaatcaaaacgttgatactgcgagaaatgttctacaagaacttagaacacaacttcccccagaaatatttgatttgtcaaagcttgtgtgtggaacatatgtggactcgaggatgcttgtcctcgaggggttagtgga

SEQ ID NO: 3169 - DNA, 234 bp, Glycine max
  unsure (1)..(234): unsure at all n locations; Clone ID: 701041172H1
tttcattgatttctccctcttcgctctctctcagtgaccagagacagatgatgatggagatggcgaacgaaacgctgtcgttgcggcactcgcggcgttggtgctactcgcggcgagtgtggcggtggatgctcaggagaactcggacgtgnagacgctggtgaagtacaagcacgggaagaagtactgcgacaaaggatgggaatgtaagggctggtcaatttactgttgtaa

SEQ ID NO: 3170 - DNA, 235 bp, Glycine max
  Clone ID: 701041173H1
agccaagcaatttgctattcactattgaactatgaaacctaatatgtagaccaagtgtttgttgtggtgggtaaattgtatctttcttataaaagacttggtcaaaatgattccccaacttaacctgttggaaaaattcttgttttgtaggtttatctcaagacacatgtgattgaatatatattgtctatgtttaaaattctatcttttgttactgcaatccaggtggacaata

SEQ ID NO: 3171 - DNA, 234 bp, Glycine max
  unsure (1)..(234): unsure at all n locations; Clone ID: 701041174H1
gtggtttgtgtcaccggagccagcggcgccatcggatcatgggtggtcctactcctcctccagcgtggttacaccgtccatgccaccgtccaagatatcaaggatgaaaatgagacgaaacatttggaggaaatggaaggagcaaagagtntctccatttttttgaaatggatcttcttgacatcgactccattgccgctgccataaagggttgttccggcgtaatccaccttg

SEQ ID NO: 3172 - DNA, 237 bp, Glycine max
  unsure (1)..(237): unsure at all n locations; Clone ID: 701041175H1
tatttccctacctctcccttcaagatgcagatcttcgtcaagaccctcaccggcaagaccatcacccttgaggtggaaagctctgacaccatcgacaacgtcaaggccaagatccaggacaaggaaggaatccccccggaccagcaacgtctcattttcgccggaaagcaacttgaggacggccgtacccttgctgactacaacattcagaaggagngtactcttcacctcgtcctg

SEQ ID NO: 3173 - DNA, 235 bp, Glycine max
  Clone ID: 701041176H1
acagctttcatggttccattggtggctggtgatggaaccaaaactcaggcacttgctgtttgccactcagatacttctggaatgaatcatcacatgcttcatgaactcatgggagttgatcctggaactaaccctgtttgccatttccttggaagcaaggccattttatgggtacccaatttatctatggacactgcctatcagactaacgttgttgtttaattagtccatgcat

SEQ ID NO: 3174 - DNA, 239 bp, Glycine max
  unsure (1)..(239): unsure at all n locations; Clone ID: 701041178H1
ctcgttgttgcttcgctgttgaatcatggatcagaaggtcnatttcagcgctccccattccatgggaaccactatcatcggcgttacttacaacggcggtgtcgttctcggagccgactctcgaaccagcaccggagtgtatgttgccaaccgagcatcggacaaaatcactcagctcactgataatgtatacgtgtgtcgctctggatcggctgctgattctcagattgtctctgatt

SEQ ID NO: 3175 - DNA, 249 bp, Glycine max
  Clone ID: 701041180H1
aaagaatgcaatgactcaactctagatactagatagtgagtgagtgaagctaaagctacaaaaaacaaccaaacaaaacactcaattctcttctcttctcttctgggtttttgctttttcctcattctctcattctcaaacaccacaaaaaaatgggccttgtttcccaggatgccctcaaccaactccaagctctcatggatcaagtgctacttgaggaggagccactgcagagaacgtttcagaatg

SEQ ID NO: 3176 - DNA, 242 bp, Glycine max
  Clone ID: 701041181H1
atcattcaaccagatggctgagcagcttcagaaaacttttcaaggagctccacaggatgctatgcctagctttgataatcaacaatatttttcaaccatgcaacaggttatgcagaatcctaattttatgaccatggctgagcgcctgggtaatgcattgatgcaggatccaccctatgtctgccatgcttgaaagtttttctaatccatcaaataaagaccagcttgaagaaagaatgaca

SEQ ID NO: 3177 - DNA, 236 bp, Glycine max
  unsure (1)..(236): unsure at all n locations; Clone ID: 701041182H1
ggtggcggaagggttcacttgcantggtctaatattccagttggagatgaatatgtccctttggcaagtgtaaagggaagcattatcactgggttggtatattacanagaatgccctgttggtacttataaaaatgtcagtnggtctgntagnnatctttgtcatgattgcccntctgacaagcttccgcatcgtgccatatatatntctgttcgangtngtgtggcagagatcct

SEQ ID NO: 3178 - DNA, 238 bp, Glycine max
  unsure (1)..(238): unsure at all n locations; Clone ID: 701041183H1
ggacatcttgngancactacggattgttataggnagactagaatattcattgagacttttcttccaaagatggggatcacgaccactgtaattgatccagcagatgttggagccttggaatctgcattggagcagcacaatgtgtctctattcttcactgagtctcctaccaatgcattcctgagatgtgttgatattaagctggtttcagagctttgccacaagaaggggactttgc

SEQ ID NO: 3179 - DNA, 196 bp, Glycine max
  unsure (1)..(196): unsure at all n locations; Clone ID: 701041184H1
ttctttttccccattttttctctttcttttttnttttcttttncttttttnattttcatttnccccttcgctnngtntcaaaagttgacgcnattcgcgnntccctttnccaaaaaaccgttncctgggnaattgagagagtncnaattntgcccctnggggnttcgcgaatttanaaanccganagtcanggctc

SEQ ID NO: 3180 - DNA, 234 bp, Glycine max
  unsure (1)..(234): unsure at all n locations; Clone ID: 701041186H1
ctgtgtcagccacagtaattggctctactgtgggcgattcctcacctcctgatggtgtacttccaaaagataaagctgaagacaaatatgagccacttggtcttcacattcagtccattcccttaggagttgtacctagtagccaagacatgaaaccatcaattatggagactgaatttaaattagaagatngnatcaatgttggtcccagtatcgaacaccagtttatcccga

SEQ ID NO: 3181 - DNA, 234 bp, Glycine max
  unsure (1)..(234): unsure at all n locations; Clone ID: 701041187H1
tctctcaaaggaaagaaaaggaaagaaaagaaaagaaaaagaagagagtgtaggtaaacagaagcacacactacacagttaccaaaatcaggttcaaacgcacagatctgggagaagnnnnnnnnnnnnnnnnnnnnnnnggacaggatcagaaccagagatcgctgatctacgcgttcgtgtctcgcggcacggtgattctcgccgagtacactgaattcagtggcaattcaa

SEQ ID NO: 3182 - DNA, 234 bp, Glycine max
  Clone ID: 701041188H1
aggaacaaggtattagctcaagtttggacccataatcttgatagttgtgaaggagatgttgtacagtgctcagaacaagaggcaatgcctagttctcataagactgctcaagactaaattcaccgaacgtcctctcctacggtgatgattaatccttggaccaccattccagaaatcaaccccgttagagcatgctttgatccacatgattcagttgtgcaacaatcatgatgg

SEQ ID NO: 3183 - DNA, 232 bp, Glycine max
  Clone ID: 701041189H1
cttagggattcaactggaatatcagattcagtgcttctcttatttggtgggaatgtatccagaggtggactagatggtcacctgaaaatgttgggagggtatttggagtttttcatgaaaccagaattagccaagacttacttgagcttaaagatggaactggaagaactgatacagaaaaaacttttggatcccatgttggaaacacaatcgcatagtgagctgctttctg

SEQ ID NO: 3184 - DNA, 232 bp, Glycine max
  Clone ID: 701041190H1
ttgattcggatctagagtcttttttcactcttcagttctcgttgttgttcttcgctttcctgaaactagggttttcaatttcgattcattcgttaataattaaagatgtttgggagggcaccgaagaagagcgataatacgaggtactacgaaatcctcggcgtctcgaagaacgcttcgcaggatgatctgaagaaggctacaagaaagccgccatcaagaatcaccctga

SEQ ID NO: 3185 - DNA, 233 bp, Glycine max
  unsure (1)..(233): unsure at all n locations; Clone ID: 701041191H1
atagatgatgctgaggtacagccagtgctaattaatcaggtcatgtcagaaggagcatatatcctattctacatgaggtcctgtccccgtcctccggtagaacatactatgaatgccatgcagcaatctgtttatgattcttcaaagcacaatccaatggaaatgcagaaacctaataaaccaggacatagtaggcatngcagtcgtcagttttttgtcccagagccatcacc

SEQ ID NO: 3186 - DNA, 236 bp, Glycine max
  unsure (1)..(236): unsure at all n locations; Clone ID: 701041193H1
cttttctgaatctcgcggngttgttagttctgcggcggttgtagttccggcggcgatgggacagcaatcgttgatctacagcttcgtcgctcgcggcaccgtgatcctagcggagtacaccgagttcaccggaaacttcaccagcgtggcggcgcagtgcctccagaaactcccttcctccnacaacaagttcacttacaactgcgatggccacaccttcaactacctcgttgata

SEQ ID NO: 3187 - DNA, 240 bp, Glycine max
  Clone ID: 701041194H1
caaatgagctgtcctttcaaatgtggacaaatcaaatacaagaaactctaaattctaagaagcaaggcgattctgcttttcatgctagagacttctccacggccattgactgctatacacaattcatcgatggtggaactatggtatcaccaaccgtgtatgccaggcgctgcttgtgctacctgatgaatgacatggcacaagaagcacttggagatgccatgcaagctcaatcaatat

SEQ ID NO: 3188 - DNA, 243 bp, Glycine max
  unsure (1)..(243): unsure at all n locations; Clone ID: 701041195H1
ccaatttcgcgataccaaaacctcagcaatcaacaatgtcgtttttctcaaggngccgtcgcgacgacgacacggtggacgactacgacgagtacgaccccaccccttacggcggcggctacgacatcgccctcacctacggccgccccatcccaccctccgatgagacctgctaccctctaggagcctcttcttctgatgacaacttcgattatgatcgccctcaatacacctctaacgctg

SEQ ID NO: 3189 - DNA, 249 bp, Glycine max
  unsure (1)..(249): unsure at all n locations; Clone ID: 701041196H1
atagtgttaatntgtctttctctatctctatcggtcatgggtgcttttgcttttgatgaggaaaactcctccancgtggctccggcaacactctacaaagctctgacaaaagatgctgacactatcatcccaaagattattggggccatccaaactattgaaatcgttgaaggaaatggaggacccggaaccgtcaagaagataacagctagtgaaggtgaccaaaccagtttcgtgctgcaaaaagtg

SEQ ID NO: 3190 - DNA, 252 bp, Glycine max
  unsure (1)..(252): unsure at all n locations; Clone ID: 701041201H1
catccctctcgaatagaaaaacagaacagaagaaagaagaagaaaagaaaacccaaacaaactctannnnnnnnnnnnnnnnnnnnnnnnnttacctgcacttgttcttcttcctcctctgcagtaaaaccctagccatcttatcgatccgaatcccgagatccgattgcnaggctggcgggtattcgggtcaagtaaatgacggatctcccccgccgcgccttattgataatagggttaccgcgctgctgt

SEQ ID NO: 3191 - DNA, 247 bp, Glycine max
  unsure (1)..(247): unsure at all n locations; Clone ID: 701041202H1
atcaanaaccactcnctctcccctctctgcagcaaaaccaattctccggcnacatctccggtcaggttccggcagcctctccggcgactcggcatggcaactcaatgaatgcggaatcaccgccggggctcctcatgtcgtttcctgcctctccgactacgacctcctctgcggcgaggactcctccggaatcctctccggagagtcgccggagtgctccttctccgacatcgatcctcacctcctc

SEQ ID NO: 3192 - DNA, 247 bp, Glycine max
  unsure (1)..(247): unsure at all n locations; Clone ID: 701041203H1
cttttacagttttcccccttcccattcatcaattcttttattgaanatgtttgcacaatagttaacaataccaaatagtggcattgantgacgtatcccaaaattnanacagtgggtagtggattggttgctttgctgggatcatatatnanatattcaagatnaataatttcataatttgtagtatagaatacacaaatgcttaaanntaaaatattatctaaaattaaagatataatcataattc

SEQ ID NO: 3193 - DNA, 243 bp, Glycine max
  unsure (1)..(243): unsure at all n locations; Clone ID: 701041204H1
tttattcagctcatttctggtcttactagtttctgatttgttctcttatgccattttttgtntcttctttcaaaggggttactcttgaagttctataaagttcgattctttgttcgtttcactaacttggatgtgagtaggctcttagatccgagggatgaaagttggatatttttagcagtaacacaaatttattcagtgtgaagcaatatgggaaacacagtgttggtcctagcatttcaa

SEQ ID NO: 3194 - DNA, 245 bp, Glycine max
  unsure (1)..(245): unsure at all n locations; Clone ID: 701041205H1
ttacaaatcatctgggaanttctgtactcaatgtgaggctgaaggcttccgtaaaattacattttatcaggatcgacctgatataatggcaaaatatacagttcgcattgaggcagataaatcactgtntccagtgtattntnnaatggnaacctanctgaacaaggtgacttagaggatggcangcactangctgnntgggangaccccttcaagaaaccttcntanctgtttgccttggtngt

SEQ ID NO: 3195 - DNA, 245 bp, Glycine max
  unsure (1)..(245): unsure at all n locations; Clone ID: 701041206H1
aaattccaagttggggttctcacgatttcgattaaccctttctcccacaaactccgattcttcttgtaaacagcggtgccaggtgttaatctagaagttgatataggatgggggcaatgatgtcgaggttctggttctgttattccctgcaaaagagtataagattgttgttgttggattggataacgctggnaaaaccactaccctttataaatnncanctgggtgaggttttaacaaccaanc

SEQ ID NO: 3196 - DNA, 248 bp, Glycine max
  unsure (1)..(248): unsure at all n locations; Clone ID: 701041207H1
ggactgctagttcaagtccagaacatccatcattgcgagctcatgggacggtccaagcttagtggtgacaggacttcttttagagatnttgttgatgaccagtctacactaagatccagctacaagtcagatggcgcttcctcatcagaagctcgtaggatacgaagaagaagtatcagcattacaccagagattggtgatgatattgctagggctgtacgggcgatgaataanacgctaaagcaaaa

SEQ ID NO: 3197 - DNA, 247 bp, Glycine max
  Clone ID: 701041208H1
gggcttcaggaatctacatagctttttcctcagagcgttgaaaattcccagactctctcgcttcctcaaaatttcgccctctttcattcaattctcttctctgctcttctcttctgttcccaccttctgatccatcatcctcgttttctccgaacaatggctgctggtgtcactgtcaagtccgaggttctagaatcttctccccctgaaggagtatgttccaacacggaggaaaaccacctggttc

SEQ ID NO: 3198 - DNA, 247 bp, Glycine max
  unsure (1)..(247): unsure at all n locations; Clone ID: 701041209H1
tttagttgacagntgaagagaganagtnagctgatgaaaagatcctgaatcaacaaagaagagacgacacgnnnnnnnnnnnnnnnnnnnnnnnagcaaacaagctgactcggagttaaaatagaagaaaggattatcgagtcgcattgtcgnttcagagaaaaaaaanttganttcaatctgatagancctatcacngcaaaaaaatnggnttgaatanggngtttccgntttcaaaaacaatcac

SEQ ID NO: 3199 - DNA, 245 bp, Glycine max
  unsure (1)..(245): unsure at all n locations; Clone ID: 701041210H1
cttgctcttgttctctgattggcctagccagtagtagccaatttnttggagctggttgggaatggcgtcgaaaccgaaatcaaatggaaattccaaatgcaacaaaggattcgctgacagctatatgctgttgaatctgaagacgctcatttcttcgatcttgttcatgtgctgtattcccgtaacttgggaaaccgaaaatttgtggacagcaatgctgagggatcttatgagggaagcttccg

SEQ ID NO: 3200 - DNA, 244 bp, Glycine max
  Clone ID: 701041211H1
gccgatgtggtagagcagttcctcccagaccacaatgaatccatttctgcagttcttgacaagtttggtgccatgggaattgacacccccggcgtagttgcattgcttggagcacacagtgttggtcgaacccattgtgtgaagttggtgcaccgtttgtacccagagattgatccagctctgaaccctgaccacgtccctcacattctgaagaagtgccctgatgccattccagaccctaagg

SEQ ID NO: 3201 - DNA, 244 bp, Glycine max
  unsure (1)..(244): unsure at all n locations; Clone ID: 701041212H1
accgaccacatcgaggtcgacaaggaaaccctcgacatgctccactccctcggtatcaacgacatccccggcatcacccaggttgatcctgtccctgttcagcagaacttccccttcaccaggaggtactgatgatatggaggctcttctgctttgagaaataagactttgttttatgcttctcgtttcgtgttttcgtggttttnattttatnttattttatttctcaagccttttaattttt

SEQ ID NO: 3202 - DNA, 243 bp, Glycine max
  unsure (1)..(243): unsure at all n locations; Clone ID: 701041213H1
ctgagagaagcagagctgaagaggtgaagtgaagatgatgtccggnaaatatacgtcgattgacgcgcagagcttcagggatctgttcctgccgttccagattcacgacccgccaccgtcaatttcgcagattcaatcttcagacttttcctccttctggagctcagggcaagatcaccgctgcttccgggcctcctcgtgacgctgatgattcattttcaaaacctgtatctggttctgatg

SEQ ID NO: 3203 - DNA, 243 bp, Glycine max
  Clone ID: 701041214H1
ttagcctgcgacacatgttgagaaacgagttgggtgtgtttgaaacttgatgttaaagtgtgaagggacaaggaaacatagagtctcgttggttcaatacacttgtgcaatttggccactatgaacacagggcttgctgcaggtgcagccttgcttgcactcttggctatcaccttctccttgttgagccctcaaaccctgttttctccgcctgagattccgggctcgaaggaccaccttcac

SEQ ID NO: 3204 - DNA, 175 bp, Glycine max
  Clone ID: 701041215H1
acagagtgttggggttgaacacctgaaacagaacttgaaccctgcctctgcgctcttgtggaatctgtgcagtgcttgaaccctaataatggctgctttcttgagaaggtttgcgagggccactccgatcctattcgtgcccaatccaattcctctcacaccaatctccgccttc

SEQ ID NO: 3205 - DNA, 245 bp, Glycine max
  unsure (1)..(245): unsure at all n locations; Clone ID: 701041216H1
cttgttgttggaaagaaaccctagcaagcggaacaatggcagacgttgaggtcgatgtgnnnnnnnnnnnnnnnnnnnggcagccgaagaagagaacgttcaagaagttcagtttcaggggcgtggatctcgatgcgttctggacatgtccaccgatgaactcgtgaagatgttcagtgctcgcgcacgtagaaggttccagagaggcctcaccagaaagcccatggccttgatcaagaagcttc

SEQ ID NO: 3206 - DNA, 246 bp, Glycine max
  unsure (1)..(246): unsure at all n locations; Clone ID: 701041218H1
attaaacaccaaaatanaaggagactcaaaaaagagttctccgtcaactgaatctccatcatttttcccctttcgcttcttcgtgttttttcttctctctcacttttgcttcttcacgatccactctctctgtttcgtgtngtggtgctgatcgcctgcgttcatggtgatcgagcatgacattgagagctgcgggagcagagcggtgcaatcttcgcacgcgcaccaccctcggcaccaccggca

SEQ ID NO: 3207 - DNA, 245 bp, Glycine max
  unsure (1)..(245): unsure at all n locations; Clone ID: 701041219H1
ccttcctcgatctctccaccgccagcncccgcctgccaccgccgtccccttccccgccgaacccaacgaccaccttccaccacccattcccganccaccttctaaccacccaccctacgccgagatgatatacacggaatcgaggcgctgaaggagaaagacggttctagcaagagggcaatagcgaagtatattgagcaagtgtatacgcagcttccaccgaatcatcagacttgttgactcag

SEQ ID NO: 3208 - DNA, 244 bp, Glycine max
  Clone ID: 701041220H1
ctgctccgcataactcctcacacacacacacaaaacagaacacaacacatatacatacacatgttgttgatgagtggaggcaacaaaaaacacagatccatcacacacatgaacaattgatctttgtcctttgtataaatttgattctaatttttggcactaagagagccactcaaggctctgggatgtactatacgccattcggggttctgattttcggcggagagaaggttcaagagaccca

SEQ ID NO: 3209 - DNA, 244 bp, Glycine max
  unsure (1)..(244): unsure at all n locations; Clone ID: 701041221H1
gtttgcatgtcaaaatctcattcatcatcatcttcttcttaaaagnaaaaggttannnnnnnnnnnnnnnnntgagtagcgtgttggagcatggtgttgtgggatgttgcaaatcagggccaggctatgctancccctggaagccatgtctggtccaagagagtctcttatttatgtaactgctgtctacacagggacaggaatagagaagccggactatttggccacagtggacatagatccc

SEQ ID NO: 3210 - DNA, 207 bp, Glycine max
  unsure (1)..(207): unsure at all n locations; Clone ID: 701041223H1
gttctattcttcttccacaatgggtatctctcgtgattccatgcacaagaggcgcgccaccggcggcaagaagaaggcttggaggaagaagagaaagtagagcttgggaggcagccagcaaacacaaagctatcaagcaacaagacggtgaggaggattagggttcgcngtggaaacgtgaagtggcgtgctttgaggcttgctacc

SEQ ID NO: 3211 - DNA, 244 bp, Glycine max
  unsure (1)..(244): unsure at all n locations; Clone ID: 701041224H1
gaaaggagctggttacacatcagagaagccacttgatgcaaaggttttgaatatgatacaaatacatacacatttatttataatctatgatatcaatattatatattgcaaggnatgttctttgtntttggatttttaaatgggaggtaagtcaagatattctgtttggtttggattcagacactgagacgtttagctcanaccgagaagctgcaaggaaaagccgtctccaggaaaaggcttt

SEQ ID NO: 3212 - DNA, 247 bp, Glycine max
  unsure (1)..(247): unsure at all n locations; Clone ID: 701041225H1
ttctctctctacgatggagccttcctcgatctctccaccgccagcnncgcctcgccaccgccgtccccttccccgccgaacccaacgncccaccttccaccanccattcccgaagcaccttctaaccanncaccctacgccgagatgatatacacggcaatcgaggcgctgaaggagaaagacggttctagcaagagggcaatagcgaagtatattgagcaagtgtatacgcagcttccaccgantc

SEQ ID NO: 3213 - DNA, 234 bp, Glycine max
  unsure (1)..(234): unsure at all n locations; Clone ID: 701041226H1
cgctgcttccgattgaaggcatctaaggagagaaaantgcacgatttctgcancacgatcccctacggattgatgttagtgggtggtggactgttcgcctacataagcaaagggagcatcgcttctctcgccggaggcccggctccggtttgcttctcatcgtcgccggctatctcagtctcaatgctttcggcaaacgaaaaaactcttacctcgctctctttctcgagaccg

SEQ ID NO: 3214 - DNA, 241 bp, Glycine max
  Clone ID: 701041228H1
acatccaggagaaaagctgttgcctctcgaatcagatttctctgaagaaagagatcagttattgtgttgtaatcaactgggctacctccctccatttgagacatcattaatgcaaaattaacagcgccctgaggtctgtccggagaattgtttgcagaaggaagaggtagtcaggtgtgtacccaacctgtttagagtaaatcagaattttgtcaaactccctcctctcagcaaacgcagc

SEQ ID NO: 3215 - DNA, 242 bp, Glycine max
  Clone ID: 701041229H1
gttgggtggccatggattctctactggcgaactatgcctcttcagatgaagaagaagatcaacagccatccccaccaaaaacgacgacgttttcctcccttcctcaacccaaactttctctgtttcaatcccttctcaacccaaatcttctctgtttcaatcccttcctccacccaaacaaccttccaccgaaagctcttccctccctaaccctaaccctaaccctgaccctaaaccccaaa

SEQ ID NO: 3216 - DNA, 242 bp, Glycine max
  unsure (1)..(242): unsure at all n locations; Clone ID: 701041230H1
gcttaagtttgcgataaggatttgagcttcagtggttttttttactatngcaacgaattcttctaatggagcaacaaagcaacctcccatgccatctcccttgcggttttccaagttctttcagtccaatatgagattctggttactggaggagctggatttattggctctcacctagttgacaaattgatggaaaatgaaaaaaatgaggtcattgttgctgacaacttcttcactggatc

SEQ ID NO: 3217 - DNA, 244 bp, Glycine max
  Clone ID: 701041232H1
tccttgatcagatcaggggactaagagctcacactgatgctggtggcataattctactcttccaagatgacaaggtgagtggcttgcagctcctcaaggatgaccagtggatcgatgtcccaccaatgcgtcactcattgtaatcaaccttggtgaccaacttgaggtcataaccaatggcaagtacaagagtgtgatgcaccgagtgattgctcaaaccgatggtaccagaatgtccatagct

SEQ ID NO: 3218 - DNA, 245 bp, Glycine max
  unsure (1)..(245): unsure at all n locations; Clone ID: 701041233H1
ccgcactctcgctcgcagttacagaaaccatgacgacngtggtgcccacctccgaagaagacgctgccctctctgttgtccgattcgcctctgaactcgcctgggccgatgccggtcccgaggttgctgagcctcaattagtagactctgcatggaggctgaagagtttatcgttatgggaaaatggttggaactagcatcattgatgattacctctgctgaattggttttctcaaaggtttctg

SEQ ID NO: 3219 - DNA, 242 bp, Glycine max
  unsure (1)..(242): unsure at all n locations; Clone ID: 701041234H1
ccaaacaaagccctagcatgaaatcatccttcgaagaaaaataattccaatcaatcctagaatccaatccctcccctttgaatttnatgcctcctcgcattcaattccacgctctggtggcatcatcatcatggtcgtggtaataacaacaataacggcnnnnnnnnnnnnnnnnnntgggtgcgaacggggacacgctctgaaggtgccgtttagagtaaacgacgtgctccccgtgctgc

SEQ ID NO: 3220 - DNA, 239 bp, Glycine max
  unsure (1)..(239): unsure at all n locations; Clone ID: 701041235H1
caaggtggtatcgggcatggacaaatttcatattggtatgggcagtgtattcatccttcttcaccccaatggngtttgggtttttccgtggcttgcctgagaatctctttatactggacatcattggacaaatgcttttcttgtagatattgncttgcaattctttgttgctatagagacagtcagacctatcgtatggtctacaagagaacccctattgctctgcggtatctgaaatc

SEQ ID NO: 3221 - DNA, 241 bp, Glycine max
  unsure (1)..(241): unsure at all n locations; Clone ID: 701041236H1
caaggatgcaaaacagtgttaacttaactgaagttgatcttatgcaaccccctcttgggtaccctgtctcatccatcaagcttcatgcacatgaagctaagtttcttgcttctaagaggaattgggagtttggtgtggtgttctcttttatgaccgtctttacggcggtttaagcctatctgatgcaattggattcaaaggttgcagggaaattgaagggccttatgangattaccttgaa

SEQ ID NO: 3222 - DNA, 242 bp, Glycine max
  unsure (1)..(242): unsure at all n locations; Clone ID: 701041237H1
gngagtgatcaatggatcctcacttttancacacctanttccaaacccacatgagggatatgaccatggctgccattactgatcaatggatgcagttctatcaacaacctctaatggatagccatggccatgatatcatgctttggcaccaatttccacagaattaggcttctctgatgcaaccgtgactacgacaactagttctcccacccccaccatgccatcatcagagagcaatagca

SEQ ID NO: 3223 - DNA, 240 bp, Glycine max
  unsure (1)..(240): unsure at all n locations; Clone ID: 701041238H1
tcttatgattttctttgtcgtaaatcgattcttcagcaattattatcatggaaggaaattcgggttcggatcctgcgcgtcctcttctggctaatcgtgacaataactccgccgagaacggtggtcagagaaccggctcagtcgccggatatcggttagcccnccaagagcctntttnangtcnaagnttcccganaaggtccgttctggccttgactccgagtctcccttcgacgttga

SEQ ID NO: 3224 - DNA, 243 bp, Glycine max
  unsure (1)..(243): unsure at all n locations; Clone ID: 701041239H1
cnaacattgcaattggtctgacagangtgaganagcctcaacccgatgatattaacaagctgttccaattgattgctgaggaagagctccgaagaagacagccacgccaataccgagatatgacagaggagtctaaaaggatcttttgttcaagatttttgatgttgataagcaaagatacatttatgcccacgttgcagctttcgaaaaaagtgaaactgaaaagatgcagaatgctcaaca

SEQ ID NO: 3225 - DNA, 240 bp, Glycine max
  Clone ID: 701041240H1
acatagtgtttgtctctgtcaacaccccgacaaaaactcgcggtcttggagccggtaaggccgcggatttaacgtactgggagagtgcagcacgcatgattgctgatgtatccaagagtgacaagattgtggtgagaaatccactgtccctgtgaaaactgctgaggccatagagaaaattttgactcacaatggcaagggaatcaagttccaaatcctttcaaaccctgaattccttgc

SEQ ID NO: 3226 - DNA, 239 bp, Glycine max
  unsure (1)..(239): unsure at all n locations; Clone ID: 701041242H1
ttttattctcttaaatcacagaatctctagtttttgttcaaatttgactttaactttctaaagggtgtttctgtgtgtgtttgtntgttttcatcttccttcatgataattgtttgtgagaaatgggaattcgttttcagcatgtgtgtttagttggcaagaaaacatgagaaaagcaattttgatttttgaattttccgttttagtaatgttaaagggtagtcaatagtcatcacttt

SEQ ID NO: 3227 - DNA, 241 bp, Glycine max
  Clone ID: 701041243H1
ccaaaacacaaacaaaaactcccgttttctctctctgtctttccatggccatctgatcaaacttttcttgattctctctctcagtttttgctattctgagtgatgggtatgccctgccgctgttcccacacctcccacatcactgaaatcatcatcaccagcttcttccgccacaagtcttaaattacaacaatttccctcaattattcatcaaccaaccaccttaatagccttttccaat

SEQ ID NO: 3228 - DNA, 237 bp, Glycine max
  Clone ID: 701041244H1
gacaaagcaacagttttattcagtgtgactcacttcacccagtgaaggccaaaggtgtttgattgtagagtttgtaaagtttgatttgctgatcccattagatggtgtgttgtaattttgtttgtatcatctttgtatatttgctttttggttaacctattgacttcacaaagtttggaaataatgtacactcggctatctgtggtttcggagtgaagaactgagcagaaatatgaa

SEQ ID NO: 3229 - DNA, 229 bp, Glycine max
  Clone ID: 701041245H1
cgcgatgttttgttcctctttggttcttcgtccccttcccaatcttcaacttcagggttcctttaatctcgttattcctcttcactcccaaactccgttcactccaacaacactctgatttagaatggatggaccagctggtcgaggtggtgctggactggacatgtttctgccaaattataaattgggaaaaacacttgggattggatcttttggcaaggtcaaaatt

SEQ ID NO: 3230 - DNA, 238 bp, Glycine max
  unsure (1)..(238): unsure at all n locations; Clone ID: 701041246H1
ctttttctccacgtctaaggggtgccctgagatcactttgagcaanggtgaaggctgtggcagttcttggcagcagcgagggtgtcactggaactattttcttcactcaggagggaaatggtccaaccaccgaactggatctcttgctggtcttaagcctggtctccatggcttccatgtccatgccttgggggacactaccaatggttgcctgtcaactggagcgcatttcaatcct

SEQ ID NO: 3231 - DNA, 239 bp, Glycine max
  unsure (1)..(239): unsure at all n locations; Clone ID: 701041247H1
aactacaccaactaaaaccttctttttcaacttttttnttttnggttngtntnnnnnnnnnnnnnnnnnnnnncaatccttaaggaaaaaagaaactaaagaaaaaaagtgngccatgtcaggcttgnataacccaacttctctccngctagagcngcttctcctcagattaggagcaanccagaagnggacagccagtacctaccagagttgctggcagaanatcagaagcttggacc

SEQ ID NO: 3232 - DNA, 243 bp, Glycine max
  Clone ID: 701041248H1
caagaacaccgccgcgtctgccacggtatcctcctcacctacggcgttgacctcgtccttcaacgacgtcaagaagttcctttccgacacgcagtccgaaatcataatcctggagattagaaccgagttcggccagaggaccctcccgaattcgacaagtacctggaggaacagctgggggagcatctgatccatcaggacgacgccgttttcgggaagaccgtggcggagttgttgccaaag

SEQ ID NO: 3233 - DNA, 241 bp, Glycine max
  Clone ID: 701041249H1
tctgaacggaaaagcaccgtcgcaccttccctgaggcttctcttgtctgtcgcgagtgaccatggtgagggttagtgtgctgaacgatgctctgaagagcatgtacaatgctgagaaaaggggaaagcgccaatcatgattcggccatcctccaaagtcattatcaaattccttttggtgatgcagaagcacggatacattggagagtttgagtatgttgatgaccacagggctggtaaaa

SEQ ID NO: 3234 - DNA, 241 bp, Glycine max
  unsure (1)..(241): unsure at all n locations; Clone ID: 701041250H1
ctctttttttctaccttanattccttctccaacaatggctctcgccgtttccactacttcttcctcttcagcagctgctgcagcttctagctccttcttctctcgtctcggatcttcctccgacgcaaaagctcctcaaatcggttcgtttcggtttccggagaggtcgcttgtttcgtctgttgttgtcaatgtaactcaacgacgctccttggtgaggccactcaacgccgaaccgcaa

SEQ ID NO: 3235 - DNA, 239 bp, Glycine max
  unsure (1)..(239): unsure at all n locations; Clone ID: 701041251H1
cagcttcctggtagccgactgaaggctgctctgagtgccagggatctggagatggagatggaactgctcggtctagaaagccctgcnnnnnnnnnnnnnnnnnnnnnnnnnnnnnnnnnnnnnntgattgagagattgctaggatctcttccccttctttccggagcaaggaattcaataggattggtgatttgaatcctactaaccttgatgacctgttattagcatctgccgaccct

SEQ ID NO: 3236 - DNA, 238 bp, Glycine max
  unsure (1)..(238): unsure at all n locations; Clone ID: 701041252H1
gacagtcagtttctgcctcttattttttccacactctctttctcttcctgtctttcttttcctcactttctctctctactttttttttctcnttatttctagtcttctctgtctatcacagatcttgaactttctggcaagaactcagagcacttacttcttgcagcatcaaaatgggcttctctctgttaccaaaagcaactccttgcattttgttcttggctctgctgttttgtac

SEQ ID NO: 3237 - DNA, 241 bp, Glycine max
  Clone ID: 701041253H1
cgagggtagggctcagctcagccatattctatctctacgccgctaactctctctcactctcgcgctctctctttcacaaccttcactttactctctctgacagctaaaatgcaaggaggatttcaatcattttgtcacacgggaatgtcattagaaatgctgttctacaacgggtgcgcatggtgaaccccctgttacagccaattgtctcttcgcggtttgaatctgttacacctgctcg

SEQ ID NO: 3238 - DNA, 238 bp, Glycine max
  unsure (1)..(238): unsure at all n locations; Clone ID: 701041254H1
cagtcattgcacttaagtgcccatccattgangtcgctgttgttgatatctctaaatcccgcattgcagcctggaacagcgaccagcttcctatctatgaacctggccttgatggtgttgtgaagcaatgcgtggcaagaacctcttcttcagcactgatgttgaaaagcatgtctttgnggctgacatagtgtttgtctctgtcaacaccccaaccaaaactcagggtttggagcgg

SEQ ID NO: 3239 - DNA, 238 bp, Glycine max
  Clone ID: 701041255H1
atggagggtggtgttgtgattgggatgattcgctcatgagttgtttttgtgagtttcattgcaaagctacttttctctgtttggggataaataaaatgggttgcttttcatgtttcgattcgagttccaagaggatcacaatctccgtcctcagcaccaacccaatcaacctctcccttctcagatttccagattgccctctggagcagacaagttacggtccagaagtaatggaggt

SEQ ID NO: 3240 - DNA, 239 bp, Glycine max
  Clone ID: 701041256H1
tctagaccttgtgttattggtgttcatttttccattctcaaaccaaggacaaatcctagagtttctcctttggttgaaagagagggacctgtgagtgtcacaaacatgggagaggagaatgttaaacaaccgtgttggagaggaagtactacaaggactgcccaggttgtaaagtggatcaagccaaagagttgagtgagggaaagggtgtacctgttaaaaatcttttatcatgtgga

SEQ ID NO: 3241 - DNA, 237 bp, Glycine max
  unsure (1)..(237): unsure at all n locations; Clone ID: 701041257H1
attactattttggacaattgtcatcaaactgaagangttggaaagccaaccttggcaaatttcaacccgaaatcgtcgatttcttctaaaatatatacagggcattngtctcctttttgaattgtggttgaggattaaagtactgtnattggtagagatggcatgtaggggatgctgggaatgccttttgaagctttttaacttcatattgaccctcactggtcttgccattgtggg

SEQ ID NO: 3242 - DNA, 236 bp, Glycine max
  Clone ID: 701041258H1
aaagatccagtttgctgatgttggttgtggttttggagggctgctcataagtctttccactctgttcccagaaacattgatgattggaatggaacttagagacaaagtgactgagtacgtcaaggagcgatttcatctttaagggtagcaaatcctggtcaataccaaaatgtttctgtggtgcgaactaactccatgaagtatattcctaattactttgagaaaggaacgctctc

SEQ ID NO: 3243 - DNA, 241 bp, Glycine max
  unsure (1)..(241): unsure at all n locations; Clone ID: 701041259H1
gagagaaagaaacagaatttggaagaaaaaaagcacaagatgggttattggaagtctaaggttcttcccaagatcaagaaggtttttgagaagaatagcaccaagaaagctgctgctgctgaggccaccaagtcctttgatgagtcaaaggaggantacaacaaagccttcgaagaanagaagactgaacttcaaactaaagtagttgaaatatacgaggcttcatcaactgaaatcaaaa

SEQ ID NO: 3244 - DNA, 238 bp, Glycine max
  Clone ID: 701041260H1
ctttcttccggatcacagggaaaataaaaaacaatggagttggacctgacaccaaagacagcagaagtgttgtttgagggagatggtggaggttactacacttggtggagttctaaagtgccactgctggccaagaccaatgttggtgctggtcggttagtgcttcagcctcagggctttgctattcctcattattcagatatatccaaagtaggttatgtgcttcaagggaacgatg

SEQ ID NO: 3245 - DNA, 237 bp, Glycine max
  Clone ID: 701041261H1
ggccctcaaaaagctggttctaataaggagtggaaaccaaagccaacaaatacgattaatcagggttctggaccagctagtgcatctgaggttcttgtttcagttgactcaactgggcagttacaatctgcatctagtgctcttaactctgaagaagctacttcaaaactgcagaggaagctggaggattttcatcttccacagcgtcaacatggcctacttccaaaccatatcatt

SEQ ID NO: 3246 - DNA, 237 bp, Glycine max
  Clone ID: 701041262H1
cgcgtcgtccgatgggaacagaaggttacacttacatggggcgcagtttgaccgaactccgcatcaacgacgattcctcttcctccgccttcagcgactgcaacagtgacagatctggcgaattcgccacgcttcttcgcagacgcggaggtttctgatcgcctgcgccaccgaaaattccgacgacttgattcgccaactcgtttctgatctccactcctcttccatcgactatca

SEQ ID NO: 3247 - DNA, 236 bp, Glycine max
  unsure (1)..(236): unsure at all n locations; Clone ID: 701041263H1
cttgtttacgcaacgcaagcnattgtnagttgtattcgatggactacgatttcagaagcaggtcgggcccacaacctccgatgtaccgtccgccaccgccaccgtcaccgatgtaccgtccatcaccgtacaacagaatcctactccttcttcaggacttggcgttagggttggtataaagccggaatctaggatcacaccgccgcctcatttatcatcattgctggagataatcc

SEQ ID NO: 3248 - DNA, 243 bp, Glycine max
  unsure (1)..(243): unsure at all n locations; Clone ID: 701041264H1
caccttcacccttaacttctccaaaggttctagccaagtcattgctcaatactaccaactaattcgccttggttttgagggatatagaaacgtgatggaaaactgcagagacaacatgttggtgctgaaagaaggactagagaaaacagggagattttcaattgtgtnccaaagacaatggagtgccttggtgggcattcacactgaaagaccacacccactttgatgaattccaaatctctg

SEQ ID NO: 3249 - DNA, 239 bp, Glycine max
  Clone ID: 701041265H1
attgtcctaatatggacattggtaacttcaccattgcttgtgttgggtggtattgctggtaaaaatagcaaaactgagttccaagcacctgtccgcactacaaaatatccccgagagattccacctctgcttggtacaggagtaccattccccagatggcaatggcaggatttcttccttttagtgccatctacatagagctgtactacatttttgccagtgtatggggccacagaatt

SEQ ID NO: 3250 - DNA, 239 bp, Glycine max
  unsure (1)..(239): unsure at all n locations; Clone ID: 701041266H1
gttcaactctaatttagcacacatacatatacaccatgttgtgaaaattgagaccttgcttgggattggaaggtagatgaaagattgtaagttggaaaatcgtaacatggattgtatgatctttcaaaatntgcaaaagttgtacatgtaattaagatgacataggtaaggaaaatatcctctaattcatcaacatccaactaatcttaaataaaaattcgtattcataagtttattac

SEQ ID NO: 3251 - DNA, 238 bp, Glycine max
  Clone ID: 701041267H1
aacgatacagagcagttacgagtgcatattacaggggtgctgtgggggcaatgttggcttatgacatcactaaacgccaaacctttgatcacataccacgttggttagaagaactgcgcaaccacgctgacaagaacatagtcatcattcttacaggcaacaaatgtgatcttgagaaccagcgtgacgtacccactgaggatgcaaaagaatttgctgagaaagaagggttgttttt

SEQ ID NO: 3252 - DNA, 238 bp, Glycine max
  Clone ID: 701041268H1
attatttcaccatcatgtcgaatcaacccattgacccctatcaatacctccaaatcttccgcaaccccgacggcaccttcactcgcctaaacgacgccgttccatgcaccccaccctcttccgaccccatctctccgttctcaccaaagacataaccatcaaccaacaaaacaacacctggctccgtctattcctaccccgaacagcactatcctcaaattccaatcccaagaagcta

SEQ ID NO: 3253 - DNA, 238 bp, Glycine max
  Clone ID: 701041269H1
agccagcgagtgagtgagcgagccaggtagggttttcggtgttcccctctttgtgttcgttcgcgacgatggggtccatccccgatccaggcgagttgagcgagttgactcagccgagcttcgacgagtaccagcgccaaacctctctcatgaccagctgcaccctcctctggaaggagctctccgaccacttctcctccctcgagcaagacctcaaccacaaatccgaagccctcaa

SEQ ID NO: 3254 - DNA, 237 bp, Glycine max
  unsure (1)..(237): unsure at all n locations; Clone ID: 701041270H1
cgtcaaactgttgctgtgggagtcatcaagaacgtggagaagaaggatcctactggagccaaggtcaccaaggctgcccagaagaagaagtgaatcgtgcggtttggttcatcaggggatgtcgtttctatggttacaataaatgttggttncttgcccttgtgtcttcgtttccaaggtagcttgttttccggacatagtttgaagtctccaccatcatctcgcaattttgttccc

SEQ ID NO: 3255 - DNA, 237 bp, Glycine max
  unsure (1)..(237): unsure at all n locations; Clone ID: 701041271H1
gaatcgtgatttagtagtgaaacgcacacactcgcacgtccacttccatattctcaattctctcttctccaaaaatctcataccataagtttctactacttacctttagtagctgcttttgcttacaaaacctannnnnnnnnnnnnnnnnnnnnnnnnnnnnntcaggttgggaatnagtgcctttggtggtcaccatgttccttcttaganggcaaacccagaatcaccatgagt

SEQ ID NO: 3256 - DNA, 238 bp, Glycine max
  unsure (1)..(238): unsure at all n locations; Clone ID: 701041272H1
ataacctctgtcaacacctgtctgtggcgcgcgagagagaaatcggagatgtcatcaaaccctaacgatcctcgtcagccctcggcggcgagaccctacgtggcgccgcagatttcgccgcaggaccttccgatcgactacgccggcttcatcgccgtcatatttggcgtcgccggcgtcatgttcaggtacaaactgngctcttggctggcgctcatattctgcgcgcaatccgtcg

SEQ ID NO: 3257 - DNA, 237 bp, Glycine max
  unsure (1)..(237): unsure at all n locations; Clone ID: 701041273H1
agaagtttcattagtgcttgatcgtatttaagatattaatctttcgcttacattaccaagcgatttaagtnagttttcccaagtaattttnagtttcagttaaatgtaaatatttataatttcatatgnanaaaatgatttcaattgaatatgtgaaactgtgattaggataatttgttttgaactatgaactaaaattaatatatatntntctctganaaaataataaaggggtgg

SEQ ID NO: 3258 - DNA, 236 bp, Glycine max
  Clone ID: 701041274H1
caaagacatacagaacagaacctgagaaacagaccctctcaaaccggaaagcgcaaatgaagcccattccatgcctaagcattcgcatacttctgctaatcgctatctgtctcttcacctcttcctccgttccaagatcggagaaacttgcgggtcagacaacaaatgcgacgctggactcagctgccaaacatgtcctgccaatgggaatacccgaaccagatgttcgcggatac

SEQ ID NO: 3259 - DNA, 235 bp, Glycine max
  Clone ID: 701041275H1
aaagcttcttgtatacttctgagattcttaggatggctcctaggacttctttgtttcaattggaggcagaaagccaacattattgtgaagatcattgggatgctcttaaaaatcagcataatgaagttgattatctggatttattgaagtattgtttctcttctgcatatatgctagcattactgcatgatgttcttgggattgctatggaagagaaaagccaacattattgtga

SEQ ID NO: 3260 - DNA, 235 bp, Glycine max
  unsure (1)..(235): unsure at all n locations; Clone ID: 701041276H1
ccgcggacccattacgacgaagcggcgtcgttttatcccacacagccgcgcacgnttcgaacggaacagagactctccgacctttcctcccaattttcccgagaaaatttcgcttcgagaaaatctagtcaatctctccgcaacactcatatatccacgacacctcacacttatggatcggaggagaaacgcgagtccggtgtacgcccggcagtggagcggcggttccagcagc

SEQ ID NO: 3261 - DNA, 212 bp, Glycine max
  Clone ID: 701041277H1
tgctatcagcgagtgagagtgagtgagtggttctcttgcagcaacaaggtttagtgacaccaaacagactggaaatgggtcgtggggtcagtgctggtggtggacagagttccttggattatctcttggcagtggggtacctgccagcagtgcaaatggtgctcgcactcaaaatgcaagtgctccttcaccaccggttgataagcaaagtc

SEQ ID NO: 3262 - DNA, 234 bp, Glycine max
  unsure (1)..(234): unsure at all n locations; Clone ID: 701041278H1
gcagcagcatgcaatattggtgtggggactatggactgcanaaagttcattgctatatcctgatggtggtgtggaaactttggccaganattattccctactattgtttagcaagagtttgaaagttcgttttctgatgtgagtattcgaggaggtgaacttgttaatcgtgtgagaaactgcctgaagatatttggcgtggaaaganatgatcttgataaatctactgganaa

SEQ ID NO: 3263 - DNA, 210 bp, Glycine max
  unsure (1)..(210): unsure at all n locations; Clone ID: 701041279H1
cctccatggccatctccttcagtcccaaacaccctccttacgatgagatgatatacacagcaatcggagctctgaaggagagggatggttcgagcaagcgagccataggaaagtacatagaacaagtctacaaggaccttccacccactcaccctgctttgttgactcaccatctcaaccgattgnnatcctctgccctcctcgtcctcg

SEQ ID NO: 3264 - DNA, 241 bp, Glycine max
  unsure (1)..(241): unsure at all n locations; Clone ID: 701041281H1
gatctctccatggaacacagcgcatcctngcancaataacagcctctcttcacaacgcagccttcgctttcagtcccttccctcaactcacactctcacctcttcattccttccactacctctcactcgngcccaccactctcaaaccccacacttcctcctccgtatacatctcctgccttaccctcgccggcaacttgctctacactggctcctccgacagagaaatcagatcctggaa

SEQ ID NO: 3265 - DNA, 236 bp, Glycine max
  Clone ID: 701041282H1
cctttacaaagctctagttacagatgccgacaacgtcatcccaaaggctgttgatgccttcaggagtgttgaaaaccttgaggggaacggtggccctggaaccatcaagaagatcactttcgttgaggtggagaaagcaagtttgtgttgcacaaaatagaatcagttgatgaggcaaacttgggatacagctatagcgtagttggtggagttgggttgccagacacagtggagaa

SEQ ID NO: 3266 - DNA, 235 bp, Glycine max
  unsure (1)..(235): unsure at all n locations; Clone ID: 701041283H1
tcanacttgcnacgcaacaaacgtaacgttgctaattgcttgcacttcccatggtcgcttcttttgtttcacattagctgtttttgtntttgtcttagttttacacctttcctcatttccgcagtagcacctgcgaatcaactctctgagaaaaaaaatggcgtcgaacgggaatggcagcgttgcgaacggtaacgggagcgctaggaacggacttncgaagattcagacgcag

SEQ ID NO: 3267 - DNA, 212 bp, Glycine max
  unsure (1)..(212): unsure at all n locations; Clone ID: 701041284H1
tttctgangctcccctcacctctctctccgaaatccccaanctgcctgtgaatgctagaaaccctaggcacgttcgatttgatgctctcccatttgcaatcaagggcgagcgcattcggttcttgcagcaaggctggtactaccgctgcatcggcctcgatccctgaattcatcattctttctcgcaccatctttttctattccgattcgat

SEQ ID NO: 3268 - DNA, 243 bp, Glycine max
  Clone ID: 701041285H1
gatcggtgttcacttgatctcatcataatcgtcagcgtcaattgaagaagatgccgatcagaaacatcgccgtcggaaggcctgaagaggcgactacaccccgacacgttgaaggcggctttggctgagtcatctcaaccttcatcttcgtgttcgccgggcttcaggcttccggcattcgcctacaacaagcttcaccgacaacggcgctggccacccctgccggcctcatctccgcctcca

SEQ ID NO: 3269 - DNA, 234 bp, Glycine max
  Clone ID: 701041286H1
aaccaacaagaggggtattgagattgagattcaagtaatggggaagagcaaggttcttgtggtggggggaactgggtacatagggaggaggatagtgagggcaagcctggcactgggccatgagactatgtggttcagaggccagagttgagcctccagatagagaagctgcagaggctcctctccttcaagaagcaaggtgctcatctcattgaggcctctttcaatgatcac

SEQ ID NO: 3270 - DNA, 234 bp, Glycine max
  unsure (1)..(234): unsure at all n locations; Clone ID: 701041287H1
ttaaataactgtnatggtgctgcaataacgtcatgcgtggcgtttttggaccccctctgccattcaccatctggtatttgccatcacatggagctgtccaccatggagcctgccgtggtgccgcagacccatnttnataagtggcaagaatgggtatgatttcaaatctgtgaggagatggaccagccaaaagaaattgggatatggcctacatgaatgtgataaaatatttgt

SEQ ID NO: 3271 - DNA, 235 bp, Glycine max
  Clone ID: 701041288H1
ctccacagaagatgggagacccctctgtcgaggttactgaagagaatcgtgatgcatcgcagatggccaaaattaaagccatggatgctatttctgaaggtaagttggaggaggcgattgagaacttacagaagctatttcactcaatcctacctctgccataatgtatggaactagagccagtgtttacatcaaaatgaagaaacccatgctgcgatccgtgatgcaaatgctg

SEQ ID NO: 3272 - DNA, 214 bp, Glycine max
  unsure (1)..(214): unsure at all n locations; Clone ID: 701041289H1
tattgcacagagagaaataatacacatatagcagagttagaacctgagcagctatcagaaatntccacaacacagctgagaagttcattttcaaaatggccggtgggtggttcctgtggatgcatcaccgattggaaatggcttcgttggcaagataacgctctcagttatcatcacttgcatcgttgctgcatccagtggactccttttcgga

SEQ ID NO: 3273 - DNA, 231 bp, Glycine max
  unsure (1)..(231): unsure at all n locations; Clone ID: 701041290H1
gttgttgaagtgcccaatgtcagctgggaagatattggtggtcttgaaaatgttaagagggaactccaagagactgttcaatatccagtggaacaccctgaaaaatttgagaagtttggaatgtcccttcgaagggagtcctcttttatggacctcctggttgtggtaaaacgcttttggctaaagctattgccaatgaatgtcaagcaaacttcatagtgtcaaaggtnc

SEQ ID NO: 3274 - DNA, 234 bp, Glycine max
  Clone ID: 701041291H1
atagatgatgctgaggtacagccagtgctaattaatcaggtcatgtcagaaggagcatatatcctattctacatgaggtcctgtccccgtcctccggtagaacatactatgaatgccatgcagcaatctgtttatgattcttcaaagcacaatccaatggaaatgcagaaacctaataaaccaggacatagtaggcatggcagtcgtcagttttttgtcccagagccatcacct

SEQ ID NO: 3275 - DNA, 211 bp, Glycine max
  unsure (1)..(211): unsure at all n locations; Clone ID: 701041292H1
gtctcattgctgctaggaggactgccncgtcttagaggacaacctgctgcaactgctgccaacgctgataaggcttaaagagaacgttgttagggttattatattgattgcaagtttttcagttttgtttttctnnnnnnnnnnnnnnnnnnnnnnaaactatttgggcaccttcttcagaaccatttcttcccaacatatggagttttcc

SEQ ID NO: 3276 - DNA, 234 bp, Glycine max
  unsure (1)..(234): unsure at all n locations; Clone ID: 701041293H1
ctttgattcagtgttctgcaacttccctctccgctgtccccatcactacccgtttcaccaggacccacaagtnctcgccttcgctgctccttagatgctaatgtttccgacatgagcgttaacgcgcaaaagggttgtttcctccggaacctgaacattatcgaggaccaaaactgaaagtggcaattattggagctggacttgcaggcatnccaactgcagtggaactcttgg

SEQ ID NO: 3277 - DNA, 234 bp, Glycine max
  unsure (1)..(234): unsure at all n locations; Clone ID: 701041294H1
cccaaatgattganactggggaagatattgactggggatttgcagaggcgcttgcttatgctaccttgcttattgaaggtaaccatgttcgattaagtggtcaggatgttgaaagaggaacttttagtcaccgccatgctgtagttcacgatcagacaacaggagagaaatattgtcccctggacaatgttataatgaaccaagatgaagagatgtttaccgttagcaatagtt

SEQ ID NO: 3278 - DNA, 257 bp, Glycine max
  Clone ID: 701041301H1
tcggtttcaccgtttatccatcccctcaggtttcgacctcggtcgtggaaccctacaacagcgtcctttcaacgcattctctcctcgaacacaccgatgttgctgtgcttctcgacaacgaggcaatctacgacatttgcaggagatctctgacatcgaacgccctacctacaccaacctgaaccgtctcgtttcccaggtgatatcatccctcactgcctctttgaggtttgatggagcactgaatgttgatgtga

SEQ ID NO: 3279 - DNA, 256 bp, Glycine max
  unsure (1)..(256): unsure at all n locations; Clone ID: 701041302H1
gtgctagttgggctggcttcttcattttgcaatcattcactttgaagaagtacccgggcagagctctcactgacagcttggatttgtgtgatgggtattattgagggttcaatcgncatcccttatatttgaacgagacttcagngtatggccataggctgggactcaagacttcttgcttgtgtttactctggggtgatttgttctggaatggcatactatgtacaaggggttgtaaccagggaacgtggaccag

SEQ ID NO: 3280 - DNA, 256 bp, Glycine max
  unsure (1)..(256): unsure at all n locations; Clone ID: 701041303H1
cgtaatcaacatttcgcagtgtggaggatcgtcttcttcatcccacccacacagagttcnngttccagttaggatatctattttttaatggctaatagaccggatccggatattgatgatgatttttgtgagctttataaggagtacactgccccctggggactgctactacaaacatgcaagagagggcaaaatcaaataagaggtctaatgcagggtctgacaaggaggaggaagcccgggaccctaatgctgt

SEQ ID NO: 3281 - DNA, 244 bp, Glycine max
  Clone ID: 701041304H1
ctcgatcccaattccactagggattcaattccgatgcgattccgagcttgttagatccacgacaacgtttcgtttcccagattcttttgtaaaaaaaaataatcttcctttgcccaacaggtaagttggaaaaaaatggccatgacaagactgggtgccaagctcctcctgaaggtcctatattgtgcatcaacaactgtggattttttggaagtgcagctaccatgaatatgtgttctaaatg

SEQ ID NO: 3282 - DNA, 256 bp, Glycine max
  unsure (1)..(256): unsure at all n locations; Clone ID: 701041305H1
gtggcatgcagatcttcgttaagaccctcaccggcaagactattaccctagaagtcgaaagctnccgacaccatgcgacaacgtcaaggctaagattcaggacaaggagggaatccccccagaccagcagaggctgatcttcgccgggaacagctcgaggacggacgcacccttgctgactacaacatccagaaggagtcaactctccacttggtgttgcgtcttcgtggtggtatgcagattttcgtgaagactc

SEQ ID NO: 3283 - DNA, 252 bp, Glycine max
  unsure (1)..(252): unsure at all n locations; Clone ID: 701041306H1
cagacttctaacgctgatagggggatatcttctttcccacacgcatcaattgntnaaaattggagtgcaggacaaaaacatggaaagaaattttggcaatggcaacttttatcaacatccacctgatttggatgagactgcttcctctgttctgaggacggccctggcattgagaattttcaagtttctggtgatgctattcctggagaaaagcttcttggatgtggatatccagtccgtggaattctcttt

SEQ ID NO: 3284 - DNA, 252 bp, Glycine max
  unsure (1)..(252): unsure at all n locations; Clone ID: 701041308H1
agcaaacataacttggcagtaatggcttcaatgaataaccaaaaagaaattgagctctttgagggccaatctcttctgtacatgcagctatatgggcacctaagacctatgtgtcttaagtgggctgttcaactaggtattccagactaatacagaanccatgccaaacccatttctctttctgacttggtctctactcttcaaattccaccagctaacgctgcttttgtgcagcggttcatgcgcttcttg

SEQ ID NO: 3285 - DNA, 250 bp, Glycine max
  unsure (1)..(250): unsure at all n locations; Clone ID: 701041309H1
ctactaccagtctcccatttcttggttgttacacacaaaaaagcagantctgcagcactcaaacgaaacgacagtgaccaaaacagaaaaacgacattacccagagagcgacgatgccggaagaaacgacgtcgatcgactacgtgtggaggctgcatctgggccccacttctccggcctgagactcgacggccgggtcccgtcctccgccaccgccgcgtcctccactcccgattcaaccctaaccctc

SEQ ID NO: 3286 - DNA, 248 bp, Glycine max
  Clone ID: 701041310H1
caacaatgcctcctttgactttgtggctagtgctgccttttctcgtgttgctagcggcggcaacaacgtctccaacacgcgccacgacggtcgcctcgtcgttccacggtcaacgagagtttgactatttcgctttcgcgttgcatggcccggcacttactgcaaacgcacccgcagttgctgccccaccaacggttgctgcagaggctccaattttccaacagtgttcaccatacatggactctggc

SEQ ID NO: 3287 - DNA, 250 bp, Glycine max
  Clone ID: 701041311H1
gagaattagggtcacgagggtttcatcctgcggcatcagacatgggaggaggcaatgggcaaaaggcaaagatggctcgcgagaagaacatcgagaagcagaaggccgcctcaaagggaagccagctggattcaaacaagaaagaatgtcgatccagtgcaaggtgtgcatgcaaacatttatgtgcaccacattcggaagtgaagtgtagggagcatgctgaagccaaacaccctaaatctgatgttta

SEQ ID NO: 3288 - DNA, 249 bp, Glycine max
  Clone ID: 701041312H1
gaggaactccacggagttcgcgagcaacagtttggcgattgtcacgaagatcctagggttgctgtcgcagttcgcggcgccgattcaccaccggcggctgctaggatttccggagtggctcggggcggcggagcggaggttgcttaggtgaacagcagcgaaacaacgctggacgctgtggtggcgcaggacggtagcggacagttcaggacgatcggtgaggcgctgaaattagtgaagaagaagagc

SEQ ID NO: 3289 - DNA, 251 bp, Glycine max
  unsure (1)..(251): unsure at all n locations; Clone ID: 701041313H1
cttgttctctgattggcctagccagtagtagccaatttgttggngctggttgggaatggcgtcgaaaccgaaatcaaatggnaattccaaatgcaacaaaggattcgctgacagctatatgctgttgaatcctgaagacgctcattcttcgatcttgttcatgtgctgtattcccgtaacttgggaaaccgaaaatttgtggacagcaatgctgagggatcttatgagggaagcttccgccaaagatggct

SEQ ID NO: 3290 - DNA, 253 bp, Glycine max
  Clone ID: 701041314H1
cactgaggcaatttggatcaaattttatcatctttagtttgggttttttgaagcagaagaatggacttctttactagagacataaatgaggattctatgcttagatgcccattcttgaggaacatcaatgagcctactaacttctcatctcttcacctttggctttaccaatgcctgttcgtggagctaaaggtccaatttttgaagatggtcccaattttgatttggcatttaggctttccacgggagtgat

SEQ ID NO: 3291 - DNA, 196 bp, Glycine max
  unsure (1)..(196): unsure at all n locations; Clone ID: 701041315H1
gtcgagctntttcttctcgcgccttggatcttcatcggacgctaaagctccgcaaattggtncctttcggtttccggagaggcctcaagttcgtctggtgttgttaatttaactcaaagacgctcctcggtgaggccactcaatgccgaaccgcaacggaatgattctgttgttcctcttgcagcaactatcgttg

SEQ ID NO: 3292 - DNA, 254 bp, Glycine max
  unsure (1)..(254): unsure at all n locations; Clone ID: 701041317H1
ggcgaaaccaggccttctcctccaggatttcgagaagcctcacacccttccttaacaacccctttctttctttcaattaggacatcatatatattnnnnnnnnnnnnnnnnnnnnncactagtcagtagtagtgactagtgnccaagtgaagtggtgtcaggtgtggttgcttagctttccctgtgtatacttatttagtcctcagcttcactccatctgcagggttgcttggttggttggtgatgcatgcatg

SEQ ID NO: 3293 - DNA, 252 bp, Glycine max
  Clone ID: 701041318H1
ggagatagccagcctagtcaagtgcctcatggaaggtgaacaagggaagaagcttcgttaccgaatcaaggatatcaaggaggctgcggctaaggctctcgctcaacatggttcctccaccaccaacatctccaatttggctctcaaggacccacaaattcaactagtagcttcttcctttcaattatctgcacttaacttatcaaatgtcactttgcatacatgacattaataaaataattgggtaagtgt

SEQ ID NO: 3294 - DNA, 253 bp, Glycine max
  unsure (1)..(253): unsure at all n locations; Clone ID: 701041319H1
tttcanaaccctctctctcgttactcgccatcactagcgagtgcctccttcttcctcttcgcgaaattcgtatgcgaagaaggaggtagggattcgcgctcctgctttctcagactgcctaattatcttttattctgcgaagtaactggagattgaagatgggaggagatgattctggtttggagagtgacaattttgattggnacactgaagatgagcttgaaattcagaactataactcgtcgtcttcatg

SEQ ID NO: 3295 - DNA, 248 bp, Glycine max
  unsure (1)..(248): unsure at all n locations; Clone ID: 701041320H1
aatacattaattatatgagtactcattcatacgtagcatatctgggatttcaaanctcaacaagttgttgctactgacatagcttctgtctcatcctcagtgctgctgctccccttgacaaacgtcgagttcganttcaacggttgggacttgaagaaggcgttgaaagaactgaagcgtagtgaagttctggttgctgttattataggaattgttataagttgaggattcagacattggagggtaat

SEQ ID NO: 3296 - DNA, 250 bp, Glycine max
  unsure (1)..(250): unsure at all n locations; Clone ID: 701041321H1
cgaacggctacttggtagttggagtggtagcttttgctctactttgctcattcagagtttctttgacagattcagttccnntattttcgcctgttcatgacgctgcttctttgactcgcaactctttccctgctggcttcatcttggggctggatcctcagcctaccagttcgaaggagcagcaaaggaaggtggaagaggaccaagcatatgggataccttcacacataaccatccagaaaagataaga

SEQ ID NO: 3297 - DNA, 225 bp, Glycine max
  unsure (1)..(225): unsure at all n locations; Clone ID: 701041322H1
tgaaatganatgagttagcaccaacgctgttttcttctttctttccttcgaatttnttctctgtttctcgcgattgaatttgagggaaccatcctcgattttctctttctgggcacccctgaattgctctgaaagtggttcagtcgaacaacgaaaacgatgtcggcttcgattgatgaagaaggttctgaacgaacagcatcaccttccgcaacacgtgagcgg

SEQ ID NO: 3298 - DNA, 248 bp, Glycine max
  unsure (1)..(248): unsure at all n locations; Clone ID: 701041323H1
ggcattacagaagtctgccttagtgggtttattgcttttgatgttcctcctccaaagggtccattgtggattcttggcgatgttttcatgagggcatatcacaccgtctttgactatggaaatctccaagttggctttgccgaanagtctaattacgctttctggaggattttctttgtaaanttgttaagcgtgttgtaaataagctgttataattgtagctctggttacttttgaaaccacgaatg

SEQ ID NO: 3299 - DNA, 249 bp, Glycine max
  Clone ID: 701041324H1
cacgtcatcaccctcaacctcaacctctccgagcgagaaccagacacaagaaagaaaacgtgttgcgccagtgttacccctttctccttctctttatctttcctgaatttggcgcgtttcgattcttcttcttccgaatcagagaagtctggatttcttgttgaagatgcgacgctcttctgcatccaaaaagacgggtcaatccaattccacccccatcgccgccgatctcttccgctccgcttcaag

SEQ ID NO: 3300 - DNA, 245 bp, Glycine max
  Clone ID: 701041326H1
gtaactttcttgttttttcactcaagtttggagtatggttagcttcctctagtcatgttatgttagctgaagtcgtccactctgttgccgattttgctaaccaggcactacttgcttatggtttatctagctcgaggcgtgcgcagatgctattcatccttatggctattccaaggaaagatttgtttggtcctgatatctgctgttgggatattttgtcttggttctggtgccaccgttgttaa

SEQ ID NO: 3301 - DNA, 246 bp, Glycine max
  Clone ID: 701041327H1
gtggatttcccagtggaaaatacctctttgctggagtggttgatggaaggaacatctgggccaatgaccttgctgcttctctcactacattgcagggtcttgagggcattgtgggcaaagataagcttgttgtgtccacctcccctcccttcttcacactgctgttgatcttgttaacgagaccaagttggatgacgagatcaagtcatggctagcatttgctgcacaaaaaattgttgaagttaa

SEQ ID NO: 3302 - DNA, 250 bp, Glycine max
  Clone ID: 701041328H1
gcaaaacaaaagacgcagtgatggagaggatgaagagggtgcttctgctgcttctggccttcactgttccttctcatgttgccagaagcttctgctacaaagtttactgttggaaacaaccagttttggaaccccaatattaactaactgagtgggctaaaggcaaacatttctaccttggtgactggctctattttgtgtacgataggaaccaagcgagcgtgttggaagtgaacaagacagattatga

SEQ ID NO: 3303 - DNA, 249 bp, Glycine max
  unsure (1)..(249): unsure at all n locations; Clone ID: 701041329H1
gtcattaagctctgaaagagggcaatttatctgattggggaagcaccctggataattctgtaacacccatgtctctgaagtcccctgttcgtgagcatttggttacaagtcagatgactccatctttagatctattcatgtcaagtatgctctgcagtggtgaagaatctgattgaatcaccagagattgcagaatcttcaataccttcagttttcccaacacctatgtcagatccatgacccnctttc

SEQ ID NO: 3304 - DNA, 255 bp, Glycine max
  unsure (1)..(255): unsure at all n locations; Clone ID: 701041330H1
ggcaattatcaccgctgaagaggtattgctgagagatccaacagatgaaaatgtgatccctgttgttgaggaactgcaaaggcggttgcctcaattgagtgccaccggtcttcaacagcaaggagatggtaaagagtatcttggtggcaaaatgatgctgaagccgctgaagaagatgagtcaccctttgaattccgggccctggaggttgctttagaagccatttgtagttttcttgctgcacntacaacagaa

SEQ ID NO: 3305 - DNA, 256 bp, Glycine max
  Clone ID: 701041331H1
tttctctctccttctttctttgtttctgtgtgttcgagattgaagaagatgatgcaggctggacccggcggcatggcccaacaagcgaaccaacaatacgcacagcaacagcaacaaccctacatgatgatgccgccgcagcctcagccctcagatgtgggccacatcggcccagcctccgtcccagtcggtggctctccgcaacccaccagcgccgatgaggtccgtaccctctggatcggtgatttgcagtact

SEQ ID NO: 3306 - DNA, 261 bp, Glycine max
  unsure (1)..(261): unsure at all n locations; Clone ID: 701041332H1
gaaaatcgagaattttccgagaaaatccgaaganggcgggccatggtttccccggaaaacagcaattggctgttcgattacccgctgatcgacgacgttattcccgtcggcgacgcctccttttccgtctccgcctccgccttctcctggccccacctcccgccaatgtcagtgttgaaattgatgcttcgcttggggattctgatggccccaaagatactgctttgaagaaaagggctagatgtgattcaagtactgctt

SEQ ID NO: 3307 - DNA, 259 bp, Glycine max
  unsure (1)..(259): unsure at all n locations; Clone ID: 701041333H1
ttccatgcattgcatgttttgagcaaagtgggccatattatgaccccaaaggattcctaggctccttttaggaatataagctgtcatgatcccccggtgccaattggtttcagcccccgatccacctaagccttgcaaggctgagaatcagattgtccatacttttattggtatggtgatggttcccaacacaactggggatttngcattggaaactttcactgttaatctcaccactcctaatgggattccgagttga

SEQ ID NO: 3308 - DNA, 233 bp, Glycine max
  unsure (1)..(233): unsure at all n locations; Clone ID: 701041334H1
agtaaattattgtacctgacgatcttctcggtttgatcttatatcaatggaatttttttagacagaactcggattcacagggaaatctgattgcataggaacaaaaaagacaacacctttttatctnacacaagtgattatgnccggttgctgagaatgttggggccaaaatcggttcttccagtcaaaatttggaaaacaatgtagtgtcatcgaactcaggcgaggttgag

SEQ ID NO: 3309 - DNA, 252 bp, Glycine max
  unsure (1)..(252): unsure at all n locations; Clone ID: 701041335H1
ttctgctttcactctctgactcaatcgttctaatccacaaaanatgaccttncattacaacattgccctcgccttctctgcggtgctcacnctgctncctctttcccctactgaccgtagggnagctcgtggaggagcagccactatcctcaagtaccacaacggccagctcctgaagggccgcatcaccgtcaatctcatctggtacggcaccttcaccccgatccaacggtccataatcgtggacttcat

SEQ ID NO: 3310 - DNA, 168 bp, Glycine max
  unsure (1)..(168): unsure at all n locations; Clone ID: 701041336H1
atcccaattaagtaataacaccatgcaatcatgcaaaatctccttattgtattacccctataacaactatgtattcaaaataaggggttttaagtgtatgctaaggaaataattaataaaatatttgaataaaattcagaaaagattgcccaaaaannaaaaaanaaa

SEQ ID NO: 3311 - DNA, 247 bp, Glycine max
  unsure (1)..(247): unsure at all n locations; Clone ID: 701041337H1
agatcatgagacctggaatgttcagttgtttagatccattgatggtggggctgcttttgggttcccggagactcctgncagatgctgccagagctggtcttattagtgggaaggataatatcattgatcgtagcattcaagatntatattaatgctattcgacgtgcaaagaacttcatctatattgaaaatcagtatttcctggaagctcttttgcctggagtgctgatgatattaagcctgaaga

SEQ ID NO: 3312 - DNA, 250 bp, Glycine max
  Clone ID: 701041338H1
cttctccttttgattccatcatcttcgatttggacgacaccttgtacccgtcaagcaccggtattgacaagtgcgtcaagaaaaacatccaactctttctcatccagaaatgcggattctcagaatccgaagccttcaccctccggttgatctcttcaaaacctacggaagcacccttgccggtttaagagcactaggccatgatatcaccgcagaggagtaccatggtttcgtgcacggaaggctacct

SEQ ID NO: 3313 - DNA, 220 bp, Glycine max
  Clone ID: 701041340H1
ggtgtgctcatgtgcgctctggataattggtgagtattgcctgtcactttcggaggttgagagtggcattgcaaccattaagcagtgtctggtgacctcccgttttatactgttactaggaaggagacggtcaggaggcatcgaaacccatacagcaggtgaacttcaaccactgtgtcttctaggaggcctgctattctgcagatgggacctatgccac

SEQ ID NO: 3314 - DNA, 245 bp, Glycine max
  Clone ID: 701041341H1
atggcttcttttcatatccaatattcattccttgtgcttgtgcttgctatggtgatcacattgatgaaccctaccaatgcaaccctctctccccatttctatgataaagtttgccctcaggcattgccagttataaagtcagggttcaacgagcaattatccgtgagcgacgcatcggagcatctcttctgcgcttgcatttccatgattgtttcgtaaatgggtgtgatggatcaatattgcta

SEQ ID NO: 3315 - DNA, 248 bp, Glycine max
  unsure (1)..(248): unsure at all n locations; Clone ID: 701041342H1
atgggatagaggaactgtggagggaagtgagggatttgagtttgggaaacggcggaagagtagagagactagagtctccaccaaccccagttcanttcctgagagacttcatcacaccaaacaagccatgcataatctccaagccattacgcactggcccgcactctcttcctggaccaacccttcccacctctcccaattccctctccggcgccaccgtctnccgtccacctcacccccaccggcgc

SEQ ID NO: 3316 - DNA, 246 bp, Glycine max
  Clone ID: 701041343H1
caattattcctcaattatttcccacttttcttctctctcaagcaaaagttttcttctctcatttctcagcgttctgaatcgaaactaatggcttcagagacagaggtgttaaatattatttcctctgttttcgaacgcttcggagaaacatgtctctgtttctgcccttcatcttcggcttctctgacgccacctcaggacgagatagcgacgacccagatcacgaaactgctcacacagaaggtt

SEQ ID NO: 3317 - DNA, 249 bp, Glycine max
  unsure (1)..(249): unsure at all n locations; Clone ID: 701041345H1
atttcttataacaactctcatattaagccactgttgaatgaaaaccttgggaatatgagaaggccttgcaaacattctaagaagaaacatgatctctttgaatgtctccctgacgatctccttgtccttattctttctaagctcgctccaccgcttcttctcctnctgatttcatcaacatcatcttaacatgcaagaggttaaaccggttaggcctgcaccgtcttgtgttatccaaagctgcctcta

SEQ ID NO: 3318 - DNA, 253 bp, Glycine max
  unsure (1)..(253): unsure at all n locations; Clone ID: 701041346H1
caaagcganaaccctaaccctaacggagagatggcggagcacttggcatcgatattcgggacggagaaggacagggtgaactgtccgttctacttcaagatcggcgcgtgcaggcacggcgaccggtgctcccggcttcacacgaagccacaattagcccaacgttggttctgtcgaacatgtaccagaggcccgacatgaacatgaacatcatcaccaaccccgatcagccccagccccaatctctcgaccc

SEQ ID NO: 3319 - DNA, 113 bp, Glycine max
  unsure (1)..(113): unsure at all n locations; Clone ID: 701041347H1
ggctgccaagcttcccctgaccattagccagcatgctagaaaacaactgtttagacaaggaagcccctggcaagacaacaagatgagcatcatctcctcccttccacaanatg

SEQ ID NO: 3320 - DNA, 258 bp, Glycine max
  unsure (1)..(258): unsure at all n locations; Clone ID: 701041348H1
aagaaatagagggttttgntgtttggtgtttgaatcgtgaaaatgttcagaaaccagtatgacacggacgtgacgacatggagcccggcggggaggctgttccaggtggagtacgcgatggaggcggtgaagcagggcttcggctgcgatgggctccgatccaagacccacgtggtcctcgcatgcgtcaacaaggctaactccgaactttcatcgcaccagaagaagatcttcaaggtcgacaaccacatcggcgtc

SEQ ID NO: 3321 - DNA, 250 bp, Glycine max
  Clone ID: 701041350H1
gtggtgagataagtttcataagccaaccgcaggttgggaagcacattttcatttactgcagattttggaacaattaagaaaaatgcaataactgacatgaagaaacataatttggaagatctgccttccaattttagagggctaagccatagtggttgatggaaaacctgttagagcagcagtgactagataccatctgaagagactagggatacaggctaaagttgcaaatagcttcaataaggctgtt

SEQ ID NO: 3322 - DNA, 247 bp, Glycine max
  unsure (1)..(247): unsure at all n locations; Clone ID: 701041351H1
tccctcttgatttgaaggttgttttgtgcttatagataaaagttctgccaaatcaagaggggttttcagatcatannnnnnnnnnnnnnnnnaaacaatggctaagttcttngctgctatgatcttggcactcattgccattccatgcttcaaacagtggttatggctgctaatgagcaaggaggccacttgtatgacaacaagagcaaatatggaagtgggagtgtcaagagataccaatgcccat

SEQ ID NO: 3323 - DNA, 248 bp, Glycine max
  Clone ID: 701041354H1
gaaagaagcaagcttgttcaactgtgctggttccgaccagagtggcacaggccctaaatctgaatcttgatgacatgatggctggccagccgcaacacttacaacgatttaatgctagttccaacatggaaaatggtgcagcttttccaggcagaggagtaattatgtcctttctcaacaacagaagcgcaacctcaaatctcagccagcagtgtaccatgagattaggctgccacaggagtggacat

SEQ ID NO: 3324 - DNA, 247 bp, Glycine max
  Clone ID: 701041355H1
agagagactctctctctagaaaccctattgcacgttttgcaatcgaactcgacaatggccaacagcaacctccctcgaagaatcatcaaggaaacgcagcgtttgctcagtgagccagcaccaggaattagtgcctccccttcgaagagaatatgcgatatttcaatgtgatgatccttgggccaacccagtcgccttatgaaggaggagttttcaagttagaactatttttgccagaagaatatcc

SEQ ID NO: 3325 - DNA, 248 bp, Glycine max
  Clone ID: 701041356H1
ctcagctaggggagaagaaagatggaagatccagaggttattattgggagcttgaatccaaatgataccaggggaaagaccgttacttgcaaagctgccgtggcatatggtcctggagagccctttgtggtggaacgtgttctgttcatcctcctcagaaaatggaggttcgaatcaagatcctcttcacttcaatctggccacaccgatctcagtgcttggcaaggcgagaatgagggctcaacgtg

SEQ ID NO: 3326 - DNA, 244 bp, Glycine max
  unsure (1)..(244): unsure at all n locations; Clone ID: 701041357H1
ctcaattggttcaattggtctctgatttcgccttcttcaacatccgaagaggaaggggagaaattcgcgacttcggcgacgtcgtttcgggcgataatggggtctccgttgatgcttgagcctctgcaattgtncgcctatcagactcgcgagnaaatgcaacccattaagagaagaagaagaatggaggcaacaacgctgatgctaaaattggcatcaaggagttggagtagagagagagaga

SEQ ID NO: 3327 - DNA, 244 bp, Glycine max
  Clone ID: 701041358H1
gcttcttctagatttaaggaagatgggtaaggaaaaggttcacatcagtattgtggtcattggccatgtcgactcctgggaaatccactaccactggtcacctgatttacaagcttggaggcattgacaagcgtgttattggaggtttgagaaggaagctgctgagatgaacaagaggtcttcaagtatgcctgggtgctggacaaacttaaggctgagcgtgaaagaggaatcaccattgata

SEQ ID NO: 3328 - DNA, 226 bp, Glycine max
  unsure (1)..(226): unsure at all n locations; Clone ID: 701041359H1
ggcctgcagttgttgttctcagtcacaagatcaccgtcgagntcttccccattgcaatcaaancacaaaaatggaggtgactgttttcactcctgcactggaaggaattaagcttgtaaaatcgagcaaggagaaattttgacccagcctttcttggatgcttgcaagcatatacttcctgttatagataagtttggagctgctatggccctgttaaatctgacat

SEQ ID NO: 3329 - DNA, 244 bp, Glycine max
  unsure (1)..(244): unsure at all n locations; Clone ID: 701041360H1
aggggccctgatgatctggacactcgtcttctccgtgccatgataaccaagggtctgattgagcccatatctagtntttttgtgaacttggttaatgctgatttcactgccaagcaaagagggatcaggataactgaggaaaggttattcttgatggttcacctgagaatccactggaattcgttcaggtgcagattgctaatgtggaatctcgatttgctagtgccatatcagattctgggga

SEQ ID NO: 3330 - DNA, 252 bp, Glycine max
  unsure (1)..(252): unsure at all n locations; Clone ID: 701041362H1
attttctcactctctctttatcttcaccttttcagtttaaagcttcagatcacaaccgatccaccattcaccactttctcttcacaaggcaaatctaacaaganaagtagtctctgaagtcgatccagtgccttgtgaatttggaatggtggtgaatttagatctaaaagccatagcaatgtcttttatcggtacccagcaaaagtgcaaggcttgtgagaaaacggtttatcccgttgatcagctttctgc

SEQ ID NO: 3331 - DNA, 252 bp, Glycine max
  unsure (1)..(252): unsure at all n locations; Clone ID: 701041363H1
tttttgcataggagtgatccaaagagaatggcagataccttaaaaacgacaganaatgaagaatcatgcacaacttataatatgttgaaggtttcgcgccacctgtttaaatggaccaaagaagtctcttatgcagactattacgacgtgccttgaccaatggtgtgctcagcattcaaagaggaaccgatcctggagtgatgatttatatgcttccactaggtctggggtntccaaggctaaaacttacca

SEQ ID NO: 3332 - DNA, 258 bp, Glycine max
  Clone ID: 701041364H1
gttaggtcttcccttcccactgttgccctgacaccgccttgctaatcccatcctccctctttctctctctacattttaataggaatcaatttccaaccatgacggactacaaacaagaacaggatatggagattgaagcattagaagcttactcatggatgagttcaaagaaatacactctggtgaaagtggcctaagtacttccaatcggtgcttccaaataaaggttgttgcgcaggatgacgatgaagatgggcc

SEQ ID NO: 3333 - DNA, 250 bp, Glycine max
  unsure (1)..(250): unsure at all n locations; Clone ID: 701041366H1
cttttctcttcaaataatntcattctttcagcttcttattactttgtatctctgtgtatatttgaagatgaagaatatgnatatgacaactaaacaccattgcattgataattgccattgcattttctgtgtggtcttcaagctcacagcagcaacgtgtcagccactggaggaaactgaaagctggcgcatctgctacttctntaatgtgttagactatggtgctaaaggtgatggacatgcagatgat

SEQ ID NO: 3334 - DNA, 247 bp, Glycine max
  unsure (1)..(247): unsure at all n locations; Clone ID: 701041368H1
cagctttcaatggaaaatataaggnaacttattactgaagctgatgggtatcagcctcatcttatagctccagaacaaggatatcgtcgtctaattgaatcttctctaataactattaggggccctgctgaggcagctgttgtgcggttcactcgctgttaaaggacttggttcacaaagctatcagtgagactttggacttgaagcagtatcctggtctccgggttgaggttggggctgctgctgt

SEQ ID NO: 3335 - DNA, 235 bp, Glycine max
  Clone ID: 701041370H1
gttaaacgttacatggtgggcgtattcattccctttaaccttccttggactagcttgtgctgaatatgctcaagaggtggaaagtggcatggcctcttggttaatgctggttatatgtatggtctccgtgcgtttttattgctttgatgatcatcactgtactcaaaattgagaggctgttccataaaaatgctccgattatgacttgaaaatgaaatgtcattcaactcaaaat

SEQ ID NO: 3336 - DNA, 246 bp, Glycine max
  unsure (1)..(246): unsure at all n locations; Clone ID: 701041371H1
aacacaacaagggtgttgtttagtattattattcattgtctgttgtcatgagcttccacaagctcataatgtncgaatgtgccactactcttggtggtggtggtgtttgcatgctcactgattggtcatgcttcagcttcttgtcctatgaccataaggctatcaccatcaatggattnagaaggatactcctttctggctccattcactatcccagaagcacccctgagatgtggccagatctta

SEQ ID NO: 3337 - DNA, 224 bp, Glycine max
  unsure (1)..(224): unsure at all n locations; Clone ID: 701041372H1
ccaacaatcctatcgcacatctttaccagttctacgatggacgttttggggtgccgaggtacaggttggagagtctgttaaggtagacccagccgaatttnaggcatgcatacacctttccaggctgctcttggtgaggcaaaganagataagcctganccggtggttctctacatgaaagttggtgaacagaaatttgtcttgggaaccctttccagggagaa

SEQ ID NO: 3338 - DNA, 223 bp, Glycine max
  Clone ID: 701041373H1
gaaaagaaaatcctcaattttctacgcagccaaacacttcactctctgtctctcgaaaattctcagtttgcagagaaaatctgaatcatgtcgtggcaagcgtatgtcgacgatcacctctgtgtgacatcgaaggtaaccacctcactcacgctgctatcatcggccaagacggcagcgtttgggctcagagtaccgacttccctcagttcaaacctgagga

SEQ ID NO: 3339 - DNA, 244 bp, Glycine max
  Clone ID: 701041375H1
cttagcttttccccctttaaaataacaatcatgaaaacatttctcaagacttatagctagtagcaccaacagttccataaccctctctctagcttccttcactcacttaattgtgacaatcccaattcaattcccatcagatgatgaactttcaagcatgttcaaacaccatctcaaacttgttctatgtttgttttgtccttttaccaaccatggccttaggagattgcacttgtgacacaat

SEQ ID NO: 3340 - DNA, 244 bp, Glycine max
  Clone ID: 701041376H1
caacatttcaagcatttgatttgcaaattgcaaatccctccaccttttcaaaatcttttgtgatcttttccaatggccaccttcatcttaaggtctaacaaagcagtgcatgcctttggttggctttgtctgctactgatgttcataagggtgcttcctatgattttgttgttggtggccaaaagggttggagtgttccaaatgaccccagtttcaatcccttcaatcaatgggcagaaaaaag

SEQ ID NO: 3341 - DNA, 246 bp, Glycine max
  Clone ID: 701041377H1
ctcatttcaacttaacccatcaaaaccatcgctctctattttcgtcctttctacctttctccgatcccaatccctaatctttctctcttcaaactctaattttttcatctggggagatcggctgacgaatcgagaggatctatcgctcgcgagggattagggtttcaatcgatcgcatcacatatcacaatcatgtttagccggatgttcggtaaacctaaacaggaaaccaatgctgttgccact

SEQ ID NO: 3342 - DNA, 252 bp, Glycine max
  Clone ID: 701041378H1
cacagattcatggcttaaaaaaaaataatcacagattcatagtgatctcagctcctaaaaaacagattcatagtgatctcattctcaagtgtattgaattttgcaatagagaatcatcaaataaacagccacctgtaccaatgtcatgacgtgtctgaaaacaagacacgcacctctccatatctttgtcaccttactctatatagagccaccttagcatactggcataatcacagttttcattcaaaattc

SEQ ID NO: 3343 - DNA, 258 bp, Glycine max
  Clone ID: 701041380H1
gggaacattgtaatcgtaagctccgaagcttcatgatattccaacaaccttcaaagacagagaagaaagaagaaaacaacctcaacaaacaaacatcaatggcaaacacgtattcgtggctcttcctcgcgatttgtgccaccctcttgttcttctgtcttcgtcgccgacagcggacgcggggagcgctgggcatggaaatgacatggataccctccatgcccatggaagaggagttccagctggacagcgagatca

SEQ ID NO: 3344 - DNA, 108 bp, Glycine max
  unsure (1)..(108): unsure at all n locations; Clone ID: 701041381H1
gcgttcggcaccagcgaaacgctcttcgttatctttttctacgacttccgcggngtagatcncgaggagttcgggaaaccctaactcancttccttcacaagcagaac

SEQ ID NO: 3345 - DNA, 247 bp, Glycine max
  unsure (1)..(247): unsure at all n locations; Clone ID: 701041383H1
ccggaacataaggcgggcaagagagtttgtntcttctctcttcaatggaaggcggcgaacaggttctccttnnnnnnnnnnnnnnnnnnnnnnnnnnntatacccaacgtctctcctcctccgctcgctgatcctgtcggtcttccgatctcgctgctgctgcctcggacgacgttgttgcggaacctgaaattcacgcgctganttcagacgaagagcacgatcacgatcacgatcacgatcacga

SEQ ID NO: 3346 - DNA, 245 bp, Glycine max
  unsure (1)..(245): unsure at all n locations; Clone ID: 701041384H1
caggaatcaccgacatggagattcacttcatccatgtgaaattctattcnatcggggtttatttggagccagaagtagtaggccacttggaccagttcaaagganaatctgcaaangagctggaagataatgaagagttctcaatgctctcatttctgccccggtggagaagtttattagacttgtggtgatcaaagagatcaagggtgcacagtatggggttcagattgagactgcggtgaggg

SEQ ID NO: 3347 - DNA, 245 bp, Glycine max
  Clone ID: 701041385H1
gctagttattttttctgcagctaactaccaagcaaacacacagttagctctcgctccctggctgatggatggcggtgatcctaccaaactactcaaagtccatctagtcacctgcaccgactcggccgagttcgcgctccgagctcggcgctgactcggacctcggtggtgggcctggacgcggagtggaagcccgtccgaagattgttcccgagggtggcggtgctccaaatcgcgtgcggcga

SEQ ID NO: 3348 - DNA, 245 bp, Glycine max
  unsure (1)..(245): unsure at all n locations; Clone ID: 701041386H1
gagcagttgaaggtagatgtgcacaacactaaaatgatgaaggaaaacgtgacctctgacgatctaaataataagagtcttggggagctgaagaggatgctgaggcagttaacgctaaatgaaaaaccaaaatccaagacaatgatgtcaaggatgtggagaagaaaaggantgnnangcaggtattgccacagaatcagattgatggctgaatgaatagttatggaataaacttggaaatttgg

SEQ ID NO: 3349 - DNA, 218 bp, Glycine max
  Clone ID: 701041387H1
aaactcactatataagattcccttctcggcccattcttcttcttctgctacaccattcattcgagcattcggttttgaatcttttgagcgaaaatgcagttcgagtcctttgctctggaggaacccataaggatggcctccatcctcgagccatccaagcctagtttctttccagcgatgacaaagattgttggcacacttggcccaaagtcacgatc

SEQ ID NO: 3350 - DNA, 241 bp, Glycine max
  unsure (1)..(241): unsure at all n locations; Clone ID: 701041388H1
cccaatgcaaggccaaggcttcccatttagtggtcaccagcatcctacttttggtggccctggaatgcaattacaagctcctgatgttggtggtggaagaaatcatccagaagcacttcagaggctttttgagatggagtgaggtcaaaaaacccaaagccaatccatgcttcaggtcacagccaggggatgtatggtcaagagctagacttgggttttgggtatagatagtgtnttgtca

SEQ ID NO: 3351 - DNA, 242 bp, Glycine max
  Clone ID: 701041389H1
gtcgttttgatccctcccccaaacgaaacgcaccctctcctctttcggaaccttcgccgcccttctccggccaaattccccgcggtttctcgaacttccgacgccatctccggccacctcagagagtgaagaaggtcgtgacgatgagcaacgtgttcgagggatacgaacgccaatactgtgagctctcggcgaatctagcgaaaaagtgcactgctgctggtgttcttaatggagagcaa

SEQ ID NO: 3352 - DNA, 242 bp, Glycine max
  unsure (1)..(242): unsure at all n locations; Clone ID: 701041391H1
agccaattcagggtgattggaatggtgctggtgctcacacaaactacagcactaagtccatgagaaatgatggtggctatgaagtgatcaaaaccgccattgagaagttggggaagagacacaaggagcacattgctnttatggagaaggcaacgagcgtcgtttgacagggcgccacgaaaccgctgacatcaacaccttcttatggggagttgcaaaccgtggagcttcagttagggttg

SEQ ID NO: 3353 - DNA, 227 bp, Glycine max
  unsure (1)..(227): unsure at all n locations; Clone ID: 701041392H1
gggtgagctaaagtcaattttccancctntcctttccactaagtcacataatctccgctagnggacatggncagactcttcgccttgcacgacgtcgacgtcancatcatcacnaccgcaatancgccaccgttttcnaaaagtccatcgatttagatgcgagtcgcggtcgccccatcagaacgcacgttgncaacttccccgncngnacaagtgggtctccccgt

SEQ ID NO: 3354 - DNA, 247 bp, Glycine max
  unsure (1)..(247): unsure at all n locations; Clone ID: 701041393H1
ctagaatggaatttcgatgctcagtcatctcttttaccattctcttctctcttgctcttgcaggagagagccatgtccatgcatcgctacctgaggaagattattgggaagctgtttggccaaacactcccattcccactgactgcgagagcttctaaagcctctccctgcaggtgttgaaatcgatgaactccctaagcaaattgatgatacacagtacccaaaaacattcttctnnnncnccncc

SEQ ID NO: 3355 - DNA, 249 bp, Glycine max
  Clone ID: 701041394H1
gaaaaatggggtgtttccatctcacagtgactagtctgtgctttgtagtggttgtggttggagtgcttccactctccttagatgcacaactagatccctcgttttacagagacacgtgtcccaaggttcactccattgttcggaagtggtgaggaacgtttccaagaaagatccccgcatgcttgccagtctcattagacttcactttcatgactgttttgttcaaggatgtgacgcatcagttttgtt

SEQ ID NO: 3356 - DNA, 251 bp, Glycine max
  Clone ID: 701041395H1
ggccaacaatgcttacattttcccgggctttggtctggggttggtaatctcaggagcaatcagagtgcatgatgatatgcttctagcagcttcggaagccttggctaaactagtgtccaacgagaactacgaaaagggcttgattatccaccattctctaacatcagagaaatttcagctaacatagcagcaagtgtagctggcaaggcatatgagctaggcttggctactcgtctccctcgtcctcagaa

SEQ ID NO: 3357 - DNA, 252 bp, Glycine max
  unsure (1)..(252): unsure at all n locations; Clone ID: 701041396H1
cttcctttcacctcctcagcagtcgtcagaaagactccataacccanaaatgcctttcaagaggtacgttgagattggaagggttgctcagatcaactatggcaaagagtacgggcggctcgtgatcattgtcgatgtcattgaccaaatagggctcttgttgatgctcccgacatggtgaggtcccaagtgaacttcaagaggctctcgctcactgacatcagattgatattaagaggatcccagaagaag

SEQ ID NO: 3358 - DNA, 258 bp, Glycine max
  unsure (1)..(258): unsure at all n locations; Clone ID: 701041401H1
gcgatctagaacatgacctganttctgggctgcctctgaggcttggctgcacaagtgagccaagagaactttnctaagggactcatatacccaccattcaccaacatcagaaagatttcagcacacatagctgccaatgttgctgctaaggcttatgaacttggcttggccactcgccttcctcaacctaaagatttagtgaagtttgcagagagctgtatgtataccccagcctacagaagctaccgatgaaaagtg

SEQ ID NO: 3359 - DNA, 275 bp, Glycine max
  Clone ID: 701041402H1
gcaaaaaaagctccaccaatggcgggttacagagccgacgacgactacgactacctcttcaaggtggtcctgatcggcgattccggcgtgggcaagtccaacctcctctctcgcttcaccaagaacgagttcaacttggagtccaagtccaccattggcgtcgagttcgccacccgcaccttgaacgtcgattccaaagtcatcaaggcccagatctgggacaccgcaggccaagaaaggtatcgtgccatcaccagtgcatactatcgtggggc

SEQ ID NO: 3360 - DNA, 275 bp, Glycine max
  Clone ID: 701041403H1
caaagtcctaccactactctacactttcttataagttataacaatcaacccacttctcagattacgctctgttgaatgaaaagctaaggaatatgagaaggccatggaagcattctaagaacaaacatgatctctttgaatgtcttccgacgatctcgttgttcttattctttccaagctcagcgccaccgcttcatctccttccgatttcatcaacatcatcttaacatgcaagaggctaaaccgctcaggcctgcaccgtcttgtgttgtcta

SEQ ID NO: 3361 - DNA, 266 bp, Glycine max
  unsure (1)..(266): unsure at all n locations; Clone ID: 701041404H1
ttactttcattattggtggagatcaattatcagtgcatgtttgcgtgtcttcntgtggaagattatattatgcgatgattacgaaattaaggtaaaaaagcgtantagctgcaacgataataagagtgctataagacaggaggaggtgaagactttcggttgtgtgtcattctttttcctcttggcgtggcatanngctgtcagatgcaaagccaagagcattatgacactgcaaaaattatttgcaagattatggtctatggatt

SEQ ID NO: 3362 - DNA, 243 bp, Glycine max
  unsure (1)..(243): unsure at all n locations; Clone ID: 701041405H1
cagcgccctaganctnctcntctttgcttcggaagaaagagaaaaacaaataacaatggcgttcgcttctttcctcggcagagttctcttcgcttccgtcttcatactctctgcttaccaagaatttaacgaatttggagttgatgggggacctgcagcaaaagcactcagacctaagtttgatgcctttacacatcgagtgcattctcaagttggctttcaacttcctgagattgatctgaa

SEQ ID NO: 3363 - DNA, 273 bp, Glycine max
  unsure (1)..(273): unsure at all n locations; Clone ID: 701041406H1
cacactcacttcatttcttctttagtactactcactctctcaagctctctgtctgcnacaacacaaaacgacatcactctgattgtctcattaacgtcgtcaaaancgctgcaaacccgtcccggcggctccggtggccgcacggtgctggtgggggtgaagatggactcccccagcaaggaattgctcacatgggctttggtcaaagttgcacaccctggtgataccgtggttgctctgcatgttcttgggaacaatgaaaccgtgaatgga

SEQ ID NO: 3364 - DNA, 277 bp, Glycine max
  unsure (1)..(277): unsure at all n locations; Clone ID: 701041407H1
caacctcctcttcagagcttcagnaatggcggcgaagaagcaggacgccggggacaccaaaaagagaaagcgactcaatactgaagctcccaaggcttcgaagctcgttgcctcaaagaagcacaaaccagactccgttgctaaagaaacaagaacaagaagacggcccctcttaccggccggcgnnacgtcgtcttcatgccaaggaactagcagatgctagaaaaaagaagagaaagcgacatttcactcttgagcaagagcttgcacgtctgtg

SEQ ID NO: 3365 - DNA, 273 bp, Glycine max
  Clone ID: 701041408H1
gaaaattttcatgtaaatgtaaatggggtaagataccaatttcaatgcttgctgtcatgtagcacaggaataggtcaaataattgaagtctcaacacaaatgtaggttattggtgttgtttattttaagttttccttttttttaagaacacccaactagatattgattttcatgatcataaattttcgtagcttgaaggataggaataatttccggtagttgtttattaattttggattatttagcaatccacttttcatttcaattcaaaaa

SEQ ID NO: 3366 - DNA, 272 bp, Glycine max
  Clone ID: 701041409H1
gaagacattgaccttgccgtcaaagcgtctcgtctggctttcgaccatggtccatggcctcgtatgcctgccgtagaaagagcaagaattatgatgaaatgggctgacctaattgaccaacacgtagaagaaattgcagcactggatgccattgatgctggaaagttgtaccatatgcttaaggctattgaaattcctgcaacagcaaatactatacgttattatgctggtgctgctgataaaattcatggagaggtattaaagccggcacg

SEQ ID NO: 3367 - DNA, 269 bp, Glycine max
  Clone ID: 701041410H1
atttctatattttggtgctctgtgtctctacgatctggatccaacggtccaaaatgttcggggcttgtgctgcttgttttcccaggttttagagctccaaaccttcatccacctcattcgtctccagatcttccttcctagataacgttttcgggttcgagaaggcacttgtttgtttgtcgtacgaaatggagactaaacagagttcggtgatggttacgctcagttacggcgcgttgacgtgcgccgcggaagttctcgcgactttg

SEQ ID NO: 3368 - DNA, 268 bp, Glycine max
  unsure (1)..(268): unsure at all n locations; Clone ID: 701041412H1
tccacgaggagatggccgtcgatctcatcgaggccaagcccggcaacaaaatcctggacgtgggctgcggcgtgggcnggcccatgcgggccatcgcngcccactcccgcgcgaacgtggtgggcatcaccatcaacgagtaacaggtcaatcgagcaaggatgcacaacaaganggctgggttggactctctctgcgaggtcgtgtgtgggaatttccttaagatgccgtttgtcgacaacagcttcgacggagcgtactccatcga

SEQ ID NO: 3369 - DNA, 271 bp, Glycine max
  unsure (1)..(271): unsure at all n locations; Clone ID: 701041413H1
gtgggaagaatggattcggatcaaggcaagcttttcatcggtgggatttcatgggatacgacggaggacaagctcaaggagcatttcggtaactacggcgacgttttgagcacttccgtcatgcgggagaagaacactgggaagccaaggggctttggtttcgtcgtttttgcggatcctaacattctagatagggttttggaagacaaacatgtcatagacggcagaacggttgatgccaaanaggccttctcaagagaggatcaacaaa

SEQ ID NO: 3370 - DNA, 273 bp, Glycine max
  unsure (1)..(273): unsure at all n locations; Clone ID: 701041414H1
tcgatttgtaccaaattttcttcacaaaatgtctggtcgtgggaaaggtggcaagggtttggganagggaggtgccaagaggcacagaaaagttcttcgtgataacattcaaggtatcacgaaacctgcgattcgtaggttagcgagaagaggtggcgttaagaggatcagtggtttgatctatgaggaaaccagaggagttctgaagattttcttggagaacgtgattcgagatgctgtgacctacaccgagcacgctaggaggaagccggt

SEQ ID NO: 3371 - DNA, 93 bp, Glycine max
  unsure (1)..(93): unsure at all n locations; Clone ID: 701041415H1
ctgccaaggnataattggacaacacactacaagttgtttntagatttcctagtgcaaagggagnaaaattcctcattgttccattggcgtgaa

SEQ ID NO: 3372 - DNA, 278 bp, Glycine max
  Clone ID: 701041416H1
gaaaagaaaaggtggggtaaaagggatccaatccagtggtagatgagatgaggtgaaatgagactggatcatagcattgatgatagttgagagtgagtgagttaatatgttatcattgttatggtgaaagtgaaaccaaacaccgaagctgttgagtgattttcattgatccagatcgtgtctgttctacgtacgatgtacagcggctccagcgacggcgaaagccatgacgcccctcagagtcagaggaaaattccgccggcatcctccatgctttg

SEQ ID NO: 3373 - DNA, 274 bp, Glycine max
  unsure (1)..(274): unsure at all n locations; Clone ID: 701041418H1
tttttcttcatcccccaaagtttcaatctttgtattcaattcaccctttctgctctctccatgggccacttgtgttgatgccccaacccctctttctcggaagcctagcgggtcccnatccgatgatcgttccttcaattacatgaattctgccgacccactttctctgatcgcgttccctgcatacccatttgcaagaatcgtgacactgccttcacacgcgtggaggagtttgacacatgtgtggaggatnatgatgatattgaggttgagg

SEQ ID NO: 3374 - DNA, 252 bp, Glycine max
  unsure (1)..(252): unsure at all n locations; Clone ID: 701041419H1
aagncagcccaaatttttgaagaaacggtgatgcaggtatgnctaagatgattccaaccaancccatggtggttgaaactttctctgagtatcctccccttggtcgttttgctgtgagggacatgctcaaactgtggctgtcggagtcatcaagagtgttgagaagaaagaccnggccggagccaaggtcaccaaggccgctgccaagaagaagtgattgcatttgggcaattttgctagcacatgtgatca

SEQ ID NO: 3375 - DNA, 269 bp, Glycine max
  unsure (1)..(269): unsure at all n locations; Clone ID: 701041421H1
attaattcacttgcccggaaagccctggtcaatgcagatggtattataangaaaacattcttgtggggtaggtactctatggaaatgtccgctgtcatttacaaggactgggttttcactgatcaagcattacctaatgatctttaaagagaggagttgctgttaaggacccatctgctccccatggagttcgtcttttgattgaggactatccttatgcttctgatgggctagagatatgggatgccatcaagtcctgggtgcaagaa

SEQ ID NO: 3376 - DNA, 273 bp, Glycine max
  Clone ID: 701041422H1
cagaaccaccccatcttccacccttgccccaatcttccaccgttcaattcgttgcctcacggcaaagggtcctgaaattgagacacatagatggctctcgagtctcgcaaatcccatagatcaagatcagccgtgtcaaattcctgcagagaacagcatctcggggaaaagggtcaccgaaggagagcttgtggaagacttagtgattaatcgctctcacgagcttctcttcacttgctcacccactcttctcttgaacggtttagctaccgg

SEQ ID NO: 3377 - DNA, 272 bp, Glycine max
  unsure (1)..(272): unsure at all n locations; Clone ID: 701041423H1
cgggattggtttctatggcttctgaagtaatagagtaccgatgctttnnccggtgggcttgcttgggccaccgacagcgatgctctcgagaaagccttctctcattatggtgagatcgtcgaatcgaaggttatcatcgatcgtnaaactggaagatcgagagggtttggatttgtgaccttcgcctcggagcaggcgatgaaagacgcaatcgaaggaatgaacggtcagaacctcgacggtcgtagtatcacagtgaacgaagcacaatc

SEQ ID NO: 3378 - DNA, 273 bp, Glycine max
  unsure (1)..(273): unsure at all n locations; Clone ID: 701041424H1
cagagngtgatttcagtgagtgatcggtgttcacttgatctcatcataatcgtcagcgtcaattgaagaagatgccgatcagaaacatcgccgtcggaaggcctgaagaggcgactcaccccgacacgttgaaggcggctttggcgagttcatctcaaccttcatcttcgtgttcgccggctcaggctccggcatcgcctacaacaagctcaccgacaacggcgctgccacccctgccggcctcatctccgcctccatcgcccatgcattcgc

SEQ ID NO: 3379 - DNA, 271 bp, Glycine max
  Clone ID: 701041425H1
ttcattatttccattaacacccgattctgcttaaattggcacaccaccaattttcgtgggaacccgaaccaataaaacaaaaaaagagtccaattttgtgaaaattattaccattcattcttattcatcaacgtccccccttctgtgcccacttccaaatcttctcctctcgctatgggttgtggctcctcccttccagatagggattcaaggcagttgggtcgacccaattccgagaatggtggagggcaggacgccaagaatctaaggg

SEQ ID NO: 3380 - DNA, 270 bp, Glycine max
  unsure (1)..(270): unsure at all n locations; Clone ID: 701041426H1
ctcttcntctcntgcggtnagggttttagcgcaactttcttctagatttaaggaagatgggtaaggannccggttcacatcagtattgtggttattggccatgttgactctgggaagtccactaccactggccacctgatctacagcttggaggcattgacaagcgtgttattgagagatttgagaaggaagctgctgagatgaacaagaggtctttcaagtatgcctgggtgcttgataagcttaaggctgagcgtgaaagaggaatca

SEQ ID NO: 3381 - DNA, 267 bp, Glycine max
  unsure (1)..(267): unsure at all n locations; Clone ID: 701041427H1
gagaataacagcacctctttctctctgtctctctcccctcgttgatcccaaatgctactagggattctcattcgatgcgattcggccggaagctttcgttttgcggatttttttaattattatttttcctggctatcaggnnngttgaaaaaaagatggaccatgacaagactggatgccaagctcccccagaaggtcctatattgtgcatcaacaactgcggattttttggaagtgcagctaccttgagcatgtgttctaagtgcc

SEQ ID NO: 3382 - DNA, 269 bp, Glycine max
  unsure (1)..(269): unsure at all n locations; Clone ID: 701041428H1
gatctctccgtcaccactttctcccccgatggccgtgttttccagatcgagtatnctgccaaagccgtncgataacagcgggactgttattgggatcaagtgcaaagatggggttntgttgggcgttganaagcttattccgtcgaaaatgatgcttccgggttccaatagaagaatacactccgttcattcgtcactctgggatggctgtagcaggattagcagctgatggcaggcaaattgttgctagggccaagtctgaagcaact

SEQ ID NO: 3383 - DNA, 249 bp, Glycine max
  unsure (1)..(249): unsure at all n locations; Clone ID: 701041429H1
gaaaaacctgatttcttctcttcactctcttctctttcgtnncgatcntcgatctctgaaaatgagagagtgcatttcaatccacatcggtcaggccgntattcaggtcggaaacgcctgctgtgagctctactgcctcgaacacggcattcagcctgatgggcagatgccaagtgataagactgttggtggaggtgatgatgctttcaacaccttcttcagtgaaatggggctggaaagcccgtgcct

SEQ ID NO: 3384 - DNA, 272 bp, Glycine max
  Clone ID: 701041430H1
ccagaatcggtgtaggttacaggtttaagggttttgttttcatttaggtcactaatccgatatcatgaagctcgatacgactagtctcgaatcgtttcccacactgattgcacctcaaaacgacgtcgccggagaactctccgcgctccgttctttgaccttccgaattccaatgacttcgatgggttcttgaaagacgctattcagatggtgaagcccgcgaagggtactacaactcttgcttttatatttaaagagggtgttatggtagc

SEQ ID NO: 3385 - DNA, 278 bp, Glycine max
  unsure (1)..(278): unsure at all n locations; Clone ID: 701041432H1
gaaaatcgagnattttccgagaanatnccgaaganggcgggccatggtttccccggaaaacagcaattggctgttcgattacccgctgatcgacgacgttantcccgtcggcgacgcctccttttccgtctccgcctccgccttctccggcccccacctcccgccaatgtcagtgttgaaantgatgcttcgcttngggattctgatggccccaaagatactgctttgaagaaaagggctagatgtgattcaagtactgcttctagctctaaancgtg

SEQ ID NO: 3386 - DNA, 278 bp, Glycine max
  unsure (1)..(278): unsure at all n locations; Clone ID: 701041433H1
ctcgaagaatacaaacacaaagcttcgggaccttttttggtctctggngttacactacagccacggagctctaggactgcttattaagtagtttattttagaggctaacatgagcttcgctgcaccatcacttggttctgctggtggtagatctgctagaagagcatttgagtttgggagaacctatgttgtcaggcctaaaggtaaacaccaagcaactatagtctggttgcatggcctcggggataatggctccagttggtcccagctattagaga

SEQ ID NO: 3387 - DNA, 272 bp, Glycine max
  unsure (1)..(272): unsure at all n locations; Clone ID: 701041434H1
gctttgtttcactctttgctcttgatttcttcccttgtattggcttctcaaatccatgtttcctnctgggaaactagtccctggactatcatggaattactatttgttgacatgtcccaagcttgagaggattataaggaagcatcttgaggatgtcttcgagaaggacagtggagtagctcctggcatacttcgactcttcttccatgactgctttcctaatggatgcgatgcgtctatattgttgaatggagacggtgacgagaagcaac

SEQ ID NO: 3388 - DNA, 270 bp, Glycine max
  unsure (1)..(270): unsure at all n locations; Clone ID: 701041435H1
attactttcattattggtggagatcaattatcagtgcatgtntncntntcttcgtgtggaagattatattatgcgatgattacgaaattaaggtagaaaagcgtactannctgcaacgataataagagtgctataagacaggngaggtgaagactttcggttgtntgtcattctttttcctcttggcgtggcatatggctgtcagatgcaaacgccaagagcattatgacactgcaaaaattattttgcaagattatggtctatggattt

SEQ ID NO: 3389 - DNA, 262 bp, Glycine max
  unsure (1)..(262): unsure at all n locations; Clone ID: 701041436H1
ctctgatatctctgcttgatcaggngtgaactcgttgngaatctcaacggtgnttcgtttgtggttctggttttagaatctcattgcttgaaaataaactattgtactgaaatgtcaagcttgtgtgttgtaatnaaacaagattanttgttggttttatttcggtttgtactcatgaaggaaaccaacgtgtggtataacannataatnattaagtatcaggctatttctagtccnaaaaaanaanactannnaaanantt

SEQ ID NO: 3390 - DNA, 272 bp, Glycine max
  unsure (1)..(272): unsure at all n locations; Clone ID: 701041437H1
ctctgttctctctccccctccccgattcgttttgcccctttcgnnncgggnaatttcaaccatggcctcgccgtagctccggtggaagatctgcccgtcctgctcctcgtgcagcacctcgtcctgctccagttcaccatgctcctcctccagcccctgctcagagcggtggcggatctatgcttggtggcattggttcaaccatagctcaaggtatggcttttggcactggaagtgcagtggcacacagggctgtggatgctgtcatgggt

SEQ ID NO: 3391 - DNA, 274 bp, Glycine max
  unsure (1)..(274): unsure at all n locations; Clone ID: 701041438H1
gncatttcaatcctcagtttctttcttcaacgtttccatcatacacagatncnaatcctctctcaagccctaatttcccctcatttcnatggcnanagaaganacccactnctcgcggtggaacccgctcccgaacctgcntccgcgatcctcccccggaggagaaggaggagaccaaacctgaagccaangctaaganaaccaaggagcccaaacctaaaaaggtttccaganctcgcaannctcncactcatccttcctacgaagagatggt

SEQ ID NO: 3392 - DNA, 273 bp, Glycine max
  unsure (1)..(273): unsure at all n locations; Clone ID: 701041439H1
ctctttctccgagaacaanaaaaaaaacgtgattcgctcttctctncgaataanccacaaaaccaacaaacgngaagaggagtgagagaagatggggttgtcgttcacgaagctgttcancaggttgtttgcgaagaaggaaatgaggattctgatggtaggtctcgatgctgctggtancttcaaccatcttgtacaagctcaagcttggagaaatcgtcaccaccatccccaccatcggatttaatgttgagactgtggagtncaagaaca

SEQ ID NO: 3393 - DNA, 269 bp, Glycine max
  Clone ID: 701041440H1
gcttgttcaacaggctattatacagaagcaagcagcgagggttcctcgaactcgatttggttctcggaaaatgggtagaggacaatattcactccttggatgaatatcgcgttcgagctctcattcttctcctcgacttggagaatccagatttatggaagtggatatctggacaagagcaacccccagaatcaatccacataaacccagtctttgccgcagtgcgagaaggagttatgaagaatctgagagtcattctgctcctgaaa

SEQ ID NO: 3394 - DNA, 265 bp, Glycine max
  unsure (1)..(265): unsure at all n locations; Clone ID: 701041443H1
caccacacacatagtagctnttatactctctagagtaattgcggaatctgctagaattttctaataatggcgaaagacgttgagcaggtcacagagcaaggtgaatactccgcgaaggactaccatgaccctcctccggcaccgttgatcgacccagatgagctcacaaagtggtccttgtacagagccgccatagctgagttcatagcaacactcctttttctttacatcaccgtgttgaccattattggctacaagagacaga

SEQ ID NO: 3395 - DNA, 264 bp, Glycine max
  Clone ID: 701041444H1
agcaagggatatatatgagcatgctgttgtccttagtgtgaaaattgaggatcaagatgctttcgaaagggatttcttccagttgaagccttattatacagatgcctgcaatcgtcttccaccatctcctcaggagtaccctatactgggtctcaacctgttgagactacttgtgcagaataggattgctgagttccatactgagttggaattgctttcatctgctgctcttgagaatccttgcattaagcatgccgtggagtt

SEQ ID NO: 3396 - DNA, 271 bp, Glycine max
  unsure (1)..(271): unsure at all n locations; Clone ID: 701041445H1
ganaccattcacattcttccagaatcatcaaagccatcaacgggcttgacttggcaactagctggaagatgaagcaagcaactacttttcttcttctcactcttcctactcctttcctccaccaccatggccatttcaccagcacctgcagcagcaccaaaagccacagcaaaaactcctcctaccccaaaggcaacagcaccatcaccaaaaccattagttcccacaatacctcagtctccagactctcctgactcggtccccgacgaca

SEQ ID NO: 3397 - DNA, 251 bp, Glycine max
  unsure (1)..(251): unsure at all n locations; Clone ID: 701041446H1
caactcttcaaaagggagaagaaacggaaaganaactctcacnaaaactattatagcaatgncagaacaaaaccaaaaccaaacaactgaagctggaaggcaccaagaggttggtcacaagagcttctccagagtgatgctctttaccagtatattctggagacaagtgtctacccaagagaacctgaatccatgaaagaactgagagagttgacagcaaaacacccatggaacatcatgacaacctctgc

SEQ ID NO: 3398 - DNA, 264 bp, Glycine max
  unsure (1)..(264): unsure at all n locations; Clone ID: 701041447H1
ttgatatctggaatgacagcactgaggtcgctaaatgtttcaaattctcgtataaccaatgaaggactacgggatttgaagcttgaagatttacgcatcttacctggantctncnaggttactgcttctgaaattaagaagctcantcaactgatcttccaaatttgataancttcggccngaataaatcaggagaataagagaattctgttatctgcctgttgaacaattctctgtacatatttatggctactgtttggataa

SEQ ID NO: 3399 - DNA, 273 bp, Glycine max
  Clone ID: 701041448H1
tactgtgaaggtatggaagctaaacaatggactctggaagatggactgcttccctgctcttcagatgcacacggattgggttcgagatgttgcttgggcacccaatttagggctccctaaatctaccattgctagcgcatcacaggacggtaaagtgattatatggaccgtggcgaaagagggggatcagtgggaaggcaaggttttgaatgatttcaacacccctgtttggagggtctcatggtcattgacaggaaacatattggctgtggc

SEQ ID NO: 3400 - DNA, 270 bp, Glycine max
  unsure (1)..(270): unsure at all n locations; Clone ID: 701041449H1
ttgagatgttggggtggtgggactggatgggctgttgaagatgccaaggacaaaatcntgaagctcttggaggngtacgancgtggaggtgttgtgagtgaagcangccagtgtatccgtgacctgggaatgcctttcttcaaccacgaggttgtcaagaaagctttggttatggccntggagaagaagactgataggatgctggatctgctgcaggaatgtttcagtgaaggtctaataaccatcaatcagatgcccaaagggttcacc

SEQ ID NO: 3401 - DNA, 270 bp, Glycine max
  Clone ID: 701041450H1
cgctttatggaatcaaatctgtatcccaagatgtcttgcctgtcttgactgatgcattcgatggaaatattttgagccttgagtttgataattttgctgaagtgcacaaactctatgaaggtggagttacactacctacaaacttcttagcaagatcgcccctataccagtgatcaaggaaatttttcgaactgatggcgaacagttcctcaagtatccaccacctaaagtgatgcaggtggataagtctgcatggatgactgatgaaga

SEQ ID NO: 3402 - DNA, 267 bp, Glycine max
  unsure (1)..(267): unsure at all n locations; Clone ID: 701041452H1
ctagctcttgttgacattccaataactttggtgctatgatcatggagatcaatgcatcccccgacaacattaattcagtcaagtacaacgtacatgaaaaacagccttaccgaacttggtaccactttcagcccccacaaantggatgaatgatccaaatggaccaatgtactacaaaggagtttaccactttttctaaccancataanccttatgcnaccaacnttggtaggctaatggtatggggtcttccgtatctatgatctc

SEQ ID NO: 3403 - DNA, 265 bp, Glycine max
  unsure (1)..(265): unsure at all n locations; Clone ID: 701041453H1
gcacttagtgctattcaataattacgaaaaaccaacagcgagtgttgtttttgtttggtccaggctggaccagggaatgaatagagatgagaggctttcggttgaagagaactgagttaagcggcgaancaaacgcagatcggcggcagaaattgccaccggaagcacgtcgaaganggtgaaccaaacacaaaattccatccaccacttctcttttcaatccccaactcaaatctgtgaagaaaatctcaatttctaaattgta

SEQ ID NO: 3404 - DNA, 267 bp, Glycine max
  unsure (1)..(267): unsure at all n locations; Clone ID: 701041454H1
ggccagtcaagcataganggtccaagttatggcaagaaggtcattgaagaaggtgtgaaactaaccgccaatgttgatttgcaaagagaagatgaatgtgggatttgcttagagccttgcaccaaaatggttttacctggtgctgccatgccatgtgtattaaatgctaccgcaagtggaacagaaagtcagagtcttgtcctttttgccgtggtagcttgaggagagttaattcggaggatctatgggtattaacttgtaatgatg

SEQ ID NO: 3405 - DNA, 272 bp, Glycine max
  unsure (1)..(272): unsure at all n locations; Clone ID: 701041455H1
ctttaagacaaaaaataacttccttaataactaagaaggacaatctccatttcatttgttagttttcacatcctccaacataagtttctgagtttgaaacacagcataaacaaagcaaaatatgaatgccactctccctttttnaatggaaacaaagctgaagacaccacacgagcaatcgatagataacaaactaaagatagagtgagagtgagagacatgtataggttcagcaacacagtaatcgggttcttgaacttgttcacactttt

SEQ ID NO: 3406 - DNA, 270 bp, Glycine max
  unsure (1)..(270): unsure at all n locations; Clone ID: 701041456H1
ctcaaacacaaacatccctcttgatttgaaggttgttttgtgcttatagataaaagttctgccaaatncaagaggggttttcagatcatannnnnnnnnnnnnnnntaaacaatggctaagttctttgctgctatgatcttggcactcattgccatctccatgcttcaaacagtggttatggctgctaatgagcaaggaggccacttgtatgacaacaagagcaaatatggaagtgggagtgtcaagagataccaatgcccatcacaatg

SEQ ID NO: 3407 - DNA, 267 bp, Glycine max
  unsure (1)..(267): unsure at all n locations; Clone ID: 701041457H1
atttgaattgggcactgaagccngagagatgccatgcnaccatatttaccnttnctgactgtattgttccttggttggttcagcataactcatgtcctgtttgccgtgttganctgccacctcaangacaggctagttcncgtggtactcgaagttggggaggaaggaatgccagcnanagcagcagcngtggcancaatgatagctccaggggcagagagancagccatcagaaccatgganggagaaatccattttcattttgtg

SEQ ID NO: 3408 - DNA, 267 bp, Glycine max
  unsure (1)..(267): unsure at all n locations; Clone ID: 701041458H1
gnggaatatggcttccttaagctcctcattagtgctgctccttgcagctctaattctatcccctcaagttcttgctgactatgagangcccccaatttacaagccacctgtntacacaccgccagtttataagcccccagtnganaaaccaccagtgtacaaacctccagtttacaagcctccagttgaaaaaccacctgtttanaagcctccagtntataagccaccngtttacaagcctccagngtataancctccagttgataa

SEQ ID NO: 3409 - DNA, 262 bp, Glycine max
  unsure (1)..(262): unsure at all n locations; Clone ID: 701041459H1
gcaatatgcattggaagacatgcgtttggtgatcaatatcgggcgactgacacagtaattaaaggagctggaaagctgaanctggtgtttgttccagaaggccagggtgaggagactgaattcgaggtttttaacttcactggtgaagggggtgtttcattggctatgtacaatactgatgagtctattcgttcttttgctgaggcctctatggcaactgctttagagaaaaagtggccactttatcttagcaccaaaaata

SEQ ID NO: 3410 - DNA, 271 bp, Glycine max
  Clone ID: 701041462H1
cacccaacaaatacctacaaacacctccaacaccaaaaactcaacattgccaccgaagcatcttcatcggcaaaatataaactgaagctagttcacagagacaaagtccccacgtttaacacctcccacgaccaccgaacccgttcaatgcacgaatgcagcgagacaccaaaagggtcgccgccctccgccgccgtctggccgccggaaaacccatctacgccgaggaggcattcgggtcggacgtggtttccggcatggagcaaggaac

SEQ ID NO: 3411 - DNA, 272 bp, Glycine max
  unsure (1)..(272): unsure at all n locations; Clone ID: 701041463H1
gcaagctagctaggttgaaaatagtttggttttgtagtaagtgaggtgaggtgccaaaatggtgaancataactcttggtactttcgatgactcttttggtgttgcctctcttaaggcttatttggcagagttccatgcaactcgattttcgtgttcgctggtgttggttcagccatcgcttacaacgagcttacaaaagatgcagccttggatccaacggggctggtggcagtagctgtggcccatgcatttgcactgtttgtaggtgtct

SEQ ID NO: 3412 - DNA, 139 bp, Glycine max
  unsure (1)..(139): unsure at all n locations; Clone ID: 701041464H1
ggtagagnnaagcgaagagtctntctcttcctatctctctctntcaatgtcagggcacaaatctncanctcnacttcttntnccntcntccttctaancctatatcagaaggaaacgcgaaaaaaganaaaaaaaanng

SEQ ID NO: 3413 - DNA, 268 bp, Glycine max
  Clone ID: 701041466H1
cgagatcaacgaagacaacgtcctctacattgttgaaaacatcaacgttgctgcaattgaaacaactctatggtcgattgagtggggcattgctgagcttgtgaaccacccagagatccagcaaaagttaagggatgagattgacagagttcttggagcagggcaccaagtgactgagccagacatccaaaagctcccatacctccaagcagtggtcaaggaaactcttcgtcttagaatggcatccctctccttgtaccacacatga

SEQ ID NO: 3414 - DNA, 269 bp, Glycine max
  unsure (1)..(269): unsure at all n locations; Clone ID: 701041468H1
gctggcggttggcgcaaccttttcgatcttcatccaacggggcaacgttggatctgctgaactgaacttctttttatatgcactctgtgatttcactctgcttcgccatcctatgggggncaacaacagcaacaacgatgcttcatgcgnaacnanaacgccgccgttcaggcccgcaccaaagcgcagaaccgctccaacgtccttcagctncaaactgattggacagagtcacccaaccggtctcacagcgaacctgttgaagctct

SEQ ID NO: 3415 - DNA, 268 bp, Glycine max
  unsure (1)..(268): unsure at all n locations; Clone ID: 701041470H1
cttctctctctttctccggcgacgatctcagattccggtcactccnctcgccggcgatcccttattcctccgtcctccgtcgagtcctttccgattcgaanccgttcccagccttgtgccaccatgaatcccgaanacgattatttgttcaagcttttgctgattggagattctggtgtaggcaagtcatgtcttctcctgaggtttgctgatgattcataccttgacagctatatcagtaccattggagtggactttaaaatccgca

SEQ ID NO: 3416 - DNA, 247 bp, Glycine max
  unsure (1)..(247): unsure at all n locations; Clone ID: 701041472H1
cntcaaatcgattaagttcatagaaccgaattgaaatatctanttggtaagtgattganantactgaatttgtagataataagatgggttcgtcgactaatggtggtgtgccgccagggtttagatttcatccaacggatgaagagctgcttcattactacttgaagaagaaggtgtcctttcagaagtttgacatggatgtcatagagaggtcgacttgaacaagatggagcctgggacttgcaag

SEQ ID NO: 3417 - DNA, 266 bp, Glycine max
  unsure (1)..(266): unsure at all n locations; Clone ID: 701041473H1
ctttctaaactaaccaactttttttcaaacaaattcgattctttctncatttttaacctaattttccttttcgatccaaaaaatggctctctcgcgcgttgttgctcaatcgtcgcaatcgaatcttctgaaacccctaggtcgtacttatcactacgacgccgttcggtttcgacttcgtcagacccactcacgatagagacctcggtgcccttcacctcccacaactgcgacgcgccgtcacgcgccgtggagacctcctcggc

SEQ ID NO: 3418 - DNA, 261 bp, Glycine max
  unsure (1)..(261): unsure at all n locations; Clone ID: 701041475H1
gggactcttccccgtcgatcctctttcaggtgcccatattgatcaatgaaagaataagcctcttagaagaagctgttcttaactttctattcttttttgtatgattatnggnctggtgactacgtctgttaacntttatcnaaaaattgtactttatttttagttttttctaaaatttgtatgacaggngnagataagtactacattttcaagactggactttacaaagttggccgaannngttgtgatgtnataatcact

SEQ ID NO: 3419 - DNA, 263 bp, Glycine max
  Clone ID: 701041476H1
cgttgtcttctcacttcgtcaaaaccaaccaaacccctccccaattctcaagccaaccatgtcttccttcaagagcaagtaccaagatgaactcattgccaatgctgcttacattggcaccccagggaagggtatccttgctgctgatgagtcaactggtacaattggcaagcgattggccagcattaatgtcgagaatgttgaagcaaataggcgtgctcttcgtgaactcctattcaccacacctggtgcttttgagtgcc

SEQ ID NO: 3420 - DNA, 264 bp, Glycine max
  unsure (1)..(264): unsure at all n locations; Clone ID: 701041477H1
tcgtttccaggtttcggcgcaatcggcttctgcttcaaggaaggagagcttgttattctctatcaacaagtaaaatgtcaggtgaagagggtgtcattgcagttgagcnnnnnnnnnnnnnnnnnnncatcccaggcgagccaatggatatcatgactgccttacaacttgtgctcagaaaatctctggcttatggtggtttgtcgcgtggccttcatgaaggtgcaaaagtgattgagaagcatgctgcacaactctgtgttc

SEQ ID NO: 3421 - DNA, 268 bp, Glycine max
  Clone ID: 701041478H1
catatatcagaatcattaaagataagattatattgctaagaagaaaaaatatgaaggttgtctacttgcttgttgccctcttggctttgacatcaactgttgtctctgcctatgaccctagtcctctgcaagatttttgtgtggcagccaaagaaaaagatggtgtatttgtgaacgggaaattctgcaaggaccccaagcttgtcaaagcagaagatttcttcagacatgtggaacctgggaaaactgacaacccactaggttcaaa

SEQ ID NO: 3422 - DNA, 270 bp, Glycine max
  unsure (1)..(270): unsure at all n locations; Clone ID: 701041480H1
gaaacaagtgatcaaggtcaatgattatcagnaganccggttcgtgaancgcgtggtttcgtcaatgtttaacactgttgcaancaaaaagatagcaattcttgggtttgcattcaagaaggacactggtgacacaagggagacaccagccattgatgtgtgcaagggactactcggcgacaaggcgcgcctaancatatatgatccacaggtcactgangnccaaattcagaggctttatggatgaacaagtttgattgggaccaccct

SEQ ID NO: 3423 - DNA, 268 bp, Glycine max
  unsure (1)..(268): unsure at all n locations; Clone ID: 701041481H1
catccatcttggttactcatctttggcagatattgaagcagctccacccacagctgaactggagcctatacgttctaattacagtcagcttgatgaagtcgatatgggaatgacttacgaggagctatcagtttatggaagactacgaaaaattttccgttgtggnccagtttccatgttccagaatctatgctacagatggggtgcaagattgacaccatcacaagtggctgaaaaagtanaacacttcttcaagtatnattctatc

SEQ ID NO: 3424 - DNA, 267 bp, Glycine max
  unsure (1)..(267): unsure at all n locations; Clone ID: 701041482H1
ccttccctctcttctgttaccaatggctccctcatcaaactacatttctttccttttcctcaccacccttttgtttgctcttcaaatcagtgcnagagacagccagttcttcagcaaagtcacccattttgacaaaaacgtgncaaagagacagaacttcccaacaaagaagcaccagaagngaacaagccagagcnacaaccacctttcattccggagactgaaaacagctatgggctatatgggcnnccngntgggnataaccaa

SEQ ID NO: 3425 - DNA, 185 bp, Glycine max
  unsure (1)..(185): unsure at all n locations; Clone ID: 701041483H1
gcaatttcgaaaatttncactcactcctcttattctcagaacagaaaagagaagaagnaatggtgtcaggcgtgagagagataagctgtagcggaganccagtccttgacagtgatagcggggnggagttgatgcaggtaaagccggcatagacattgtcctcggcgatcttcctcgtgcaancc

SEQ ID NO: 3426 - DNA, 264 bp, Glycine max
  Clone ID: 701041484H1
gggcattggaaatggcattccccttggtgctgttgtaactactccagagattgcagaggtcttaacccgccggagctacttcaacacctttggtggcaaccctgtttgcactgctgcagggttggctgttttgaaagtaatagagaaagagcagcttcaacagaacgcgtttgtggttggatcccatttgaaagaaaggctcactgccctcaaggacaaatatgaattaattggtgatgtcagaggaagaggcctgatgctagg

SEQ ID NO: 3427 - DNA, 268 bp, Glycine max
  unsure (1)..(268): unsure at all n locations; Clone ID: 701041485H1
gcggcgcagtggtggcgctccgccgccggccaccttcgaacggtggcggcgggccgtggttccttgtcgggattccagcgcaganactatcacacgatccaagccatcccaagggagtgcagcggcagcaaagtctcggcgagagaccgaacgcaaggtcgaataccttgcgtcgttttcctccagaaccttctggaaaaaaaccccgacgcgcgttcggaatcgaagaagcacttgctcaccgtcgagaagaagcagattaaggcca

SEQ ID NO: 3428 - DNA, 267 bp, Glycine max
  unsure (1)..(267): unsure at all n locations; Clone ID: 701041486H1
cgcatttcctcgtttttttcttcccttttctctttctccggcgacgatctcagattccggccacttcctctcgccggcgagcccttactcttccctcctccgtcgagccctctccgattcgaatcgttcccagcctcgcaccaccatgaatcccgaatacgattatttgttcaagntttngctgattggagattctggtgtaggcaagtcatgtcttctcctgaggtttgctgatgattcataccttgacagctatatcagtaccat

SEQ ID NO: 3429 - DNA, 265 bp, Glycine max
  unsure (1)..(265): unsure at all n locations; Clone ID: 701041487H1
ganattcaagaaattttttaaacttgacatatctgctatcacctcttccgtttcttgcgattcgacgntggccgatcaaaagcttttaggaccggcgtttagttttaagcatgatgaattgacgagtcgatttcttgaaaactccgacttcttgaagaactccgacttcttcaagaccgactttttaaagaacccgagaacaatgatgaatgtaggaaaaatgggagcctgaaaaggttanntgaccagagtgntgtctgtggat

SEQ ID NO: 3430 - DNA, 266 bp, Glycine max
  unsure (1)..(266): unsure at all n locations; Clone ID: 701041488H1
ctgaggtttccttttcttctgccacatccactctttgttctctttcagaatctcttgagagcttttccgctcccaaaaatgctgaggagcatattaacatcaatgcaacaagtattattgattttgaagagtttgctgaaagaatatccaacagtgcttgtgaatcttcattatctcctgctgtgtatcatgaaaggtcggttaaaccacggggtgatcttcanagattgataaaaaacccgttgtanacgagantgatgattctg

SEQ ID NO: 3431 - DNA, 221 bp, Glycine max
  unsure (1)..(221): unsure at all n locations; Clone ID: 701041489H1
gagggaaaggatgggttgttgccaatcatcgacgttgctgagagtgggagagagggagactcaccctgaaaaggaaaaggaaaaagaccaccagaggtctctgaggccgagaaagagggctttgatttctcctctctgagttctcgctggctgagctgaaggcggccaccaacaatttcagctctgactatatcgtgtctgagagtggggagaangcaccc

SEQ ID NO: 3432 - DNA, 261 bp, Glycine max
  unsure (1)..(261): unsure at all n locations; Clone ID: 701041490H1
cgcaaacagtgagccatggccgtcggaaanaacaagngcatctccanngggaagaagggtggcaagaagaaggcagctgatccctttgccaagaaggattggtatgacattaaggctccttctntttttcaagtgaaaatgttggcaaaaccctcgtctctcgtactcagggtaccaagattgcttctgaaggactcaagcatanagtgtttgaggtctcttggctgatcttcaaggggatgaggatcatgcattcaagaa

SEQ ID NO: 3433 - DNA, 259 bp, Glycine max
  Clone ID: 701041491H1
gtcgagctgagaataccagttgctccagtagccggcactaaacaacatggcggacaaggcagttcaccatccgaaccaggaagtttatgacaaacaggcttctctccagaaagcagttcgtcgttgatgtccttcatccagggagggctaatgtttccaaggctgaactgaaggagaagctgggaagaatgtatgacgtgaaagacaccaacactgtatttgtctcaagttccgaactcattttggtggtggcaagtcc

SEQ ID NO: 3434 - DNA, 260 bp, Glycine max
  unsure (1)..(260): unsure at all n locations; Clone ID: 701041492H1
ccggacgcgagactttttacaaagttattagaagctgggcatcanaaaagtttatgactggatgtgtcattctctttccaattgcaatcaccttctatataacatggtggtttattcatttcgtggatggatttttctctcctatctatgctcaacttggaattgatatttttggtcttggattcataacttccataactttcatcttcttggtcggggttttcatgtcatcatggttgggtgcatctgtcctgggcctg

SEQ ID NO: 3435 - DNA, 266 bp, Glycine max
  unsure (1)..(266): unsure at all n locations; Clone ID: 701041493H1
ctagnatggaatttcgatgctcagtcanctcttttaccattctcttctctcttgnncntgcaggagagagccatgtccntgcatacgctnacctgaggaagattattgggaagctgtttggccaaanactcccattcncatgnactgcgagagcttntaaagcctctcnctgcaggtgttgaaatcgatgaactccctaagcaaattgatgatacacagtacccaaaaacattcttctataaagnngaccttcatccnggcaaaac

SEQ ID NO: 3436 - DNA, 273 bp, Glycine max
  Clone ID: 701041494H1
tagggtatcaaccaagaccaatcaactccaagtgaaagtgaagttcagatggttcatagtgggcacaaaggatttcacaacaaactcaaatgcatccaaggaagggacaaatgatacaaaggaggaaactaatccttcaaaaatgttgcaatagtagtggataaacctattgaagcacttgttatactctcttcaggagaaaaggactatatgaacaaaaaatggaagagggtactgtggaaatcttgtgtttatgcaatcacactagtaatg

SEQ ID NO: 3437 - DNA, 271 bp, Glycine max
  unsure (1)..(271): unsure at all n locations; Clone ID: 701041495H1
caaacatggcctccaaatccttcaccctcattctcctcatcctcaccacattcctcanggcccnaacccaagcccaagctcccgcaccggccccctcaggcgcggtgaacctcaccgcgatcctcgaaaagggtggccagtacaccaccctaatcaaactcctaaaggacacacaacaactcactcagatcgagtcccagctcaaatcaaactcacaaggcttcactctcttcccacccactgacaatgccttccagagcctcaaacccgg

SEQ ID NO: 3438 - DNA, 271 bp, Glycine max
  unsure (1)..(271): unsure at all n locations; Clone ID: 701041496H1
ccactcttaatttctctctgccttgctcatttacacacctctccaacctttcactttcagctttatttgaatccctctctctcctttccaaatggccagcgttgnggttgcacatcaaacaccaacaacagttccagaaaagaaacaaccgaggtaatcaagacccaggaaacaaccccggaaccagtaccagccactgaggctcctgcaacagaacaagcagcagctgaggttcctgcccaagaagaacaacaagcaatgaggttcctgc

SEQ ID NO: 3439 - DNA, 288 bp, Glycine max
  unsure (1)..(288): unsure at all n locations; Clone ID: 701041501H1
cttcctctctttaaatcctcnaccagccaacaccctttttctcccctaactctctcacagatccaaaacccaaaaaagagaatagagtgagagaaagagaatcatggaattagaacaaaaccagagatgggaaggctatgtgaactggaggaacaagcctgctctcagtggctgcaatggtggcatgcttgctgcctcctttgttttagtggttgagatattggagaatctggcatttctagccaatgcaagcaatttggtgctgtatctgaggcagtacatgcacat

SEQ ID NO: 3440 - DNA, 281 bp, Glycine max
  Clone ID: 701041503H1
caataatgccccaagatgcaagtggtgaagatattgaggttgataagaatcttgctttcctcaatcaatatgttcagcagtctctggaaaggggtgctctaccctacattccagaggatgagcgcaatggaacagtgaatgtgagcaacttcagaagccaggatcaacatgaatctgcacaacatggtctgagatttgaggcatatgaagttccaaagcctccaatgccgtcaaaagttgctccagtttcatttcatcctcaacagaccttgttccagtac

SEQ ID NO: 3441 - DNA, 281 bp, Glycine max
  Clone ID: 701041504H1
ggagcactttatgttgatcgaatagatttcagtgatcatcacatattccatgccagggatattgagatgatcagagccaaacttggagaactagatgggaagtttgttcccaaaccaattgttgtaatgactgaaaaggattatgatagggacccagaaattcttaagcaattgcacccatttaaagtttttgttctctgttctgcattgaaggttctgccctatagaggaagcacagaggatagctttaagaaatttctgaaggaccatttaaaattaga

SEQ ID NO: 3442 - DNA, 281 bp, Glycine max
  Clone ID: 701041505H1
ttgcaatcaaattagttcattctctttgcgcagttccctacctctcctttcaagatgcagatcttcgtcaagaccctcaccggaaagaccatcacccttgaggtggaaagctctgacaccatcgacaacgtcaaggccaagatccaggacaaggaaggaattcccccggatcagcaacgtctcatcttcgccggaaagcagctcgaggacggccgtaccctcgccgactacaacatccagaaggagtcaacccttcaccttgtccttcgtctccgtggtgg

SEQ ID NO: 3443 - DNA, 276 bp, Glycine max
  Clone ID: 701041506H1
agaaaacggttagagttccggcgattagttcgaaggtcgccgatattccgccggatgagtactcgtggaggaagtacggacagaagccgatcaagggatcaccgtacccgaggtgagtggtttgtggccgttgatttggtgttggctttggtcaaaggtgtgttaactgacgttgatttgttttgtgttctcagggggtattacaagtgcagtaccgtgagagggtgcccggcgaggaaacacgtggagcgtgcttcggacgatccgacgatgttg

SEQ ID NO: 3444 - DNA, 279 bp, Glycine max
  Clone ID: 701041507H1
cagagatgaatcatctccatatgctgctatgcttgctgcgcaggatgttgctgctagatgcaaggaactgggcataactgctcttcatatcaagctccgtgccacaggtggaaacaagacaaaaacaccaggtcctggtgctcaatcagctcttcgagcccttgctcgttcaggaatgaaaattggtcgcatagaggatgtgacccccattccttccgatagcacacggagaaagagtggtagaaggggtagaaggctttaagcttcttatggtatatg

SEQ ID NO: 3445 - DNA, 256 bp, Glycine max
  unsure (1)..(256): unsure at all n locations; Clone ID: 701041508H1
atttttttcgtttttnttttatggaaaaaaatattgtagcaatttcgtcgtagaaacaaaattcccctattttcggcacgccgttgttgaatttccaatctgtgattttnttcttcttctatttatacgtgataattccaaaaagcctaacgcgagagattcatcagcttttcaattattcctcgaattattttgaaggaatcatccaaactgcttgaaatattcatcatcaacaacctcacgctgttatagatat

SEQ ID NO: 3446 - DNA, 277 bp, Glycine max
  unsure (1)..(277): unsure at all n locations; Clone ID: 701041509H1
gggagttaggttctgcacgctctgcttccagcgagtgttctttcttcgtttcaacaccttaatttgcacacgctgcttcttcngcttgagaaatggcacaagaaacctttctattcacatctgaatctgtaaacgagggtcaccccgacaagctgtgcgaccagatctctgatgcagtgcttgatgcgtgccttgaacaggaccctgacagcaaggttgcctgtgagacatgcaccaagaccaacatggtcatggtctttggagagatcacaaccaa

SEQ ID NO: 3447 - DNA, 278 bp, Glycine max
  unsure (1)..(278): unsure at all n locations; Clone ID: 701041510H1
gcgtttttctcttcgtcttcttctacgcataatagcagtggccaatggtgaagcactacanacccccggggaagaaaaaggaggganatgctgccaaatttgtcattaggtcacaagcaatcaagcagcttcaaatcagtctaccccttttcaggaaactatgtattttgaaaggtgtaactccaagggagcctaagaaaaagttcaagggaactcatcagacttattaccatgncaaggatgtttccttccttcatcacgagcctttggttgaaata

SEQ ID NO: 3448 - DNA, 275 bp, Glycine max
  Clone ID: 701041512H1
gtggtcttagcagagaggctgaacaggaattcacctctgcttaccctgttacggagtttactattaaacccgctaccaaacattctgttgagttccctgtttctgagaaaagccatcttgtttgggaaatccgagtggtgggttgggatgtcagctatggagctgaatttgtgcccagcgctgaggatggatacactgtcatagtacacaagagcaggaaaattgctcccgccgatgagaccgttcttaccaacggtttcaaaattggtgaacct

SEQ ID NO: 3449 - DNA, 275 bp, Glycine max
  Clone ID: 701041513H1
cacaaactagtaaatagtaatattattcttcgaatccattttattcataatgggtgttttcacatttgaggatgaaaccacctcccctgtggctcctgctaccctttacaaagctctagttacagatgccgacaacgtcatcccaaaggctgttgatgccttcaggagtgttgaaaaccttgaggggaacggtggccctggaaccatcaagaagatcactttcgttgaggatggagaaagcaagtttgtgttgcacaaaatagaatcagttgatg

SEQ ID NO: 3450 - DNA, 276 bp, Glycine max
  unsure (1)..(276): unsure at all n locations; Clone ID: 701041514H1
gttgaaaagaaaccctagcaagtggagcaatggcagacgttgaagtcgatgtgnnnnnnnnnnnnnnnnnnnggctgccgncgaagagaacgttcaagaagttcagttttcgaggcgtggatctcgatgcacttctcgacatgtccaccgatgaactcgtcaagatgttcagtgcccgcgctcgtagaaggttccagagaggcctcaccagaaagcccatggccttgatcaagaagctccgtaaagcgaaaagggaagctccaccaggtgagaagc

SEQ ID NO: 3451 - DNA, 275 bp, Glycine max
  Clone ID: 701041515H1
gcgatcgaagtttcacatcagccttatccagtttagggtttcggttccttaccctacctttgacgtatcgaaaccttaaatttgggattaggtctgagcaatctggttggtagaacctttggtcttagagagtcaagttttatgtctggattagacgatcaaattcctactgccttcgatccttttgctgatgcaaatgctgatgactcgggtgctgggtcaaaggagtatgtgcatattcgcgttcagcagcgaaatggtaggaaaagcctgac

SEQ ID NO: 3452 - DNA, 278 bp, Glycine max
  Clone ID: 701041516H1
tccgaatcttcttctatttctcttaaccactacttcactgacctcctcgaacccgaaattgaatttcctctcttcgaattcgattccaaaccccaagtaatcgacctcgaaaccccgaaaaccctaatttcagctgagaagaagcctcaatttaatcggaaaccgtcgctgctaatcgctgttccgaagaagaccgagtggatccaattcggaaaccctgaggtggcggcgccggagaaccagcctgagaagaagcatacagaggtgtccgtcagcgg

SEQ ID NO: 3453 - DNA, 210 bp, Glycine max
  Clone ID: 701041517H1
ggcaatttggaggaatgtaatgtttccgatagcttatgtaaaaatggttggccccctgcattgtatttgggtcatttatctatcatgtgttgagtcaaagtttggtgatattgaatgcataatgtcattcattacactaacccaaattgtttaaagaacattgaatgttgtctctagacccaaaagaatgaaaagtgaaagataaaatgc

SEQ ID NO: 3454 - DNA, 280 bp, Glycine max
  Clone ID: 701041518H1
ttcacattctccattccacaacatcaaggttctgatcatgtcggggaagaggccccggccaatgatcggaaagttgtcggagttgttggtctcgagaggccgcacggtggcacttttggacaccactggaagcccaagaggcccattagacatgaagatgatgcaatcaccaagaggcttaaaaaattatgatcttggtggcgttggtcttggaattgtggtggctcttgataaatccaataacgaggttgctgcacgtgaagttttgcccaaacacacc

SEQ ID NO: 3455 - DNA, 278 bp, Glycine max
  Clone ID: 701041519H1
atcgtcttctccctccttcttcaatggtcttagggtttccggtgtccatgcgtagagctcgcagtaatgcgcttttgaaacccgtgttcatctgtatccaacgatttactagaaggaggtcgcaatttctccatcttcacatttcgctagcacgtgaaatcaaaagttatcgacactttcgcgcgacacgaaatattgggaaccaagcaaaatatctatggctgacgaaccattatatccaatagcggtgcttatagatgagttgaaaaatgatgaca

SEQ ID NO: 3456 - DNA, 278 bp, Glycine max
  Clone ID: 701041520H1
ctcatccttggcacaaggttttccacaagagaatgcctcctgaagcaattgaccttgcatcaaggcttctccaatattcacctagtctacgctgcactgcgctggaagcatgtgcacatcctttctttgatgagcttcgcgagccaaatgcccgtcttcctaatggccatccactgcccccacttttcaacttcaaacaggagttagctggagcatcacctgaactgatcaataggctcatcccagagcatattaggcggcagatgggtctcagcttc

SEQ ID NO: 3457 - DNA, 278 bp, Glycine max
  unsure (1)..(278): unsure at all n locations; Clone ID: 701041521H1
gaaaattatgctggctaggcaaacaggcttgaccagaaaccaggtggcaaattggttcatcaatgcaagggtgcgtctctggaagccaatggttgaggaaatgtacaaagaggagtttggagattccgagatgaactgcaacctttcatctgagaacaacacggtcaaaggtaaaagagatgatgttcaagagtctgnnnnnnnnnnnnnnnnnnnnnnnnnatgggaagagtcacaggacaatttagtaactgttgacagtgtgcaagtccaacctc

SEQ ID NO: 3458 - DNA, 276 bp, Glycine max
  unsure (1)..(276): unsure at all n locations; Clone ID: 701041522H1
cggagattgcgaattgcgatttgcgatgcgaaaaggaaaggaaaaaaagggtttcctttcttgaattgctgctnnnnnnnnnnnnnnnnnnnnnccgactgacagataaggtgagttgaattactgtgaaggagtgattgagtgagtggtcaatgnnnnnnnnnnnnnnnnnnnnnnnnnnnnnnnnnnttctcatccaattgttgttttcctcgcctcctgcatgggcaactctaatcgcagctgcatttctcctcctaactctaaccctctcca

SEQ ID NO: 3459 - DNA, 274 bp, Glycine max
  Clone ID: 701041523H1
ctcctttctctctcttcacacttcaatggatattctttcttgaattcttttatgggtgtcattcatagggatctcaagccagagaatttcttgctatctagtaaggatgacaagggacttctcaaggccacagattttggcttgtcagttttcattgaagaaggaaaggtgtatcgaaatatagttggcagtgcttactatgttgctccagaagttctacgtcgtagctatgggaaggaagcagatatatggagtgcaggagttatattgtata

SEQ ID NO: 3460 - DNA, 275 bp, Glycine max
  unsure (1)..(275): unsure at all n locations; Clone ID: 701041524H1
cttcaaagttcaattctttctctgtcgtcgctctttcttcaacttcaagcttaattcctcatgtctttcagangcctcagccggccaaatgccacatcaggcatgggtgttgctgatcacagcaaaaacaccttcatggaattgaagcagaagaaggttcatcgttatgtgatctttaaggtcgatgagaagaaaagggaggttgtggttgagaagactggtggcccggctgagagctatgacgattttgctgcatctttgccggagaatgattg

SEQ ID NO: 3461 - DNA, 274 bp, Glycine max
  Clone ID: 701041525H1
ctagaatggcaaacaacggtgatgttgttaagatcaatattgaggagatgctggagatgctggagggggcaaaggcacccctaattactgagtgttgcatttacaaagtgccgtttagtatccgaagacacaacgaaaaagcctacaccccagaggttgtttctattggcccttttcaccacggccatcctcgcctccaagacatggagaaacacaaactcttttactccaaggcttttctcaaacgaactcaaacaactttggacactttgat

SEQ ID NO: 3462 - DNA, 272 bp, Glycine max
  Clone ID: 701041526H1
atcgtatgatcaatggagagtcaatatgccctcgaatttacacttttggcattggttcgttctgcaatcattatttcttgcgaatgcttgcaatgattggtaggggccaatatgatgctgcgttggatgtagatttgattgaacctcgaatgctgacattgtttggcaaagcttcatctctcattcttgcaaatatcaaaatggacacattggatgatcttgatgacctcgaggtataccctcctcatattccagatctttcatcagagggt

SEQ ID NO: 3463 - DNA, 135 bp, Glycine max
  Clone ID: 701041527H1
gtttgataacttgatacaacaacaaagcttcatcccattagacgaggtcgattacatgaatcacacgacaccattttgacacggttaaaacccaaagtttcagtatatcgaaataaaagtagacatttgtttttc

SEQ ID NO: 3464 - DNA, 94 bp, Glycine max
  Clone ID: 701041528H1
gcgggggaatatggatggggaactacacataatgttatttccgttccccaggtcaggggcacttgataccaatgagtgatatggcgagagcatt

SEQ ID NO: 3465 - DNA, 272 bp, Glycine max
  Clone ID: 701041529H1
gggagaaggcattacagaagtctgccttagtgggtttattgcttttgatgttcctcctccaaagggtccattgtggattcttggcgatgttttcatgagggcatatcacaccgtctttgactatggaaatctccaagttggctttgccgaagcagtctaattacgctttctggaggattttctttgtaaatttgttaagcgtgttgtaaataagctgttataattgtagctctggttactttttgaaaccacgaatgtatttatccatttaa

SEQ ID NO: 3466 - DNA, 273 bp, Glycine max
  unsure (1)..(273): unsure at all n locations; Clone ID: 701041530H1
cccgaatccggacccggttgtgatccgccaggtttgggcttcaaatctcgaatccgnattccaactcatccgcgaatccatcgaccactatccttttatctcgatggacacagaattccccggtgttgttttccgaccacacctggaccccacaaaaccctacaaccaccgcaacaacaatcgcaaccgccactccgaccactaccgcctcctcaagtccaacgtcgacgctctcaacctcatccaggtcggcctcactctcaccgacgccgc

SEQ ID NO: 3467 - DNA, 273 bp, Glycine max
  unsure (1)..(273): unsure at all n locations; Clone ID: 701041531H1
caaaaccctgaagaaagacacagccattgtttgtttactttccattgattgagcgaaagtttgttttttctgcgatcattttccattgggtggaagaaagtctcaacctttagtcgaaagagcaaggatctgagtgagtgagcgatcatgtgtggtggtgcgattatctccgacttcattccagcgggtcccgccggcggggcgcagcgcgtgnaccgccgacatcctgtggccgaatttgaggaagcggttctcgaagtcgctgctggacga

SEQ ID NO: 3468 - DNA, 275 bp, Glycine max
  unsure (1)..(275): unsure at all n locations; Clone ID: 701041532H1
aatttctccaacgctatcgagccaaacccaaacgttaactcagaagaagaccnnnnnnnnnnnnnnnnnnnnnnnnnnnnccgaaccactttcaactctccaacgtcgccacacgattcatcgcgtttcgcaggctgcaatggcgacgttcgaactgtaccgcagtcgacgatcggaatgtgcctgacggagacgctggacgagatggttcagaacggcactctcagccccgagctcgcgattcaggttctggtccagttcgataagtccatgac

SEQ ID NO: 3469 - DNA, 281 bp, Glycine max
  unsure (1)..(281): unsure at all n locations; Clone ID: 701041533H1
gcttagaagagcaaagtgtgtgatgtggttggacattcagtcccaatcacatggnnnnnnnnnnnnnnnnnnnnnnnncttatctcacacaccttcctcttcatccctctcaccaaggtgagagtgagaagcgcgtggaggacgatgaatcgcgcgttccgattcacatcgtgaccgcggcgacgcaacttcccgtcgaatttctggaaccctcgcctcaatccaagctcgtcatcggctttgactgcgagggcgttgacctgtgtcgcaaaggcacnctc

SEQ ID NO: 3470 - DNA, 278 bp, Glycine max
  Clone ID: 701041535H1
cccgaatccaagtgaaacgaaaaacactcatcatcatggattcagttgcattaaatggcaaaagcaatgataagcctcttcacgttgccatgctcccatggctggccatgggtcacatatacccttacttcgaagtcgccaagattcttgctcaaaagggtcactttgttaccttcataaacagccccaaaaacattgaccgcatgcccaaaaccccgaaacacttagaaccattcatcaaactcgtgaagctacccttgccaaaaatagagcatctc

SEQ ID NO: 3471 - DNA, 276 bp, Glycine max
  Clone ID: 701041536H1
gcagtgactaaaccaaacctctcactcgccgtcgtagggtttctcctttcgtttagcaacaacaacaatggttgcagccaagaaaaccaagaagacccatgagagcatcaacaacaggctcgctcttgtcatgaagagtggaaaattcaccctcggttacaagacggttctcaaatcacttaggagctccaaagggaaattgattatcattgctaacaactgcccccctttgaggaagtcagagattgaatactatgctatgttggccaaggttgg

SEQ ID NO: 3472 - DNA, 274 bp, Glycine max
  Clone ID: 701041537H1
gatgaaacaaaaccttgacatatttgactgggaactgagccaagaggaatcacagaaattcagccagattccgcagcgtaggatgtatcgcggaataacttttgtatcagaaaatgggccttacaagaccttggaagagctttgggattgagattcctgaaatcattcctaatagcagcaaaatgtcatataaggctgtgtgtttggtttaagatgggaggagggaactaggagagaaattttgtacttttcatgtggaactcacatcttttac

SEQ ID NO: 3473 - DNA, 203 bp, Glycine max
  Clone ID: 701041538H1
tttgtttgtgtgtgatgcgagtgagagagaagtgtgaaaaggggcgaatagggttagggttagggtttgattgaggatgccgaagaacaagggaaagggaggtaagaacaggaagaggggaaagaacgaggcggacgacgagaagcgggagctggtgttcaaggaggacgggcaggagtacgcgcaggtgctccggatgctgg

SEQ ID NO: 3474 - DNA, 273 bp, Glycine max
  Clone ID: 701041539H1
ccaacgcgctggggaagcacgtggaatacagtttcggttcgtcacctctgtggcacagcactataaataatcctcaagtttctacactttacctctcccaggaggaacagcgcagaacctaaccctcacgaaagcccttttcgattccgataactctcgttgttccgaaaccctaaccctaaccgggttttttcgtttgtttggattgaattggcatcggagggaggcgatcgattggaaattggtagtagtagtttagcgttgaagaacgat

SEQ ID NO: 3475 - DNA, 274 bp, Glycine max
  unsure (1)..(274): unsure at all n locations; Clone ID: 701041540H1
ggcnaacagaactctctagaacctctctcacacaatagcaaanaccnggaagactaaaactaaaaccccacttctctttttccgagtcttccagtgaaagaaaggcagcgatggaagaagacttcgacatccccggcggcgaggaaatggatctcggcgaagacgaggtcggcgaggagagggagatcggctctggcggcctcaagaagaagctcctcaaggaaggtcaaggctgggaaacccccgaagtcggtgacgaatccaagttcattac

SEQ ID NO: 3476 - DNA, 272 bp, Glycine max
  Clone ID: 701041541H1
ctttctccggcgacgatctcagattccggccactcctctcgccggccgagcccttactcttccctcctccgtcgagccctctccgattcgaatcgttcccagcctcgcaccaccatgaatcccgaatacgattatttgttcaagcttttgctgattggagattctggtgtaggcaagtcatgtcttctcctgaggtttgctgatgattcataccttgacagctatatcagtaccattggagtggactttaaaatccgcactgtggagcagga

SEQ ID NO: 3477 - DNA, 269 bp, Glycine max
  Clone ID: 701041544H1
cttcttgttcctctcgcccagaatccgagatcaaccctgacccctaaggccaggggtttttctcggcttcttcagattcctgaaatggcgtctgtttcagctttagccaagtacaagctcgtcttcttgggtgaccaatccgtgggcaaaaccagcatcatcactcgcttcatgtacgataaattcgataacacctatcaggctacaattggtattgattttctatcaaaaactatgtatctcgaagatcgaactgttcgactgcagtt

SEQ ID NO: 3478 - DNA, 269 bp, Glycine max
  Clone ID: 701041545H1
gctggtgctcctgcaacatcttctccacccaggaccacgccgccgccgctattgcccgcgacagtgccgccgtcttcgcctggaagggtgagaccctccaggagtactggtggtgcaccgagcgcgccctcgactggggccccggtggtggacccgacctcatcgtcgacgacggtggtgacgctacccttctcatccacgaaggcgtcaaggccgaggagctctatgagaagaccggcgaactccccgaccccaactccaccgacaac

SEQ ID NO: 3479 - DNA, 72 bp, Glycine max
  unsure (1)..(72): unsure at all n locations; Clone ID: 701041546H1
ccttctccaaagagaaagaacagcaagcaatcgttacccattacctatttcactttccacacaacatacgng

SEQ ID NO: 3480 - DNA, 270 bp, Glycine max
  unsure (1)..(270): unsure at all n locations; Clone ID: 701041547H1
gcgctgcattggtcatccattgttggaacattctctgattaccaaacaatgagacccccgagaggcggtggacgcggcggcggattcagaggtngccgcgacggtggtggtcgcggcagaggtggttttggtcgcggcggaggtggttttggtcgcggcggcggcggatatcgtgacgaaggaccaccctccgaagtcgtagaggtgtcatcttttatgcatgnatgcgagggagatgcagtgacaaagcttacaaatnagaaagttccc

SEQ ID NO: 3481 - DNA, 206 bp, Glycine max
  Clone ID: 701041548H1
ccaattcccaattcccaattcgaaacccttattcctttcaaagaaccaaattgagtgatcgtgatggcaccaaaggcagagaagaagccagcggagaagaagcccgcggaggagaagaagtccacggtgggagacaaggctccggcggagaagaagccaaaggccggaaagaagcttccgaaggagggaggcgccggcggagaagg

SEQ ID NO: 3482 - DNA, 276 bp, Glycine max
  Clone ID: 701041549H1
ttctagcaagctttcaaaagttgatgagttggttgatgagataaacatatataacattctagaaccatgctatcacggcacagaagcagagaagattacagaatcctatattaggatgccatctaccttccggaagttgggtgagaccgaaagaccttttcctgtgaggaaaagaatgttcggtcgtgcttggcccctaagagctcctgtgagagatggaattgtaccaacttggccacaactgatgaatagtaaatctgctccaccatgcacgga

SEQ ID NO: 3483 - DNA, 277 bp, Glycine max
  Clone ID: 701041550H1
gcaaaatcacccaagctcggtcgtaagaagagttcagcaaattcagagtcagatggaaacaacagcagcagttcacgactagctcgtttaagtctggatgagaaagtgtcagagagtaacctcactaagggacctactcctcctgtccatcaaaagaagccacaacgaagatctcttcctgctcggctggcccctgaaaggaacagtgtatcaaattcaaggactgcaccaacttcatccaaggctatcaaagatgaaaagtcctccttgtctagtg

SEQ ID NO: 3484 - DNA, 274 bp, Glycine max
  unsure (1)..(274): unsure at all n locations; Clone ID: 701041551H1
gatgacctcaacaacgtttgcatctgccactgttaatgtcctcccggccattacttttgtaatggcactcattttcaggctagagaaggtgaacttgagaaaatttcacagtgtagccaaagtcattggaacccttataacagtttcaggagctatggttatgactctgtacaaaggccctgccttccaaatcntaaagggtggaggagccatcagcaaccatagcaactctagcagtactagtaccaccgaaccctctgaccagcactggata

SEQ ID NO: 3485 - DNA, 275 bp, Glycine max
  Clone ID: 701041552H1
gcccggcaaccgctactacggcggcaacgaattcatcgaccagatcgaaaacctctgccgcttcacgcgccctccaggccttccacctcgacgcccaatcctggggcgtcaatgtgcagccctactccggctcccctgccaacttcgccgcctacaccgccgtcctcaacccccacgaccgcatcatggggctggatctcccctccggcggccacctcacccacggctactacacctccggcggcaagaagatctccgccacctccatttacttc

SEQ ID NO: 3486 - DNA, 271 bp, Glycine max
  Clone ID: 701041553H1
gttcaatgtaggattatttcagaacaatccccagatggctttctcaaatgatggtcctatgggccaagtgcacaatgtggccaactattgtgagcaaccaagaaactttgatgcatttgttaatggtgatactggaatcagaataaggactcgtcatggaagaaatgaacagccaaacatgaacatgatgatacaatcacaaggtattgcaccaaggagaatacgattgggagttgttaggcgtccgcttggttctcaggagacagcaaaa

SEQ ID NO: 3487 - DNA, 270 bp, Glycine max
  Clone ID: 701041554H1
gaagcagtggcccctgtggtgaaggtgcgtcaacatcctcctagtgctagtcgtgtgctacttccagatggtagatacatggcttatcatgagcaaggtgttttggccgacacagctagattttcacttgttgctccgcactcttttctttcatccagactagcaggtttacctggagtcaaagcatcattgcttgaagagtacggcattcgtttggtcacatatgatcttcctggttttggggagagtgatcctcatcccaacagaaat

SEQ ID NO: 3488 - DNA, 270 bp, Glycine max
  Clone ID: 701041555H1
tccacatcctggtgaattctcagacaattctagaccttttcaccactgttactttatgggtctgcagcgtaagcaaggagttccagtgaatgaaggtgaacagtttgatataaggttaactgttgaagaatttaaacattctgtcaacgtttacactctatggaaacctggaatggatatccatgtgtcccatgtgaaacgcagtaacattcctaactacatatttcctggtggtgtgcgacctaccttcccatcaaaagtaactgccga

SEQ ID NO: 3489 - DNA, 272 bp, Glycine max
  Clone ID: 701041556H1
gtgaaatctaacaccgagcgtgtagatagtctatgaaatccaattaaatgttcttctgagaacaaagaacataagataacaaacagaaagcgcttataaatggctttccacgaccatctaccgcacgaaatcacgttccagccgtttaccgaggagcagcagttaggtcagagcagggacatgcagcggctgctcccgctctccggcggggcgccgacgtggctgaacaacagcaccgcggacgacgctccgccagcagaatttcctccacc

SEQ ID NO: 3490 - DNA, 267 bp, Glycine max
  unsure (1)..(267): unsure at all n locations; Clone ID: 701041557H1
atttgctcttgctgatgtnccagctacttcgtagctgcatcttgtgtgtttaggtttcaatttttgcttaatattttacttgaatatgcaatagatcatttatccgcttggatncggaattttcctagcctgcnatgttcacacgaacggtgggantaggggtgaaccatatgcctattaatttatatttatttatgtcctttcttttatggaagtctttttttncactaggatcgagtgaagggaatctgctagtctagttgtagc

SEQ ID NO: 3491 - DNA, 269 bp, Glycine max
  Clone ID: 701041558H1
caaacttcaacttgtaatcaagggagagagaaaatttcaagcacaaaaaatggcggagaagaaagtggtgatcctaggaggtggtgttgccggtgccaaccttgcaaaaactatacaacatcaagccaacgtcacccttattgatccgaaggaatattttgagattccatgggcaagtttgaggggattggttgagccaacttttgctgaaaggatagtaatcaaccatagagagtacttcaaaaagggtaaccttgttgtatccagtg

SEQ ID NO: 3492 - DNA, 267 bp, Glycine max
  unsure (1)..(267): unsure at all n locations; Clone ID: 701041559H1
gcagaaacgtgaggnaccacttggcaaggtgttctggttccagtttcagacgatcatcttctcaaacagaaagaaggaagtcatcatggttttgttccctcaatcaatctgttgacacaggcagtggatgctgattacattttggtctttttctttctcaccccaacattataccccatgattccaaatatcatccactgttcactacatttctacattgattgtaaataccaagcccaattgttttcagctgggacaaatttcttt

SEQ ID NO: 3493 - DNA, 89 bp, Glycine max
  unsure (1)..(89): unsure at all n locations; Clone ID: 701041560H1
gtgaaacttgttttccttgcgcgaantttggcattccccaatcgcttcatncctcattctaacttaaccctaaccccaacaacnntana

SEQ ID NO: 3494 - DNA, 268 bp, Glycine max
  Clone ID: 701041562H1
ggagaagaaagatattgtgcaacttcattagagtccatggtagattttgtcacttctaagcttgggaagaatgctcgagttatttctacagaagcagaaaaggaaagtaagtcccaaaaattctcggtgaaagatggagtgaagttgttagcagaagataaggtcattgtttgtcatcctatggattacccatatgttgtgtttatgtgtcatgagatatcaaatactactgcgcattttatgcctttggagggagaagatggaacca

SEQ ID NO: 3495 - DNA, 269 bp, Glycine max
  Clone ID: 701041563H1
ttttgcttgtgtgaagtgccaaattaagagagaaacagagagatagaaggaaaagcatcaaagatgaaacccaacttttcatttttgtttaagcttttgatactgcaatatctagcagttctatccatttctcaggaatttgatttcttctactttgttcagcagtggccaggagcatactgtgacacaaagcagagctgctgttatcccaagactgggaaaccttcagcagatttcagcattcatggactttggcctaactacaatga

SEQ ID NO: 3496 - DNA, 272 bp, Glycine max
  unsure (1)..(272): unsure at all n locations; Clone ID: 701041564H1
cgcanaacgagggagcagcctcaggaggagaaggatgtctcacaggaagttcgagcacccaaggcacggttcactgggatttcttcccaggaagcgtgctgctcgtcacaggggaaaagtgaaggcattccccaaggatgacccatccaaggcacccaagctcactgcattcttgggttacaaggccggtatgactcacattgttagagaggtcgagaagccaggatcaaagcttcacaagaaggaaacttgtgagcctgttacaattattg

SEQ ID NO: 3497 - DNA, 271 bp, Glycine max
  Clone ID: 701041566H1
ttttgtgcttctttctgtgtgcaagaaaggtaaaagctttcacacaccaagaaaagtagccatggctgcttgctcaagaacttctcttttgctccttttctttctctttggattctccgcagctaaggaactattggttggaggcaaaatagatgcttggaagattccatcttctgaatcagattccctcaatcaatgggctgaaaggtctcgtttcagagtcggcgatcatcttgtgtggaaatatgagaatgggaaggactcagtgttg

SEQ ID NO: 3498 - DNA, 269 bp, Glycine max
  unsure (1)..(269): unsure at all n locations; Clone ID: 701041567H1
caatttccatcttcaacttcaacacttaaactccttttagtttcaataatccacaccccaaaccccancatctttccctatttattttcatcttagttttccctaggaccatatattataccatatttatatatcttcacatacttaatagtatataataatgggtgttgtacggacgtgggagagcaggagggcggagtggaggcctttcgccggagcctggtggcagccgccggcatccagcggcggaaagacgatgagggggggag

SEQ ID NO: 3499 - DNA, 270 bp, Glycine max
  unsure (1)..(270): unsure at all n locations; Clone ID: 701041568H1
gcgaagggagagcgaataaaaaaaggcaaatcaaattcgagagaaggagagaatttagagagggaaaggatgaagatcacggcgttgttggtgcttaaatgcacgggcgagggatccgatccggtgattctggcaaacgcttccgatgtcagccacttcggctacttccagcgttccagcgttaaggaattcatcgttttcgttggtcgtacagtcgccagtngcactcctcagggccaacgccaatccgtacaacacgaagagtacaag

SEQ ID NO: 3500 - DNA, 272 bp, Glycine max
  unsure (1)..(272): unsure at all n locations; Clone ID: 701041569H1
gtttctttcttcaacgtttccatcatacacagatccnaatcctctnctcaagccctaatttcccctcatttccatggccacagaagagtcccactgtcgcggtggaacccgctcccgaacctgcctccgccgatcctcccccggaggagaaggaggagaccaaacctgaagccaaggctaagaaaaccaaggagcccaaacctaaaaaggtttccagacctcgcaaccctcccactcatccttcctacgaagagatggttaaagatgcaatt

SEQ ID NO: 3501 - DNA, 267 bp, Glycine max
  unsure (1)..(267): unsure at all n locations; Clone ID: 701041570H1
taattacttgccttgaggaacgttccagaccacatacagagntttctctagtgatcttcgttcttctgtggagatcttgttttttcatctcacttttcttctaattaaggaacaagctttccgcagttgaaaaccctagctagctagcttccaccaatttgaatcaccaatggctcgctctttctctaacgtcaaggttctctctgctcttgtggccgacggattctccaacactctcaccaggcgtgggtacgcagcagcgacaca

SEQ ID NO: 3502 - DNA, 267 bp, Glycine max
  unsure (1)..(267): unsure at all n locations; Clone ID: 701041571H1
ggaacattgtaatcgtaagctncgaagctncatgatattccaacanccttcaaagacagagaaganagaagaaaacaacaccaacaaacaaacatcaatggcaaacacgtattcgtggctcttcctcgcgatttgtgccaccctcttgcttcttctgtcttcgtcgccgacagcggacgcgggagcgctgggcatggaaatgacatggataccctccatgcccatggaagaggagttccagctggacagcgagatcagccggcgcat

SEQ ID NO: 3503 - DNA, 268 bp, Glycine max
  Clone ID: 701041572H1
caaaaaacaaaaaattaaagtaggcagaggcagcgcagatttagcataacaaaattgaagtaagcctcacattcacagatttcccagtaaacaacgaacccatcatctcaatctgcttcttcactctaatcgaatcgaaccacccttcaaatcgcagatcaaaatcgaagcttatacatatacatacaccacgcgtgaatccaacggtgatgatgaccgggaagcaaggtttcttctctctgcgaggctcactcctcttcctcgcagt

SEQ ID NO: 3504 - DNA, 265 bp, Glycine max
  Clone ID: 701041573H1
ctccagacacaatccatggatcacttcgtgtgacagtccaaggtgaagtcattgagcaatcatttggagaacaacacttgtgttttagaacactacaacgtttcactgctgccactctagaacatggcatgcaccccccgatttctccaaaaccagaatggcgtgctttgatggatcagatggctgtcattgctactgaggaataccgttccattgtattcaaggaaccacgctttgttgagtatttccgcctggctacaccgga

SEQ ID NO: 3505 - DNA, 264 bp, Glycine max
  unsure (1)..(264): unsure at all n locations; Clone ID: 701041574H1
ctcacccttgttgcatgttccttacttcctttgaaacctttggcnaccaacacacacacttngatcaactttcctcgtcccttgctttccactccaccaaggtaccaaccaacctaccaaatggcagcaaagccagctgaagaagctcctcaaggagaaaccctcaagtaccagtcgtgggttttgaaagtattgatccactgcgatggctgcaaaaggagagtcaagaaaattcttcagggaattgatggggtttatacaaca

SEQ ID NO: 3506 - DNA, 263 bp, Glycine max
  Clone ID: 701041575H1
cgttccgttacgctacgttcactctgtctgttgggcttttagggttagggttagggttagggttttggtttgtggatctattgttgtcgctgcgatggatcgcaagaggggaaggcatgaagctgccttcaatttcaatggcggcgccaagaaatcgaggcctgaaatggactcctttccaactggtttaggaagcaaatcgaagccatgcacaaagtttttcagcacctctggctgtccatttggtgaaggatgccacttcc

SEQ ID NO: 3507 - DNA, 263 bp, Glycine max
  Clone ID: 701041576H1
cacgagactcatacattgtgctgccaattatagtaactctctatttctctttccatctctcaagttctgaagaagaaacatgtgtggaggtgctatcatctcagacttcattggtgtgaagcgtggccgcaacctcgccgcgcaggaactatggtctgagcttgaccctttctctgacttccttggcttcgataccaccaattccaaaaaccaaccacccctgcagaaaattccagacaaaaaagtggtgtcatcatgtgaga

SEQ ID NO: 3508 - DNA, 262 bp, Glycine max
  unsure (1)..(262): unsure at all n locations; Clone ID: 701041577H1
tggagatgcttcgcagaagcagcagaagactcttcgtctccgcgtgtctgtngttgcttctgtcactgtcaccgtcaccgttgagtgtcgttagggccgcccacgggtgttctacgtgaagtgcaagtatcaggaccgcaccctctccgccctcaaagcccacgactaccgccgcnagctctccctcctcgccggcgtcgacctccccctcggaggctccggccgccccgacgccgtcgggctttattacgctaaaattggg

SEQ ID NO: 3509 - DNA, 266 bp, Glycine max
  unsure (1)..(266): unsure at all n locations; Clone ID: 701041578H1
aaaaagancnacaggnaaaacagagagagagaaatcttctcaaaccatcttggcaggtgtgtctttcatnctatgttctactgctgggtaattggaaggctaaaccaggagctgcttcattcctcaattattcttcaanccttctaagaagttcatattcttcagtgttctctagtgtcatcaccaaaatcagggaatgctgaaagatgtgcttgatagttaagaattccttcactgaggctaatgagtccgtgcctccatctgag

SEQ ID NO: 3510 - DNA, 265 bp, Glycine max
  Clone ID: 701041579H1
gaaatctgaagctaacttaagggaaatgagatggccaatggcaacactagtcatcgcttcaagctcttgcttttccttctaactctgcactcttcattcgctgagattttcttcgaagagagattcgaagatggatggaagagccgttgggtgctatccgattggaaaaggagtgaaggaaaagcgggtaccttcaagcacacagcaggaaaatggtctggggatcctgatgacaaaggtcttcagacatataatgacgccaagc

SEQ ID NO: 3511 - DNA, 263 bp, Glycine max
  Clone ID: 701041580H1
aacgaaaccagagattcgtaattgcacattctcttttgttgtctccagctcatagaatattataaactcagattcattcagaatttcagattcacctttttctttcttctctaccttctttttcctctgacagctttttgcagaaagttgtgatttttccttgaaagatggcatctttgagcatgatccagatcagaactgggaattgtgcatctgggtttggtttgaatgtgctgggaaggttaaggttggtcccagcagag

SEQ ID NO: 3512 - DNA, 268 bp, Glycine max
  unsure (1)..(268): unsure at all n locations; Clone ID: 701041581H1
cgcaanaaaaagaaagaatcccaggcgaggagaaagatggaggggaaggagcaggatgtgtcgttgggagcgaacaagttccccgagagacagccaattgggacggcggcgcagagccaagacgacggcaaggactaccaggagccggcgccggcgccgctggttgacccgacggagtttacgtcatggtcgttttacagagcagggatagcagagtttgtggccacttttctgtttctctacatcactgtcttaaccgttatgggag

SEQ ID NO: 3513 - DNA, 258 bp, Glycine max
  unsure (1)..(258): unsure at all n locations; Clone ID: 701041582H1
ttttgatcatacgatttcgttttgcctaatctaaggnacaaattcaaacaaacaaggtcactcctnnnnnnnnnnnnnnnnnnnnnnnnttctctgtcaagtgctgtctatcactcgttgttgatttcattccaacaacgtcaatttcncatttccttgtcttgttgtgatcactctttagtatttagcatacctgcaaagttgtactctttttttttccttccctttgttttgagctctcagattactcagcaatca

SEQ ID NO: 3514 - DNA, 266 bp, Glycine max
  unsure (1)..(266): unsure at all n locations; Clone ID: 701041583H1
ctgccgtggtgctttctccactgcctnaaccgactctctctctctgcctctgcaagcttgttacttgggctttgtttgattgattgccccaatggccgcgtgtggctatatatctgctgccaacttcaatcatcttgttggcgccagaaacttatccaaattcagttcttcggatgccacaatttcgttatcatttggcgggagcgattcaatgggtcttagtttgcgacccgctccaattcgtgctcctaagaggaaccatttct

SEQ ID NO: 3515 - DNA, 264 bp, Glycine max
  unsure (1)..(264): unsure at all n locations; Clone ID: 701041584H1
ctccttcttccgcatcaactcgtcttattagagtttttactaatcaattatggcttacgagataaccgagataaagaagattggtataggcctaattggtttcngcttatttttcacatttcttggcataattcttttctttgaccgtggtttgcttgctctgggaaatattttttccttggcaggggttggcattttgcttggttggcgttccacgtgggcacttttcactaatagagccaactttaagggttctgcatcatt

SEQ ID NO: 3516 - DNA, 263 bp, Glycine max
  Clone ID: 701041585H1
gcaatattgtgcacatgatgggatgtttgactgcttacacatgtgctcagatgcgcatgaatgcgtttagtagaaaatgtcctgttaggtagtcatcagcaactgtcttctctgggttccatgccctcgttggcatgcaccataggatgccgagtaaatgctgatgcagataattgcagtttctcagtattctctcaatctcttgaagaaaatggtgtggtctgcctctatgcatctgcttaccttctgtgggcctcctgtgt

SEQ ID NO: 3517 - DNA, 265 bp, Glycine max
  Clone ID: 701041586H1
gtttctataagtacagccatgtcaaatccattaccagttctaccattccctttaccatttcaaagtatttcaaataaccctttacatttacagggtggagcccatccacctttacctcctggtcgccctcctgctccatctcaaatgataccccatccaaatgctggtgcatttatgccaagccaacagccaactgttggatatactaatttaattagttctctaatgtctcaaggcgtgatctcattggctaaccagctgcctg

SEQ ID NO: 3518 - DNA, 263 bp, Glycine max
  Clone ID: 701041587H1
ctattacatatatcagaatcattaaagataagattatattgctaagaagaaaaaatatgaaggttgtctacttgcttgttgccctcttggctttgacatcaactgttgtctctgcctatgaccctagtcctctgcaagatttttgtgtggcagccaaagaaaaagatggtgtatttgtgaacgggaaattctgcaaggaccccaagcttgtcaaagcagaagatttcttcagacatgtggaacctgggaaaactgacaaccca

SEQ ID NO: 3519 - DNA, 262 bp, Glycine max
  unsure (1)..(262): unsure at all n locations; Clone ID: 701041588H1
caatcttctgagagtgtttggttganagtagcaaagatgtttcctttcgggcaaaagggtcanaagataaaggggactatggtggttatgcagaagaatgtgttggatatcaacagcatcaccagtgttggagggatcgttgaccaaggcttaggcttcataggcagtgcagtcgatgcacttacttttgcagccaccaaaatctccatccagttgattagtgctaccaaggctgatggtgggaaaggaaaaattggaaaga

SEQ ID NO: 3520 - DNA, 182 bp, Glycine max
  unsure (1)..(182): unsure at all n locations; Clone ID: 701041589H1
aaaacttgtaaatttcttattttgatacaaagattgtcttgtcctgacgaccgtctttgtatggttggtgctggctttaaacctcgctctcactcgcatccctccttattagctttaatttaaacctctcgtgcggtgttgtncgtctcgcgctccccaaatctctcctcatctcgttcctc

SEQ ID NO: 3521 - DNA, 259 bp, Glycine max
  Clone ID: 701041590H1
agttactatactctctctttctgaaacaatttgcccaattgtttgagatgttcaatatgagatttgtatctcaagattgggtggtttcatgtgcactaatacttctggtgtcatgcacaacatactcatcagcttctttggggaaacctgagaacaacataaaaacatctgtttttaaatcacccaagattgagctaggtccagggttagtttcaaacaaattttattttgatgttgactttccaagaggccatattgc

SEQ ID NO: 3522 - DNA, 259 bp, Glycine max
  unsure (1)..(259): unsure at all n locations; Clone ID: 701041591H1
actttcttccttaattttctagctcttgctacgtacttgaattcaattagttattaatggctgagattgagggttctcccggaagctccatgcatggagtaacaggaagagaacaaacatttgtagcctcagncgcttctccaattgtccctacagacaccacagccaaatttgctctcccagtggattcagaacacaaggccaaggttttcaaactctctccctggccaatccccacatgagaaccttccacctttct

SEQ ID NO: 3523 - DNA, 260 bp, Glycine max
  unsure (1)..(260): unsure at all n locations; Clone ID: 701041592H1
ggtgagtgggaggcattttgatttgagaatggcatcagcgtgtctgaaattgagaaatttgagcagaggaggaggagcatttnngtgtgggcgttattcgaagttgatacatgcnnnnnnnnnnnnnnnnnnnnnanaagaggaggtgccgagttctagaatctctaggccgctctctgaaatactgaaagagctgaacaagaaagtaccggactccctcgtcaaaacccgcctccagaaagatcaagatgcctcnccca

SEQ ID NO: 3524 - DNA, 260 bp, Glycine max
  Clone ID: 701041593H1
tgttgtagagagaagtaatggcgaacatagacatcgaagggatcttgaagcagcagcagccttatgatgggcgcgttccgaagacgaagatagtgtgtactttgggccctgcttctcgatccgtagaaatgaccgagaagcttctgagggcagggatgaacgttgctcgtttcaatttctctcatggcacccacgactatcaccaggaaaccctcaacaatctcaagactgccatgcacaacactggcatactctgtgcc

SEQ ID NO: 3525 - DNA, 262 bp, Glycine max
  Clone ID: 701041594H1
taaatctcctctttgtttccgagtcagagagcaatggcacgtaccaagcaaaccgctcgcaagtccaccggcggaaaggcgccgaggaagcaattggcgactaaagccgctcgcaagtcagctccggccaccggcggagtgaagaagccccaccgcttcaggcccggaacggtggctctgagggagatcagaaagtaccagaagagcactgaacttctgatccgaaaactcccattccagaggctcgtcagagaaatcgctc

SEQ ID NO: 3526 - DNA, 262 bp, Glycine max
  Clone ID: 701041595H1
gtaaacttttggtgtgagtgttctgcgcgcgccgcatcaacaataatttctcaaacagcgtcgtttaagttaaagaaacccattagactaggcagatcattatggctgtacattccgaatcagcttcatcagagaagaaatcaagcaatggagtgaatgagttgctgacttttaatgctgagaatatgcaaagcaacatgaaaattatctattacagccgaacatttttatctataattggtggcgttgttgctggaatttt

SEQ ID NO: 3527 - DNA, 260 bp, Glycine max
  Clone ID: 701041596H1
gtattttcaaacattagcaaatagcaaccaaacatacaaagatgaaagaaacatgttgttgtgctagttttagttttggcaaggcaaagccttatttgttaacggtgggacttcaatttgggttcgccggtgcatacatcttctccgtcgctagtctcaaccatggaatgaatcgttacgtcttcgttgtctatcgcaatgccatcgctgcattggcccttgctcctttgcatgattttcgagaggaaaattaggccaaa

SEQ ID NO: 3528 - DNA, 125 bp, Glycine max
  Clone ID: 701041601H1
aattgagccacttaccatcagatttagatctcccaacagagagtttctcaaaattgccaagtacccttttcaggatcaaggaagagaatcaagaaccaccaaaaggtgttgttctttgttgtagt

SEQ ID NO: 3529 - DNA, 276 bp, Glycine max
  Clone ID: 701041603H1
cttattgaagactacccttatgcagctgatggactcctcatatggtccagcataaagaagttggtcaggacctatgtcaaccattactataaaaattccaatgccgtttcttctgacaacgaactccaatcttggtacagagaattcatcaatctcggacaccctgatcataaaaatgctagttggtggcctaaacttgacatccctgaggatctcacctccatgcttaccactgttatttggcttgtatcagcacaacatgctgtcttgaacttt

SEQ ID NO: 3530 - DNA, 275 bp, Glycine max
  Clone ID: 701041604H1
tctacaaccaagataagccatgggatgaccattggatcttttgggtaggaccatttattggggcagccattgcagccttctaccatcagttcatccttaagagcaggtgcagctaaggctcttggatcattcaggagtaacccccataattgagttgtcttctcttccttatgatggctctagtggaaagaagataattggagagatggaggttgatatggcaagtttaataataattgggaatgcttttggcttgtgttttgcaacgtttcttt

SEQ ID NO: 3531 - DNA, 275 bp, Glycine max
  Clone ID: 701041605H1
cttccacttgctctaacttctgcaacaggaaggaaagaacttcccgaggatctgttcactgtaaaatattcttccttccctgctccagtcctaggttggcaaatgggtgttccccatggcatgggtatctcaatgcaatacaataatgtgcctgtgccaagttttccacagccatcaaagtcaacaaatccgtttgatttgcagttggttcactgctgacatcaaaccccaacttttccttccatgtcatccttgcaaggtgccctgcctagtgt

SEQ ID NO: 3532 - DNA, 270 bp, Glycine max
  Clone ID: 701041607H1
gcaggtagccacagctgttataaaagaagcagtggaggaggacctagctgaaggatatcatggaatggatgctcgggagtgcagaaactaagcgaggatgaaatcgcggaatatgtgcagaataacatgtggagtccagagtaccctacattagtttacaagaaagaatgagtaacctgcagggttgataactacaatttccctctcgatgcatgtttggttcgatcaggttgttcacagaatcctgtttactggattagatgatttaaa

SEQ ID NO: 3533 - DNA, 273 bp, Glycine max
  unsure (1)..(273): unsure at all n locations; Clone ID: 701041608H1
agcaagcaacatcaatgttcctcccacaacactactcaanacatggaccctcaccgccgccaccgccaccgccgccgcacgtggtgctgctcctttgccgtccctccctccagccccgacaaccttactaactcctccaaacctctccctcgcaactccgagcctcactccaaacctgcattctccctcccaaactcccccaaatcccgcatcccagtncaagatcgaccctcgccggatcctttccccgggaagagtctcccccatcgactc

SEQ ID NO: 3534 - DNA, 270 bp, Glycine max
  Clone ID: 701041609H1
gtgagtctacgtgtttgagagaaaggttgagctatagcctaaagggagagacacataaatagtttctactttctattcatagatagatggctggcccaattatgagacctcagattgtgctatttggctcctccataattcaaatgagcttcgacaatggtggttggggtgctattctagctaacttgtacgctaggaaggcggacatcatcttaagaggatactctggttggaattcaaggcgggctttggaggttttggatgaaattt

SEQ ID NO: 3535 - DNA, 269 bp, Glycine max
  Clone ID: 701041612H1
cagaatcggtcactaaatccgcaatcatgaagctcgataccaccggtctcgaatcgtttcccacactgcttgcgcctcaaaacgacgtcgttggagaactctccgccgctccatccttcgaccttccgaattccaacgatttcgatgggtttgtgaaagaagctattcagatggtgaagcccgcgaagggtactacgactcttgcttttatatttaaggagggtgttatggtagctgctgattctcgagctagcatgggaggatatata

SEQ ID NO: 3536 - DNA, 271 bp, Glycine max
  unsure (1)..(271): unsure at all n locations; Clone ID: 701041613H1
tttctctcttctctctccacccaaaccctaactccccgaccctgttcccctctcgtatccgtcatganaggnggaaagtcaagaccgaatctaagagagccgatcccaaacttgctgtgaataagaagggagccgccaccaaggctaggaaacccgccggcaaggggaaggcagcgaaagaccctaacaagccaaagaggcctccaagtgctttcttcgttttcatggaggagttcaggaaggtattcaacaaagaacatcctgaaaacaa

SEQ ID NO: 3537 - DNA, 271 bp, Glycine max
  Clone ID: 701041614H1
cagctatggaaggagaaaatggaaagaagctgaaaatactgtgcctccacggattcagaacaagtgggagttttcttaaaaagcaaatcagcaaatgggatccttctctattcattcaatttgatatggttttcccagatggtaaataccctgctggagggaagtctgacatagaaggcatcttccctccaccttactatgagtggtttcaattcgaaaaggacttcacagtgtactttaacttggaagaatgcatctcatacttatgcga

SEQ ID NO: 3538 - DNA, 273 bp, Glycine max
  unsure (1)..(273): unsure at all n locations; Clone ID: 701041615H1
gtttcgttgtaaagaagagtgttgaagccttttcttttcttcttcctctgtcttgtcttcaacctcgttttcttttcttcgtcttctatcaccgattccgattcgnnnnnnnnnnnnnnnnnnnnnnnnttattgatcctctctgcgatcacgaattttcccattttctccgtttcctcggcgaccaaacggaggagaagaacgcagttctgaaaacgattggaaaatgctgggaactgcactgcaattcagcggcgttcgcggcgaggatcg

SEQ ID NO: 3539 - DNA, 275 bp, Glycine max
  unsure (1)..(275): unsure at all n locations; Clone ID: 701041616H1
gatgcaatgagttacagtgagatacgaaaatggtgttaatgggaggagttggagtaccctcaatctcaatctgttttttgttccaaacaagacccaccanacatttgtgtctcaaattcagattgaaacattcactttcatattcaatcactagcatggcattgnnnnnnnnnnnnnnnnnnnnngaaaggaagcttccaattctgctgtttgatatcatggacaccctgttcgtgaccctttttaccaagatgtccctgccttcttcggaatgt

SEQ ID NO: 3540 - DNA, 274 bp, Glycine max
  unsure (1)..(274): unsure at all n locations; Clone ID: 701041618H1
gaacgaatganggattgataatatcaatcctgggtcacagaaacgcggctcagcgtaagttgattcgtgaagcttatagtacaacccatggagaagatcttcttaaagatttagacaaagaactttcaagtgactttgagcgggctgtgatggtttggacattggatccttctgagcgtgatgcctttttagcaaatgaagccactaagatgttgacttcaaacaattgggtcattttggaaattgcttccactagatcttcacttgacctcct

SEQ ID NO: 3541 - DNA, 274 bp, Glycine max
  Clone ID: 701041619H1
ctccgatgggctaatccctcactcttgttcttcagtctcctcctattatccgccaccgtagccgccgccgaacggatcgagatgaagacgaccttctgatccgtcaagtggtgccggatgcggaggaccaccacctgctcaacgcggagcaccacttctccgccttcaagacaaagttcggcaagacctacgccacgcaggaggagcacgaccaccgcttccgtatcttcaagaacaattgctccgcgccaagtcacaccagaaattggatccc

SEQ ID NO: 3542 - DNA, 271 bp, Glycine max
  Clone ID: 701041621H1
ttgatatctggaatgacagcactgaggtcgctaaatgtttcaaattctcgtataaccaatgaaggactacggtatttgaagcctttgaagaatttacgcactcttaccttggagtcttgcaaggttactgcttctgaaattaagaagcttcagtcaactgatcttccaaatttgataagctttcggccagaataaatcaggagaataagagaattctgttatctgcctgttgaacaattctctgtacatatttatggctactgtttggata

SEQ ID NO: 3543 - DNA, 268 bp, Glycine max
  unsure (1)..(268): unsure at all n locations; Clone ID: 701041622H1
cttggttacactgaagatgatgtggtctccactgactttatcggcganagcagatcaagtatttttgatgcaaaggctggaattgcattgaataagaactttgtgaagcttgtttcttggtacgacaacgagtggggatacagctcacgtgtcattgatcttcctgtattcgttgccaagaagtctctttaaggtgttacttcaaagtagcttgtcttcacattattaccgtatgtttatgtttagctgcgatttagtgtctgctcga

SEQ ID NO: 3544 - DNA, 267 bp, Glycine max
  Clone ID: 701041623H1
tcatctttagttcttcagtaatttattgtgggattctattctaagattttgagaatgtctagctgtgggtgtggaagcagctgcaactgtggcagcaactgcggttgcaacaagtactcttttgacttgagttacgttgagaagacaaccacagagactctagttttgggtgttgggcctgtgaaggcccaattggagggtgctgaaatgggtgttgcatctgagaacggtggctgcaactgtggatcaagctgcacctgtgaccca

SEQ ID NO: 3545 - DNA, 273 bp, Glycine max
  unsure (1)..(273): unsure at all n locations; Clone ID: 701041624H1
caagcataagcacaagcacaagcacaagcacttctctaattccctttcacactctattacagatttcacaagtgncttacacttcaaatggctttggaagcnccttcaatcacccaccacanccactccatcgtttagtccctttgangatnccagtctcagttacttagagacaccgtggncgataggaaagcgttctaagcgtanccgcacggngcaacaactgcaacacccttcatgcaccgaggaagagtacctcgctctttgtctcat

SEQ ID NO: 3546 - DNA, 99 bp, Glycine max
  unsure (1)..(99): unsure at all n locations; Clone ID: 701041633H1
aaatttganaganttcaccaccctttttgctctgtttatatttttaatttttctcctgctctcagctgctgtaagtaattgttgcggtgctgttttggc

SEQ ID NO: 3547 - DNA, 92 bp, Glycine max
  unsure (1)..(92): unsure at all n locations; Clone ID: 701041634H1
cttcttccatttgggttttctcaaaagtgaaaagcaaattccgtnacttccacaatcancacngngncncgcagtatgcacaccagtctcag

SEQ ID NO: 3548 - DNA, 270 bp, Glycine max
  unsure (1)..(270): unsure at all n locations; Clone ID: 701041635H1
cgaccgcgtactttactttctggacgcagtttctgcggttcaaacgagcgttttgagtaagcgattcatttacctttggacttccctcccagtcctcaagttccacgaccctctccttttccactctttcgtcgaccacttcctctccctcagagacgcttccaccaacgtccacgctnncaacttcacgtgccacgatgaactcgatgatgatgggcatgttgtagattccatcattgactatgttaccctcacacccaccatctccac

SEQ ID NO: 3549 - DNA, 269 bp, Glycine max
  Clone ID: 701041636H1
cataaatattccgttttgcgtttctctgcctaaaaggattgaaagatgggtcaagcactaggttgctatcaagttgatcagtcaaatgtggctatcaaggagcattttggaaaatttgatgatgtcctagaacctggatgtcattgcctgccttggtgtcttgggtaccagattgctggtagtttgtcactgcgtgtgcagcaacttgatgttcgatgtgagacgaaaaccaaggacaatgtctttgtcactgtggttgcatctgtgca

SEQ ID NO: 3550 - DNA, 131 bp, Glycine max
  Clone ID: 701041637H1
aacaaagaacaaaaacattaatagagtatagaaagaaaaaagatgatgtccccatcccatgtgatcctatccatatttttcttggtgtgtacaacaacaccaccactgtcccttgcccagaacacccctca

SEQ ID NO: 3551 - DNA, 267 bp, Glycine max
  unsure (1)..(267): unsure at all n locations; Clone ID: 701041638H1
caaattccaatcccaagaagctacctctcatcgttttctttcacggtagcngcttcgtgcgactcagcgcggcttccacaatgttccacgatttttgcgtcgaaatggcgaacaccgcggaggccttcgtggcctccgttgactaccgcctcgcaccggagcaccggcttccggcggcgtacgacgatgccgtggaggcgctgcggtggatcgcgtgcagcgaagaggagtggttgacgcaatatgcggattatagtaagtgttatc

SEQ ID NO: 3552 - DNA, 265 bp, Glycine max
  Clone ID: 701041639H1
gtgaaccactacaagctaagagggaatatccaaagttataatcttggtggcatgggttgcagtgctggactaatctctatagaccttgccaaacagctcctccaggttcatccaaactcttatgccttagtggtgagcatggagaacatcactctcaactggtattttggcaacaacagatcaatgctagtctcaaattgtctattcagaatgggtggagctgcagtcctcctctccaacaagtcttctgatcgcagaagagcca

SEQ ID NO: 3553 - DNA, 252 bp, Glycine max
  unsure (1)..(252): unsure at all n locations; Clone ID: 701041640H1
cntttctctctcncattgtcggtgtacgcagatcttgtgcactccncgctcttggcacctgctttctgctgttgttcttgcggattggctttgtggggtgtgacaaattgtggttttnctgttgagagtagctganaggtgggtttttgtgtggaaatgagggcgcttttgctggtggggtggtggagtgtatgataataataaagggtggtggtttttggttttgaagattgtggcttggaaagggaagga

SEQ ID NO: 3554 - DNA, 222 bp, Glycine max
  unsure (1)..(222): unsure at all n locations; Clone ID: 701041641H1
aaaatttgaaaganttcaccaccctttttgctctgtttatatttttnatttttctcctgctctcagctgctgtaagtaattgttgcggtgctgttttggcnnnnnnnnnnnnnnnnnnnnncccaaaagagactatgctcggggactcagctctgttgggnggnggaggaggagaaggtggtgcctccgccgatgtagtggcggcgaccgccacgcatgatg

SEQ ID NO: 3555 - DNA, 92 bp, Glycine max
  unsure (1)..(92): unsure at all n locations; Clone ID: 701041642H1
cttcttccatttgggttttctcaaaagtgaaaagcaaattccgtncacttccacaatcancactngnanancantatgcacaccagtctcag

SEQ ID NO: 3556 - DNA, 265 bp, Glycine max
  unsure (1)..(265): unsure at all n locations; Clone ID: 701041643H1
cgaccgcgtactttactttctggacgcagtttctgcggttcaaacgagcgttttgagtaagcgattcatttacctntggacttccctcccagtcctcaagttccacgaccctctccttttccactctttcgtcgaccacttcctctccctcagagacgcttccaccaacgtccacgccnncaacttcacgtgccacgatgaactcgatgatgatgggcatgttgtagattccatcattgactatgttaccctcacacccaccatc

SEQ ID NO: 3557 - DNA, 263 bp, Glycine max
  Clone ID: 701041644H1
cataaatattccgttttgcgtttctctgcctaaaaggattgaaagatgggtcaagcactaggttgctatcaagttgatcagtcaaatgtggctatcaaggagcattttggaaaatttgatgatgtcctagaacctggatgtcattgcctgccttggtgtcttgggtaccagattgctggtagtttgtcactgcgtgtgcagcaacttgatgttcgatgtgagacgaaaaccaaggacaatgtctttgtcactgtggttgcatc

SEQ ID NO: 3558 - DNA, 264 bp, Glycine max
  Clone ID: 701041645H1
aacaaagaacaaaaacattaatagagtatagaaagaaaaaagatgatgtccccatcccatgtgatcctatccatattttcttggtgtgtacaacaacaccaccactgtcccttgcccagaacacccctcaagactttcttgatgtgcacaatcaggctcgtgccgaggttggtgttggtccactctcatggaaccacacccttcaagcctacgctcaaaggtatgccaatgagagaatccctgactgcaacctcgaacactcca

SEQ ID NO: 3559 - DNA, 267 bp, Glycine max; identical to SEQ ID NO: 3551
  unsure (1)..(267): unsure at all n locations; Clone ID: 701041646H1

SEQ ID NO: 3560 - DNA, 269 bp, Glycine max
  Clone ID: 701041647H1
gtgaaccactacaagctaagagggaatatccaaagttataatcttggtggcatgggttgcagtgctggactaatctctatagaccttgccaaacagctcctccaggttcatccaaactcttatgccttagtggtgagcatggagaacatcactctcaactggtattttggcaacaacagatcaatgctagtctcaaattgtctattcagaatgggtggagctgcagtcctcctctccaacaagtcttctgatcgcagaagagccaaata

SEQ ID NO: 3561 - DNA, 249 bp, Glycine max
  unsure (1)..(249): unsure at all n locations; Clone ID: 701041649H1
cttgctttgaccttttgccggttgttgtgttgcattggtgcaactggcgttattcagaagcgtttctgcactttctcgacttcgctctcgcgtgggccagcaatctaatcttgcgaattcagttagatggctccaaactccgagctccagtaacactgatctttattctgagttgaaggaatagttccagagtatcaggaacgtgttaagaagtgaagaagatcatggagtgttgaattgggaaantnc

SEQ ID NO: 3562 - DNA, 269 bp, Glycine max
  Clone ID: 701041650H1
tcgaactcgttactcatccttctctcacactcttcttcatctggattacagagctccccattgtgacccttctatacagtcgatatcgacaaaatcggaagcaatgcacgtacctgcgagctgttgggagaggggttctaggagtgcctgttggggcactactgaattttttaggagctattgctgtgggggcgcctgttacatttcagtatcttcccaagactgtaaattgggctcttatgatgtctgtgttcacaacaattccagcg

SEQ ID NO: 3563 - DNA, 272 bp, Glycine max
  unsure (1)..(272): unsure at all n locations; Clone ID: 701041651H1
cacttttgcttcgagatggcaaagtcgaagaatcacacagcacacaatcagtcctacaaggcccacaaaaacggcatcaagaaacccaagaggcatcgccacacttccaccaaagggatggatcccaagtttctgaggaatcagaggtacgcgaggnagcacaacaagaagagtggtgaaacagccaccgaggaagagtgaaatggcactttctaacggaaccattagggtttttttatgctcatttttttggttaaactttgtttgaaatc

SEQ ID NO: 3564 - DNA, 268 bp, Glycine max
  unsure (1)..(268): unsure at all n locations; Clone ID: 701041652H1
agaaatagagggttttggtgtttggtgtttgaatcgtgaaaatgttcagaaaccagtatgacacggacgtgacgacatggagcccggcggggaggctgttccangtggagtacgcgatggaggcggtgaagcagggctcggctgcgatagggctccgatccaagacccacgtggtcctcgcatgcgtcaacaaggctaactccgaactttcatcgcaccagaagaagatcttcaaggtcgacaaccacatcggcgtcgccatcgccgg

SEQ ID NO: 3565 - DNA, 271 bp, Glycine max
  unsure (1)..(271): unsure at all n locations; Clone ID: 701041653H1
ctcttcactactattaacctttcacatcacaacacaatctcatagcncccaaaaacatagtactatacagccccacttctcctttctctttctcttcactctaaagtctaagcatccatggccatggngtctgctaagctcaacaccttgtcttcccagtggatcgcccacaattccttctctcctcgccgtggatcctcttctcgccgagtctctcttccgatccgcgcttcttcttaccaacacgaactcgtccaaaccgccaaatcta

SEQ ID NO: 3566 - DNA, 265 bp, Glycine max
  Clone ID: 701041654H1
aattaatcaaacatggctagggttagtgctttgtttcactctttgctcttgatttcttcccttgtattggcttctcaaatccatgtttcctctgggaaactagtccctggactatcatggaattactatttgttgacatgtcccaagcttgagaggattataaggaagcatcttgaggatgtcttcgagaaggacagtggagtagctcctggcatacttcgactcttcttccatgactgctttcctaatggatgcgatgcgtcta

SEQ ID NO: 3567 - DNA, 54 bp, Glycine max
  Clone ID: 701041655H1
ttcattattgtgtaccacttttcaaacttggctggagtttgtaacaacaacaac

SEQ ID NO: 3568 - DNA, 263 bp, Glycine max
  unsure (1)..(263): unsure at all n locations; Clone ID: 701041657H1
attcaagttccaatcggaaccggaaatgaatagggtttggtttctactattccttctgctgatctcgaaatgcgatcatgtgtggagctcttacgcgtttccgctagctcncgtcatcaacccttccaaggtcaaacagatttcctggaagccaagagctttcgtttatgaaggtttcctcacggatttggaatgcgaccacttgatctctctagcgaaatcggagcttaagagatctgccgtngcggataatctctctggag

SEQ ID NO: 3569 - DNA, 259 bp, Glycine max
  Clone ID: 701041659H1
cttgtcttctgaaggcagctggagggaagttatttcaggtgccaacaaatcaatatatgctcctgacccctctgatgttgggagaatcttacaagtagatattgtctcaaatgggaaaaagctcaccctaacaactaatcccattcaaactgtttcaggacttggaagccatgtggagacacttctacgaaaatctaatactgattttaatgtagttatttctcaaatgaatggaaaagatcactcatcccattctact

SEQ ID NO: 3570 - DNA, 261 bp, Glycine max
  Clone ID: 701041661H1
tttgcttcttcgagtttcacagccaagtcgtaaaagggtttcaagggatggaaaacatgcagagcttctggcaattgggtgatgaactccgtgggcactcaaaagcatcggaggatcacaagtggttaatggttgcctcgaaactggccgaacagacaagattgaagggggagcgtgtgaacaaccttgatctttcaaagggacccattgaaacaaggtcaagggataaatttgggttccaggaagagaacaaatttgatt

SEQ ID NO: 3571 - DNA, 262 bp, Glycine max
  unsure (1)..(262): unsure at all n locations; Clone ID: 701041662H1
cagacttctaacgctgatagggggatatcttctttcccacacgcatcaattgataaaattggagtgcaggacaaaaacatggaaagaaattttggcaatggcaacttttatcaacatccacctgatttggatgagactgcttcctctgtttctgaggacggccctggcattgagaattttcangtttctggtgatgctattcctggagaaaagcttcttggatgtggatatccagtccgtggaacttctctttgtatgtttc

SEQ ID NO: 3572 - DNA, 264 bp, Glycine max
  Clone ID: 701041663H1
ttgtggtatttgtggagatggaggggatttaatctgttgtgatggctgtccatcaacatttcatcagagctgcttggatatacagatgcttcctcctggtgaatggcattgtccaaattgcacctgtaaattttgtggcatagccagtggaacttctgataaagatgatgcatctgtgaatatcctacagacttgcatcttatgtgagaaaaaatatcacaactcttgcactaaggagatgaatacccttcctaataaaatcaa

SEQ ID NO: 3573 - DNA, 263 bp, Glycine max
  unsure (1)..(263): unsure at all n locations; Clone ID: 701041665H1
acaaaacttgctatagcagtaagctataactcatttgaggctctgtgagaattgagaaatggctaaagatgttgaggttcaagagcaaggaggagagtactctgccaaagactaccatgaccctcctccagcacctttgttcgacccagaggagctcacacagtggtcctctatagagccctcatcgctgagttcatagcaaccctctcttcctttatgtcatgtgctcaccattatggctacaaanggcgactgatacaang

SEQ ID NO: 3574 - DNA, 268 bp, Glycine max
  Clone ID: 701041667H1
cctcaaaataaaaaataaaactttttattatctgcaggttttgcatttgtgtttctgatttttgtgtacctaatcccaatccgtttcttttcaatcttctcttcgaccccatttcctagatctgcttgtttcttccatcatcaactaatcatggttcttcacagagaactcgatcatctcttttcatcccctttcgttcgaccctcccaaagatgatgcgaaatccagtggcatgtcaattgaaaagaagattgagttcctcgagagt

SEQ ID NO: 3575 - DNA, 265 bp, Glycine max
  unsure (1)..(265): unsure at all n locations; Clone ID: 701041668H1
atttgaattgggcactgaagccagagagatgccatgcaaccatatttaccattctgactgtattgttccttggttggttcagcataactcatgtcctgttngccgtgttgagctgccacctcaaggacaggctagttcccgtggtactcgaagttggggaggaaggaatgcnnnnnnnnnnnnnnnnnnnnnnnnnnatgatagctccaggggcagagagaacagccatcagaaccatggaaggagaaatccattttcatttttg

SEQ ID NO: 3576 - DNA, 75 bp, Glycine max
  Clone ID: 701041669H1
ccaattcccaattcccaatttcgaaacccttattgcctttcaaagacaccaaattgagtgatcgtgatgggcacc

SEQ ID NO: 3577 - DNA, 260 bp, Glycine max
  Clone ID: 701041672H1
ctcagattgcaattgcctcttctcttctcccagaatcggtgtaggttacaggtttaagggttttgttttctttaggtcactaatccgatatcatgaagctcgatacgactagtctcgaatcgtttcccacactgattgcacctcaaaacgacgtcgccggagaactctccgccgctccgttctttgaccttccgaattccaatgacttcgatgggttcttgaaagacgctattcagatggtgaagcccgcgaaggtactt

SEQ ID NO: 3578 - DNA, 263 bp, Glycine max
  Clone ID: 701041673H1
ggaaaattagcctcacaaaagcaaagatcaaacaaaccaaggacgagaacacgatgttgcttgaacttgcacttggtttattggttttggctctgtttctgcacttgcgtcccacacccactgcaaaatccaaaagcacttcgccatctcccaaacccaccaagcccaaagcctcgtctctcccttcataggacaccttcatctcttaaaagacaaacttctccactacgcactcatcgacctctccaaaaaacatggtccct

SEQ ID NO: 3579 - DNA, 84 bp, Glycine max
  unsure (1)..(84): unsure at all n locations; Clone ID: 701041674H1
tcccctnagattcagccacagttggaaaaaaaaaaaaagttgtnccgagatggacacgtagcgaagcaaactgctcgtaagncc

SEQ ID NO: 3580 - DNA, 256 bp, Glycine max
  unsure (1)..(256): unsure at all n locations; Clone ID: 701041675H1
ggagaggataaggctttgcatttcatttgagagagagagcgtcttaactttncattatcaaaatggcgtntcggctatcacaggagcgaggctaangctagggatagggttggcgatacctctttcctctcccacgcgctctcgaaccgtcgcaatggccgtatccgtcgaccccaagaccgacaacaaactcactcttaccaagtccgaggaagctttcgctgctgccaaggagctgatgcctggaggtgtcaac

SEQ ID NO: 3581 - DNA, 125 bp, Glycine max
  unsure (1)..(125): unsure at all n locations; Clone ID: 701041676H1
gaaaacatcactgcgccgcgctgccacaccaaataaacacncacatggacgcatcaaaactcaattcaattgaagcatttcatcgaacagtgcaagtccaacccttccctcctcgctgatccttc

SEQ ID NO: 3582 - DNA, 111 bp, Glycine max
  Clone ID: 701041677H1
gttgttgttgtaataaatatgcatggtgtgttgtaccaaaaacaaagtaagatgcttctgtacgttctgttgcttaaattcattgaaataaattaaagtggggtttagttc

SEQ ID NO: 3583 - DNA, 259 bp, Glycine max
  Clone ID: 701041678H1
ctaatctccatctaatagtgttaatttgtctttctctatctctatcggtcatgggtgcttttgcttttgatgaggaaaactcctccaccgtggctccggcaacactctacaaagctctgacaaaagatgctgacactatcatcccaaagattattggggccatccaaactattgaaatcgttgaaggaaatggaggacccggaaccgtcaagaagataacagctagtgaaggtgaccaaaccagtttcgtgctgcaaaa

SEQ ID NO: 3584 - DNA, 260 bp, Glycine max
  Clone ID: 701041679H1
ggggcagtatggtggtggagctgcgccctacatggggcactagattccacataagtgcatcagtcttttatactggcctggcgtttcttctgagttctgaagtttaaggagctgatgcaattggcgtgtttataatgaaatgctacttactgatcagaatattttaattaccaaatggagttctgttttcgccacctgctttttcttattttcttccctttcaaaatattgtagtattttgactttggtttatctcaaaa

SEQ ID NO: 3585 - DNA, 264 bp, Glycine max
  Clone ID: 701041680H1
ctcacactcactggcagatctcaatccatggctaccattgttagcatcaaggcccgccagatctttgacagtcgtggcaatccaaccgtcgaggtggatttgacatgctccgatggtacttttgctagagctgctgttccaagtggtgcatccactgggatttatgaggcccttgaattgagagatggaggatctgactaccttggaaagggtgtatcaaaggctgttgacaatgtgaacaccattattgcccctgctttggtt

SEQ ID NO: 3586 - DNA, 258 bp, Glycine max
  unsure (1)..(258): unsure at all n locations; Clone ID: 701041681H1
tggaaccatttccctcataaaattctctcttcctttttgggttctcctcaancccattccaagcttcaatcttttctctcttctgccctctgcacctcccctcacacccttcctcattcgcaggaggtgaagatgtcgaccccggcaaggaagagactgatgagggattttaaaagattgcaacaagatcctcctgctggcatcagtggggctccccaagacaataattatgctttggaatgctgttatctttggacc

SEQ ID NO: 3587 - DNA, 268 bp, Glycine max
  Clone ID: 701041682H1
caaaaaggcagaaaatattgatggaaaaacactcaaggggatctcttgctagggaagatagagaagcaaggatgcaagaaaaggaaaagaggaaaaaaattaaggaaaatagggtctccaaaaaggattcagcaaggaaccaaagtcaatcaaattcacacattacaaggccacaatatcaacctcaagaaacaaatgtacccattaatccagaaaagccagaatttccatctcgaaattcaggtttatctgccaacataaggaaagg

SEQ ID NO: 3588 - DNA, 231 bp, Glycine max
  Clone ID: 701041683H1
gattctaattctaattccttctactttacaaattaaagggttgcaactgtgtgctacactgtggctagaactacatgttctgtggttcccttcatgctttgcactgtggctggctcctgttctgtcaattttcactctctgggggttcagtttgagttagctctagataaagacatggattctcagaggtttctcatttgacaaaaattgtcttgtatttctttgagggaa

SEQ ID NO: 3589 - DNA, 226 bp, Glycine max
  unsure (1)..(226): unsure at all n locations; Clone ID: 701041684H1
cttctgatgttgtaggatcatacttctccttccagcacttgaactatggaacaacaacaaacatgtccctctctgcaaaccccaacgcctctctttgttttgttccagcctccacttcttcagaccttaataacaattccaccataacctcctccntgctcccttcaattttcccaacacaacacgtgaagctccaatctaataacaacaacccttccatttcatc

SEQ ID NO: 3590 - DNA, 262 bp, Glycine max
  Clone ID: 701041685H1
aaggcatgagatcatcaagagggcagacgcggtgatagagcactatccattcggaagggaagatcacaggatcgttcctcgcttctggattggcatagagagcctgttcgcgaacatgattcagaagacacacaaggaccctaccattgaggagattaagagcttgctctgtctgaaacagcaacaacccgggtgggttcttctcagcaaagggtcgaacgtgaagttgttggggagtggggacccaatgctggcaactgcc

SEQ ID NO: 3591 - DNA, 260 bp, Glycine max
  Clone ID: 701041686H1
ctcgtcttcaatcctttcgttattctcttattcatccttctcttctgaaaaatccagatctctttctgcccttttctccgtcacgcttttcgtgaccggatctgtatggatttgatccagatctacacgccgatggtggttttggccgggtctttcatagatctggtgcgtagaggctcagatctacggtaccgaggtacaacagagaatcgatgacaagaacgcagatccgacggtagatccagccgattccgcttgtt

SEQ ID NO: 3592 - DNA, 258 bp, Glycine max
  unsure (1)..(258): unsure at all n locations; Clone ID: 701041687H1
ggggtaaaacagcactactaacagcagacaagaaaaatggagattgaggacacatcaagtagagtatcattgcatttcctcttggcttagctcttcttgttgccttgtnattgttcttttgttgcttcttttgttgctgcttgcactgggaaaaactccaacctttgtttccattttgtatggttatcgtcgatactcagcctcngacacaagcagacttcactccccctcctcacaagccaggctttcctgtcttga

SEQ ID NO: 3593 - DNA, 258 bp, Glycine max
  unsure (1)..(258): unsure at all n locations; Clone ID: 701041688H1
tcatttattgaatcccaccccaaatttctaattctttctctttcactctcccacgtgcancttcctcttccccgctctaaataattctccgttcccannnnnnnnnnnnnnnnnnnnnnaatacattattattatatgtgtgtggaaaaaagaaccgttttttttttcagtgaaagcgaccacctttatattatccttttgatcagagtgtaaaatggtgatgtgattttacaagggtcttgcatgcccctttgagtt

SEQ ID NO: 3594 - DNA, 255 bp, Glycine max
  unsure (1)..(255): unsure at all n locations; Clone ID: 701041689H1
gtgtgttccanntcnngctnctnaatttcttgatcatgtcacttgctggtaaaatccagcattgaaatggggtgcatgcaagcgctgcaaagtggttcaacctcnccgcaacgcaactccatcatgttcaaaaccttaccgaaagagtgcatgaaaccaagctacatcatggtgatgactggcatcacaacgaatcgatcaaacactggacttgtacntagatggtaaggttacaantatcacgagagtattgnc

SEQ ID NO: 3595 - DNA, 252 bp, Glycine max
  unsure (1)..(252): unsure at all n locations; Clone ID: 701041691H1
tgagaatgagataaaggacaagaagttctttggaggtgangagattgggttggtagatattgctgctgtctacatagcattttnggtccctatggttcaagaaattgcagggttggagttattcacaagtgaganatttcctaagctccacaattggagccaagaatttttgaaccatccaattgtcaaagaaagtctgccccctagagatcctgtttttgccttttcaagggtcgctatgaaatcctttta

SEQ ID NO: 3596 - DNA, 214 bp, Glycine max
  unsure (1)..(214): unsure at all n locations; Clone ID: 701041692H1
cgcaaattgctgaacctccttccgtcctcacttcaacgcagangcgttcgtactttctagaacttggcgtcattcaggggaggaagtttggctacttactacgatattgatattcaacgccaatggttggattccagagtgaccataagcccgggaacaagtgcaatggtaattctaatagttttccggttccggatcgtcatgtacgacttat

SEQ ID NO: 3597 - DNA, 255 bp, Glycine max
  unsure (1)..(255): unsure at all n locations; Clone ID: 701041693H1
atcaacatgaaaccgatgtagaantgggcacaactaaatgtggctaattgatattgcagatggctggagtggggtcagtggtgatgacaccattaataggaaacttgtcggaccgatatggcagaaaagcgttgctcacacttcctctcactgtctctgtcattcctcaagtgatattggcatatagcagggatacccaattcttctacgcgtactatgtggtgaaaactctggctgccatggcaggcgaagggt

SEQ ID NO: 3598 - DNA, 257 bp, Glycine max
  unsure (1)..(257): unsure at all n locations; Clone ID: 701041694H1
aattttccattgggtggaaganagtctcaacctttattcgaaagagcaaggatctgagttgagttgagtgatcatgtgtggtggtgcgattatctccgacttcataccggcaggtcccgccagcggggcgcggcgcgtgaccgccgacatcctgtggccgagtttgaggaagcgcttctcgaagccgctgctggacgatgatttcgaggctgggttcagagaattcaaggatgattcggaaatcgaggatgttgatg

SEQ ID NO: 3599 - DNA, 211 bp, Glycine max
  Clone ID: 701041695H1
ggttgattgagatagctctcgatggatgcaagaggaagaggaacttggaatttaactttgatgaagagaatttgattgagatcgatatttctccgtcgaggtacagagaactttccggcgacgacgaggtgttttccggtgagatcagctacaactaatgtgacattaattcgagattgacgtagtggattattgtgttttttgaggttgg

SEQ ID NO: 3600 - DNA, 195 bp, Glycine max
  unsure (1)..(195): unsure at all n locations; Clone ID: 701041696H1
gaagaagagaaggtggtaccgccttcaattctctctctccatttcngcatcctcatcatcttattatacctcttccatctccataacatccacttgtganaaaaacccattaatatatatcacacacacatgtatcnctgagctccaatccaatccaagaccacaccttgtcgcgtcggacgaaccttggtgtct

SEQ ID NO: 3601 - DNA, 287 bp, Glycine max
  unsure (1)..(287): unsure at all n locations; Clone ID: 701041701H1
gctgccacaaattataataatagggttgttgaatgccatttggcttctattgtgctcgctataaagctagggatggatccaaaagaggcaatatcaaaagtgagcacactgtctgatgttgaagggttatgcgtatcatttgctggtatttataactcatctgatcctgtacttgctgtaaaggaatatttgaaggaagaaccatatacagctgaagaaattncaagcagttaccaggggaaaaccgacttcatttttgaacaataatgcagctatttagaagtgtt

SEQ ID NO: 3602 - DNA, 278 bp, Glycine max
  Clone ID: 701041702H1
attcatgaatgggatgtatccaagcaacaggatgtacagccaatatggaaacacatttaggcctgattctcgttttggatctgctgggtatggatctagaatgggttctttcgatagcaaatttaatggcacagggtatggctgcggtttaaaaaaaagcatggatggtttcagcgagctaaataagggacccagagctgccaagagttctgataataaaaatatcaaaagtcttggacctgtcacattattactcaaaggacagaaccttccagtga

SEQ ID NO: 3603 - DNA, 278 bp, Glycine max
  Clone ID: 701041703H1
gttctctctctctgattcgatcgatttcgattgttgaattcatcacatcacggagccttgacaacgatggtgctgccgctatttactgctttcattctctttgcttttattccgaatggattgttagcagttccttccaccgtcccggcattcctttggtcatcacattatgaactggcctctgaaaatatattgaaggaatctgtaaattaccaagtcatttctccgaaggatctagcaaaatctattttatctgaagcaggctggtcaaattttct

SEQ ID NO: 3604 - DNA, 279 bp, Glycine max
  unsure (1)..(279): unsure at all n locations; Clone ID: 701041704H1
gaaatcagtgaccggcgtgagagagcaaagatggtggtncttggnaccacctcaccttcaattncctgcttgccgtcttcaactcaaaccgactacaaggcgcgtcgatactgttcttttccgcaacgcccacgcccacgcccacgcncacgcgcttcacgtttcttttgcggatcccctttcgctccaaatgccatccattctccttctctgtctgtcacgaatgangcactgaatgtcatgantnctggggctcctgcttctggtaaaggaacccag

SEQ ID NO: 3605 - DNA, 208 bp, Glycine max
  Clone ID: 701041705H1
aataagtgagatgggtctggcccgttttcaaaattttcgtcattatagttattgttacgattatgatactgagaaagttggggggcctgaaatttggcatctacagctatcagattgctatatttgttgttttgtttagcaaaagactgcagcatgtcactacaaattttgctgtttgtaagacgattgaattgaaattctttccttt

SEQ ID NO: 3606 - DNA, 277 bp, Glycine max
  Clone ID: 701041706H1
gcggtcatcaatttcatctcgattgcattggttcggcattcaacataaaaggagcaatgcagtgccctaattgtcggaagattgagaaaggtcaatggctatatgctaatggttgtcggtcatatcctgaatttagcatggatgagtggactcacgatgaggacctttatgatcttagctactctgagatgtcctttggagttcattggtgcccttttggcaacctggcacgacttccatcatcctttgaggaaggggagttttcgtcatctgcata

SEQ ID NO: 3607 - DNA, 278 bp, Glycine max
  Clone ID: 701041707H1
atcatggacagagtgcaattcagagaaaccaaatcccagacaccatacaacacaacacagcactttggtcgtgtttcgtttcatctttttctccgagaaagatccaccccacgtttcaaaatcactttttttctctgctttgggaaatgatgccattgttgtcccttgcgaagccaaaccccatcaccaccatcatcatgtaggagcgactcaacaactcgagtctcgcgttcctcttcctccccctctgggcacgtgagaattctccgattctgaaa

SEQ ID NO: 3608 - DNA, 269 bp, Glycine max
  unsure (1)..(269): unsure at all n locations; Clone ID: 701041708H1
tcccttataaacttcttccgatgtgtttctctctttctctctccgtactctngctttcttcataaaattttgcaatcggtttgacaactgaatttgcatttggtaatcaaattaataattganaaaaaagaagaagaaaaaaagggtggggaggcatagccagatattgaacctgccctctgttcttaatctcattgtgcctcccctcagatctcgtcttcaatcggagtgctttgccttcattgattcactgcttgatgattgttgag

SEQ ID NO: 3609 - DNA, 278 bp, Glycine max
  unsure (1)..(278): unsure at all n locations; Clone ID: 701041709H1
ggggctacccgctgagtttaagcatatcaataagcggaggaaaaggaaacagcaacggcagttacaaaactaaaggcggcgccggtgtcgcgcacggaagtttagagtccggcatgacggcggtgaagctgctggatttgatgccggtgatgcgaactcccgatgaggacgcggcggagatggcgccggaggagatgaatccgaagctgtttggtgtggcgattggagcgaanncgncgaganagggaggaggtggtggagattgtggaggtggagga

SEQ ID NO: 3610 - DNA, 277 bp, Glycine max
  unsure (1)..(277): unsure at all n locations; Clone ID: 701041710H1
gcattgtgatgatctaaatacacaacaaattatcatgggatgaaatcatgcaatctgtcggcactttagcacaggatcaatatggaaattatgttattcagcatattgtggagaatggtaaaccacatgaacggactgctattatcagcaagntgccgggcagattgttaagatgagccagcaaaagtttgcttcaaatgttatcgagaagtgtttggcttttggtagtcctgaagaacgtcagattttggtgaatgaaatgcttggtacttctgat

SEQ ID NO: 3611 - DNA, 282 bp, Glycine max
  unsure (1)..(282): unsure at all n locations; Clone ID: 701041711H1
gatttatctggtncgggttgttatcncngggnatncaangtctggctcctgntgganagtgtttgnaagcngcttgangacttgaatnctgcnattcnagcnanngattnactgntagctggtcnggttaaattagccttaggtgtggggaagtcgttgaaatctcttggtgtggcancttgtgccaagataacngatatactcaatggaggctgtagggtcacattggaggtcccttganacctgtcgttggactctgnantgcatccacaatanagggcc

SEQ ID NO: 3612 - DNA, 236 bp, Glycine max
  unsure (1)..(236): unsure at all n locations; Clone ID: 701041713H1
gtagttcaattcaattcaattcaatatgatgcagagactctcttctaccactantactantccnctcgctctgccttgctgcgctacggtggcggcgcacttcgccgggacgtgcttgctcccatttnctcttctcacttaacagctaagtcacaggtgggtgaaagtgacaccaaagcagctagatggttttctattatgagctctgatagatccacatttgattcctcaaactt

SEQ ID NO: 3613 - DNA, 278 bp, Glycine max
  Clone ID: 701041714H1
gtcccaaagagctaacaagagattcaagaccggcatggctaatgaagaggaacagaaaaaccacctcttcggcatcaaagatctcggtcacaagactctccttcagagtgatgcactctatcagtatatacttgaaaccagtgtctatccaagagagcacgagtgcttgaaagagatacgcaagatgactgcaaaacacccactgaacatcatggcaacaccagcagacgaaggacaacttctgagcatgcttgttaagtcacgaattcaaagaacgc

SEQ ID NO: 3614 - DNA, 280 bp, Glycine max
  Clone ID: 701041715H1
ttcgggtcctctcaatccgatcaacgacaccgtcgaattccgatcccctcgcgacgccgatggccacggcacccataccgcctccaccgccgccggccgctacgccttccaagccagcatgtccggttacgctgctggaatcgcgaaaggcgttgctccgaaagccagattggctgcttacaaagtttgctggaaaaattccggttgcttcgactctgacatcctcgccgcctttgacgccgccgtgaacgacggggtggatgtgatttcgatctccatc

SEQ ID NO: 3615 - DNA, 282 bp, Glycine max
  Clone ID: 701041716H1
ggaaaacgcagaagaacttggcggcactagatgccattgatgcggggaagttgtaccatatgtgtaggaatttggaagttccagcagcagcaaacactcttcgttactatgcaggtgctgccgataagattcatggcgaggtgttgaaaatgtcccgagacttccatgcctatacattgcttgaaccacttggtgttgtgggacacattactccctggaatttccccaataccatgttctacatcaaggttgctccttctttagctgctggctgcaccatgg

SEQ ID NO: 3616 - DNA, 279 bp, Glycine max
  unsure (1)..(279): unsure at all n locations; Clone ID: 701041717H1
ggaaaagacactgtctcgcgagtnaacacaggttacagcaatggctttctttggtagaattgggaatttattaagacagacagcaagcaggcaggttagttcagaattgcgatcatccccttcgttttttcaggctatacgcagtatgtcatctgctccaagcacaaagctgtttatcggaggtgtttcatattctactgacgagcaaagtttgagggaagcttttcaaaatatggtgaagttgttgatgctaggataattatggatcgtgaaactggt

SEQ ID NO: 3617 - DNA, 278 bp, Glycine max
  unsure (1)..(278): unsure at all n locations; Clone ID: 701041718H1
ctcacgaccctccgccgccgcggttgcaagcagagcacaccatcgnaatgggcgaacgaagggcgttggttccggaatcggtggtgaagaaggagaagaggaacgaggagtgggctttggagaagaagcaggaactcgatgccgcaaagaaaaagaggttcgaaacgcggaagctgatttttaacagagccaaacagtactcaaaggaatacgacgagcagcaaaaggagttgattaggttgaagcgtgaagccaagcttaagggagggttttatgtt

SEQ ID NO: 3618 - DNA, 279 bp, Glycine max
  unsure (1)..(279): unsure at all n locations; Clone ID: 701041719H1
aaaaaacttgagagagagaaaatagagaaagaggctaggtagaaactagaacccgggtcctncttactacactcacccccaatttcccgagcctcagcttcgggacacccgaacctcattactcgggacgcgaataaaagccacactgggattcacactcccaagttccaaccctactctcacacactgcaacaacgaaaaccaaagaagaaaaaagagtttcttctttccgaaatccaagcagtagggttagggttttttccgatctcaatggcggag

SEQ ID NO: 3619 - DNA, 273 bp, Glycine max
  Clone ID: 701041720H1
tttgattccaagattgtttgaaactggggctatctgtttggtggatgagatttttcttgagtgccattacaataggtggcagaggtgttgccctggacagaggagccccaagtatgagaaaacttatgatcagtgcttgcagctcttcacttctctcagacaaagtggagttcttgttcatcaatggttttaattaactttgtagaattgcctgatggatgatgggtcaaaccctatatgcatgttctagcttctgcatgtttctctttttag

SEQ ID NO: 3620 - DNA, 277 bp, Glycine max
  Clone ID: 701041721H1
ggctgctgaagtgacatatgaggataacgagaattttgttgatgatgggattcaaattgagcctttcaacctagagaaagaaagggaagaaggttattttgatgctgcaggaaattttgttgaatatgtaagagagaatgagattaaggatgcatggcttgataatgttgaagttgatccaaaatatgctgcattaagctctgtagcaacaaatgatgaagatgagggccccccagacctttcttctaaagatattggaatcatgaagaggcgcatt

SEQ ID NO: 3621 - DNA, 275 bp, Glycine max
  Clone ID: 701041722H1
tcgaactcgagtggtaatggagacgattttacaagcaacgtgaaaaggctcataattgatttggtcaccatttgaaggaagagaatgtgaaagagtgaggtcagagttgcctgtagacgaagacaatcgtcatcagttgcagctgcaaaggaatgaggtaattgcattgacgaaccttctcaatcgactctcggaatccttcaaattcgtccacgaatgggacctacagttgaaagaatcatggaaggaggacatttttctgctcatacaagaac

SEQ ID NO: 3622 - DNA, 276 bp, Glycine max
  Clone ID: 701041723H1
ccaacatctatctcacttcttagttctttgtggctctttccatgatggcctctcctacatctccaagagttctcttcttgagtctctttgtaactctttccatgattttacatttgagttcagccaggaagttgtctgagtcagacccccaattgcagttccaataccacagaggccctctcctcacaggcaaaatctccgtaaacctaatttggtacggtaagttcaaaccttctcagaaagccattgttgctgatttcatcacctctctctcct

SEQ ID NO: 3623 - DNA, 271 bp, Glycine max
  Clone ID: 701041724H1
tcaacacaaaggtgggaatgtattgattctactctctgaagaatctggagatcagcttgtagcatccaactatgtcagcaaacagttctttgcatgtggaattatcgaggaagacttcgtttttgggattgagattatgggttttgattgggataggtgttggtgtttttatagttgtgattctttgtgtattatctgtatgggtgatgtttcggagaaagtctaaaagatctctggacaagtactctttgtcacaaataccacatgtctc

SEQ ID NO: 3624 - DNA, 270 bp, Glycine max
  unsure (1)..(270): unsure at all n locations; Clone ID: 701041726H1
ttttctacttctntcgtnntcgccgttcgttcacagcgtanntctgctctcgaagatggctcctcccanaggtggtggtgggttcaggggtggtaggggtgacagaggtagangaaggggtggcggtggaggaagaggagganacaggggtacgccgttcaaagctagaggcggtggccgtggtggccgcggangangcaggggtggtggccgtggcggcggcagaggtggaatgaatggaggtagcaaggttgtngttcagccccatag

SEQ ID NO: 3625 - DNA, 277 bp, Glycine max
  unsure (1)..(277): unsure at all n locations; Clone ID: 701041727H1
cgagaggagaggagagaagagaggaagttttgnnngtttgaatctatagaatagaatcaaaccaaattgaaagaagatcgattcgatcgatcgatggctctggtcggagttggagtgaagcatgcggcggagggcgcaccggaggagaattgctccgccaagcccaccaagcagggcgagggcctccgccactactattctcacaacatccacgancatcagctccttctccgtcaaaagacgcataacctcaaccgtcttgaggctcagagaaacg

SEQ ID NO: 3626 - DNA, 274 bp, Glycine max
  Clone ID: 701041728H1
gttgatctttggttgaagattcaagaggaggcaaggttagatgttgatcaagaaccaattttatccagctactatttcagttccattttgtctcacaaatctttggagagtgccttggccaaccacctctccacaaatttgagcagcttgagccttccaagcagcaccctttttgaccttttcatgggtgttttggttgatgatggagatgatgacatcgtaggtgctgtgaaggatgatttgatagctgttaaggagagggaccctgcttgca

SEQ ID NO: 3627 - DNA, 275 bp, Glycine max
  unsure (1)..(275): unsure at all n locations; Clone ID: 701041729H1
gagacaaangcatggctggcaatataatagcttcatcagtgnccaanagcgtccaagaaatgnccatggatggtgatganccaccatcaagntatgtagttaatggaaatagctttggatctaaagattcttctgtacagtttccaatacccatcattgatgtgcgtctcctctcatcagaagatgngctaganaagcttagatctgctctaagttcagctggatgcttccagncaattggtcatgnnatgtcaagttcatatcttgacaatata

SEQ ID NO: 3628 - DNA, 246 bp, Glycine max
  unsure (1)..(246): unsure at all n locations; Clone ID: 701041730H1
atttggnactaccaaaagncgaacgtcgcacaacnacnacnaacctagcaaccattgagttttgttngctttgaaacatcgtgtgcacagtaccccagaagatcgaacaaggatctccacaaagacaaaccccagttctcaantgtgttttacctctctctcacctacnttcagaccatacccagggtttttgctttttctttttaaattagtttcagtgacattaacgaggctgagaagatgcag

SEQ ID NO: 3629 - DNA, 279 bp, Glycine max
  unsure (1)..(279): unsure at all n locations; Clone ID: 701041731H1
gttactttccaatttgaattgttccattttcatttctttcgcaaaagttgcaactacttcctcagaaaaaaagtttctaagttaaggcaatccagacacacaaanatcgccggnnacggtncagctacatgcatagncatcntccttncnatcattntncctcctcttggngtnctttntcaaatatggctgcnaggtggagttctggatttgtttggtgctgaccctttttggttatatacctggaattatctatgctgtctatgctatcaccaagtg

SEQ ID NO: 3630 - DNA, 102 bp, Glycine max
  unsure (1)..(102): unsure at all n locations; Clone ID: 701041732H1
catcctccaatgaacgacgctacngccgccacccccgccacggcgctgttagatcgccgtggcaagtacaaccgcagcgtctcccacgtgaacgacgagttc

SEQ ID NO: 3631 - DNA, 284 bp, Glycine max
  unsure (1)..(284): unsure at all n locations; Clone ID: 701041733H1
caacaccattcatggctgtgtcaacgaggaatcgttcacaagtnagaatcatcatcatcatncatnnnnnnnnnnnnnnnnnnttatncttccatctacaagttcagaaatggagaccatgttatccaaattgctaccatccaacaatggatggagcaattcanaagctttgcaagaatttggaggcaagcctgtgaagcaggaaatangggaatctattccacaagagccancacnacngnatggttatccttatggtgnctctcgttgatttacccatcncc

SEQ ID NO: 3632 - DNA, 275 bp, Glycine max
  Clone ID: 701041734H1
gctttctcccaactctaccaccaccacttcaacaccttcgtttcccaaacaaattgcatagtagtctccgtggagtacaggctcgccccggagcaccctctccccgcatgttacctcgattgttgggaagctctcaaatgggtcgcatcccattccagcgaaaatagccccatcaacgcagaacagtggttaattagccacggcaatttccaaagagttttcattggaggtgacagtgcaggtggcaacatcgttcacaacattgccatgcgtgc

SEQ ID NO: 3633 - DNA, 265 bp, Glycine max
  Clone ID: 701041735H1
ggaagagagagggagattctttgtttgctaccttctctcggaaaaatggttacgttcaggtttcaccagtaccaggtggttgggagggctcttcccacggaagcagatcagcaccccaagatctaccgaatgaagctctgggccaccaacgaggttcgcgccaagtccaagttctggtattttctgaggaaactgaaaaaggtgaagaagagcaatggccaagtgcttgccatcaacgagatttttgagaagaacccaaccaaaa

SEQ ID NO: 3634 - DNA, 275 bp, Glycine max
  Clone ID: 701041736H1
atgggttcttcttcttctatgtggacggtgtgtgtgattttggcatcactggcctgctgcagcactctgtgcgcaacccacgcaggccagtggatgtacaatttggccgaaactacgtgcccacatgggcctttgatcacatcaaatatttcaatggtggttctgacattcagcttcatcttgacaagtacactggtactggcttccagtccaaagggtcttacttgtttggtcacttcagcatgtacataaagatggttcctggagattcagct

SEQ ID NO: 3635 - DNA, 275 bp, Glycine max
  Clone ID: 701041737H1
aaacttcaacttgtaatcaagggagagagaaaatttcaagcacaaaaaatggcggagaagaaagtggtgatcctaggaggtggtgttgccggtgccaaccttggcaaaaactatacaacatcaagccaacgtcacccttattgatccgaaggaatattttgagattccatgggcaagtttgaggggattggttgagccaacttttgctgaaaggatagtaatcaaccatagagagtacttcaaaaagggtaaccttgttgtatccagtgctgtca

SEQ ID NO: 3636 - DNA, 243 bp, Glycine max
  unsure (1)..(243): unsure at all n locations; Clone ID: 701041738H1
gcttcacatcctcagacctcaaccatcagcaccaccataccaacaacatcatcgcggcgccatcaccaccgtaccaacaacatcatcgcgcgatccaagcaacactcacacnaacagatctatgcgccacancaccaccgcgcaacggagaagtcgcgcgcgcgcaggaagcctcaaagattgattcgcgcacacagatggaggtgcaatgatggtgtgacggcggcgcggtggtggctggtc

SEQ ID NO: 3637 - DNA, 275 bp, Glycine max
  Clone ID: 701041739H1
caaaagcaaccacaacaagcacttctcttatttcctatcacaccctattacagattcacaagcgcagacacttcaaatggctctggaagctcttcaatcacccagaacagccactccatcgtttagtccctttgaagaaaccaacctcagttacttggagacaccgtggaccaaaggaaagcgttctaagcgtagccgcatggagcagcaactgcaacactcttcatgcaccgaggaagagtacctcgctctctgtctcatcatgctcgctcacg

SEQ ID NO: 3638 - DNA, 274 bp, Glycine max
  unsure (1)..(274): unsure at all n locations; Clone ID: 701041740H1
ccgacgcctccagataaacaaccttaactttcccacaacaccacccanncattctttttcctctctctagatttcatttagttgttgctgtcttcttctgtttgtgtgtgccaacacagagcgaaaaacatggctctgaaccaatcaaaagccgtgttgttgagggtgagtttggtggtggtggcgctcttcatagcagggtacatagtgggtccccctctctactggcatttcgttgaaggtttggctgcggtcaaccactcttcttctactt

SEQ ID NO: 3639 - DNA, 274 bp, Glycine max
  Clone ID: 701041741H1
ttttcatttccgatccataattgtcccaacgcgatacaccaattcttccttcctttcatctcgtgaaatccaaagagttgcgacacgttaaattgttttccaggttgcgcatatccagcatgcaggcatcgcgggcaaggctgttcaaggagtacaaagaggtgcagcgggaaaaggctgttgatcttgatattcaactagtttgtgatgattcaaacatttttaaatggaccgctcttatcaagggaccctctgagactccttatgagggtgg

SEQ ID NO: 3640 - DNA, 271 bp, Glycine max
  unsure (1)..(271): unsure at all n locations; Clone ID: 701041742H1
gtgccattcatttcttctagccatggacganaagctcatacagcggttagaatcggcggtgttgcgcttggagtcgctatcctctggactccacccctccgcttcacaatccggcggcgcccacgctccccgatgcggcgctcgatccctccgtcgtcgccttcgccgatctgatcgaccagtacgtcggtagggtttccggcgctgcagaggttatcggcggacaggtcttgggtgtcaccaaactggtgcaggaagctttcaatgttca

SEQ ID NO: 3641 - DNA, 269 bp, Glycine max
  Clone ID: 701041743H1
agtttcttcctttctctgctctttgccttctctgacacatttggtgccttgtagagcgtgttttgagcaggaaggtggtatggcgaaggacgttgaggttgctgagcgtggctccttctctgggaaggactaccaggaccctccaccagcaccactcattgatgctgaggagctcacaaagtggtccttttacagggctctcattgctgaattcatgccactttgctcttcctctacattactgtgctcacagtcatagggtacaagca

SEQ ID NO: 3642 - DNA, 272 bp, Glycine max
  unsure (1)..(272): unsure at all n locations; Clone ID: 701041744H1
aaattgtgaaggaagtctcttcctacttgaagaaagtaggntacaaccctgacaagattccttttgttcctatctctggttttgagggagacaacatgattgagaggtccacaaaccttgactggnacaagggtccaactctgcttgatgcacttgaccagattagttcngcccaagaggccctctgacaagccccttaggcttccccttcaggatgtgtacaagattggaggtattggaactgtgccagtgggacgtgttgagaccggtgt

SEQ ID NO: 3643 - DNA, 254 bp, Glycine max
  unsure (1)..(254): unsure at all n locations; Clone ID: 701041745H1
accctagcntaccttttcaactttcaagatgcaaatncttcgttaagncactccactggtaanacaatcaccctgaggtggagagttcagataccatagataatgtaaagtccaagattcaagacaaggaagggatcccaccagaccagcaacgtctcatttttgctggcaagcagcttgaggatggacgtacacttgctgattacaacatccanaaggagtccactcttcacttggtgctccggctccgtggg

SEQ ID NO: 3644 - DNA, 272 bp, Glycine max
  unsure (1)..(272): unsure at all n locations; Clone ID: 701041746H1
cacacttccacgtcaccancaccagcgtggaaggtggagcgtgaggctgtttccggtaacctctcccggcggcgctgagtggtgatcaaggaaatgggtcagacgctgagttgcgtgcaacagcacgaggaccatggtgtgctcttccctgcacttgcaagtggagaattggaggttgttgaggccatggtggaggaagaccccactgtgttggaacacaccattggctgtgacaggctttctcctctgcatgtcgctgctgncaatggtcg

SEQ ID NO: 3645 - DNA, 275 bp, Glycine max
  Clone ID: 701041747H1
aagcagcggctaccctaatcctctcctcttcctctctactaatttcagctatggccgacgaagctgtggttgttccagatcccacccagatcgatgtcaagctctttaaccgctggagcttcgacgatattgagtggcgacatccaagcacgccacgtatgtgcctcacaccgccggcaggtcactcggtgaagcggttcaggaaggcgcaatgccccattgttgagaggctgaccaactctctcatgatgcacggtagaaacaatggcaagaaa

SEQ ID NO: 3646 - DNA, 277 bp, Glycine max
  unsure (1)..(277): unsure at all n locations; Clone ID: 701041748H1
cttcttttactatcttcaatggctgattcaggctcagcctcttcttccagaatgtggtgctccatccccgaacgggttcagctgcatgcggccatgttggccctgcagtttggctatncctggctttcatgtggtctcaagagctgcccttaacatgggcattagcaaacttgttttcccagtctaccgcaacattattgcttttctcctcctccttccttttgcctacttcttggaaaagaaggagagacctgccattactttaaacttcctctta

SEQ ID NO: 3647 - DNA, 274 bp, Glycine max
  unsure (1)..(274): unsure at all n locations; Clone ID: 701041749H1
ctcaaaggtgttgatgttggtgcatataagcccttctgaagaggatgtttgcgaaacagtttgttccttaaattttgcaaagagagcgagagcaatagagtccaacaaagaagtgccagtggaagtgaagaagcaaaaagagaagaagattatggagctagaggaagacatcaaggaagccgaaaaacagagccagaatttaagggaacaaatacagcagattgagttgaagttaaatgagagtnaaaagctcttatttaccacatatagtctt

SEQ ID NO: 3648 - DNA, 272 bp, Glycine max
  Clone ID: 701041751H1
ttccatacgaggccgaagggaagagtttttgttgggtttgggaggctaagtagggtttgcgttgagaaagagagagatgggaagagaaaaggagacaacaaaggtagcttacacagtggagcagcttgtagccttcaatccatacaatcccgatattcttccagatctcgaaaactatgtcaacgaccaggtttcgtcgcaaacttacagcctggacgcgaatctctgccttcttcgcctctaccagtttgaaccagagaaaatgagttccc

SEQ ID NO: 3649 - DNA, 269 bp, Glycine max
  unsure (1)..(269): unsure at all n locations; Clone ID: 701041752H1
gtgaaagagaatccgaggcgaagagaagagaaaaattaagatggaggggaaggagcaggatgtgtcgctgggagcgaacaagttcccggagagacagccgattgggacggcggcgcagagccaagacgacggcaaggactaccaggagccggcgccggcgccactggttgacccgacggagtttacgtnatggtccttttacagagcagggatagcagagtttgtggccattttctgtttctatacatcatgtcttaaccgtcatggga

SEQ ID NO: 3650 - DNA, 268 bp, Glycine max
  unsure (1)..(268): unsure at all n locations; Clone ID: 701041753H1
ctggacttgaagcaatatcctggtctacgtgttgaggttgggaatgccgccattgattcgctagaaaaaatgagggaggaaagcaaaagagcancactacagctagttgatatggagtgtggctatttgacggttgattactttcggaagcttcctcaagatgttgataagggtggcaatgctacacattcaatttttgatagatataatgattcatatcttaggagaattggaaccaatgttctgtctatgtcaatatggtctgtgc

SEQ ID NO: 3651 - DNA, 269 bp, Glycine max
  unsure (1)..(269): unsure at all n locations; Clone ID: 701041754H1
gcaactgaagccagaaccanagaggatgctgtctagttgggtgaagagtgcctttcgtagtgggaagaaggatatgcaagaatctgttaatcagaatcttgattttntccttggctcagctccaatatgggatagggtggagcttaaaggcaacaagtatgtattgggggagttcctggaatttaagggcaaacaagaagatgttgaggcttaagacctattagaagatcaaaagttggtcgtatgataatccaaaagacaagcatgtt

SEQ ID NO: 3652 - DNA, 225 bp, Glycine max
  unsure (1)..(225): unsure at all n locations; Clone ID: 701041755H1
ctccttnncctttcgagatnaancgccaccgcnacgnntccgcgctcngcngncactgnaacccccgnntnncttctccgtcaatgcaaaattcggcgtcgattctcgccggaancttctcccgctcttccttcccctgccgggctttnacttttgntttactnncgattgcgatgagtccctttcgcnctttgtngctcttcgcngccgtattcttngtcctnc

SEQ ID NO: 3653 - DNA, 272 bp, Glycine max
  unsure (1)..(272): unsure at all n locations; Clone ID: 701041756H1
ctcgaggacgagtnccgctcgctcatggagcgcggcggcgaggccttacgacntcactacggagccaccggaaaggcgactcagcggggaatttgccgttcgagtcagacgnnnnnnnnnnnnnnnnnnnnnnnnnnncgcggaacgttggaataggaggaggagacgaggaggagcagattccggtggcgctgccggtcacggacttcgacatcgtcatcgacgcactgccgtcggggacgatcaacgacctgcacgagatcacgaagcga

SEQ ID NO: 3654 - DNA, 270 bp, Glycine max
  unsure (1)..(270): unsure at all n locations; Clone ID: 701041757H1
cctcgtggccacacgagctttaccactactagggcggcaaaaccactgttcttagcttnctgcatgtgaagtgaattantgcaatgcttccttttctccacggtgagcatgaataacaacaattgctggttcttgtaattattattattgcaattccattttgtgacttccctgttgcttgttaattagtgtgacccagatggtgttttgagtatttgtttggagattcattcagtattttgagagatttgtatgataaatatggatact

SEQ ID NO: 3655 - DNA, 268 bp, Glycine max
  Clone ID: 701041758H1
ctctaatcactctagctgttgcaaatttctactatttttcaatggcttctgcagatgttgagttccgttgctttgttggtgggcttgcttgggtcaccggcaacgatgccctcgagaaagccttttcaatctacggcgacatcgttgaatcgaaggttatcaacgaccgtgagactggaaggtccagaggattcggatttgtgaccttcgcctcagagcagtcaatgaaagatgcgatcgcaggaatgaacggccaggaccttgacgg

SEQ ID NO: 3656 - DNA, 267 bp, Glycine max
  Clone ID: 701041759H1
aacgacctgtttcctccctcgcacggatccacccgatttctgagattccttcgaattgttaactctctttcagtttcaagttggaaactttttcgattttcgctttctggaggtgtgaattgttgtttgaaagtcacaagcaatggtgaaggacactgcgtattatgacatattaggtgtcaattatgatgcatctgctgcagagatcaagaaagctattatgtcaaggctagaattgttcaccccgataaaaatcctgaggatcct

SEQ ID NO: 3657 - DNA, 269 bp, Glycine max
  unsure (1)..(269): unsure at all n locations; Clone ID: 701041760H1
ctcactttcttttctttttcttttcttttcccgaatctgaatttntccctacaaaatccactcnctgtcctcaangacagatccgaaagtggatgccaaatctatcacccctcgtcgcccgagattatcgtacccattagattcttcttccctcttccttctacactttcccaaatnacacacactattggcggtaacagagcacaatttagtttatctactcactgttactgcgatttttgtcctacccttttcantattttagctat

SEQ ID NO: 3658 - DNA, 270 bp, Glycine max
  Clone ID: 701041761H1
caaattaatcaaacatggctagggttagtgctttgtttcactctttgctcttgatttcttcccttgtattggcttctcaaatccatgtttcctctgggaaactagtccctggactatcatggaattactatttgttgacatgtcccaagcttgagaggattataaggaagcatcttgaggatgtcttcgagaaggacagtggagtagctcctggcatacttcgactcttcttccatgactgctttcctaatggatgcgatgcgtctatat

SEQ ID NO: 3659 - DNA, 270 bp, Glycine max
  unsure (1)..(270): unsure at all n locations; Clone ID: 701041762H1
catcaatctcgtttgtnctcactaactattacttcatcatgtcgtcgagcacagttggtcaagtcatcaaatgcaaagctgcggtttcatgggaggcagggaagccacttgtgattgaagaagtagaggtggcaccaccacaagctggtgaagtgcgtttgaagatcctctacacctctctttgccacactgatgtttacttctgggaagccaagggccaaactccattgtttcctcgtatatttggtcatgaagctggagggattgtgg

SEQ ID NO: 3660 - DNA, 271 bp, Glycine max
  Clone ID: 701041763H1
actgacgtctactggactactatatggatggggttggaataagtttggacaggttggagttggtgacaatgttgatcgttgctctcctgtgcaagtgaagttcccccatgatcagaaagtagttcagatctcatgtgggtggagacacacaattgctgtaactgaaaaggaaaatgtattttcttggggaagaggcacaaatgggcaacttgggcatggggataccgttgaccggaattctccaaagattattgaggcattgagtgtggat

SEQ ID NO: 3661 - DNA, 272 bp, Glycine max
  unsure (1)..(272): unsure at all n locations; Clone ID: 701041764H1
tctcatttctcgtcttcactgagaaaaatccttctttgtgcatgctcctcgtttccatctaaaggggagagggggtgagtgagaaaaagagagtgaggtttctagcttctactgttgagtaaacatgactatggaagagggcagggtagagaacgaggactacacacaagatggaactgtgaacattaaagggaaacctattcttagatccaaaagtggtggttggaaagcttgctccttgttgttgtatatgaggtatcgaaagantggct

SEQ ID NO: 3662 - DNA, 241 bp, Glycine max
  unsure (1)..(241): unsure at all n locations; Clone ID: 701041765H1
ccttttctctcttctctctctttctccggcgacgatctcagattccggtcactcctctcgccggcgatcccttattcctccgtcctccgtcgagtcctttccgattcgaatcgttcccagccttgtgccaccatgaatcccgaatacgattatttgttcaagcttttgctgattggagattctggtgtaggcaagtcatgtctctcctgaggtttgctgtccaaatgtatngacgtattac

SEQ ID NO: 3663 - DNA, 268 bp, Glycine max
  unsure (1)..(268): unsure at all n locations; Clone ID: 701041766H1
gtacgcccagcgtgtcggtaccggtgctcccgtttacttggccgcagttctcgagtacctagctgctgaggtgcttgagttggctgggaatgctgcacgtgacaacaagaagaacaggattattccgagacatgtgctgttggctgtaaggaacgatgaggagttggggaaattgcttgctggngtcaccattgctcatggtggtgttcttccaaacattaaccctgttttgctacctaagaagactcaggttgctaaggaaccaaaa

SEQ ID NO: 3664 - DNA, 267 bp, Glycine max
  unsure (1)..(267): unsure at all n locations; Clone ID: 701041767H1
gggcaataaaacagcaaaagtttcaattttgtttctgttgaattttctcgggttggtttgcagtagcaatggcggagacatagtggtttactggggccaagacganagcgagggcacattgagcgaaacatgcaactctggactatacaaaatagtgaacataggctttctggcaaaatttggcggtgggcgggaaccagaaataaacctagcaggacactgcgaccctgcatcaaacggttgcaaaagtttgagcaaagactaaag

SEQ ID NO: 3665 - DNA, 270 bp, Glycine max
  unsure (1)..(270): unsure at all n locations; Clone ID: 701041768H1
ctaaactttgaacttgatagatactgtgagtgttttngttcctcaatcaatgcnaattcnctcaattggcttcttctctctccacnaaaccattctcanccanncgacgctctctccgccttcgcttctctcaatcccgatctcngatccttcttcctcggctanctccgtctctcactccgtcctcgtcttcccaagagacttcagatacgggctgctgggagtatctatggaaatcanttcgtgtttcaacatatggagaatcacatg

SEQ ID NO: 3666 - DNA, 267 bp, Glycine max
  unsure (1)..(267): unsure at all n locations; Clone ID: 701041769H1
tcaatgagttagcttcgggtttggaattgagtggtcaaaggttcttgtgggttttgagagcaccaaataattcagctagtgctgcttaccttgaggcttcaaaggaggaccctttgcaattcttaccaagcgggtttttggaaaggacaaaggagaaaggtttggttgtggcttcatgggcacctcaggttcaggtccttggtcacaattcagttggggggnntctaagccattgtggttggaactcaacattggagagtgtgcaag

SEQ ID NO: 3667 - DNA, 267 bp, Glycine max
  Clone ID: 701041771H1
aagacacacataattagcatagttattatggggagggttgagtactccccattgtttgagacaagaaggtgcagaggaaggttcatctacaggtcctttgcaatctcattatttgtgaccatatgctttatatggcattacagatttagccacataacaaagggtgaagatggaaactgggcatggcttggtatgcttgcttcagagctgtggtttggcttttactgggtccttactcaagcccttagatggaaccttgtgttcaga

SEQ ID NO: 3668 - DNA, 265 bp, Glycine max
  unsure (1)..(265): unsure at all n locations; Clone ID: 701041773H1
gttcactcttcttctcttgcggctagggttttagcgcantttcttctagatttaacgaagatgggtaaggaaaaggttcacatcagtattgtggtcattggccatgtcgactctgggaaatccactaccactggtcacctgatttacaagcttggaggcattgacaagcgtgttattgagaggtttgagaaggaagctgctgagatgaacaagaggtcttcaagtatgcctgggtgctggacaaattnnngctgagcgtgaaaga

SEQ ID NO: 3669 - DNA, 267 bp, Glycine max
  Clone ID: 701041774H1
atccatatggaggtttaatcctaaacaggccaactattagcaggagattcatgcctgaaaaggggtctcctgaatatgatgcgttggctaagaaccctgagaaggagtttttgaagactattactggcaagaaggagaccctcattgaccttacagttatagaaatcttgtcaaggcacgcatctgatgagttctaccttgggcagagagatggtggtgactactggacttctgatgccggtccattagaggcatttaagaggtttg

SEQ ID NO: 3670 - DNA, 267 bp, Glycine max
  Clone ID: 701041775H1
agcgcagaatccaagaagaaaggatcaactgtcaaagataaggaaaaatctaaaaggatgaagggtcaatcatcccatgcaacctggaaaagtgaaacagagatgcatctaaggcaacagtttgattagcattatgtgttcttgtatgttaccagttacctggtagaatgtgatgtgtttaggactatgctgttaaatcaacaaattaacttcgtcgttatcaatgccagcaggtacaagttgctacatatggctctaaaattatgg

SEQ ID NO: 3671 - DNA, 267 bp, Glycine max
  Clone ID: 701041776H1
caattaattatagtttaggctgcaaattatggaatcccatgatgaagagcatgctgccaaactacttagagctcaaacccacatatggaatcacatatttagcttcataaactccatgtcccttaaatgtgtggttgacttaggcataccagatatcatacacaactatggccaacccatgccactctcaaacctcattgcttcactaccaatccacccatccaaaacttgcttcgtccatcgcttgatgcgaatcatgatccattc

SEQ ID NO: 3672 - DNA, 249 bp, Glycine max
  unsure (1)..(249): unsure at all n locations; Clone ID: 701041777H1
caaattcccttcccatggtctctcnnctcttcaattaattccatttagctttccccaaatcacaaaccctttttcgcttagatcccaatccaattgggttatggacatggcttccagtccccgcaccgtagaagagatcttcaaggattacagcgccagaagaacctctgttattcgcgctctcactcacgacgttgatgaattttacggcctctgtgatccagataaggataacctgtgcctctatgg

SEQ ID NO: 3673 - DNA, 273 bp, Glycine max
  unsure (1)..(273): unsure at all n locations; Clone ID: 701041779H1
gatcatcagaggcaatgggcgagcaggtactgggcagtgtctcttcccgtccacaactcggcatcattctcagctctggaaccaattgcaggaacgaatctccaagcattccttcgacacacctctctacanattcaacattcccaacctccgcgtcggaaccctagactctctcctctccctcagcgatgacctcgccaagtccaacaatttcgtcgaaggagtcacgcacaagatcaggcgccagattgaggagctcgagagagtttccgg

SEQ ID NO: 3674 - DNA, 272 bp, Glycine max
  Clone ID: 701041780H1
aatttattcaaaaagaaaagatgaaccctaatttcctctgtctctgaacttggaagatctggtttccattatctcctccatcttcacgttccgaaattgtagatagaagatcacacttgctcaattcccttctcaagttattgttggttggcaatgcaagatccaaggattcctttgtcagaggagatcttgaataataaaccaaggaagaagaaaaactcaacccagaaggcatctttatttcttttgcaagcgaatggtgtcaaggaaga

SEQ ID NO: 3675 - DNA, 268 bp, Glycine max
  Clone ID: 701041782H1
agcaaagccaaggaaatgaaggggctttgacatttccaattttctaatatttaatattcgctccattccaattttcatcacaaacacacactgctacaccaaaaaccgaagcaaaacaagtgaatcaagactctacttcgtgttccaatcagaggatatagatagagaattatgagtcgattgaacaaaaataaaagtatttgtagtgatggtagtgccagtaatgaatcttcttcaagtggaataactggagaaagggatgatcatc

SEQ ID NO: 3676 - DNA, 270 bp, Glycine max
  unsure (1)..(270): unsure at all n locations; Clone ID: 701041783H1
atcatcctnccactcacttactcatcntggncaattctgatctntccctctggaacaaggcagnatngcttctccttcacttgcatagctgtcagncatggattataccaccanctcacatccaccnctcatcaattaccaacaattcccaggaggtttatgccgtgccanttcagctggatcagatcttcagcattacacgtgggtcgtcttagagtgcacggtgaagggagatgggaagttgattctcacaggtcagaggttaagtcc

SEQ ID NO: 3677 - DNA, 264 bp, Glycine max
  unsure (1)..(264): unsure at all n locations; Clone ID: 701041785H1
tcaaaaattgcctatgatggttggcaaaatatcgggcacaccattccaccatggcagccattgcaatgtcattttacancattggtcaaaatccgtaaaaaaataaagttctggaggtgtttggggttgggaaaggagaggaatgatacgatgttcntataattgcagctttgttagtttcctgttctctttaagcctcaataattgatagttttatttntagtaagctcttaggaagaacttttaaaagggaagtagaagttc

SEQ ID NO: 3678 - DNA, 264 bp, Glycine max
  Clone ID: 701041786H1
cgccagtctcccagaaggaagctgacatccagatgatgttggccgccgacgtccacctcggcaccaagaactgcgacttccaaatggaacgttacatcttcaagcgccgcaacgacgggatttacattattaaccttgggaagacgtgggagaagcttcagctagcagctagggttatagttgcaattgagaacccccaggatatcattgttcaatctgcaaggcctatgggcaaagagcggttctgaagtttgctcagtacac

SEQ ID NO: 3679 - DNA, 265 bp, Glycine max
  Clone ID: 701041788H1
gttttctttgttctttttcaacccttacataattaatctgtgcaaaattagcatcagattgacccttggctaacttcgttttgatgtattttttcaaaacaaattaacctcagtttgttttgacaggctgcagaattactaaatcatccgcatcttcagccttacattcataaaattcacctaaaattaaatagccccataagaagtacttttccattccaatggccagagtcaaattacataaggagaatcagtttgtagagcc

SEQ ID NO: 3680 - DNA, 263 bp, Glycine max
  unsure (1)..(263): unsure at all n locations; Clone ID: 701041790H1
ccagaattcatgccattgagtcatgttcttgcaaccaagctcggtgctcgtctcaccgaggttcgcaagaacggaacctgcccatggctgaggcctgatgggaagacccaagtgactgtggagtattacaatgataatggtgccagggttccagttcgtgtncacaccgtgctaatctccacccagcatgatgagactgtcaccaacgacgaaattgcggctgacctcaaggagcatgtgatcaagcctgtgatcccggagaa

SEQ ID NO: 3681 - DNA, 262 bp, Glycine max
  unsure (1)..(262): unsure at all n locations; Clone ID: 701041791H1
caaattctctgtgttgtgttgtgnacttgtgttaattgtgttgntgttgtaggaaatttaagtgaagagagaatnatgatgaagtctgctatgtgtgcattggtgcttgtggcactggttgtggttgaagtggggcccatggctgaggctgcggtgacttgcaacccaacacagttgactncttgtcttccggcaattaattcaggttctgcaccttcgagtgctgttgccagaagctgaaggagcaaaagccatgcttctg

SEQ ID NO: 3682 - DNA, 267 bp, Glycine max
  Clone ID: 701041793H1
cgcaacaaaaagaaagaatcccaggcgaggagaaagatggaggggaaggagcaggatgtgtccgttgggagcgaacaagttccccgagagacagccaattgggacggcggcgcagagccaagacgacggcaaggactaccaggagccggcgccggcgccgctggttgacccgacggagtttacgtcatggtcgttttacagagcagggatagcagagtttgtggccacttttctgtttctctacatcactgtcttaaccgttatggg

SEQ ID NO: 3683 - DNA, 268 bp, Glycine max
  unsure (1)..(268): unsure at all n locations; Clone ID: 701041794H1
cctagatacatatgttcacgctgctgatggtactccgttactcatcnagaacgcaatctgtgtctttgaacaatatggcagcatcatgtggcgtcacaccgaaacaggcattcccaatgaattcgttcgaagaaacgagaacggnagtcaacttagtggtaagnactgttgttaccgtgggcaactacgataacatcattgattgggagtttaaaacaagtggctcaatcaaacccttcgattgctctctcgggtatattggaaataa

SEQ ID NO: 3684 - DNA, 267 bp, Glycine max
  Clone ID: 701041795H1
gttcaacaacgtggcgctgcaattatcaaagctagaaagctttcaagtgcactatcagctgctagtgctgcttgtgaccatattagagactgggttcttggaactcctcagggcacttgggtatcaatgggagtatattctgatggttcctacaatgttccagctggacttatatattcattccccgtcacttgtgccaatggggaatgggcaatagttcaaggactttccattgatgagttctcaaggaagaagttggacttgact

SEQ ID NO: 3685 - DNA, 271 bp, Glycine max
  unsure (1)..(271): unsure at all n locations; Clone ID: 701041796H1
ccctaatcagctcacagacctctctttctcgcgtctttggaggtatagtttccaagtctccttttgcttcgatccaagcgttattgttcccaatcttttttcataccaattgctgttccagcaaaattttatggaggagcaattcatacttagagttccacctaatgtggcagancggatagagcgtcttctgaatgaaaacaatgcttcttcatctgaagacaagtcactagatttgtcatttagagaggatggaagaagtggtacgttt

SEQ ID NO: 3686 - DNA, 150 bp, Glycine max
  Clone ID: 701041801H1
gctgccacaaattataataatagggttgttgaatgccatttggcttctattgtgctcgctataaagctagggatggatccaaaagaggcaatatcaaaagtgagcagcactgtctgatgttgaagggttatgcgtatcatttgccggtat

SEQ ID NO: 3687 - DNA, 193 bp, Glycine max
  unsure (1)..(193): unsure at all n locations; Clone ID: 701041803H1
gttctctctctctgattcgatcgatttcgattgttgaattcatcacatcacggagccntgacaacgatggtgctgccgctatttnctgctttcattctctttgcttttattccgaatggattgttagcagttccttccaccgtcccggcattccttggtcatcacattatgaactggcctcngaanatatatt

SEQ ID NO: 3688 - DNA, 146 bp, Glycine max
  unsure (1)..(146): unsure at all n locations; Clone ID: 701041804H1
aaatcagtgaccggcgtgagacnagcanagatggtggntcttggcaccanctcaccttcaatttcntgcttgccgtcttcaactcaaaccgantacaaggcgcgtcgatactgtncttttccgcaacgnccangcccacgccgacg

SEQ ID NO: 3689 - DNA, 146 bp, Glycine max
  unsure (1)..(146): unsure at all n locations; Clone ID: 701041805H1
aataagtnagatgggtctgggcccgttttcaaaattttcgtcattatagtnattgttacgattatgatactgagaaagttggggggcctgaaatttggcatctacagctatcagattgctatatttgttgttctgtttcagcaaaa

SEQ ID NO: 3690 - DNA, 285 bp, Glycine max
  unsure (1)..(285): unsure at all n locations; Clone ID: 701041806H1
gcggtcatcaatttcatctcgattgncattggttcggcattcaacataaaaggagcaatgcagtgccctaattgtcggaagattgagaaaggtcaatggctatatgctaatggttgtcggtcatatcctgaatttagcatggatgagtggactcacgatgaggacctttatgatcttagctactctgagatgtcctttgggagttcattggtgcccttttggcaacctggcacgacttccatcatcctttgaggaaggggagttttcgtcatctgcatatcatga

SEQ ID NO: 3691 - DNA, 211 bp, Glycine max
  unsure (1)..(211): unsure at all n locations; Clone ID: 701041807H1
atcatggacagagtgcaattcagagaaaccaaatcccagacaccatacaacacaacacagcactttggtcgtgtttcgtttcatctttttctccgagaaagatccaccccacgtttcaaaatcactttttttctctgctttgggaaatgatgccattgttgtcccttgcgaancaaaccccatcaccaccatcatcatgtaggagcgactc

SEQ ID NO: 3692 - DNA, 271 bp, Glycine max
  unsure (1)..(271): unsure at all n locations; Clone ID: 701041808H1
tccttataaacttcttccgatgtgtttctctctttctctctccgtactctngctttncttcataaaattttgcaatcggtttgacaactgaatttgcatttggtaatcaaattaataattganaaaaaagaagaagnnaaaaagggtngggaggcatagccagatattgaacctgccctgctgttcttaatctcattntgccncccncagatctcgtctcaatcggagtnttggccttcattgatccctggcntgatgttnnngagngggc

SEQ ID NO: 3693 - DNA, 282 bp, Glycine max
  unsure (1)..(282): unsure at all n locations; Clone ID: 701041809H1
ggggctacccgctgagtttaagcatatcaataagcggaggaaaaggaaacagcaacggcagttacaaaactaaaggcggcgccggtgtcgcgcacggaagtttagagtccggcatgacggcggtgaagctgctggatttgatgccggtgatgcgaactccgatgaggacgcggcggagatggcgccggangagatgaatccgaagctgtttggtgtggcgattngagcgaanngnccnagncacggaggangtggtngagattgtggacgtggaagagagga

SEQ ID NO: 3694 - DNA, 279 bp, Glycine max
  Clone ID: 701041810H1
gcattgtgatgatctaaatacacaacaaattatcatggatgaaatcatgcaatctgtcggcactttagcacaggatcaatatggaaattatgttattcagcatattgtggagaatggtaaaccacatgaacggactgctattatcagcaagtttgccgggcagattgttaagatgagccagcaaaagtttgcttcaaatgttatcgagaagtgtttggctttggtagtccgaagaacgtcagattttggtgaatgaaatgcttggtacttctgatgaga

SEQ ID NO: 3695 - DNA, 278 bp, Glycine max
  unsure (1)..(278): unsure at all n locations; Clone ID: 701041812H1
aattcagaaactgaatagaatgtcctgaaacaggttgaaaaagggaagcaagatgatgcactgtcagatttaagtgatctcttgggagaactgaaaggcatggccattgacatgggatctgaaatcgggaggcaaaaccaagccttggacggttttgacaatgatatggagaagttgaccgtccgtgtgaatggtgctaatcaacgtatcatcgtttgcttgggaaataggggcgtatatcatgagattgatnctaatttttaccttgcatattcatt

SEQ ID NO: 3696 - DNA, 111 bp, Glycine max
  unsure (1)..(111): unsure at all n locations; Clone ID: 701041813H1
tttctttcaaacaaacgctgtttnctctctgctcttctctgctgcgtagttcnnttncaattgcaattcaatntgatgncagaganttctccttgctacacactagctant

SEQ ID NO: 3697 - DNA, 290 bp, Glycine max
  unsure (1)..(290): unsure at all n locations; Clone ID: 701041814H1
gtcccaaagagctaacaagagattcaagaccggcatggctaatgaagaggaacagaaaaaccaccttcttcggcatcaaagatctcggtcacaagactctccttcagagtgatgcactctatcagtatatacttgaaaccagtgtctatccaagagagcacgagtgctgaaagagntacgcaagatgactgcaaaacacncactgaacatcatggncaacaccagcagacggagggacaacttctgaggcatgcttgttaagctcacgaattcaaagancgncttggaaa

SEQ ID NO: 3698 - DNA, 284 bp, Glycine max
  unsure (1)..(284): unsure at all n locations; Clone ID: 701041815H1
ttcgggtcctctcaatccgatcaacgacaccgtcgaattccgatcccctcgcgacgccgatggccacggcacccataccgcctccaccgccgccggccgctacgccttccaagccagcatgtccggttacgctgctggaatcgcgaaaggcgttgctccgaaagccagattggctgcttacaaagtttgctggaaaaattccggttgttcgactctgacatcctcgccgcctttgacgcggccgtgaaacgacggggtggatgtgattcgatctccatcngtgg

SEQ ID NO: 3699 - DNA, 285 bp, Glycine max
  unsure (1)..(285): unsure at all n locations; Clone ID: 701041816H1
ggaaaacgcagaagaacttggcggcactagatgccattgatgcggggaagttgtaccatatgtgtaggaatttggaagttccagcagcagcaaacactcttcgttactatgcaggtgctgccgataagattcatggcgaggtgttgaaaatgtcccgngacttccatgnctatacattgcttgaaccacttggtgttgtgggacacattactccctggatttccccaataccatgttctacatcaaggntgcnccttctttagctgtggctgcaccatggtctca

SEQ ID NO: 3700 - DNA, 288 bp, Glycine max
  unsure (1)..(288): unsure at all n locations; Clone ID: 701041817H1
gaaaagacactgtctcgcgagtnaacacaggttacagcaatggctttctttggtagaattgggaatttattaagacagacagnnagcaggcntgttagttgagaattgcgatcatccccttcgttttttcaggctatacgcagtatgtcntctgctcccaagnananagctgtttatcggaggngtntnatattctactgacgagncaagttggaggaagctttttccaaaatatggtgnagttgtggatgctaggngatcanggancgtgaactgggngatccnagg

SEQ ID NO: 3701 - DNA, 146 bp, Glycine max
  unsure (1)..(146): unsure at all n locations; Clone ID: 701041818H1
ctcacgaccctccgccgccgcggttgcaagcagagcacaccatcganatgggcgaacgaaggcgttggttccggaatcggtggtgaagaaggagaagaggaacgaggagtgggctttggagaagaagcaggaactcgatgccgcaa

SEQ ID NO: 3702 - DNA, 135 bp, Glycine max
  Clone ID: 701041819H1
aaaaaacttgagagagagaaaatagagaaagaggctaggtagaaactagaacccgggtcctgcttactacactcacccccaatttcccgagcctcagcttcgggacacccgaacctcattactcgggacgcgaat

SEQ ID NO: 3703 - DNA, 285 bp, Glycine max
  unsure (1)..(285): unsure at all n locations; Clone ID: 701041820H1
tttgattccaagattgtttgaaactggggctatctgtttggtggatgagatttttcttgagtgccattacaataggtggcagaggtgttgccctggacagaggagccccaagtatgagaaaacttatgatcagtgcttgcagctcttcacttctctcagaacaaagtggagttcttgttcatcaatggttttaattaactttgtagaattggcctgatggatgatgggtcanaccctatatgcatgttcctnagcttctgcatgtntctcnttntagtnccntat

SEQ ID NO: 3704 - DNA, 284 bp, Glycine max
  unsure (1)..(284): unsure at all n locations; Clone ID: 701041821H1
ggctgctgaagtgacatatgaggataacgagaattttgttgatgatgggattcaaattgagcctttcaacctagagaaagaaagggaagaaggttattttgatgctgcaggaaattttgttgaatatgtaaganagaatnagattaaggntgcatggcttgataatgttgaagttgatccanaatatgctgcattaagcctctgtagcaacaaatgatgnagnatgagggccccccagacctttcttctaaagatattggaatcatgaangaggngcattgcaa

SEQ ID NO: 3705 - DNA, 279 bp, Glycine max
  unsure (1)..(279): unsure at all n locations; Clone ID: 701041822H1
tcgaactcgagtggtaatggagacgattttacaagcaacgtgaaaaggctcataattgatttggtcaccatttgaaggaagagaatgtgaaagagtgaggtcagagttgcctgtagacgaagacaatcgtcatcagttgcagctgcaaaggaatgaggtaattgcattgacganccttctcaatcgactctcggaatccttcaaattcgtccacgantggcacctacagttgaaagaatcatggaaggaggaatttttctgctcntacaagaactgatt

SEQ ID NO: 3706 - DNA, 279 bp, Glycine max
  Clone ID: 701041823H1
ccaacatctatctcacttcttagttctttgtggctctttccatgatggcctctcctacatctccaagagttctcttcttgagtctctttgtaactctttccatgattttacatttgagttcagccaggaagttgtctgagtcagacccccaattgcagttccaataccacagaggccctctcctcacaggcaaaatctccgtaaacctaatttggtacggtaagttcaaaccttctcagaaagccattgttgctgatttcatcacctctctctctcttc

SEQ ID NO: 3707 - DNA, 281 bp, Glycine max
  unsure (1)..(281): unsure at all n locations; Clone ID: 701041824H1
gatcaacacaaaggtgggaatgtattgattctactctctgaagaatctggagatcagcttgtagcatccaactatgtcagcaaacagttctttgcatgtggaattatcgaggaagacttcgtttttgggattnagattatgggttttgattgggataggtgttggtgtttttatagtcgtgattctttgtgtattatctgtatgggtgatgtttccggagnaagtctaaaanatctctggacaagtacctttntcacaaatnccccatgtctcagagganc

SEQ ID NO: 3708 - DNA, 139 bp, Glycine max
  unsure (1)..(139): unsure at all n locations; Clone ID: 701041826H1
ttttctacttctttcntngtcgccgttcgttcacagcgtacctctgnctctcgaagatggctcctcccagangtggtggtgggttcaggggtggtaggggtgacagaggtagaggaacgggtggcggtgnaggaagang

SEQ ID NO: 3709 - DNA, 284 bp, Glycine max
  unsure (1)..(284): unsure at all n locations; Clone ID: 701041827H1
cganaggagaggagagaagagaggaagttttgncngtttgaatctatagaatagaatcaaaccaaattgaaagaagatcgatcgatcgatcgatggctctggtcggagttggagtgaagcatgcggcggagggcgcaccggaggagaattgctccgccaagcccaccaagcagggcgagggcctccgccactactattctcacaagatccaggancatcagctccttnccngtnaaaaggcgtnnaccgntcaaccttntgcgggncnnnnngaaaccngntct

SEQ ID NO: 3710 - DNA, 280 bp, Glycine max
  Clone ID: 701041828H1
gttgatctttggttgaagattcaagaggaggcaaggttagatgttgatcaagaaccaattttatcccagctactatttcagttccattttgtctcacaaatctttggagagtgccttggccaaccacctctccacaaatttgagcagcttgagccttccaagcagcaccctttttgaccttttcatgggtgttttggttgatgatggagatgatgacatcgtaggtgctgtgaaggatgatttgatagctgttaaggagagggaccctgcttgcataagt

SEQ ID NO: 3711 - DNA, 251 bp, Glycine max
  unsure (1)..(251): unsure at all n locations; Clone ID: 701041830H1
tttggaactaccaaaagcngaacgtngcacanntacacnaaacntagcanccattgagttttgtntgctttgaaacatcgtgtgcacagtacnccagaagatcgaacaaggatctccacaangacaaaccccagttctcaantgtgttttncctctctctcacctatntnaggccatacccagggtttttgnnttnantttnnacattagtntcagtgggattaacgaggctgagaagagcngcagacacc

SEQ ID NO: 3712 - DNA, 98 bp, Glycine max
  unsure (1)..(98): unsure at all n locations; Clone ID: 701041831H1
gttactttccaatttgaattgttccattttcatttctttcgcaaaagttgcaactacttcctcaganaaaaagtttctaagttaaggacnatccagag

SEQ ID NO: 3713 - DNA, 67 bp, Glycine max
  unsure (1)..(67): unsure at all n locations; Clone ID: 701041833H1
caanaccattcatggctgtgtcaacngaggaatcgttcaccaagtgagaatcntcatcatcntcatc

SEQ ID NO: 3714 - DNA, 110 bp, Glycine max
  unsure (1)..(110): unsure at all n locations; Clone ID: 701041835H1
ggaagaganagggagattctttgtttgctaccttctctcggaaaaatggttacgttcaggtttcaccagtaccaggtggttgggagggctcttcccacggaagcagatca

SEQ ID NO: 3715 - DNA, 117 bp, Glycine max
  Clone ID: 701041836H1
atgggttcttcttcttctatgtggacggtgtgtgtgattttggcatcactggcctctgcagcactctgtgccaacccacgcaggccagtggatgtacaatttggccgaaactacgtg

SEQ ID NO: 3716 - DNA, 153 bp, Glycine max
  unsure (1)..(153): unsure at all n locations; Clone ID: 701041837H1
aaacttcaacttgtaatcaagggagacagaaaatttgcaagcacaaaaaatggcggagaagaaagtggtgatcctaggaggtggtgttgccggtgccaaccttggcaaaaactatacaacatcaagccaacgtcacccttattgatccgacng

SEQ ID NO: 3717 - DNA, 249 bp, Glycine max
  unsure (1)..(249): unsure at all n locations; Clone ID: 701041838H1
gcttcacatcctgcagacctcaaccatcagcaccaccataccaacaacatcatcgcggcgccatcaccagncgtaccaacaacatcatcgcncgatccaagcaacactcacacnaacagntctatgcgccacaacaccaccgcgcaacggagaagtcgcgcgcgcgcaggaagctcaaagattgattcgcgcacacagntggaggtgcaatgatggtgtgacggcggcgcggtggtggctggtccaagg

SEQ ID NO: 3718 - DNA, 278 bp, Glycine max
  unsure (1)..(278): unsure at all n locations; Clone ID: 701041839H1
caaaagcaaccacaacaagcacttctcttatttcctatcacaccctattacagattcacaagcgcagacacttgcaaatggctctggaagctcttcaatcacccagaacagccactccatcgtttagtccctttgaagaaaccaacctcagttacttggagacaccgtggaccaaaggaaagcgttctaagcgtanccgcatggagcagcaactgcaacactcttcatgcaccgaggaagagtactcgctctctgtctcatcatgctcgctcacgggg

SEQ ID NO: 3719 - DNA, 276 bp, Glycine max
  unsure (1)..(276): unsure at all n locations; Clone ID: 701041840H1
ccgacgcctccagataaacaaccttaactttcccataacaccacccatccattctnttnctctctctagatttcatttagttgttgctgtcttcttctgtttgtgtgtgccaacacagagcgaaaaacatggctctgaaccaatcaaaagccgtgttgttgagggtgagtttggtggtggtggcgctcttcatagcagggtacatagtgggtcccctctctagtggcatttcgttgaaggtntggctgcggtcaaccactcttcttctangtgccc

SEQ ID NO: 3720 - DNA, 279 bp, Glycine max
  Clone ID: 701041841H1
ttttcatttccgatccataattgtcccaacgcgatacaccaattcttccttcctttcatctcgtgaaatccaaagagttgcgacacgttaaattgttttccaggttgcgcatatccagcatgcaggcatcgcgggcaaggctgttcaaggagtacaaagaggtgcagcgggaaaaggctgttgatcttgatattcaactagtttgtgatgattcaaacatttttaaatggaccgctcttatcaagggaccctctgagactccttatgagggtggtgtgt

SEQ ID NO: 3721 - DNA, 277 bp, Glycine max
  unsure (1)..(277): unsure at all n locations; Clone ID: 701041842H1
gtgccattcatttcttctagccatggacgagaagctcatacagcggttagaatcggcggtgttgcgcttggagtcgctatcctctggactccacccctccgcttcacaatccggcggcgcccacgctcccgatgcggcgctgcgatncccttccgtcgtcgccttcgccgatctgatcgaccagtacgtcggtagggtttccggcgctgcagaggttatcggcggacaggtcttgggtgtcaccaaactggtgcaggaagtttcaatgttcagaaga

SEQ ID NO: 3722 - DNA, 275 bp, Glycine max
  Clone ID: 701041843H1
aagtttcttcctttctctgctctttgccttctctgacacatttggtgccttgtagagcgtgttttggcaggaaggtggtatggcgaaggacgttgaggttgctgagcgtggctccttctctgggaaggactaccaggaccctccaccagcaccactcattgatgctgaggagctcacaaagtggtccttttacagggctctcattgctgaattcattgccactttgctcttcctctacattactgtgctcacagtcatagggtacaagcaccaga

SEQ ID NO: 3723 - DNA, 137 bp, Glycine max
  unsure (1)..(137): unsure at all n locations; Clone ID: 701041844H1
aattgtgaaggaagtctcttcctacttgaagaaagtaggatacaaccctgacaagattccttttgttcctatctctggttttgagggagacaacatgattganaggtccacaaaccttgactggtacaagggtccaa

SEQ ID NO: 3724 - DNA, 257 bp, Glycine max
  unsure (1)..(257): unsure at all n locations; Clone ID: 701041845H1
accctagcttaccttttcaactttcaagatgcaaatcttcgttaagacactcactggtaagacaatcacccttgaggtggagagttcagataccatagataatgtaaagtccaagattcaagacaaggaagggatcccaccagaaccagcaacgtgtcatttttgctggcaagcagcttgaggatggacgtacacttgctgattacaacatccanaaggagtccactcttcacttggtgctccggctncgtggtgga

SEQ ID NO: 3725 - DNA, 278 bp, Glycine max
  unsure (1)..(278): unsure at all n locations; Clone ID: 701041846H1
cacacttccacgtcaccaccaccnncgtngaangtggagcgtgaggctgtttccggtaacctctcccggnggcgctgagtggtgatcaaggaaatgggtcagacgctgagttgcgtgcaacagcacgaggaccatggtgtgctcttccctgcacttgcaagtggagaatnggaggttgttnaggccatggtggaggaagaccccactgtgttggaacacaccattggctgtgacangctttctcctctgcatgtcgtgctgccaatggtcggatcgag

SEQ ID NO: 3726 - DNA, 279 bp, Glycine max
  unsure (1)..(279): unsure at all n locations; Clone ID: 701041847H1
taagcagcggctaccctaatcctctcctcttcctctctactaatttcagctatggccgacgaagctgtggttgttccagatcccacccagatcgatgtcaagctctttaaccgctggagcttcgacgatattgagtggcgacatccaagcacgccacgtatgtgcctcacaccgccggcantcactcggtgaagcggttcaggaaggcgcaatgccccattgttgagaggctgaccaactctctcatgatgcacggtagaaacaatggcaagaaatctt

SEQ ID NO: 3727 - DNA, 284 bp, Glycine max
  unsure (1)..(284): unsure at all n locations; Clone ID: 701041848H1
cttcttttactatcttcaatggctgattcaggctcagcctcttnttccagaatgtggtgctccatgccccgaacgggttcagctgcatgcggccatgttggccctgcagtttggctatnctgggctttcatgtggtctcaagagctgcccttaacatgggcattagcaaacttgttttcccagtctaccgcaacattattgcttttctcctnctccttccttttgcctacttcttggaaaagaaggagagacctgccattactttaaaantccctcttacagtt

SEQ ID NO: 3728 - DNA, 129 bp, Glycine max
  unsure (1)..(129): unsure at all n locations; Clone ID: 701041849H1
ctcaaaggtgttgatgttngtgcatatnagcccttctgaagaggntgtttgcgaaacagtttgttccttaaattttgcaangagagcganagcaatagagtccaacaaagaantgccagtggaagtgaa

SEQ ID NO: 3729 - DNA, 139 bp, Glycine max
  unsure (1)..(139): unsure at all n locations; Clone ID: 701041851H1
ttccatacgaggccgaagggnagagtttntgttgggnttgggaggctaagtanggtttgcnttgataaagagagagatgggaagagannagganacnacaaaggtagctacacagtgtagcagcttgtngccttcaatt

SEQ ID NO: 3730 - DNA, 92 bp, Glycine max
  unsure (1)..(92): unsure at all n locations; Clone ID: 701041852H1
gtgaaagagantccgaggccgaacagaaganaaaanttnanatggangggaaggagcaggntgtnntcgctggcgagncgnacaagttcccg

SEQ ID NO: 3731 - DNA, 115 bp, Glycine max
  unsure (1)..(115): unsure at all n locations; Clone ID: 701041853H1
ctggacttgangcaatntcctggtctacgtgttgnggttgggaatgccgccattgattcgctagnaaaaatgagggangaaagcaaaagagcangcactanagctanttgatatc

SEQ ID NO: 3732 - DNA, 159 bp, Glycine max
  unsure (1)..(159): unsure at all n locations; Clone ID: 701041854H1
gcaactgaagccaganccaaagaggatgctgtctagttgggtnaagagtgcctttcgtagtgggaagaaggatatgcaagantctgttaatcagaatcttgattttgtccttggctcagctccaatatgggatagggtggagcttaaaggcaacaagta

SEQ ID NO: 3733 - DNA, 285 bp, Glycine max
  unsure (1)..(285): unsure at all n locations; Clone ID: 701041856H1
ctcgaggacgagtnncgctcgctcatggagcgnggaggcgaggcnttcgacnttcactcggagccaccggaaaggcgactgcagcggggaatttgccgttcgagtcagacgnnnnnnnnnnnnnnnnnnnnnnnnnnnngcggaangttggaatangaggaggagaccgangaggcagcagattccggtggcgctgnccggtnncggntttcgacatntcatcggacggcactgccgtcgggggacgaatcaacnanctgcacgngatcacggaacgnatggtgg

SEQ ID NO: 3734 - DNA, 274 bp, Glycine max
  unsure (1)..(274): unsure at all n locations; Clone ID: 701041857H1
ctcgtggccacacgagcttttaccactactagggcggcaaaaccantgttcttagcttctgcatgtgaagtgaattantgcaatgcttccttttctccacggtgagcatgaataacaacaattgctggttcttgtaattattattattgcaattccattttgtgacttccctgttgcttgtnaattagtgtgacccagatggtgttttgagtatttgtttggagattcattcagtattttgagagattgtatgataaatatggatactttgctc

SEQ ID NO: 3735 - DNA, 159 bp, Glycine max
  Clone ID: 701041858H1
ctctaatcactctagctgttgcaaatttctactatttttcaatgagcttctgcagatgttgagttccgttgctttgttggtgggcttgcttgggtcaccggcaacgatgccctcgagaaagccttttcaatctacggcgacatcgttgaatcgaaggtt

SEQ ID NO: 3736 - DNA, 274 bp, Glycine max
  Clone ID: 701041859H1
aacgacctgtttcctccctcgcacggatccacccgatttctgagattccttcgaattgttaactctctttcagtttcaagttggaaactttttcgattttcgctttctggaggtgtgaattgttgtttgaaagtcacaagcaatggtgaaggacactgcgtattatgacatattaggtgtcaattatgatgcatctgctgcagagatcaagaaagcttattatgtcaaggctagaattgttcaccccgataaaaatcctgaggatcctaaggcc

SEQ ID NO: 3737 - DNA, 159 bp, Glycine max
  unsure (1)..(159): unsure at all n locations; Clone ID: 701041860H1
ctcactttcttttctttttcttttcttttcccgaatctgaatttttccctacaaaatccactcnctgtcctcaaagacagatccgaaagtggatgccaaatctatcacccctcgtcgcccgagattatcgtacccattagattcttcttncctcttcct

SEQ ID NO: 3738 - DNA, 276 bp, Glycine max
  Clone ID: 701041861H1
caaattaatcaaacatggctagggttagtgctttgtttcactctttgctcttgatttcttcccttgtattggcttctcaaatccatgtttcctctgggaaactagtccctggactatcatggaattactatttgttgacatgtcccaagcttgagaggattataaggaagcatcttgaggatgtcttcgagaaggacagtggagtagctcctggcatacttcgactcttcttccatgactgctttcctaatggatgcgatgcgtctatattgttga

SEQ ID NO: 3739 - DNA, 279 bp, Glycine max
  Clone ID: 701041862H1
catcaatctcgtttgttctcactaactattacttcatcatgtcgtcgagcacagttggtcaagtcatcaaatgcaaagctgcggtttcatgggaggcagggaagccacttgtgattgaagaagtagaggtggcaccaccacaagctggtgaagtgcgtttgaagatcctctacacctctctttgccacactgatgtttacttctgggaagccaagggccaaactccattgtttcctcgtatatttggtccatgaagctggagggattgtggagagcgta

SEQ ID NO: 3740 - DNA, 276 bp, Glycine max
  unsure (1)..(276): unsure at all n locations; Clone ID: 701041863H1
actgacgtctactggactactatatggatggggttggaataagtttggacaggttggagttggtgacaatgttgatcgttgctctcctgtgcaagtgaagttcccccatgatcagaaagtagttcagatctcatgtgggtggagacacacaattgctgtaactgaaaaggaaaatgtattttcttggggaagaggcacaaatgggcaacttgggcatggggataccgttgaccggaattctccaaagattattgangcattgagtgtggatggatc

SEQ ID NO: 3741 - DNA, 166 bp, Glycine max
  unsure (1)..(166): unsure at all n locations; Clone ID: 701041864H1
gttctcatttctcgtcttcactgagaaaaatccttctttgtgcatgctccttcgtttccatctaaaggggagagggggtgagtgagaaaaagagagtgaggtttctagcttctacnngttgagtaaacatgactatggaagagggcagggtagagaacgaggacta

SEQ ID NO: 3742 - DNA, 283 bp, Glycine max
  unsure (1)..(283): unsure at all n locations; Clone ID: 701041866H1
gtacgcccagcgtgtcggtaccggtgctcccgtttacttggccgcagttctcgagtacctagctgctgaggtgcttgagttggctgggaatgctgcacgtgacaacaagaagaacaggattattccgagacatgtgctgttggctgtaaggaacgatgaggagttggggaaattgcttgctggngtcaccattggctcatggtggtgttctttccaaacattaaccctgttttgctacctangaagactcaggttgctaaggaaccaaaatctccatcccang

SEQ ID NO: 3743 - DNA, 137 bp, Glycine max
  Clone ID: 701041867H1
gggcaataaaacagcaaaagtttcaattttgtttctgttgaattttctcgggttggtttgcagtagcaatggcggagacatagtggtttactggggccaagacgagagcgagggcacattgagcgaaacatgcaact

SEQ ID NO: 3744 - DNA, 136 bp, Glycine max
  unsure (1)..(136): unsure at all n locations; Clone ID: 701041868H1
ctaaactttgaacttgatagatactgtgagtgtttttgttcctcaatcaatctaattctctcaatggnttcttctctctccaccaaaccattctcanccaaccgangctctctccgccttcgnntctctcantccc

SEQ ID NO: 3745 - DNA, 275 bp, Glycine max
  unsure (1)..(275): unsure at all n locations; Clone ID: 701041869H1
caatgagttagcttcgggtttggaattgagtggtcaaaggttcttgtgggttttgagagcaccaaataattcagctagtgctgcttaccttgaggcttcaaaggaggaccctttgcaattcttaccaagcgggtttttggaaaggacaaaggagaaaggtttggttgtggcttcatgggcacntcaggttcangntccttggntcacaattcagttggggggtttctaagccattgnggttgggaactcaacatnggagagtgtgcangacngat

SEQ ID NO: 3746 - DNA, 270 bp, Glycine max
  unsure (1)..(270): unsure at all n locations; Clone ID: 701041871H1
aagacacacataattagcatagttattatggggagggttgagtactccccattgtttgagacaagaaggtgcagaggaaggttcatctacaggtcctttgcaatctcattatttgtgaccatatgctttatatggcattacagatttagccacataacaaagggtgaagatggaaactgggcatggcttggtatgcttgcttcagagctgtggtttggcttttactgggtcctacntcaagcccttagatggaacntgtgttcagacaac

SEQ ID NO: 3747 - DNA, 272 bp, Glycine max
  unsure (1)..(272): unsure at all n locations; Clone ID: 701041873H1
gttcactcttcttctcttgcggctagggttttagcgcagttcttctagatttancgaagatgggtaaggaaaaggttcacatgcagtattgtggtcattggccatgtcgactctgggaaatccactaccactggtcacctgatttacaagcttggaggcattgacaagcgtgttattgagaggtttganaaggaagctgctgagatgaacaagaggtctttccagtatgcctgggtgcggacanactttaaggctnagcgtgaagaggnatc

SEQ ID NO: 3748 - DNA, 267 bp, Glycine max
  unsure (1)..(267): unsure at all n locations; Clone ID: 701041874H1
atccatatggaggtttaatcctaaacaggccaactattagcaggagattcatgcctgaaaaggggtctcctgaatatgatgcgttggctaagaaccctgagaaggagtttttgaagactattactggcaagaaggagaccctcattgaccttacagttatagaaatcttgtcaaggcacgcatctgatgagttctaccttgggcagagagatggtggtgactactggacttctgatgccggtccattagaggcnttaagaggtttgg

SEQ ID NO: 3749 - DNA, 268 bp, Glycine max
  unsure (1)..(268): unsure at all n locations; Clone ID: 701041875H1
agcgcagaatccaagaagaaaggatcaactgtcaaagataaggaaaaatctaaaaggatgaagggtcaatcatcccatgcaacctggaaaagtgaaacagagatgcatctaaggcaacagtttgattagcattatgtgttcttgtatgttaccagttacctggtagaatgtgatgtgtttaggactatgctgttaaatcaacaattnncttcgtcgttatcatgccagcaggtacangttgccacatatggctctanattatggtatt

SEQ ID NO: 3750 - DNA, 269 bp, Glycine max
  Clone ID: 701041876H1
caattaattatagtttaggctgcaaattatggaatcccatgatgaagagcatgctgccaaactacttagagctcaaacccacatatggaatcacatatttagcttcataaactccatgtcccttaaatgtgtggttgacttaggcataccagatatcatacacaactatggccaacccatgccactctcaaacctcattgcttcactaccaatccacccatccaaaacttgcttcgtccatcgcttgatgcgaatcagatccattctgg

SEQ ID NO: 3751 - DNA, 252 bp, Glycine max
  unsure (1)..(252): unsure at all n locations; Clone ID: 701041877H1
caaattccctttcccatggtctctcanctcttcaattaattccatttagctttccccaaatnccaaacccttttncgcttagatcccaatccaattgggttatggacatggcttccagtccccgcaccgtagaagagatcttcaaggattacagcgccagaagancctctgttattcgcgctctcactcacgacgttgatgaattttacggctctgtgatccagataaggataacctgtgcctctaggacac

SEQ ID NO: 3752 - DNA, 282 bp, Glycine max
  unsure (1)..(282): unsure at all n locations; Clone ID: 701041879H1
gatcatcagaggcaatggcgagcaggtactgggcagtgtctcttcccgtccacaactcggcatcatntcagctctggaaccaattgcaggaacgaatctccaagcattccttcgacacacctctctacannattcaacattcccaaccttncggcgtcggaacccctagactctgctcctcttccctcagcgatgaacctcgccaagtccaacaatttcgtcgaaggagtcangcacaagatcaggcgccagattgangagctcgagagagtttcgggcatc

SEQ ID NO: 3753 - DNA, 272 bp, Glycine max
  Clone ID: 701041880H1
aatttattcaaaaagaaaagatgaaccctaatttcctctgtctctgaacttggaagatctggtttccattatctcctccatcttcacgttccgaaattgtagatagaagatcacacttgctcaattcccttctcaagttattgttggttggcaatgcaagatccaaggattcctttgtcagaggagatcttgaataataaaccaaggaagaagaaaaatcaacccagaaggcatcttattcttttgcaagcgatggtgtcaaggagatggac

SEQ ID NO: 3754 - DNA, 278 bp, Glycine max
  unsure (1)..(278): unsure at all n locations; Clone ID: 701041882H1
agcaaagccaaggaaatgaaggggctttgacatttccaattttctaatatttaatattcgctccattccaattttccatcacaaacacacactgctacaccaaaaaccgnagcaaaacaagtgaatcaagactctacttcgtgttccaatcagaggatatagatagagaattatgagtcgattgaacaaaantanaagtatttgtagtgntggtagtggccagtatgaatcttcttcaagtggatantggngaaagggatgatcatcttgatcatgaa

SEQ ID NO: 3755 - DNA, 126 bp, Glycine max
  unsure (1)..(126): unsure at all n locations; Clone ID: 701041883H1
atnntcctnccactgcacttactgcntcntgggcaattctgatctctncctctggaanaaggcagaatgttgtccttgcanttggatagctgtcagncatggattataccaccaactncacatcca

SEQ ID NO: 3756 - DNA, 178 bp, Glycine max
  unsure (1)..(178): unsure at all n locations; Clone ID: 701041885H1
tcaaaanttgcctatgatggttggcaaaatatcgggcacaccattccaccatggcagccattgcaatgtcattttacaacattggtcaaaatccgtaaaaaaataaagttctggaggtgtttggggttgggaaaggagaggaatggatangntgttcttataattgcagctttgttag

SEQ ID NO: 3757 - DNA, 269 bp, Glycine max
  unsure (1)..(269): unsure at all n locations; Clone ID: 701041886H1
gcgccantctcccagaaggaagctgacatccagatgatgttggccgccgacgtccacctcggcaccaagaactgcgacttccaaatggaacgttacatcttcaagcgccgcaacgacgggatttacattattaaccttgggaagacgtgggagaagcttcagctancagctagggntatagttgcaattganaacccccaggatatcattgttcaatnctgcangcttatggnnaagagcggttctgangtttgctcagtncactggtg

SEQ ID NO: 3758 - DNA, 272 bp, Glycine max
  unsure (1)..(272): unsure at all n locations; Clone ID: 701041888H1
gttttctttgttctttttcaacccttacataattaatctgtgcaaaattagcatcagattgacccttggctaacttcgttttgatgtatttttncaaaacaaattaacctcagtttgttttgacaggctgcagaattactaaatcatccgcntcttcagccttacattcataaaattcacctaaaattanatagccccataagnagtacttttccattccaatggccagagtcanattacataaggagaatcagtttgtagagccagagtct

SEQ ID NO: 3759 - DNA, 269 bp, Glycine max
  unsure (1)..(269): unsure at all n locations; Clone ID: 701041890H1
ccagaattcatgccattgagtcatgttcttgcaaccaagctcggtgctcgtctcaccgaggttcgcaagaacggaacctgcccatggctgaggcctgatgggaagacccaagtgactgtggagtattacaatgataatggtgccagggttccagttcgtgtncacaccgtgctaatctccacccagcatgatgagactgtcaccaacgacgaaattgcggctgacctcaaggagcatgtgatnaagcctgtgatcccggngaagtnctt

SEQ ID NO: 3760 - DNA, 162 bp, Glycine max
  unsure (1)..(162): unsure at all n locations; Clone ID: 701041891H1
caaattctctgtgttgtgttgtgtacttgtgttaattgtgttgttgttgtagganatttaagtgaagagagaatgatgntgaagtctgctatgtgtgcattggtgcttgtggcactggttgtggttnaagtggggcncatggctgaggctgcggtgactgca

SEQ ID NO: 3761 - DNA, 270 bp, Glycine max
  Clone ID: 701041893H1
cgcaacaaaaagaaagaatcccaggcgaggagaaagatggaggggaaggagcaggatgtgtcgttgggagcgaacaagttccccgagagacagccaattgggacggcggcgcagagccaagacgacggcaaggactaccaggagccggcgccggcgccgctggttgacccgacggagtttactcatggtcgttttacagagcagggatagcagagtttgtgggccacttttctgtttctctacatcactgtcttaaccgttatgggagtc

SEQ ID NO: 3762 - DNA, 277 bp, Glycine max
  unsure (1)..(277): unsure at all n locations; Clone ID: 701041894H1
cctagatacatatgttcacgctgctgatggtactccgttactcatcaagaacgcaatctgtgtctttgaacaatatggcagcatcatgtggcgtcacaccgaaacaggcattcccaatgaatcgttcgaagaaacgagaacggaagtcaacttagtggtaagaactgttgttaccgtgggcaactacgataacatcattgattgggagtttanaacaagtggctcaattcaaacccctcgantgctctcttcgggtatattggaaattaggggagtg

SEQ ID NO: 3763 - DNA, 271 bp, Glycine max
  unsure (1)..(271): unsure at all n locations; Clone ID: 701041895H1
gttcaacaacgtgggcgctgcaattatcaaagctagaaagctttcaagtgcactatcagctgctagtgctgcttgtgaccatattagagactgggttcttggaactcctcagggcacttgggtatcaatgggagtatattctgatggttcctacaatgttccagctggacttatatattcattccccgtcacttgtgccaatggggaatgggcaatagttcaaggatttccatgatgagttctcaaggnagaagttggacntgactgcaga

SEQ ID NO: 3764 - DNA, 183 bp, Glycine max
  unsure (1)..(183): unsure at all n locations; Clone ID: 701041896H1
ccctantcagctcacagacctctctttctcgcgtctttggaggtatantttgnaagtgctccnttcncttcgntccangcgttattgttcccaatcttttttcataccaattgctgttccagcaaaattttatggaggagcaattcatacttagagttccacctaatgtggcagagcggatag

SEQ ID NO: 3765 - DNA, 290 bp, Glycine max
  Clone ID: 701041901H1
agcagataaacctaaagacgaacctcgcaaattccctcaacactggagtcactaagtgggactcggtggaaattcattctgggactcagctaagctgaccaaccatgattcaaaatggttgcattgtatcccaagggtgtgcccctctgaattctaggtcacgcaaccatgtcatacctagtacctctgtctttcgttgcgcttctcgaatgcctcccaaggttgccgtctctaacatccggagcttttggggacataatttggaatttcaatccttgttgccaagagga

SEQ ID NO: 3766 - DNA, 283 bp, Glycine max
  Clone ID: 701041902H1
ccctgttggtgctaaaataaattttgtttcttggtctcctgatggttgtcatttgtcctttagcattcgtgtgaatgaggaggacaatgatagcagtaaactcacagtatggattgcagatgtgaaaacagggatagctagaaagttgtttcagtcacctaatgtacatttgaatgcagtttttgacaattatgtttgggtaaataattctcattgttagtttgcaccattccatcatcccgtggagctcctccaaagaaacctttggttccaagttgcccaa

SEQ ID NO: 3767 - DNA, 282 bp, Glycine max
  Clone ID: 701041903H1
cttgtttatcattttcttactttcctctcacgctctgccacaaaactccgtctccgcaataacggaataaaaaaacaagtttaattactattatggcgccgagggatcataagacaagcaacgctaaggctaacggtaacggtaacagcggggtgaaggaggtgcattttcgtggagtgagaaagaggccgtgggggagatacgccgcggagatcagagatcccggcaagaagagccgcgtctggctcggaaccttcgacacggcggaggaggcagcgcgtg

SEQ ID NO: 3768 - DNA, 245 bp, Glycine max
  unsure (1)..(245): unsure at all n locations; Clone ID: 701041905H1
ttcctttccccgnntttccttctctctctnaatctctttcatgtgaggntagaaccanaacaaaacacaaaccacacactctcctaactccgaggttatttttttctttccccaaagaggcatgagttgcaacgggtgccgcgtcttcgaaagggttgcagcgagtctgtattctgcggccgtgtctacagtggatcgatacgcccgaagcacaaggccatgccactgtcntcgttgccannccc

SEQ ID NO: 3769 - DNA, 271 bp, Glycine max
  Clone ID: 701041906H1
tgctgctgttgcaaaacttagggttgggcctttttttgaggttttcagcgcttctttctcacaatggttcttcagaatgatattgatttgctgaatcctccagctgagttggagaagagaaagcacaaactcaagcgtctgttcagtcaccaaactcttcttcatggatgttaagtgccagggatgcttcaacataacaactgtgtttagccactctcaaactgttgtggtgtgcggaaactgccagactgttttgtgccaaccaacaggg

SEQ ID NO: 3770 - DNA, 265 bp, Glycine max
  unsure (1)..(265): unsure at all n locations; Clone ID: 701041907H1
ggaaaatgagttacttgggtttgggtgttagtccaggtactgttccagtgtaccatggaacaaaacttaaagtgttggataggagggtgaggataacagagctggtgttaaggtgtgtgagcctggtctggagttgttgcaattgtcccttgtggtgacgattcccaagtcaaagagtttttctcctttcagaagaaagctaaatttacagacatgaaggcttagtgttctggtagttgcgaacggactaactgttggntactcc

SEQ ID NO: 3771 - DNA, 267 bp, Glycine max
  unsure (1)..(267): unsure at all n locations; Clone ID: 701041908H1
gnaattgcctctttcaanaagcatctgagtgtttactattttgtactatatttatatatagtcactcaagcttctaggatttctgcctgctgcatcaaaatgggaagcaacttgaggtttttgagtcttgcctctggcattgattgcatcaactcatgctcaacttcagcttggtttttatggctaacagttgcccaaaagcagagcaaattgtnntganattngttcatgacccatatccacaatgctccatcactagcagtgatt

SEQ ID NO: 3772 - DNA, 262 bp, Glycine max
  unsure (1)..(262): unsure at all n locations; Clone ID: 701041909H1
cttggactttacagatcatgtttggacagagtgcttctctcaattncttgggaagatggatgcatcttgacccatgtgaaggaatctatgacaagccattattatatgaaaaagggtgggggaaaaaattaaattatgtaatagccatagcaaaagatggagtttatgatgtcaccaaacgatacacaaggaagtggcatgaggtcctatctcgacgtactatcattacagagcctctttgtcatctttactnctctaatat

SEQ ID NO: 3773 - DNA, 269 bp, Glycine max
  unsure (1)..(269): unsure at all n locations; Clone ID: 701041910H1
ctttgcttcagctatggagtttcgttgccttccattggtnttntctcttantctgatcctgatgacagctcatgctgccatacctccagaagtttactgggaaaggatgcttccaaataccccantgccnagagcaatcatagantttctnaaccgtgatcaacttcctctttggtatggtgctaaggaaacccaatctacagatcaaatattcctgtatgatggnaagaaancccaatcnacagatcaagntnctcctatctntgang

SEQ ID NO: 3774 - DNA, 261 bp, Glycine max
  unsure (1)..(261): unsure at all n locations; Clone ID: 701041912H1
aacctcaaataacccttgtnatctctctttcattctcacttgtactcatctctttttcacaactttttttgtaccttctgatctaatggcagttccagtgattgatttttcaaagctgaatggtgaagaaagaaccaaaactatggcacagattgctaatgggtgtgaagagtggggattttttcagttgatcaaccatggtattccagaggaactcctgagagggtgaagaaggttgcctctgagttctataagctggaa

SEQ ID NO: 3775 - DNA, 276 bp, Glycine max
  unsure (1)..(276): unsure at all n locations; Clone ID: 701041913H1
gattggtgaatttgagattgaagaagatgatgcaggctggacccggcggcatggcccaacaagcgaaccagcaatacgcnnnnnnnnnnnnnnnnnnnnnnnnnnnngcttacatgatgatgccgccgcagcctcagccccctcagatgtgggccccatcggcccagcctaccgtacccaatacggtagctcctccgcaacccaccagcgncgatgaggtccgtaccnctggatcggcgatttgcagtactggatggacgaaaattatctctatac

SEQ ID NO: 3776 - DNA, 279 bp, Glycine max
  unsure (1)..(279): unsure at all n locations; Clone ID: 701041915H1
gagaaaatggggtctctaatggcctctcttactctcactcttgtattggcaatagtttctctaagcttgtcatctgcaagcctcagctgacaagtacgactattcatctccaccaccaccagtttanaagtacaagtccccaccaccaccctacaagtattcatctnctgccaccacctcctaagaagcctacnaanagccatcaccaccacnaccagnnnacaantacnagtcaccaccaccnccntacaagtaggntgtcctgcancaccntcggag

SEQ ID NO: 3777 - DNA, 287 bp, Glycine max
  Clone ID: 701041917H1
caacaagttaatagcattccgcaaaatggctgccaccaccttagtctctgaagtcactctcccctccttcctgccggccagcggaagatgccgctgatgggcctcggcaccgcgccggaagcaaccagcgcggttaccacaaaagatgctgttcttgaggccatcaagcagggctacaggcactttgatgctgcttctgcttatggtgtggaacagtctgtgggagaagccatagctgaagcacttaagcaaggactaattgcatccagagatcaactcttcatcac

SEQ ID NO: 3778 - DNA, 282 bp, Glycine max
  unsure (1)..(282): unsure at all n locations; Clone ID: 701041918H1
gaaagattcgaaacgaagaaagaaagcgttgtgaagaatggcggaagagggacaagtgatccggtgtccacagcgtagaggagtggaaggaacatctcaagaagggagaagagtccaagaaattgattgtggtggattttactgcttcttggtgcggtccatggccgtttcattgccccaattctgcagagtttgctaaaaagttgccgaaggtncaccttcctcaaggtggatgtggatgaattggagactgtttccaaggagtggggaatgaggctatgc

SEQ ID NO: 3779 - DNA, 277 bp, Glycine max
  unsure (1)..(277): unsure at all n locations; Clone ID: 701041919H1
caaaaactaaacactaacaacgttttgggctctgagcaacttttacatttgagacacagattaaattaatnccactttaattaggtctgttgttcatgatggctctagctactccaggtagccctagctccatgcacatgccactggtgcaaacgtccaaccctagctcacaaaattctatgacgacaattaccgaaaggagaggaagtgtagtagttctacaaacgaaaagaaaacatgatggaggaaaaggacgtgatccacaaactaatagcat

SEQ ID NO: 3780 - DNA, 158 bp, Glycine max
  unsure (1)..(158): unsure at all n locations; Clone ID: 701041920H1
tgtattctgaggttccatctcctcctatttcnctctcccatccaagttgacctttcattccactttttcgaatcccnagactcaggcctggtaaccttttgaggttgttgggtgcagaagggaacgatggctgcttcagaggagaatagtgcactgtt

SEQ ID NO: 3781 - DNA, 207 bp, Glycine max
  Clone ID: 701041921H1
atcgaggatgaggaaacagcagcacctggaaggtctcagtgcccaattggatcagctaaaaaaggagaacacccaaatgaacacaaacataggcatcagcacgcagctgtacctcaacgtggaagctgagaacgcgattctgagggctcaaatggaagaactgagcaagagattgaacttctctgaacgaaatgataagtttgatta

SEQ ID NO: 3782 - DNA, 267 bp, Glycine max
  unsure (1)..(267): unsure at all n locations; Clone ID: 701041922H1
tcggaacaaacagggaatataagagagaaaangatgggtttcataatggaattcgcggagaacttggtattgannttgatggaggatccgaaggaaagggatcggaggttccgggagcacgtttatagagtgaaggacaggtgcgagaagacgaaggagatgtggagctaccctatgcgaccctatgggttttggantttcgaacgccacaatttctcagttgntgggatgcacagattagccaagtggctgggaggagggaccctt

SEQ ID NO: 3783 - DNA, 268 bp, Glycine max
  unsure (1)..(268): unsure at all n locations; Clone ID: 701041924H1
taaaataactgcatacatcttccatccaactatatatnaannacactctatggcgaggtgtgaatccgtttccacgacaatgcccttnnatgcaaaaatattaatagcacttatattccttgcattngcaatcacggctaccacttcaactcgaatcnttgatgaaatagaaacaccagaagaacccaacagtgctgcngaatcccctgttgtctctcnattccattgttgcagaatctccagttgcggaagtnaaaggagttgacca

SEQ ID NO: 3784 - DNA, 265 bp, Glycine max
  unsure (1)..(265): unsure at all n locations; Clone ID: 701041925H1
gttccttccattcctttcttccggatcacagggaaaataaaaaacaatggagttggacttgacaccaaagacagcagaagtgttgtttgagggagatggtggaggttactacacttggtggagttctaaagtgccactgctggccaagaccaatgttggtgctggtcggttagtgcttcagcctcagggctttgctattcctcattattcagatatatccaaagtaggttatgtgcttcaagggaacgatggcgtagngggatgg

SEQ ID NO: 3785 - DNA, 248 bp, Glycine max
  unsure (1)..(248): unsure at all n locations; Clone ID: 701041927H1
cngnatctacatgttcctgagcccanacagatgatttgggntagaaccaactctttgctngtcagaaaaatctgcagcttgtgcttttacttctggctgttatctctgtgccctggatgctattgccaaaaccttttattttgaagaagcaacatgangctaggcatggggttgaatcctatgaaccacttcaaagtacagatgagagctgcaagtggagtcaaaccatgattcccatggtcatgagg

SEQ ID NO: 3786 - DNA, 203 bp, Glycine max
  unsure (1)..(203): unsure at all n locations; Clone ID: 701041928H1
gctcagcgataagcagaaagtggaaatcgcgaaatggtcctcctcaattctcctcccggagaaatccaatacgtgcnaagatgtgaatccattctcaacaaacganatttgtacaaggaagccgntccgaggntttctctttacaacaatcgcattgatttccctcatgtcaacgagcgggactactggtacttcttttggna

SEQ ID NO: 3787 - DNA, 144 bp, Glycine max
  unsure (1)..(144): unsure at all n locations; Clone ID: 701041929H1
tatttattttgagctttccatttttctctcttttnccaactttcaattcaagcagctttggaaanaccaaccagccaacgggtttttnttttttccacccccngaaattngnangttgctttgnattgaatttncnaanaaana

SEQ ID NO: 3788 - DNA, 278 bp, Glycine max
  unsure (1)..(278): unsure at all n locations; Clone ID: 701041930H1
ctttgactgctgccgtcaagccaaccaagggacatcaacatcgaattagaaaatagcatcaaaatttganaaccaatgttcactatcactaaaaaattgaagttccagaaccagtatttgaaaaccaaggcgtcgcaactncccaacaacctggccgccgttgccgccaccgctcctgttgccgtcaaacttcgtgcccacccttttgcttcagattttgtggtgctcgcggaccagctcaagaaggagagctagtgggagactctcaaggcggccat

SEQ ID NO: 3789 - DNA, 280 bp, Glycine max
  unsure (1)..(280): unsure at all n locations; Clone ID: 701041931H1
actagtcaacaaacataattctcttcctagtcttgtccttaaattacaacaactttcaatcctcaatnctgctccatccatatatatatagtaataatagcagcaatggataatactcccagattgcttcaatcggtttcaagcttgattctgattctaagcatttcatcattggcctcagcatctctgaaagtgggtttctatagctcaacgtgtccatctgctgaggcaatagtgagaagcgcagtagagaaagcaatatctgccaacccaggcatag

SEQ ID NO: 3790 - DNA, 277 bp, Glycine max
  unsure (1)..(277): unsure at all n locations; Clone ID: 701041932H1
gagagaaacacgatgaatttatgttgaganaacttgtnaagagatgggcnnaccatnaaattatggttcggcggcttctcggttcttcattattnggatcgatactttattgctcggaggtcacttccgccccttaatgaagttgggttgactgcttccgcgncttgatttacaaggaactaaatgggaaagntagagatgcagttatttcactanttgatcaagaacgggagggagaacagattgatcgagctctattaaagaatgtatagacata

SEQ ID NO: 3791 - DNA, 280 bp, Glycine max
  Clone ID: 701041934H1
ctgctctgtctctatctctacttgaggcctttccctctgttccgttggcgggtgggtctttcttctctcaaaatggccaccggagtgaccagaaaaatttctgctgcatcagctcgggcccacaccagaagggcgaagaaaaccaattctctaccccttccttcaggaattcttggaacagcactagcagtgttgtttattgggtttctagcatgggcttatcaggttattcaacctccccctcccaagatatgcggcactcctgatggaccacctataa

SEQ ID NO: 3792 - DNA, 212 bp, Glycine max
  unsure (1)..(212): unsure at all n locations; Clone ID: 701041935H1
tgtgtgatgccaacangtaaatngtaggttgangaatttgactgaactgaaatatttcaattctgggcactctcgaagattgtaacatagagattgcagattcaagttcattcaaattcttcaacctactatttgcctgttgtgtagtgactgtgtgatgccaacctaggtcctggagtaaccaaaaagctgatctgtttacaaagttgaaa

SEQ ID NO: 3793 - DNA, 263 bp, Glycine max
  unsure (1)..(263): unsure at all n locations; Clone ID: 701041938H1
aagggacagctttttccatgacagaacgagatcgtcttgatctacgaggactgctttcctccaaatgttatgtctcctgacctacagattgaacgattcatggttgatctgaagaggcttgaagttcaagctagagatggaccttctgatcctaatgcattggccaagtggcggatactaaccgcttgcatgacagantgagactatgtactataaggttttgattgccaaaatagaggatatgcaccatagtgtatactcca

SEQ ID NO: 3794 - DNA, 141 bp, Glycine max
  Clone ID: 701041939H1
agttgcaggcagtgtcatctctcctttgacgacaagatgagcatcccaattccccatcggcagttattcatagacggagactggaaagtccccgtcctcaagaatcggattcccatcatcaaccctccacccaacacatca

SEQ ID NO: 3795 - DNA, 266 bp, Glycine max
  Clone ID: 701041940H1
tctcaacaagagagttgcaatcagcatatttcgagaatttcggggggatttccctctggtggaatgccttccaaccattttcaagcagttgctcctcaacctattcacacaggtgctgtttcacagtttcccaaccggcctatggttttcccccagttagcatctgctgatcaatctagatttcaaatgcagtcccctggcgaggtattagtcctcatagccagtcaaggcagaaacaggaaacccttccacctgacttgaatatt

SEQ ID NO: 3796 - DNA, 263 bp, Glycine max
  Clone ID: 701041941H1
gaaaaatccactttggttgttcacttgtatatgtatctcagttctcaggtggtggtgcatcgctgagttgtgtgagagtgagaaagagagagtgtgtgtgtgtgcagaagatgtggccattcagcagaaaaggggcttctggtttttcatcatcatccacggcagagcaagtcactgaaggaattgatggaactggtctcactgccattgtcacaggagcatccagtggtattggcactgagactacacgtgtccttcatgcg

SEQ ID NO: 3797 - DNA, 266 bp, Glycine max
  Clone ID: 701041942H1
cttgggaaagcctctgtaaacaccctgaagaatatctttcttatgatggtcattgcagtgattcaacagtgaaatcactgtcaagctcacttgtttgtactgttggggagatatcaacatggccaagtgccagtaatgtcattccaggccaggttacatataccgtggatatacgagcgatagatgaccttggacgtgaagctgttatctatgatttatcgaaacaaatttaccaaatatgtgacaagcgttcagtttcctgcatt

SEQ ID NO: 3798 - DNA, 265 bp, Glycine max
  unsure (1)..(265): unsure at all n locations; Clone ID: 701041943H1
ggtttgtacagcgtttgctttgggggcgaaaaattcagccnctttccgatttgcaccacnttcaacagagaacaacaccatttgtggattgctgtaaactgcacactttggctgttagctaatggacaagggggtgccacctagcctcttcgtcaatgacggttctttcatggagaggttcaagcaacttcagcaagagcaggagaaagggaagaatgtcaaattggaggattctaaaccanttaaggttaattcagggtcttgt

SEQ ID NO: 3799 - DNA, 156 bp, Glycine max
  unsure (1)..(156): unsure at all n locations; Clone ID: 701041945H1
gcagtttcgtgctttcccgccgccgctacactgccaccgtcttccccgccgtctccgccagagatggcagaanaggattcaaagcctctgaactacatctaccgaggtcattctcaagaagaggaagaacaccgaagcatgggctttaaggaaaaa

SEQ ID NO: 3800 - DNA, 270 bp, Glycine max
  unsure (1)..(270): unsure at all n locations; Clone ID: 701041947H1
cgggggatcaacctttgtacaacgaagacaaaactgtnattgtcactgtaaatggggagatatacaatcacaagcaattgaggcagaaactgagttcccatcaatttcgaactggtagtgattgtgaagtgattgcccatctttatgaagaacatggagaagaatttgttaatatgctggatgggatgtttgccttactcttctgatactagggataaaagttttattgctgctcgtgatgctattggcattaccccnctatattgggcg

SEQ ID NO: 3801 - DNA, 269 bp, Glycine max
  unsure (1)..(269): unsure at all n locations; Clone ID: 701041948H1
acttttaggaggtccctacatcttacgtacatttcccnttgtacagattcatccagttcttantgttattggctactagttcatgggggtgaagctattataagttacaaagcttttcccctaaagaaggaagtgaagaaattgatacaccttgttttccatnccatcgcattaatacttggaatagttggaattatactgcctcaagtttcacaatgaaagtgggattgccatctctacagctgcattcatggctggnatggggtatt

SEQ ID NO: 3802 - DNA, 281 bp, Glycine max
  unsure (1)..(281): unsure at all n locations; Clone ID: 701041949H1
gccagctagggcttgagatctcatatatcatggctacctccatggtgaagcttatgcttttgctctgctctcatattcttgtccttgcaagcagttgtgtctgtaacaccactggcattttcaacatccactagaccctctaaccaaacaagagataagtcttgtccaaaccatagtccaaaannagtaccccaaggctcaagtaacaggttgagttccactacattggactcgncngaaccgaaaaggatgccatcctcaaatgggattcatcaaaccna

SEQ ID NO: 3803 - DNA, 194 bp, Glycine max
  Clone ID: 701041950H1
ttcattctcatctttctctcttctctctccacccaaaccctaactcccgaccctgttcccctctcgtatccgtcatgaaaggaggaaagtccaagaccgaatctaagagagccgatcccaaacttgctgtgaataagaagggagccgccaccaaggctaggaaacccgccggcaaggggaaggcagcgaaagat

SEQ ID NO: 3804 - DNA, 272 bp, Glycine max
  Clone ID: 701041951H1
gaaagaaaggaaacggaataattcgatacccctctcgtctcgtaactaaccatggcagcgttccgatggaagagcttcgaggagaatgaggatcgcccagccaagcctgcgtcattttggcgtcaccgagattcaaagcccccactgcactctcttctcccacaaccttcttcaggatatttttgaatctatgggagactatgtagatgggttaaagttttctggaggttctcacagcatgatgccaaaggctactatcaagcaaatcatga

SEQ ID NO: 3805 - DNA, 268 bp, Glycine max
  unsure (1)..(268): unsure at all n locations; Clone ID: 701041952H1
aataacaagctagctattagttcgattttgtagtaagtgaggtgccaatatggtgaagatagctcttggtactttggatgactcttttagncgctgcctctcttaaggctatttcgcagagttccacgcaacttctgattttcgtgttcgctggtgttggatcagccatcgcttacaacgagctacaaaagatgcagcctggatccaacggggctggtggcagtagctgtggcacatgcatttgcactgtttgtaggtgtcatcnncc

SEQ ID NO: 3806 - DNA, 265 bp, Glycine max
  unsure (1)..(265): unsure at all n locations; Clone ID: 701041955H1
gaaagagactgggcaaaagatgaaacatcactgaagtcaggttttaggcatctagagcacatgccattccctttctggttggccctttttgttgaaggaactcgtttcacgcagacaaagcttttacaagctcaagagtttgctgcttcaaaagggctgcctatacctagaaatgttttgattcctcgtactaagggttttgtcacagcagnacaaagccttcggccatttcgttccagccatttatgattgcacatatgcagtt

SEQ ID NO: 3807 - DNA, 260 bp, Glycine max
  unsure (1)..(260): unsure at all n locations; Clone ID: 701041956H1
gtttganagaaaggttgagctatagcctaaaggtncgagacacataaatagtttctactttctattcatagatagatggctggcncaattatgagacctcagattgtgctatttggctcctccataattcaaatgagcttcgacaatggtggttggggtgctattctagctaacttgtacgctaggaaggcggacatcatctaagaggatactctggttggaattcaaggcgggcttggaggtttggatgaaatttcccc

SEQ ID NO: 3808 - DNA, 261 bp, Glycine max
  unsure (1)..(261): unsure at all n locations; Clone ID: 701041957H1
ctctctttctctctccttcaacgcatcccaaccctntggcgctatcaccctcctagatctacttctctaaccgctatacaggctggtactaagagctgtggttagtcatagatggcgctctcagcttcacgggcaatgtcaaagggtgtggtggtatctgtgcctncttctggttctatctgctttagtggctactgttttcctgttctcctttgtcctctcttcatcctgctccgccctactcctcagaaatctctgcct

SEQ ID NO: 3809 - DNA, 265 bp, Glycine max
  unsure (1)..(265): unsure at all n locations; Clone ID: 701041958H1
aagaaagtcatctagaacagttgtnattcgtaatatcggctacatcactccaaaaaggagaaataatgaggggggagtctctgatgagtcnctagaagatgancatggcatcgatgaagaaaccatcaaacaaaaggttggtgttgcacttgagtctttgcaaaaggtccataaagttgaaaaacgtgctaagggaaaaaaagcagcagcctggcacaatgtaactaaatcaagtgatgcgactgaggaagatctcacttataac

SEQ ID NO: 3810 - DNA, 263 bp, Glycine max
  Clone ID: 701041959H1
aaagaaaagaccatcaaagtttcacttcagccttatccggtttagggtttcggtttttgaccctacctttgacgtatcgaaaccttaagtttcggatcaggtctgagcaatctggttggtagaacctttggtcttagagagtcaagttttatgtctgaattagacgatcaaattcctactgcctcgatcctttgctgatgcaaatgctgatgactcgggtgctgggtcaaaggagtatgtgcatattcgggtacagcagcgaa

SEQ ID NO: 3811 - DNA, 270 bp, Glycine max
  unsure (1)..(270): unsure at all n locations; Clone ID: 701041961H1
gttgttgctgctcatcctccgtaacctccgagctctgcaccgaagaacgaagccatggggaagacacatggaatgggatctgctcgcaagctcaagtcccaccgcaggaggcaaaggtgggctgacaagtcatacaagaaatcacntgnntggaaatgaatggaagaaaccttttgctggttcatcccatgccaagggaattgtcctgaaaagataggtattgaggctaagcagcccaactctgccattcgtaagtgtgccagggttcaa

SEQ ID NO: 3812 - DNA, 269 bp, Glycine max
  unsure (1)..(269): unsure at all n locations; Clone ID: 701041962H1
ctcggtgacagtggggtggggaagacatctttgatgaaccaatatgtgaataagaagtttagtaatcagtacaaggcaaccattggagcggattttttaaccaaagaagtgcaattcgaagataggctttcaccttacagatttgggatacagctggccaagaanagattccaaagcctggagttgcttctatcgtggtgctgattgttgtgttnttgtatatgatgttaattccgatgaaatcattgacaaccttaataactggaggg

SEQ ID NO: 3813 - DNA, 272 bp, Glycine max
  Clone ID: 701041963H1
gcttggtgttcgttatcccacacatgcttgatgatgaggtttcaatcaaaacacgtacatgtgctacattcatgtagttgagcatatataccacaggattcttgtaataataggagggtttactattgttgagcgactttaccaagtctcacatttatttatgtatctatttttccatcaaatcaaatgcagtaatgacggggagttcctcaatgaatatgatgatatacctatatcatgctgtgcacgtgatgtaggagacaacatgtgaa

SEQ ID NO: 3814 - DNA, 255 bp, Glycine max
  unsure (1)..(255): unsure at all n locations; Clone ID: 701041964H1
ggatacttcagcactgattttaattatgccttgcattttggtacatggaaatcatttgttgacttatctatgattacatgagtttgatttgcataaatatgggttacctatgataagtgatccagtgtttagcggggacgtgatcctcgtctcatgtacttgagtcgtgatggatatattgatcaatttttgccccttgtctgataggccagggacaaattcttgtggcactgttttgcttncncctttaattaa

SEQ ID NO: 3815 - DNA, 279 bp, Glycine max
  unsure (1)..(279): unsure at all n locations; Clone ID: 701041965H1
gtgaagtccttcntacatagtatagacattctccaagccatgatttgtagacttttcaccattctacttcactttcttcttatgtttgcttttnaccttcttcgttccttatgttcatagcaataaccagcttgataccaatttctatgatggatcatgccccaatttggccacgattgttagatatggtgtttggtcagccattaaaaatgacaacagaatgggctgcgtccctcctcggttgcactttcacgattgcatagtaaatggntgtnatgg

SEQ ID NO: 3816 - DNA, 274 bp, Glycine max
  unsure (1)..(274): unsure at all n locations; Clone ID: 701041966H1
gcaaacgatncaaactcttttttcatttgcagcatcaaaatgagtggtagcaacgatngncngcggcagctggagctctaggtttttgaaggtggctagtgcagctggcngctacagccgccgttgccggcggtttatatgccattctttcatccttcaacctctgctagctctgagatggaagtgccgtttggcagngcacggcgtgagagcaaagaacgtgacgatggtggctccgggtctcancttcgcnaggtgccacaaggtcagtcnt

SEQ ID NO: 3817 - DNA, 192 bp, Glycine max
  unsure (1)..(192): unsure at all n locations; Clone ID: 701041968H1
gaccacaccaccgttatggncgaggacgagcaactcgaacgattcgactcggagtttcgcctccacgagtttcatttcctccaccctcagcaccgactattttccgcaacctcaccagctnccggcgncatttcctccatcagcagcngcttccggcgagatttcctcccgtngcggtcctcgcgcctccgt

SEQ ID NO: 3818 - DNA, 269 bp, Glycine max
  unsure (1)..(269): unsure at all n locations; Clone ID: 701041969H1
ctcaggtggctaaactacctccgccctaacatcagacacggtggtttctccgaagaagaagacaacatcatttgcagcctctaacgttagcattggaagcaggtggtcggtcattgcagcacaattgccgggaagaactgataatgacataaagaactattggaacacgaggctgaagaagaagcttctagggaaacaccgtaaggnactacaggcacgcaacanaggaaacggtggtatcttaaacaggagaacagttccttcgntct

SEQ ID NO: 3819 - DNA, 161 bp, Glycine max
  Clone ID: 701041970H1
attgatgacatcttgaacaagttcgaccctgtcgttgaaagggtcatcaagaagcgccgtgagatcgtcagaaggagaaagaacggagaagttgttgagggcgaggccagcggcgtcttcctcgacactttgcttgaattcgctgaggacgagaccatgga

SEQ ID NO: 3820 - DNA, 260 bp, Glycine max
  unsure (1)..(260): unsure at all n locations; Clone ID: 701041972H1
aatccatttaacaatgatctcacaaatcggttatgtgcagatggggaagtttcattggacaaagctgcagaggtgtggaagaattatatttgtgaggtttctcttcagacatttgcaagacacccggtcggatgactccaaccgtttatggccaaatggaagctgcagtgaatgtaagntatggtttatatcattatggcccattcttggttggcntacaagactgcatttcgtttcggaaaatattcacagacatcagc

SEQ ID NO: 3821 - DNA, 261 bp, Glycine max
  unsure (1)..(261): unsure at all n locations; Clone ID: 701041973H1
tccaaatccaaaaaaatcatggagcagttgtactacctcacccttgtgctactgtttgtntccttcgtctctgtctcttttttcatcattttctacaggcatcgttctccgttcagcgtccccaacttgccgccggggaaggcggggnttccggtgatcggcgagagcctggagnttctgtcggcgggacngaaggggcttccggagaagttcttctccgatcgcatgacagagtactcttccaaagtgttcaagacctcc

SEQ ID NO: 3822 - DNA, 252 bp, Glycine max
  unsure (1)..(252): unsure at all n locations; Clone ID: 701041974H1
cgcaacctcaactttgttctgtttccactgatgtcccagggccacatgatccccatgatggacatagcaaaaattctggtncagaacggtgttactgtcacagtggtcacaacccaccanaacgcatcacgcttcacatcaactttttctaattcccaaatccgattactcgaagttcaattcccataccaagaagcagggttgccagaagggtgtgagaatctcgacatgttacntcacttggcacaggtt

SEQ ID NO: 3823 - DNA, 276 bp, Glycine max
  unsure (1)..(276): unsure at all n locations; Clone ID: 701041975H1
caaagatggcaaccaacgcgggccagtgcccactngcancccacgntgcccaacaacntgaccaccnaaagcccaaggacaccctncgtcaaggnccacgcttcaggnccacctctntctccaacaatgccctnnannttnctacagcggctgccaccggttaccgnntctccttctgncacctncatntcaagcttctcctccatgcacctnccctccgcgacangctccccgaaaacccccacatntacgncttcnccgaaatngtgccgccac

SEQ ID NO: 3824 - DNA, 264 bp, Glycine max
  unsure (1)..(264): unsure at all n locations; Clone ID: 701041976H1
tcccaattttctagggttttattcattttccgatggcttctgcagatgttgagtaccgttgctttgtcggtgggctcgcttggnccactgacgaccatgccctcgagagagccttctctcagtacggcgaaatcgttgaaacgaagattatcaacgattcgtgagactggcagatccaggggttttggatttgtgacctcgccttcggagcagtccatgaaagatgcgatcggagcgatgaatggacagaattggacggccgta

SEQ ID NO: 3825 - DNA, 221 bp, Glycine max
  unsure (1)..(221): unsure at all n locations; Clone ID: 701041977H1
accggtggttctgttcattcttccttgcaccttcttctttgaagatcgaaattgtgtttttgaaaaaatgggagttccagagaaagaccctctttcccnntccgagtttgcctcctggttttcggttttaccccaccgacgaggagctcctcgttcagtatctatgccgcaaggtcgctggccaccatttctctctccaatcattgctgaaatgatttgta

SEQ ID NO: 3826 - DNA, 272 bp, Glycine max
  unsure (1)..(272): unsure at all n locations; Clone ID: 701041978H1
gttccgagacctcccagaaccggtcagcatccccggttgcattcctcttcccggncaaggactcgttggacccggttcaggaccgcaaaaacgaggcctacaagtggatcctacaccactgcaagcgatacaaagaagccgaggggataatcgggaacagctttcgaggagcttcgaaccgggagcctggaacgagctgcagaaggaagaacaagggaggcttccggtttacgcggtgggaccgcttgtaagaatggaagcaggtcaggccg

SEQ ID NO: 3827 - DNA, 264 bp, Glycine max
  unsure (1)..(264): unsure at all n locations; Clone ID: 701041979H1
gttgaggatcagattgctgtcgggaaacgcgtggtattagtaggtagcacaggggttgtgaagtctcaaactgattctgcttatggtgccaatgttgaagtgcggcttagagaggcagattttccaattggccaggaccagtcttcactgagccttctntgtgaagtggagaggagacctggcttgggggctaatctcagtcccaatntctgtggacnaggttataaggtgggngttcgcgctggattgnacaacaagctcagt

SEQ ID NO: 3828 - DNA, 145 bp, Glycine max
  unsure (1)..(145): unsure at all n locations; Clone ID: 701041980H1
atcggctcnanataacaagctanctattagttcgantttgtagtaagtnaggtgccaatatggngaagatagctctggtacnttggatgactctttagcgctgcctctcttaaggctatttcgcagagttccacgcaactctgat

SEQ ID NO: 3829 - DNA, 271 bp, Glycine max
  Clone ID: 701041981H1
aagaaagaaggtttttttagtatagttaacagcatggagagggaggaagatgttaaggttggagcacagaaattctcggagaggcaagcactgggtacaggagctaagagtgacaaggactacaaggaggcaccaccagcacccttgtttgagccaggggagttaaagtcatggtcttttacagagctgggatcgcagagtttgtggccacattctgttcctctacatcactgtctgactgtctgggtgtcaacagggcacccaacaagtg

SEQ ID NO: 3830 - DNA, 272 bp, Glycine max
  unsure (1)..(272): unsure at all n locations; Clone ID: 701041982H1
gtttttattgctgccactttcatggagcanggtggcattccaccttcaacgaaccctgcaactncttcttaaggaagcaatccatgttatcagctgtggttacgaagacaagacagaatggggcaaagagattggatggatctatggctctgtgacagaagatatcttgactgggttcaagatgcatgctcgtggttggattccatctattgcatgccacctcgcccagcatttaagggntctgctcctatcaatcnttctgatcgtctcaa

SEQ ID NO: 3831 - DNA, 243 bp, Glycine max
  unsure (1)..(243): unsure at all n locations; Clone ID: 701041983H1
caaacatacaaagatgaaaganantgttgttgtgctagttttagttttggcaaggcaaagccttatttgttaacggtgggacttcaatttgggttcgccggtgcatacatcttctccgtcgctagtctcaaccatggaatgaatcgttacgtcttcgttgtctatcgcaatgccatcgctgcattggccctgctccttttgcattgattttccgagaggaaaataggccaaagataacactcc

SEQ ID NO: 3832 - DNA, 88 bp, Glycine max
  unsure (1)..(88): unsure at all n locations; Clone ID: 701041984H1
ctttccagttgctggtaagatcttaaacgtgatttaataatgaatnccaaattccgggtcttggctaaaaannannaanaaaaacacc

SEQ ID NO: 3833 - DNA, 266 bp, Glycine max
  unsure (1)..(266): unsure at all n locations; Clone ID: 701041985H1
cacgcacaacanaaccacatcatcgtcttcatcgctctccgacacttgaacctctcatgttgttcctctagaaacctcttccgctccaccgtggaattttcctgcttctgtagcacannnnnnnnnnnnnnnnnnnnnntgctttaatattattcacgcctgtccttgtcgtggtgctggttacaagatagggtttgcactttttaatcagaaactagccatgaccaggtacagaaaactactgtgttagttaaaaaacattcatc

SEQ ID NO: 3834 - DNA, 262 bp, Glycine max
  unsure (1)..(262): unsure at all n locations; Clone ID: 701041986H1
ggatggtgagtgttgaagagatccgtcaggcacaacgtgcagaaggccctgccactgtcatggccacttggcaccgccactcctcccaactgcgtcgatcagagtacctatcctgactattacttccgcatcaccaacagcgngcacatgactgagctcaaagaaaagttcaagcgcatgtgtgntaagtcaatgattaagaagcgatacatgtattaaatgaagagatcctgaaggagaatccgagtgtttgtgcatatat

SEQ ID NO: 3835 - DNA, 259 bp, Glycine max
  unsure (1)..(259): unsure at all n locations; Clone ID: 701041987H1
gggatcaatcagtttgatcgtggagccatgcagatcagcacacttgaaggcaatggaagtagccaaggaatctgggtgcttgctctcctatgaccccaaccttcgtctacctttgtncgcttcggctgaggaagcttcgtaagcaaatactgagcatttgggagaaggctgatttgatcaaggtcagtgatgcggacttgagttcctcacaggaagtgacaagattgatgatgaatctgcttgtcattgtggcacccca

SEQ ID NO: 3836 - DNA, 263 bp, Glycine max
  unsure (1)..(263): unsure at all n locations; Clone ID: 701041988H1
gaagaatgttgcagtcaaggatctcaagcgtggttttnttgcatccaactcccaaggatgaccctgccaaggaagctgccaacttcacatctcaagtcattatcatgaaccaccctggccagattggaaatggatacgcaccggtgcttgattgccacacttctcacattggctgtcaagttttctgaaatcttgaccaagattgacaggcgatctggtaaggagctgagaaggagcccaaatttttgaagaatggtgatgca

SEQ ID NO: 3837 - DNA, 260 bp, Glycine max
  unsure (1)..(260): unsure at all n locations; Clone ID: 701041990H1
accgattgcnagaatggaatttcgatgctcagtcntctcttttaccattctcttctctnttgctcttgcaggagagagncatgtccatgcatcgntacgcgaggaagattattgggaagctgtttggccaaacactnccattncncactgcactgcgagagttctaaagcctctccctgcaggtgttgaaatcgatgaactccctaaggaaattgatgatacacagtacccaaaaacatcttctataaagaaggacntca

SEQ ID NO: 3838 - DNA, 266 bp, Glycine max
  unsure (1)..(266): unsure at all n locations; Clone ID: 701041991H1
ggcgttgtttcgttcccanatctcccaaattccccattctacccctggtggcagatcacgcacttattccatgacaccgagagaggangtcccgaatggaagtttcacagagagaacatggcttctcaacattgattcctggggcgtcgttatcaacacattcancgagttagancaagtttacttaaaccacttgaagaaagaattgggacacgaaagagtcttggcggtggngccggttctggccntttcaaaccggancgttt

SEQ ID NO: 3839 - DNA, 264 bp, Glycine max
  unsure (1)..(264): unsure at all n locations; Clone ID: 701041992H1
aaaattcntataggancacanannatggcaganatntcctcgggtgaagttggaagncaaggcctgaaggtttccaagttaggatttggttgtangggnctaagtggagtgtacaancgatcgtgttcccgaagaggctngcatctnctttcttnaaacacgcattcaccaaangggtcantttcngtgntttgagatttttatggancacgtgccaatgangttntgngtccggaaaggcnctcagggactttcctccagaca

SEQ ID NO: 3840 - DNA, 268 bp, Glycine max
  unsure (1)..(268): unsure at all n locations; Clone ID: 701041993H1
cgcttactcctttttnttctcctgcttctgcacctcattgccataccccctttcaancaggagaaaatctctcgctccctttctctttcttctcttcacgccgccatcaccatgccttcactctntctntctgaaactgacaccaccacccctaaacctatttccaacaaaaagatnccaaaganccaatccctcactgatcccgacctcgatggggtttcggggaagaagacgnagaagcgcaaggcttcagatttattagaaccag

SEQ ID NO: 3841 - DNA, 269 bp, Glycine max
  unsure (1)..(269): unsure at all n locations; Clone ID: 701041994H1
tcaaccttggatcaggtttagggaatggctgcaatcttagctcgaaaatcactccttgctcttacgtgcgcgccaattggctgtaagcggttcaagggctgcacagctcccaatactatggccttcggtnaagtgnacactcccttntctaccaaaagagaggatgagganagggagcaacncgcaaaggacatttncanaggattggagttctgtcttgaacgtagcattaacatctgcttctcactganatggttcgaggantatgt

SEQ ID NO: 3842 - DNA, 280 bp, Glycine max
  unsure (1)..(280): unsure at all n locations; Clone ID: 701041996H1
gaccatcaccgtcctggccctcgacaatgccgccatgtcctccctccttcgacaagcacctctccctccccaccatcaaaaacgtcctctccctccacatcctcgtcgactacttcggcgccaaaaagctccaccagatcaacaacagcaccaccctcgtctnctccatgttccaggccaccggctccgcctccggcaccgcggctacgtcaacatcaccaacctcaaggccggcaaggtcggctttcgcgccgaagacaacgacggctccctccactct

SEQ ID NO: 3843 - DNA, 281 bp, Glycine max
  unsure (1)..(281): unsure at all n locations; Clone ID: 701042001H1
gcacaaacagaccaattccaacggttgaattttttggctgaagacaccccaccgacgttagtcaaataaaacatgtcttgctccgtcgcggtttccaattcgccggtgttctctccttcttcttccctcttctgctcgaagccctccatcatctcttcttcgccggaannnnnnnnnnnnnnnnnnnnnnatctcaaaccttccaactcttctacgacgtcgtcttgttcttcaccctctgctgctgcttcttcatcttcttctccttctnctccgtttcg

SEQ ID NO: 3844 - DNA, 271 bp, Glycine max
  unsure (1)..(271): unsure at all n locations; Clone ID: 701042003H1
gagaganatatcttgttgagttgatttctgatcccaaattgagtttgagtttcagccatggtatctgtttctctgctcttattcctatctttctttgccttctttgcaccctctgaatctcacgacaaagtctcgttggaattgtactacgaaagcttatgcccctacagcgccaacttcatcgtgaatcacctcccaaaaatcttcaccccagatcttgccccaatcgttcacctcaaactcgttccttggggcaatgccaaactccgtg

SEQ ID NO: 3845 - DNA, 269 bp, Glycine max
  unsure (1)..(269): unsure at all n locations; Clone ID: 701042004H1
gcttggtgttcgttatcccacacatgcttgatgatgaggtttcaatcaaaacacgtncatgtgctacattcatgtagttgagcatatataccacaggattcttgtaataataggagggtttactattgttgagcgactttaccaagtctcacatttatttatgtatctatttttccatcaaatcaaatgcagtaatgacggggagttccttcaatgaatatgatgatatacctatatcatgcttgtgcacgtgatgtaggagacaacat

SEQ ID NO: 3846 - DNA, 268 bp, Glycine max
  Clone ID: 701042005H1
ggctagggttagtgctttgtttcactctttgctcttgatttcttcccttgtattggcttctcaaatccatgtttcctctgggaaactagtccctggactatcatggaattactatttgttgacatgtcccaagcttgagaggattataaggaagcatcttgaggatgtcttcgagaaggacagtggagtagctcctggcatacttcgactcttcttccatgactgctttcctaatggatgcgatgcgtctatattgttgaatggagac

SEQ ID NO: 3847 - DNA, 266 bp, Glycine max
  unsure (1)..(266): unsure at all n locations; Clone ID: 701042006H1
cgttgcttgaaaagaaggaaacaagaaaaaaattagtgtcattaagttattaattaagtatggtcttagtagttaatttgcgtgtgtaaattaatgttacttaatcgggcatgtatccaagagggggaaaaattgaagatatgtgttggggatttattgattattacgaaagataatcataatataggtaggagggaggggatatttgaattaatgagtatnatggtaattaattatgntttggnaaaataaatatatactatggg

SEQ ID NO: 3848 - DNA, 139 bp, Glycine max
  Clone ID: 701042007H1
gctagtttcatctgggttatgcttatgtctggcacagaacaggtgaccatgggaggattaggactcaatttgactccaattactacatttgctatcattactgtgattgctacggtgctaatatggtggttttggaatg

SEQ ID NO: 3849 - DNA, 220 bp, Glycine max
  unsure (1)..(220): unsure at all n locations; Clone ID: 701042008H1
tttcttgtaaaannnngattgtattctatttngcatgttagcntaatcacaatatgctcgtacaagtaagaatttttactgcaccaaacattaacaaaccctagaagaacatcaaaacaaccagaactatacaacaatttaaaggagaaaaattcttacttgtacgagcatattgtgattatgctaacatgctaaatagaatacaatctttcttgtaaaa

SEQ ID NO: 3850 - DNA, 268 bp, Glycine max
  unsure (1)..(268): unsure at all n locations; Clone ID: 701042009H1
attttcatttgagagttgcaggttgccagttaatcgtcttcttctctgcatccatcagatccaaagtttctcgcgatacgagggagcaatgtcagaggctaaggttcaggatttgaagaaggaagaggaggttgctgatgattctcctaagaacgaagttgacagtggaaaatctgtggatgatctgaaagattcggntaacgataaaagcgatggaaacgccatgccctcatcccatcaggaggaagcagctgttaagaaaaagtat

SEQ ID NO: 3851 - DNA, 268 bp, Glycine max
  unsure (1)..(268): unsure at all n locations; Clone ID: 701042010H1
caggtgaagcaacagtgttacgaagcaagtagtagcaattagcaatggcgtacatgagcatgggggaagctcataggaggataacacggcatctgaatcgctttnccgacgcgatttcttgccaagacggagctacgttcaagtctctcttcgctctctcttctaattccccattccttctctctctgggcgacgcgctcaacctcttccaagacgccaacagactcatcaagcaatccgacaaccattcccagttcacagacatcct

SEQ ID NO: 3852 - DNA, 266 bp, Glycine max
  Clone ID: 701042011H1
accgtgttcctatacatgtttgtaatagggatgtggaaatggaggttccgcccgagataccctcctcacatggatgctagtctctcttgtgcatatgtaaccagccctgaggactttgatgaggaaatggacacttttccaaccacaaagagctttgatatcgttcgttggaggtatgataggttgagaagtctggcagggaaggttcagagtgttgttggacagatagcaactcaaggagaaagaatccatgctcttataaattg

SEQ ID NO: 3853 - DNA, 267 bp, Glycine max
  unsure (1)..(267): unsure at all n locations; Clone ID: 701042012H1
aagaatttgagtacatgatgacagccaaaataggagaaagggacactaaagaggagctcatgaaagctttccatattattgatcatgataaaaatggaaagatatccgcattagacatcaagcgcattgcaaaagagctaggtcaaaatttcactgacagagagattcaggngatggttgaggaagcagaccaagataatgatcgagaggttagtgcggaggngttcatcacgatgatgaacagaactcgcttccatcactagtctt

SEQ ID NO: 3854 - DNA, 268 bp, Glycine max
  Clone ID: 701042013H1
cgtttcaattctcaagtaaacatcatcaaagagcttctagtgtgaagtttggtggtgtttcatgcagagccgcaacgttaacccaagaaaacttgtacaaaatattgtctgtgtgtccaggaagtgcaacaatggatgagatcaagagggcttataggtcaatggctcttcagtaccaccctgatgtgtgccatgatccttccatgaaagaggaatcaacgaggatgtttgttcagctaaacacagcttacaagaccttgtccaatcc

SEQ ID NO: 3855 - DNA, 262 bp, Glycine max
  unsure (1)..(262): unsure at all n locations; Clone ID: 701042014H1
taacagagcaaaagttccagacttgcgagaaattatggcaagagatcttgaaagtggcggtggaggaaccaagaataacagaactgcagaggnaaactactctgcacctgaatcttcccatgtttatgattctgagacccattggacatcatggctcgtgcctatgtttgtggttgctaatattgctgtctttgttattaccatgtacatcaacaattgtcccaggaacaaccttcgtttccaaggtcgctgcgtggccagg

SEQ ID NO: 3856 - DNA, 271 bp, Glycine max
  Clone ID: 701042015H1
cgacgaaaactactcgctcggcaaatccctcacgagcaagcacctcattcagctagcttcaaagggtgaccacaaaaacgccatcaacgttgtgttaacttccgctgacgtggcagttgaaggtttctgcacgagccgatgtgggacccacggttcttcctcagcgggccatgcaaagaacaagaactacaagttcgcatacatatgggttgggaattcggaggcccaatgcccgggccaatgcacgtggccgtttcaccagcccatatat

SEQ ID NO: 3857 - DNA, 273 bp, Glycine max
  Clone ID: 701042016H1
ctcacgcatttcctcgtttttttcttcccttttctctttctccggcgacgatctcagattccggccactcctctcgccggcgagcccttactcttccctcctccgtcgagccctctccgattcgaatcgttcccagcctcgcaccaccatgaatcccgaatacgattatttgttcaagcttttgctgattggagattctggtgtaggcaagtcatgtcttctcctgaggtttgctgatgattcataccttgacagctatatcagtaccattgg

SEQ ID NO: 3858 - DNA, 273 bp, Glycine max
  unsure (1)..(273): unsure at all n locations; Clone ID: 701042018H1
tttcactactttgtatttttcgctgactccggcgtcactttccgttgagtctccgtccaccggcgtggcgatgnactcggaatcttcaaactccgattctcaaccgcaccctctctcgaanccaatcgacgacgcgtgccacgacatgagctccctggaaganctcgcgaaccgcngcgcgtggcgttccatcattgacaaggtctcactcgcncgcgccctctctctcctccacaagccccacgaccacctcacctaccttgccttcaacgc

SEQ ID NO: 3859 - DNA, 269 bp, Glycine max
  Clone ID: 701042019H1
ctctccgccacttcctgcacaaaccctcccttctccatgggacagtcaccgtccacctccgccgcgcctccgtcggacctcaaccgcctccaaattgctcagttacacccaaacaccgattctgattccaccgattacaccctgtgtctctccgacgattgcttggccgcaatctttcatttcctgaacaccgccgatcggaaacggtgctctctggtatgcctccggtggcgccttgtcgacggccagaggcggcaccggctctccct

SEQ ID NO: 3860 - DNA, 266 bp, Glycine max
  Clone ID: 701042020H1
gatcaaccccgacgaaggcaaggggtttttctcggcttcttcagatttctgaaatggcgcctgtttcagctttagccaagtacaagctcgtcttcctgggtgaccaatccgtgggaaaaaccagcatcatcactcgcttcatgtatgataaattcgataacacctatcaggctacaattggtattgattttctatcaaaaactatgtatcttgaagatcgaactgttcgactgcagttgtgggatacagctgggcaggaaagattt

SEQ ID NO: 3861 - DNA, 265 bp, Glycine max
  Clone ID: 701042021H1
ggaaaatcttcctaaaattgcatctgaagatgatgaaatggtgcagatttccggtgaccttgatgttgctaaggatgctcttgtgcaagcacttacacggctaagagcaaatctttttgataaggagcgtgctgtctcaggattccttccggtgcttccatatcttcctgcttcagttgatggatcagatggtttgaactatgacagtagagatggtaaacgacatggacgtggtggatattccagtgggtatggaggttcaagt

SEQ ID NO: 3862 - DNA, 264 bp, Glycine max
  Clone ID: 701042022H1
cttcatatcccacggaaacacagccaggcttgctaaggagcacggcgatataaagttggcccagatctgcggcatgattgcctcagatgagaaacgccatgagactgcatacacgaagatagtggaaaagctatttgaggtcgatcctgacggtacagttatggcgtttgccgacatgatgaggaagaagattgccatgccagcacacctcatgtatgacggccgtgatgacaacctgtttgatagctactcttcggtcgcgca

SEQ ID NO: 3863 - DNA, 163 bp, Glycine max
  Clone ID: 701042023H1
cgcgccttcaatttgttcttccaacaccctcagtcattgtgtgagtccgaagctcaacctctctcgctcttcaatggccgtatcctctattcgaatcgccgtcgtcggtgatgtgcatgattgctggaaccttgaacaagattcgaaagcacttgagctcttg

SEQ ID NO: 3864 - DNA, 267 bp, Glycine max
  unsure (1)..(267): unsure at all n locations; Clone ID: 701042024H1
gtctgtctgtctctgactccactcccaccttcgcctgcgtcactcactctacctttctttcacttccttatcatatcattattctcttccaattcctcaacgcgcactttctctcttctctccgcatctccaannnnnnnnnnnnnnnnnnnnnnnngaaacaaaaaaatagaaatagaaaaaaaaaacaaaagttaaaaaaaaaggttagttattcttcttcaaccacgccatggagggtcttccccaaggttaccgtcccaacgt

SEQ ID NO: 3865 - DNA, 265 bp, Glycine max
  unsure (1)..(265): unsure at all n locations; Clone ID: 701042025H1
caccgagaaggaaagcaggaaanaaacaaaaaggagcagatgggtagctcaggtttctcatggaaattggcggatcatccaaagcncccaaagggtaagactgtggctgttgtggtattggatggttggggagaggccacacccaatgagtacaactgcatccacaaggccgaaacaccctgcatggattcacttanaaagggtgctcctgaacggtggagattggtcagggctcatggtactgctgtaggacttccaacagaag

SEQ ID NO: 3866 - DNA, 265 bp, Glycine max
  unsure (1)..(265): unsure at all n locations; Clone ID: 701042026H1
gggccaactggtccaaaggagnaggataactggctaggagatgaatattgctagttctgcttcctctctcgttttagcgggaaaggaatgcaaactgnttaaggtaatatctttatgtcctggtattagtatgtgttatgtatgtcattgtgggagaggtgaaatggagcaagannnnnnnnnnnnnnnnnnnnatcaattgtaaagggggtgtaccttacatagtagcaacttatgtcattcttggtgacctgaagaactatag

SEQ ID NO: 3867 - DNA, 264 bp, Glycine max
  Clone ID: 701042028H1
cgaactcctggtggcggtgctgactctgctttccggaaggcagaggatgtggtctccggcatgctagccaagggctttatcttagggaaagatgctgtcaacaaagcaaagacctttgacgagaagcaccagttatcctccacagcctcagcaaaagttgcgtctttcgatcagaaaattgggcttagcgagaaaataagtgctggtgctacagtagtgggtgatagagttcgagaagtggaccaaaagtttcaggtttcagag

SEQ ID NO: 3868 - DNA, 265 bp, Glycine max
  Clone ID: 701042029H1
agggtctcttccattcacaaccttaaacctttctttcttgtaaactttattgattgattctgagaatagaactaagagggtatagacatggctagcgcaattgcagcttcttttttggttctgcttctggctttccccactgtatttggagctgaccatgaagttggtgacactagtggatgggccctcggagttaattacaacacctgggcctctgggaaaactttcacagttggtgacactttggtgttcaagtatgactcca

SEQ ID NO: 3869 - DNA, 267 bp, Glycine max
  Clone ID: 701042030H1
ggttggttcatttgatctgcgactgagagaagagaagagaattgtgatggggggaggacagggtcacggcacaacctacaaaggtgttaccattcatcagccaaagcgctggcacactatcaccggcaagggtttgtgcgcggtcatgtggttttgggtattctacagggcaaagcaagatggtcctgttgtattgggctggagacatccttgggagggtcaccatgatgatcatggcaagggccattagcattccttaggcatgag

SEQ ID NO: 3870 - DNA, 236 bp, Glycine max
  unsure (1)..(236): unsure at all n locations; Clone ID: 701042031H1
ctnttctccaaatacacacacagngncaactntcgtcttcnatccccaaccctaaccagttagcgaacgatcgnttagagtttcgacgcaggatgagttcgaaagagcgaagccagcagccgcattcgagggttcctcgtcgtcaggagtggattcgtagagatgttggtggttgcttcaatccaagaaagcccaagaagggatcatctncgaattcgagggaggagtctnatttg

SEQ ID NO: 3871 - DNA, 172 bp, Glycine max
  unsure (1)..(172): unsure at all n locations; Clone ID: 701042032H1
agcgttgaaaatggagaagttgcagctgcatgtcccgagagttaagcttggaagtcaaggcttagagatatcaaggttgggctttggatgtgtaggactatctggactttataatgctcccctctcgcacgaagctggatgttcaattattaaagangcattcaatatgggt

SEQ ID NO: 3872 - DNA, 244 bp, Glycine max
  unsure (1)..(244): unsure at all n locations; Clone ID: 701042033H1
cacagatccgtcttgaacttctctgtgttctgaaacagcaacaatggcaaanaccntgactatgtggtttctgttggtcactcnttccttcgtttatgctgctgccactgctaatactcaaatcaaagttactaacaaccctgcggacaagttggtagttgcgnttaacgaaaacagaactgctcacaaggtgtcagccttnanggacaacccggggcttgcgtgtattgctctacaatacatt

SEQ ID NO: 3873 - DNA, 270 bp, Glycine max
  unsure (1)..(270): unsure at all n locations; Clone ID: 701042034H1
gtgggctttgaaccattctggtgttagatggtatgtgtttggggatgatgacaccattttcttccctcagaatttggtcaaaactctttccaaatatgatcataggctttggtactacgttgggtcgtactcagagatttatgagggctcccaggtttttggttttggaatggcttttggtggaggtggttttgccatcagttcctntctagcacaagtcctagccaaggtttttgattcatgcatacaaaggtattctcatctatatgg

SEQ ID NO: 3874 - DNA, 267 bp, Glycine max
  Clone ID: 701042035H1
cttcctcaccgattgctagaatggaatttcgatgctcagtcatcttcttttaccattctcttctctcttgctcttgcaggagagagccatgtccatgcatcgctacctgaggaagattattgggaagctgtttggccaaacactcccattcccactgcactgcgagagcttctaaagcctctccctgcaggtgttgaaatcgatgaactccctaagcaaattgatgatacacagtacccaaaaacattcttctataaagaagacctt

SEQ ID NO: 3875 - DNA, 255 bp, Glycine max
  unsure (1)..(255): unsure at all n locations; Clone ID: 701042037H1
cgcgtttggacgcagacggtagcaaggaaacccaccgtaagcgataagcaatngaattcnnnnnnnnnnnnnnnnnnnntctcttgctctgtatctttgatttgatcattccaatcttcaatttttctatatatccatcaatccgctgagtgcaaagttctaatctttcgcctattgggttctactcctttctctcttcgtttccgatcgatccaattttcttcccatggctacgatcggacacaacaatctcaa

SEQ ID NO: 3876 - DNA, 262 bp, Glycine max
  unsure (1)..(262): unsure at all n locations; Clone ID: 701042038H1
acatctttggacagtggccctgcaaattttgaggcaatggctcacacttatagcantgctttattgttcactgcgttcaaagacatccagttacatggcttnagtaagatgtttccaactggcattttccctcatgagcctctctctggaccaagaaggaggtttacaaccatctcgcaggagatctctttttactatggcatcatacatgcttatattctcagccagggcaggcaatttccccgagctaattcagaaagtt

SEQ ID NO: 3877 - DNA, 260 bp, Glycine max
  unsure (1)..(260): unsure at all n locations; Clone ID: 701042039H1
cccttttgaagtaatcgatggagtttcagtctctttccagattctaccttcttctttccttaaccattctcttccttgcaccctttcacgctcaagctaaaattaaagtcacttactgcgataagaaggcagactatcctgtgaaggtgtctggngttganatatcaccagaccctgtggagagtggcangcctgctacctttaagatctcggctacttctagtaaagctatttatggtggagaagttgtaattggngtt

SEQ ID NO: 3878 - DNA, 253 bp, Glycine max
  unsure (1)..(253): unsure at all n locations; Clone ID: 701042040H1
attttctagcttccaaaccctaacactcctcttcctcttcgatcatcacctatccacaatgccgccgaagttcgacccctcccagatagtcgacgtcttcgtccgcnttaccggcggcgaagtcggcgcggcgagttccctggccccgaagatcggtcccctcggtctctcccccaagaagatcggagaagacatngccaaaganaccgccaaggactggaaggcccccgcgtcaccgtcaagctcaccgttt

SEQ ID NO: 3879 - DNA, 263 bp, Glycine max
  unsure (1)..(263): unsure at all n locations; Clone ID: 701042041H1
gtttgcttccatggaagtgatttccgcttcgagcttgaatcccaacgctccgatgttcgtgcctctncgcctatcggacggtggaggatttctccgaccaatggtgggacctcgtccactcctccccctggttccgcgactactggctccgcgagtgcttccaagatccccagtaccaatacgacgacgttttcgacttcgactttgacctagatctccaagataaagatgaaaatgaagggaaggaagggaaagaggtggtg

SEQ ID NO: 3880 - DNA, 263 bp, Glycine max
  unsure (1)..(263): unsure at all n locations; Clone ID: 701042042H1
tctagctccaattcaaccatgggcttcgagactcacggtaacagccttggtgctgatagctttggcaacagtttctctccaaacntcagcttcatcagtgggtaaattcatcgacgaaaccatcacttcccacaagatcgtcattttttccaagacctattgcccgtactgtagaagggcaaaagctgttttcaaagagttgaaccaagttccacatgttgttgagctcgacgagagagangatggttccaagattcangata

SEQ ID NO: 3881 - DNA, 262 bp, Glycine max
  Clone ID: 701042043H1
agggagacaagacagagtagtacagattactaccaatggctaccaaggtttacattgtttattattctacgtatggacatgttgagaagctagctagagagatagaaaaaggggctgcttctgtggagggagtagaagcaaaactgtggcaggtacctgaaacattgcctgaagaagtccttgctaagttgggagcacctccaaagagtgatgttccaattattactcccaatgagcttcctgaggctgatggctttttgtt

SEQ ID NO: 3882 - DNA, 263 bp, Glycine max
  unsure (1)..(263): unsure at all n locations; Clone ID: 701042044H1
cagagaccttccctttccgccgaagaactgttccttggcggaaagattagacctctcaaacccctttccccttcgtcgaataaaagaagagagaaaagggttatcgaagannnnnnnnnnnnnnnnnnnnnnnnacctccacaacgtaagctaggtagggaaagagcttcatcattttccatttcctctgctacccctttaaaaggtcgcagaggaagtggaattcaagtcgtgtcttgtgatgacacgtcatcacaagggga

SEQ ID NO: 3883 - DNA, 263 bp, Glycine max
  unsure (1)..(263): unsure at all n locations; Clone ID: 701042045H1
caaattacgaaccctgaacctctttgcgaattcagctgaaccttgatgggaaatctgagatttctgataggaaatagaaagccccaaaacattaccttagaataagggatttctcccgttactgaaggaaagacccccatttcatagcgcctggggaacgcaagtttgatcgaggattggagaggngaggtggaatggaagaaaaggcgaaggatggatctgtcttaaggatcttcagtcttacttggttagtagttttagat

SEQ ID NO: 3884 - DNA, 266 bp, Glycine max
  unsure (1)..(266): unsure at all n locations; Clone ID: 701042047H1
cgannatccgacccggatccatggggtgcgtgantncgaagcaagcggtgtcggtgacgccggcnattgaccactccggcgcgttccggagcaatgcgggtggtctggccganccggagaagaagaggagcaagaagaggaccgagtctggtggagcgagtcagagcgaggtaggtgagtcggggagaacgagttccaattgcnactcgctcagcttcaggctggggaacctccacaagtacgtgcagggcgaacacgtcgcagcc

SEQ ID NO: 3885 - DNA, 271 bp, Glycine max
  unsure (1)..(271): unsure at all n locations; Clone ID: 701042049H1
tgaggacaaaaacgaagaancggaangccanagatggcaatgagaattgatgttccagccactaatccaactcgagcaattacagctatcactagcatgctgtgggaggntttagtcaagaatcccaccggagacttggttcacnagngcaagctccaatgtgctgagaaaatgattagaggtgcctttgtcgagctctataaaggatttggcctactcaaaacttacagctcactcaatatggtagcatttacaaagatattaaagnntt

SEQ ID NO: 3886 - DNA, 267 bp, Glycine max
  unsure (1)..(267): unsure at all n locations; Clone ID: 701042050H1
ctcaaaaacagagtagcctacacgtatcagagagagtgagagaagagagagaatatttctgttcgtgcnnnnnnnnnnnnnnnnnnnnnngagctccacaagaatgaaatgggtctccatcttcacacttctattcctctcccactcgcccctcacaaccttcgcagaagatgggctagtggcgaatggagattttgaggttagcccatcaagtgggttccctaacgaggcgattgtggagggccccagcgaggtcccaaactggaa

SEQ ID NO: 3887 - DNA, 262 bp, Glycine max
  unsure (1)..(262): unsure at all n locations; Clone ID: 701042051H1
aaganagaaaaaaaaacactgcacaaaacaatggctttgaatttgattcatcgaccagccactaaaccaccatcttcctcctcctctttcgtcacccctcgccctttgcggaccacacagagcatccctgtgaggaactcgcggcgctccatcgccgtgcgcnccgccgccacggaggctcctgtggctactattacggcggcaagggagtgcagggtgaagtcggtgaaggcccggcagatcgtggacagccgcgggaacc

SEQ ID NO: 3888 - DNA, 264 bp, Glycine max
  unsure (1)..(264): unsure at all n locations; Clone ID: 701042052H1
tgacctccgtgaatcgataagcaaccaaaccgacgtcgctctgagcatcacanagctcctgttgtcgaaaaacgctcgggacagtaacctcgtgtactcgccgctgtcgttgcacgttgttctgagcatcatcgcttctggctccaagggccccacactcgatcagcttctctccttcctccgatccaagtccaccgaccatctcaactccttcgcctctcagctcgtcgccgtcgtgctctccgacgccgctcccgccggcgg

SEQ ID NO: 3889 - DNA, 260 bp, Glycine max
  Clone ID: 701042053H1
aggcgctgctgtttctacgattcatgttaccccagaagatggtttcagttatgcaagcttcgaaactgttggttatgacttcaaagcggtgaatctgaacgaaatggttcagagggtattggcatgtttcctcccaactgagttttctgttgcagttcatgtggatggtgcaagcaagtcgtttgagcagacctgctttctggatgttaagggatactgtcgtgaagagaggagccacgaagggcttggaatgggtggtt

SEQ ID NO: 3890 - DNA, 259 bp, Glycine max
  unsure (1)..(259): unsure at all n locations; Clone ID: 701042054H1
atcgtgctgaatggcatggatcagatgttgctatcaaggttttaacagttcaggatttccaagatgatcaattganngagtttctaagagaggttgcaataatgaaacgagtacgtcatccaaatgtggtgttgttcatgggtgcagttactaaacgtccccatctatctatagtaacagaatatttgcctagtttatttcgcctaatacataagccagcatctggtgagattctagatccaaggagaagattacggat

SEQ ID NO: 3891 - DNA, 259 bp, Glycine max
  unsure (1)..(259): unsure at all n locations; Clone ID: 701042055H1
cacgaacagaagcttgactgtggtggtggctacatgaagttgctcagtggggatgttgatcagaagaaatttgggcggggatactccttacagtattatgtttggcccagatatctgcggttacagtaccaagaaagttcacgctattcttacctacaataacacaaaccacttgataaagaaggatgttccttgtgagactgaccancttactcatgtttacacatttatcctccgtccggatgcaacctacagcatc

SEQ ID NO: 3892 - DNA, 259 bp, Glycine max
  unsure (1)..(259): unsure at all n locations; Clone ID: 701042056H1
cacacactcactctccttctctctcctattgcggctagggtttgggtttttcactttcagcctctccattccttcaaccttcttcttctctttgatctctgntggagacgttccgtgtttagtagcaagggttagttgaggccttgtgtttggaaacgtacggtgtcgttttggagttgggaaaacaaataattctgagagatggcaaccacgaacccttttgatttgttgggtgacgacgctgaggacccttctcagc

SEQ ID NO: 3893 - DNA, 260 bp, Glycine max
  Clone ID: 701042058H1
agagaatagagaaagcgaagggaaggcccgtgagttttgcgcgtgcgagagagacagtggaaagaaaggaaagggatgacgctgggtctgatcaatgcgaatcctgtggttcacgccaagaaagagcgaatcgctcgttctgatgatcctcacgccgatgacgccgttgatcctctcgacatctatgatttcgtgagggatattcgggatcccgaacatccttattccctggaacagctcagtgttctctccgaggaatc

SEQ ID NO: 3894 - DNA, 260 bp, Glycine max
  unsure (1)..(260): unsure at all n locations; Clone ID: 701042059H1
ctgctttaaacttcccttcgggaacatcattgccacttccatggntgcctcacacatcctttataatcctcctcccctttccaaaacttttattaatcaccctttgaaccaaaacccttctcctcaaaacctaattctaccactcaaagctactattaaaccgcgggttcttagagcagttcactcccagaagatcactgctaactcctcgcttcataactccgatactaggactcgttttcagcactgtttcacaaaga

SEQ ID NO: 3895 - DNA, 260 bp, Glycine max
  Clone ID: 701042060H1
cttccatctaaccctcaaatgcttcatggaacccaaaacaatcttattcatactgataaattcaggttgggttgtctctaatttctttctttccaacacatacaaaccacttaactaaacttgatctgcatgcaggttcttggacaaggcttgtatcagagtggaacaagagggaaatcaggaaagcgcgtggagattatgcagtgttgcgcaagttgagcaagtgaagatattgctatcggtcattccgatattctcgt

SEQ ID NO: 3896 - DNA, 261 bp, Glycine max
  unsure (1)..(261): unsure at all n locations; Clone ID: 701042061H1
ggcgctgggaaccatgctcgaggaatggtggngtgatatatttgtacaaatgatttcggaaaccaaattaatcatcaaaacaatttggcggcnagaaaggagagtgaaatgtgatgaaatcctaggntagactcgntaaagatttgggaatagaatgcagggaattagtgttttttgagttgtaccatgtacacattaacaacagtntatagatgaaactttttccttcaagtccctttttgtgtatctgtgcgttgatgt

SEQ ID NO: 3897 - DNA, 245 bp, Glycine max
  unsure (1)..(245): unsure at all n locations; Clone ID: 701042063H1
ctcaaacatggcctccaaatcctttcaccctcattctcctcatcctcaccacattcctcatngcccaaacccaagcccaagctcccgcaccggccccctcaggcgcggtgaacctcaccgcgatcctcgaaaagggtggccagtacaccaccctaatcaaactcctaaaggacacacaacaactcatgcgatcgagtcccagctcaaatcaaactcacaaggcttcactctcttcgcacccactg

SEQ ID NO: 3898 - DNA, 267 bp, Glycine max
  unsure (1)..(267): unsure at all n locations; Clone ID: 701042064H1
aagactctaaacgggnaggngtttgtctcctttctggagcagatacttgaagccttgaacaaaggagagattccatcaacaggctctcttgtggnngnntncaacaagaatattcttgagaaatgtcttaagttatacagtgaaaagatggcgaaattagttctacctcttcctgagaaatctctgcaaggggcccatgataggtctagagatgaagtcacaaaagtctttgatcagcagcattttggtcgtcaccatgctaagaaa

SEQ ID NO: 3899 - DNA, 266 bp, Glycine max
  unsure (1)..(266): unsure at all n locations; Clone ID: 701042066H1
cgtagatatgggctgaaactgacatccaagactatctccaactcttctnccnctggntactctccatcatcgccgttagagccatactcaccaaactccgccacaagcctcgccgtccaccgggcccacggnccctccccatcatcggccanctccatctcatctccgccctgcctcaccagtctttccacgcgctctccacgacctacggccccncgtgcaagtcttcctcggctccgtccccgccgtggtcgtttcgtgccgga

SEQ ID NO: 3900 - DNA, 263 bp, Glycine max
  unsure (1)..(263): unsure at all n locations; Clone ID: 701042068H1
caanatgttgncacttgtgtacatactcatagcttcntcctgcagtagtgttgntattgatcctcttcaaagccaacaaanacancccgccangtccaccaggtccaagaggccttcccataatcggcaaccttcaccaactcgacgcttcgaagctcaatctccnnctagggcagctctcnaagacctacggtccccttttctccctccgaatcggcttcaagccagccctcgtcgtttcctctccaaaactcgccaaagat

SEQ ID NO: 3901 - DNA, 259 bp, Glycine max
  unsure (1)..(259): unsure at all n locations; Clone ID: 701042069H1
tttaaccggaatcgggccnccacagcccgacaagaccgacgcnctgcagcangtgggcttganattagnccaattggcccaaatcatcggcgnncanttcgaattccgcggcttcgtttgcancagcctcgcggntctcgacccgnntatgctcganatccgagccggggnagccgtggcggtgnnttccgtcttcgaactccancgcatgctcgcccngtncggatgcgtcgacaaggtcttggacatgtnannaaaa

SEQ ID NO: 3902 - DNA, 164 bp, Glycine max
  Clone ID: 701042070H1
ggggtacatttctagaggaatcacgatcatgagaaatgatgcaatgtttctgtttcttgttgacctttcatcttattttgtaatttagattatttaatttactaaatatattaattgtggaagcttaatgttgagttcgtactgcatgtctgattttcaaaact

SEQ ID NO: 3903 - DNA, 257 bp, Glycine max
  unsure (1)..(257): unsure at all n locations; Clone ID: 701042072H1
ctcaacttgacccattacctgttgcatgagaataattcagactgcnacatcgtgaatgagcttgggtttcctcgactgttgatgcaccttgcctcaagtgaagattcagatgtcagagaagctgcccttcggggccttcttgagcttgctcgcaatactcaagatggcaaggatggcaatgaggaagacagtgagaagatgaagcaacttcttcaagaacgaataaacaatatcagtttaatgtcagctgaggacct

SEQ ID NO: 3904 - DNA, 258 bp, Glycine max
  unsure (1)..(258): unsure at all n locations; Clone ID: 701042073H1
ctttccccaacgaacctcgttgttgtgaatcgcgctgctgaatcaatcgttctcggttttcgcgtactctactcgttcatcccgacatggtttgcttggcttgtttgctgcccctctttctcgtcccaatcgtcaacatcctccctcttctcttccattttatcatgggganaatctatcgggtttttggttgggagtacaggaaaccggagagggctcctcctgcatgtccattcaagcctccagccaacaggatct

SEQ ID NO: 3905 - DNA, 259 bp, Glycine max
  Clone ID: 701042074H1
cgtgcgtgcattccattgttgttgttattgtatcgtagccagagaagaagaagagaagagatcgcggcgaagaaagaaagatgacggaggcacatataaggaagaagcccgggatggcgagcgtgaaggacatgccggttctccaggatggtccaccgccgggcgggttcgctccggtccggttcgcccggcgcatcccgaacaagggccccagcgccgttgccatcttcctcaccaccttcggcgctttctcttgggg

SEQ ID NO: 3906 - DNA, 259 bp, Glycine max
  Clone ID: 701042075H1
atagacttatattccatgggctccgccgcttcgaacacaacggcgtttccaccagcggtgactctctgagatctattccgacgccgtttctcaccaaaaccttccaactcgtcgacgatcacaccatcgaccatgtgatttcgtggaacgattctggatcgtccttcatcgtctggaacaccaccgctttcgccaaggatttgcttcctaaatatttcaagcacaacaacttctccagcttcgttcgccaatcaacact

SEQ ID NO: 3907 - DNA, 258 bp, Glycine max
  Clone ID: 701042076H1
ctcgtgcaccagattgagaccgttccaaaccctaaggggctctgtgcggtttcgcagctgtccgattctctcgttctcgcgtgccccggtttgcacaagggtcagattcgcgtggaacactacgcgcagaagaagaccaagttcatctcagcgcatgattccagaatcgcttgcttcgctctcacgcttgatggacagttaatcgccaccgccagcaccaagggtacgctgattcggattttcgacaccgatcacggc

SEQ ID NO: 3908 - DNA, 259 bp, Glycine max
  unsure (1)..(259): unsure at all n locations; Clone ID: 701042077H1
ttttctgatatgtaagtctatttgcctttactcttaggggcccccatttacggggatgatggaggatggggtgagttggaaaattgaaattttcatttttgcatcttcaaggttcagccataacgttannnnnnnnnnnnnnnnnnnnnnnnnatgttatgtatgggtttggtttcacattcaaggacatgggaaacatggggggaccgaagccaacatagttttgttggttatatatatacttggatgcctattgagt

SEQ ID NO: 3909 - DNA, 260 bp, Glycine max
  unsure (1)..(260): unsure at all n locations; Clone ID: 701042078H1
tggtcatcctcggcacacaatacgccggggaaatgaagaanggtcttttcggtgtcatgcattatctcatgcctaagcgccaaatcctctncctacactctggatgcaatatgggcaaagatggggatgtggcactcttctttggactctcaggtaccggaaagaccactctttcgaccgatcacaataggtatctaatcggagatgatgaacactgttggggtgacaatggtgtctccaacattgaaggtngttgctat

SEQ ID NO: 3910 - DNA, 233 bp, Glycine max
  unsure (1)..(233): unsure at all n locations; Clone ID: 701042079H1
ttcctttccccgtttnctcttctctctctcaanctctttcatgtganggtaganccacaacaaaacacaaaccacacactctcctaactcgaggttatttttttctttccccaaagaggcatgagttgcaacgggtgccgcgtccttcgaaagggttgcagcgagtcttgtattctgcggccgtgtctacagtggatcgatacgcccgaagcacaaggccatgccactgtctt

SEQ ID NO: 3911 - DNA, 261 bp, Glycine max
  unsure (1)..(261): unsure at all n locations; Clone ID: 701042080H1
ggccattggtaccggcatttttgactatgtctgggtacaattctataacaacccttcgtncagttatagccaaaacaatttagataactttctaaaatcatggagagagtgggccacatcattgaaagtaggtaaactgtttctggggttaccagcagatgaagctgcagctccggccggaggttatgttccggctgatgtattaatgtctaagatcttacctgaaataaacaagtcaacaaattatggaggtctcatgtt

SEQ ID NO: 3912 - DNA, 266 bp, Glycine max
  unsure (1)..(266): unsure at all n locations; Clone ID: 701042081H1
ancatntcaattctctttcctttccttttcctccttttctcgatctctccgtcggtcatcatcatcagacccaaacaaattctctacgcagatcgaatcaaagctcctccatccaattccgagatgagcactggcgaccttctcagcatcgaacctctcgaacttaagttcttctttgagctcaagaagcagatatcatgctctcttatattgtcaaataagaccgatagctatgtagctttcaaggtgaaaacaaccaatcccaa

SEQ ID NO: 3913 - DNA, 258 bp, Glycine max
  unsure (1)..(258): unsure at all n locations; Clone ID: 701042083H1
tcagaaggagaaagaacggagaagttgttgagggcgaggccagcggcgtcttcctcgacactttgcttgaattcgctgaggacgagaccatggagatcaaaattaccaaggagcaaatcaagggccttgttgtcgactttttctctgcagggacagattccacagcggtggcaacagagtgggcattggcagagctcatcaacaatcccagggtgttgcnaaaggctcgtgaggaggtctacagtgttgtgggcaaac

SEQ ID NO: 3914 - DNA, 260 bp, Glycine max
  Clone ID: 701042084H1
attctccgtcgccacaacaacaatggctccgaagaaaggtgtgaaaggttccgttgtagcagcgaagaagaaggttcaggagaaggtgacgaatcctttgttcgagaagcgtccgaagcagttcgggatcggaggcgcgctgccgccgaagcgggacctgacgcggttcgtgaagtggccgaagaacgtccaaatccaacgcaagaagcgcatcctcaagcagaggctcaaggtccctcctgcactcaaccagttcaccg

SEQ ID NO: 3915 - DNA, 255 bp, Glycine max
  unsure (1)..(255): unsure at all n locations; Clone ID: 701042085H1
atttcantccatcntaatggncgcctcagcgatggtgttngatccnccgccnttnctcccgtngacaaagtccgcctacctccaaggcggngacnccacggncttcnatgaggnagatctctacagccgcctcaaatccctagtgcgtcactcgagttcgtcgacatccaggaggagnatgtgaaggacgnactnaagaatctcnggcgcgantcctccgcgcnatggaggnggtnaagcggntccagtcggtgc

SEQ ID NO: 3916 - DNA, 254 bp, Glycine max
  unsure (1)..(254): unsure at all n locations; Clone ID: 701042086H1
tcgggtgtactttcttgcgaaaccgagagagcgaaggggcaaacacaattttttttatcttcttttttattttttgtnnnnnnnnnnnnnnnnnanatgttggggatcttcancagttcagtggtgtcgccgccggnggagctggtngccgctngcaacagaacgccgtcgccgaagacgacggcggggaagctgctgnnccngttcgtgganagcnaggcgtcngcggtgtcnctncaggttggggaacacgt

SEQ ID NO: 3917 - DNA, 257 bp, Glycine max
  Clone ID: 701042088H1
ctcatgcagtgatggaaccatttgccatagcaaccaataggcatctcagtgtgctccaccctatttataaacttctttatcctcactaccgcgacacagtaaatatcaatggacttgctaggcagtccctgattaatgcagatggcattatagagaaatcatttttgcccggaaagtactccattgagatgtcttcatccgtctacaagaattgggttttcactgaccaagcattaccagctgatctcgtcaagaga

SEQ ID NO: 3918 - DNA, 256 bp, Glycine max
  unsure (1)..(256): unsure at all n locations; Clone ID: 701042090H1
gtgagtagaaggcatagagactagngcggngatagcantccatctcattcatttcaatgagcaactcaaggtcaagtccattacctgcaaagctgcggtggcctgggaacccaacaagcccttaactgtccaanacgntcaagnggctccgcntcangccggcgaggtccgngtccaaancctcttcaccgctcnctgccacaccgntncttacacttngggcggccangaacccgaantctcttccctgtaattc

SEQ ID NO: 3919 - DNA, 255 bp, Glycine max
  unsure (1)..(255): unsure at all n locations; Clone ID: 701042092H1
tcttcttcaattcatatcatatnnattagatttgttttcagagnntgctagtgagataccntggacaactacaacagcaatgacttttggaaattcagtgaccagttgangcntgaatctgggttggccantctgtctctgaatgattattccntttggagcaacagctacagctccaagaggcntgatcagnggaggnagtttcgtgtcaagggcagtnatttcnacaactcancnangcntnnttatgctnat

SEQ ID NO: 3920 - DNA, 258 bp, Glycine max
  unsure (1)..(258): unsure at all n locations; Clone ID: 701042093H1
caacaaacacaacaacactctctcnnctcgntcttngcttttcgctcttcactcactnctcattcattcatntccacngaacatgganccaccnaagcgtgtggggtaacacgnccttggctacggtngatcccgagatccatgacntcatnganaaggagaancgccgtcaatgccgcggaatcgagctcatcgnctccganaaatnnacctccttcgccgtcatcnangcccncggcagcgtctnangannaaata

SEQ ID NO: 3921 - DNA, 260 bp, Glycine max
  unsure (1)..(260): unsure at all n locations; Clone ID: 701042094H1
gtggaggaacattgtgcctggccttcctgctgttattctcaggtgtacgtgtaggctcgccaacgctgtctctgctggcaccattctcgcttctagacaagtgagaaggaagcttgtagaagattggttgccggttttggttgtatgcaaagataatgtttcaccaatatcacccagcaacaaatcgttgtatctggaactggaaganacattcttgcgaatcatctccacattgcctatgtcagntgctcaagaattgt

SEQ ID NO: 3922 - DNA, 262 bp, Glycine max
  Clone ID: 701042095H1
gtaccaaatggatgcgtgtcagcgaatacaatgcttgaatatacattactataggcttgtctgaattcagcatgccaatggtgtactatttgagtctcagctaaaaatttgcgtgataatgcttcagatctggaaggaaatatttacagcatgatgtggcattctgtaattttggatgttcagttgtaagctaactcattttttcccctatccttttcatttataataatagcgaatataataaaaaaaaattatttaccgg

SEQ ID NO: 3923 - DNA, 265 bp, Glycine max
  Clone ID: 701042096H1
attaattgcaagaatggcacttcgttgcttggtgatgtccctttctgttctcttcactcttggtcttgcgagagaaagccatgccagagacgaagatttttggcatgctgtttggccaaacactcccattccaagttcattgcgagatcttctaaagcctggccctgcaagtgttgaaatcgatgatcaccctatgcaaattgaagaaacacagtacccgaaaaccttcttctataaagaagaccttcatccaggcaaaacaatg

SEQ ID NO: 3924 - DNA, 268 bp, Glycine max
  Clone ID: 701042101H1
gcggcggcaacagggagagaagatgaagttcaatccacgtgtgtcgagcagccgccgcaagagccgaaaggctcatttcacggcgccatcgagcgtgcggcgggtgcttatgagcgcccctctgtcggcggagtgcggtctaagtacaacgtgaggtcgatcccagtacggaaggaggacgaggtgcaggtgatgcgaggaacatacaagggtcgcgaggggaaggtgactcaggtctaccgtcgaaagtgggtgattcacattgagc

SEQ ID NO: 3925 - DNA, 246 bp, Glycine max
  unsure (1)..(246): unsure at all n locations; Clone ID: 701042102H1
aattaataacaagctagctancnagttcgattttgtantaagtgaggtgccaatntggtgaagatagctcttggtactttggatgactcttttagcgctgcctctcttaaggcttatttcgcagagttccacgcaactctgattttccgtgttcgctggtgttggatcagccatcgcttacaacgagcttacaaaagatgcagccttggatccaacggggctggtggcagtagctgtggcacatgc

SEQ ID NO: 3926 - DNA, 267 bp, Glycine max
  Clone ID: 701042103H1
ctcggttctgccttcacaaaaaaattatcgagatcccctttttctcctaagaaaagccatggctaagggtcccggtctctactctgacatcggcaagaaagccagggatctgctgttcaaggactaccacagtgaccagaagttcaccatcaccacctactcacccactggagttgctataacagcatcaggaaccaggaaaagtgaactgtttgtggctgatgtcaacacccagttgaagaacaaaaacatcactactgatatcaa

SEQ ID NO: 3927 - DNA, 267 bp, Glycine max
  Clone ID: 701042104H1
ctcctcgttagcagttttcgttctccattctctccattccttcgccatgtccgatctccggctccgatcttcctgctgccgccgccgctcttagtgctgaggatcgtgctggtctcgtgaatgcactcaaggacaagctccagctcctcgctgggcaacatgtggacatcctggagacactgccacccaaagtcaggcaacgcgtggaaattctcagagatctgcagagtcaacatgatgaggtggaggctaaatttttagaggagc

SEQ ID NO: 3928 - DNA, 265 bp, Glycine max
  unsure (1)..(265): unsure at all n locations; Clone ID: 701042105H1
gcaatcttagcagaacaaagatgagtctcaatgtagatgatgatgagttagtgagtganatggatgaagcacccagttttgcttcatctctaccagtccccaatgttcaagaaatggtaaggaataaccctttgcaggttcctgaaagatatgcgaggagtcaagaagagttggagaaagtcaaccatatgcctcacctttcatctgaggtccctgtcattgatttagcactgctttcaaatggaaacaaagaggagttgttgaa

SEQ ID NO: 3929 - DNA, 234 bp, Glycine max
  Clone ID: 701042106H1
accgaagaataacttgactttcccgaactccacctgagaaaaagatacccttaattcgcaggcgcgtcttgtgttggacaacaaccacaagatgattaacttcgaagaaaccgagttgcgactcggcctccctggcaacgactcagcactcaagggaagtgctgccaagagaggcttctctgaaactgcttctgttgatttgaagcttaatctttcttcttgcattaacgactc

SEQ ID NO: 3930 - DNA, 262 bp, Glycine max
  Clone ID: 701042107H1
caaaccgaggcctcttcacatctgaccaaactctcttaactaatgctgaaacagccagccaggtgaaacaaaatgccagggatccctatttatgggcaagtcaatttgcagatgcaatggtgaagatgggtcaaatcattgtcttaaaaggtaatgctggagagattagaacaaattgcagggtggtcaatagttagcaatagtggtgaaggactcaagtgcctgcagcaaagaagatttacaaattctaagtcatgtttct

SEQ ID NO: 3931 - DNA, 261 bp, Glycine max
  Clone ID: 701042108H1
ggtttgataagcttcttcaggttacaggtccaggcatagtcaatgtgctgacacatcatgtgtataatttgggcccaggtagtgatgagcatcttgacaggaagattctagatcctgagtgcttgagcaaggttgaatcaatttttagcaatctttcagaaaccattcaaaaatatggcccttggtcttctgcatgggtaggtgaagctggcggggcattcaacagtggtggtcgttctgtttctaacacatttgtaaata

SEQ ID NO: 3932 - DNA, 264 bp, Glycine max
  unsure (1)..(264): unsure at all n locations; Clone ID: 701042109H1
caatctgtcaaaaccagttgtgtgtattgtttctgccaggcaaatatcaatagcaatagcaggcaatgtcaatgttgagatcagtttgtcagttaagggtgggagtcacaacccaaaaaccttgcctccatccctcaatcttattctccttttccctctctcacaacantcanactncncatttgaaatcttttccccagaaccttccgtttcnaccccacnttcagtggncctttcaccctttgtgccctnnatgccccccaa

SEQ ID NO: 3933 - DNA, 261 bp, Glycine max
  unsure (1)..(261): unsure at all n locations; Clone ID: 701042110H1
aaaaaatcacaaaccaagcttaattacccaagagagaaattaagaagctagtttgcttgtttttcggtgaactcagggagtcagatagataatactgatccctcgagatattgagattcatctaagagattaatatcatcctacccaaccacaagcttagattganacaagatggaagtggtggtacaaagtcctagtagtccaaccatggataatttcgattttggtggcaacatgggttcgatctatcaaagtgtccct

SEQ ID NO: 3934 - DNA, 252 bp, Glycine max
  Clone ID: 701042111H1
ctccgtgagcaagttgaggaacgacttgacttttatgacaagggagttgcccctcgcaagaacatagatgtcatgcaggctgctattgaaagtgctgaaaacaaagatacagagatggaaacagaagcacctgctgaagtttcaggcaagaaaaccaaaaagaagaaacaaaaagctgctgatgctgaagatgacgtggctatagatacaaatggtgatgctgtggaggatcataaatcagagaggaagaag

SEQ ID NO: 3935 - DNA, 219 bp, Glycine max
  Clone ID: 701042112H1
tattcctttctctccgaatccacgtcctagatccgttgttctcttcccacagttctcactgaatcaggatccattttgataccaagttgctgttgaatatcgagtttgctctttagagatctgtttccctctagacaacggtctgtgtgacctgttattttagttgaatcgaagccgcgaccaaatcttcctgatctttgcctgaggtgatggcatcgg

SEQ ID NO: 3936 - DNA, 260 bp, Glycine max
  unsure (1)..(260): unsure at all n locations; Clone ID: 701042114H1
tttaatatcactaaccacttcctcgttgaatcataacataaccacttggtctgtgtttgtttttgcaacttcatattgtacataaaaacatggatgatgaatatgctaagcttattagaaggatgaacccaccaagggttgtgattgacaacaatgcntgtgaaaacgcaactgttattcaggttgacagtgtcaacaaacatgggattctccttgatgttgtccaagttatatcagatatgaaccttgtgataacaagg

SEQ ID NO: 3937 - DNA, 260 bp, Glycine max
  unsure (1)..(260): unsure at all n locations; Clone ID: 701042115H1
tttcaatttctcgtcgtccctcattatggctcgtctctcgatcgtcgccatcgtcgccgccgtgctcctcctggccctctccgccacccccgcgacggcgcgtccctgcaggagcttcataatctcctcctactccttccgcaaccctaactccaacacgttcgcnaccatcaccgagatccgatccttcacccctctctacatcaccgacaaacccccctcctatgcccttttcttcccccangcgatcagctccctca

SEQ ID NO: 3938 - DNA, 250 bp, Glycine max
  Clone ID: 701042116H1
ctggattccaaggtttccaagtcctgtgctgtgctttcaatacctacgtcatggaatttctcaaaaaggtttaagttctttggcgtggattcatatcaagttgcatttggattttgactttgagactctgcttggggtgctacttacgaatgttttcccggaaaaacgtaaatttcttctaatgctttatgaaaagaataacgaacaagttcaatgtataccgcctttataaaataataacaagtttcat

SEQ ID NO: 3939 - DNA, 108 bp, Glycine max
  unsure (1)..(108): unsure at all n locations; Clone ID: 701042117H1
aatattgttaactgaatatttcagantaaaanaacgagttgaaaaaatattttcatgtgttgaacnctaactaaataatatgggttttaatggaacggtttgtttttc

SEQ ID NO: 3940 - DNA, 265 bp, Glycine max
  Clone ID: 701042118H1
tttcatttctacatccctgggctctgttccgtcgatgacgatggcgtttagggtgcgaaaccctgacctccgctttctcattcttctctctctcttgtccatcacttccgccaaggtcttcttcgaggagcgtttcgatgacggatggggaaatcgttgggttaaatcagattggaaaaaagatgagaacctggctggggagtggaaccacacctctggccaatggaatggagacgctaacgacaaaggtattcaaaccagtgag

SEQ ID NO: 3941 - DNA, 264 bp, Glycine max
  unsure (1)..(264): unsure at all n locations; Clone ID: 701042119H1
attttttcattaacaaatattaatggttaaatttatttgttttttttcctgtgagattaaactcaaccattttttttccttcttttttaactattcaactcaatcttatntctcaaattaagtttattttttggttttcctagaaattaaattattctgagaaattaactatatttaacgagcgagagccatttcattggcccatattagttcttgtgcttaggaaactttttgggtagaaaaaaaacagtactaagagtttga

SEQ ID NO: 3942 - DNA, 266 bp, Glycine max
  Clone ID: 701042120H1
gaaaagaagaggaaaaggagagtggagaggaagaaaaggattgaagttgttgctgtgagaaagagaaagagtgaaatcggagtttgggaaggaattgcaatcaatggatgtgataaagacgcagcaaatctcatctcgaccaatcgagaaggtggtggttcaccctctcgtgcttctcagcatcgtcgacaactacaacagagtcgccaaagacactcgcaagcgcgtcgtcggcgtcttgctcggctcctccttcaaaggcaccg

SEQ ID NO: 3943 - DNA, 264 bp, Glycine max
  unsure (1)..(264): unsure at all n locations; Clone ID: 701042121H1
tgacaagggaggttgatctagaatactctgaggcngttaaagccacgggcttgacagacagtttgttgaaactaagggaggaagtttcaaaagcaaatgcagataatcaaattgtngatccattgctgaaggataagatagaaaagctaagggtggagtttgaacagcaactgcgtgcagctcccaattatggaaggctgcagaataagtttacctatctgagcgaattatgtaaagttaagcttctgtcagatgcaaacaagg

SEQ ID NO: 3944 - DNA, 263 bp, Glycine max
  Clone ID: 701042122H1
cagactagagagagtaagagtaagagaagagatggaaagagtagcatcagtatctcggccactgaaaatatacttcctcccattcttctcaccggggcacctaatccctctggtccagctggctcgcttggtggcggcacgaggccagcacgtgaccatcatcaccacccccgccaacgctcaactcttcgaccagaacatcgacaaggacaccgcctccggccaccacatccgcgtccacatcatcaagttccccaacgccc

SEQ ID NO: 3945 - DNA, 261 bp, Glycine max
  Clone ID: 701042123H1
atctgattcgttcgttcactttcactttaccaactcctaacaatttctctctgtttccttcttcaccgcatcaatggagttggacggcgttctcctcggcatgtgcaaccctctcctcgacatctctgccgtcgtcgacgacgctttcttgcaaaaatacggtatcaagttgaacgatgcgattctcgctgaggataagcacaaacctatgtatgaagaattggctaacaatcctaatgtggagtacattgctggaggtgc

SEQ ID NO: 3946 - DNA, 263 bp, Glycine max
  unsure (1)..(263): unsure at all n locations; Clone ID: 701042124H1
ctagacctcgatcttgatctcgacgcacctcgccgtccctcgnngtagctgaacctcacagaagaagcctccttcaccggcaacgccagtggancctccagaaaccgtacgtcggcagcgtttcggacgacgaaaattgcatgcttctggccgcctacccctggacgacggcgacgcatttgggattgaagactgacgccgtcttctcggcntctgaaaacnggttatantttcaatnggaattcagatcttataatcctcag

SEQ ID NO: 3947 - DNA, 258 bp, Glycine max
  Clone ID: 701042125H1
gaatttgcaggatcatttagttaataagacgttggggaactctttgaaagaaaatatgtcaagtggactttctgttcctgcaattatgattcgtaatttggctattcaacttaggaaggtgtgtaaccatcctgatctccttgagtcagcatttgatgattcatatttgtatcctcctttggaagagatagttggacaatgtggaaaattccatttgcttgatcgattgctgcaacgtttattttcaaggaatcacaa

SEQ ID NO: 3948 - DNA, 259 bp, Glycine max
  unsure (1)..(259): unsure at all n locations; Clone ID: 701042127H1
aaaatgtggtttcttggttggaaaggggcatctgggttctcancctcttccacagccgaacaagtcactcaagggattgatggaaccgccctcaccgccatcgtcacaggagcaacaagtggccttggtctggagaccacccgggttcttgcattgcgcggtgtccatgttgttatggcagtaaggagtctggacagtggtaagaatgtcaaagaaacaatacttanggaaatcccctcggctaaaattgatgtcatgg

SEQ ID NO: 3949 - DNA, 260 bp, Glycine max
  Clone ID: 701042128H1
ataccatcttacttttactttgttttcacaacatagccatggccatctccagcaacgcttctccttttgattccatcatcttcgatttggacgacaccttgtacccgtcaagcaccggtattgacaagtgcgtcaagaaaaacatccaactctttctcatccagaaatgcggattctcagaatccgaagccttcaccctccgagttgatctcttcaaaacctacggaagcacccttgccggtttaagagcactaggccat

SEQ ID NO: 3950 - DNA, 259 bp, Glycine max
  Clone ID: 701042129H1
tgatgcttcgcttggggattctgatggcctaaaaaatcctgctttgaagaaaaggactaaatctgattcaagtactgcttctagctccaaagcgtgtcgggagaagttgaggagggataggcttaatgacaagtttgttgaattgggctccatcttggagcccggaaggcctcccaaaacagacaaggcttccattctgattgatgctgcccgaatggtgacacagctgcgggatgaagccctgaagttgaaagactca

SEQ ID NO: 3951 - DNA, 258 bp, Glycine max
  unsure (1)..(258): unsure at all n locations; Clone ID: 701042131H1
ggttcgctgaactatattggtttgcaggtgcaaccacaacatctggttatgccttcaatgcaaggccatgaatagtttagatgcttctacgcatcttatttatttcccttgaatgcttgtacgcatggaatgggtggaaacaatggtttggtgatttaatatttaggttctcgtttagaaggcatcagtgtcagaattttgttacggtactaaggtagatttttattaatacattatacatgncatatttngcngccg

SEQ ID NO: 3952 - DNA, 259 bp, Glycine max
  unsure (1)..(259): unsure at all n locations; Clone ID: 701042132H1
ggaaaaaattggaacctgcctctgttaaagcttgtatttttctgagtgggtgggttgattgagagtgctgtgcaagctttggaactttttcccaacctgctacttcaatggccactgaagaggttaacaaacctcaatcacttcctccataccctgagatgatagtgaaagcacttgaagcactgaatgagccaaatggatcgaacaagtcagcatatcanagtacatngaaaccacctngggtgagtngccaggcgca

SEQ ID NO: 3953 - DNA, 269 bp, Glycine max
  unsure (1)..(269): unsure at all n locations; Clone ID: 701042133H1
cttcaaccttgggcctttcactttctcttcctatctctctctcacgttcacattccatgccagtgttttagngcagcaccccttcatattctttcaaccagacacagagnngcnaaaccctgaagangccagagtcagagagaaacagagtaatactatagtggaatatttgttggaccatgaagcataaagatggaaaaccgattaatcagccaaataagaaccgggctgtgactttggcagtcactttaattgctctatgtggtttt

SEQ ID NO: 3954 - DNA, 265 bp, Glycine max
  unsure (1)..(265): unsure at all n locations; Clone ID: 701042134H1
cttgcggctagggttttagcgcanttctttctagatttaaggaacnatgggtaaggaaaaggttcacatcagtattgtggttattggccatgttgactctgggaagtccactaccactggccacctgatctacaagcttggaggcattgacaagcgtgttattgagagatttgagaaggaagctgctgagatgaacaagaggtctttcaagtatgcctgggtgcttgataagcttaaggctgagcgtgaaagaggaatcacaatt

SEQ ID NO: 3955 - DNA, 262 bp, Glycine max
  Clone ID: 701042136H1
ggggggtggcactgtttggccgttgatgatcagggcagagcttatgcttggggtggaaatgaatacgggcagtgtggcgaagaacccgagcgcaaggatggcactggtagacctttaaggagagatatagagatccctcagcgctgtgctcctaagcttgttgttcggcaggttgctgcaggaggaactcactcagtggtacttacacgagaagggcatgtttggacatggggtcagccatggccgcctggtgacataaaac

SEQ ID NO: 3956 - DNA, 260 bp, Glycine max
  unsure (1)..(260): unsure at all n locations; Clone ID: 701042137H1
agatatggcaatgttcacgtaccacgttgaaacggttcaatcatggttggcactgagcagacttcacatactgatccacttagtggcagtgttgtcgctgtgttactaccgcataactcacttgttactggaacctccaacagcgccatggcttctgatgaccgtagcggagttcttctctcggtgctctggttcttcaaccaagccttccggtggcggccggtgtcgcggagntccatgacggagaagctgccgaggga

SEQ ID NO: 3957 - DNA, 142 bp, Glycine max
  Clone ID: 701042138H1
aaatatttttctctctcttcagcgaattcgtttttctcttcaagcttcggctatggcgtctggatcctcgggtcgcggaaactctgcctccaaaggcttcgatttcgcttccgatgacatcctctgctcctacgacgactac

SEQ ID NO: 3958 - DNA, 260 bp, Glycine max
  Clone ID: 701042139H1
atcctaagtctttgggaatagtgctgcaatggcttcaagtcaggaggaggtgacccttttgggagctactggaagcccatttgtgtgcagggttcatattgccctcaagttgaagggagttgaatacaaatatgtcgaagaaaatttgaggaacaagagtgaactgcttctcaaatccaacccagttcacaagaaggttccagtgtttattcacaatgagaagcccatagcagagtctcttgtgattgttgaatacattg

SEQ ID NO: 3959 - DNA, 258 bp, Glycine max
  Clone ID: 701042140H1
gcaggttgagtatcccaacaatgtacatttaatacgtggaaaccatgaagctgcagatattaatgcactgtttggtttccgaattgagtgcatagagaggatggtaaggaatttcatgtactagaaattgtgtcttgtttatattgggttcatcaaccaatcatgaaaaattgttgatcagggtgagagagatggaatttggacatggcatcggataaacaagctgtttaattggcttcctctggcagctttaattga

SEQ ID NO: 3960 - DNA, 258 bp, Glycine max
  unsure (1)..(258): unsure at all n locations; Clone ID: 701042141H1
ctgagctggctatccatgagaatgcctatggcttggccagatacgctgtcatatgccaggagaatggcctggttcccattgttgagcctgagatccttgttgatggatctcatgacattcacaagtgtgctgccgtcaccgagcgtgtccttgcagcatgctacaaggctttgaatgatcaccacgtccttcttgagggtaccctattgaagccaaacatggtcncccccggatccaattctgctaaggtttcccctc

SEQ ID NO: 3961 - DNA, 255 bp, Glycine max
  unsure (1)..(255): unsure at all n locations; Clone ID: 701042142H1
gggaaatccataaagcgaggcattatatcattcctcaacgttgatgacagcagattcacccgcgccgatgaaattgaattcgccccatatttttcaaagcacaagtggggtttgttccgccgaaaaaccaagcttctttgtcgcaagtgttgcaaccatattggatatgcctacaacgatcgcacttcatcattttttcccttcgtatcaaacagaacagaaccatcaccacccacngaagctcaattcangtcc

SEQ ID NO: 3962 - DNA, 258 bp, Glycine max
  unsure (1)..(258): unsure at all n locations; Clone ID: 701042143H1
gagtgagatagagagagacgcttcgcaaatctcaatcgaatntcagaaaaatgagagaaatcatcagcattcacataggtcaggccgggatccaggtcggaaactcctgctgggaactctactgcctcgaacatngcatccagcccgacggcatgatgccttctgactccaccttcggtgtagcccacgacgccttcaacaccttcttcagcgaaaccggatctggcaagcacgtcccccgtgctgtcttcgtcgacc

SEQ ID NO: 3963 - DNA, 255 bp, Glycine max
  Clone ID: 701042144H1
gttcccaaacacgcaacctcaactttgttctgtttcctctgatgtcccagggccacatgatccccatgatggacatagcaaaaattctggcacagaacggtgttactgtcacagtggtcacaacccaccaaaacgcatcacgcttcacatcaactttttctaattcccaaatccgattactcgaagttcaattcccataccaagaagcagggttgccagaagggtgtgagatctcgacatgttacttcattggca

SEQ ID NO: 3964 - DNA, 258 bp, Glycine max
  Clone ID: 701042145H1
gaaaatcctcacccattttcttcgtagccaaacactctgaaattctcagttatgtcgtggcaagcgtatgtggatgatcacctactgtgtgaaatcgaaggtaaccacctcactcacgccgctatcatcggccaagacggaagcgtttgggctcagagcaccaacttccctcagttcaaacctgaggaaataactgccatcaataatgactttaatgagcctggatcacttgctccaactggattgtatatcggtggc

SEQ ID NO: 3965 - DNA, 257 bp, Glycine max
  unsure (1)..(257): unsure at all n locations; Clone ID: 701042146H1
gagcaggactttctcaacatgtacttcaaggacaagtacaagccaataccgaacatctacaaccttgtgctggccatgttgtggcgtcaccctgaaaatgttgaacttgataaagttcaagtggttcattactgtgctgctgggtctaagccttggaggttcactgggaaggaagagaacatggatagggaagatatcaagatgctnctgaagaagtggtgggacatatatgaagatgagacactggactacaataa

SEQ ID NO: 3966 - DNA, 91 bp, Glycine max
  unsure (1)..(91): unsure at all n locations; Clone ID: 701042147H1
atnccttaatcagttgtgtatgcttaagtncatgtatttggagtggctgaatgtatttgtatttgtcattaataaagagagttgtgttagt

SEQ ID NO: 3967 - DNA, 258 bp, Glycine max
  unsure (1)..(258): unsure at all n locations; Clone ID: 701042148H1
agaaaatcctcacccattttcttcgtagccaaacactctgaaattctcagttatgtcgtggcaagcgtatgtggatgatcacctactgtgtgaaatcgaaggtaaccacctcactcacgccgctatcatcggccaagacggaagcgtttgggctcagagcaccaacttccctcagttcaaacctgaggaaataactgccatcaataatgactttaatgagcctggatcacttgctccaactggattgtatatcggngg

SEQ ID NO: 3968 - DNA, 260 bp, Glycine max
  Clone ID: 701042150H1
aaaaataattaaggtgtttttctttaaatgggttggttgattggttcaatgaaccgatcaagaccacagcaggttcatggggatgcgaggattaagacgctttgttttttaatcttccgatgtcactcttgtttgttagtttgtctttttattctttatttcaataagtactgtgcaagtaggttagagttgggtagaagggcatgttcatggtgttaattactatgttatgtatgcatgtgagtgctgctatcgatggc

SEQ ID NO: 3969 - DNA, 263 bp, Glycine max
  unsure (1)..(263): unsure at all n locations; Clone ID: 701042152H1
tgaggcctgtgctgtgctctgaggggccatagtttgggaccctttgaancctaatctcnatccaaacccattnnngcgggaanttgncttggaaaagaaagagcgaagagganaatgcagaatcacagnnnnnnnnnnnnnnnnnnnnnnnnnnnnnnagctcttatgcagcaagctcttctcnaanaacagtntctcnnccaccctggcctccttgctcctcctcagattgaaccatatccaagtggaaatttgcctcctgg

SEQ ID NO: 3970 - DNA, 257 bp, Glycine max
  unsure (1)..(257): unsure at all n locations; Clone ID: 701042154H1
tctagaatggctttgaagcttgtaaatctagggtttcactcatcgattccgtgttctccgaggcccttgaaagatcggttcgtgcttcggtcttctaaagtggagcaaatatcgtttacggaatctgagaactcactcatcgaagcccttcttggcatccaaggacgcggacgttcttcttctcgtcagcngctcaatgctgttgagcgtgctgtncangtcctggagcggttagggggtgtacctgatccgacaaa

SEQ ID NO: 3971 - DNA, 191 bp, Glycine max
  unsure (1)..(191): unsure at all n locations; Clone ID: 701042155H1
tgattgnngaagatgccgatcagaaacatcgccatcggaaggcctgaagaggctactcaccccgacacgttgaaggcggggttggctgagttcatctccaccttgatcttcgtgttcgccggttcaggttccggcatcgcctacaacaagctcaccgacaacggcgccgccactcccgccggcctcatctt

SEQ ID NO: 3972 - DNA, 260 bp, Glycine max
  unsure (1)..(260): unsure at all n locations; Clone ID: 701042156H1
acacccctctcatggcatcttcttctggtagtttagacacctctgcaagtgcaaactnccttcaccaacttcaccttctccacacaccctttcatgggccacttctttctctgaccttcttgcttctcccacagacaacaacaaaccaccacannnnnnnnnnnnnnnnttgtctgagagaactggctctggtgtccccaaattcaagtccacaccaccaccttctntgcctctctctccccctcccatttctccttctt

SEQ ID NO: 3973 - DNA, 258 bp, Glycine max
  unsure (1)..(258): unsure at all n locations; Clone ID: 701042157H1
cccatctctcaaagctttacacgcttttaacactctctagaaaagtggtgttcttttttctttctctgaggactccgttgcttttcctttttcccattctcttcttaaatccatggacacggctcagtgggcacagggtattggagtggttaaacaaccgatggaaggttcaaagnnnnnnnnnnnnnnnnnctcctcctatgttggagagaagggcaaggcctcaaaaggatcaagctttgaactgcccaaggtgca

SEQ ID NO: 3974 - DNA, 255 bp, Glycine max
  Clone ID: 701042158H1
tctgtctctgtgtttgcggctgaggattccgaacgagcgaccttcttcgtttctcgcaaagtttaagtcctcatgggtaaggaaaagactcacatcaacattgtcgtcattggacatgtcgactctgggaagtcaactaccactggtcatttgatctacaagcttggaggtattgacaagcgtgtgattgagaggttcgagaaggaggctgctgagatgaacaagaggtcattcaagtatgcctgggtgttgaca

SEQ ID NO: 3975 - DNA, 258 bp, Glycine max
  unsure (1)..(258): unsure at all n locations; Clone ID: 701042159H1
ggagaaggagaaagagaaagaatctaagctgaagaacaagatcttcaaaatactgccaaaagcagcggctgcagcagtgagcatgacattccaaaaccctcccttcagcccaggcagggatcacaagttcaaacaccatggcggcaaagggttcttctctggccctatgattcccgttgaagccagangaaaatcaanggatggttgtgttgaaactcaagaacccacttcccccaaaatctctgcatgggacagatc

SEQ ID NO: 3976 - DNA, 254 bp, Glycine max
  Clone ID: 701042160H1
gttacaatggagttagaaatgcaatgggatgggaacccaagtattatacttgatattaaaactcttcttggtgttgcactaccggtgcaggtaaaaaatattggatttacgggtgtttttaggttgatcttcaagccgttagttgatgaatttcctggttttggagctgttagctattcattaaggcaaaagaaaaagttggattttactctaaaagtcattggtggcgacatatcagcaattccggattatat

SEQ ID NO: 3977 - DNA, 257 bp, Glycine max
  Clone ID: 701042161H1
catcaacacagtgtcacatccattaacgtgctatggtgtttagttaggaaacaccggtggtaaaattgtacgaagcagaaagaacatggctccgtctagcaaggctgagaaaaaggctgccgtggatgcagctgcatggatgttcaatgttgttacatctgttggaatcatcattgtaaacaaagctttgatggcctcttatggcttcagttttgccacaacattaacaggcatgcactttgctaccacaactttgt

SEQ ID NO: 3978 - DNA, 258 bp, Glycine max
  unsure (1)..(258): unsure at all n locations; Clone ID: 701042163H1
cgggacttgttcctgcctgctatacagaatctcttgaaagacttggatgcattggatccagcacacaaagaagcccttgaaattattatgaaggaaagatcaggaggaacttttgagtcttttagtaaggtgatgggtgctcatattggccttccatcntcagtgaccagcttctttggtgagagtggattgcttggaaagaaagaaaccacagngccaccatccagaagcaacagtgtcnccnaaagctgctgcacc

SEQ ID NO: 3979 - DNA, 263 bp, Glycine max
  unsure (1)..(263): unsure at all n locations; Clone ID: 701042165H1
cttaaagcagaaaanctcaaggncttgancgcaggcttagaagganaacgaattattatttttccttctaagcctgcttcaagtccttgagttcagttcttacaatcncgaaaggatcaagttgaatgaaaattcaaccttgttgccgatcaaactccctagntaatttattcaatctgtgtgactaggtaggtgcaattacggcttgatgagtgtccttctgctgtaaagtgccaagtaacgatattaatctccaatttttt

SEQ ID NO: 3980 - DNA, 241 bp, Glycine max
  unsure (1)..(241): unsure at all n locations; Clone ID: 701042166H1
ctcgaaccgggagcctggaacgacctgcagaaggaagaacaagggaggcctccggtttaccgcggtgggaccgcttgtaagaatggaagcaggtcaggccgactcggagtgcttgangtggctggacgagcagccacgtggaagtgttttgtttgtttccttcggaagcggtgggacactctcgagtgcacagatcaacgagctggctctcgggttggaaaaaagtgagcaacggtttctg

SEQ ID NO: 3981 - DNA, 262 bp, Glycine max
  unsure (1)..(262): unsure at all n locations; Clone ID: 701042167H1
ggtccctcgacctccgcacaaccccaactcnaaggggctgtgcctgtngccgtcgtcttccacgcttcatgtcggaacccgacatccacgcgccgccgttcctgctccagcgcccgccgctcctgcagtcggcctcgccactcttcaagcagcgatcgtggtcgccggacgccttccgcgatgaggcgtggctccggcgcaaggggaactgcaagaaccgccgcagcaagancgtcaccgatgaggacgtggacgagctcaa

SEQ ID NO: 3982 - DNA, 259 bp, Glycine max
  Clone ID: 701042169H1
tttcatgtaggcaagtctatatccaggaaaagtattgtacctcaaaatgcaaaaaccagaaggttttaagttccatagtggcatgtatatattcattcagtgcccccaaatttcgccctttgaatggcatccattttccttgacttcagggccacaagaagactacctcagtgttcacattagaacactcggagactggagctaccaaatatatgatctattccaagaggcagtgttatcacgatcacaagggtgtcca

SEQ ID NO: 3983 - DNA, 257 bp, Glycine max
  unsure (1)..(257): unsure at all n locations; Clone ID: 701042170H1
atagaaaagaaactcaagaaccgaattcaatggaagggactggatgtttcaagaccgggtgaggctgatgatagtnttcctagtttacaggcagaagttgaaaatttaacaatgaaggagcgccagttagatgaacaaataagggagatgcaaganagactgcgagatcttagtgaagatgaaaataatgacaagttgcngcngttactgaggaggatataaagaatttgccctgcttccagaatgaaaccttaata

SEQ ID NO: 3984 - DNA, 255 bp, Glycine max
  Clone ID: 701042171H1
cagcattggccttgtaaatgctggacagtatcttgaggagacatatgggggtggactatttccaattttatacatatggggtattggattattagcagcaggccaaagtagcactattacaggtacttatgctggacaattcatcatgggaggttttctaaacttaaggttaaagaagtggatgagagcattgatcacccgaagttgtgcaatatttccaaccatgatagttgctcttatattcgatacctcgga

SEQ ID NO: 3985 - DNA, 257 bp, Glycine max
  unsure (1)..(257): unsure at all n locations; Clone ID: 701042172H1
cataaacgccgcccaaaaccatttatagggttttcttttctttgccaagaaaatgagagagtgcatttcaatccacattggtcaggccggtatccaggtcggaaacncctgctgggaactctattgccttgaacacggcattcagcccgatgggcagatgccgagtgacaagaccgttggaggaggagacgacgccttcaacacattcttcagcgagaccggcgccggaaagcacgtgcctcgcgccgtcttcgtgg

SEQ ID NO: 3986 - DNA, 257 bp, Glycine max
  unsure (1)..(257): unsure at all n locations; Clone ID: 701042173H1
ctacatctcaaagtcttgggatgactacaaaagagccactcaatanatggagtaagagcagtttcactgtagaaggtatatgggagcacttaaatgttacaaaggatcaatctgattacctttggtattcaaccagagtatatgtttcagatagtgacatcttgttttgggaggaaaatgatgtccatccaaaacttnctatagatggtgtccgtggacatattgcgtgtattcatcaatggccagcttataggtat

SEQ ID NO: 3987 - DNA, 253 bp, Glycine max
  unsure (1)..(253): unsure at all n locations; Clone ID: 701042174H1
gcagttcttaccggaagggttcgtggancgaacaaaaggaagagggtttttggttcagtcttgggctccgcagcctcaggtattgggccatccatccacgggtgggttcttgacccactgcggctggaactctattctggagagcgtggtgaacggtgtgcctttcatagcctggcctctgttcgcggacagaggaccaacgcctttatgctcacgcatgacgtcaaggtggcgctgaggcccaacgttgcag

SEQ ID NO: 3988 - DNA, 254 bp, Glycine max
  unsure (1)..(254): unsure at all n locations; Clone ID: 701042176H1
ggaagcttgtgtctatgaacaatatacacttccaaaactctatgtgaagatgcagtactgtgtttcctgtgctatccactctcatgttgtgagggttcgatcccgcaccgacaggaggaagcgtgagcctccacagagattcatcaggcgcagggatgatgcaccaagacctggtcagcccggtcaaggacctcgtctgcgggcacagcagcagcacctgtnccgaccntaaaagcaatctanggantaagctt

SEQ ID NO: 3989 - DNA, 256 bp, Glycine max
  unsure (1)..(256): unsure at all n locations; Clone ID: 701042177H1
caaaacactattttattatcttcttcgtctgtnctttgcattgaagaaaatttctttgaattgaagaaaacttgaaatcgaattgtgaaacagaaaataaaccaaaggaaatttttactgattganttgcagagattggaaaaatggcgttgagtatgactcaacagatcgggaccctagctggtgcgacggtgcccggattcctcggccggagaatccnccgcggcggtgagtgccgccgcggtgtggaagtcac

SEQ ID NO: 3990 - DNA, 188 bp, Glycine max
  unsure (1)..(188): unsure at all n locations; Clone ID: 701042178H1
gacctttgtccatcttcaatgttctgttccnaaaaccataccatattctgcaaggcccaagaaaagttcctttttcccctttccccttctctnttcttcntcaaggtcaactccgtttactataaatantgaccactcttcttcaacttcaataatantcnccttngaatggattcntcttctnctcc

SEQ ID NO: 3991 - DNA, 254 bp, Glycine max
  Clone ID: 701042179H1
cccatgtctcaaactccgaatccaacgttgtctcctcctacccttgtcgaatctactacgaacactctaggggtgctgaagaatatgaaggtgttcgtgtacgagcttcctccaaagtacaacaccgattggcttgcgaacgagaggtgtagcagtcatttattcgcttcggaagttgctattcacagggcactgttaacgagcgaggttcgcacgtttgacccatacgaagctgatttctcttcgtcccattt

SEQ ID NO: 3992 - DNA, 199 bp, Glycine max
  unsure (1)..(199): unsure at all n locations; Clone ID: 701042180H1
gttgtcctttctcagcaaaaccnacgatccgaggaagaggaaggaacgatgtcttcgtcatcgggaagcacagcagcagcaacgccgattctgaaggaggaggtggacatagtgattcccacgatacgtaacctggacttcttggggatgtggaggcccttcttcgagggttatcatttgataatagtgcaggacggnc

SEQ ID NO: 3993 - DNA, 252 bp, Glycine max
  unsure (1)..(252): unsure at all n locations; Clone ID: 701042181H1
ctttattctctttcagtagancaacagcaacctctctgccttccaaacccacnctctggtcatttggttccaatgaaacaatcttcttctccggggcacttggccttagccttagacaatccacgtagaacacttcacgtgtcttgtggctccacntcaccacatgcttcccagagatcatcaattcaggggggtgaagtttttttcaggggtgtgttggaaagtatgcaatctgttacttgaacagaaatc

SEQ ID NO: 3994 - DNA, 260 bp, Glycine max
  Clone ID: 701042182H1
ccctgtttcaaaacttcaacaatcagagagggagaagttgttgcatttagaggaagtgcttcataagcgtgttgtaggccaagaccctgctgttaaggcaattgctgaggctatccaacgttcaagagcaggtctttcggatcctcatcgtccaattgccagcttcatgtttatgggacctacaggtgtaggaaagacagagctggctaaggcacttgcagcctacttgttcaacactgaagaagctcttgtacggattg

SEQ ID NO: 3995 - DNA, 259 bp, Glycine max
  Clone ID: 701042183H1
cttttacaggatcagaagccatgtttgctgatcttgggcactttacacaattatcaattcaagattgcttttacttctgtggtttatccatctttaattcttgcatatatggggcaagctgcttatctatctaaacatcataacattgcacaagattatcactttgggttttatgaatctgtaccagagaaattgagatggcctgttctcgttatagccatacttgctgcagttgtgggaagtcaagccatatcactgg

SEQ ID NO: 3996 - DNA, 259 bp, Glycine max
  unsure (1)..(259): unsure at all n locations; Clone ID: 701042184H1
ctttctctctcttctgttttccttttnctcgagaaaattgtgtnagggtttctgtgattgagcctgcaaacacttccttgagggcacaaaagattccattgtttgcttctttcagattaatttttttgtcagttcagatcttcaagaagaagaatccagagaagctatatatacatcatcgttgttctttgccaagacaaagaagaaaaatggtgagggggaaaactcagatgaagcgcatagaaaatgagacgagtag

SEQ ID NO: 3997 - DNA, 256 bp, Glycine max
  unsure (1)..(256): unsure at all n locations; Clone ID: 701042185H1
agaagtctcttactattacacaattaagaatgaagggctctctctttcacctcctgtttgtgattctttttggactctctcattttgtatgcctcaaagcagtcccaattacaagaactgaaagccttatgcaagatcccaaagttattcatcatgcactggataatatccacaaccacaagattatcactgagataanggggcagcaggaggagccatttttgctgagaggatggattggaactccatgactacc

SEQ ID NO: 3998 - DNA, 255 bp, Glycine max
  Clone ID: 701042186H1
gatttctgcaatctacaaaaattcactatgggagtcacaacctttacacaggaatactcctcctctgttgccccatcacgcatgttcaaggccttgattgtagactccagaaatttgcttccaaagctcttacctcagtttgtaaaagatgtgaatgtgatccaaggtgatggtgaagctggaagcattgaacaagttaacttcaatgaagctagccccttcaaatatctgaaacacaggttgatgtgcttgaca

SEQ ID NO: 3999 - DNA, 95 bp, Glycine max
  unsure (1)..(95): unsure at all n locations; Clone ID: 701042187H1
agcccttctaaaacgccttacttctgtatctttctttcatgcatgccaaaaaaaaccattcaacacaangtgaanccnaacnggtttcccaagat

SEQ ID NO: 4000 - DNA, 253 bp, Glycine max
  Clone ID: 701042188H1
attttttcacctctccccaaaaccctcgcgccgcttttttttctctttcattatttttttaccattttttttatggacctcttcaccggcgaccacttccccgtccccgaccacgtcgctccgttccccgattccggcgacctcctcttcgccgccgacctcctctcccaccgccacaacccccagaagttccgccccatcaggtcgtccccaccgcccccttgccaacccttctctccccctctctcgcacg

SEQ ID NO: 4001 - DNA, 251 bp, Glycine max
  unsure (1)..(251): unsure at all n locations; Clone ID: 701042189H1
ccgaagataacaagaccgaagctcagcctcgagctaaacgggccaaaacctccaagcctcaatccgaacctgagtacttcgaagataancgcaacttggaagatttgtggaaggaaacattccccgttggaactgagtgggaccaattggatactgtctatcaatacaagtgggatttctcgaatctagaaaatgcgtttgaagaggatggcgtgttgtatgggaaaaaggtttatctctttggttgcctg

SEQ ID NO: 4002 - DNA, 192 bp, Glycine max
  Clone ID: 701042190H1
gcgaatttacaaaactagccaggaacaggccctgtctttccgatattcaccatctctttctctctaatccaaaaaaaaatctgttgtgaacaaacacacattattgtttgttttcatcccacggaaaaatcgatcaggcaaaacaaacaaaggtgaaactgaataggtgcgtgtttgtgttgatgggctaag

SEQ ID NO: 4003 - DNA, 255 bp, Glycine max
  Clone ID: 701042191H1
aacaacagagtttatttctttttggttccttggttcacgctgggctgcaaggcttgtgtttggtgggagcagcttctcaccgtgacgctgctctacgaagacgacgacaacctcgtgtgacaacatcaaataatgggaaaaggaaacatggaactcgagacaaacaaggtctatgactacgaggatgcacgaggggacgttgaagtcccagataccgctcatcagataagcactgattcatggtttcaagtggct

SEQ ID NO: 4004 - DNA, 252 bp, Glycine max
  unsure (1)..(252): unsure at all n locations; Clone ID: 701042192H1
tcatcagccatgtccaacaatctaaggtctccgagttactcttccctaacccgttcctacatggcaacaacaggctcagaaccttggtccttttttctcatcttcgttttcctgtgacctttttcttcctttcaaacacacatacgaaagtcctccttttttcttgnnnnnnnnnnnnnnnnnnnnnnnnnnggtggcagaaaaaaatgggtattggagagaagantccaagcaagagtttcaatctgcacc

SEQ ID NO: 4005 - DNA, 254 bp, Glycine max
  unsure (1)..(254): unsure at all n locations; Clone ID: 701042193H1
cttggaataagggtcattaggaagggtatccctccacccccagcnaagaagggccaaagtggagtcctatttgtatgcaaccacaggacagttttagaccctgtggttacagctgttgcattaggaaggaaaattagctgtgtcacatatagcataagcaaattcactgaaataatttcaccaatcaaagctgtggcactctctagggagagggacaaagatgctgccaacatcaagangttgcttgaggaagg

SEQ ID NO: 4006 - DNA, 245 bp, Glycine max
  Clone ID: 701042194H1
ttcagttctttctggataagcttgcatcatctcttggtccacgcttttatactaacattttcaaatgcaagcaaatatcagaaactggagctcaacagatgctattagatacccaagctgtaaagacgattcttcttgaagttccttcccttggtagacagacatcaggtgcgggctagttattccaagtttgtaagccgcgagatgagcaaagccgaggcccttttaaaggttatactttctcc

SEQ ID NO: 4007 - DNA, 286 bp, Glycine max
  Clone ID: 701042201H1
caaacttcaacttgtaatcaagggagagagaaaatttcaagcacaaaaaatggcggagaagaaagtggtgatcctaggaggtggtgttgccggtgccaaccttgcaaaaactatacaacatcaagccaacgtcacccttattgatccgaaggaatattttgagattccatgggcaagtttgaggggattggttgagccaacttttgctgaaaggatagtaatcaaccatagagagtacttcaaaaagggtaaccttgttgtatccagtgctgtcaacataactgaa

SEQ ID NO: 4008 - DNA, 139 bp, Glycine max
  unsure (1)..(139): unsure at all n locations; Clone ID: 701042202H1
ccncnccaaagccttcctagnncnanaaanaaaagaagagcantttnccctcantnagagtncgncgaagcaaacaatggccgatcaacttaccgttgaacagntctccgagttcaaggaagccttcagcttgttcgac

SEQ ID NO: 4009 - DNA, 279 bp, Glycine max
  Clone ID: 701042203H1
aaggaataaactattacaacaatcttatcaatgagctagtggctaatggtatacaaccacttgtgactctatttccattgggatcttccccaagccttagaagatgagtatggcggattcttaagtccacgcatagtgaaagattttcgggactatgcggaactttgcttcaaggaatttggtgatagggtgaagcattgggttactttgaatgagccatggagttacagccaaaatggctatgcaaatggacgaatggcaccaggacgttgttctgct

SEQ ID NO: 4010 - DNA, 279 bp, Glycine max
  Clone ID: 701042204H1
ctctcacatttcattacttctaccaagctactacatttttaacttcctctttctacatttcattcaaaacaatcatggcttctcttcattccattacattttcaacaaaaactgtcctttatgtatttgtattggcctcttccatcgcagcctctgctggcaacttctaccaggattttgacgtaacttggggagatggtcgtgccaagatactcaacaacggcgatcttctcactctttcccttgacaaagcctctggctcggggtttcagtccaaaa

SEQ ID NO: 4011 - DNA, 261 bp, Glycine max
  unsure (1)..(261): unsure at all n locations; Clone ID: 701042205H1
gttcacaccgccgtatagttcacgaccgaaccgcactnnttatctctttctccgccncaaactatccttctccggcggcgccaccgtacaaccctcgatttaagcaaaggagcaacagaaggaggtgcttggttgcaaatggcggccaccgcaagcaacaannnnnnnnnnnnnnnnnnnnnnnnnnnnntgatgagcctaatcaacaagcgcctccgcgccctccgcaagaagctgaaccgcatccttcccatggaagag

SEQ ID NO: 4012 - DNA, 283 bp, Glycine max
  unsure (1)..(283): unsure at all n locations; Clone ID: 701042206H1
ctctttcaccagaaagtgacactgagagaagaaggaaaaactaaccaacaccacagcccctaatttcctttttctcacaatggcggctnaccgtcgacaaccgtcaatacggcacccacataaacgccgtcgttcgcgcttgcggcccagacttcaatacccctctcccgtcggatttcgatctggactcatccagcgacgacgaagaccaaaacgacgacgcttcgtatctcaaggagttgatacaaaaagcgaacgcggnaaaccgaggcgtcgctgttgg

SEQ ID NO: 4013 - DNA, 279 bp, Glycine max
  Clone ID: 701042208H1
atccattagaagaaagaaaattaagcaaataacaagaaagaaacaatgaacgacttgttctccggttccttctcccgcttccgcagcgaccagtcctccccggaccgccaccacgacatcgagatgggcgccaccgcctccggcgcggtcgcggcggcgaggtgaaccttgacaagttcttcgaggacgtggaaggcgtgaaggaggaactaaaggagttggaaggtttggctcagagtctaaggagcagccacgagcagagcaagacgctgcacaacg

SEQ ID NO: 4014 - DNA, 277 bp, Glycine max
  unsure (1)..(277): unsure at all n locations; Clone ID: 701042209H1
aagcattcaacttttggcatttttaggttatcttgaatccgattatcaatggagaccccatcgtccaccagaagagtaatancaagatcacagactttatctgcttccaatgatgctctcatcacagttttcagtgagtgattttctctcttacaatttcaatttttctttctccaaactcacccaaaacaacattactcgtttgtcttttgcaggaaatattgaagattccgaaaagaacacatcaaagtcaaaaacaagggtgcaacaacaacaa

SEQ ID NO: 4015 - DNA, 96 bp, Glycine max
  Clone ID: 701042210H1
caacacacaaaaaaaactcccaccgtatattgttgcaactcctagctagggtttcgcacagtgccgattcgaagaagaacaacgacgatgggcgat

SEQ ID NO: 4016 - DNA, 277 bp, Glycine max
  Clone ID: 701042211H1
aaaaaaataaaataaaaattggaaaaattccaattccgctctcgattttcgatttcggagtttgatagcaacgttggaaggaaaggtgagagcaaaatcgttggaagaatctggtttttgggtcgtggttgttgttttcgccatcaaaacaatgtcttcgccggacattgtctcgatattggagaactcgaaggagttcgatcgggtgaggaaagaacaagaggatattctgtcggagatcaacaaacttcacaagaagcttcaagcaactcctgaa

SEQ ID NO: 4017 - DNA, 276 bp, Glycine max
  unsure (1)..(276): unsure at all n locations; Clone ID: 701042212H1
gaaaaaggggagtttcttattctttctagacgcttccattgatcggcgatttcttagacatggcggagcattcacgaacacgaggaagtgaagggtgagtccttgttggagaagatttctgggaagatccacgaccacgattcgtcatcttcgtcggattccgacaacgagaaaaccagngcttctnantcnttnaanncaaaggtttcnaggnttcgggacaganaagancantcaccantncttggtggcggaaaaccggcggngnttttntct

SEQ ID NO: 4018 - DNA, 276 bp, Glycine max
  Clone ID: 701042213H1
ctcttattcatccttctcttctgaaaaatccagatctctttctgcccttttctccgtcacgcttttcgtgaccggatctgtatggatttgatccagatctacacgccgatggtggttttggccgggtctttcatagatctggtgcgtagaggctcagatctacggtaccgaggtacaacagagaatcgatgacaagaacgcagatccgacggtagatccagccgattccgcttgttcgatcgctacagacccctgtatcggatcattaagcagcgt

SEQ ID NO: 4019 - DNA, 277 bp, Glycine max
  Clone ID: 701042214H1
agagagaggtatcacagtgaaacgaagaagccctaactacgcacgcactcattcttgagaaagctcaatattcattcgtccatggcactctcttctcgtctcttttccaaatccaaattgatctatggctgtcaaatacttctgcaaaaggagcatgctattccagttcgtcactttgctaaagagtctgcccctcctgcccttaagggagatcagatgctgaagaacatttttgtggaggtgaagaacaaatttgagactgccataggaatattaa

SEQ ID NO: 4020 - DNA, 280 bp, Glycine max
  unsure (1)..(280): unsure at all n locations; Clone ID: 701042215H1
gcctccgccaaagcaaataaaatggatactgaaatggttganagcattgatgtcacagatgatgcaaggngttttagctgggcagtggacagcgccataaggagtgagactgggtccatttttggagaatctcgtgtccgtagctttgcttcgttagtggacagtgccataaggagtagtagtgccagtgaagcagatttgggatcatccccttccccagtgcatgcttttgcctccgctgtggatatcaggactgttgctgcacgattattcaccgtct

SEQ ID NO: 4021 - DNA, 285 bp, Glycine max
  Clone ID: 701042216H1
tggtgagtgaaaatggcggtacccttgctctccaagaggatcgtgaagaagcgcgtcaagaagtttatacgcccccagagtgatcgcaagatctccgtcaagccaagctggcgcagacccaagggtattgattctcgtgtcaggagaaagttcaaaggatgcactttgatgcccaacattggttatggctcagacaagaaaacccgccattatctaccaaatggtttcaagaaatttgtcgtgcacaatgtgaaagacctggaacttctcatgatgcataacagg

SEQ ID NO: 4022 - DNA, 280 bp, Glycine max
  Clone ID: 701042217H1
tcaaatttaataattggcattgacttcaccaagagcaatgagtggacaggcaagcactccttcaaccacaaaagccttcattttactggaaacactcctaatccgtatgagcaagcaatctctataattggccgtactctctcttcatttgatgaagacaatctgataccatgttttggatttggtgatgcatctacacatgatcagaatgtgttcagcttttatcctgatgagtgctattgtcatggttttgagcaagtacttgcacgctaccgagaga

SEQ ID NO: 4023 - DNA, 277 bp, Glycine max
  unsure (1)..(277): unsure at all n locations; Clone ID: 701042218H1
gnactgtgatccatcgtcaatctttcagtaacaaacatgagcggagtgttcttgttgctgtggctgctgctatcggcaacttgctgcaaggatgggataatgccaccattgcaggtcatatttttattcggttagccaattaagataacattcaaccaagtctaattggctttctatgctatgcaggatctattttgtacataaagagggagtttaatttacaaagtgaacccacaatagaaggtctaattgtggccatgtcacttattggagccac

SEQ ID NO: 4024 - DNA, 279 bp, Glycine max
  unsure (1)..(279): unsure at all n locations; Clone ID: 701042219H1
gtccgtttcacaccttccttggataccttgagtccactaaagtgattgacactttccaaaaccaagccaacaacactgaagaaggaattaccatctttgttcctaaggacagtgncnacaatgtntanaaagaaaactaccctatccaacctcacctctaaccagctaaagcaagtgatcctcttccatgccttgccacatttctattctctggctgagttcacaagccttagccaaaccagctctactcccacattcgccggaggagattacatttga

SEQ ID NO: 4025 - DNA, 277 bp, Glycine max
  unsure (1)..(277): unsure at all n locations; Clone ID: 701042220H1
aacttattgaagaattgagtactccagccccgggttcaaaggacctttatttttncttcaaagtactctaggtcctttattacccaatgcatggcttgcttatggaaacaacattggtcttactggcgcaataatgaatacaccgccctaagatttctctttacaattgctgttgccttgttgtttgggagcatatattggaaccttggctccaaaatcaaaaagcaacaagatcttttcaatgccatgggatccatgtatgctgctgttcttcttc

SEQ ID NO: 4026 - DNA, 275 bp, Glycine max
  Clone ID: 701042221H1
gctgaacaaacctatgagtatactcctcctgaagctttgctgaatgctacatggtatcaagggccaacaagctcaactttgaaatatgacatgtggagcattggtgttgtgatgttagagttggtcttagggacaccaaatgtctccagataaatgctttaacacgtgctcttttagacagacaactagaaggttggaatgagggtgtgaaggagctggcatacaaacttagatcattcatggaattgtgcattttaatccctggaatttccagg

SEQ ID NO: 4027 - DNA, 278 bp, Glycine max
  unsure (1)..(278): unsure at all n locations; Clone ID: 701042222H1
ctttcacaacataacatattgcctctctaattattctagtgttgctattgtgttgtcactttctctttgangccatttttctagctatttaagaaaatggcaattgagcagcacaaggatgtggagagtggatatttgcaacagcccttcattcaaccagaggaggctgctgcttgtgaagaagttggatcagataagagtgtggaaaatggatccattggaatggtttttcttagcacacttgttgctgtttgtggttctttcacatttggaacttg

SEQ ID NO: 4028 - DNA, 275 bp, Glycine max
  Clone ID: 701042223H1
tgctgctgatgagtcaacagggacaattggcaagcgtttggccagcatcagtgtagagaatgttgaatccaacaggcgtgctcttagggagctgcttttcaccgctcccggtgctcttaaatatctcagtggtgtcatcctctttgaggaaactctctaccagagcacagctgcaggcaagccctttgtggaagtcttgaaggaggctggtgttcttcctggcatcaaggttgacaagggcacagttgagcttgctggcactaatggagaaacca

SEQ ID NO: 4029 - DNA, 274 bp, Glycine max
  Clone ID: 701042224H1
gagacaagttggaagcttcaggtgggccagtttcatctcgttactcttttgctggccctcatttcaccgccaataacttaatttgcattttttgaattccttgacttgtgttccttagtatctttcaaattctggtgactgaaaaaaaaactgtgagaaatcctacatacttgagcccttctggatttggaaaatcatttctgcctggtgagatttcaatatggtcaatatgatgattggtagctctggaactttagatgagaaggctagtttg

SEQ ID NO: 4030 - DNA, 275 bp, Glycine max
  Clone ID: 701042225H1
ctcatctgcttcccctagcaaccttcttcttacttctctccgcttcttatctccagattgctggggcggaagcacaaccgttgactagtctcaaacttaactctcatattcttcaggagtctactgctaaagagattaatgaaaatcccgaggcaggatgggaggctgctataaatcctcgtttctccaattatacagttgaacaatttaagcgccttcttggagtcaaaccaatgcctaagaaggaacttagaagtacacctgctatatctcac

SEQ ID NO: 4031 - DNA, 275 bp, Glycine max
  unsure (1)..(275): unsure at all n locations; Clone ID: 701042226H1
aaccactttgcttcagctatggagtttcgtnncccttccattggttttctctctcaatctgatcctgatgacagctccatgctgccatacctccagaagtttactgggaaaggatgcttccaaataccccaatgcccaaagcaatcatagactttctaaaccttgatcaacttcctctttggtatggtgctaaggaaacccaatctacagatcaaatattcctgtatgatgctaagaaaacccaatcaacagatcaagttcctcctatcttttat

SEQ ID NO: 4032 - DNA, 274 bp, Glycine max
  Clone ID: 701042227H1
gtgaagaaaccagagacaatcacatgaaccctaacctaaacccctgagaaattattgaaattgatgcatggcggaactgaacactctggtggtgcgaaagccatgttttggccttccaaccggttgcactcaatccctctctgcctacatttatctcaaattcgcccaaattcccttccaattggacttccacctcaacaaccctcattctgatcaaattccttactttgaggttgatgactctgtggcttataataatgagaaggaggggatc

SEQ ID NO: 4033 - DNA, 276 bp, Glycine max
  unsure (1)..(276): unsure at all n locations; Clone ID: 701042228H1
ctctctttgtgtcgcctggtcttggcatctccgcagcaccacccaccctggaccaggtcttcaacagagagaaagagaaggnnnnnnnnnnnnnnnnnnnnnnnnnnnngttaaactaacattttttattagtaagaagacatggctcaacccagttccaacggggatctgaataataaccagcagggtcaggttnnnnnnnnnnnnnnnnnntgggcggcggcgcagccattccagtatcagcagcaatggatggccatgcagtacccggcctcc

SEQ ID NO: 4034 - DNA, 276 bp, Glycine max
  unsure (1)..(276): unsure at all n locations; Clone ID: 701042229H1
tcgcttctcgaaccctacttcttccgcggtgattgcatttncaattcctgtaatggcgattgatcaatatttttaaacatgaagccagtgaagaaaaaggagagcgggccanaatggcttcttttgttggagccatggctattgctgacttggtgaagacaaccttggggccaaagggaatggataaaattttgcagtcaacaggtagaggacgtgaagttactgtcactaatgatggtgctacaatcttgaagtccctccatattgataacccag

SEQ ID NO: 4035 - DNA, 143 bp, Glycine max
  Clone ID: 701042230H1
aacctctaacctacctctttttcttctctctcaacaacttcaccttcttcctcctcgatcatgtctcacttcaagggcaagtaccatgatgagcttatcgccaatgctgcgtacattggcactcctggaaagggtattcttgc

SEQ ID NO: 4036 - DNA, 285 bp, Glycine max
  unsure (1)..(285): unsure at all n locations; Clone ID: 701042231H1
gaagcaccttttctgagggagagagtcttccacttttctgcagagtnccatagcaaaactgaaagcaaaagccaacttcagagtccaataccacaaaaatctcttcattccagtcattatcagcacttgtctggagatccataactctcgcgcgctccgtgccgtacgagcaaaaaacaagttgcaagatggctataaacaatagatcaagaatggaaccgcctatgccagaagaatactttggaaacttagttcaagtagtgagtgcagaaacgacaacaaggg

SEQ ID NO: 4037 - DNA, 285 bp, Glycine max
  unsure (1)..(285): unsure at all n locations; Clone ID: 701042232H1
aacgatatcagtcttccattcatcaacaaccactctctctcccctctctgcagcaaaaccaattctnccggcgacatctccggtcaggttccggcagcctctccggcgactcggcatggcaactcaatgaatgcggaatcaccgccggggctcctcatgtcggtttcctgcctctccgactacgacctcctctgcggcgaggactcctccggaatcctctccggagagtcgccggagtgctccttctccgacatcgactcctcacctcctccgccgtcgccgaga

SEQ ID NO: 4038 - DNA, 283 bp, Glycine max
  Clone ID: 701042233H1
cactgttccaatacggaatctaagggcaaagcaaaccaaacatcttgaatcatgggttcaacaggtgagactcagattaccccaacccacgtatctgatgaagaagcaaaccttttcgccatgcaactagccagtgcttctgtccttccaatgatcctcaaatcagcacttgagcttgatctgttggaaatcatagccaaggctggccctggtgttcatctttcccccactgacatttcttctcagctcccaacacagaaccctgatgcacccgttatgttgg

SEQ ID NO: 4039 - DNA, 223 bp, Glycine max
  Clone ID: 701042234H1
tgaagccatcgatgctcagatctctccactccgccgccacccgcggcgcctctcatctcttccgccgtgggtacgcctccgagccggtgccggagcgcaaggtagccgttctcggcgccgcggcgggatcgggcagcctctctcccttctcatgaagctcaatcccctcgtttcgagcctctccctttacgatatcgccggaactcccggcgtcgcgccgata

SEQ ID NO: 4040 - DNA, 278 bp, Glycine max
  Clone ID: 701042235H1
tgggtatagtagatgaagggaaagggacagcagccagcttcgggactcacggaaccttctaggctatatataaaaaaaaaaatattgcacgctcctccgggctcctggcatttcaaattcaaggcctctttccaatcttcaaagcagctactgcggcagctccattttccaattgaagttagcagagcagccatctgtgtgtgaaggggacatgatggatgattcccaaaagcatagaatcctgatggtctcagattttttctatcccaactttggag

SEQ ID NO: 4041 - DNA, 276 bp, Glycine max
  Clone ID: 701042236H1
ggggggtggcactgtttggccgttgatgatcagggcagagcttatgcttggggtggaaatgaatacgggcagtgtggcgaagaacccgagcgcaaggatggcactggtagacctttaaggagagatatagagatccctcagcgctgtgctcctaagcttgttgttcggcaggttgctgcaggaggaactcactcagtggtacttacacgagaagggcatgtttggacatggggtcagccatggccgcctggtgcacataaaacagatttcagtccc

SEQ ID NO: 4042 - DNA, 277 bp, Glycine max
  unsure (1)..(277): unsure at all n locations; Clone ID: 701042238H1
cctgactctgtgttagtgttgtgtttgttgtgtgttgagaagcagagatgcaaggnagcgcggccgacggagaagccttggatttcgagcctgaggacgatgacttgatggacgaggacggcgcccccgacgccgacgccgacgcttctccacctcaacctaagctcaaatccgccatcacccccgccgccacttcctctctctctgccccgaagaagaccaagggccgcggattccgccaggacactgacgccaaccgcaacactcgcctctccgg

SEQ ID NO: 4043 - DNA, 275 bp, Glycine max
  Clone ID: 701042239H1
aaaggacactacttatgtctcaaaagagcttggagaagcgttttggtcagtctccagtttttattgctgccactttcatggagcagggtggcattccaccttcaacgaaccctgcaactcttcttaaggaagcaatccatgttatcagctgtggttacgaagacaagacagaatggggcaaagagattggatggatctatggctctgtgacagaagatatcttgactgggttcaagatgcatgctcgtggttggatttccatctattgcatgcca

SEQ ID NO: 4044 - DNA, 275 bp, Glycine max
  Clone ID: 701042240H1
gaggttttgacgcaacacactttcactgagaaaggatctctatctaccaaggagcagaataaaacccttctctctggtaagtgaataagagaatggcttcagatcggaaacttcacactttcgaggaggtggcaaagcacgaccagaccaaggattgctggctcatcatttctggcaaggtgtatgatgtcacccctttcatggaggatcatcccggagtgatgaggttttgttatctgcaacagggaaagatgcaaccaatgatttgaagatgt

SEQ ID NO: 4045 - DNA, 272 bp, Glycine max
  unsure (1)..(272): unsure at all n locations; Clone ID: 701042241H1
ctttgcctccccttctcacttcgcttattcttctctcgtgtantatgtctcttctttcttgatgctatgttgatgactggataaaatctgagacagaagggtagtttctagaaacttgacagagctaattaagagaatcttggtatttataggaagtagattactttattaactgggtaataagtcgttgtttggaggctatagatggcgatgcaaaccgtttatctgaaagaacatgaaggacttgtccacagttctgttgggcagttgtc

SEQ ID NO: 4046 - DNA, 273 bp, Glycine max
  Clone ID: 701042242H1
ccacacaccacacacatagtagctattatactctctagagtaattgcggaatctgctagaattttctaataatggcgaaagacgttgagcaggtcacagagcaaggtgaatactccgcgaaggactaccatgaccctcctccggcaccgttgatcgacccagatgagctcacaaagtggtccttgtacagagccgccatagctgagttcatagcaacactcctttttctttacatcaccgtgttgaccattattggctacaagagacagagtg

SEQ ID NO: 4047 - DNA, 273 bp, Glycine max
  Clone ID: 701042243H1
caccaatacaacacgcctaagccaaacccaaatccaccgctctttattttcgtcttttctacccttcccggatcccaatccctaatctttctaccactctcactccaaaaatctctaattttttcatctgggaagatcggttgacgaatcgaggatccgatcgcttgcgaggaactagggtttcaatcgatcgcatcacacacaaacaatcatgtttagccggatgttcggtaaacctaaacaggaaaccaatgctgttgccactttggacaa

SEQ ID NO: 4048 - DNA, 273 bp, Glycine max
  Clone ID: 701042244H1
aaaaaaaagagcagtgtaagaaattagaaagggcgaaaggcgcagtttatctgaaagcaaaaaccctacctagggtcaaccgtgacgccacaatcgccttcggcatctttgcaacgggatcaggtgctcctcgtccttcacgatggcgggaactgaagccaaaaaaactgaatccaaaaaacctgccgctaagcaatccggtgcgaagaagaaggaggtgaagaaggaaactggcttaggtctcacgcatcggaaggcggagaacttcggaga

SEQ ID NO: 4049 - DNA, 273 bp, Glycine max
  unsure (1)..(273): unsure at all n locations; Clone ID: 701042245H1
ctcgagcgnctttctttccccaatttgtgagtgttactgttgaatcgattggattggcattaggttgatctgaaatacgcaattgacatggcgagcgcgatggtagaggacgcgaacttcgaagatgaccaactagccaatatgaccaccgacgacatcgtcagagcttctcgtcttctcgacaacgagattcgcatcctcaaggaagagttgcagaggaccaatttggaattggaatcgtacaaggacaagatcaaggagaatcaggagaag

SEQ ID NO: 4050 - DNA, 273 bp, Glycine max
  Clone ID: 701042246H1
gcaagctagctaggttgaaaatagtttggttttgtagtaagtgaggtgaggtgccaaaatggtgaagataactcttggtactttcgatgactcttttggtgttgcctctcttaaggcttatttggcagagttccatgcaactctgattttcgtgttcgctggtgttggttcagccatcgcttacaacgagcttacaaaagatgcagccttggatccaacggggctggtggcagtagctgtggcccatgcatttgcactgtttgtaggtgtctc

SEQ ID NO: 4051 - DNA, 278 bp, Glycine max
  Clone ID: 701042247H1
atcagatcaaattgcctggacttcacccatcaatgtccatggacgatttggtaagccacattggacattgcatttcagaacagatgggatccgacaatccgagtttggctggtgacagccagtatagtagatctattctggaagaattttctcagtacttgttcaatgactctcaacatgcaactacctctgatgaacagcgtgtgatgtcaagggtgaactcactttactgccttctgcagaaggatccttcttcagcagaagacataaacacaatg

SEQ ID NO: 4052 - DNA, 281 bp, Glycine max
  unsure (1)..(281): unsure at all n locations; Clone ID: 701042248H1
gcagagtctcttgcacgctttcaaggagggtcaccttacatatatcctttgtatggtttaggagagcttccccaggcatttgcacggcttagtgctgtttatggtgggacatatatgttgaataagcctgagtgcaaggtagaatttgatgaggaaggaaaggttgttggtgtcacatctgaaggggaaactgcaaagtgcaaaanagttgtttgtgatccatcatatttgcccggcaaggtgaggaaggttggtagggttgcaagagcaatagccataat

SEQ ID NO: 4053 - DNA, 278 bp, Glycine max
  unsure (1)..(278): unsure at all n locations; Clone ID: 701042249H1
tggatccgcagatctaatgatttcacacactttcctcacncacggatcattnctcttcttcatctgnggcaccccaatagcttcttctaatcgacagtccaattttgttggtttgtggtggatcatcttcgtcgttgtggtgactagtgaggagtgcaggactatacctatctatatagtgtatgaaaattcaggggggtgaagtcgtttttggagtagttgataaatgttgaaatccttgacggttgtttggtgaaatgagggatgttatcggggtt

SEQ ID NO: 4054 - DNA, 276 bp, Glycine max
  Clone ID: 701042250H1
gctcgtgcctctagggttatcatatctccatttccatttcctctctctcagtttccaagaatcttaagctatgggaaagtcttacccaaccgtgagcgctgattaccagaaggccgttgagaaggcgaagaagaagctcagaggcttcatcgctgagaagagatgcgctcctctaatgctccgtttggcatggcactctgctggaacttacgacgtgagctcgaagaccggtggtcccttcggaaccataaagcacccctccgaactcgctcacgg

SEQ ID NO: 4055 - DNA, 226 bp, Glycine max
  unsure (1)..(226): unsure at all n locations; Clone ID: 701042251H1
cgccgcacgccgaaacaatggccggaaaaggagagggtcctgctatcggaatcgatctcggaaccacctactcttgtgtcggtgtgtggcaacatgaccganttgaaatcatcgccaacgaccaagggaacagaacgacgccgtcttacgtcggcttcactgataccgagcgtctcatcggtgatgcggctaagaaccaagtcgccatgaaccccatcaacaccgt

SEQ ID NO: 4056 - DNA, 276 bp, Glycine max
  unsure (1)..(276): unsure at all n locations; Clone ID: 701042252H1
tcgaaattngcgctctgctacgaatccatcttcttctccaacttccatttcaccgattcaaattcaattcaatgggtgccaatccacagtcgcgaagatctgttggaatcttccgattcagagcaagaggagcatgaaaccttcgaagacgccaccgaaggaagcgccgaacggaaaccgtcaacgccgtcatccctcgatgacgtggaggccaanttnaagccttgaacncnaatattcttcaanttcaaccccggcggnaananggcgnnaagt

SEQ ID NO: 4057 - DNA, 273 bp, Glycine max
  Clone ID: 701042253H1
tgtagacaagatggaaggaactgtggaaacgtctctcgaatttggcattgcattcctcagattttaccaaccttgcacatttcagcaaatttttatcatgggttctgttgaatcgagatagctccatttccctgcatagtctagatttgaggcgtaaaggctgtatagatcatgaactcctggacatgatcatgggatatgctgtgtcacatgatgtccagcagttggcaattgaagttaatttaaatgctaaatttggttttaagttgcagc

SEQ ID NO: 4058 - DNA, 273 bp, Glycine max
  unsure (1)..(273): unsure at all n locations; Clone ID: 701042255H1
caaaacgtttatagatcataactactacgtattggaaganagctttggtttcagttttttgtcatcactctcagctggtcggtgcttatagatccagcgccagcagattcaatttgacactggaagcaacttttcatttcaaagattaagtgaaaacatggctgtccttgctgcttccattgtgagcaaatctggcaaagttctagtttctagacagtttgtggacatgtctcgtatcagaattgagggacttctagcagcatttcccaagtt

SEQ ID NO: 4059 - DNA, 274 bp, Glycine max
  Clone ID: 701042256H1
gttttcgctcattctagaaacacccataagtcggcattacaagcaccatatttcggaagctggaagctcacacatttttttctgcgtccgagaatcgcatttttctagttcctgcgcatccaaacgagtccttaatatcgaactttcctgaagatggtgttgatagagcatgaagagagcaagcagagaaacgcgaacccctccaacgccgccaacgacgattccgacggcttcgaaaccgccagcgacaccgatctggccggtgaaggcgacg

SEQ ID NO: 4060 - DNA, 271 bp, Glycine max
  Clone ID: 701042257H1
tgcaaattctatgttgtttgatttgcgtgagtgaattgggaagatgctgtgtctgggtcgattcggcggggtctcttacggttggatttggaatcggaggagggacaacaccattaacaggcccagatggcgtttgatggcccaggaatcaccctctctcgactcagacaaaaccgccactgctggattctgcatcattgaaggccccgaaactgtacaggattttgccaagatggagcttcaagaaattcaggacaacattcgaagtcgg

SEQ ID NO: 4061 - DNA, 274 bp, Glycine max
  Clone ID: 701042258H1
accaccctattactacaaatcacctcccacccccatcaccttctccaccacctccttactactacaagagtcctcctccaccatctcccgtttctcatcctccctactactacaaatctcctccacccccaacgtcgtctcccccacctccttatcactacgtgagccctccaccaccaaccaagtctccaccaccaccagtttacatttatgcttcccctccaccacccatctacaagtaagcttggaattaagaagcagcaacaataataag

SEQ ID NO: 4062 - DNA, 270 bp, Glycine max
  Clone ID: 701042259H1
gccacatgaaatacaacagatctagcagggatatatctacaattgtccaatgagctggccaaagtacaattaacttgtgttagagactaataagcgaatcatcagataacgacaaaaataactaaaaaaattggtattgatggtgggagggggtaaaataaagtgatgattggcatcttccatgagcaaatccagctccccagaagcatgtggttggttggttggcattcattgaatattggctcgcatgaggcattttctgttatggag

SEQ ID NO: 4063 - DNA, 271 bp, Glycine max
  unsure (1)..(271): unsure at all n locations; Clone ID: 701042260H1
ctttgataatctcctatcctttggttactaccgtaaaacctnnccccaatttgaatccatcctacacaacaaagtcanngaatggatccagaaggactacactttagcagctagtctcatgaggctccacttccatgattgctctgtcaggggatgtgatgggtccattctgttgaagcatgatggaagtgagaggacagcacaagctagcaagacactgagagggtttgaagtggtggatgatataaaggcagagttagagaaacaatgc

SEQ ID NO: 4064 - DNA, 273 bp, Glycine max
  Clone ID: 701042261H1
gttcttcccaactcctcagaagttgaatgtagtttggtgatacggagagaggttgccctgtcctgtcggtggctctgatctatgtatgacatttccacgatgctatatgcttcgcttcgccatttcatcactagtgtcttcttgtcttggaagttgctatggaatctaggggttcaacaagctaaataaaagtaaggtgataaagcatggagtttttgaaaatcaagaagttcagaaaatctcagaaagcagatggagaaaaggatttggcag

SEQ ID NO: 4065 - DNA, 276 bp, Glycine max
  Clone ID: 701042262H1
cgatgatgaataagaacacagacatcatcatgagttattcttattcttattcccctgccactccattctcgtcatcatcttcacattccatggatcccataatttggagcaaattgccacccgaaatcctcgaatacatactctcttttcttcctctcaaaaccttcttaaacctaagatccactcgcaaaggtttctggtctctcatattctctcctcctttcatttcgaaacactgttctcccactgcttcttcacccttctcttcattcctct

SEQ ID NO: 4066 - DNA, 277 bp, Glycine max
  Clone ID: 701042263H1
cattcgttgacttgggctctctcttctcttctcttctctctcaaaatcgtttctctgcattttcagctaaacctgagcacacccaactgagattttagcttcagattccgaggtaagaggagaaagaagagaactaagtgctacccagagttcgatttttgggttggtcaacaaggtcaagatgtttctgagcttgatgggtatcatgtagatcaagaggggtgcgtgtgtggattggggaagcaattgtttatgaagttgaagaagcatggataga

SEQ ID NO: 4067 - DNA, 280 bp, Glycine max
  Clone ID: 701042264H1
cgtcaacatcctcctagtgctagtcgtgtgctacttccagatggtagatacatggcttatcatgagcaaggtgttttggccgacacagctagattttcacttgttgctccgcactcttttctttcatccagactagcaggtttacctggagtcaaagcatcattgcttgaagagtacggcattcgtttggtcacatatgatcttcctggttttggggagagtgatcctcatcccaacagaaatctcaactcatcagctatggatgtgctgcatctagtca

SEQ ID NO: 4068 - DNA, 278 bp, Glycine max
  unsure (1)..(278): unsure at all n locations; Clone ID: 701042265H1
cttaaagcagaaannctcaaggncttgancgcaggcttagaaggaaaacgaattattattttccttctaagcctgcttcaagtccttgagttcagttcttacaatcacgaaaggatcaagttgaatgaaaattcaaccttgttgccgatcaaactcccanangtaatttattcaatctgtgngactaggtaggtgcaattacggcttgatgagtgtccttctgctgtaaagtgccaagtaacgatattaatctccaattttttttaaccctgacgggt

SEQ ID NO: 4069 - DNA, 221 bp, Glycine max
  Clone ID: 701042266H1
caagcacccactatcactccctcacgacctcatgacaacaattcccgcaaaaccctttaacaacaacatgggctgcagcattcacgagaagcctttcatccacctctcaactaagctcaaaatcaccaaacattaacatgttcgaggaaaatggtctcctttcacctcacatgtccgccacagcattgctccaaaaagctgcagaaatgggtgcaacagtg

SEQ ID NO: 4070 - DNA, 210 bp, Glycine max
  unsure (1)..(210): unsure at all n locations; Clone ID: 701042267H1
agagcttatctacttcactttctggagagacatggagggtgctaactggaagatnacagaggaagaagcagggccatcctcttcttctgggattgcttcanataaacaacaaaacccacctganacttttcatcatcaacattcataggaaggaggctgcagcagaagaagaaganaccgaggaagagggagnagncgatgttgatcatc

SEQ ID NO: 4071 - DNA, 273 bp, Glycine max
  unsure (1)..(273): unsure at all n locations; Clone ID: 701042268H1
cgcctcttcaacaacccttgttttgttctgtgcaagtnatcttgaaaggaacaacaatggtgaagtctataaactttctcctgcttctgtctctactagcctttgttccctcctgtcactgcaaaaagaaaataggaggttacctctaccctcaattttacgacggttcatgccccagagctcaagagattgtccaatccatcgttgccaaggctgtggcaaaagaaccccgcatggctgcttcgttgctcagactacatttccatgattgtt

SEQ ID NO: 4072 - DNA, 276 bp, Glycine max
  unsure (1)..(276): unsure at all n locations; Clone ID: 701042269H1
caaaaaaaactcccttgtatattgttgcagctctagctagggtttcgcaagtgcgattcgaagaagaacaacgacgatggcgatggctgcagctctgcgtcgcgaaggaaggcgtttgatccaaccaatcaacgccctccacttcttctctcaattctccctcatctctcaagaccaagcccctcatggcgcgcgctccatttccacttcaagttgtgaggnaccgaatgaagagtgtgaggaatatccagaagatcaccaaggccatgaagatgg

SEQ ID NO: 4073 - DNA, 275 bp, Glycine max
  unsure (1)..(275): unsure at all n locations; Clone ID: 701042270H1
cctcactcgttcattcgaacaaaaccctttttagtttttttcctcctctgtttctnctctctgcttctgcattttggtggcatcatcagagatagagacttgagtgtgagagccacnacttctccaattcttcaaaagggtgaaactttgaaggaaaagaaatggttggtgctataaaagcagcgattggagacgcggtgttgactttcatgtgggtgttctgttcctctgtgttgggaattgcttcagggtacataaccaatgcacttaacctt

SEQ ID NO: 4074 - DNA, 272 bp, Glycine max
  Clone ID: 701042271H1
cacacgtacatctatcactccccccaaacccacaccgttttattctctcaaatgggtcttgatcaggatgccaatagctcaggccttcacctcgttctagggctttctttgactgctagtgttaaggaaaccgctccgtccaccaagcccgatgatcatcatctttgtgttatcaagccaactccaacgaaaccttatccttccaaagaaccgtctttgacgttggggctgtccggtaagggttaccacgtgcccagaaataacgttgccat

SEQ ID NO: 4075 - DNA, 274 bp, Glycine max
  unsure (1)..(274): unsure at all n locations; Clone ID: 701042272H1
attactcaaaagtaattgaatttgtccagttcaaagataggttgcaacactctagtcagtatctagtggctcgagttgaaacacccattttacaactaaagcagaatgcagataacattgaagaagaggagggtatccttcaaaacttgaaatgtggtattcacttccttgagctgtctaaggaggtagggtcaaanncttgggaccttncatngannntnnannnacagggccngnggncacccacttcngggaaaattaccttttagggccc

SEQ ID NO: 4076 - DNA, 268 bp, Glycine max
  unsure (1)..(268): unsure at all n locations; Clone ID: 701042273H1
cttcccttgttcgtttcactctcacaatggactccctctctcncttctgcaccggagcccttctccgccggcggctctactggttcgtctgtgttctgggccccgcgagcaaaaggggnaacggggcancnatttaaccggggggttcantttcggcgaaaaaggtcaagacaaatncnaggnntnattgnnctttnttcggcggcccaaggaaatcgaaaccgcgganaaagtcccgatttggtgganacttttaaaatttgtcacg

SEQ ID NO: 4077 - DNA, 267 bp, Glycine max
  unsure (1)..(267): unsure at all n locations; Clone ID: 701042274H1
ccacgctgaggcctaagatctccgaattccaagcgcctcttgatagggtctcccaccctaaccaagccagatcccgttttcaattccttctcagtttccttttctctgaaaaaacatgttgagggttgcagtagaaaggnctcttcttctctctnnatcttcttctccgttgcggcccaatnangcngnttccgctttnctctctcgaaacgacgtngtcgtcgntnacgnaaattggncctttcttncanccctttttcccntnag

SEQ ID NO: 4078 - DNA, 270 bp, Glycine max
  Clone ID: 701042275H1
ctttcaccttcctccatactttcttcatctgggttttgcttgctataaaaatctagctaaaatttgtcgtttgctttcagcaagagctttagcttaattatcaccaggaatttatttggcagtcatggattattcatcatggatgattaacacttccttggatctcaacattaatccccacaggcttcatgaagaacttcccaaaaaggaggtggaaaacaactttttgtcattgaatttggaggtgaagaaatcttctgtaaaacaaga

SEQ ID NO: 4079 - DNA, 269 bp, Glycine max
  Clone ID: 701042276H1
ctaacactcattaattgcaagaatggcacttcgttgcttggtgatgtccctttctgttctcttcactcttggtcttgcgagagaaagccatgccagagacgaagatttttggcatgctgtttggccaaacactcccattccaagttcattgcgagatcttctaaagcctggccctgcaagtgttgaaatcgatgatcaccctatgcaaattgaagaaacacagtacccgaaaaccttcttctataaagaagaccttcatccaggcaaaa

SEQ ID NO: 4080 - DNA, 272 bp, Glycine max
  Clone ID: 701042277H1
gggcgttctatatattattgaattgacaatgaggcctgctcttgctttgcttcctcttctatttgctttcttgttagctgccactacagaatcaagaaaagatacaggggaatattggaaaatgatcatgaaagatcaggaaatgccagaaggacttcaaggtcttgtttcatttcaatctgaaaataaccctaagactcaagagcagcttggtaaaggttccaaaaaccattgtgaagagtctctagttacaaatacacaagttaatagtg

SEQ ID NO: 4081 - DNA, 273 bp, Glycine max
  unsure (1)..(273): unsure at all n locations; Clone ID: 701042278H1
ccaggatgttccgcatccaccaaggcatgcatatacggcatccagtacggcgacagttccttctcagttggctacttcagccgcgagcgcctcaccgtgacagccaccgacgtcgtcgacaacttcctcttcggctgcggccagaacaaccagggcctcttcggcggctccgcnggcctcattggcctcggccgccaccccatctncttcgtccaacaaaccgccgccaaataccgtaaaatcttctcctactgcctcccctccacctccagc

SEQ ID NO: 4082 - DNA, 271 bp, Glycine max
  Clone ID: 701042279H1
agaaacaaagttctcttctactttctgtctccagcaggctcagaatctttttgcaactgttctctggattttcgttcattattttagtttcctcttttgttttctctcctttttctttgaagcaaagtgaacttgtggtatacctttccaattgaggtttctagcgaaagagaaaggatgtcaagtgggacaacatactggtgttacacatgcaggcagccaatctggctgaagggagggaaggctttgcccctactgcgatggaggcttg

SEQ ID NO: 4083 - DNA, 279 bp, Glycine max
  Clone ID: 701042280H1
gaaagagaaagagaaagagaagagaataataatttttccgggaaaattcaagttccaatcggaatcggaatcggaatctgaaatgagtagtagggtttggtttctactattccttctgctgatctcgaaatgccatcaagtgtggggctcctacgcgggttccgctagctccatcgtcaacccttccaaggtcaaacagatttcctggaagccaagagctttcgtttatgaaggtttcctcacggatttggaatgcgaccacttgatctctttagccaa

SEQ ID NO: 4084 - DNA, 275 bp, Glycine max
  Clone ID: 701042281H1
gatgaatcaagtctcaggatccacggtaaagaggtggccagcaagttgaatcgccgtgattcagatcccttgtatgaccgtgaatgggaggatgagaagagacaaagagctgatcagaagcgaaggcaccgaaagtaacaaaccaaaaggggatttcaccagtaaacttttttgaaggttgttcattttatgcacgtgctataatgccaactttttgcgtgagttgaggtggtgggttcacaacacttttaaccgtcagccccctcatttttctg

SEQ ID NO: 4085 - DNA, 274 bp, Glycine max
  Clone ID: 701042282H1
gggaagaggaaccctagctagggtttggaagaagctgatccgagaagatggtgcagcgtctcacctaccgcaaacgccacagctatgctaccaaatccaaccagcacagagtcgtcaagactcccggtggcaagcttgtttatcagaccacgaagaagagggccagcggacccaagtgccctgtcactggaaagaggattcaagggattccacatttaaggccagcagagtataatagatcaaggttacacagaaaccgaaggactgtgaaccg

SEQ ID NO: 4086 - DNA, 230 bp, Glycine max
  Clone ID: 701042283H1
acgaactcgcgagatttctttgtcctcactcaagggttagggatgcggcggaacagtccagcatactacagtcctccgcggcgaggatacggtggcggtggccgaggaggagggtccggcaggaggggattcggtggaggcaggcgcagggacagcaatgggagcctcttggttcgtaacattcccctcgattgcagacccgaggagcttcgcgtccctttcgaacgatt

SEQ ID NO: 4087 - DNA, 271 bp, Glycine max
  Clone ID: 701042285H1
gttcgtttttggggactcgtatgttgataccgggaactatagaataaatcaagctggttcgtcgtggaaaaacccttatggcgaaacttttcccggaaaaccagccggaagattctccgatggaagagttctaaccgactacattgctaagtatttgggactcaaatcaccagttccctataaatttaggaaagtgatgcagcaacatttgaaatacgggatgaattttgcatttggtggtacgggagtgtttgacacatcctccaaaaat

SEQ ID NO: 4088 - DNA, 273 bp, Glycine max
  unsure (1)..(273): unsure at all n locations; Clone ID: 701042286H1
ctgacgagaaaccagacaccagcaccgaagttgttnttcccgtagagaaagacgcacaacaagaacaagaaacctcgccagagaaggagaaagagaacgttcccgaaacagctgaaaccgagtccgaggttgtttcaaaaccaagcggtgacgacaacgttcctgaatccggttctttcaaggaggaaagcaccattgtttccgacctacctgaaaccgagaaaaaggctctgcaagaacttcaaacaactcttcaagaagcgctcaacaacc

SEQ ID NO: 4089 - DNA, 271 bp, Glycine max
  Clone ID: 701042287H1
caataatctgagagagaaacaaaaacaatgaaggtttccattgccaagttccactcccttcccctatgttttttccttctcttggccttcaacacaaaacccctcctagcagcagaaccagagccagtggttgataagcaagggaaccctttggagccaggagtagggtactacgtgtggccactttgggctgatgaaggaggcctcacactaggccaaacaaggaacaagacatgccctctttatgttatccgtgacccttcattcattg

SEQ ID NO: 4090 - DNA, 269 bp, Glycine max
  Clone ID: 701042288H1
gggtgttaaagccaggaaacggaagctcagtggttttggacttcgtgtgtacaaaaattatgatccaagagcaaaggtcttgaggaaactgacagaggaagtgttttccattgttggccgggatcctcttatagagattgctgttgccttggagaagattgcactgtctgatgagtatttcatcaagaggaagctatatccaaatgttgacttctactctggactgatttatagggccatggggtttcaacctgagtttttcactgttt

SEQ ID NO: 4091 - DNA, 269 bp, Glycine max
  unsure (1)..(269): unsure at all n locations; Clone ID: 701042289H1
gcaacctcaatttagccagattaacatctctgtnacatggaggggaaagaaatttgttgtcgagatgaatataggagccaatgtgaaggatctagggcaggaattgcaaaagttaacaaatatcaaagaagataccatgcggttcattgttccacagatttctgccagnnacgtcaaaacttctggcccccttttccaaggaacatgcacttttaagtctgcaggaaacttcaattaccgaggccaggtcaattataatgatgggtgta

SEQ ID NO: 4092 - DNA, 269 bp, Glycine max
  unsure (1)..(269): unsure at all n locations; Clone ID: 701042290H1
taatggcgtttgctcacgacttggagttggaatcctcttcttcccctctggtgttctcagtacggaggagtgaaccggagctggtggctccggccaagcccactccccgcgaaattaagatcctatctgagatagattctcaggcgggtcttcgtacccaaattccaatcatacagttctancgtaacgacccatcattggcaggcaaggacccagttcaagccattcgaaacgctcttgcggaagcacttgttttctactacccgttt

SEQ ID NO: 4093 - DNA, 271 bp, Glycine max
  unsure (1)..(271): unsure at all n locations; Clone ID: 701042291H1
gagagaaacccatttctagagagagaaactcgcagtcgcagacatgtcttccttcgatgccttcgccgacgacttgaacgtcaacttcttcttccactcgccagcacgacngatgacgaggacaacttctctggctacggcggctactcctccttcaccggaggattctccgccgacggagatgtcgccgtcgatcactccgccgccgcgtcgccggagatctacggcttcactgattcgaatcccgcttactctcagtctcccttcgaat

SEQ ID NO: 4094 - DNA, 269 bp, Glycine max
  Clone ID: 701042292H1
gttgacatgcacatccaaatgtcttctttcctcttagcatcgtttgcacttttgttttgcatctccaccttggagaagagctttgcctttcaagcaacaaaggaaagcaacaatcttcgtcaatatcattttgttcacctcaactctctatttccatcatcttcttgcagctcttctgccaaaggtcctaaaaggaaagcatcattagcagtggtacacaaacatggcccatgctcccaactaaatcataatgggcaagcaaagactac

SEQ ID NO: 4095 - DNA, 260 bp, Glycine max
  Clone ID: 701042293H1
gtttgattgggatcatcctatccacttgcagcccacaagtcctactactgtgaagaaggtcagtgttgtttgggatgcctatgaagcaacaaaggatgcacatggcctttgcattctaaccgagtgggatgagttcaagactcttgattaccagaagatatttgacaacatgcaaaaaccagcatttgtttttgatggcagaaacattgtggatgctgataagttgcgtgagattggctcatagtttactcaattggtaa

SEQ ID NO: 4096 - DNA, 271 bp, Glycine max
  Clone ID: 701042294H1
gtcagatctggtccctacggtcagattttccgacctgataacttcgtcttcggccagtccggcgccggaaacaactgggccaaaggtcactacaccgaaggcgctgagttgattgactctgttctcgatgttgtcaggaaggaggcagaaaactgtgactgccttcaagggtttcaggtttgccactctcttggtggtggaactggttctggaatgggaacactgttgatctcgaagatcagggaagaataccctgaccgaatgatgctta

SEQ ID NO: 4097 - DNA, 275 bp, Glycine max
  Clone ID: 701042295H1
agtgatttcagtgagtgatcggtgttcacttgatctcatcataatcgtcagcgtcaattgaagaagatgccgatcagaaacatcgccgtcggaaggcctgaagaggcgactcaccccgacacgttgaaggcggctttggctgagttcatctcaaccttcatcttcgtgttcgccggctcaggctccggcatcgcctacaacaagctcaccgacaacggcgctgccacccctgccggcctcatctccgcctccatcgcccatgcattcgccctctt

SEQ ID NO: 4098 - DNA, 277 bp, Glycine max
  unsure (1)..(277): unsure at all n locations; Clone ID: 701042296H1
ttgacaaccatgagtgatgtatatagctttggagttgttctcctagagctcctcacaggaaagaagtctgtggacaagaaaagacccaccagagagcaggatttggtggaatgggcaaggccattgttgaaggattcccataaactagaaagaataatggacacaagacttgaggatcagtactcaactgaaggggctagaaaatttgcagccttggcttatcaatgtcttagcnannnnnaagntagagcccnccctgngaacgtgggtaggacct

SEQ ID NO: 4099 - DNA, 256 bp, Glycine max
  unsure (1)..(256): unsure at all n locations; Clone ID: 701042301H1
ggctcacatcatccaatgccaatccgacggccacgatcccttccacgtgctcntccgagcngagatgaaccaggaggacacgtggcgcaattacgccgccgacgtcgacgtactccacgncgccgtgtatagcatcagccacgaccgnttcgccgtgttcctccgcctccacacngcttcgtgcacagcgcctccgcngtggcgctgctcaacgagctcctcngcttcgtncgnaggcggnagaggcgagcgggga

SEQ ID NO: 4100 - DNA, 200 bp, Glycine max
  unsure (1)..(200): unsure at all n locations; Clone ID: 701042304H1
ggagcgtcgtcgtttcgttagggcacaaaaccccttttcggatcggtggagcaagncctcgccggcgagattcccgaggctgttcanccagcgatcgagcaccggcgaaaagcggcgaagatgaaggttttcgtgaagactctcaagggcacgcacttcgaaattgaagtgaacccttcggacacgctttctgaagtgaa

SEQ ID NO: 4101 - DNA, 251 bp, Glycine max
  unsure (1)..(251): unsure at all n locations; Clone ID: 701042305H1
gctcgacaagctcaaagctgagcgtgaaagaggaattaccattgatattgctttgtngaagtttgaaaccaccaagtactactgcacggtcattgatgctcctggacatcgtgactttatcaagaacatgattactggtacctcccaggccgactgtgctgtccttattattgactccaccactggtggttttgaagctggtatttctaaggatggacagacccgtgagcatgctcttcttgctttcaccc

SEQ ID NO: 4102 - DNA, 252 bp, Glycine max
  unsure (1)..(252): unsure at all n locations; Clone ID: 701042306H1
ggcggaaggtggtgtctccggtgaccggaaaatctaccggcggtggcgttaacatctgcggcgtcccactccggcggcgacgacatggggtcgacatcnacgggatcgatggaggcggcaacggcggcgggcgctgatatatcgggcgagaacgagaaattgaagaaggacaacgagaaattgagcggcgagttagcgctggcgaagaaacaatgcgaggagttggtggcgtttcttagagactcgctgaac

SEQ ID NO: 4103 - DNA, 251 bp, Glycine max
  unsure (1)..(251): unsure at all n locations; Clone ID: 701042307H1
gtgctttcgagcagtgactgtagtctnattcttcttctctaacaaaatggtcatcgtcgattccgattacgaaggtgccgccatcgaagccctcggttctctcttcaaggtcacccaagtcttcctctgggatgatggccttcaggtttcatcctcagctgaacgctggaaattggatgaagctgatgacaatcacggctctgaccccgttcctgatttgattgaccttattacacccgaggatttggagc

SEQ ID NO: 4104 - DNA, 251 bp, Glycine max
  Clone ID: 701042309H1
ctttgttcgacaattttgaatggtcttcaggttatacatcacgttttgggatgatcttcgtggattacaaaaatggtttgaagagataccaaaagctttcagcgcaatggttcaagaattttctcaagaaagaaagaagactttatagctctagtaaataatatgaaattcgtttattcattggttatatttgtaaataattatttggtttttctttgatattcttttattctaaagaggtcctaatttga

SEQ ID NO: 4105 - DNA, 251 bp, Glycine max
  unsure (1)..(251): unsure at all n locations; Clone ID: 701042310H1
attttngcggaaaacctcagcgtagttcctaacactacactcttcccgccgattatttctccaaaccgattattcttcttctgtgccctagcgccttttcctccgncgtcaaccaccgtatccctcncgcttccggcaccgatcgaacagtntcnggccaagttcagttcttgcttgcganaattctcggaatattttgaatccaggaaatcatgcacgcgccagttctagttctcaaggactctttgaaa

SEQ ID NO: 4106 - DNA, 250 bp, Glycine max
  unsure (1)..(250): unsure at all n locations; Clone ID: 701042311H1
gcaacaganagtagaaaanatggcgcggttgatcacagtggtgttgtgcgcggtggcggtgctactgtgcgcnatggcgggcgcntcgtgggtggaggangnggngaacccgatacgaatggtgnnccggggtggaggcggaggtggttcgggnctatagggcagtgccggcgcgcgctgaagtttgctaggttcatgagcaggttcgggaagagttaccgaancgaggaagagatgagggagagtcacg

SEQ ID NO: 4107 - DNA, 250 bp, Glycine max
  unsure (1)..(250): unsure at all n locations; Clone ID: 701042312H1
caggcagctagtactaccctgcccctgctagctattttgtaacaagcagatcaaattaattgcttgatatcaagaaacatggcaatcaccggtgttcatggatggggagacatcaagagtctcagcgtccaagtnatcaccggtcgatggttcgtcgtattcgcctcttttctaatcatggcagccgccggagcaacctacatgttcggtctctattccagcgacatcaaaaccaccctcggttacgacc

SEQ ID NO: 4108 - DNA, 250 bp, Glycine max
  unsure (1)..(250): unsure at all n locations; Clone ID: 701042313H1
atcgcaattaccccaaattcctcaccctaccgtagatccatctcctcttccttcgtgaattctggttcagggtggttgccatgtatggcacttagtatttttttcccctttttaggattattaggggtgggtgggttgtgtctcgcttagggttccaaagtttgtcgctttgaatggaacctcgtgttgggaataagtttcgcntgggtcggaagatcggaagcggctcctttggggagatctatttagg

SEQ ID NO: 4109 - DNA, 204 bp, Glycine max
  unsure (1)..(204): unsure at all n locations; Clone ID: 701042314H1
ttgcagagagaggttcagatcgcatggccttaataacgggtcgaatcaatgcgcttcctccgacaccaccctcttcggcgtcgtccccaacccacccccacatccctgcgccacgngcantccttgtcggtcgcagctttcgattctaactcagatgatcagcagcagcatcttccccctcgccaccagcgccctcagtcgttg

SEQ ID NO: 4110 - DNA, 195 bp, Glycine max
  unsure (1)..(195): unsure at all n locations; Clone ID: 701042315H1
tgattgaagaagatgccgatcagaaacatcgccatgcggaaggcctgaagaggctactcnccccgacacgttgaaggcggggttggctgagttcatctccaccttgatcttcgtgttcgccggttcaggttccggcatcgcctacaacaagctcaccgacaacggcgccgccactcccgccggcctcatctccgc

SEQ ID NO: 4111 - DNA, 194 bp, Glycine max
  Clone ID: 701042316H1
cactaataacagcaaactaaaggtgaagtttgccagaaacaagatgggaaggaaccattttcagcagcaacactgtgctgatgggagcatgtggatggagagtcagggtcagcaacagagctatgccttccaagaagagtcttggagccctgataacaactatggccacaaccacaagcaattcccaggcatgc

SEQ ID NO: 4112 - DNA, 236 bp, Glycine max
  unsure (1)..(236): unsure at all n locations; Clone ID: 701042317H1
ataagagaatctaaagaaagaccaaagccaggctcaanaagttgtgttattgtatgcatgagaattgaaggagagaggtgaagacnnnnnnnnnnnnnnnnnnnatcatcgtcatgtatagcatggattcatcatcttctggatctcagttttctcagcacccacaactccctccagggtttcgattccaccccacagatgaanngctagtggttcagtacctcaagaanaaagca

SEQ ID NO: 4113 - DNA, 251 bp, Glycine max
  unsure (1)..(251): unsure at all n locations; Clone ID: 701042319H1
aattctcatttcttcatcgttcgattcttctcctcctaaagatcttcgtgaaaactttgaccggtaagaccatcacccttgaggtggagtcctccgacaccatcgataacgtgaangctaagattcaagacaaggaagggatcccacctgatccagcagagacttatctttgcgggtaaacagcttgaggatggtcgaacccttgccgactacaacatccaaaaggaatccactctccacctcgtgcttcg

SEQ ID NO: 4114 - DNA, 252 bp, Glycine max
  unsure (1)..(252): unsure at all n locations; Clone ID: 701042320H1
gaaaataataattagtagcataataattaagccaaagtgttcatagatatggagggtcttctgcctcttgtttataaagcaatcaagagaaacaaaacacgaaggcantacgagtgtctttcatcaggaacttctctanggtacaacatcagcatggccgagatgtaccctcaaactcaggaacatgtccttcagaaccagacacatgcccagaaagtgtttcaccaccaccataatgaaagtcacaaaatt

SEQ ID NO: 4115 - DNA, 252 bp, Glycine max
  Clone ID: 701042322H1
ggaatttcttcttccaatttttcagaactttgcacgaaagaagaaactctgaaggaagtgcatgcatgcacttgtaaaggaaggacagaaggctcgtttggagaaatttgagattcctgcaaaaattaaattgctttctgatccatggactcctgaatctggcctagtcactgctgctctcaaactcaagagagaggccataaaaaagacttttgatgaagaactttctgagttgtatgcttcataggctta

SEQ ID NO: 4116 - DNA, 84 bp, Glycine max
  unsure (1)..(84): unsure at all n locations; Clone ID: 701042323H1
cgcaaatnaaagcgcaananccattccttcctgtgcggtgntgcttganaacatgggaanancagagcancanaattgcttctg

SEQ ID NO: 4117 - DNA, 249 bp, Glycine max
  unsure (1)..(249): unsure at all n locations; Clone ID: 701042324H1
gtttaagcttngtntgtcantttagttttccaaatttaacacattgttaaggctaattatggctgatattgagggttctccaggaagctccatgcatggagtaactggaagggancaaaccttcatagcctcagtggcttnccctatggtccctacagacaccacagcaaatttcgctttgccagtagattctgagcacaaggcaaaaattttcaagcttntttcctagcnaaccctcacntgagaacc

SEQ ID NO: 4118 - DNA, 116 bp, Glycine max
  unsure (1)..(116): unsure at all n locations; Clone ID: 701042326H1
tgaggnctgtgcctgtgctactgaggggccatagtttggtgaccctttgnaaccctaatctccaccncaaacnccattggctcncgggaanctgcnttgngaaaagaaagagccga

SEQ ID NO: 4119 - DNA, 249 bp, Glycine max
  unsure (1)..(249): unsure at all n locations; Clone ID: 701042327H1
ggcttcttcttctccctctcactcatatctcacacatcttcctcttcatccctctcaccaaggtgatagtgagaagcgcgtggaggacgatgaatcgcgcgttccgattcacatcgtgacggcggngtcgcaacttcccgtcgaatttctggaaccctcgcctcaatcgaagctcgtcatcggctttgactgcgagggcgttgacttgtgccgcaaaggcactctctgcgtaatgcagcttgcgtttcc

SEQ ID NO: 4120 - DNA, 202 bp, Glycine max
  Clone ID: 701042328H1
gttcacgaagacacactcaagtacatgaatgattttgagctgtacgactttgttgctgattcaaattttgatcagttcatcaatttgatccgaggggagaatgaagatgccaactgtgatcatttcggttctgaccttatcaatgattgctttgttaacaatcagcagcagcccctttcatctcctgcaaacccttttgatc

SEQ ID NO: 4121 - DNA, 251 bp, Glycine max
  unsure (1)..(251): unsure at all n locations; Clone ID: 701042329H1
gcatttccaaaaacatcatacatntgtcttttctaagatccaccatgtcaaatgatcattnctaaattaacctttgatgagctcagatgggtgattaacatccgcaaaactcttgaagaagaggttgaggaggatggtgaatttgctgtgtccatcttcagcgtgccaaagctccttatggcaagtgatccagactcttatgtccctcaacaggttgcaattggtccctaccattattggcgtccagagct

SEQ ID NO: 4122 - DNA, 252 bp, Glycine max
  unsure (1)..(252): unsure at all n locations; Clone ID: 701042330H1
cgtcaacaacagcagtccaagaaatttggatcatgatggaagaattgacaatgaaagttctgggacaagtacttcattacaacaaaatgctaccagtcatcaaaaaaagtttccaattngttctttactacctgataattttnctttttcccaaaaagattgttactgatggggacagggattatctacaaacaaagtattcttcagacaggaatcacagtggtccgttgcaatatcggcagaagagagaca

SEQ ID NO: 4123 - DNA, 233 bp, Glycine max
  unsure (1)..(233): unsure at all n locations; Clone ID: 701042331H1
aattaactatgaagcctaccactactattatcccttacncttcctgcctctctttgactttcctggctctttcagaagatgttgaacaagttgtggacataagtggcaaccccattttcccaggtggcacatattacattatgccatcaacttggggcgctgccggtggtggattgaaactaggccggacaggaaactcaaactgcccagttactgttttgcaagattactca

SEQ ID NO: 4124 - DNA, 78 bp, Glycine max
  unsure (1)..(78): unsure at all n locations; Clone ID: 701042332H1
gnggaacttaanttgntntggtgcaatgnnggatttggacgaacgaagacaanagcacggcaatggagnaanaagttc

SEQ ID NO: 4125 - DNA, 255 bp, Glycine max
  Clone ID: 701042333H1
cgactcggttcggttgatgtttggactatttttcttctctctctgtctctctgaggactctttgtgtttcgactctattttctccaaacacaacaacaacaccagaggcagaggcagagagaaacagagagagaaaggagtaacaaatagttgattatttcaaagacaatgaacaataaagatggaaaacccgtcatccaaccagacaagagcaggattgtccctatggcaatcatatttgtggtgctatgtgga

SEQ ID NO: 4126 - DNA, 252 bp, Glycine max
  Clone ID: 701042334H1
gtttagggtaaatccgtggctggtttctggaacttttgcatccgaatctccgtttgttttggcagaagcacaggttctccgcgtcagccatggccgatgacttcgacttcgcggataaagttcctccttcattcgatcgcgtgggaaatgtgatcaaggattctggatccaaagggttcaatccaggattaattgtcctcctggttgttggtgggttgttgttgacattcctcattggaaattatgtgctct

SEQ ID NO: 4127 - DNA, 78 bp, Glycine max
  unsure (1)..(78): unsure at all n locations; Clone ID: 701042335H1
atttcttgctaanactttattttgctctntggcatccattcataaagtaataagccaggcagataaagccattccaca

SEQ ID NO: 4128 - DNA, 251 bp, Glycine max
  unsure (1)..(251): unsure at all n locations; Clone ID: 701042336H1
ttttccctcttctttttctatgatggcattggatatgatanatgttgttccgagaacgaggatggaggaagctgcttccgctggattaaagagcatggagcatccnnttcgactcctttctccaacctcttctaatccccaattcttcttcttntcntcttctcaataccaatcccaacaacctccactgctcccaaatcaccgacttcaccgtctccaacttcaaacaagtcatcaaccttctcaaccgc

SEQ ID NO: 4129 - DNA, 251 bp, Glycine max
  unsure (1)..(251): unsure at all n locations; Clone ID: 701042337H1
gtttttntgttgttgtgtaatgatactcattgtcaccaccaacacgctttcannttactgaacaacgacttccatcttcactcttccttcaaatttccaacaagggttcaagggtattatgtcttgcngnattcattctcttgctgaaatgcagtctttctaganagtttgttcaactgtccctnnattggcgttagnatggctacctactggagcaaaagaganccaattacgtgagaacaacagccaga

SEQ ID NO: 4130 - DNA, 248 bp, Glycine max
  Clone ID: 701042338H1
atggctttaggtgttcctgctcttccgttgacatacgtggctcacgttctggcagttgttgccagcgtcttggtcgtggtctgggtcgtcaatttcaggggtggcttggcttgggattctgataacaagtccctcatcttcaacattcatccagttcttattgttattggcttactagttcatgggggtgaagctattataagttacaaagcttttcccctaaagaaggaagtgaagaaattgataca

SEQ ID NO: 4131 - DNA, 248 bp, Glycine max
  Clone ID: 701042340H1
gctaggttgaaaatagtttggttttgtagtaagtgaggtgaggtgccaaaatggtgaagataactcttggtactttcgatgactcttttggtgttgcctctcttaaggcttatttggcagagttccatgcaactctgattttcgtgttcgctggtgttggttcagccatcgcttacaacgagcttacaaaagatgcagccttggatccaacggggctggtggcagtagctgtggcccatgcatttgca

SEQ ID NO: 4132 - DNA, 251 bp, Glycine max
  unsure (1)..(251): unsure at all n locations; Clone ID: 701042341H1
accagtaagagttnntgttgttnataatttgaaaangtcaaggcagccaacaaactaggggggttgttcttcatctgtcttgtatgnncatgaagaagggatattcagtttncttgncaaaacaacaacataagaaagagccattttcctgcagttcatcacncaagancncancnncaatgcatccangcgnatcnngatgntacagnngnnacnagcncacngcaaaatcaatattccctcaaattggg

SEQ ID NO: 4133 - DNA, 214 bp, Glycine max
  Clone ID: 701042342H1
gttgcaagagaaagagagcgagattccgatggcgactctggattccgacgtgcctatggttcccgccggcgagccctcgagcagcgccggtccttcttccaagaagcccaagcgcttcgagatcaagaagtggaacgccgtacgctctctgggcttgggacatcgttgtcgataactgtgctatctgccggaaccacatcatggatctctgcat

SEQ ID NO: 4134 - DNA, 248 bp, Glycine max
  Clone ID: 701042344H1
tgcgttacgatactatgcaggtgcggctgataaaattcatggtgaagtattaaaaatgaatggggattttcatgcatatacacttttggaaccaattggtgttgtgggacacataattccatggaatgcccccagcctctcgtttttcatcaaggttagcccttccttagctgcaggctgcaccatggtcctcaaacctgctgaacaaacacccctctctgccttgttttatgctcatctagctaagt

SEQ ID NO: 4135 - DNA, 249 bp, Glycine max
  unsure (1)..(249): unsure at all n locations; Clone ID: 701042345H1
cttccattcctttcttccggatcacagggaaaataaaaaacantggagttggacttgacaccaaagacagcagaagtgttgtttgagggagatggtggaggttactacacttggtggagttctaaagtgccactgctggccaagaccaatgttggtgctggtcggttagtgcttcagcctcagggctttgctattcctcattattcagatatatccaaagtaggttatgtgcttcaagggaacgatggc

SEQ ID NO: 4136 - DNA, 251 bp, Glycine max
  unsure (1)..(251): unsure at all n locations; Clone ID: 701042346H1
gtttaagcaaacataacttgcagtaatggcttcaatgaataaccaaaaagaaattgagctctttgagggccaatctcttctgtacatgcagctatatgggcacctaagacctatgtgtcttaagtgggctgttcaactaggtattccagacataatacagaanccatgccaaacccatttctctttctgacttggtctctactcttcaaattccaccagctaacgctgcttttgtgcagcggttcatgcgc

SEQ ID NO: 4137 - DNA, 254 bp, Glycine max
  Clone ID: 701042348H1
gtcagagaaagtgaggcttttatttgattctaaaaatgagacgtgctcttgctttgcttcctcttctgcttcctgtttgtagcgattggggaatcaagaaaagatggaggaaaatattggaaaatgaacacgagagatcatcagatgccgaaaaaaattaaggctctcctcaaccaaaactttgagatccaatctgaaaagattctcaaaaccaaggaacaaattcttgaaggttctaaacatgattgcgaaaa

SEQ ID NO: 4138 - DNA, 251 bp, Glycine max
  Clone ID: 701042349H1
aattaatcaaacatggctagggttagtgctttgtttcactctttgctcttgatttcttcccttgtattggcttctcaaatccatgtttcctctgggaaactagtccctggactatcatggaattactatttgttgacatgtcccaagcttgagaggattataaggaagcatcttgaggatgtcttcgagaaggacagtggagtagctcctggcatacttcgactcttcttccatgactgctttcctaatgg

SEQ ID NO: 4139 - DNA, 250 bp, Glycine max
  unsure (1)..(250): unsure at all n locations; Clone ID: 701042350H1
gtgaatctcccgttgttgttgttcnttctggaagcatggaacccggattcaagcggggagacatcttgttcttgcacatgagtaaagatcctattcgggtnncgggagattgttgtgtttaatgttgatggacgtgagattccaattgnccatcgtgtaattaaggtacatgaaagggaagatactggggaggttgatgttctcacaaaaggagacaacaattatggggatgacaggctactgtatgctc

SEQ ID NO: 4140 - DNA, 249 bp, Glycine max
  unsure (1)..(249): unsure at all n locations; Clone ID: 701042351H1
gggtcctgcaatcattggtcacgctgatgatcaggtgcttgcagctctgggtgaaaccatgaagaaaggaaccagctttggtgcaccctgtctgctggaaaacactttggcaganctggttatcgatgccgtccccagcattgaaatggttcggtttgtcaattcaggcactgaagcttgcatgggtgcgctccgtctggcccgtgcttataccggaagagagaagatcatcaagtttgagggctgtta

SEQ ID NO: 4141 - DNA, 219 bp, Glycine max
  unsure (1)..(219): unsure at all n locations; Clone ID: 701042352H1
caagagttganaacatgttgagtgcaatcatttgtcaaacagtgggncagatgagttggatagaacagagtctccanaagctgnttcaaattctagtgtgattacatctgttggttcttctgaagatactggatctgtaacagtggcaggatgtgttgaggaaagcaccgggggtgttgaaatgatgaacaatggctggtttgaggatagcacttatgg

SEQ ID NO: 4142 - DNA, 248 bp, Glycine max
  Clone ID: 701042353H1
gttgccccaaagacactattaagtttggtgtgtgtgctgatgtgttaggtttgatcaacgtgcaacttgggaagccaccaaagaccccatgctgcaacctcattgagggtctcgctgatcttgaagctgcagtgtgcctctgcactgctctcaaagctaatgtgttgggcatcaacctcaatgttccagtgaacttgagcttgctactcaactactgtggaaagggtgttcccaagggtttcgtctgc

SEQ ID NO: 4143 - DNA, 105 bp, Glycine max
  unsure (1)..(105): unsure at all n locations; Clone ID: 701042354H1
ttatctgaatngcgaanagaggcaagaagacgggaagaagggcgtggtcgatctcatgcctcttttccgccaaggaactcctcgccggtngctcgccggcggttt

SEQ ID NO: 4144 - DNA, 105 bp, Glycine max
  unsure (1)..(105): unsure at all n locations; Clone ID: 701042355H1
cnatttccctatattacttgacggtatngantgaacactactanntcatgtgtataacgttgtatagcnagctagctagctttctattgtctaatatacctttgt

SEQ ID NO: 4145 - DNA, 247 bp, Glycine max
  Clone ID: 701042356H1
aataactatggttgctgagccattagaaagaggtcttgcagaggacatagagaatggtgttgttagcactgactggagtaaaaagaaactaggtgactttttccagactaaatatgactgggatcttcttgctgcacggtcaatctgggcatttggccctgataagcagggtcccaatattctgttagatgacacccttccaactgaagttaacaaggatctaatgaatgccgtgaaggattccatt

SEQ ID NO: 4146 - DNA, 248 bp, Glycine max
  Clone ID: 701042357H1
gaaaagggtcttctccaagtgggaccaagtgaaagacccagaaccagaaccagaatcagaatcagaatcaaaatcaacggttaattcttcttcaaagccaccaactttatcatcctttgttcttgcatgtgcatattctgttgtgtgtattgcaaaagcggttcacggggttgaaaaggagaagcaaaagtttggtttctggttcccggtggattatagggctaggttagagcctccaatccctgata

SEQ ID NO: 4147 - DNA, 250 bp, Glycine max
  unsure (1)..(250): unsure at all n locations; Clone ID: 701042358H1
ttttgtctttgtttctcttacaattttattttgcttctcttccttggagaagagttttgcctttcaaacaaccnaaggagntncacagaaagcaacaatcttcatcaatatactcatcntgttcnccctcagctcactccttccttcatcttcctgcagctcttctgccaaaggtccnaaaagaaaagcatcattagaagtggtacacaaacatgggccatgctcccaactgaataatcatgatggcaaa

SEQ ID NO: 4148 - DNA, 246 bp, Glycine max
  Clone ID: 701042360H1
ttctttcccacctttcattagttttgtggtttgtggcatcgaagccaaggaggcaaggatgatgccatacaagttttggcataggaaaaagtgtaacgtagtgcaataaccaagggtggctttgacttataggatagattgtgttcttttcatataaaatgatccaatgtaatttgtgtaaaactttctataagagtagcaattttctgttcttttatattttgagctgaatgttgagttaaatag

SEQ ID NO: 4149 - DNA, 251 bp, Glycine max
  unsure (1)..(251): unsure at all n locations; Clone ID: 701042361H1
gtgaaananaatcccgagggcgaagaacannagagaaattaanatngaggggaaggagcaggatgtgtcgnggnancgaacaagttcccggagagacagccgattgggacngnggcgcagagccaagacgacggcaaggactaccaggagccggngccggcgccactggttgacccgacggagtttacgtcatggtccttttacagagcagggatancagagtttgtggncacttttctgtttctatacat

SEQ ID NO: 4150 - DNA, 250 bp, Glycine max
  unsure (1)..(250): unsure at all n locations; Clone ID: 701042363H1
cgcgtcgctggctccgtaccagtttcactgcataaatntnanagaaaactctgcaaacatgttggtttatcaggacctccttacaggtgatgagcttctctcggactccttccgttacaatgaaattgagaatggaatgctgtgggaagttgaggggaagtgggttgttaagggagcagttgatgttgacattggtgcaaacccttctgctgagggtggagaanatnagggagtcgatgacgcagctgtt

SEQ ID NO: 4151 - DNA, 251 bp, Glycine max
  Clone ID: 701042364H1
caaaactcaggcacttgctgtttgccactcagatacttctggaatgaatcatcacatgcttcatgaactcatgggagttgatcctggaactaaccctgtttgccatttccttggaagcaaggccattttatgggtacccaatttatctatggacactgcctatcagactaacgttgttgtttaattagtccatgcatctgcatcttgggcaccataagattgtatataaaataaattatggtgtgttgtgt

SEQ ID NO: 4152 - DNA, 253 bp, Glycine max
  unsure (1)..(253): unsure at all n locations; Clone ID: 701042365H1
anagcgtcgtcgtcttcgctatgtcgcgacaganatccagaagagccgaactacctcccgctccaggagaatattgaaaaattggagaaagttgtaaacgatggaaattattatggagctcagcaaatgtacaaatccgttagtgccagatatgtttctgctcagaggtactctgaagcattagatatcctacattcaggagcgtgcattcagttgtctcatgggcaggttacctgtggagcagagttagctt

SEQ ID NO: 4153 - DNA, 252 bp, Glycine max
  unsure (1)..(252): unsure at all n locations; Clone ID: 701042366H1
cgcaggtccacaagccggtccatnnaacttaaaatgtaaaaatatgatagcatggttaggccgactacatngaatganagcaaagncaatattttgtaatanccattaaaggaggcatgtttggattgttgaattgcccagtttatagcatggttaggcggactacattnaatgatagcaaanaaantattttgtaataacattaaaggaggcgtgtttggattgtngaattgccgagtttagctgcagnng

SEQ ID NO: 4154 - DNA, 249 bp, Glycine max
  unsure (1)..(249): unsure at all n locations; Clone ID: 701042367H1
ctctcctttcgctcctgcttgagaaaatcaggtatgaaagttcacttgctccgttcaactccttctttctctgtttctactgttcgcatttcacgttccacatatggttgttgntccctgtggagcttagagctctgatggagttgaagtcctctctggatccagagggaaagatccttggctcgtggatcagtgatggtgatccatgcagtggcttcttcgaaggggttgcgtgcaagagcatcgcaa

SEQ ID NO: 4155 - DNA, 79 bp, Glycine max
  unsure (1)..(79): unsure at all n locations; Clone ID: 701042368H1
aacgcaancaccanccatcgtgtttnggtcattcttgctctctttcccgtcagccctcaaaaccgancaaaattgttgc

SEQ ID NO: 4156 - DNA, 247 bp, Glycine max
  Clone ID: 701042370H1
gtcgcctggtactacttctacttctcccgcgacgtccccctcgtcgttttcaaccaaaccctcgacgacagaaccgtgctctgcgttttgggattgctcactgtcgtttcgctcgtctccactcacgtcggcctcaacgtcctgctctcgttaatcgtctcggtggttctcgttggcttgcacgctgcgtttagggttaccgaggatttgtttcttgacgaggaaagttcgttgctttccgttgtgg

SEQ ID NO: 4157 - DNA, 249 bp, Glycine max
  unsure (1)..(249): unsure at all n locations; Clone ID: 701042371H1
gtgacacagaaattaagctagngcttcatagtttcttcttcttttctcaccttccttctctcccttcagacaaagggacaaaaaatcnnnnnnnnnnnnnnnnnnnnnnnnnnnttccaaaaccatgtcccacagtcatctaagtttcgcctttgggattctaggtancattgcctccttcgtgtgctttctggcaccactaccaacattttatagagtttgtaagaagaaatcaaccgaagggttcca

SEQ ID NO: 4158 - DNA, 247 bp, Glycine max
  unsure (1)..(247): unsure at all n locations; Clone ID: 701042372H1
atctctctctcgccggcgtcgctacgaaggaaagcaatttactgtgaagaacaatgaggaagctaaagtttcatgaaaagaagcttttgaagaaggttaattttttggaatggaagagggaagggggtcacagagagaacctcattatgcaacgctaccatgttactggacgggacgattacaaaaaatattcaggtttatgccatatggttcanaagttagtaaacatattgaaacagatggaccc

SEQ ID NO: 4159 - DNA, 247 bp, Glycine max
  Clone ID: 701042373H1
ggcagactagtatccgatcctctgtcctctcgaagctttcatcgttcaacatattctcaccatcctcagtcatgggcctgctatcttgttttaggtctaccgtcctgagaaaatgttccaaaggaagctctggcatgtcaagattcctgtatacgaacaattttcaacgaaacttgatttcgtctggtggcaatgaatcgtattatgggtattttaacaggagatcatacacttcactttatatggg

SEQ ID NO: 4160 - DNA, 245 bp, Glycine max
  unsure (1)..(245): unsure at all n locations; Clone ID: 701042374H1
aacaaacttcttcancctctntatntnccaatcctttttttccattccctactattccctatcatctttctttgtgttcncatctttttccttttcccaagcaattgtactttttaggggcatacacgtnaagcagttggtttctggagtagttagagttacatgtgttttgcaggcacatggcaacacatgaaatggatcccgatgttgttcgctggggtcttcatctcctagatgtctgcaca

SEQ ID NO: 4161 - DNA, 80 bp, Glycine max
  unsure (1)..(80): unsure at all n locations; Clone ID: 701042376H1
cgcaggtngantatcccangnaatgtacatttaatcacntgggaaacacntgtgagctgacagatcatnggtgncactgg

SEQ ID NO: 4162 - DNA, 248 bp, Glycine max
  unsure (1)..(248): unsure at all n locations; Clone ID: 701042377H1
gaagcttgcatgctcttctncatgggaaccngggaccaggaaggattccgttagattggaccncganaataagcttgatgttaggtgcagctagangtttngcacggnttcatggaggagtatagcgcatcagagntacctcaanggaacgtgaaatcttccaacgtgcttcttgaccaaaaacggcgtcgctttaatatctgacttggnctttcgctgcttttaaacccngttcacgcgattgcang

SEQ ID NO: 4163 - DNA, 82 bp, Glycine max
  unsure (1)..(82): unsure at all n locations; Clone ID: 701042378H1
aaaactacacacctttgtcantttctgttcttgttcggactgctgctgtctttntaccagactttnagcancacngnacaca

SEQ ID NO: 4164 - DNA, 249 bp, Glycine max
  unsure (1)..(249): unsure at all n locations; Clone ID: 701042379H1
cttggacttatatctcatccactggcccctcagttctccagcnagggaanttctcctttcctattgaggtagatgatctcttgcctttcgatgtnaagggtgtgtgggaatccatggaagagtgccananacttggnntcaccaaagccattggagtcagcaacttctctgtcaagaancttcagaatctgctctctgttgctaccatccgtcccgtggtcgatcaagtggagatgaaccttgcatggc

SEQ ID NO: 4165 - DNA, 251 bp, Glycine max
  Clone ID: 701042381H1
gcaatgtgacatcattaaaatcagtggcatggttcgcaataaggagcgatttgtaaaaagaagacaacatcttgtgggtcccaattcttccaccttgaaggctcttgaaatactcactggctgctacattctcgtccagggaaacacagttgctgctatgggttcattcaaaggcttgaagcaagtcagaagaattgttgaagaatgcatgctgaataaaatgcatcctgtatacaacattaaggttctta

SEQ ID NO: 4166 - DNA, 247 bp, Glycine max
  unsure (1)..(247): unsure at all n locations; Clone ID: 701042383H1
cagacatgtacaggaacnctgcttcacgtcttagggtcatcagtgcccgttcgtgcagcagcagcaggatacctgccagtgccagatttgcaagttccgttgccacacaacaatcctcttctggtttgggtggtttatttggatggctcantggagaccgatccagttctttaccatctctggatttcccgcttccgggcgttacacttcccccttcattgcctgattttgttgcgcccggaaaaac

SEQ ID NO: 4167 - DNA, 247 bp, Glycine max
  unsure (1)..(247): unsure at all n locations; Clone ID: 701042384H1
caagccataaaaacatgcattttttgttgttgtttgttgcaagttagttaaaactgtgtcacattgatggttaatgcaccacttgcatcgtaatcatcgaagccacacttgtaaaaatctaaactaaaagtctaaaaccaaaccactgtgttccaattcttctttgtattctccattcaccctcattgcgtttttttaccctttttcggtgtcttctcagattcctcacacgcacactctnttcgat

SEQ ID NO: 4168 - DNA, 247 bp, Glycine max
  Clone ID: 701042385H1
agattatcctaagtctttgggaatagtgctgcaatggcttcaagtcaggaggaggtgacccttttgggagctactggaagcccatttgtgtgcagggttcatattgccctcaagttgaagggagttgaatacaaatatgtcgaagaaaatttgaggaacaagagtgaactgcttctcaaatccaacccagttcacaagaaggttccagtgtttattcacaatgagaagcccatagcagagtctcttg

SEQ ID NO: 4169 - DNA, 250 bp, Glycine max
  unsure (1)..(250): unsure at all n locations; Clone ID: 701042386H1
aactttttctacttaccttttctcttaatccaaatacgatggcagccatggcaaccacaaccctctnttcaaaccccaaactctcattcttcaacggaaagcccgtcacatattnttcccgcgtcgcgcccaccaccaaattatcctcatccaaacaaggnacaattncccatgtncctaaccccacccccctacgacctccagtccttcanattccagcccatcaaagaatccatcgtgtcacgggaaa

SEQ ID NO: 4170 - DNA, 249 bp, Glycine max
  unsure (1)..(249): unsure at all n locations; Clone ID: 701042387H1
cgttggttgcgattgaaacggtacgatgggaagaggaaaattcaagagcaagcccaccggtccgccgccagttgctccaccccggaagatatgcttgctggaacctctaaccgtcctcgaacttttagacagaaagaagctgagcatgaagaggagcctgaggaagtncctggggatgaatctggagaagaatcagaagaggaaacttctaagaaaaaaggaacacaaggagttattgagattgaaaat

SEQ ID NO: 4171 - DNA, 60 bp, Glycine max
  unsure (1)..(60): unsure at all n locations; Clone ID: 701042388H1
ctcagatacncttgctgnggttanagcaaaaancnaagacnagagagagngagaaaatga

SEQ ID NO: 4172 - DNA, 250 bp, Glycine max
  unsure (1)..(250): unsure at all n locations; Clone ID: 701042391H1
aagcgccaaggctgcaacacccactccctcccctcccttcaatccctaattccgccactcacttccgctctcagctcagggtcattacgtagtancgtggagaatgggaagtactgaaaagatcccaatcanccgctgaaagttcagaaaccaccatcgagataaaaattaaaacattggattctcaaacttacaccctcagagtggataaacagatgccagtccctgctctgaaagancagattgcttc

SEQ ID NO: 4173 - DNA, 246 bp, Glycine max
  Clone ID: 701042392H1
aaatggtgctgccaatggtagttctctaaaatcaaacaaccaactatgcagtcctcctgcttctagtgcaagttctgttatgaggcagttttcagctcccccttcatctgggccttcaaatgttagattagtacagtcacctaagataatgccaggttatccggagcactgaagaagaatgaatctaagtggttggggaaattccggttccttgtgccaacacctaacctagcacggataaaatta

SEQ ID NO: 4174 - DNA, 247 bp, Glycine max
  Clone ID: 701042393H1
gacaaaattcagatcacaggcccttcagggaagataatgcttttacccgaggatgacccaaatgctacccatataatgattgccaccggtacaggtgttgctccattcagaggctatctacgccgaatgttcatggaatcagtccctacatacaagtttggtggactagcatggcttttccttggagttgccaacactgacagtcttctctatgatgaagaattcagcaaatacctcaatgactatt

SEQ ID NO: 4175 - DNA, 250 bp, Glycine max
  unsure (1)..(250): unsure at all n locations; Clone ID: 701042394H1
agaatttctatctatctcttgtttcaatttcaacaacggtttctcctttttcgttttgagtttcaatcaagccatcatcatgtctaccgcagcgcaacccaaggccaagaaaacnagcgtcgtccaagaagcccctctcccaccctcccttcgccgtgatgatagcagaggcgattgcnagtctgaaagagagaaccggttcgagccaatacgcgataaccaaatacatcgaagggaagcacaaggagtt

SEQ ID NO: 4176 - DNA, 248 bp, Glycine max
  unsure (1)..(248): unsure at all n locations; Clone ID: 701042395H1
gtaaaacagagggagcatgtcaatttggattcccccagccacgacgttgattagttgtaacagcaattgataataatcaggatgcaacaaatacgactccgcacacccagcagttaaattcattaattattttattgttctatnttattatattgtcattctctgcctctgcatagtttctgtttacttttcgctactcaaagtctcaaaaactcatcttccccgatttagtagtcattaattantgc

SEQ ID NO: 4177 - DNA, 247 bp, Glycine max
  unsure (1)..(247): unsure at all n locations; Clone ID: 701042396H1
aaagacacagccattgtttgtttactttccattgattgagcgnaagtttgnnatnnctgngnncatnntccattnggnnnnaggaagtctcaacctttagtcgaaanancaaggatctgagtgagtgagcgatcatgtgtggtggngcgattatctccgacttcattccagcgggtcccgncggcggggcgcacgcgtgaccgccgacatcctgtggccgaatttgaggaagcggtctcgaagtcgc

SEQ ID NO: 4178 - DNA, 273 bp, Glycine max
  Clone ID: 701042501H1
ccctatggctcgtccactccttgctcttagccctcctcctcttcgccgcgtccgacgccgacgacatcctgatccgtcaggtggtgccagatgttggcgaagcgaagaggaggacaacctgctgaacgccgagcaccacttcgcgagcttcaaggccaagttcgccaagacctacgccaccaaggaggagcacgatcatcgcttcggcgtcttcaagtccaacctccgcagagccaggctgcacgccaagctcgaccctccggcgtccagggt

SEQ ID NO: 4179 - DNA, 269 bp, Glycine max
  unsure (1)..(269): unsure at all n locations; Clone ID: 701042502H1
cacaaaccactatcaaaccattacatatgtatcaatcgtgctaaagtgagataacttagggtctgtatttaatcattttcgggatttatggggggtaggtgtggggagaacaagaacaagacctgagttgtnaaacttttttattttgagaaaaaaaaacattggacatagtaaagccatggaagagatcaccaagaacctatcagggactctcttttggtaccatcagttcaaganttggctaaaganaagatatctaatgttccaca

SEQ ID NO: 4180 - DNA, 271 bp, Glycine max
  unsure (1)..(271): unsure at all n locations; Clone ID: 701042503H1
aggccaccaaagccaaaggttccattgccaccaggcactgttgtgtcccctccaaggccaaggggtcgtcccccaaaagaccctaatgcccctcctaagtcccctaaggctaaggccacccctgccactggcagggccaagaggaaggcctaagaaggttgctcgctcaccggccgtgcntgctcccaccgccgtctccactggaaggcctagaggcaggcctcccaaagtgaagcctcagttgacagaagtcagtgttgagtcatagaat

SEQ ID NO: 4181 - DNA, 268 bp, Glycine max
  unsure (1)..(268): unsure at all n locations; Clone ID: 701042505H1
atttaatttgattttatagcgacgagaccagcgagcaccaccaccgcgaccggcgagcccagccaccgtgttcgacttcgaattgagtccgagaaggctgttagntaggcttttatattgaaaactgagacttgaagggaagcggttataattggtctggctttggacgtttaaacaattccgatcaagatccaatttngccttcccattttctcgtcgtttttttgtaacggtctttccatggcatatcccttctctgatttcaagt

SEQ ID NO: 4182 - DNA, 75 bp, Glycine max
  unsure (1)..(75): unsure at all n locations; Clone ID: 701042508H1
ctnnacacggagggatcggaggtctcaaggntaannncagggagtngagggattacatacgancattncaacata

SEQ ID NO: 4183 - DNA, 203 bp, Glycine max
  Clone ID: 701042509H1
tgattgaagaagatgccgatcagaaacatcgccatcggaaggcctgaagaggctactcaccccgacacgttgaaggcggggttggctgagttcatctccaccttgatcttcgtgttcgccggttcaggttccggcatcgcctacaacaagctcaccgacaacggcgccgccactcccgccggcctcatctccgcttccatcgc

SEQ ID NO: 4184 - DNA, 80 bp, Glycine max
  unsure (1)..(80): unsure at all n locations; Clone ID: 701042510H1
gcttcttactggtgccaagaagacggcagtttgcctgcactggatcagtnccttagagcatgaattncagcattccccgg

SEQ ID NO: 4185 - DNA, 272 bp, Glycine max
  unsure (1)..(272): unsure at all n locations; Clone ID: 701042511H1
gctctctcactcacaaacgcacactgaattcaaaaacatcgaaagagagaggcatggccgagcaaaccttccatacatgatcaagccagatggcgttcaaagangccttattggcgagattattagcagatttgagaggaagggttnttacttganagggttganactcgttactgtggaccgtccttttgctgagaagcactatgctgatttgttctgcaaagcctttctttagtggtttggtggattacattgtctctggccctgttgtt

SEQ ID NO: 4186 - DNA, 273 bp, Glycine max
  unsure (1)..(273): unsure at all n locations; Clone ID: 701042512H1
ctttctcaaacaaaaccagacggttatctagtcttccaatccttccccctattccctgttcctattcctattttatcaatcaataacataaataacacttcttcttgccttttaatatatntttctctcttcccctcttgtttcacctttcaacacttaattagagacgacccactttccttgcagatctttttccagggaaaagtttggatgttttgtggtaagagttagatgttgagtgatagacggnaaggttgaggtggagctggatta

SEQ ID NO: 4187 - DNA, 271 bp, Glycine max
  unsure (1)..(271): unsure at all n locations; Clone ID: 701042514H1
caaaagcctattcacttggtcaatcattctctcacttagcaaacaaacactgtgtgtagctgcaatggaagagtattactaccagagacatcacgtgccagnatttgggagctgggattggaatgataatcttccttttacacaatgctttgagtctgcaagacaggctggtttgctaagatatagttactctgagtctgaagatagagatctttatgtcactggagactgtatgagaatgatttngtcaaacccgctatgatcgttgttc

SEQ ID NO: 4188 - DNA, 274 bp, Glycine max
  unsure (1)..(274): unsure at all n locations; Clone ID: 701042515H1
tcaattatatccatccttatcgnttngantagttgatttttaaatttttgacgacctcaatgcataagangaatcaattcttgtagctttgattcgntttcttnnaattagatttgcaaacactactgaaaccgaaaccctaaacccttgtgaataagacgaatttgtnctttcctttgattagataagaaagagttagatttagattcagttcgttnacgcttttatttgttgtcttctaattagatttgggagtataagtgaaaccctaggt

SEQ ID NO: 4189 - DNA, 260 bp, Glycine max
  unsure (1)..(260): unsure at all n locations; Clone ID: 701042516H1
tcnagctcttgttgacattccnataactttggtgctatgatcanggngattnatgnatncnccgacaacnttantncagncaagtacaacgnacatgncaaacagccttaccgaacttggtagcanttncagcccccacannattggntgaatgatcnanntggnccaatgtactactcnggngtttaccantttgtctaccancntaacccttatgcnccaacctttggtacggatntggatggggcntccgaccccat

SEQ ID NO: 4190 - DNA, 271 bp, Glycine max
  unsure (1)..(271): unsure at all n locations; Clone ID: 701042517H1
ccaggtaccaaacagcatccgcggcagnancggtaaccctccaacaacaacacttccgctgcgaaaaatgtctctggtggcgaacgaggatttccagcacattctgcgtgtgctgaacaccaacgtggatgggaagcagaagataatgttcgcaatgacctccatcaagggtattggaaggagattcgccaacatcgcttgcaagaaggctgatgttgacatgaacaaaagggctggtgagttgactgctgctgagttggatagtgtgatg

SEQ ID NO: 4191 - DNA, 268 bp, Glycine max
  Clone ID: 701042518H1
gttataagctaggaaagctacactaggaacagatgtctccaattccaaaacagtttttagggtgatttcagaagcaagccactttcacttgatcttgaagtttgaggaggcatgcaacacttcttgcactgtcatctgtgtacttaagatgaaataaacatctcagtgcaagctcagaaatagatcttattctgaatactcagtggttaatttccatttctattttgtaaataatttctaacataagcatagctaaatcatgaaacca

SEQ ID NO: 4192 - DNA, 269 bp, Glycine max
  Clone ID: 701042519H1
actcaaactcgggatcacagaaaccaacaacagttcttgcactgaggtttcacgatgttgctggaacttgcacttggtttgtttgtgttagctttgtttctgcacttgcgtcccacaccaagtgcaaaatcaaaagcacttcgccacctcccaaaccctccaagcccaaagcctcgtcttcccttcattggccaccttcacctcttaaaagataaacttctccactatgcactcatcgatctctccaaaaagcatggccccttattctc

SEQ ID NO: 4193 - DNA, 269 bp, Glycine max
  unsure (1)..(269): unsure at all n locations; Clone ID: 701042520H1
gcaagttcctttttgtnttcctattattgggaattcttaactgtgaggcacaatatttcaatgccaacccatacgactatttacaactagccttaaggtggcctaattcctattgcttgacacatgaaggtggttgcagggaaatagtgccacaatattttactattagctaccttcatcccatgagaagaggaggccctgatctgcaaaattgcccctcaccatttaatatgccaaatagcactatggagatanacaagaatgaccta

SEQ ID NO: 4194 - DNA, 267 bp, Glycine max
  unsure (1)..(267): unsure at all n locations; Clone ID: 701042521H1
catatccttcaatttctcgaattggatttggagccaacccttcgcattttcaggaaactggggttggtgtatgcaattgttgtgttaggatttnncctggnagatatgagtaggtctccttcgttttcagtgagaacagaagtnagtccgagtgttgattcagaatcattgcaacaatgggttgttgcctttgtgctataaggtttgatcttgaacagggccagcttgtggaagantgttatccacatgggtgtttttcccatgatg

SEQ ID NO: 4195 - DNA, 267 bp, Glycine max
  Clone ID: 701042522H1
ggccgaagtgcagagaaaccaagaactgtggaagatgtaatagatagagctaaaccatggcaactatctgaaattctggatcctgtccaatgtcggtcagttaccatgcctgagagcacagattcttccagcaaggttgtcagacttttatatacaaactctgctgttggtattttggcccttggttcaaatggtatccagaagctttggaaatgggctcgcagtgaacagaatcctactgggaaggctactgccaatgttgttcca

SEQ ID NO: 4196 - DNA, 267 bp, Glycine max
  unsure (1)..(267): unsure at all n locations; Clone ID: 701042523H1
gttcattctgttttcttgaagtctttccctagccaatggccactgatcgtttgacccgggttcacagtctccgtgagangcttgatgaaacccncactgncaacaggaacgaaattntggcccttctgtcaaggatcgaagctaagggcaaggggatcctggcaacaccaccangtgcattgctgagtttgaggaaatccctgaggagaacaggcagaagctactgatggtgcctttggagaagtcttgagatctacacaggnagcc

SEQ ID NO: 4197 - DNA, 267 bp, Glycine max
  unsure (1)..(267): unsure at all n locations; Clone ID: 701042524H1
caacaaattactaaggagagttttgagagatcaaatgaagcgtgagtatcaattcagagcagactttagtaacattattaattcagtccattccctatgtctagaatacatttatactgggtgtgaggtcttggcgtgtaatcanatggtgaacatttgatattatnagtgggaaatccttcactttattaagtcgtaacgttgtntattgttcatccatntttgtcntcttntaatgtnaaataatggaatatnaagtannaagag

SEQ ID NO: 4198 - DNA, 270 bp, Glycine max
  Clone ID: 701042525H1
gagaatccgaggcgaagagaagagaaaaattaagatggaggggaaggagcaggatgtgtcgctgggagcgaacaagttcccggagagacagccgattgggacggcggcgcagagccaagacgacggcaaggactaccaggagccggcgccggcgccactggttgacccgacggagtttacgtcatggtccttttacagagcagggatagcagagtttgtggccacttttctgtttctatacatcactgtcttaaccgtcatgggagtcgc

SEQ ID NO: 4199 - DNA, 270 bp, Glycine max
  Clone ID: 701042526H1
ctacactatacttgtcaaccctttgagagttagaatggctgctgctattgaaatccccacaatagtgtttccaaactcctctgcccaacagaggatgccagtggttggaatgggatctgcccctgacttcacatgcaacaaagacacaaaggaggctatcattgaggccgtgaaacagggttacagacacttcgacactgctgctgcttatggctctgaacaggctctcggtgaagctctcaaggaagctatccatcttggcctcgtctc

SEQ ID NO: 4200 - DNA, 270 bp, Glycine max
  unsure (1)..(270): unsure at all n locations; Clone ID: 701042527H1
taanaattagggcgaacgggtcataggtgtgaagtgaaagagagattctgcgtgcaggaagagcgaagcanntggagtgtggcaatggcggaggagcaangtgaantcaggattnacaattccatgactcancagaaagagatgcttcaaaaccaaagtccccggcaaggtttccatgtacgtttgcggagtcactgcctacgacttcagccatctcggtcacgctcgcgctgcggtttctttcganatcctcttcagtaccttaagcac

SEQ ID NO: 4201 - DNA, 273 bp, Glycine max
  unsure (1)..(273): unsure at all n locations; Clone ID: 701042528H1
gagagaacaaattacgattttccatcattccagaaccgtaatctccaaaccccacttcgtcagatattaaagaagaaaccaacagagtttccattctcggtatctcttctctgatcaggttgacaacttgacatagcaatcctgctttcttggttccccatttccatgtttgtggattcttcctgattcaaaggcaatccattgtgtcttcttagctcagttttgagcttcaaaagttacaacttgcaacacaaatttntatctgtaactttg

SEQ ID NO: 4202 - DNA, 270 bp, Glycine max
  unsure (1)..(270): unsure at all n locations; Clone ID: 701042529H1
ggaggtcgccgtttcagtgagggaacaagtgcagatcgtgagattcagagaacgctaatggagctgcttaatcaactcgatggatttgatcaacttggaaaggttaaaatgataatggcaacaaaccgacctgatgtacttgaccctgctctcctgngtcctgggagattggatagaaaaatagaaatccctctgcctaatgaacaatcaaggatggaaattcttaagattcatgctgctggaattgccaagcatggtgaaatagactat

SEQ ID NO: 4203 - DNA, 271 bp, Glycine max
  unsure (1)..(271): unsure at all n locations; Clone ID: 701042531H1
cgttctttgtctcgcaatcttcactattttcaccgagcatntgcattccacattgaatatggctgaggctacacaatctaatgctgagttgttggagtggcctaagaaagataagcgccgcttcctgcatgttgtgtatcgtgttggtgatcttgatcgcaccattaagttttatactgaatgttttgggatgaagctttgaggaaaagagatattccagaagagaaatatgccaatgcttttctggatttggccctgaacaatcccattt

SEQ ID NO: 4204 - DNA, 120 bp, Glycine max
  unsure (1)..(120): unsure at all n locations; Clone ID: 701042532H1
gatgntgcaagacaganacaaagagaagggaaatatcaggagctagtgctaggtgcgagtactggagcaaaacgcgggtgtgtgtgactttcgttgganngagatgcagttccattcaga

SEQ ID NO: 4205 - DNA, 270 bp, Glycine max
  Clone ID: 701042533H1
ctttctcaaatatggctgccaggtggagttctggatttgtactggtgctgaccctttttggttatatacctggaattatctatgctgtctatgctatcaccaagtgatcaccctttaactttgtgtggacaataaacaaatgtcatgggcgtttctgtctttcaactcagatattagtgtttctttaatatatcgccaatgttgtcatattcttatgttctgtttttaaaaccccttttgttcttagcttaagcgagagtggagtgtgta

SEQ ID NO: 4206 - DNA, 269 bp, Glycine max
  Clone ID: 701042534H1
cggggttcttccctccaagcctaacggctttacgatacaccttcattcccgaatcgccaatttccacatttgcccctccccataaacggtgccgtttcgtgtaccagaagagaatcttgtacttcaccgcagtagcatagtccacacggtaccacattctcccagccaccgccgcggtgaggtttccgccgccgccgctgaagtttccgtgcttggtggccttcttctggtggccctggtagaacctttgcacggtggcgttgccgagt

SEQ ID NO: 4207 - DNA, 268 bp, Glycine max
  Clone ID: 701042535H1
ggaaagaagcagaggctgaggaaacaatgaagatattggtgaccggcgcatccggtttcctcggtggaaaactctgcgacgccctacgtccggcaaggttactctgtcagggttctcgtaagatccaccagcgatatctccgccctttctccgcacatcgaaatcttctacggcgacatcaccgactacgcctctctcctcgccgcctgcttctcctgcactctcgtcttccaccttgccgccctcgtcgaaccctggcttcctgatc

SEQ ID NO: 4208 - DNA, 268 bp, Glycine max
  Clone ID: 701042536H1
gtcacaggtgaaaatggcaccatagatggtcagggtgagttttggtggcagcaatttcacaggaagaagttgaagtacactcgcccatacctgattgaattgatgttctcagacaacattcaaatctcaaatctaactctcctcaattccccatcatggaatgttcatcctgtttacagcagcaatattattgtgcaaggcatcaccatttttgctcctgtcacatctcctaacactgatggcatcaacccagattcttgcacaaatg

SEQ ID NO: 4209 - DNA, 268 bp, Glycine max
  unsure (1)..(268): unsure at all n locations; Clone ID: 701042537H1
ggaatctgggtctagcgaaggagaagaggtgcagcaacgcgtngccgttgagggagagagtggagtggtcagatgttactccggttcctcaaaacgacggccctaaccctgtcgttccgatccagtacactgaagagttttccgaagttatggattactttcgcgccgtttacctcaccgatgaacgctcccctcgcnccctcgctctcacagccgaagccgttcaattcaactccggcaactacactgtgtggcatttccgacggtt

SEQ ID NO: 4210 - DNA, 268 bp, Glycine max
  unsure (1)..(268): unsure at all n locations; Clone ID: 701042538H1
ctttcaatatgaggaaccccactcacaagtcccctgaggttnaaaatgatggtgattttaaagttcatctgttctcttcatcatccgagttgcttgaaaagcttcatgaaaaatggagttcagtggagaaaccaccatacccagctatgtaacctagtatttatggaggtatcatacttgatccagcaatgatggtaatccccattgatgatcacatggttcacagagggcatggtgtgtttgatacagctattgttctagatggata

SEQ ID NO: 4211 - DNA, 265 bp, Glycine max
  Clone ID: 701042539H1
atccctccatcaaaagtggcatatgtagctaaagaactatatgatatgggttgctttgaaatctcacttggggacacaattggagttggtactcccggtaatgaattagctagatgtctttctttttgaaaactttatgctacacacagaacataataatatcagcctcatggcagcattcccttgtttggcatttgtcttcaaacactttttactaaacatcagcctattactcacctttcctgtgctttgtgttgatcgtgat

SEQ ID NO: 4212 - DNA, 266 bp, Glycine max
  Clone ID: 701042540H1
cgcaaaaggtgataactgatgatcgttgcccttcaacttctattgccttgaagagcaagcgcaaaaggtgataactgatgatcgttgcatgaaattcaactctttgtcctttggtcaatcatggaaagacaatgagaaagaaccacattttgtttctgatgggccagggttaaagcagatcaaggagctaatattggtttacttatgctaaaggccagcaaatagttcatatagtacttgtgatgctacataattaggaagttcaa

SEQ ID NO: 4213 - DNA, 267 bp, Glycine max
  unsure (1)..(267): unsure at all n locations; Clone ID: 701042543H1
ccttactttgtgttttgttgttcgaaaagaaatcaaggtctttgttttgattccttcgtgcttgcttctggaatctcaacaacaccttttgctctctcttggctggatcagtcgccgttactcaagaaacataacatacaaccaaggtgatggacaaggttgtggaggaggctgaaaaagtgaagaaggaatgggatgaaacatacaaganaacgcaagagcacattgaggcaattgcagagtatggaaaaccaggaagagcaaaag

SEQ ID NO: 4214 - DNA, 270 bp, Glycine max
  Clone ID: 701042544H1
tctcacttctcttggggttgtgagaaaagtgctcgggactcttacaacagatattgttcaaccaaggagtggaaattggcacttagcaaaaagaggtggaagactcatatcgtttaagggtcgtgcgaggctggtacatacaacgtgccgaatctctgtccctgggaccttaccaagaactgatgaaaaggcctcatctaacatctcgagggataagaagacagttccagaagcagatcctccgagtatcaaagacgttcagcttttgta

SEQ ID NO: 4215 - DNA, 270 bp, Glycine max
  unsure (1)..(270): unsure at all n locations; Clone ID: 701042545H1
ctctggagttaattcaagagcttcagaagcacttccctataaaacggtgtccgttgagaatacgtgctactgctccngatgaccaggtgcctgaacttttaggaaagctgaatgaatggaatgccactgttatttctaaagaaggatcttctgctgttatntttgaattggaacctggtctatataaggattgtcatgactttgttatgaataagatgcatggaagatttgaagttcttgcacactctctttatgtggagggggataccc

SEQ ID NO: 4216 - DNA, 274 bp, Glycine max
  unsure (1)..(274): unsure at all n locations; Clone ID: 701042547H1
cttgtcaaccctttgagagttagaatggctgctgctattganatccccacaatagtgtttccaaacttcctctgcccaacagaggatgccagtggttggaatgggatctgcccctgacttcacatgcaagaaagacacaaaggaggctatcattgaggccgtgaaacagggttacagacacttcgacactgctgctgcttatggctctgaacaggctctcggtgaagctctcaaggaagctatccatcttggcctcgtctcccgccaagacctc

SEQ ID NO: 4217 - DNA, 274 bp, Glycine max
  unsure (1)..(274): unsure at all n locations; Clone ID: 701042548H1
cttaggagtctntcttcctntgnaatagnaagcacgcgtttctctctctcnctctctcancgaatatttgtgtacttcctctnttgtgggtagattcaatttaccatgtcgagttcatcggaatactctcaattttccggccagaaaccggcgaggtcgccggagaaatcgagcttctctcagacttgtagcctgttgagtcaatacatcaaggagaagggtagcttcggagatcttaccctcggnatgacatcatgtgggtcactgagacatc

SEQ ID NO: 4218 - DNA, 106 bp, Glycine max
  unsure (1)..(106): unsure at all n locations; Clone ID: 701042549H1
tttcaaggtgtggtgtgtttcacatttgaagtaacactgaaaagaaaggnaagtgaagttgagagtttaagaagaacaagaaatgggggttggttcccaggatgcc

SEQ ID NO: 4219 - DNA, 267 bp, Glycine max
  unsure (1)..(267): unsure at all n locations; Clone ID: 701042551H1
ctctttgctacctcttagtcaaacaaagtaacaaaccatcctcccctctcttctcttcttttgttctctagatttcttctctcttgtttcttagaatccgtacaatctaatcaacataacaaaaatggatgcaattagttgcatggatgagagcaccaccactgagtcactctctataagtctttctccgacgtcatcgtcggagaaagcgaanccttcttcgatgattacatcgtcggagaaggtttctctgtccccgccgccgtc

SEQ ID NO: 4220 - DNA, 265 bp, Glycine max
  unsure (1)..(265): unsure at all n locations; Clone ID: 701042552H1
ttgcatttgtgtatgtatctactcaaattcaacatttgattgaggttctatctggggatggctctgtggctatgtggtgggatgaacaaagaatttggattctgaagtcagttaccagcatatttgcaattatagatggaatcaagaagtggctggggttgaacaaggtgaaattcaacttgtcaaacaaagccattgacaaagagaagctcaaganatatgagcaaggtaggttcgatttccaaggtgcagctgtgttcatggc

SEQ ID NO: 4221 - DNA, 265 bp, Glycine max
  unsure (1)..(265): unsure at all n locations; Clone ID: 701042553H1
gcatcacctcttcgtcattgtctatgccctgttggttgtacatggnatcaaactttacttaactaaggaatggtacaaganaacggttagcaccttcagttgaaccttatatttatgtagtngtnttggattgnaaaataatcgattaaaatgcacttgacattatgtgattganagacctggatgtatctggctattcccatcaccatttatgcattggaaagactggttagagcattcagatcgngcattaagtccgtcagaa

SEQ ID NO: 4222 - DNA, 256 bp, Glycine max
  unsure (1)..(256): unsure at all n locations; Clone ID: 701042554H1
gggaaaagtttggattttntgatcgttttgtgataagagttagatgttgagtgatagacggaaaagttgaggtggggttggattatatggatagtctttgttgcttcagctctttcagtcaggtggttggagggcgttcttcatgtaactctggcaaaggcaagagcagtcagtcctcagtcaagtatggctatagcctagttaaagggaaagcaaaccacccgatggaggactatcacgtagcaaaatttgtcca

SEQ ID NO: 4223 - DNA, 265 bp, Glycine max
  unsure (1)..(265): unsure at all n locations; Clone ID: 701042555H1
gaactgactcactcctttctctccctccctctaaatatatatttctgacaacccaaagtcaaacaaagaaaagcaactgaactagaaatagattgattgtttcatgataaaaaggcctcatgccttgtctcccttttgatcaagcgtgacaaacttgttttttttttnattattgtaaatcaaaaagttccctttcttttngttatanaataatttggaaaaaaaaaaactaaanggcatttttattngnatcttncnttcttnc

SEQ ID NO: 4224 - DNA, 267 bp, Glycine max
  unsure (1)..(267): unsure at all n locations; Clone ID: 701042556H1
ggaatattggttctcaacaatgccatagcttcttgcactgaagcaatagaacaacacaagggtaaacttgtggttaaggaggcagcnagagcngtgagtgaacgtgatgataaattgcttgccgagcacatggctaagctacgccaagataatgaagaggtcagtggtgacgnagacagtgaggaggaagaagatacaggaatgggcgaggttgatgtggataatggtgccgggataacagagtgacaaaaaacttgtgggtatagt

SEQ ID NO: 4225 - DNA, 265 bp, Glycine max
  unsure (1)..(265): unsure at all n locations; Clone ID: 701042557H1
cataaatattccgttttgcgtttctctgcctaaaaggattgaaagatgggtcaagcactaggttgctatcaagttgatcagtcaaatgtngctatcaaggagcattttggaaaatttgatgatgtcctagaacctggatgtcattgcctgccttggtgtctgggtaccagattgctggtagtttgtcactgcgtgtgcagcaacttgatgttcgatgtgagacgaaaaccaaggacaatgtctttgtcactgtggttgcatctgt

SEQ ID NO: 4226 - DNA, 269 bp, Glycine max
  unsure (1)..(269): unsure at all n locations; Clone ID: 701042558H1
ctctttgcaacacaacaaaanaagacaacacagagagaagcgtcttaataaacgctacttcctctgaaaaacctgatttcttctcttcttctcttctctttcgcttcgatcttcgatctctgannatnngagantgcatntcaatccacatcggtcangncggtattcaggtcggnnacgcctgctgggagcnctactgnctncgnncacggcattcagcctgatgggcagatgccangtgntangactgttggtggaggtgatgatgc

SEQ ID NO: 4227 - DNA, 266 bp, Glycine max
  Clone ID: 701042559H1
gttaatcatctgtctttcaagctaagattttcgggtttgtctattaattcaccaagaagcaaacttagaaggatttttcgaaagccaggtgttttcagaaacgagatccaggttttattgtcgaatttcgctagtcaaattaattttcataattatttttttctttgaaaccagccaagagggttatttttgatccctcaaagctaatttctctctctctttttttatttccgggactgaagaggttgtctatttgaaatctcctc

SEQ ID NO: 4228 - DNA, 270 bp, Glycine max
  unsure (1)..(270): unsure at all n locations; Clone ID: 701042560H1
gaagagagagaaacccatttctagagagagaaactcgcagtcgcagacatgtcttccttcgatgccttcgccgacgacttgaacgtcaactcttcttccactcgccagcacgacgatgacgaggacaacttctctggctacggcggctactcctccttcaccggaggattctccgccgacggagatgtcgccgtcgatcactccgccgccgcgtcgccgganatctacggcttcactgattcgaatcccgcttactctcagtctcccttc

SEQ ID NO: 4229 - DNA, 271 bp, Glycine max
  unsure (1)..(271): unsure at all n locations; Clone ID: 701042561H1
atcaaacacttctatcaacaacacaaaacaatctcttccccgcaattgtaacctcttattgacgcagactgcacccccattccctgatgttcaagttttctcatcatctgaatacacccttttcaatcttcatctctcttcacacacatacatcantccacttctatcaacaacaacaaaagagtgtgagatgttgtaaattctctaatatgtgtctttgatttttacatataanaaaaacaacacacacttctaccaaattttgctctaa

SEQ ID NO: 4230 - DNA, 269 bp, Glycine max
  unsure (1)..(269): unsure at all n locations; Clone ID: 701042562H1
gtagtctgcaaggtcttccaaaaggaaggtctggtcccaggaanggggcacactgtgngagaccatttaatgaggaagngtgggatgatgngganattggaatacctngngctgctttgaatgnancagttcccatcttgcctatgacatctgatggttctgttccaaatgacaatctccctgctagtggatgtactgggtcagcatccatatcntgtctatcaggatcactgnctnctcctggaggtctatnatcctggtcangaana

SEQ ID NO: 4231 - DNA, 270 bp, Glycine max
  unsure (1)..(270): unsure at all n locations; Clone ID: 701042563H1
cttttgatgcagggatatagttcgaattcaaaagaccgtaaagggaacttccttgatgattgggatctttcagaagctggtgggggtgaggtttctgagaatacagaccaaaggcaagtatccttagaccaagatcagagctcaatgcttaaagtgattngtaatcaaagagatcgatttaggacccgcttgcgagagacagaagaggaaataaggcagttganggngaagattngggtattaacagtggaatggaacagngcaaagctg

SEQ ID NO: 4232 - DNA, 267 bp, Glycine max
  Clone ID: 701042565H1
ctcagctagggagaagaaagatggaagatccagaggttattattgggagcttgaatccaaatgataccaggggaaagaccgttacttgcaaagctgccgtggcatatggtcctggagagccctttgtggtggaacgtgttcttgttcatcctcctcagaaaatggaggttcgaatcaagatcctcttcacttcaatctgccacaccgatctcagtgcttggcaaggcgagaatgaggctcaacgtgcatatcctcggattttcggcc

SEQ ID NO: 4233 - DNA, 253 bp, Glycine max
  unsure (1)..(253): unsure at all n locations; Clone ID: 701042566H1
cngtttccactatcatcttctctcagttcgacgtcagcgaannctttcattnnttgttgggggcaattcgattcgatttcgcagagtagaatgtttgggacggcgattcgatgtttggcgaagaaaccgaagccgaagatgggacccgtgatcctgaaaacgccgccggagcagaggcagacaatcacaagaaccctcttcgatataattaaggagcatggtcccatcactgttgctaacacctgggaacgtg

SEQ ID NO: 4234 - DNA, 257 bp, Glycine max
  Clone ID: 701042567H1
caaaacctcgtttggcttatctccctgccatttttgttcttcttctagttgtcttcacttctgtgacggcacaatccccagggccagaatcttcatcactccacgacaccttccttcaatgcctcaccaaatacacaaaaaactcctcatctcaactctccaacatagtcttcgctaacaccaaccccaagttccccactgtcctccaaaactacatccgaaacgcgcgtttcaacacctcctccaccccaaagcct

SEQ ID NO: 4235 - DNA, 265 bp, Glycine max
  Clone ID: 701042568H1
tgggttcaaacccaaaaccccttgtgcacctttctcttcttctcctggtcctcttttcttcctcaaccgaatccctgagatttgaaatccaatccgggcacaccaaatgcatctccgaggatatcaagagcaattccatgaccgttggcaagtaccaaatcgttagccccaacgagggtcaacctctgccagatgcccacagattcaccgtcagggtgacttcgtcttatgggaacaactatcactacggggatcgcgttcagac

SEQ ID NO: 4236 - DNA, 264 bp, Glycine max
  unsure (1)..(264): unsure at all n locations; Clone ID: 701042569H1
agattattgactgggaaaactcttctgtgaagcaagttgagattcctttcaagcctgctcgtgttctactgcaggattttactggagtccctgctgttgnngacctggcttgcatgcgtgatgctatgaataagcttggcagtgattctaataagattaatcctctggttcctgttgatcttgtcattgatcattcagttcaagttgatgtagcaaggtcagagaatgcagtgcaagccaatatggagcttgagtttcagagaa

SEQ ID NO: 4237 - DNA, 266 bp, Glycine max
  unsure (1)..(266): unsure at all n locations; Clone ID: 701042570H1
ctagtagttaagaaacattagttaaagaagataagaaacattacacctagctactagagtttaacatggcttccaaaacttgctcctcccttgctcttttcctcacactcaacctcgttttcttctcacttgtctctgcatgtggttatncaccatgccctggtccaaacccaaagccaaggcccaaccccaaccctaaccctaaccccagccgaagtggctcgtgcccccgtgatgcactcaaactaggtgtatgcgccaatgtg

SEQ ID NO: 4238 - DNA, 264 bp, Glycine max
  Clone ID: 701042571H1
caagtgttagggaggacaaataccgcccctttatgcgcgaagacagtgagaagaacatcaaatggagatatggtgctcctccaaattatgacgttgtcaacaaattatttgatgaaggcagaaccaaggtatggcctccgggttcacttgaagaaaaggtgcagactttagtgaagaattgggagatggaaatgttccacaaggaggatttcaaggataacagatcagtggacccagagaaatacactttcagcctaaacggaa

SEQ ID NO: 4239 - DNA, 266 bp, Glycine max
  Clone ID: 701042573H1
tgctaatagatccattttggtcattgaagacattgattgcagtgtggatctgccagagcgtcgccatggtgatcatggacgtaaacaaactgacgtacagttgaccttgtctggattactgaacttcatagacgggttatggtctagttgtggagacgagagaatcatcatattcaccaccaaccacaaggagaggctagacccagcactgttgaggccaggaagaatggacatgcacattcacatgtcctattgctcctaccaag

SEQ ID NO: 4240 - DNA, 267 bp, Glycine max
  unsure (1)..(267): unsure at all n locations; Clone ID: 701042574H1
gtgccaccgtatcccttatacaagcgcattgcttcagctctgttgaggtgcatggaatctgaaacattttgtaggataggcggcaatntagccatgaccaatgaatttgaagattcttccatncagcagaagcgtgnangagtggcacanattgattgtagagaaggggtttganatagagaatatttgangaatgttttctttgaacttcatgtgcaagagcctctttccacagcncaaatgatggcctaaaaccaattgaagggg

SEQ ID NO: 4241 - DNA, 266 bp, Glycine max
  Clone ID: 701042575H1
cagaaaggaaggaagtgcaaaacagaggaagcgaattaaaaaatcttatgatgcaaaggaccaacttttggagggtggtgaggatgatgatattgttcaatccaagtatgattcagatgaagatcagggtgatcaagaagcaaatccattaatggtgccacttaatgatggggcagagctcacccaagaggaggtcatgaataagtggtttagtcaggatgtctttgctgaagctgcagaggaaggagactttgagaaggatgaga

SEQ ID NO: 4242 - DNA, 196 bp, Glycine max
  Clone ID: 701042576H1
accaatggagtctccaacgacgccgtttcaacgctacccaatgaccctcaataccctggtatctctgctgttattcccggttggttctcagaaatcagcccaatgtggcctggggaggcgcactccttgaaggtggaaaagattttgtttcaagggaagtctgactatcagaatgtcatggtcttccagtcatcaa

SEQ ID NO: 4243 - DNA, 259 bp, Glycine max
  Clone ID: 701042577H1
tctggttggaattgtatggaatggagggttagctaagaagaaaataggagagggttagtttttaggggctgcggaaaaaagatagtgagtggtggccaatgggagcggagaggttttcccacgaccatgctcccttgattctgggtctccagccatccgccctggtcgacaacgttgccaccgtcgattggtccttgctccatcgcattcccggcgagcgcggtggctccatccctgtccaaattgaagaactggaatc

SEQ ID NO: 4244 - DNA, 269 bp, Glycine max
  Clone ID: 701042578H1
gaagcctaccctactattatccctttccttcctgcctctctttgctttcctggctctttcagaagatgttgaacaagttgtggacataagtggcaaccccattttcccaggtggcacatattacattatgccatcaacttggggcgctgccggtggtggattgaaactaggccggacaggaaactcaaactgcccagttactgttttgcaagattactcagaaatcttccgtggcacaccagtcaaattcagcatacctgggataagcc

SEQ ID NO: 4245 - DNA, 267 bp, Glycine max
  unsure (1)..(267): unsure at all n locations; Clone ID: 701042581H1
cagccagcagccataagcaacgcaacaattccatttccagtttctgattcgtcacgtcagacaaaggaaggggttagggtgtgacctgagatcaaaatgttgcggaggcttctctcttctcacctcaaaaccctannnnnnnnnnnnnnnnnnnnnnnnnnnnnnnnnnnncgatctgcttccgcctccgccagattcgccgctactctctcgctcctgcctctacttctcaacccaatccgaggatgctactgcgatcaaaaagaa

SEQ ID NO: 4246 - DNA, 265 bp, Glycine max
  Clone ID: 701042582H1
aaaaccctttcattccattttacattattgtaaagcattcttctcttttctttcttttctctttcctctctctctctctacgctttctcgtttgagatccctcaagggatccactaactgaaggagcaatggggttgacatttaccaagctttttagccggcttttcgccaagaaggaaatgcgaattctaatggttggtcttgatgccgctggtaagaccaccatcctgtacaagctcaaacttggagagatcgttaccacaat

SEQ ID NO: 4247 - DNA, 265 bp, Glycine max
  Clone ID: 701042583H1
ggaaatcttgcgcaagagaagagctgggaaacttcctggtgacacaacttctgttcttaaagcttggtggcaatcacattccaagtggccttaccctaccgaggaggataaggcaaggttggtgcaggaaactggattgcaattaaagcagattaataattggtttatcaatcaaaggaagaggaattggcacagcaatccttcaacttcaactgtcttgaagagcaaacgcaaaaggtattcccatcaaaactagtaatttgta

SEQ ID NO: 4248 - DNA, 264 bp, Glycine max
  Clone ID: 701042584H1
gtcggcgattatgttgacgtcaaggttaacggtgccgttcacaagggaatgccccacaagttctaccatggccgcaccggacgcgtctggaatgtcaccaaacgtgctgttggcgtcgaagtcaacaagcaggttggcaacagaattataaggaagaggattcatgtgcgggtagagcatgttatgccttcaaggtgcactgaggagttccgcctcaggaagattaagaatgatcagctaaaggccgaagccaaggtcaagggt

SEQ ID NO: 4249 - DNA, 263 bp, Glycine max
  Clone ID: 701042585H1
gtgtgatttgcagtcggattgccggtgtctgtttcgtcgaagtcttcctcgtttctggtttcctgattcgagcatttaactggtggttgggccaatctcactgggttgatccccagtccgaaactgacaactatgagcagcactctttaaaaccatatttcaagtatataaagtttttgaatgaagtaagctaaaagaagtactatggagaccaagcgctgcaacttctggctcctaacaaaaacagattttgtgcaaactgc

SEQ ID NO: 4250 - DNA, 263 bp, Glycine max
  unsure (1)..(263): unsure at all n locations; Clone ID: 701042586H1
cagtgagcagaggttttcattcaactggcatgaagaggatgggaggtggacatggccatgatgagccctattatcttgcatgcaaagcacatgtacaacttggacaggatgaagcaccaggggttgaaaatgtcccttgctgtattcactgctttcagcattggggttgcagttccagtgtatgctgtcattttccagcaaaagangacagcttctagctaggctcgtcttttacttccatttgcaacaataaggtggatttg

SEQ ID NO: 4251 - DNA, 263 bp, Glycine max
  unsure (1)..(263): unsure at all n locations; Clone ID: 701042587H1
gagacgcttcgcaaatctcaatcgaatctcagaaaaatgagaganatcatcagcattcacataggtcaggccgggatccaggtcggaaactcctgctgggaactctactgcctcgaacatggcatccagcccgacggcatgatgccttctgactccaccttcggtgtagcccacgacgccttcaacaccttcttcagcgaaaccggatctggcaagcacgtcccccgtgctgtcttcgtcgacctcgaacccaccgtcatcga

SEQ ID NO: 4252 - DNA, 265 bp, Glycine max
  unsure (1)..(265): unsure at all n locations; Clone ID: 701042588H1
ttcaaaccctaaaaccctagaagccgcttaattttntctagacttttctttttcttttcataaacccccaaccccacgcacactctcttagttctctctcgtttgcatttgcattgcttcctacattttctttaccttctctctgtctcttccatacncacatcatgtntcgcttggcttctaanctcgcttccaaagcaaggattgcnaggagtagcagccaacagattggaagtaggctgagtttgagcagaaactatgcggc

SEQ ID NO: 4253 - DNA, 266 bp, Glycine max
  unsure (1)..(266): unsure at all n locations; Clone ID: 701042589H1
aaaacggaaagttgagctaccaagtgagaagcatgttgatggggttttctatgatcctccacttactgggacacaagttttttcanancctaccactgnccaaccaatttaggtgtntgaataaagcagctgtaataatggagggggagcaaaaccctgatgggagtagagcaaataagtggaaagttgtcagcatccaacaagtggaagatgtgaagtgcttggcaaggattttcccaatttgggctgcagggatcctangattt

SEQ ID NO: 4254 - DNA, 263 bp, Glycine max
  Clone ID: 701042590H1
cagcataagaaagatctccaacaaataagacagtctgctggaaatcacgaaatagactatatgccttacatgggagaagttgttcctttcaaaaactatctttaccgatatactactccctacttggcctccaatagctccagtcccctctggtatgcagttaggcgtgcgtctgctcatataattgtgctatccagctattcaccatttgtgaaatacactcctcaatacatgtggctaaagaagagctgaagcgagttgag

SEQ ID NO: 4255 - DNA, 265 bp, Glycine max
  unsure (1)..(265): unsure at all n locations; Clone ID: 701042591H1
aaaccctactcattctccatacctcaacgaagaggttaaagagacggcaacactttgctgtccgccttgaccgagcagagcttcgtcttggccctcgattttgccctaaagtactcccagtcacaacagacaccgtcgtcgttgtcgtcatcatcaatggcaccgaagcagaccaaggctgagaagaagatcgcttacgatgcgaantgtgcgacctaatggaggagtacggccagatcctcgttgtgaatctgataacgtggga

SEQ ID NO: 4256 - DNA, 267 bp, Glycine max
  unsure (1)..(267): unsure at all n locations; Clone ID: 701042592H1
attttcgtggcattcgtcactctcgtgtcgggtgaaggcgaaaaccaaatcaagatgctgagagtgggcgcaaagaggcttttgggaacgacgtcgttgggcgttagggttccggcgaggctgtaccacgagagggttgtggatcactacgacaacccccgganacgttggatcgttagacaagaacgacccgagcgtggggacgggtttggtgggggcgccggcgtgcggcgacgtgatgaagctccagattaaggtcgacgacaa

SEQ ID NO: 4257 - DNA, 266 bp, Glycine max
  unsure (1)..(266): unsure at all n locations; Clone ID: 701042593H1
cattgaccctattcctttctttattttcggattaaattaactaacatcaatttttgtntttggcttcagtgataaattgtcagcatctatttcaaggtttcgtctttnntgtgccttttttcccccagaaattcataaattcgtggaagttcncggctcgatttgtgcattgaattggtgccgcatttactctacgaattgaacaaggtggcatgatgcgatgagatgatgttctatgagggtattctcagtgtaacactctgaat

SEQ ID NO: 4258 - DNA, 266 bp, Glycine max
  unsure (1)..(266): unsure at all n locations; Clone ID: 701042594H1
tgtaattgtaaagccaccacaatcgctacccttggctgcaagttaagcctaagcctgagacataccatagagaaagtgattcaattaatatattatatggtgtttctcttcaattcccatggagcctaagacacaacctcaagcgaatagtcctccaccaaaaccttgggaacaagcgggttcctcttctggtccagcacctttcaaacctccgtcagctggcaacacaagtgatgtagttgangttcaggactgcaaaactgggg

SEQ ID NO: 4259 - DNA, 271 bp, Glycine max
  unsure (1)..(271): unsure at all n locations; Clone ID: 701042595H1
cgaaaatgtggaagagaacgggttttgaagaagaagcagttcaattgatcaactcagatttcagggacctaagtnctagctgctaatagactcgcccatcatgccatcaaacttggtggcattggctttggagcctctnttttcggattgtttgctgccattgctgctatttatctgttgattttggatcgtacaaactggaaaacaaatattctcacagcactactcattccatacattttcttcagcttgccttcattaattttcgacg

SEQ ID NO: 4260 - DNA, 278 bp, Glycine max
  unsure (1)..(278): unsure at all n locations; Clone ID: 701042601H1
aacaaactcacaaaatggataagcaaattttgtttcttcttccccttctcatcatgtccctncttcactgtttcaatagccgctgaatcttccagctcatgccccatggatctcaactatgttgagacctttccatgggantcttcatcctgcagagaccctgttgacaagaaccactgctgccagtcntgnnaagtgtaattggnataggactttcccaacatcttcaaacnaacttccttgnttcaacttnccaatgaaaccatttcctccaattg

SEQ ID NO: 4261 - DNA, 272 bp, Glycine max
  Clone ID: 701042602H1
gggtaaccacggcgccactcgaacaagtgcggcaattcccaacgcttctcttctcagggggagttcgaatcctgtgagctttcaatatgacgtcgttcttgaagcctgagaatgctctgaaaagggcggaagaattaatcaatgttgggcagaagcaggatgctttgcagactcttcatgacctcatcacctcaaaacgatacagagcatggcagaagacacttgaaaggattatgttcaagtatgtggaatttgcgtcgacatgcgaaaag

SEQ ID NO: 4262 - DNA, 271 bp, Glycine max
  unsure (1)..(271): unsure at all n locations; Clone ID: 701042603H1
tcttcatgaagaataggagttgtcaagatggttatgcagtgaaatcatctttgaaagctgaagatggaattctgtatccccttgagaagagcttcttctttctacctaaacctcccactcttattcttcatgaagagattgactatgtggaattcgagcggcatgctgctggtggctccaatatgcattattttgaccttcntatcagactaaaatctgaacaagagcatctcttccgtaatattcagagaaatgagtaccacaatttgtt

SEQ ID NO: 4263 - DNA, 269 bp, Glycine max
  Clone ID: 701042604H1
attacttctttccttctctctctcaccaaaacaatttgctcacaaaggaggaaaaatggcacctttcgtttccctctctttgttgcttctctttctcaaccaccccctcctttccctctcaaccaaccctgaagggaacgctctgcatgctttgagaagcaggctttctgatcccaacaatatgttgcagagttgggacccaacactggttaatccctgtacttggtttcatgttacctgtgactccaacaatcatgtgatcgcttaga

SEQ ID NO: 4264 - DNA, 271 bp, Glycine max
  Clone ID: 701042605H1
gtcaaacttgagttcaaacactctcatcttcttattcttctgctttcactctctgactcaatcgttctaatccacaaaaaatgaccttaaattacaacattgccctcgccttctctgcggtgctcacgctgctcctctttcccctactgaccgtaggggagctcgtggaggagcagccactagtcctcaagtaccacaacggccagctcctgaagggccgcatcaccgtcaatctcatctggtacggcaccttcaccccgatccaacggtt

SEQ ID NO: 4265 - DNA, 269 bp, Glycine max
  Clone ID: 701042606H1
gcaaatttctactttctgggttttctatttgagattcgttgttccaatgagcgatcacttggtggtgttcgttgaccgtctcgcgcgccctgtccccgttgacccggtggcgcagcgccttccgagccgtctcctcctccggcccccgtgaatgctgacgcttccgggagctccggcaccgctccggtggaggattgtgacggagagggcggcggcgaggaggagccgctgatccagatggcggagtgccgcatctgccaggaggagga

SEQ ID NO: 4266 - DNA, 270 bp, Glycine max
  Clone ID: 701042607H1
attgatgaagagggataatgatgtctcttggaaatgggtcatttgctttttacaaatttttttcaggggagaaaaagggtaatctgtaaattgattttcccattgctgaagatgtacagactacagagttcatgtcaagctgattctgtcaaacctgctatttaatgcagttgacagattcagttgttctgaatttcatgctgtcacattgtataaattttacaaatatttgtcacatttggtgaaaacccaatgtgaacatttcttcag

SEQ ID NO: 4267 - DNA, 272 bp, Glycine max
  Clone ID: 701042608H1
ctcgatcaactcaacacaaaccaaaactcaagctaaaattctcactctctctctcatctcgagatcatagtatcatattcaatatcatttcataccaaacacatggctttggaagctctcaactcaccaacaacaaccgctccatcttttccctttgacgacccaactattccatgggcgaaacgaaaacgttcaaagcgttctcgcgaccatccttctgaagaagagtacctcgccctctgcctcatcatgctcgctcgcggcggcaccac

SEQ ID NO: 4268 - DNA, 269 bp, Glycine max
  Clone ID: 701042609H1
gggcacagtccacgtttcttgggtgcagccaagagttctgggtattcaacagatcaaatccttacgggatcgactagacagttggaccggaaaagttcacactgcattgttgtccattgaggcagaaacacctgatctaattggatcgtgatctttctttaattttttttctgccctatgtaacaatttctcaagtcaaagggaacacatcctaaggcttcaaaagatgaagagaaattccaagtgacatgggcaatgtagccaacttg

SEQ ID NO: 4269 - DNA, 268 bp, Glycine max
  Clone ID: 701042610H1
cacctagcgtttaaccctagagttttggtttggcctttcttctcttctcttcttatttcccacaaaatcatttcacaaagagaagagacagtggatcgcggtttcatttcagaccaaagatggtgcagtggcagagacacgttttcccctttcttcgccacattcacaagcgagcagtggaaccccacgccacccattctgctccaagccttgtaatttctcgcttagcctcttctctttcacaaggtcagttaggaaggagaacatg

SEQ ID NO: 4270 - DNA, 267 bp, Glycine max
  Clone ID: 701042611H1
aaaatcttatcttagcaatagctacccctatcacaacaatactctattaggcaaaaacaccaaatgggagaggaaaaagagcagcctaagaatgaaaccgagaagaagcccgaggaggccgccgcagcccccaagaaagacgacggacccatccctgtcgtttacaagctcgacttgcattgcgagggatgcgtcaagaagatcaaacgcacatgtcgccacttccaaggtgtggaaaccgttaaggcagatctatctcgaacaaag

SEQ ID NO: 4271 - DNA, 268 bp, Glycine max
  Clone ID: 701042612H1
gaatagattacccaagggtgcacgaagcttgtcatacacatcaggggtctgtgcatggagcttactgctgctggggttatggctgctgaaaattgtgagagctatatgttagagaaactaggccacgcagaaaagctatctctagcttctgttaggcatgaaatgcttgaaactcttatacctcttcagatctcgaggatgtgatttgttggtgctcagtagcttttagacaatgattctgcataatgcaatggcaaaatatttgcca

SEQ ID NO: 4272 - DNA, 271 bp, Glycine max
  unsure (1)..(271): unsure at all n locations; Clone ID: 701042613H1
gcatgtttttcttgatggattagagaatcagatagagactcggcattcagtttctctgtgcttgttcttttgccctattggggttcttagtcatgccatcaccaaagaaatgactaaaagtgccagaaaaaacaagcacagcttatagagggcacctacttgctttcccacataaccaaaaangtaacttaatttaaaaacttgaacatgantttctgaaactcttaaacttcatgttcaagtttttaaattaagttacttgntnattttg

SEQ ID NO: 4273 - DNA, 272 bp, Glycine max
  unsure (1)..(272): unsure at all n locations; Clone ID: 701042614H1
attttcaaagccagacagacaaacatgtccgagaatattgagtccaattctccttcgctttccctctttatctgaaaggtatggagtgttttgacttctggaagagataatggtgcagtgcctancacggattaaagcatttgtgtgctgctctggtaaattgttgtgatgccgattcgtcaaagcaacctacaggtttagaaaatccagaagttcttgcaagagaaacagtgtttagtgtaagtgagattgaagcgctgtatgaattgttc

SEQ ID NO: 4274 - DNA, 274 bp, Glycine max
  unsure (1)..(274): unsure at all n locations; Clone ID: 701042615H1
taattacttgccttgaggaacgttccagaccacatacagaggtttctctagtgatcttcgttcttctgtggagatctgttttttcatctcacttttcttctaattaaggaacaagctttccgcagttgaaaaccctagctagctagcttccaccaatttgaatcaccaatggctcgntctttctctaacgtcaaggttctctctgctcttgtggccgacggattctccaacactctcaccaggcgtgggtacgcagcagcgacacaaagcgcaa

SEQ ID NO: 4275 - DNA, 121 bp, Glycine max
  unsure (1)..(121): unsure at all n locations; Clone ID: 701042616H1
gttgcaggggagatttgagtctganacagagctttccctgcttggcaagtgcatacaatnatnantgcccaaagatagcatnagaaaacatgagatgcacaattncacancntcgttcngt

SEQ ID NO: 4276 - DNA, 273 bp, Glycine max
  Clone ID: 701042617H1
cataaatattccgttttgcgtttctctgcctaaaaggattgaaagatgggtcaagcactaggttgctatcaagttgatcagtcaaatgtgggctatcaaggagcattttggaaaatttgatgatgttcctagaacctggatgtcattgcctgccttggtgtcttgggtaccagattgctggtagtttgtcactgcgtgtgcagcaacttgatgttcgatgtgagacgaaaaccaaggacaatgtctttgtcactgtggttgcatctgtgcaat

SEQ ID NO: 4277 - DNA, 271 bp, Glycine max
  Clone ID: 701042618H1
tggggatcgatcttaaggctgggggtaagagcaaaaagaccaaaagaacagcaccaaagtccaatgacatctacctccaaattacttgtcaagctttatcgattccttgttcgaaggacagacagcaatttcaatgctgtgatactcaagcgcttgttcatgagcaaggttaacaagcctccaatttctttgtcaaggttaattaagtatacgaaggggaaggaggataaaattgctgtagtagtggggactgtaactgatgatatcagag

SEQ ID NO: 4278 - DNA, 270 bp, Glycine max
  Clone ID: 701042619H1
ggcctgccactcctccggagagacctaaaacaccaccttatgtccctccaagagctccttctcctagacctccctctccgagggctccttctccaaggcctccgtctccaagggctgcttctccgagggtggcttctccacgagttacctctcccaaagccgcgtcttcccggattgctcatcaccacaaggaggttggctacagaccagagccaactttgaggcaacagcatgccacagctactaagatccagtctgtttacagaggct

SEQ ID NO: 4279 - DNA, 267 bp, Glycine max
  Clone ID: 701042620H1
gaaagatgcaaccaatgattttgaggatattggtcacagcaccagcgccgtagccatgatggatgagttctatgttggagacattgatacatcaaccatccccagcaaggttaagtacactcctccaaaacaacctcactataaccaggacaagatgccggagttcatcatcaggatcctccagtttctagttcccttgtttatcttgggtttggcagttggtattcgtttctacaccaaatcaacataatcattaatgcaagagca

SEQ ID NO: 4280 - DNA, 267 bp, Glycine max
  unsure (1)..(267): unsure at all n locations; Clone ID: 701042621H1
ggatgagcatcggcttctggtttatgaatttatgcccaagggtagcatgnaaaatcatctattcagaagaggttcttactttcagccattctcttggagtttgcgaatgaagatagcacttggggctgcaaagggccttgcttttcttcatagtacagaacctaaagtcatataccgtgactttaaaacttcaaatatcttactcgatacaaactacagtgccaaactttctgattttggcttggccagagatggtcctactggtga

SEQ ID NO: 4281 - DNA, 267 bp, Glycine max
  Clone ID: 701042622H1
gcgccgtgagatcgtgaggaggagaaagaacggagaggttgttgagggtgaggtcagcggggttttccttgacactttgcttgaattcgctgaggatgagaccatggagatcaaaatcaccaaggaccacatcaagggtcttgttgtcgactttttctcggcaggaacagactccacagcggtggcaacagagtgggcattggcagaactcatcaacaatcctaaggtgttggaaaaggctcgtgaggaggtctacatgttgtggga

SEQ ID NO: 4282 - DNA, 248 bp, Glycine max
  unsure (1)..(248): unsure at all n locations; Clone ID: 701042624H1
gttgaatatttgtgaattgcgacatcaccacacgaccaantccttctcgctttgttgacttcttggcatcttttcttgctacaatcattttttcaatcaaccttctcttcctcaacgcacttcaattcttcctttttcgcgtacgttggagtcttggagcgaaccttcaattcaattcttcctagcgggttttctaactaggtggtggttcttgttaaaagctgccatctgggttctgctaccgttga

SEQ ID NO: 4283 - DNA, 265 bp, Glycine max
  Clone ID: 701042625H1
gcttcttgcaagaagtttctgagcttttatatcctctatatatagttctctggcaattaaggtctcatccaaataagcacaaatgggtagccagagttacttcaaggctttgattatttgccttatagcactaattggatcaactcaagctcaattgcagcttggtttctatgccaaaagttgtccaaaggctgagcaaataattctgaagtacgttgttgagcatatccacaacgctccatcactagcagctgctctcataaga

SEQ ID NO: 4284 - DNA, 266 bp, Glycine max
  Clone ID: 701042626H1
atcttcctctattggttgttctatgtctgctcatgaactaactccctctgcaatcccctacctaatccctttcaatttccccatttttttccccattttttttcctaataaatcagatatgtaaaatcctaatttctctaaccctaacaaaacccccaaaattcaaagaagaagctggagatctgcgcgagttcaagatcgtcggagggaggaggagatccagtggtgatggatgagagaaagaggaagccaatggagtcaaaccg

SEQ ID NO: 4285 - DNA, 264 bp, Glycine max
  Clone ID: 701042627H1
gtacaacaacatgtaccgcataatgttcgaccggaggttcgagagcgaggaggatcccatcttccagaggctaagagccttgaacggagagaggagtcgcttggcgcagagctttgagtataactatggtgattttattcccatcttgagacccttcttgaagggttacttgaagatttgcaaggaggtgaaggagacgaggttgaagcttttcaaggattacttcgttgacgagaggaagaagctggaagcaccaagagcacc

SEQ ID NO: 4286 - DNA, 264 bp, Glycine max
  unsure (1)..(264): unsure at all n locations; Clone ID: 701042628H1
caactacctcaacttttacaagctctatcaacctcttgtggtagttgaggtagtaaaagttggnggcgtgatcgggtacgacaacaccctatggaacggatctgtggtggcaccccctgatgctcctcttaggaagtatgttaggtantacagggattcgtgctggagctcaacaaagccctcgctgtggaccccaggatcgagatttgcatgctcccggttggtgatggaatcactatctgccgtcggatcaagtgatttctg

SEQ ID NO: 4287 - DNA, 248 bp, Glycine max
  Clone ID: 701042629H1
caaccctcccttctccctatttacaaccgatcgccaccactttttctctctaacttccactggacgacgtcgctttttactctctgcttttcctgtgcttctttcaatcggtgcgagggattttggaccccaacgatttcctcgctctgcaatcaattcggaaatcccttcacgatgttcccggttccaattttttctcctcctgggacttcaccgccgacccctgcaacttcgccggcgttttctgt

SEQ ID NO: 4288 - DNA, 271 bp, Glycine max
  unsure (1)..(271): unsure at all n locations; Clone ID: 701042630H1
ctcagatgttcnttccatcaaccactccagcnaagataancttgtngtgtccacctcctcctcnnttcttcacactgctgtngatnttgttaacgagaccaagttggatgacgagatcaagtcatggctagcatttgctgcacaaaaaattgttgaagttaacgnattggctaaggcnttgtctggcaacaaggatgtggccttcttntctgctaatgctgcagctcaggcttcaaggaagtcntctccaagagtgaccaacgaggctgtt

SEQ ID NO: 4289 - DNA, 272 bp, Glycine max
  Clone ID: 701042631H1
gaagtgccaaattaagagagaaacagagagatagaaggaaaagcatcaaagatgaaacccaacttttcatttttgtttaagcttttgatactgcaatatctagcagttctatccatttctcaggaatttgatttcttctactttgttcagcagtggccaggagcatactgtgacacaaagcagagctgctgttatcccaagactgggaaaccttcagcagatttcagcattcatggactttggcctaactacaatgatggatcatggccctc

SEQ ID NO: 4290 - DNA, 238 bp, Glycine max
  Clone ID: 701042632H1
agcgagcaactttgttagatttcaatcatttccgagaatatcgaattttcaatttcgtgtcttccattttcgggttcaattctgaggtttcatacaaacaagggaagatatcacattcttaaagattcacaatttcagataaatattatatgtatctgaaacttttttaataagaagaatgccaggcattcctgttgcagctcgtgctacctcaagccatccagatgcttgtgaacat

SEQ ID NO: 4291 - DNA, 271 bp, Glycine max
  unsure (1)..(271): unsure at all n locations; Clone ID: 701042634H1
gtcaagaaggtcaacgaatctggtttaggtgccgggcttaaagttacgggttggcttaactgggccagaaagcccaaaggattaggacagtgagatcccataaaaacaaaacaaaaggacaaaacgacagcacttcttctcttctctcatttttcagtttctcagtttcttattcgttaatcgttagatctcatcttacacttcaccggcgagtccatctcgcgccaccgtcgantgagcttccggccatcgccgttggttccctcacttt

SEQ ID NO: 4292 - DNA, 269 bp, Glycine max
  unsure (1)..(269): unsure at all n locations; Clone ID: 701042635H1
ctttcgctctctctgcttcactttctcgcttttgcattttcttnnganaaaaaaaaatcctcagaacaaaaataggtctccttcttctcngatctaccaaagcttcaaattcnccntagttnggnttgtctgtgagtttggagtgtaatgtcgccgccgacnctggtaacggaggaggangggcggagcnaccgtggcgtccgattcttngcaatccttgggnctgtttctctcagaatggtgctggatttaaagaacggnattactta

SEQ ID NO: 4293 - DNA, 267 bp, Glycine max
  unsure (1)..(267): unsure at all n locations; Clone ID: 701042636H1
gcagtttcgtgctttcccgccgccgctacactgccaccgtcttccccgccgtctccgccaggttctctctcactccgcaaccagnnnnnnnnnnnnnnnnnnnnnnnacgaaaccctaaacttgaaacctaccccactcatcgtgtgtgtgtgtgcagagatggcagaagaggattcaaagcctctgaactacatctccgaggtcattctcaagaagaggaagaacaccgaagcatgggctttaaggaaaaaagaacagttccaggc

SEQ ID NO: 4294 - DNA, 264 bp, Glycine max
  Clone ID: 701042637H1
gtagcgggtctgcgctgattcacaataagaatttgttgatatcaccaattcataatgcattaaaggtgaggggcaacaatagaagttgtggcttgcgtgttcaggtttctatggtggactcttcctccgctgatttcaccagacgcatcgaacgagcttggtcaatttctaagcaaccaaggccaatcgtgtgttcgtcttgcgactcaaaagggcatattgaatgtaaatggtgtgcgggtactggtttttttattcttggtg

SEQ ID NO: 4295 - DNA, 267 bp, Glycine max
  Clone ID: 701042638H1
gagaatggctcccaagggtttaatctttttgggctgtgttatgcttctcagcactgtcactgagtcgttgtcttgcggaggataatggacttgttatgaacttctacaaggaatcatgccctcaggctgaagacatcatcaaagaacaagtcaagcttctctacaagcgccacaagaacactgctttctcctggctcagaaacatcttccatgactgtgctgttcagagttgtgatgcttcactgttgctggactccacaagaagga

SEQ ID NO: 4296 - DNA, 267 bp, Glycine max
  Clone ID: 701042639H1
ggaagagagagggagattctttgtttgctaccttctctcggaaaaatggttacgttcaggtttcaccagtaccaggtggttgggagggctcttcccacggaagcagatcagcaccccaagatctaccgaatgaagctctgggccaccaacgaggttcgcgccaagtccaagttctggtattttctgaggaaactgaaaaaggtgaagaagagcaatggccaagtgcttgccatcaacgagatttttgagaagaacccaaccaaaatt

SEQ ID NO: 4297 - DNA, 268 bp, Glycine max
  unsure (1)..(268): unsure at all n locations; Clone ID: 701042640H1
gcaaaaacacccttcattcagtttgtgacatgtctcacaagaggctaggaaaaaagcttcaacctgccaagaaggcatggaagagcttctccaacacagtccaacacaaactccacaaactcaacattcccaattccatgaaaaccacccttcaacgcctccttcaatccttttactcccttggcactgtcatacactctaganttcatcgttcattcaccaccataaggccacgtggtggtactgccacttctaattactaccatgt

SEQ ID NO: 4298 - DNA, 256 bp, Glycine max
  unsure (1)..(256): unsure at all n locations; Clone ID: 701042641H1
tggatttgggacttggtcgtcaacacagtctaattnatatctttttgctccntcgnnnnnnnnnnnnnnnnnnnnnnnnnnnnnnnnnnnngcaacgcactgaattcgatcaatcaatccatcttcaattgctttgtttcgatcggaggaaaatggccgatcagttatcgaagggagaggaattcgagaaaaaggctgagaagaagctcagcggttggggcttgtttggctccaagtatgaagatgccgccgatct

SEQ ID NO: 4299 - DNA, 261 bp, Glycine max
  Clone ID: 701042642H1
ctggaatttggttccaatgaaacaatcttcttctccggggcacttggccttagccttagacaatccacgtagaacacttcacgtgtcttgtggctccacatcaccacatgcttcccagagatcatcaattcaggggggtgaagcttttttcaggggtgtgttggaaagtatgcaatctgtttacttgaacagaaatcgtactgctaaggccatattggaccttgttcactctgctgagaataactcattatgctatgatca

SEQ ID NO: 4300 - DNA, 262 bp, Glycine max
  unsure (1)..(262): unsure at all n locations; Clone ID: 701042643H1
aacaaagtacccttgtnttccccaagggaaatcccataccaagtgtcaaggcactgaccatctacaggtcaggaaccttttctattgatgttcagtatgatgacgtgagtggtttgcaaacacctgcaaagatcagcacatatactattggccctttccaatctacaaaaaatgaaaaagcaaaagttaaagtgaaagttcggttgaatgtgcatggaattatatctgtcgaatctgcaactctactggaagaggaagaaga

SEQ ID NO: 4301 - DNA, 264 bp, Glycine max
  unsure (1)..(264): unsure at all n locations; Clone ID: 701042644H1
gaaatggtcttgggactcttacctgcccttcattctcgacaaggccagggagatgaaggacgnggaaagggtcttaaagatgcacactctcaacaccacctactgttacagtggagtcaaatgggactccattaatctggagcatccctcaacttttgagacgctggcgatggagccggagctgaagaatgcggtgatagaggacttggataggttcgtgaagaggaaggagttttataagagggttgggagggcgtggaaacg

SEQ ID NO: 4302 - DNA, 192 bp, Glycine max
  Clone ID: 701042645H1
accaatggagtctccaacgacgccgtttcaacgctacccaatgaccctcaataccctggtatctctgctgttattcccggttggttctcagaaatcagcccaatgtggcctggggaggcgcactccttgaaggtggaaaagattttgtttcaagggaagtctgactatcagaatgtcatggtcttccagtca

SEQ ID NO: 4303 - DNA, 274 bp, Glycine max
  unsure (1)..(274): unsure at all n locations; Clone ID: 701042647H1
accgacagagccatccacgtcatcttcattggcgagggacccaaccaccgtggttcacccaaggcgcgagccattcgagcacggcctcttggccaatcccgcgcctcatcttctccgacccgacgcaaaccctaatctcgttgaagcagaagcttctcgagttatcctctaaccagcgagtcgantcggcggcaatctccgagtcactgcagatccccattgagcacgccaggctcgtccttgataccctcgcctcgattctgcantccgactt

SEQ ID NO: 4304 - DNA, 274 bp, Glycine max
  unsure (1)..(274): unsure at all n locations; Clone ID: 701042648H1
catttctccatttccattttctctntcanttttcaagaatcgtaagctatgggaaagtcttacccaactgtgagtgctgattaccagaaggccgttgagaaggcgnagaagaagctcagaggcttcatcgctgagaagagatgcgctcctctaatgctccgtttggcatggcactntatccggaacctttgacaagggcacgaagaccggtggacccttcggaaccatcaagcaccctgccgaactggctcacagcgctaacaacggtcttgac

SEQ ID NO: 4305 - DNA, 266 bp, Glycine max
  Clone ID: 701042649H1
gtggcaggggttttcttaatatgggcttcctcacctgtccatcaggccagaagcattgatgcctcgacccatgctgtagatatttccaatggaaatgttttgtcccatagtaatcaattaaaaatagcttcccctctgagtagtggattttctgattatggatctaatgctaatggacagtctgtggttgctaaacttcgaccaaaggttcatgtaggtaaaggactgagtgaagtaaatggaagttctgatgttttaggtgagca

SEQ ID NO: 4306 - DNA, 264 bp, Glycine max
  Clone ID: 701042650H1
ttcagatctatatttgcctcagaaaagagttggacaatcattgtacagtcagcaccaagagatgtgtggcattcttcagctttctgatgaagtcttggctcacaacattttgtcacgcttgacaccgagggatgttgcatccattgggtctgtatgcaggaggatccgtcaattaacaaagaacgagcatgtcaggaagatggtatgtcaaaatgcgtggggcaaagaagtgacgggcacattggaactgatgaccaagaagtt

SEQ ID NO: 4307 - DNA, 264 bp, Glycine max
  unsure (1)..(264): unsure at all n locations; Clone ID: 701042651H1
aganaatggctcccaagggtttaatctttttgggctgtgttatgcttctcagcactgtcactgagtcgttgtcttgcggaggataatggacttgttatgaacttctacaaggaatcatgccctcaggctgaagacatcatcaaagaacaagtcaagcttctctacaagcgccacaagaacactgctttctcctggctcagaaacatcttccatgactgtgctgttcagagttgtgntgcttcactgttgctggatccacnagaa

SEQ ID NO: 4308 - DNA, 248 bp, Glycine max
  unsure (1)..(248): unsure at all n locations; Clone ID: 701042652H1
tgacgcccacgcncgcncggccgttnacgccgcgcgtaacgttacnggaaccacctctacggccagggaacggatcggccggtgaaccggagcggtttgcggctttgattccggcgagctgcgnntttttgtgtcagagagtgaaaatgcgacgggacttgaatccatttcgtcggtaatagaggaacgggattcgaagaagtttgtgtgggagaatggttgcttgcttcactgtgagcttccaatta

SEQ ID NO: 4309 - DNA, 263 bp, Glycine max
  Clone ID: 701042653H1
ctctaaccttttccttccgttcactcgccgccttgctcatcctcgccgtcacagtcacctcaaccgatcatgttctagacttctctctctcagctggagatgattcaacaaagtatagcttctaaattttgtgagtatagtctgggcaattgtaaaatggacttgcctaatcgtgataaacaactgactgttgctgtgaagaagacagcattgagagatctgcaaaatgataataaaatcatggtgccaacctctgttggaag

SEQ ID NO: 4310 - DNA, 200 bp, Glycine max
  Clone ID: 701042654H1
ttgtgtgtctttcgtgaaaggcaagacactgaagcttcaaatttcaacattctcctgttcgtgtcatcgattgggaatattgcggtgctggcaatgctaactttgtgtttctgactcattgtacttaattaatttctagctagccactctgtcatgactttgttttccttttccaccgattttccagcggctgggagctt

SEQ ID NO: 4311 - DNA, 263 bp, Glycine max
  Clone ID: 701042655H1
ctttagtgatttgagcataactagcagcggacctggttttggaagtggctctggttttggattgagttctgatgttggttccttttctaccaagtctaaaggtggtccaacttcatctgccactgctccaccaaaaggtcttggaatgaagcttggtaaatctcaaaggacaaatcagtttttggaatcattgaaagcagaaggtgaggtcattcttgaacatgttcaaccaaaacttgctcaggcagctgccccaccatcta

SEQ ID NO: 4312 - DNA, 265 bp, Glycine max
  unsure (1)..(265): unsure at all n locations; Clone ID: 701042656H1
cgggggaagattttcatccctttggcctaataacatagtaggccaacgggggaagattttcatccctttggcctactatgttattaggnacattctaaggaaaggtttgagtgaaaatcctaataccnaagtttatcattacgggtcatagtttgggtggagcactcgcantcttgtaccctacgatcatgttcttgcatgatgagaagttgctgattgagaggttggaagggatctacacgtttgggcaaccaagagttggaga

SEQ ID NO: 4313 - DNA, 259 bp, Glycine max
  Clone ID: 701042657H1
atggatcagaaagtcgatttcagtgctccgcattccatgggaaccactatcatcggcgttacttacaacggcggtgtcgttctcggagccgactctcgaaccagcactggagtgtatgttgccaaccgagcatcggacaaaatcacacagctcactgataatgtttacgtgtgtcgctctggatcggctgctgattctcagattgtctctgactatgtgcgctacttccttcaccaacacacgatacaattggacaacc

SEQ ID NO: 4314 - DNA, 259 bp, Glycine max
  Clone ID: 701042658H1
tcgcaagcaaaaagaaagaatcccaggcgaggagaaagatggaggggaaggagcaggatgtgtcgttgggagcgaacaagttccccgagagacagccaattgggacggcggcgcagagccaagacgacggcaaggactaccaggagccggcgccggcgccgctggttgacccgacggagtttacgtcatggtcgttttacagagcagggatagcagagtttgtggccacttttctgtttctctacatcatgtcttaacc

SEQ ID NO: 4315 - DNA, 261 bp, Glycine max
  Clone ID: 701042659H1
ccccctggcaagttcttcaaaccctccattgctgcagtctccggtgcgcacgccatccccaatgcgagtccctcctgtgaagcctttgaagcaaccaaagccgaaggtaaggaccccaacaagagggatatgagtcttgaggagaaacacaagttggggttagggttgcagagtttgccgccagaaaaaatggaacaggtggtgcagatcatacggaggaggaatggacatttgaagcaggatggggatgagatcgagcta

SEQ ID NO: 4316 - DNA, 260 bp, Glycine max
  Clone ID: 701042660H1
gtatgctttagtttctagcatcgatcactcctaattacttgctgcatttctctactccttgtgcttgacacttttgtcatttaaaatggaacttaattttaagtaccaacttagccttttctgtgtcacactgctcttacctgccctgtgtacctctcaagactcttttacgtgctccagagcaacctattatggtagcccagattgttatggaaatccaaggggagcttgtggctttggagaatatggaaaaacggtaa

SEQ ID NO: 4317 - DNA, 263 bp, Glycine max
  Clone ID: 701042661H1
attctggggtagtccttttgtcctcagggtcaagtgggttcttgaactaaaagggattcagtaccaatatgtggaagatctcggcaacaagagtgccatgctcctacagtataaccctgtccacaagaagctaccggctctcgtgcatgacggtaagcccctggcagaatcactagtgattcttgagtatattgatgagacctggaagcaagatccctcccttcttccacatgatccctatgaaaaggccaatgcgattctgg

SEQ ID NO: 4318 - DNA, 266 bp, Glycine max
  unsure (1)..(266): unsure at all n locations; Clone ID: 701042662H1
gttttgaaggtattgcaaatgtgagatgccttataacccggatgatctcatggtacaatgtgaagggtgcaaggattgggattatgtgattccagcgcctgcagaatgaacgccgtaaagggtgttaaggtgttgtaaaggtcaaatttggtagtaaaatgagaaggggaatggttgtgnacaacaggaagctcatagaaaatgtaccatcctgcttgcatgggcatgactattgaagaagctaagaaactagatcattttgtatg

SEQ ID NO: 4319 - DNA, 268 bp, Glycine max
  unsure (1)..(268): unsure at all n locations; Clone ID: 701042663H1
cgtcactccttgctcttagccctcctcctcttcgccgcngtnnccaccgccgcgatggcggtggccgcgtccgangccgacgacatcctgatccgtcaggtggtgccagatgttggcgaacgaataggaggacaacctgctgaacgccgagcaccactnccgcgagnttcaaggccaagttcgccaagacctacgccaccaaggaggagcacgatcatcgcttcggcgtcttcaagtccaacctccgcagagccaggctgcacgccaa

SEQ ID NO: 4320 - DNA, 272 bp, Glycine max
  unsure (1)..(272): unsure at all n locations; Clone ID: 701042664H1
cacaccaaattaacaaagccttctttttcttgtgtgatctcacaagcccctaaaggccaccatgtcttccttcaagagcaaattccaagatgagttgattgccaatgctagttacattggcaccccaggaaanggtatccttgcggctgacgagtcaacagggacaattggggaagcgttggcgagcatcaacgtggagatgttgaaccaacaagggncattccttcntgaagctcctattcactgcccctggttgtcttgagcgctcaatg

SEQ ID NO: 4321 - DNA, 264 bp, Glycine max
  unsure (1)..(264): unsure at all n locations; Clone ID: 701042665H1
agagaatccgaggcgaagagaanagaaaaattaagatggaggggaaggagcaggntgtgtcgctgggagcgaacaagttcccggagagacagccgattgggacggcggcgcagagccaagacgacggcaaggactaccaggagccggcgccggcgccactggttgacccgacggagtttacgtcatggtccttttacagagcagggatagcagagtttgtnggccattttctgtttctatacatcactgtcttnacctctgggg

SEQ ID NO: 4322 - DNA, 266 bp, Glycine max
  unsure (1)..(266): unsure at all n locations; Clone ID: 701042666H1
ggcgagagcagaagctacagcgangcaagcctggcttccgcgggcttgccacgtggtacaaatccaaggacgtagcgcagaggatccttctctcagttgaatgccaaatgaggaggtgttcctacacgctgggtttgggtgagccgaacctagcgggcaaaccgagcctgctctacgacctcgtgtgtaagccgaacgagatccacgcgctgaagacgacgccgtacgatgagcgcgtagagaatcacgagaaccacgcgttgcac

SEQ ID NO: 4323 - DNA, 260 bp, Glycine max
  Clone ID: 701042667H1
ctcaaggttacaaagggggttgatcatgttttcaatcttgctgcagacatgggtgggatgggttttattcagtctaaccactctgtcattatgtacaacaacacaatgattagcttcaacatgattgaggctgccaggattaacggcattaagaggtttttttatgcctctagtgcttgtatctaccctgaatttaaacagttggaaactaatgtgagcttgaaggagtccgatgcatggccagctgagcctcaagatgc

SEQ ID NO: 4324 - DNA, 260 bp, Glycine max
  unsure (1)..(260): unsure at all n locations; Clone ID: 701042668H1
atgacattcattgagattcgtaaacgcagatggttaggactctgtaggctgataaagacaacactcataccgttggaaagaaggatgctgctggccatgttgcttaatttagttcttgcttccttgtcttcttgagttttatcagagacgggagtgcagggatcactagctctttcattcggtcagagtggccggcagttnacatcccccttgatcatgaagcatttgcagttccaaagggttataatgcacctcaacaa

SEQ ID NO: 4325 - DNA, 262 bp, Glycine max
  Clone ID: 701042670H1
cttcgcatcaataatgggttcaggtgattggtttaagacaataattagcttaagaaaatcaaaagaaggcagatcaaagaaagcaaagggtatcttaactcaagagaaactaaatgcatcaaagtcaaacaattatccaggaaaagaatccagtggtttaacaaatggtattaaaagtgaaaaccttgtgtcggctggggtgtcagttgaaactaatgctgcaacaaggatccagactgcattccgagcttataaggctaga

SEQ ID NO: 4326 - DNA, 262 bp, Glycine max
  unsure (1)..(262): unsure at all n locations; Clone ID: 701042671H1
tagtgagaganagttctctctgcttctctctcttagactcaaaaccctattgcgtgctttgcaatcgaccccgattatggccaacagtaacctccctcgaagaatcatcaaggaaacgcancgtttgctcagtgagccagcacctggaattagtgcgtccccttcggaagacaatatgcggtatttcaatgtgatgatccttggnccaactcagtcgccttatgaagggggagttttcaagttggaattatntttgccagaa

SEQ ID NO: 4327 - DNA, 265 bp, Glycine max
  Clone ID: 701042672H1
gaggtgttggtgccctaatcgtgagaagaaaggaaagggaaaagaggaaaatggtgtgcataaggaaggcgacggtgaaggaccttctggcgatgcaggcgtgcaacctgttctgcctccctgagaactaccagatgaagtactacctctatcacatcctctcctggccccagctcctctacgtcgccgaagactacaacggccgcatcgttcgggctacgtccttcgccaagatggaggaagaaaccaccgactgccacggtca

SEQ ID NO: 4328 - DNA, 258 bp, Glycine max
  unsure (1)..(258): unsure at all n locations; Clone ID: 701042673H1
gttgaattgaagttgaagccatgagatgaatcacttatctcttgacaccgaagattattctctgtcaagcttgctggagcttgcagccaacaacgatgtntcgggtttcaaaagactaatcgagtgcgatccttcctccatagacgaggttcggttgtggtatatccgtcacaaagagtcaaagaagatggtcaatgagcaaagaactcctttgatggttgctgctacctatggcagcattgatgtcatgaagctgat

SEQ ID NO: 4329 - DNA, 258 bp, Glycine max
  unsure (1)..(258): unsure at all n locations; Clone ID: 701042674H1
ctcttcttcttcccacgcncctccttctcatacccttcgccaccctcgtctccgcccgccctcacctcgccggagactttctccgactgccctccgaaaccgataacgatgacaacgtccagggcacccgctgggccgtcctcctcgccggttccaatggctactggaattacagacatcaggctgatgtttgtcacgcctatcaaatactaaggaaaggtggcctgaaagaagaaaatattattgtttttatgtatg

SEQ ID NO: 4330 - DNA, 258 bp, Glycine max
  unsure (1)..(258): unsure at all n locations; Clone ID: 701042675H1
gttgtntnnnccntgtncttggacccaggtggcctgccacgtgggtccaagaacaagcccaagncgcccatagtcataaccaaggaaagtcccaacgcantccgaagccacgtcctggaaatcaactccggcagtgacgttgctgagagcatcgccggctttgncaaccgccgccaccgcgggtgtcggtgctcagcgggagtggcattgtcgccaacgtnactctncgccagcccgccgccccggccggcgtcataa

SEQ ID NO: 4331 - DNA, 262 bp, Glycine max
  Clone ID: 701042677H1
gagctgcgaaaacccccaactccaacctctgttcatcgtctaccgcgctttcttttcaaccagaactatgattaagctttttaaagtaaaggaaaagcagagagaacttgcagaaaatgcaagtggcggaccacctgttaagaagcaaagtgctggagagttgcgtcttcacaaagatataagtgagctgaatctaccaaaatcatgtaccatggcaattccccaatggcaaagatgatctgatgaactttgaagtttcaat

SEQ ID NO: 4332 - DNA, 263 bp, Glycine max
  unsure (1)..(263): unsure at all n locations; Clone ID: 701042678H1
ggatcttccccaagctttggaagatgagtatggtggtttcttaagctcccatatagtagatgattttcaagactatggcggatctttgctttaaggaatttggagatagggtgaagncttggactactttgaatgaaccatggttgttcagccagggtggctatgcaaccggagcgacggcaccaggaagatgtaccggtccacaatgcctcggtggtgatgctggcactgaaccttacatagttacacacaatcaaattctt

SEQ ID NO: 4333 - DNA, 265 bp, Glycine max
  unsure (1)..(265): unsure at all n locations; Clone ID: 701042679H1
tctgggcgaacaccactggactgggacagccgtatgaaaatagccctaggagccgcaaganggcttacatgcctccacgtggcaggcaaggtggtccacggcaacatcaaatcttccaacatcctcctccgagggccggaccacaatgccggcgtttctgacttcggcctcaaccccttgttcggaaacggagccccgtcgaaccgcgtggcgggctaccgggcacccgaagtggtggaaacccggaaggtgagttcaagtctga

SEQ ID NO: 4334 - DNA, 239 bp, Glycine max
  unsure (1)..(239): unsure at all n locations; Clone ID: 701042680H1
atcattcatgggtttttttgtagcacatgtantgcaaggaanagcactagcccttcttggattatggcacaccatccacaccatcagatcttacctggtgaagggccctgccaacttcactgtaagattctggtaccagtttaacactacccctcagtctagacttaaacacttagaacttgtttctattttatccttttccatccttgnatttttcgntcaaattctagacttccctc

SEQ ID NO: 4335 - DNA, 260 bp, Glycine max
  unsure (1)..(260): unsure at all n locations; Clone ID: 701042681H1
tttcgccattggatctgcccttccttccccttccggcaaaggtatgcaacttttttttgttgttctcttttttacttcttcgtattatattgttgttctgatggctgtgcctattttaaagttgttgactttcttcggtttcatgggtacccatttataatcatatgtnattgcacgttgcagtatatgtttatatatataatgcggggtgttaatgtataaatatgtntttnttttttnccggggtnagttngtttnta

SEQ ID NO: 4336 - DNA, 260 bp, Glycine max
  Clone ID: 701042682H1
cccaacccaagaaatttccttttacccctttcccctctcctcttttcttattcatcaaaattcctctttggtgtcctctccctcggtcaactccgtttactataaatatgaccactcttttcttcctcttcttcaacttcaatactcacctttgaatggattctaattcttcttctccaagtcccaacaaccacgcttccacaaccaaaatcaacggtttctttcatcccaagctgggttcccaacctgccaccagctcg

SEQ ID NO: 4337 - DNA, 256 bp, Glycine max
  unsure (1)..(256): unsure at all n locations; Clone ID: 701042683H1
gtgtatttgtagagagaaacaaagttctcttctactttctgtctccagcaggctcagaatctttttgcaactgttctctggattttcgttcattattttagtttcctcttttgtnttctctcctttttctttgaagcaaagtgaacttgtggtatacctttccaattgaggtttctagcgaaagagaaaggatgtcaagtgggacaacatactggtgttacacatgcaggcagccaatctggcttgaaggaggaag

SEQ ID NO: 4338 - DNA, 259 bp, Glycine max
  Clone ID: 701042685H1
gtctcgtttacacatctctccaacctttcactttcgtttctcagttttattcgaatccctctctcaatctcctttccaaatggccagcgttgaggttgcacagcaaacaccaacaacagttccagaaaatgaaacaaccgaggtaagcaagacccaggaaacaaccccagtcactgaggctcctgcaacagaacaaccagcagctgaggttcctgcaacagaacaaccagccgctgaggtcctgccccagaatcaacca

SEQ ID NO: 4339 - DNA, 260 bp, Glycine max
  Clone ID: 701042686H1
gaaagaattagcaaaagacaatgattcttcaaaggagaaaaatcaagttcaaccagggcttagtggtcctctgaaaaagagaattcagcagcttgttgactctaatcctgtcatgcttttcatgaaaggaactcctgaagagccaaaatgtggatttagcaggaaagttgttgttgtgttgaacgaagagagagtcaagtttggaagttttgatgtcctatcagactcagaggttcgtgaaggctgaagaagttttccaa

SEQ ID NO: 4340 - DNA, 259 bp, Glycine max
  unsure (1)..(259): unsure at all n locations; Clone ID: 701042687H1
aaaagattaacaataaaagtgtggagtactgttgatagcaaagatgtttggnatcttcgacaaggggcaaaagntaaaggggacagtggtgttgatgccaaagaatgtgttggacttcaacgccataacctccatcggtaaaggtggtgttattgacacagccaccggcatcttaggccaaggcgtcactttagttggtggagtaattgatactgccacttccttcttaggccgtaatatctccatgcaattgatcagt

SEQ ID NO: 4341 - DNA, 282 bp, Glycine max
  unsure (1)..(282): unsure at all n locations; Clone ID: 701042688H1
gtttgtggatcatcaccaatctnttcttgntaaagtaanttcctttcatctcttnttgttagctttnaacacaatccatggcncgaacaacantagtctgccctgntttgntgctttgctctgcggctatgtgtntattctctttagtgcagttagtagagtggngaggttccaaaatgggagaccatgtaagctagaacttgttcttcaaaccattcactcacactcagcanctttcaactccctttcaaggtttcaaaggtaccatcttttctgcatccc

SEQ ID NO: 4342 - DNA, 258 bp, Glycine max
  unsure (1)..(258): unsure at all n locations; Clone ID: 701042689H1
agcagccacccgnttgcatcgtcgccgactttctcttcccctgggtggatgacttgggccaaaaagcttcgcatccccagacttgccttcaacggcttctccctcttcaccatctggcgccatacactcctcctccgagtcttccgattctcccatcattcagagtctccctcaccccatcaccctcaacgcaacaccgccaaaggaattgaccaaattccttgaaaccgtgctggagacagagctcaaaagctatgg

SEQ ID NO: 4343 - DNA, 253 bp, Glycine max
  Clone ID: 701042690H1
gctagctaggttgaaaatagtttggttttgtagtaagtgaggtgaggtgccaaaatggtgaagataactcttggtactttcgatgactcttttggtgttgcctctcttaaggctatttggcagagttccatgcaactctgattttcgtgttcgctggtgttggttcagccatcgcttacaacgagcttacaaaagatgcagccttggatccaacggggctggtggcagtagctgtggcccatgcatttgcact

SEQ ID NO: 4344 - DNA, 257 bp, Glycine max
  unsure (1)..(257): unsure at all n locations; Clone ID: 701042691H1
ggtttcaaggctagtggaggagcgtaggaggctgaggagaaaagacaggctaggctagaaaaagaacttttggaggaggaagagagaaaacagaggaagaggtttgagngccatagaaatgcagaagttgaggaagacggctacgaggcggtgtcgcaactgtttgaacccgtatagggatcagaaccctggtgggggtaggtttatgtgttcgtactgtggccatgtttcaaagaggcccgttttagacttgcctg

SEQ ID NO: 4345 - DNA, 260 bp, Glycine max
  unsure (1)..(260): unsure at all n locations; Clone ID: 701042692H1
ggaaagatagtgagtgaagtaactgaagagaagaaaaaatgccgtgcctcaaccttcagcaccaacgtgttcccttcgaaggcgtcgacacctcttccatcctcgccgaagccacctcctccgtcgccagcataatcggcaaacccgaagcctatgtgatgattgtactgaaaggatcagtacccatagctttggtggggatgagcagccagcagcttatgggggattggttncattggtggtcttaaacctagtgtaaa

SEQ ID NO: 4346 - DNA, 260 bp, Glycine max
  unsure (1)..(260): unsure at all n locations; Clone ID: 701042693H1
tcgctaacagtaacagggtaaagagtaagcgaaaccctacgcgcgtgttccttccggtgaaactatcttatcctctccgggatctgaatctgagaaatttaatgcactactacttcttctcgagaaggatccnnnnnnnnnnnnnnnnnnnnngccacactcaccgccaatgagcaacatccgtcgctgccagaggattctcatcctctctctcttctttctctccgtcgtcgctcctctcgtcttcgtctctcaccggc

SEQ ID NO: 4347 - DNA, 207 bp, Glycine max
  Clone ID: 701042694H1
ggttttctttctccgaactcgaacgaagatgcgtgagattcttcacatccagggagggcaatgcgggaaccagatcggagccaagttctgggaggtggtgtgcgcggagcacgggatcgattcaacggggaggtaccaaggggacaacgagttgcaacttcgagcgagtcaacgtctacttacaatgaagcgagttgcggaaggttc

SEQ ID NO: 4348 - DNA, 265 bp, Glycine max
  unsure (1)..(265): unsure at all n locations; Clone ID: 701042695H1
atagttttgaagagatatgcatcaagaaagaagcgtttgagggagaagagaagttttgtgcaaaatccttgggaacagtaattggttttgccatttcanagctgggaaagaacattcaagtactttcaagttcctttgtcaataagcaagagcaatacactgtggaaggacngcagaatcttggagacaaagcagtgatgtgtcatgggctaaatttcagaactgcagtattttactgccataaagtccgtgaaacaacagcttt

SEQ ID NO: 4349 - DNA, 269 bp, Glycine max
  Clone ID: 701042696H1
tccagttctctcttttccccatcacttcctatctgaggcaaaagaaagacactaaaaaaattatccacagcatcaaagttggaatctcccttgtattgatttcactcctgtacttcgtggatcctctctatgagcaagttggagataatgctatatgggctatcatgactgttgttgtcacttttgaattttctgcgggtatagagctacgctaggaaaaggtttaaatcgcggaatgggaaccatattaggaggtggactgggttgca

SEQ ID NO: 4350 - DNA, 260 bp, Glycine max
  unsure (1)..(260): unsure at all n locations; Clone ID: 701042701H1
ctcttcttctcttgcggcnagggttttagcgcanttcttctaganttaaggaagatgggtaaggaaaaggttcacatcagtattgtggtcattggccatgtcgactctgggaaatccactaccactggtcacctgatttacaagcttggaggcattgacaagcgtgttattgagaggtttgagaaggaagctgctgagatgaacaagaggtctttcaagtatgcctgggtgctggacaaacttaaggctgagcgtgaaag

SEQ ID NO: 4351 - DNA, 260 bp, Glycine max
  unsure (1)..(260): unsure at all n locations; Clone ID: 701042702H1
gtgatctaaccgaacaatcgcatatttctgttctgccttcttctactcaatacattacnaaccctctagtctcgtttccaggtttgtaataataataattttagtttcttcgttacgcctgcnttgtgcgtgagaaagtgcgcgtggtgaaaaccatggcttctcagctcctgagacgaaccttcggaagtcgcatccttgcaaaccctagggccttctccttctcctccgctgcttccactccgatccgcgccactctc

SEQ ID NO: 4352 - DNA, 227 bp, Glycine max
  Clone ID: 701042703H1
agaagagaatagggttagggttagggtttgattgaggatgccgaagaacaagggaaagggaggtaagaacaggaagaggggaaagaacgaggcggacgacgagaagcgggagctggtgttcaaggaggacgggcaggagtacgcgcaggtgctccggatgctggggaacgggcggtgcgaggcgatgtgcatcgacgggacgaagaggctctgccacatccgcggga

SEQ ID NO: 4353 - DNA, 260 bp, Glycine max
  Clone ID: 701042704H1
ccatgctctcccaaacaagaagcgattaagattagatttttcagcaatgaacaacaccaacccaaccaagaatgctgcaacgccgtcgtttttcaccaaccctggaacaccctccatccccatgaaccaccttctctcccaaacgcagcctcaaccacaaggtgccacgtcacacttccacggccactttcagctttcacaaccccaaacccacgtgctcgcaccacaacaacagccacaccctcatcctcatctcaagg

SEQ ID NO: 4354 - DNA, 257 bp, Glycine max
  unsure (1)..(257): unsure at all n locations; Clone ID: 701042706H1
ctttttgatcctcatagtggtgacaactatgatagggatgaggancatctggcattgatgatggagcttcttgggatgatgcctcgcaagattgcacttggtggatgctattcccgagattttttcaacagatatggagatttgaggcacatccgtcggttgcgtttctggcctcttaataaggtgctgacagagaagtatgatttcagtgaacaagaagcaaataacatgaccgatttcctcttccattacttgat

SEQ ID NO: 4355 - DNA, 259 bp, Glycine max
  unsure (1)..(259): unsure at all n locations; Clone ID: 701042707H1
ctacttggtagttggagtggtagcttttgctctactttgctcatncagagtttctttgacagattcagttccattattttcgcctgttcatgacgctgcttctttgactcgcaactctttccctgctggcttcatctttggggctggatcctcagcctaccagttcgaaggagcagcaaaggaaggtggaagaggaccaagcatatgggataccttcacacataaccatccagaaaagataagagatggagccaatgga

SEQ ID NO: 4356 - DNA, 258 bp, Glycine max
  unsure (1)..(258): unsure at all n locations; Clone ID: 701042708H1
cttgctagggttttaggaaaagacactgtctcgcgagtnaacacaggttacagcaatggctttctttggtagaattgggaatttattaagacagacagcaagcaggcaggttagttcagaattgcgatcatccccttcgttttttcaggctatacgcagtatgtcatctgctccaagcacaaagctgtttatcggaggtgtttcatattctactgacgagcaaagtttgagggaagcttttcaaaatatggtgaagtt

SEQ ID NO: 4357 - DNA, 258 bp, Glycine max
  Clone ID: 701042710H1
ctctccgcatacactctgctcgtagggtttctccacctagagggaaatggctcccaaaccgcctagtacgggtctgtttgttggactgaacaagggtcacgtcgtcaccaagaaggaattgcctccacgcccctcagatcgtaaggggaaaacaagcaagagggtgcactttgtgaggaacctcataagagaggtagccggttttgcaccctatgaaaagcgtataactgagttgctgaaggttgggaaggataagag

SEQ ID NO: 4358 - DNA, 216 bp, Glycine max
  Clone ID: 701042711H1
agcctttaatgattgatccactttattgttgttagcagtcaatgtcgtctttaagatctctccaaagaaagctgatgagaagacaaggtttttttcactcaaaggcaccagcaaagtcactttctccaccatcaccaccacttcctagcaagacctcattgacacccccagtttctccaaagtcaaagtcccctaggcttcctgccacaaagagag

SEQ ID NO: 4359 - DNA, 256 bp, Glycine max
  unsure (1)..(256): unsure at all n locations; Clone ID: 701042712H1
gagatagaccccagaagtggtttctgcagctccaattcaatcttctacagcaagcgtaagtccctcccactccctcccaacaacgccttngacgtcaccaccttcatctcctcccgcgcccaccgcgccaccacagccttcgtcgacgccgccaccgcccgccgcctcacctacacccagctatggcgttccgtggagggcgtggcagnctctctctccgtggacatggggatccgaaagggcaacgtggtcctca

SEQ ID NO: 4360 - DNA, 253 bp, Glycine max
  Clone ID: 701042713H1
ctagtggtgaaggagatcaaaactttggctggctcttggcagaaagtcttgttttctcgcatctttcgggaagcccatggcggatgttttatagccaaggaagcgtatgggatgtgtgaagatttttctctcttctctgttattcccaattgtgtttacctgttcgcaggggttcttagttggggtttcagcccttttgctcaccaaaaaaaaataagaaactactgggtgtggctttggtgtgtttgaagtt

SEQ ID NO: 4361 - DNA, 253 bp, Glycine max
  unsure (1)..(253): unsure at all n locations; Clone ID: 701042714H1
aaaaacatatcacacaatatggcattcaagggctatttccttctcggcctcgttactcttgttcttgttaaatcttccaaagttacatgcgaancnagaatcggttaatacagtttcacccattattgacatttcactcaatcggaagagnttcccagaagggttcatatttggggcgggatcttcctcgtaccagttcgaaggggcagcaaaggaaggtggtagaggaccaagtgtatgggataccttcacc

SEQ ID NO: 4362 - DNA, 252 bp, Glycine max
  Clone ID: 701042715H1
ttttggcacgaatcagacagaagcaaacacattgagagttgttggaacatatggctatatgtcccctgaatatgctatggatgggaacttctcagtgaaatctgatgtttttagctttggagttctagtgctggaaattataactgggaaaaaaaatagaggattctattactcaaatgaagatatgaatcttctagggaatgcatggaggcagtggagagatggcagtacattggaactcattgattcatc

SEQ ID NO: 4363 - DNA, 254 bp, Glycine max
  unsure (1)..(254): unsure at all n locations; Clone ID: 701042716H1
agacacaaaaaaatggctagtggccgcaatttgaagaacgctgtgattgcattcttggttcctcttccctccatcttcttctacctctcattcctcaaccactacgactnagcaaaatccccatctttttggtcaactctatggtcatggtgctatcaccaccctcttctattagccaacgctctcttcttcctcaacgtcaatgtcctcttctggctcataggcctaatacaatccagccactggatgatcga

SEQ ID NO: 4364 - DNA, 256 bp, Glycine max
  Clone ID: 701042717H1
accagcaaagagaaagcctagtggaggcattgaaacactgcgtgcaataccttggatttttgcatggactcagacaaggtttcatcttccagtgtggctaggctttggagcagcatttaaagaagtcattgagaaaaatgttaacaatctcaatatgctgcaagagatgtacaatcaatggcctttctttagggtcacacttgatttggtggaaatggtgtttgccaaaggagatccgaaaattgctggtctgaat

SEQ ID NO: 4365 - DNA, 257 bp, Glycine max
  Clone ID: 701042718H1
acgaaacaaggaaaaagaaatcgaggaggtataggatggaacaggggatatacgcggagctgagcgaggcgatggagtgtttggaacacatatgctatgaggggtgcacccacgttggaccgtacgatgcggaggtgaagagggagaggacgccgtgtgggagattcgccacgtgccagggtcttcaggttctgatccgccactttgccacgtgcgagaagaaggttcgcggtggctgcgtgcggtgcaagagaatg

SEQ ID NO: 4366 - DNA, 256 bp, Glycine max
  Clone ID: 701042719H1
ctgacgacagactgaagttgtttttctggggcaactaaggcatccacatctcgtgaagctgataggatactgctgtgaagaagaacacagggttttagtatatgaatatttaccaagaggaagcttggagaatcaattatttagaagattctcggcatcactttcatggtcaacgagaatgaaaattgctgttggagctgcgaagggtttagcatttcttcatgaagctgagaagccagtcatctatagagatttc

SEQ ID NO: 4367 - DNA, 254 bp, Glycine max
  Clone ID: 701042720H1
gcgagggtgaggggatgagggtgaagtcggggaaacgtgtgggggtgagcttggggagggtgcgggagatttggtggtgagggtggaaatgagggtgtcgagcttatgggtcatggtttgcaggttttcactgagactgagttgatgaatggtgagcttagctatggcgtcttccaacttttcagagttggacttcgaggccatgagagcgagacgagagcaccaaattgttaggaatgcgtttataaattctg

SEQ ID NO: 4368 - DNA, 230 bp, Glycine max
  unsure (1)..(230): unsure at all n locations; Clone ID: 701042721H1
ggcatctgcgacgcgtctngtgcactgcgagctgcgctcggcgaggcccgcggttcggccgagggaaccggccggtccggttcaggttacgatccccaaacccaaacccaaagcggcggaggcggaaggcgcgaacatcgttttgcagccgcggttgtgcactctcagatcctacggttcggatcgagccggggtgcttatcaagactcgcaaggagggtgaccatgatg

SEQ ID NO: 4369 - DNA, 258 bp, Glycine max
  unsure (1)..(258): unsure at all n locations; Clone ID: 701042722H1
tttcaaaaccctctctctcgttactcgccatcactagcgagtncctccttcttcctcttcgcgaaattccgtatgcgaagaaggaggtagggattcgcgctcctgctttctcagactgcctaattatctttcattctgcgaagtaactgagagattgaagatgggaggagatgattctggtttggagantgacaattttgattggaacactgaagatgagcttgaaattcagaactataactcgtcgtcttcatgttt

SEQ ID NO: 4370 - DNA, 257 bp, Glycine max
  Clone ID: 701042723H1
agaaggtgaaggaagtgagagtggagtagatctgagtgtgaagcaaaaattcttccaaagttttcatctttcaatcaaagggtcctaaaaaaaatgctctgaaccttcgttttcttcatctttttctttttctaagtccccaatcactataacacaatgcctcgcccttgtttccacaagcttgttctccccactactctccaatccagacaactgaggattccagataattttctgaggaaatatgggacccagct

SEQ ID NO: 4371 - DNA, 255 bp, Glycine max
  unsure (1)..(255): unsure at all n locations; Clone ID: 701042724H1
tttaccttaaacaacaatggccgatgccgaggatattcaacccctcgtttgcnataatggaaccggaatggtcaaggctggttttgctggagatgatgcaccgagggctgtgttccctagcattgtggggcgtccacgtcacactggggtgatggttgggatggggcagaaggatgcgtatgttggggacgaggctcaatccaagaggggtattttgactctcaaatacccaattgagcatggaattgtgagcaa

SEQ ID NO: 4372 - DNA, 256 bp, Glycine max
  Clone ID: 701042725H1
ctcaaatctcttcgttccttcgattcgttccatttcttccaaaatggccaaagacccagttcgcgttctcgtcactggagctgcagggcaaattgggtatgctcttgtccctatgattgctaggggagtgatgttgggtcctgaccagcccgtgatcctccacatgcttgacattcctccggcagcagagtcattgaatggggttaaaatggaattggtggatgctgcattccctcttcttaaaggtgttgttgcc

SEQ ID NO: 4373 - DNA, 255 bp, Glycine max
  unsure (1)..(255): unsure at all n locations; Clone ID: 701042726H1
tccgcccattgaaagtttgggggacttatcatttttgaggtacttaagcttcagaagtcacaagatagtccatcttccaaaattaattggtgagctgcacaacctagaaacattggatctaagagaaacttatgtgtgtatgatgccaagggagatctacaagcttaaaaagttaagacaccttctgagtggttatcaagggtttcaaatggatagtggcattggagcnanaacatccctacaaacactacctga

SEQ ID NO: 4374 - DNA, 220 bp, Glycine max
  unsure (1)..(220): unsure at all n locations; Clone ID: 701042727H1
ctagggtttcanntttccatgtgaaaacggattgagaatctctctctcattctctctctattttatatttnctttcacgtcaattagggtttttttgntggcgtgattctgaaggcttggatctggatatcttctttgcttctttgctatggaagactcggattcagttgctacantgatagattctactacttctaagatacaanagctgcagaaggca

SEQ ID NO: 4375 - DNA, 252 bp, Glycine max
  unsure (1)..(252): unsure at all n locations; Clone ID: 701042728H1
cttcctttgtaatagaaagcacgcgtttctctctctccctctctnaacgaatatttgtgtacttcctcttttgtgggtagattcaatttaccatgtcgagttcatcggaatactctcaattttccggccagaaaccggcgaggtcgccggagaaatcgagcttctctcagacttgtagcctgttgagtcaatacatcaaggagaagggtagcttcggagatcttaccctcggaatgacatcatgtgggtcac

SEQ ID NO: 4376 - DNA, 251 bp, Glycine max
  unsure (1)..(251): unsure at all n locations; Clone ID: 701042729H1
acctacctctttttcttctctctcaacaacttcaccttcttcctcctcgatcatgtctcacttcaagggcaagtaccatgatgagcttatcgccaatgctgcgtacattggcactcctggaaagggtattcttgctgctgatgagtcaacagggacaattggcaagcgtttggccagcatcagtgtagagaacattgaatccaacaggcgagctcttagggagctgcttttcactgctcctggtgttcntc

SEQ ID NO: 4377 - DNA, 250 bp, Glycine max
  Clone ID: 701042730H1
cgattgctagaatggaatttcgatgctcagtcatctcttttaccattctcttctctcttgctcttgcaggagagagccatgtccatgcatcgctacctgaggaagattattgggaagctgtttggccaaacactcccattcccactgcactgcgagagcttctaaagcctctccctgcaggtgttgaaatcgatgaactccctaagcaaattgatgatacacagtacccaaaaacattcttctataaaga

SEQ ID NO: 4378 - DNA, 249 bp, Glycine max
  unsure (1)..(249): unsure at all n locations; Clone ID: 701042731H1
gtcgcgattgatcgattcagctacgtccgatgaagataaagtcgcacccgtttacaaattggaggaaatctgcgaacttttgcctcttcgcatgttagtattgtgaaggaggtttccgagtttgtcttaaaacgtttggnacataaaagcccaattgttaaacagaaggctttaagattgataaagtatgcggttgggaagtctggtgtggagttcagaagggaaatgcagagacattcagtggcggtt

SEQ ID NO: 4379 - DNA, 254 bp, Glycine max
  unsure (1)..(254): unsure at all n locations; Clone ID: 701042732H1
tgacttttcgagaaaggaaanaaaaagagtttccggcattattccatcatgaacgctcttcccattcttctcttccttcctcttcgtttcggcattagtttatgcgaagaaaactggcgatgtgacggagttgcaaattggcgtgaagcataaaccagcatcatgtgaagttctggcacacaaaggtgacagagtcaaagtacactatcggggaaaactcactgatggaactgttttcgattctagctttgaaa

SEQ ID NO: 4380 - DNA, 253 bp, Glycine max
  Clone ID: 701042733H1
gtttcaaggggagttgagtgatgcttcggttgtggcggtgaagaggttggagaggccggggggtggggagaaggagttcagggctgaggtgtccacaattgggaacattcagcatgtgaatcttgtgaggctgagagggttttgctctgagaattctcataggcttttggtttatgagtatatgcagaacggtgcccttaatgtttatttgagaaaggaagggcctgtttgagttgggatgttaggtttaggg

SEQ ID NO: 4381 - DNA, 257 bp, Glycine max
  Clone ID: 701042734H1
gacaaccagagtcatccatggccaagcccaatccacacactgaagccccttctgcacctgagccacccaaagctgtaaagcgagagggcaatcgcaagggaacaacatcaagctctgagcaggaagcacccaaaacaccagatcctaagacactaagaagacttgctcagaatagagaagcagcaaggaaaagcaggctcaggaaaaaggcgtacgttcagcaactagagttcaagtaggattaagcttaatcagat

SEQ ID NO: 4382 - DNA, 254 bp, Glycine max
  Clone ID: 701042735H1
gtatcttgagtctgaagcagaagagttgaggaaatctaatttaagattgcagatagaaaattctgacttagctcgaagattggattctacccagatccttgcaaatgcatttctggaagacccagaggcaggtgctgtgaagcaagaaagtgagtgtcttaaacaagaaaatgtgcgcttgatgaaggaaattgagcaatttcagtctgatcgatgttcagatcttgaagaattggtatatctgcggtggataa

SEQ ID NO: 4383 - DNA, 254 bp, Glycine max
  Clone ID: 701042736H1
ctctttgcaacacaacaaaaaaagacaacacagagagaagcgtcttaataaacgctcttctctgaaaaacctgatttcttctcttcttctcttctctttcgtttcgatcttcgatctctgaaaatgagagagtgcatttcaatccacatcggtcaggccggtattcaggtcggaaacgcctgctgggagctctactgcctcgaacacggcattcagcctgatgggcagatgccaagtgataagacggttggtgg

SEQ ID NO: 4384 - DNA, 254 bp, Glycine max
  unsure (1)..(254): unsure at all n locations; Clone ID: 701042737H1
ctttataccccccctctcttttttgcgttcattctgttttcctgntgaagtctttccctagccaatggccaccgatcgtttgacccgggttcacagtctccgtgagaggcttgatgaaaccctcactgccaacaggaatgaaattttggcccttctgtcaaggatcgaagccaagggcaagggcatcctgcaacaccaccaggtcattgctgagtttgaggaaatccctgaggagaacagacagaagctcactg

SEQ ID NO: 4385 - DNA, 255 bp, Glycine max
  Clone ID: 701042738H1
gccattttattttgccctacctcctcgattctagggtttcaacaatggcgctgttccttctctacgaatccgcttcgggctacagcctgttcgaggttcacggcgtcgatgaaatcggccagaacaccgaagcggttcggaactccgtttcggacctcaacaggttcggcaaagtcgttaagcttcgctccttcaaccctttcacttccgctctcgatgctctcaaacagtgcaacgccgtctccgaaggcatat

SEQ ID NO: 4386 - DNA, 255 bp, Glycine max
  unsure (1)..(255): unsure at all n locations; Clone ID: 701042739H1
aatgtttttaggtcccggaaggactcagcaagcatgttgtgtcttctaagaaggctcaggctaattggtatagaaagttagtagatgcttggnaagaggcaaaacctcctcctaagacacctgaagaagcagctagacttgtcattcagaccttgagaagacatcaaaaagcagatgttgagggattgttggctttctatggtcttcctctaccacacacactggttcanggaactacccaacccctttcatcct

SEQ ID NO: 4387 - DNA, 176 bp, Glycine max
  Clone ID: 701042740H1
aaattattggtctctgttctctacctcaccccccaccgcactcgtcttgtctcaaacaaatgcaacaaccacttattcttatagttactatggactaggaacaagatttgattctcattctgatatcagattcagatttttttaaaagagactcacgctggcggtgaagaacgttt

SEQ ID NO: 4388 - DNA, 254 bp, Glycine max
  Clone ID: 701042741H1
gcaagagtattcgatttgattgattgtattacagtgtcattttccttcataaccgatttctattttatgattgtgcgcaacagttcgcagactcacaatggccgcaatatccaactccttatcactgaagcacagtttctctctgagtcgagctcctccttcttcctcttccatcaaattcaaattcagaagatgttacgccgcgttcgccaatgagaatcgcgagtacgtgatcgttggcggcggaaatgccg

SEQ ID NO: 4389 - DNA, 252 bp, Glycine max
  Clone ID: 701042742H1
tggtcgtccatttcctcctctatttaacttcaaacaggaattatctgaagcatctccagtgcttgttaacaaattgatacctgaccacgtgaagcggcaaatagggctgcaatttgttcctccagcaggatcatgatgatgagctttaggggggcttagtgtatactagttgatgagttaaacaaaagtgacaccgttatttttgtctaaattagcatgttctgtggcctgaccagtgtagtttcaagccga

SEQ ID NO: 4390 - DNA, 251 bp, Glycine max
  Clone ID: 701042743H1
cgcagtgcttttattcgcaccgcaaacagtgagccatggccgtcggaaagaacaagcgcatctccaaggggaagaagggtggcaagaagaaggcagctgatccctttgccaagaaggattggtatgacattaaggctccttctgtttttcaagtgaaaaatgttggcaaaaccctcgtctctcgtactcagggtaccaagattgcttctgaaggactcaagcatagagtgtttgaggtctccttggctgat

SEQ ID NO: 4391 - DNA, 250 bp, Glycine max
  Clone ID: 701042744H1
gggtgcccaaaattggggaatcaaatcgccggcctctagcaatgttgagaccaaatgcttcacttacttcagccctaaacttattagttcaagctcaagtaagttcaataccaatagttgatgatagtgactcattactggatatatattgtcgaagtgatataacagctttggcaaaggacagaacttacacacatattaatcttgatgaaatgactgttcatcaggcattgcaattgggccaggattc

SEQ ID NO: 4392 - DNA, 250 bp, Glycine max
  Clone ID: 701042745H1
tctcacttctcttggggttgtgagaaaagtgctcgggactcttacaacagatattgttcaaccaaggagtggaaattggcacttagcaaaaagaggtggaagactcatatcgtttaagggtcgtgcgaggctggtacatacaacgtgccgaatctctgtccctgggaccttaccaagaactgatgaaaaggcctcatctaacatctcgagggataagaagacagttccagaagcagatcctccgagtatc

SEQ ID NO: 4393 - DNA, 247 bp, Glycine max
  Clone ID: 701042747H1
acagttgcaacctctattaccccattcaattggtggtatctccaggcaaattctctttcttcctggaacgatactaatagcacatggaacagccaaccaaaccctaattcttcctcttcttgtgaggaggatatatctgtttctacatctttcactaatgcttccaaccattcaagcctcactgttgagtcctcacgcagactcattgagccacctgctccttcctccaacgagttgatgggagaac

SEQ ID NO: 4394 - DNA, 248 bp, Glycine max
  Clone ID: 701042748H1
gaaacatttcactaatagagagacataagcataatattgagaaataatggagggttgtacttattgtgtgaagttgctatgccttgttgggtttgtggtgcttgtgagtactattgcaggggtggagagtgctggtgaatgtgggaaatctaccaccccagataatgaggcttataagcttgcaccatgtgcctcagcagcacaagatgagaatgctagtgtttctcagagttgctgtgctcaggtga

SEQ ID NO: 4395 - DNA, 254 bp, Glycine max
  unsure (1)..(254): unsure at all n locations; Clone ID: 701042749H1
ccactctcgcgtcgttaccatgccgcaaggggattacatagaacgccacagaagagactatggctaccgtctcgatcacttcgagcgtaagcgcaaganagaggcacgtcaagttcacaagcgctctgcaattgcccagaaggctctgggtattaagggcaaaatgattgccaagaaaaattatgctgaaaaggcgcagatgaagaagactttggctatgcatgaagaatcatcgtctaggcgcaagactgatg

SEQ ID NO: 4396 - DNA, 233 bp, Glycine max
  Clone ID: 701042750H1
gaaaagaaaatcctcaattttctgacgcagccaaacactctctctctgtctctcgaaaattactcagtttgcagagaaaatctgaatcatgtcgtggcaagcgtatgtcgacgatcaccttctgtgtgacatcgaaggtaaccacctcactcacgctgctatcatcggccaagacggcagcgtttgggctcagagtaccgacttccctcagttcaaacctgaggagataactg

SEQ ID NO: 4397 - DNA, 251 bp, Glycine max
  Clone ID: 701042751H1
gcaagaatggcacttcgttgcttggtgatgtccctttctgttctcttcactcttggtcttgcgagagaaagccatgccagagacgaagatttttggcatgctgtttggccaaacactcccattccaagttcattgcgagatcttctaaagcctggccctgcaagtgttgaaatcgatgatcaccctatgcaaattgaagaaacacagtacccgaaaaccttcttctataaagaagaccttcatccaggcaa

SEQ ID NO: 4398 - DNA, 251 bp, Glycine max
  Clone ID: 701042752H1
gaacagcctctggtcgatggaacaatgtaggcaagggaagtcggcaaaatggatccgtaacctcgggaaaaggattggctctgagggctgggcacgggggtcccagtcccgaacccgtcggctgtcggtggactgctcgagctgcttccgcggcgagagcgggtcgtcgcgtgccggtcgggggacggattgggaacgggcccttcggggcctcttccccgggcgtcgaacagtcaactcagaactggtac

SEQ ID NO: 4399 - DNA, 252 bp, Glycine max
  Clone ID: 701042753H1
aaacgctgccttagcaatacccgaaaagagaagagggtgtgggaaaggaggaggaagaagagcgagatggcgtcagtggtgaagaacgtactcaaatcggtcagagaaaagggtttcggcgctttcctcagggagctcaaggatgaaggctacctgagatgccttccggatggaaatctcttgcaaaccaagatccacaatattggggcaacacttgttggtgttgataaatttggtaacaagtattatgag

SEQ ID NO: 4400 - DNA, 251 bp, Glycine max
  Clone ID: 701042754H1
gcctctttcaagaagcatctgagtgtttattattcgtaatatatagtcactcaagcttctaggatttctgccagctacatgaaaatgggaagcaacttgaggtttttgagtctttgcctcttggcattgattgcatcaactcatgcccaacttcagcttggtttttatgcccagagctgcccaaaagctgagaaaatcattttgaaatttgttcatgagcatatccacaatgctccatcactagcagctgc

SEQ ID NO: 4401 - DNA, 246 bp, Glycine max
  Clone ID: 701042755H1
tgtggaggttagcatggtagctcacttgacaaaggatgaactctaatccggctctccactatcaagattaattgctatattttcctttccatttatctgttggatagaatattaggcataataacaaacttgtcttagtgacattctttgttgcgggctaatattggactccatacaggttagagaaattgttgccattttggaccttgatgttcttttctatccttgtccaagaaatggcccaaa

SEQ ID NO: 4402 - DNA, 251 bp, Glycine max
  Clone ID: 701042756H1
ttgggcttgtctagagttgctggtgctcctggttactatgctcctgccccgcaacctatgatgccttatggaatgccacaatttggaggcattgggcaacctggaggctattaccctgcaccttattattgaattgaagtgagggaggaacttgttttgagccaaactgtgttttttcatggtcttcaagctctccggaagatcggactctatttttctgtctttgcgtttgggatataaatgttcaaaat

SEQ ID NO: 4403 - DNA, 253 bp, Glycine max
  unsure (1)..(253): unsure at all n locations; Clone ID: 701042757H1
aaacattgtttccgtgatcatcctcatcactctcacccatggctgcctcatccaccatcaacaacttcctctctttcttcttacgcannnnnnnnnnnnnnnnnnnnnnnnnnnnnnagttcaaccccaccacttctcagaaccagaaaccctcctcctcanagcncctaattgcccaatacaaccctcctccttnaccctcttgcgcttcttcttctgagttgtcctctgttatatgcccatccatggcgta

SEQ ID NO: 4404 - DNA, 248 bp, Glycine max
  Clone ID: 701042759H1
gcagagaggaaagactttaccgagtccttacgcgttgtttgtgtttgcgtcggaaggaagagaagatgagtgagaatttgatggagaaagtgagcgcactgggagagcgcctgaaaatcggaggcgtggaagtggggagaaagatgagcgaggggatgagctccatgagtttcaagctcaaggagttcttccagcctgggcccaatcaggccgacaagcttgtggaggacgctacttccgaggccctg

SEQ ID NO: 4405 - DNA, 247 bp, Glycine max
  Clone ID: 701042760H1
ctaatccctctttcttcctcttcctcagtagtgcgattttcgattctcttctctgcaactatgcctaaccctaaggtcttcttcgacatgaccatcggcggtcaacctgccggccgcatcgtgatggagctctatgccgacgtgactcccagcaccgccgagaacttccgcgcgctctgcaccggcgagaagggcgccgggcggagggcaagcccctccactacaaaggctcgtccttccaccgcgt

SEQ ID NO: 4406 - DNA, 246 bp, Glycine max
  Clone ID: 701042761H1
caaacttcaacttgtaatcaagggagagagaaaatttcaagcacaaaaaatggcggagaagaaagtggtgatcctaggaggtggtgttgccggtgccaaccttgcaaaaactatacaacatcaagccaacgtcacccttattgatccgaaggaatattttgagattccatgggcaagtttgaggggattggttgagccaacttttgctgaaaggatagtaatcaaccatagagagtacttcaaaaa

SEQ ID NO: 4407 - DNA, 244 bp, Glycine max
  unsure (1)..(244): unsure at all n locations; Clone ID: 701042762H1
cgcaaattgttttcttttgctgtcactgttgccgaatccctcactttctcactcctcagcaccattcaatctctttcctctactggcaataagcatcagcactctgccacatccagttcccttctgcgtgttcctttcttctactctctccagtccggccaaagcgaanttccttccatcattttcagttttttctgtcaagtgctgttgcttctgcncccaaacttatccaaatattgcttgt

SEQ ID NO: 4408 - DNA, 247 bp, Glycine max
  Clone ID: 701042764H1
attcattcaagattcagcaagtgcgttttggaagcagagaccgaaatacttcgagatggcccgtacaaagcaaactgctcgtaagtcaactggaggaaaagctcccaggaagcagcttgcaaccaaggctgcacgtaagtctgcaccaacaactggtggtgtgaagaagcctcatcgttatcgccctggaactgttgctcttcgtgagattaggaaataccagaagagcactgagctcctaatcagg

SEQ ID NO: 4409 - DNA, 252 bp, Glycine max
  unsure (1)..(252): unsure at all n locations; Clone ID: 701042765H1
ggaaaccctagctgggataggtcaaacatcatcatgtcggacgaagagcaccatttcgagtccaaggcagacgccggtgcctccaaaacctaccctcagcaagccggtaccattcgcaagaacggctacatcgtcatcaaaggacgcccctgcnaggttgtggaagtttcgacttccaaaactggnaagcnncggtcacgccaagtnccactttnttggnattgatattttcactgccaagaaacttgagga

SEQ ID NO: 4410 - DNA, 248 bp, Glycine max
  unsure (1)..(248): unsure at all n locations; Clone ID: 701042766H1
gggcagtatggtggtggagctgcgccctacatggggcactagattccacataagtgcatcagtcttttattactggcctggcgtttcttctgagttctgaagtttaaggagctgatgcaattggcgtgtttataatgaaatgctacttactgatcagaatattttaattaccaaatggagttctgttttcgccacctgctttttcttattttcttccctttcaaaatattgtagtattntgactttgg

SEQ ID NO: 4411 - DNA, 249 bp, Glycine max
  Clone ID: 701042768H1
gttttctctctctgtttttccatggccatctgatcaaacttttcttgattctctctctcagtttttgctattctgagtgatgggtatgccctgccgctgttcccacacctcccacatcactgaaatcatcatcaccagcttcttccgccacaagtcttaaattacaacaatttccctcaattattcatcaaccaaccaccttaatagccttttccaatggttccttaaagatccaacttggtcggagta

SEQ ID NO: 4412 - DNA, 252 bp, Glycine max
  unsure (1)..(252): unsure at all n locations; Clone ID: 701042769H1
gagagacccttttccttctctctggctttcctttgacgcttctgacactgctccttttgctttctnctccgtgtcctaatggctctccccgactcttcttcctgccgcaactccctgatcccctccttcatctactcctcttcctccaaaacgctccctctacaccacatgctcaannnnnnnnnnnnnnnnnnnnnnnnncagccgccggaaaacctcnacgccggatcgcgcggcctcatgattccctct

SEQ ID NO: 4413 - DNA, 248 bp, Glycine max
  unsure (1)..(248): unsure at all n locations; Clone ID: 701042770H1
ctattatctttatcttcatctttactttttacgtacaagcactctttgagatctcgtttcaaaatttcaaccaaggctttccctctcttttaattaatattatagtgaagattggntttgtcattttaattcttacaagtttttattataagggtcctaattaatttagtcctaacattcatctgatttttttactcttgtgacagaaagttgtgctaagtgtggaactacatgatgacaaaattaag

SEQ ID NO: 4414 - DNA, 227 bp, Glycine max
  unsure (1)..(227): unsure at all n locations; Clone ID: 701042771H1
tctaaaagagatctttttctgcncctttgaagaaagaagggtctttgcttgattttggagatgtctctgctctcagatctcatcaaccttaacctctccgataccaccgagaaggtgatcgcagagtacatatggatcggtggatcaggaatggacctgaggagcaaagcaaggactctcccaggaccagttagcgaccctttcagagcttcccaagtggaactatg

SEQ ID NO: 4415 - DNA, 249 bp, Glycine max
  unsure (1)..(249): unsure at all n locations; Clone ID: 701042772H1
tctgtttctgtctctgtgtttgcggctgaggattccgaacgagcgaccttcttcgtttctcgcaaagtttaagtcctcatgggtaangaaaagactcacatcaacattgtcgtcattggacatgtcgactctgggaagtcaactaccactggtcatttgatctacaagcttggaggtattgacaagcgtgtgattgagaggttcgagaaggaggctgctgagatgaacaagaggtcattcaagtatgcc

SEQ ID NO: 4416 - DNA, 210 bp, Glycine max
  unsure (1)..(210): unsure at all n locations; Clone ID: 701042773H1
agagaaaaactcagacacccacgttcacacttcgcacacaccatctctcactgttctttcttcttcctctttttcttttttnttttcttttctcttaatggaatgatggaacacaacatnatcgtnaanaanaangngatcgcnccgtttgttataaaaacctacaatatggngaacgatcccaccacngataaactcatcangnggggc

SEQ ID NO: 4417 - DNA, 247 bp, Glycine max
  unsure (1)..(247): unsure at all n locations; Clone ID: 701042774H1
gttccagagtgatgatggaagtgatgatctgtgagaatttccggtattcaccactctccatcttatcttcttctccttcacctcgttgccatctctctgttccatcttcttctttgaggattaaacctnnnnnnnnnnnnnnnnnnnnnnnnnntgtgtcttgttctctcatggagaatcaggagacccaacgcagcaaattcatggactttccgttcgtttcatctgcccagaagaacctcatggt

SEQ ID NO: 4418 - DNA, 245 bp, Glycine max
  Clone ID: 701042775H1
caagcaacttaattccagaggctcctcctcctagcaaagctgatgaagacagtaagattaaagcctttcttgatactccagccttggactggcaacgtcaaggttcagactttggcactggtagaggctttggaaggggtacagggggacggatgggtggtggacgtggttttgggatggagcggaaaacacccccacaaggctatgtatgtcacagatgcaaggtgcctggacattttattcag

SEQ ID NO: 4419 - DNA, 244 bp, Glycine max
  unsure (1)..(244): unsure at all n locations; Clone ID: 701042776H1
agcgtcgtagtcgcaaccctaatcagaagaagcgcanttcaagcgagtgacagccaccagccatgggtcgtatgcacagccgcggtaagggtatatcctcttctgctttgccctacaaaaggacacctcctagctggctcaagatctcttcgcaagatgtcgaagaaaatatctgcaagtttgcgaagaaaggtttgaccccgtctcagattggtgtcattctcagagattctcacggtattgc

SEQ ID NO: 4420 - DNA, 245 bp, Glycine max
  Clone ID: 701042777H1
tgttaatttgtctttctctatctctatcggtcatgggtgcttttgcttttgatgaggaaaactcctccaccgtggctccggcaacactctacaaagctctgacaaaagatgctgacactatcatcccaaagattattggggccatccaaactattgaaatcgttgaaggaaatggaggacccggaaccgtcaagaagataacagctagtgaaggtgaccaaaccagtttcgtgctgcaaaaagtg

SEQ ID NO: 4421 - DNA, 189 bp, Glycine max
  unsure (1)..(189): unsure at all n locations; Clone ID: 701042778H1
gaagaagagaaggtggtaccgccttcaattctctctctccatttctcatcctcatcatcttattatacctcttccatctccataacatccacttgtgaaaaaaacccattaatatatatcacacacacatgtatctctgagctccaatccaatccaagancacaccttgtcgcgtcggacgaaccttgg

SEQ ID NO: 4422 - DNA, 243 bp, Glycine max
  unsure (1)..(243): unsure at all n locations; Clone ID: 701042779H1
gattgctagaatggaatttcgatgctcagtcatctcttttaccattctcttctctcttgctcttgcaggagagagccatgtccatgcatcgctacctgaggaagattattgggaagctgtttggccaaacactcccattcccactgcactgcgagagcttctaaagcctctccctgcaggtgnngaaatcgatgaactccctaagcaaattgatgatacacagtacccaaaaacattcttcta

SEQ ID NO: 4423 - DNA, 244 bp, Glycine max
  Clone ID: 701042780H1
caataatgccccaagatgcaagtggtgaagatattgaggttgataagaatcttgctttcctcaatcaatatgttcagcagtctctggaaaggggtgctctaccctacattccagaggatgagcgcaatggaacagtgaatgtgagcaacttcagaagccaggatcaacatgaatctgcacaacatggtctgagatttgaggcatatgaagttccaaagcctccaatgccgtcaaaagttgctcc

SEQ ID NO: 4424 - DNA, 247 bp, Glycine max
  unsure (1)..(247): unsure at all n locations; Clone ID: 701042781H1
attctcagtctctgcacacacctcagaagaacagaacagaaccaccngtgcttttcaaaaacggtttcagcaatggcgttcttaaataaaattggaaatctggtcaagaattctgctgtcaagcacatcaatcaagatttttcggtgtctaccccatcacttttccaagcaattagatccatgtcatctgcaaagctttttgtcggaggtatttcttacagcactgatgatatgagtttgcgagagt

SEQ ID NO: 4425 - DNA, 248 bp, Glycine max
  Clone ID: 701042782H1
ccgacgaagccaaagccaaaggcaacgcagccttctcctccggggactatcctgccgccatccaccacttctccgatgccatcgccctggctccctccaaccatgtcctctattccaaccgatccgccgcatacgcctccctcaaaaactacgcagatgcattagcggatgccaaaaagacagttgaactcaagcccgactggtccaagggttacagccgtctcggtgccgcgcatcttggcctttcc

SEQ ID NO: 4426 - DNA, 246 bp, Glycine max
  unsure (1)..(246): unsure at all n locations; Clone ID: 701042783H1
gttcatcctcttccttctttctccaccaaaccttaaaccntaaactcgcatataacccaatcaaatttgcctttagattctcatttcccgncaaannnnnnnnnnnnnnnnnnnnaggaatccaaaatattccaactaaacctttcttccttttcatggcagatcctacccgtctttcattcagttcaatctcatacctgtatgtgtatctctaatgcaatcagttaatgaatgagaagaggnatc

SEQ ID NO: 4427 - DNA, 246 bp, Glycine max
  unsure (1)..(246): unsure at all n locations; Clone ID: 701042784H1
cttgtggctccaacaaaagccatcatgaatgctcgtgtatcagtttaccgatggcatgagttcttccctcatgccaganacaatattggtgtagtgattgcaatatggtcccctatcatacttgtctactttatggatacacagatttggtatgccatcttctctacaatagtaggaggcatatatggtgcatttcgacgtttgggagagattcgaacattggaattactgaggtctcggtttgat

SEQ ID NO: 4428 - DNA, 245 bp, Glycine max
  unsure (1)..(245): unsure at all n locations; Clone ID: 701042785H1
ctaatttctctcgttgtcatattctagtttcaacttatggagtttacctctaataatatgcttccttttgtttcaatgttttggcttgtgttcctaagtcctttagtgaactgtcaactttattataatttctatgactcancttgtccaaacctgaccggaattgttcgatccaacgtgtggtcagctatggccaaggatgcaagaattgctgcttctctcttgcgccttcatttccatgattg

SEQ ID NO: 4429 - DNA, 246 bp, Glycine max
  unsure (1)..(246): unsure at all n locations; Clone ID: 701042786H1
cgaaaaaagacttgagatatcattttttgaaaatggtgtgtttgctgaccccggaggattaggcctccgagcattgtnccaaagaccaattggacgagattcttaaaccagcagagtgcactattgttgcatcactttcaaatgattatgttgactcttatgttctgtcagagtcaagcctgttcgtctatcctataaaattatcatcaaaacttgtgggactaccaaattgcttctgtccatccc

SEQ ID NO: 4430 - DNA, 247 bp, Glycine max
  Clone ID: 701042787H1
atcgtaagcagcggctaccctaatcctctcctcttcctctctactaatttcagctatggccgacgaagctgtggttgttccagatcccacccagatcgatgtcaagctctttaaccgctggagcttcgacgatattgagattactgacatttctctggctgattatatcggagtggcgacatccaagcacgccacgtatgtgcctcacaccgccggcaggtactcggtgaagcggttcaggaaggcg

SEQ ID NO: 4431 - DNA, 248 bp, Glycine max
  unsure (1)..(248): unsure at all n locations; Clone ID: 701042788H1
ctgccgtcatccatttnnntgctttatgttatgacagcaaactgaactaaagcngaagangcgccatccatgtctcggcttcataagtcaacaacaggtcagcagcaacagtttcattccctacaccaaatccngtcccccatacatgtcaagtgttgttgtatccgttttattatggcatgccattgctgtgcttttgctttcaaatttggcctctgctgagggcattgaggccacaaatggaggca

SEQ ID NO: 4432 - DNA, 241 bp, Glycine max
  Clone ID: 701042789H1
ctgggtgttctgaggaatattctgtcattgatcgagaaccagggcttgtggtgttagagggtgatattggtgggggattggttcttaaacgtcatatctatgttccaaagaatgttcccaatgccatccagatagactctagtataatagcacgaatttggagctggttctggagggttctcaaggttggtttgcttaagagttcacccaacatttagtgttttgcatccatcagaatctt

SEQ ID NO: 4433 - DNA, 184 bp, Glycine max
  unsure (1)..(184): unsure at all n locations; Clone ID: 701042790H1
tagtgcctccttgccagaagttaaaatggcccaagaaactttcctattcacatctgaatcagtgaacgaggggcaccctgacaagctctgtgaccagatctccgatgctgtgctcgatgcatgcttggagcaggaccctgacagcaaggttgcctgtnnaaacctgcaccaagaccaacatggt

SEQ ID NO: 4434 - DNA, 243 bp, Glycine max
  unsure (1)..(243): unsure at all n locations; Clone ID: 701042791H1
gtttcctttcgccgaaaccctcgctcgcaacttctacagaatccctttcaccatggatattgaggaggacatccgttctttacagctcgattcagcagaagacaataatggggtggtaaatgcagaggatggaaggccagaagaagttgagaaatctgataagatggatgaagatccaaagcaggatgttgaggctgagccaaaggctgttgaggctgagccaaaagtgaaggataaggnggt

SEQ ID NO: 4435 - DNA, 242 bp, Glycine max
  Clone ID: 701042793H1
atcgcttaggtacagatacagatacagacacaacctggaaaaaattccgaccccagcccttcactcttctctctgcagcggaggagttgttataaagctattcatccctgctcaatattctacaccccaagacagagaaggacaatagagatcaactaactatcccaacttgccaatataaactgtgaagagtttctataaatgcaggacttctagcatactgttgtttgattaaccaagtt

SEQ ID NO: 4436 - DNA, 241 bp, Glycine max
  Clone ID: 701042794H1
gcggcagctacttcggctccatcttcttcgatctctcaaactctatcggcgcagaaccaatcctatatcactatggggaagacacatggaatgggagctgcccgcaagctgaagtctcaccgtaggagacaaaggtgggctgacaagtcatacaaaaagtctcatcttggaaatgaatggaagaagccttttgctggttcatcccatgcaaagggtattgttcttgaaaagataggtattg

SEQ ID NO: 4437 - DNA, 241 bp, Glycine max
  Clone ID: 701042795H1
accctccccacaatggtttcccgggaaaacaccaattggctcttcgattacggcttgatcgacgatattcccgttccggacgccaccttcggcgtcaattcctccgccttcacatggccccctaacgccttgaacgcttcctccaatgtcggcgttgaaattgatggctcgttgggggattctgacagtctcaaagagtctggctcaaagaaaagggttaggtctgagtcatgtgctgctt

SEQ ID NO: 4438 - DNA, 240 bp, Glycine max
  Clone ID: 701042796H1
gtttgagaagaactatgttggacaaagcttttgatctcttggatacgcataaagttagtagtctcaacaaaaatcaatgcattaggctctttgaggagctgaacaagtacaggactttgccaaaaatctctcgggaagacttgaattaatatttgatgagctcgatgatagtcatgatataaagattaacaaggatgaatttgcagatatttgcaatgccatagcttaaaatttcagaag

SEQ ID NO: 4439 - DNA, 202 bp, Glycine max
  unsure (1)..(202): unsure at all n locations; Clone ID: 701042905H1
ttaagagctgttcctgttcctcctagttgtaatttactacttagtgaaatgtganatgacttnccttctttcttatatgccatgcttacttcaagcgctggaacatatgaganagaagatagaggcatcaaccgaganaattcgtgtggcnaagatacaggaanaacaggcgcgcaaggtgtgggaatcagcatcaaaaaca

SEQ ID NO: 4440 - DNA, 203 bp, Glycine max
  Clone ID: 701042907H1
aacaacaacccaaagataaaaagcacaacacaagacactgaactcgcactcactgggttttcaaccatggatgcgatacggaagcagctcgatgtgttgatgggagccaaccgtaacggcgacgtccgtgaagtcaatcgcaagtactacgatcgcgacgtctgtcgtctctacctcgtcggtctctgccctcacgaactctt

SEQ ID NO: 4441 - DNA, 195 bp, Glycine max
  unsure (1)..(195): unsure at all n locations; Clone ID: 701042908H1
gttctgaactttctgaattcttcacttngatcatcatcttcttcaattccagcaaggatgtcacancaaggcgaatcatcggacccganatcggggaagaaggacttctcgaccgcgattctggaacntaaaaagtcgccgaaccggcttgttgtggatgaggctgtcaacgacgacaactccgtagtgaccatg

SEQ ID NO: 4442 - DNA, 203 bp, Glycine max
  Clone ID: 701042909H1
cggctgctacttcgggctccatcttctccgatctcctcaaactctatcagcgcagaaccaagcctctatcaccatggggaagacacatggaatgggagctgcccgcaagctgaagtctcaccgtaggagacaaaggtgggctgacaagtcatacaaaaagtctcatctgggaaatgaatggaagaagccttttgctggttcat

SEQ ID NO: 4443 - DNA, 201 bp, Glycine max
  Clone ID: 701042910H1
tcccttttctatctccctctgcaaaaacgaagtaaatgggtcggcttaatctcctacttgtgtggtcactctctttaacacttttccttaattatctacacccaacctctgcccagctcagtccaaaccactatgctaacatatgccccaaccttgaaagcatcgttagacaagccgttactaataagttccaacaaacct

SEQ ID NO: 4444 - DNA, 201 bp, Glycine max
  unsure (1)..(201): unsure at all n locations; Clone ID: 701042911H1
ctttggttctttntggttttcacatgccttttgattcgcctagcagttgcagattggaacatactgaagctgcagacacaagntggattgaagatcagcctgaagaactattgtgaaagctggaggatgaatgtggagctgcacaacattagggacttccaagttgtgcctgaagagtgcactgaatacattggaaaatat

SEQ ID NO: 4445 - DNA, 202 bp, Glycine max
  unsure (1)..(202): unsure at all n locations; Clone ID: 701042912H1
cgcgtatttagtcctccacctccaaattgtagacgaattcattgttgcaacaaatattgctgaaacttccttgactgttgatggtgtagtgtatgtnattgactctgggtatgtgaagcaaaggcagtataatccatctagtggcatgtattctcttgatgttgttcaaattagcaaagtgcaagctaaccagcgagcaggc

SEQ ID NO: 4446 - DNA, 201 bp, Glycine max
  Clone ID: 701042913H1
gcggaatatccactagcttcgtggaggtgacggatcttgacatggttgatgctgccatagtagaagggaaaacaaaagtgctttacttcgaatctgtttccaaccccacccttacggttgcgaacatacctgaactgtgccacatggcacaccggaagggagtgacggtggtggtggacaacacgttcgcgcccatggtgc

SEQ ID NO: 4447 - DNA, 201 bp, Glycine max
  Clone ID: 701042914H1
gaaaaaccaagtaatactagccaaaatatgtctcccaaatacatgtcccttttcctcctagtaatactagggatggcttttctggccactacttcccttgctgatcgtcgttttctttcggtggaagatggtcatgatcaccatcaccaccacccaccaaaaaaacactggcctccaaccacacaaaatgaaccttcaaac

SEQ ID NO: 4448 - DNA, 202 bp, Glycine max
  Clone ID: 701042915H1
atctttgtggggactgcggcggagcatccgttggacctcacatattgacatgtgtcagttgaagcgcgttagtgacggaatctgatggacacacctttaaaaggaggcaagttgagtcccgtcaccctctttgccccgctttattgcatctcagaggccaattctttcgccgcttcttctctctttccaacgcttccccctg

SEQ ID NO: 4449 - DNA, 201 bp, Glycine max
  Clone ID: 701042916H1
caagaacccaagaggcattacccttcttcagaggatgggaattggccttgtaatccacacattgatcatgatcattgcatctgggactgaaagctatagactcaaggttgcaagagaacatggcgtggttgaaagtggagggcaagttcctttgagcatattcattttgcttcctcagtttatacttatgggaactgctga

SEQ ID NO: 4450 - DNA, 192 bp, Glycine max
  unsure (1)..(192): unsure at all n locations; Clone ID: 701042917H1
gcgggnttngaagaagaagcagttcaattgatcaactcagatttcagggacctaagtctagctgctaatagactcgcccatcatgccatcaaacttggtggcattggctttggagcctcttttttcggattgtttgctgccattgctgctatttatctgttgattttggatcgtacaaactggaaaacaaat

SEQ ID NO: 4451 - DNA, 200 bp, Glycine max
  Clone ID: 701042918H1
tccgttactggctttttctgtgtccttgggcaaccctttttgctgattttcactgccacaatcacaatcaattgaagaaggaagaaataagaagtttctgggtaatgattcgcggttatatagcctgagctgtgccccattccatacgcaacttttcctccatcattctccttttttttctcaccttaataagtgatgga

SEQ ID NO: 4452 - DNA, 199 bp, Glycine max
  Clone ID: 701042919H1
aagagaacgggttttgaagaagaagcagttcaattgatcaactcagatttcagggacctaagtctagctgctaatagactcgcccatcatgccatcaaacttggtggcattggctttggagcctcttttttcggattgtttgctgccattgctgctatttatctgttgattttggatcgtacaaactggaaaacaaata

SEQ ID NO: 4453 - DNA, 200 bp, Glycine max
  Clone ID: 701042921H1
ttcaatatgaggaaccccacttcacaagtcccctgaggttgaaaatgatggtgattttaaagttcatctgttctcttcatcatccgagttgcttgaaaagcttcatgaaaaatggagttcagtggagaaaccaccatacccagctatgtattctagtatttatggaggtatcatacttgatccagcaatgatggtaatcc

SEQ ID NO: 4454 - DNA, 201 bp, Glycine max
  Clone ID: 701042922H1
ttcatttcatttcactcactcacttcttcgtttcgtttctctttctcactctagatctgtgtttctctctccaaccttcgtttcaccacacttccatcacttgtcgagtgtagaaatggctccaccaattgagaccccaaccaaggtttccagctatcagcactccccaaaccctcgtcttaacgagaggattctttcatc

SEQ ID NO: 4455 - DNA, 183 bp, Glycine max
  Clone ID: 701042923H1
aatagcgatttagagtttccgaaaagaaattgatttcacgcatttttagtcagtatcagatggatcactttgcagcacatgaagagcaacttgcttcacagagaatgaggcagaaacttgaagaagtaaatgtggctgctcaaactaatcttgcccctgtccaagactatgtcaattacacgc

SEQ ID NO: 4456 - DNA, 200 bp, Glycine max
  unsure (1)..(200): unsure at all n locations; Clone ID: 701042925H1
gggaaggttagtcaaaacattggaatttccacacttgaacatagnccgatgacacaactcaacacccccaaagacaaggtcacaaaaaactcatgaaacgatgtgcttgcccactagcctctttacttctcctagcaatagtaatcatagttttaatcttcacaatatttcgtgtcaagggtcccatgatcacaatgaac

SEQ ID NO: 4457 - DNA, 199 bp, Glycine max
  Clone ID: 701042926H1
gggccacaggagtcgcctcgtgtttccgtttccgtttcaatttcctctcacaggctttaaccttaccagcttcgagataagacatggaccggatcaaaggcccatggagtccggaggaggacgaggctctgcagaagctggtggagaaacacgggcccaggaactggtctctgatcagcaagtccatcccgggccggtc

SEQ ID NO: 4458 - DNA, 199 bp, Glycine max
  unsure (1)..(199): unsure at all n locations; Clone ID: 701042928H1
ccaagatccaacaacttctcaaccacaacgagttgctattcccttcgattcacgaaccccaaaaattaaaacattaaaaaagatatcaagtatcaaaatctaaacggcatcagcaaacatgtctcaacaccatggtgatgaaatggagtatgcggcagatgataatgaaatggcagaggtagaagaggatatntatttc

SEQ ID NO: 4459 - DNA, 196 bp, Glycine max
  Clone ID: 701042929H1
ttgaaagcttgaatactgcatctttcgagacgtttgctgccttttgtcaacctggacttggacatctaatattggtattttatttggcatttgtgttgttttctgctgactttttatgaaattaaacataatgtttttctggttcattttttacgggaaacaattgtgcggggtccaagttttcgttggtctgttg

SEQ ID NO: 4460 - DNA, 197 bp, Glycine max
  unsure (1)..(197): unsure at all n locations; Clone ID: 701042930H1
gtgctataatggctgagcttttctctcttcgtcctcttttcccaggtgccagngaagcggatgagatttacaaaatatgtggtgtgataggcaatccaacctttgaatcatgggcggatggactcaaacttgcnagggatattaactaccagtttccacagcttgccggtgtgcatctttctgctttgattccgtct

SEQ ID NO: 4461 - DNA, 144 bp, Glycine max
  Clone ID: 701042931H1
tttccattttctgtggttctcttctcacttctctaatcttctcccccctctgttactccccgcttctctgaatccctttctgttaatcatctgtctttcacctcgtgattccaaaaagattcaaactttgaaaatttttctcga

SEQ ID NO: 4462 - DNA, 198 bp, Glycine max
  Clone ID: 701042933H1
tgcacgatgatcattcgcttcaagacatagagaaaggtgcatccaaagagaaaaatgagactccaacagaatcttctgctgtaaggggtaacacaacttgtgtacctgagaatgtggaaatggatgattgcctacaagtatatgcaagtctaccactgaaactagtagtagtagcaacaagagtgtttcaaaagctgg

SEQ ID NO: 4463 - DNA, 196 bp, Glycine max
  Clone ID: 701042935H1
tgcttacaatccttgtttcctttggagtgttcttctacttgcaggattcttacacagcacagttatttcctctcataaagttaccgcgggataagtgcagccttcttccccatcgccacttctggatatccagcaaacgtattgtgaccccacaagggatcatttctggttcagtggagataaatgatgggaaaat

SEQ ID NO: 4464 - DNA, 198 bp, Glycine max
  unsure (1)..(198): unsure at all n locations; Clone ID: 701042936H1
ctgctncgcataactcctcacacacacacacaaaacagnacacancacatacacatacacntgtcgttgatgagtggaggnaanaaaaaacacagatccatcacacacatgancaattgatctttgtcctttgtatataatttgattctaatttttggcactaagagagccactcaaggctctgggatgtactatacg

SEQ ID NO: 4465 - DNA, 197 bp, Glycine max
  Clone ID: 701042937H1
ctgaagagtaattggtggattccagcaatgggccgtggttcatggcagttgggtcaagcttgatcaaagaggagaagggcaaggagcgagaagctcacatgctatagccatagtagcacagaaggtgtatgcatttggtggcgaattcgtgccacgtgtccccgttgataacaaacttcacgtgttcgacctagaga

SEQ ID NO: 4466 - DNA, 197 bp, Glycine max
  Clone ID: 701042938H1
ctctcttctcttcattctccctcttaattcttttctcttttctttctttcacacaaactcctcttattatgatgggtcttgatcaagatgctagcagcaactctggccttcatcttattctagggttagctttgactgccaccaccaccactactccatcactaccatccatttccaacaagcttgatcatgttgat

SEQ ID NO: 4467 - DNA, 198 bp, Glycine max
  Clone ID: 701042939H1
cacaaactagtaatattattcttcgaatccattttattattcataatgggtattttcacatttgaggatgaaaccacctcccctgtggctcctgctaccctttacaaagctctagttacagatgccgacaacgtcatcccaaaggctgtcgaagccttcaggagtgttgaaaaccttgaggggaacggtggccctgga

SEQ ID NO: 4468 - DNA, 199 bp, Glycine max
  Clone ID: 701042940H1
tccgggttcacgtttcacaatcactttttgcgcttctctcactcactcactcttcttcttccttcttcgtgtggttttctttctcgaactcgaacgaagatgcgtgagattcttcacatccagggagggcaatgcgggaaccagatcggagccaagttctgggaggtggtgtgcgcggagcacgggatcgattcaacgg

SEQ ID NO: 4469 - DNA, 196 bp, Glycine max
  Clone ID: 701042941H1
caattaaacagttgagaaagaacctggtcgttaaggcaaaaccagtaccaagcttctattatgaggggccaccccccaagactgaactcaagaaggtactcttttttctatttcatctgccttttccaagtctcaggatgcatatgaattgcaattaagaatcttagagtatgcacgaatagatcgatggagtaat

SEQ ID NO: 4470 - DNA, 197 bp, Glycine max
  unsure (1)..(197): unsure at all n locations; Clone ID: 701042943H1
tcttgggcatgaccantcaaatgtcttctttnctctnagcttctcttgctgttttctnnntcttctcctccttggagaagagttttgcctttgcaagcagcaagaaaggaggacacagaaagcaacaatcttcatcaatatactcatcttgttcacctcagctcactccttccttcatcttcttgcagcncttctac

SEQ ID NO: 4471 - DNA, 197 bp, Glycine max
  Clone ID: 701042944H1
gagtgcggtaggctcatccgagaccggaagcagcaatggggatcgatctcaaggccggaggtaaaagcaaaaaaaccaaaagaacagcacccaagtccaatgatatctatcttaagctcttggtcaagctttatcgcttccttgttcggagaactggcagcaaattcaatgccgttatactcaagagattgttcatg

SEQ ID NO: 4472 - DNA, 195 bp, Glycine max
  unsure (1)..(195): unsure at all n locations; Clone ID: 701042946H1
cctcaccatccgtatgctcgatggttggcagaaacaaatgcagtgaatgncacattgccagaagtggtgctggttaggagaacccttgcttgggtaacaggaataatattgctcatttcaacctttatggggatatgctacctcatgaatatgccgcttacaagggacacgcttctatattctaatgtcaagctt

SEQ ID NO: 4473 - DNA, 195 bp, Glycine max
  unsure (1)..(195): unsure at all n locations; Clone ID: 701042947H1
gttttggtttctggccatatctaatatctttagtttctttgttgttgttctccaatctgcactgaaacgtggctgaatgcctctctcagtcccagccagagcgagaatccaccatctccatggaccctcctttttcccttccatttccaaaccanaacaaaaacccatttggccaacccttttgcctctgaatcg

SEQ ID NO: 4474 - DNA, 197 bp, Glycine max
  Clone ID: 701042948H1
attctttcgatcagctatgaagtaaagagaagggcaaggagagatagatagggaagaaaaatgagtgtatcattgactgtgatgaccttcaatcctccatgatgatgagccacaagacagtcctaattcgtgggagaagagaagggatatgtgcataagcgttatcaccagttactcacccatcatcctctgtaccc

SEQ ID NO: 4475 - DNA, 194 bp, Glycine max
  unsure (1)..(194): unsure at all n locations; Clone ID: 701042949H1
ttctggctgtgttaatatgcgtttcagcactgtcactgagtcttctgttgcgggggaagggcaaaataatggcctgttatgaacttctacaaggaatcatgccctcaggctgaagacatcatcacagaanaagtcaagcttctctacaagcgccacaagaacactgctttctcctggctcaggaacatcttcca

SEQ ID NO: 4476 - DNA, 175 bp, Glycine max
  unsure (1)..(175): unsure at all n locations; Clone ID: 701042950H1
taccanaccaaaatcaatctgcggcgtcagaaagccatgganccctacaagaatcgggccatcaagcgccttcaattctcccttctggactacaaattccggtgctcccatctggaacaataactcatcgctgactgttggatctagaggtccaattctgctggaggattaccat

SEQ ID NO: 4477 - DNA, 197 bp, Glycine max
  unsure (1)..(197): unsure at all n locations; Clone ID: 701042951H1
gtggcgtcgtgggctgatggccgggcacgagcctctctcacgtgatccaatcgacggtcctagaattgcccagaaccacccgccacgtncagaatctccgccaagagccaccgcgtctccgccacctctgaccaacgccccgcgggaccctgctgcatctacgttggccccctcgaaaccgctaacaaagagaacct

SEQ ID NO: 4478 - DNA, 197 bp, Glycine max
  unsure (1)..(197): unsure at all n locations; Clone ID: 701042952H1
gctaccaggagctcccnatctacagtgtttccctctctttctcnctctctctgctngcaaaagctncgaagtctgtgttctgatccttcaaattaggntgtttgcntttcntggggagttanatggntgctaggccgtggatttngtcaatttgatctcaattgaaattttntagtatntctgatggactcgaaaac

SEQ ID NO: 4479 - DNA, 196 bp, Glycine max
  Clone ID: 701042954H1
cgaaaagtccgtgggatttgtgacaacacaacgctgtaaagtactcctcaattcgaaaacgcagtgttttagcattgttcctcaacacacacacaaaaaaaactcccttgtatattgttgcagctctagctagggtttcgcaagtgcgatcgaagaagaacaacgacgatggcgatggctgcagctctgcgtcgcg

SEQ ID NO: 4480 - DNA, 196 bp, Glycine max
  Clone ID: 701042955H1
ctgccacctggtccgactcctcttcctataatcggcaaccttaacctcgttgaacaacctatacaccgtttcttccaccgcatgtcccaaaaatatggaaacatcatatccctttggtttgggtcacgtcttgttgtggttgtttcatcacccacagcgtaccaagaatgtttcaccaaacatgatgttaccttgg

SEQ ID NO: 4481 - DNA, 197 bp, Glycine max
  unsure (1)..(197): unsure at all n locations; Clone ID: 701042956H1
cattttcagaggaacaatggcgggtagggtttcgacgtgcttcttcttcgtgtttgctctttctctccttcttccttttcagattctccgncgaggaatcatcggagaaagagttcgtactcacattggatcactctaactttcacgacactgtcagcaagcacgatttcatcgtcgtcgagttctacgctccatgg

SEQ ID NO: 4482 - DNA, 195 bp, Glycine max
  unsure (1)..(195): unsure at all n locations; Clone ID: 701042957H1
gcaattgcctcttctctnctcncagaatcggtgtaggttanaggtttaagggttttgttttcatttaggncactaatccgatatcatgaagctncgatacgactagtctcgaatcgtttcccacactgattgcacctcaaaacgacgtcgccggagaactctccgccgctccgntctttgaccttccgaattcca

SEQ ID NO: 4483 - DNA, 194 bp, Glycine max
  unsure (1)..(194): unsure at all n locations; Clone ID: 701042958H1
gttcattcagacatatggcacacacataattcataggtatggctgttggaggtcaagatgtaatttgtgtcaaacanaaacattcttcgaaggttccacctggtgatctaagaagacatttagaggatctaggagatattttgttttcagatttaagaagcccttctcaacaacaaaggaacaccccagaaggc

SEQ ID NO: 4484 - DNA, 196 bp, Glycine max
  Clone ID: 701042959H1
ctcatcgtttctctctctagatctctgtttctcctttttctccaaccttcgtttcaccaccacacttacattactttgtcgaaatggctccaccaattgagaccccaaacaaggtttccagctatcaacagtccccaaaccctcgtgcttaacgagaggattctttcatccatttccaggagacacgttgctgcac

SEQ ID NO: 4485 - DNA, 194 bp, Glycine max
  Clone ID: 701042960H1
tccagggaatatttatttcaagtactggagatcaggcacagtcaatgagtggaaatggcgctatggcatttgatgtagagtacgcacgatggttagaagagcataatagacaaaccaatgagctaagggctgcaataaattctcatgctggagatattgaacttcgaaccattgttgacaatttcatgacgcag

SEQ ID NO: 4486 - DNA, 164 bp, Glycine max
  unsure (1)..(164): unsure at all n locations; Clone ID: 701042962H1
caaacataacttgcagtaatgggcttcaatgaaccaccaaaacgaaattgagctctttgagggccaatctcttctgtacatgcagctatatgggcacctaagacctatgtgtcttaagtgggctgttcaactaggtattccagacataatacagaancatgcca

SEQ ID NO: 4487 - DNA, 193 bp, Glycine max
  Clone ID: 701042963H1
ctcattaattgcaagaatggcacttcgttgcttggtgatgtccctttctgttctcttcactcttggtcttgcgagagaaagccatgccagagacgaagatttttggcatgctgtttggccaaacactcccattccaagttcattgcgagatcttctaaagcctggccctgcaagtgttgaaatcgatgatcac

SEQ ID NO: 4488 - DNA, 193 bp, Glycine max
  Clone ID: 701042965H1
gcgggattagaaacattatggcttcctatttctgggaaagaaagtgaataagaacatcatgaaattagtattgctgagagatccaacagatgaaaatgtgatccctgttgttgaggaactgcaaaggcggttgcctcaattgagtgccaccggtcttcaacagcaaggagatggtaaagagtatcttggtgac

SEQ ID NO: 4489 - DNA, 194 bp, Glycine max
  Clone ID: 701042966H1
gtaaatatcgcttgcagtagtaatggataaccaaaatgccatccgagttctttgaaggccaaaaccttttgtacatgcagatatttggtaacctaagacctgtgtgtcttatgtgggcttgcgaactaggtattccagacataatatccaaccatgggaaacccattactcttcttgagttggtctcagccctg

SEQ ID NO: 4490 - DNA, 183 bp, Glycine max
  Clone ID: 701042967H1
attttctctctccctctcccacgcgccaccgccagaaagaggattttccatttctgcctccgattgcatgccgctcatccatggatcagtcttctggcctgaatctggaagatctgaaatgggaccattccttcgtcagagaattgcccggcgatccccgccgcgactcctttccccgtgagg

SEQ ID NO: 4491 - DNA, 194 bp, Glycine max
  Clone ID: 701042968H1
gattatcctaagtctttgggaatagtgctgcaatgggcttcaagtcaggaggaggtgacccttttgggagctactggaagcccatttgtgtgcagggttcatattgccctcaagttgaagggagttgaatacaaatatgtcgaagaaaatttgaggaacaagagtgaactgcttctcaaatccaacccagttct

SEQ ID NO: 4492 - DNA, 193 bp, Glycine max
  Clone ID: 701042969H1
caaaaacattcttctataaagaagaccttcatccaggcaaaacaatgaaagtacaattcaccaagcgtccctatgcacaaccttatggtgtatatacatggttaacggatattaaagacacctctaaagaaggatatagttttgaagagatatgcatcaagaaagaagcgtttgagggagaagagaagttttg

SEQ ID NO: 4493 - DNA, 193 bp, Glycine max
  Clone ID: 701042970H1
ctctcgccttgctcctggtactcctccaagatccaagaggggatattgatatggagctgaatgtttgttagctatatgatattctggtgcaaatttcaaacatcttacaacacactgcaagttatagatttgtagatcataataccagttgtcttatggtggtgatctttcttcagagcatagttgctaaaaa

SEQ ID NO: 4494 - DNA, 197 bp, Glycine max
  unsure (1)..(197): unsure at all n locations; Clone ID: 701042971H1
ggcgatttgcgtaattgtcaaccaccacaccaaccaagncgngtcgttctttttagtcactgataagaacaaactttccatngtccgcggncatggcaangctgttctttccgccgtcactctcgccgataaaccccttctcantatncctaaaccatcgcgccaggcggcggctgcgttccactctcccaaatctc

SEQ ID NO: 4495 - DNA, 194 bp, Glycine max
  Clone ID: 701042972H1
tcatcaaccatggcagggagattgacgaacgcagcatcgaggatcttaggcggaaacggcgtcgtttaccgatccgtagcttcctctcttcgcctccgctccggcatgggcctccccgtcggcaaacactatgttcccgacaaaccccttcccatgaatgaggaactcctgtgggacaacggcactgcatttcc

SEQ ID NO: 4496 - DNA, 171 bp, Glycine max
  unsure (1)..(171): unsure at all n locations; Clone ID: 701042974H1
gcgaaaagnaaagaaaaggtggggtccnaagggatccaatccactngtagatgagatgaggtgcaatgagactggatcatagcattgatgatagttgagagtgagtnagttaatatgttatcattgttatggtgaaagtgaaaccaaacaccgaagctgttgagtgatttt

SEQ ID NO: 4497 - DNA, 192 bp, Glycine max
  unsure (1)..(192): unsure at all n locations; Clone ID: 701042975H1
ctgaaattgtgaacagtattgttcttgncgttgtttcggagggtcaattgtttggttgagcaaaaatctgaaattcaatttcagttgaaagcaaatggggaatcttttttgttgtgtgaaagttgatcaatctacggtggctatgagagaaggatttggacgatttgagaaggtacttcagccgggatgcca

SEQ ID NO: 4498 - DNA, 195 bp, Glycine max
  unsure (1)..(195): unsure at all n locations; Clone ID: 701042976H1
gcggagggcggtggaagaaggagcgatgtcagagtcgagagtgaggaagaggnaaatggcgaggggcgaagaatccgagagccatgacgaagagcaatgcgatgaaaccagttctgcctccgcctccgccgcttcctccgaaggcgtcgaggtgcaggttacttacggcacggttctgaagcttatgcncgagaa

SEQ ID NO: 4499 - DNA, 192 bp, Glycine max
  unsure (1)..(192): unsure at all n locations; Clone ID: 701042977H1
agattccaatccttccttccttcacattctattctatttaccctttgttggtccgcgaagtttcttgtttcctccaacatataatacctcatctttctctttcaatttctctcttcgcttttntttgattcacacacaatgggtctctgggattccttcctcaattggctccgcagcttgttttttaaacag

SEQ ID NO: 4500 - DNA, 132 bp, Glycine max
  Clone ID: 701042979H1
aagagaaattttttagaacaatggaggcatcaaagatgaagtttttcttggttttggtgattgccatgttggcgatggtagcaactggggtttcagctgctgaggcacctgccccaggtccttcatccgatg

SEQ ID NO: 4501 - DNA, 193 bp, Glycine max
  unsure (1)..(193): unsure at all n locations; Clone ID: 701042980H1
canggcgttggagtggataccgttccggtcctcgttggccctgttacatacctgttgctcctccaaagcctgccaagggagttgagaaatccttttctctcctctctctccttcccaaggttcttgctgtctacaaggaagttattgctgaccttaaggcagctggtgcttcatggattcagtttgatgagcc

SEQ ID NO: 4502 - DNA, 190 bp, Glycine max
  Clone ID: 701042982H1
gtttctgcagcagttgagaggaggcactgtggcagaagtcctagggagtgtaaaacagagacgcaaaatgaagacgatcttgtcgtctgagaccatgaatattcccgacggcgtgagcatcaaggttcacgctaaggttatcgaggttgagggccctcgtggaaaactcgtgcgagacttccaccatctg

SEQ ID NO: 4503 - DNA, 190 bp, Glycine max
  unsure (1)..(190): unsure at all n locations; Clone ID: 701042983H1
gcacaatgttggtgccaccatggcttgagccactcctaaacacatccttcttcaatgtgtgtcggattcacggagatgccgcgaggagcgaatgtaacatgttttgtctcgactgcaatgagantgcgttttgcttctattgccgttcctcaaaacacaaggatcaccaagtcattcagatacggagatc

SEQ ID NO: 4504 - DNA, 190 bp, Glycine max
  Clone ID: 701042984H1
gggactttgggtatattttgttggaccgattactggggcagttttagcagcatggtcttacaatgtgattagggacactgaacacccctggttttcccatttcactatcctccatttcatccaaggtgcgccaaagcattggtggaaccgaacaaaaaagcgaccaaagatgcttggtgtgaatgaaaat

SEQ ID NO: 4505 - DNA, 192 bp, Glycine max
  unsure (1)..(192): unsure at all n locations; Clone ID: 701042986H1
cncatttcctctcagaaccctcgatcactcccacgcgctcctatatcctctccttcaccgtcgctctctccaacgatcacaacaacatcgtcatcccatggcaaacgccgcatctggtatggcagtccatgatgactgcaagttaaggtttttggagctgaagacaaagaggacacaccgtttcatagtttt

SEQ ID NO: 4506 - DNA, 192 bp, Glycine max
  unsure (1)..(192): unsure at all n locations; Clone ID: 701042987H1
aacaacaacgacaacatcgccgtgacagatctcacttccgcnctcaaatgaagagaatcgcgccgactagtcaatgctctcaagagcaagattcagagtctggctggggctcattctgatgttctggagactctatcccccaatgtcaggaagcgtgttgaatctcttagagagattcagggtaaacatgat

SEQ ID NO: 4507 - DNA, 140 bp, Glycine max
  unsure (1)..(140): unsure at all n locations; Clone ID: 701042989H1
agagttctacttctagagtctcctccttccactcgtcgccgcgctggcagctnctacttcaacgagatcaaagataccgataagctcgttgtgatagatttctcggcgtcgtggtgcggtccttgcaaattcatagagcc

SEQ ID NO: 4508 - DNA, 190 bp, Glycine max
  Clone ID: 701042991H1
tgctgtttgttttcccaggttttagagctccaaaccttcagatccacctcattcgtctccagatcttccttcctggataacgttttcgggttcgagaaggcacttgtgttgtttttcgtacgaaatggagactaaacagagttcggtgacggttacgctcagttacggcgctttgacgtgcgccgcggaa

SEQ ID NO: 4509 - DNA, 165 bp, Glycine max
  Clone ID: 701042992H1
ggatttcttgcgcggtttatcatgggggatagtcagtattcgttttctctcaccacatttagcccttctggaaagcttgttcagattgagcatgctttgacggctgtcgggtctggacaaacgtctttgggaattaaagctgcaaatggagttgtcattgctact

SEQ ID NO: 4510 - DNA, 180 bp, Glycine max
  unsure (1)..(180): unsure at all n locations; Clone ID: 701042993H1
aaagatgagtgatgatcaaacggcagtgcgttttggtattcttggatgtgctaacatctccatcaagctatgcaaagccctaagcaaagcaccaaatgccaagctccatgccataggcagccgttccctcgagaaggcgacggcgttcgcggctgagcacggccttcncgaggtgttagg

SEQ ID NO: 4511 - DNA, 168 bp, Glycine max
  unsure (1)..(168): unsure at all n locations; Clone ID: 701042994H1
gaaaaaaatgccagtgcagatattcantagaatgagaaattacataccttgggcctttgaaatcaacatacaggcactgaggatacaatatgctatgagaattcttattttgaagttagaatcaagaaaccttttgttagtttgatgtttggatttaacatgatcaca

SEQ ID NO: 4512 - DNA, 197 bp, Glycine max
  unsure (1)..(197): unsure at all n locations; Clone ID: 701043001H1
atttcacgcagccactttagcaagctccatctatctccctgattaaaggttatctctaaggtcctanacaatcctctttncaaaaacataccgaganaagtgtggaaatgacgacaccatcattggtagagtctctagttcttcaactccatgagatctcagctgtcaaatttggcaacttcaagctcaaatctggc

SEQ ID NO: 4513 - DNA, 193 bp, Glycine max
  Clone ID: 701043002H1
gctttttgattctgaaatctgagctttgtagttttcctatgatccagtctctttagttagctcctgctccttttctgccagaagtttcaaggaaaaacaaagaaatgagacttggatttgcttcttggagattcatcccatgcaccctggttgcctttttgattctacaagacagtggagctagaaagatagc

SEQ ID NO: 4514 - DNA, 192 bp, Glycine max
  unsure (1)..(192): unsure at all n locations; Clone ID: 701043003H1
cnaataacaaaccaataaaccaaacccaaactggctaggntttgtttggngtgacgcgcagnagcgccatggntgattctcttcgaacttgaaatccgacgcgataatggagcagatgaagcagcacctcgncaccgnntcaggcanacaagtcactaacaaaattggactcgttnatcagattcanattnt

SEQ ID NO: 4515 - DNA, 192 bp, Glycine max
  Clone ID: 701043004H1
attcgttggccacacccctaggttttctccctcttcatctctcccaatttctctcatcaaagtttcaacctttgataagattgaatcatggggaacgccctgagattcctctacagccattgctgcaagcccacagcagctggtgattctgaatcacttggaccacacggtgtttcctctgccaccgttggt

SEQ ID NO: 4516 - DNA, 190 bp, Glycine max
  Clone ID: 701043005H1
ctctgtttctgtctctgtgtttgcggctgaggattccgaacgagcgaccttcttcgtttctcgcaaagtttaagtcctcatgggtaaggaaaagactcacatcaacattgtcgtcattggacatgtcgactctgggaagtcaactaccactggtcatttgatctacaagcttggaggtattgacaagcgt

SEQ ID NO: 4517 - DNA, 189 bp, Glycine max
  Clone ID: 701043006H1
cgtgtaccctcctgagaatcagacgcagttcgccatggcatattacgtcatcaactattccaagctacgtatttgggagtttgtggagttcagcaagatgatatacctagacggtgatatacaagtgtttgacaatattgaccacttgtttgacttgccgataactacttttatgcggtgatggactgt

SEQ ID NO: 4518 - DNA, 190 bp, Glycine max
  Clone ID: 701043007H1
gttcgtcaccatgacttttaagcgcaggaatggaggtcgcaacaaacacggccgtggccacgtcaagttcattcgatgctccaactgcggcaaatgctgtcctaaggacaaggctatcaagaggtttctggtgaggaacattgttgaacaggctgcagtcagagatgttcaggaggcttgtgtctatgaa

SEQ ID NO: 4519 - DNA, 190 bp, Glycine max
  unsure (1)..(190): unsure at all n locations; Clone ID: 701043008H1
ctctgcagttttcgcaaccaaaccttcttttttgtttttatncctctgcttattggattcaacgaagtgtncgtnattaaggagaacataactttttnantcacacagagagagagaganaagagacccagtactttctgcatccaaaccaatcactactgcggataactggtaagttcataaaggggag

SEQ ID NO: 4520 - DNA, 190 bp, Glycine max
  Clone ID: 701043009H1
gcacagcagaactctgcttcttcggattccgatcgcacgcgccgtcaccatggtgaacgttccgaaaacaaagaagacatactgcaagagtaaggagtgcaggaagcacacgctgcacaaggttacccaatacaagaagggtaaggatagcattgctgcccaaggaaaacgccgttatgatcgcaaacaa

SEQ ID NO: 4521 - DNA, 187 bp, Glycine max
  Clone ID: 701043010H1
gctcgtttggtctatctgtgtgtgtctgtttgctcatgcatacactttcatatgtaaacaaggttgtgcatgaaataaaatctgctgtcaaataggattcgtttgagcagaggccagtacttaatacctagctcagcttggatcaagttaaaatgtattgagtttcttttgtaagttaaaatcaatt

SEQ ID NO: 4522 - DNA, 188 bp, Glycine max
  unsure (1)..(188): unsure at all n locations; Clone ID: 701043011H1
ctctttttctctctctccattccgtgttttcagctccggtaacctctccttctccgccgccgttgctatctccgccgtgaccttccatccctcaacgccccacagatcttcaatttgattgcttgggtcaacaatttctgtcattctcaatcatggcaactagacttcagtttganaataattgtgaa

SEQ ID NO: 4523 - DNA, 192 bp, Glycine max
  Clone ID: 701043012H1
ttttgattctcgttggcaatggcggatggtggtacgttgggattggagggtgtgagattagccttcttgcatcaatactttcaactctaacaatgaaatcttccttgcgcgaacttatcaacaatgaaatcttcatttcatttcattgcatgcttatagtcatcgtgggatgtgtgtgtgttttagatttgg

SEQ ID NO: 4524 - DNA, 189 bp, Glycine max
  unsure (1)..(189): unsure at all n locations; Clone ID: 701043013H1
ggaggatggaacactacatcgtttccaagctgcttcaacaattttggccacagggggtnatggtagagcatacttctctgcaacctcagcacatacttgtactggagatgggaatgccatggttgcacgtgctgggatccctcttgaggatttggagtttgtacaatttcacccaaccggtatatatgg

SEQ ID NO: 4525 - DNA, 190 bp, Glycine max
  Clone ID: 701043014H1
ctgcgttctcaaacgttgttgcttgctgctgctgcatagttgatcgaaagcatgacaacatcattgtccagcatccttttcaagggaattgcagctcgttctttcaccgcccctctaactaggtcctgttatcatggaatgagatactttgctactgtatcaaatgatcctgacacacatgatgacttca

SEQ ID NO: 4526 - DNA, 191 bp, Glycine max
  Clone ID: 701043015H1
tcgtcattttcctctggaagcataataagtatatatataaagttgttgccacttgcaatactcatcaatcaaaatccaaacccaaagctttcttttttctccatcaaattctctgacctcaccatggggatgcagcttgttttcattggcaccatagccttgtgtttggttgtttcctcggctatgcttga

SEQ ID NO: 4527 - DNA, 192 bp, Glycine max
  unsure (1)..(192): unsure at all n locations; Clone ID: 701043017H1
gcgatcgtgctcctgttcacggtctttgccgtttcctccgccctanacatgtcgataatctcgtacgacagcgcccacgcggacaangccgccacgttgcgcaccgangaggagctgatgtccatgtacgagcagtggctcgtgaagcacgggaaggtgtacaacgcgctcggcgagaaggagaagcgcttc

SEQ ID NO: 4528 - DNA, 189 bp, Glycine max
  Clone ID: 701043018H1
aaaagattgatgactgatgtgccttttggtgttctactctctggaggtttggactcttcattggttgcatccgtcacttctcgctacttggccaacacaaaggctgctgagcagtggggatcaaagttacattcattctgtgtaggccttgagggctcaccagatttgaaggctgcaaaagaagttgct

SEQ ID NO: 4529 - DNA, 189 bp, Glycine max
  Clone ID: 701043019H1
cgattgctagaatggaatttcgatgctcagtcatctcttttaccattctcttctctcttgctcttgcaggagagagccatgtccatgcatcgctacctgaggaagattattgggaagctgtttggccaaacactcccattcccactgcactgcgagagcttctaaagcctctccctgcaggtgttgaaa

SEQ ID NO: 4530 - DNA, 189 bp, Glycine max
  unsure (1)..(189): unsure at all n locations; Clone ID: 701043020H1
gcctaagtagggttttgcagagtgtcgcgtttgtcgcattccatacgaggccgaagcgaagagtgtttgtagggtttgcgttgcgcatcgtttgagagagagagatgggaagagaaanagagnntacaaaggtagcttacgcagtggagcagcttgtagccttcaatcgatacaatcccgatattcttc

SEQ ID NO: 4531 - DNA, 191 bp, Glycine max
  unsure (1)..(191): unsure at all n locations; Clone ID: 701043021H1
gccgcctcccctcccttccgacncctcctcctccccggaaatcctggtctccgacaacaacggtgccccctcnccgcccccctccgatccgagctccatcgaggtggacgccgtcacggaggccgngctcaaggagaacggcttccgcagcacgcgcaggaccaagctcgtctgcactgtgggccccgcca

SEQ ID NO: 4532 - DNA, 188 bp, Glycine max
  Clone ID: 701043022H1
caaaggaggaagcgctaatgttgcagtagtatgtggcaagccaaaatcctcgagaatttgatagtggagtacggccctacgttagtgcaagtcctcatgttgcagcagtatgggctatatttttttgcggaatatgatattaaatgcataattgactttcatgctgttctggttcccagaatgggatg

SEQ ID NO: 4533 - DNA, 161 bp, Glycine max
  unsure (1)..(161): unsure at all n locations; Clone ID: 701043023H1
cgagatggnacgtacgaagcaaactgctcgtaagtccacaggaggaaaggcactaggaagcagntcgnaaccanggntgcacgtaagtctgcaccaantactggtggtgtgaanaanccacancgttatcgtcctggnaccgttgcncttcgtgagattag

SEQ ID NO: 4534 - DNA, 188 bp, Glycine max
  unsure (1)..(188): unsure at all n locations; Clone ID: 701043024H1
atgctgatggttatccttactattctcctccaccaccttatgaatacaagtcannnnnnnnnnnnnnnnnnnnnnnnatggtggaggtggtggagacttgtagacgtaaggagggatatttggaatcaatgctgataagtgaaatgttgctgtggccatgacacttggttaccactccttacctgctc

SEQ ID NO: 4535 - DNA, 187 bp, Glycine max
  unsure (1)..(187): unsure at all n locations; Clone ID: 701043025H1
gttcacctctnaccccttgctgatgtttatnttatttttgttaaataaaacttcagtttcgattctaaattnttgccggctccagcaacctctgccaatctttaatgggtgtgattgatttctacaacactggtgctttgtgctgggttaagtccaacgccaatctgaagcagcaagtgggtttggc

SEQ ID NO: 4536 - DNA, 186 bp, Glycine max
  Clone ID: 701043027H1
agctactgagaattctgcttatcttgatatgcttcggttgtttgcacatggaacatggagtgattacaagagtaatgctgaccgtcttccacaattgatatctgatcagatcctcaagcttaagcaacttacagttcttacactggctgagacatacaaggtactaccctatgaccaactgaagca

SEQ ID NO: 4537 - DNA, 187 bp, Glycine max
  unsure (1)..(187): unsure at all n locations; Clone ID: 701043028H1
ctcttctctctctttctcnggcgacgatctcagattccggtcactcctctcgccggcgatcccttatttcctccgtcctccgtcgagtcctttccgattcgaatcgttcccagccttgtgccaccatgaatcccgaatacgattatttgttcaagcttttgctgattggagattctggtgtaggcaa

SEQ ID NO: 4538 - DNA, 166 bp, Glycine max
  Clone ID: 701043029H1
atcgggcgactgacacagtaactaaaggagctggaaagctgaagctggtgtttgttacagaaggccagggtgaggagactgaattcgaggtttttaacttcactggtgaagggggtgtttcattggctatgtacaatactgatgagtctattcgttcttttgctga

SEQ ID NO: 4539 - DNA, 188 bp, Glycine max
  Clone ID: 701043030H1
tttgagacaaaatcaacagtttgggcagatacactaagcaggggattggttaatttgaatatatctggacctaaaacaaatccattagcagatattggggttgactttgaagccattaataggagggaaaagagaatggagaagcccactaccacggctgtaacatcaactgtaactatgggtaaagc

SEQ ID NO: 4540 - DNA, 190 bp, Glycine max
  Clone ID: 701043031H1
caacgccaacgctggcctctgttccccttcttttcaatgcctataataataacttgtcctattttttcaaccatgtcatcccagtaagcaatcgctgttagtaacatagcctctaacagaaaaacaagtagtcatcacatgcccacagcaatgacagagtcagggccaagtgtgagtttgaagcttcttg

SEQ ID NO: 4541 - DNA, 190 bp, Glycine max
  unsure (1)..(190): unsure at all n locations; Clone ID: 701043032H1
gaaaacagctgtagcaaatataccatatggtggtgccaaaggagggatagggtgtgacccagcagaattaagtatatctgaattagaaagacttactagagtttttacacaaaaaattcatgatttgattggnactcacacagatgtgccagcacctgatatgggaacaggaccacagaccatggcatgg

SEQ ID NO: 4542 - DNA, 173 bp, Glycine max
  Clone ID: 701043033H1
tctaaaagagatctttttctgctctttgaagaaagaagggtctttgcttgattttggagatgtctctgctctcagatctcatcaaccttaacctctccgataccaccgagaaggtgatcgcagagtacatatggatcggtggatcaggaatggacctgaggagcaaagcaagg

SEQ ID NO: 4543 - DNA, 189 bp, Glycine max
  unsure (1)..(189): unsure at all n locations; Clone ID: 701043034H1
caacgttcgaggtgctgacgtcatacgtctggcgctgccgcacgaaagcgcttcaaatccctccnaatgaagatgtgagaatgatgtgcatcgtcgacgcgcgtggaaagttcgatcctcccttcccggcggggttctacggcagctgcttcgcgtttccggcggcggtgacgggcgccggagatctct

SEQ ID NO: 4544 - DNA, 158 bp, Glycine max
  unsure (1)..(158): unsure at all n locations; Clone ID: 701043035H1
aagcaacatcaccaggagtaagagagagcancaggtggacccttttcatgtgagttttgagtgattcattgattcttctgctaccatcttcttttctactcgaaaaaggaagaggggaaaagaaattgaaacatgggttggattccctgttccggaag

SEQ ID NO: 4545 - DNA, 187 bp, Glycine max
  Clone ID: 701043036H1
gcaaaagaaaatcacattacctgtctctgaaatcagattcactttgttcttcatcaatggaaagagaacaactatcccttcacatgaatggtggcaagggacaaaggagttatgcaaacaactcctcactacaaagaacaataatacgtaaaaccagatccatacttgaagaaactataacgaggtt

SEQ ID NO: 4546 - DNA, 186 bp, Glycine max
  unsure (1)..(186): unsure at all n locations; Clone ID: 701043037H1
cttagaattaagttagtagcgaggaagaaaaatgaaggttgtntacctcttcgttgtgctgatggctttggcatcatctgttgcctttgcttatgatccaagccccctgcaagacttttgtgtcgctatcaatgacaccaaagctggtggtctatacggtgtgttcgtgaatggaaaattttgcaa

SEQ ID NO: 4547 - DNA, 186 bp, Glycine max
  unsure (1)..(186): unsure at all n locations; Clone ID: 701043038H1
gcaggcctagctttgtttggttttagtgtgaganagagaaagtgtacatnctttctatcatatagatannnnnnnnnnnnnnnnnnnnnnnnnnnnnnnnnnnnnnnnnnnnnnncgcgtgtgtgananatgcagcagcacctgatgcagatgcagcctatgatggcagcctactaccccaacaac

SEQ ID NO: 4548 - DNA, 184 bp, Glycine max
  unsure (1)..(184): unsure at all n locations; Clone ID: 701043039H1
cctttgttcactcttcttctcttgcggctagggttttagcgcanttcttctagatttaaggaagatgggtaaggaaaaggttcacatcagtattgtggtcattggccatgtcgactctgggaaatccactaccactggtcacctgatttacaagcttggaggcattgacaagcgtgttattgag

SEQ ID NO: 4549 - DNA, 143 bp, Glycine max
  Clone ID: 701043040H1
gaaggggggaaatctggtgcgggaggctcacagagaaggttgtgggtgaaggatcgttcaggagcatggtgggatgaatgcaacaaagaggattttcctgaagaagattttaagaaggctttaggatgggaagagaaaccttt

SEQ ID NO: 4550 - DNA, 187 bp, Glycine max
  Clone ID: 701043041H1
gttagtagcgagagagggagaaatgaaggttgtttacttcttcgttgtgctattggctttgggcatcctccattgcctttgcttatgatccaagccccctggcaagacttttgtgtggctatcaatgataccaaaactggtgtgttcgtgaatggaaaattttgcaaggatccaaagcttgctaagg

SEQ ID NO: 4551 - DNA, 184 bp, Glycine max
  unsure (1)..(184): unsure at all n locations; Clone ID: 701043042H1
tttctttcacaaccacttcgtcttctccgtttctcactagactcacatcgcgcctccatttcgctgcattccctctgcgttctccaacgaggaaactcatgtcgcacactctcgcacgtnccactctcggtctcacacatccttctaacatcgaaacacccaagacctctttcngttctnagga

SEQ ID NO: 4552 - DNA, 186 bp, Glycine max
  unsure (1)..(186): unsure at all n locations; Clone ID: 701043043H1
acagaatctactctctattttcctagcttagattccttctccaatggctcttgccgtttccactacttgcttcctcttnnnnnnnnnnnnnnnnnnnnnngtcgagctctttcttctcgcgccttggatcttcatcggacgctaaagctccgcaaattggttcctttcggtttccggagaggcctc

SEQ ID NO: 4553 - DNA, 165 bp, Glycine max
  unsure (1)..(165): unsure at all n locations; Clone ID: 701043044H1
cccgtttggcnttgttgtttgcacataaatggcgactaacaggagcgtgggaacgttganggagggtgatttgaaggggaagagggtattcgtgagggtcgatctgaacgtgcctttggatgacaaccttaacatcaccgatgacactagagtccgtgctgctgt

SEQ ID NO: 4554 - DNA, 186 bp, Glycine max
  Clone ID: 701043046H1
ctggtcaatgcagatggtattatagagaaaacattcttgtggggtaggtactctatggaaatgtccgctgtcatttacaaggactgggttttcactgatcaagcattacctaatgatcttgtaaagagaggagttgctgttaaggacccatctgctccccatggagttcgtcttttgattgaggac

SEQ ID NO: 4555 - DNA, 187 bp, Glycine max
  Clone ID: 701043047H1
gcaaattaagcaatttacaaaccctagttctcgtatatattcttcttctttgcatcaatcctttgtctcaaattaaaatcatgggaattgtcactactgaatgcgagcaagtttgtgccgtggctcctgcaaggctatacaaagccatggccttcgattttaacaatgttatgccaaaagctatccc

SEQ ID NO: 4556 - DNA, 189 bp, Glycine max
  Clone ID: 701043048H1
gcgattgatggttggtcacaccaccgaagaaggcttcaggaatctacatagctttttcctcagagcgttgaaaattcccacactcgctcgcttccccaaaatttcacccctttcattcaattcttccctcttctctgctactgatccatccctcgttttctccgaacaatggctgctggtgtcactgtc

SEQ ID NO: 4557 - DNA, 188 bp, Glycine max
  unsure (1)..(188): unsure at all n locations; Clone ID: 701043049H1
tngtgccttatcgctgtggttttcatcgtcttccttctcttatatttcttttnttttttgttcttcgcngtnnnccgaaanaatggtcngtaaaaggagagggnctgctntnggaatcgatctnggaacnacctantcttgtgncggggtgtggnaacatgaccgagttganatcatcgcnaacgacc

SEQ ID NO: 4558 - DNA, 189 bp, Glycine max
  unsure (1)..(189): unsure at all n locations; Clone ID: 701043050H1
ggaaatcttccgtcagtgatggggaaagtgtccttcaatttccaccacctcatgtagtccaagttagtaaattctggcatggatgactgatgatgaatttgcaagagagatgattgctggtgnaaacccaaatgtaatccgccttcttaaagagatcccaccacaaagcaagctggaccccactctcta

SEQ ID NO: 4559 - DNA, 186 bp, Glycine max
  Clone ID: 701043051H1
ccttgatctaagttctgtttccaccatggatcttcaaaccctctacttcacatccattttatccattttcatttttatgtttttggggcacaaaataattacaaagaaacctacctcaactccaaatttaccaccagggccttggaagatacctatcatagggaacatacacaacgttgttggctc

SEQ ID NO: 4560 - DNA, 184 bp, Glycine max
  unsure (1)..(184): unsure at all n locations; Clone ID: 701043053H1
atcaaacatggctagggttagtgctttgtttcactnctttgctcttgatttcttcccttgtattggcttctcaaatccatgtttcctctgggaaactagtccctggactatcatggaattactatttgttgacatgtcccaagcttgagaggattataaggaagcatcttgaggatgtcttcga

SEQ ID NO: 4561 - DNA, 119 bp, Glycine max
  Clone ID: 701043054H1
tggcaataaagtgaaacgcatcagagaaattcaattcaatggatgcaaatcgcgagcaaattgtggacgttgggtcggtggtggaagccgtttctgctgacgacggtgacgctcctctc

SEQ ID NO: 4562 - DNA, 184 bp, Glycine max
  Clone ID: 701043055H1
gatcaatcgccgccatcttcttcctcttcctcgtccctcgattccattaattctaacggtcccgccgttcaaacaagcgatatcgccgtgaaacctgcgtggaagaaaccggaggccaatggcgtcgccgaagttgggcctgtaatgggcgctcattcttggcccgatttatccgagtccacca

SEQ ID NO: 4563 - DNA, 183 bp, Glycine max
  unsure (1)..(183): unsure at all n locations; Clone ID: 701043056H1
ctcttctccatcgcgcgtnagaaacacattttagttgctactaatgggaactgttgaagctgcaaacaaggatgcaaatggaagtctcctagagaaaaatcctcagttgtttttgtgttaggtggcccaggaagtggaaagggtacccaatgtgcaaatattgtccaaaattttgggtatact

SEQ ID NO: 4564 - DNA, 185 bp, Glycine max
  Clone ID: 701043057H1
ggacgaaatggagtatgttgttgagccatgttggcttggcttgggcttaaagttgaattgaagagagaggatctgatctggagtatgttgctgatgataatgaaatggccggaagtagaagatgacatgtatttccgtggtagagtgtttggtgattcagagtccgaatcagatgacgatgatga

SEQ ID NO: 4565 - DNA, 183 bp, Glycine max
  unsure (1)..(183): unsure at all n locations; Clone ID: 701043058H1
gatgggtcgaactttcgtatttcgggcccacccaagttcttcgccggcggngagttcggagagttcgtcntcgatcggaacccctgatgacagcgacaacgaggaggaggaagaagtgcagagccagttaaagatacgaactgggttgggttctttggatgctttggaagaatctcttcccat

SEQ ID NO: 4566 - DNA, 184 bp, Glycine max
  unsure (1)..(184): unsure at all n locations; Clone ID: 701043059H1
gtctaggggangcttatatgactttctgcacaaacaaagaggtgtatttaagcttccatctttgctaaaagtagcaattgatgtttccaagggaatgaactatttgcaccaaaataatataattcacagggacctcaagactgccaatcttctgatggatgaaaatgaagtggtcaaggttgct

SEQ ID NO: 4567 - DNA, 183 bp, Glycine max
  Clone ID: 701043060H1
tttagagaaacacaaagagaatataaagtcagctgaagctcccagccccatcttaaagatattgaaaagcgaatttgaatgtctcctgcctacatgaagggactaacatcatgggaggatctagtcgtggctgttgataagattaattcaagcctaagcaagaagaccaatggatgcagctac

SEQ ID NO: 4568 - DNA, 189 bp, Glycine max
  unsure (1)..(189): unsure at all n locations; Clone ID: 701043061H1
ctctttctccgagaacnaaaaaaaaaacgtgattcgctctgtctcttcgaataaanccnnaaaacccaggcaaacnngnngaggcntgaganaagatggggntgtcgttcacnaagctgttcancaggttgtttncgaagaaggaaatnnggattctgatggtaggtctcgatnctgctggtaanacaa

SEQ ID NO: 4569 - DNA, 186 bp, Glycine max
  unsure (1)..(186): unsure at all n locations; Clone ID: 701043063H1
gccactttcttcgcccaaacctccttcccctcccactctctctccaaaaccttcgatacccatttcgcncctgccccgaaagtcaacgtctttgtgaacttcagggcgaggaggcacgttggggtgcgagtttcgaacgcgctgatcgaaccagatggagggaagctcgtggagcttgtggtgacg

SEQ ID NO: 4570 - DNA, 189 bp, Glycine max
  Clone ID: 701043064H1
cttattctataggggctatattccttcggctgaagggtttaatttgcgccatggcttctctcttcgcgagaaccaagaggttctcatggactactcttctgcttcttctggagctattcacaatagtccttcacacggcagatgctcaaattggtgtttgttatggtatgatgggcaacaatctaccac

SEQ ID NO: 4571 - DNA, 187 bp, Glycine max
  Clone ID: 701043065H1
cgttgccattctcatcctcttctttctctctctaccattgccatggatccctacaagcaccggccatccagcgccttcaattctcccttctggactacaaattctggtgctcctatttggaacaacaactcctctttaaccgttggagctagaggtccaattctgctggaggattatcatcttgtgg

SEQ ID NO: 4572 - DNA, 184 bp, Glycine max
  Clone ID: 701043066H1
tcttccctcttcaatcttcacattttctctatggagaatcatggcaacaagcgagtctgggaccagtcctctgactccaacactcagcgggtcgactcgcccgagtctaagattcgtcgagttgactcgtccgattcgggtattaactcgtccgagtctcaactcgaatcggtcctcgactcgt

SEQ ID NO: 4573 - DNA, 122 bp, Glycine max
  Clone ID: 701043067H1
cgaagaaaatcgagcacgaaggtgaaagcttcaaccgatgcgaacacgaacctgagcatgctcaacgaggaccttctccagaacattctagcgaggcttcctgctctgcatttcgcttccgc

SEQ ID NO: 4574 - DNA, 183 bp, Glycine max
  unsure (1)..(183): unsure at all n locations; Clone ID: 701043068H1
caccgattgctagaatggaatttcgatgctcagtcatctcttttaccattctcttctctcttgctcttgcaggagagagccatgtccatgcatcgctacctgaggaagattattgggangctgtttggccaaacactcccattcccactgcactgcgagagcttctaaagcctctccctgcag

SEQ ID NO: 4575 - DNA, 153 bp, Glycine max
  unsure (1)..(153): unsure at all n locations; Clone ID: 701043069H1
ccttaaccatcactggncacataggtgtttantgctacacactagaagaatnatggaagatctcaagancctcttctnagccatttttgttgtcttggcttccgcattgtattnagncaatgccaaaatccaggagcatgaatttgttattca

SEQ ID NO: 4576 - DNA, 183 bp, Glycine max
  Clone ID: 701043070H1
tgcgagcgagcgagcagtttcaaagagaggatttgggattgggaaggcgagggattgcgctgcgtctcttcctcttctctttcgattcatccctcattcataatcttccaatccaacaacctcagcctcacactcacacatacacacatctgaacgcgtatcgtccctcccatggcttcaaag

SEQ ID NO: 4577 - DNA, 182 bp, Glycine max
  Clone ID: 701043071H1
cgacgaaccatctcaaatccgccaccacataatgtaaatgtactcgaatgcgaatgtgaatgtgaatgcgcttctgtgcggtttcgattcagatccagattcatggggatttgcttcagcattgaagacccaaacaacgtctccatctccgattcgaacgccaagcctaataaacctgcagg

SEQ ID NO: 4578 - DNA, 183 bp, Glycine max
  unsure (1)..(183): unsure at all n locations; Clone ID: 701043072H1
aaccttgccctcgtcaaanaataaagaagcanaaaactctcacacagagaaagagacttaaaaaaaaacgggatttgttttgctgggttgggttgtgtgaattgtgaaatgcgggtgacggagttgcaacgtgccacggcggtgtaanatcttccggcggcaacgagcatttcttcggcgaga

SEQ ID NO: 4579 - DNA, 180 bp, Glycine max
  unsure (1)..(180): unsure at all n locations; Clone ID: 701043074H1
gtaactgccttctcacccctgaggaagggtgctagtaatacccttnnccttgcagaantctctaancttctgntgttgccacccaaggttagagatttctgcaaggaaaagggtattactgtaactgccttctcacccctgaggaagggtgctagtaggggtgctaattttgtgctggac

SEQ ID NO: 4580 - DNA, 183 bp, Glycine max
  unsure (1)..(183): unsure at all n locations; Clone ID: 701043075H1
tcacattggttattgatctcantnaaganagagatttgcnattcgcaatggcctctttccgcgacaatgcggttctccgcgacctcnatcggagccgaggcggctcttcctcgccgcaactccgtcgccggattcatcggcgttngcggcgagatcctccgccaaatcgaggnttcgcttcat

SEQ ID NO: 4581 - DNA, 187 bp, Glycine max
  unsure (1)..(187): unsure at all n locations; Clone ID: 701043076H1
cgccgcctcgctccaactttctctcncgcacgccgatctctctcgcaccgtcctncctcataccgctttcgtgaactcaacatgtcttttgtcaaagagtatnttgctgaaagcaagcctcttgggggtntaatatttttgcttccccggatgttcagttttgaaaacaaagatggtatgggaagta

SEQ ID NO: 4582 - DNA, 182 bp, Glycine max
  unsure (1)..(182): unsure at all n locations; Clone ID: 701043077H1
ggcgcgggtcgaattgggaagcttttgctccagaggctgaagccttttanctgtaatcttctgncactatgatagacttaggatgaatactgatttggagaaagagattggagcaaagtttgaggaggaccttgatgcaatgcttccaaagtgtgatgtaattgttatcaacatgcctctta

SEQ ID NO: 4583 - DNA, 183 bp, Glycine max
  Clone ID: 701043079H1
tttttaactacttacttcccactttacccttctcaactctcttactgttactattactgttactccacctaaatcaaaattcaaacatacctattgcatttgcagatagattgaatgttgtgaacaaacaatgggttcatccaaggcctatgcagtgtttctctgctccatttgttcatagtg

SEQ ID NO: 4584 - DNA, 186 bp, Glycine max
  Clone ID: 701043080H1
gtcggcggagttaacactatcaaattcagagcagctgcagagagaacagaggattcctgtcttctctgttttctcctcacatagttacctacaaaggctgcaacataacagaggacaacaacaccctttggttcaacctcttcatggagtacatgccctttggtactctctctcaggaaagtcacc

SEQ ID NO: 4585 - DNA, 139 bp, Glycine max
  Clone ID: 701043082H1
tctgatccggagcgatgagtgagagtgagaagcagagagtaacggggaaggtgaagtggttcgatgaccagaagggttttggcttcataaccaccgacgacagcggcgaggaattcttcgtccaccagtcctccatccg

SEQ ID NO: 4586 - DNA, 181 bp, Glycine max
  unsure (1)..(181): unsure at all n locations; Clone ID: 701043085H1
gcacaacacacggagaaagtgagaatgganttggaggagcagcgantgaggcaatcaagaatgttgatagcggcgattcaagaagccgtggcgaagaaactgaaggagaaggacgaggagattcagcgcgtggggaagctgaattgggttctgcaggaacgagttaagaaccttctgcgtg

SEQ ID NO: 4587 - DNA, 181 bp, Glycine max
  Clone ID: 701043087H1
caggttggttgctccatatacacctcctcatgtaagtcaccatgcgagaaagtagtcttcacatccaattgaaacaaaggccaatgatgtgtagcagcaagagagataagaatacgaaaggaggaaagcttagcaacaagggaaaaagtatcagtataatcaactccataagtttgagcat

SEQ ID NO: 4588 - DNA, 141 bp, Glycine max
  Clone ID: 701043088H1
ttacagaaacatgctggagaatcttcaggctcctccgccaacggaatcggccccagtggtgaagcgctatgctcctcccaaccagaggaaccgttctgccaacaggcgcaaatcatctgatcggcttgatcggacaaacag

SEQ ID NO: 4589 - DNA, 179 bp, Glycine max
  Clone ID: 701043089H1
gatcgatcaagcatcagggagctttgagggttgattctctggtgtagtagcaatcagcacaatagaaaatgttttttgacggatatggatatcatgggacatcatttgagcagatatatcgatgctacccagcttcctttattgaaaagccccaaatcgaaagtggtgacaaaattatc

SEQ ID NO: 4590 - DNA, 128 bp, Glycine max
  unsure (1)..(128): unsure at all n locations; Clone ID: 701043090H1
atcgncaaggaagatnancggtgncagggagacaggggntgagatctggtncggngcgggtngcnccaccagcgtcagtcactccgataacttccttcgacagcacatccanncggcaacangtggct

SEQ ID NO: 4591 - DNA, 182 bp, Glycine max
  unsure (1)..(182): unsure at all n locations; Clone ID: 701043091H1
gcttttcacatgganatcggntcccccgcattccttaccctcgaagactattcttccttcttcttccctaacatggatcccattcccaattccaatgtcaacaagcgtcgtgcaaacaacgaccagttcgacttaaatgactccgcattcagccacctcctcaattccatcatggatcctaa

SEQ ID NO: 4592 - DNA, 185 bp, Glycine max
  unsure (1)..(185): unsure at all n locations; Clone ID: 701043092H1
aacaatatcaagacaacttcatctaattaacgatgaatcaccaacaacaatctcctgtgactgncatatccagcagtgagtcagaggcaacccagcagctccaccaancacctgtgggttatcccactaaggatgatgttccttcccaacaaaatgttccaatcaaaaccttctactaggggtga

SEQ ID NO: 4593 - DNA, 182 bp, Glycine max
  unsure (1)..(182): unsure at all n locations; Clone ID: 701043094H1
aaattgagctctttgagggccaatctcttctgtacatgcagctatatgggcacctaagacctatgngtcttaagtgggctgttcaactaggtattccagacataatacagaatcatgccaaacccatttctctttctgacttggtctctactcttcaaattccaccagctaacgctgcnttt

SEQ ID NO: 4594 - DNA, 183 bp, Glycine max
  Clone ID: 701043095H1
tttagcaccaaagaggccaaatatcccaacggaaatcgctctaacagagccacaaattcgggttattggaaggcaactggcttggacaaacaaattgttacttcaaaagggaaccaagttgtggggatgaagaagacacttgttttctacagaggcaagcctcctcatggatccagaactgat

SEQ ID NO: 4595 - DNA, 137 bp, Glycine max
  Clone ID: 701043096H1
tctctctctcgtctcacttgaaactccacaacccaattttcttttcctatgacccaattccaaatccaaatcaccaattctaattccattcttcaggagttgaattgaattcgtgatgaagagggaccacaaagata

SEQ ID NO: 4596 - DNA, 251 bp, Glycine max
  Clone ID: 701043101H1
caacatccaaggaaaaccagttgtcactgcaacccagatgttggagtcaatgatcaaatctcccaggccaaccagggccgaagctactgatgttgccaatgcagttctggatggcacagactgtgtgatgcttagtggtgaaaccgctgctggagcctatccagaccttgctgttcaaacaatggctaaaatatgcattgaagcagagagcacccttgactatggtgatgtgttcaaaaggattatggagc

SEQ ID NO: 4597 - DNA, 232 bp, Glycine max
  unsure (1)..(232): unsure at all n locations; Clone ID: 701043103H1
gatatngaggatggctctncccanagctaaggagatcgtgtcgtaccnattccgncgtcgttttcagcnaaacctattgccctttctgcgtcgatgtgaagaagctcttcggtgacctcggtgccnattacaaggccatcgaactcgacactgaatccgatggaaaagagctccaagcagcattagttgagtggacgggccagcgaaccgtgcctaatgtgtttattggtgg

SEQ ID NO: 4598 - DNA, 243 bp, Glycine max
  Clone ID: 701043105H1
cagacttggggaatttctttgctaatgctgatgccaactatctagggagagataaaagtggaggaaactaccatcccaacaattcagacaccaacatagttgatgttgatcccatggatatgtcagaaagtatgcaagaggctatgcatcgttcaaatttggacatgagtggtgcagagttcgtaagaaaagaaattcccctatatgttttgccagccttgtctttaatcaaccttgattcac

SEQ ID NO: 4599 - DNA, 243 bp, Glycine max
  Clone ID: 701043106H1
caaaacctttcaaaatacacatgctgcaaattgctcacccaatcaccagccatgggagaggttgacgcagcattcatccaagacccaccacacaggccaaagctctccaccatccaagccgaaggaattcccataattgatctctctccaataaccaaccacagagtttcagacccttctgctattgaaggcttagtgaaggagataggtagtgcatgcaacgagtggggtttcttccaagta

SEQ ID NO: 4600 - DNA, 242 bp, Glycine max
  Clone ID: 701043107H1
aaaaaaactaacatttttaggttgtgctcgaaattgaatgaaaaaaaatgcagaaagaagaacaagaaaaagagtatttagaatcgttgacgtgtccaagcttcaactgctactccaccgatgaactcccaggtatcgctcaaagcaggattcaaaaggacgacgcgtcgttttcggcctctcaaaatgacgaccctgacttcgagttcgccgcgtttcgagacgaacccttcgagttctcc

SEQ ID NO: 4601 - DNA, 239 bp, Glycine max
  unsure (1)..(239): unsure at all n locations; Clone ID: 701043108H1
gagagagagagaggcgcgaaaatgagcgganncaggggaagaagaagggagcgagctttgtgatcgattgcgcgaancggtggaggataaaattatggacattgcttctctggagaagttccttcaggagaggattaaggttggcggcaaggccggngcactcggcgattccattactgncactagggacaagagcaagatcaccgtcacctccgacagcaacttctctaaacggtatc

SEQ ID NO: 4602 - DNA, 244 bp, Glycine max
  Clone ID: 701043109H1
gtcccggaaacaagtttttaggtttgggcagtttgagtgctcagtgaaggagaaaatggcgaaggagttgttgactcttgataatggcacaacctgcacatcatggaactattctggcaccaggctcgctgcgggttccgccgatggcactctttcaatcttcgattcccgcgagccgccttcttcttcctccctccgttctactttcaaatctagggttctagaaggaaacatcgtgaagatt

SEQ ID NO: 4603 - DNA, 244 bp, Glycine max
  Clone ID: 701043110H1
gaggctgcttctttggatctgaacaatgcctctggctctggatctttgccgcgccttcaaacattgaaaaagacttccatttcttctcgaaggtctggtactgccactttccctagtcctggtacactcaattatcgcgttgcaatgcacaagggatggagctccgagcgagttcccttgcatgcaggtgctacccggaagcacgttttgccgttcaacaatgggaaaacattgccgtcaaagt

SEQ ID NO: 4604 - DNA, 246 bp, Glycine max
  Clone ID: 701043111H1
gaaaggcattaataccagaatcaaagacggtgccggctccggtggccgcattgaacgccaacgcctcaggaggaatatcgacaactttccgaccaaccctaattgcaaccaagttgacataatagagtgaagatcttctaggattcttgagaagaggggtatacttaatccttatgggctgggccacaggcccaagtcttagcgacccagagaagttaagtgatttgaagctgggcaagcagtagg

SEQ ID NO: 4605 - DNA, 247 bp, Glycine max
  Clone ID: 701043112H1
caacaacaagggcaacctagttgggtgttcgaagacgaggtggacgatgatttggtttcggagttcaaagatctaccaatgaagttccaacaaacactaatccccgacctggaacgaatctccacaacctcaaaagcctacataacaaaagccaacaaagagatcacgagagggttcaaaccctacgttggcaacaagtacgcacccaccatcaccactttactctcttgcgcattcgctttgatcc

SEQ ID NO: 4606 - DNA, 245 bp, Glycine max
  Clone ID: 701043113H1
cacttttaggggttaaagtaattgtatacataagcgtgggggaactgtccttggaacatcacgaggtggacatgacaccaaaaagatagttgacagtattcaagatcggggaatcaatcaggtttatataattggaggagatggaactcagaagggtgcatctgcaatttttgaggaagtcagaaggcgtggtctcaaagtttcagttgtaggtatccccaaaaccatagataatgatatcccgg

SEQ ID NO: 4607 - DNA, 245 bp, Glycine max
  unsure (1)..(245): unsure at all n locations; Clone ID: 701043114H1
gaaaanagtgacaagaagtgaagagaatgcgggttgtttgttgttccaattcaggcgtgagtgctttccctagttgtcttagantccctccactgatcgcaatttcaacaacaccctcttcgatccgctttctaaattctccacccctccgttccactgcttcgtgtaatttccattcaacatctctctctccaatcttcaatcttcaatcttcaatcgcgactattctaacataatacgatttc

SEQ ID NO: 4608 - DNA, 244 bp, Glycine max
  unsure (1)..(244): unsure at all n locations; Clone ID: 701043116H1
ttgncctcaactttctcgacaagaggctctctgtcggtgttctctcccttccctttggtgtcgtgtctttcaaatggcgaangtttgattcctctgttcaatcgggttttggtggagaaaatcgtgcctccatcgaagaccaccgctggcattttgttacccgagaaatccaccaagctgaattccggaaaagttattgctgttggccctggctttcacagtaaggatgggaagctaattcctg

SEQ ID NO: 4609 - DNA, 239 bp, Glycine max
  unsure (1)..(239): unsure at all n locations; Clone ID: 701043117H1
tancctntntcangtnncaacgctccanctatccatggcaaaccgctggctacagacccgaggtgtatccactgttcgctgcggttggtgctgctgtngggatctgtggattccaactggttcgtaatatctgcatcaaccctgaagtcagggtgaacaaggagggaaggaaggcaggagttttggagaactttgctgagggagagaagtatgccgagcacttcctgaggaagtatgtg

SEQ ID NO: 4610 - DNA, 243 bp, Glycine max
  Clone ID: 701043118H1
cactacggtaatcaactggcaaatacttggacaatggcctcagaaaatggagacaaactagagcttgctttcagtgctgttcctgatcccaagcccaagaaggattgggtcattttgtcccttagggtggtcgcattttttgccacagcatctgctacacttgttatggcattcaacaaacaaaccaaaggcatggtagttgctaccattggcaccaacccagtaacaattactcttactgca

SEQ ID NO: 4611 - DNA, 242 bp, Glycine max
  unsure (1)..(242): unsure at all n locations; Clone ID: 701043119H1
tgcaggcccacctggatctgggaaaggcacccagtcaccaatcataaaagatgagtactgcttatgccacttagctactggtgatatgttaagagcagctgtagcagctaagacccctcttggtgtcaaggctanagaagctatgaataagggagaacttgtttctgatgacttggttgttggcattatagatgaagcaatgaaaaaaccttcatgtcaganaggtttcattcttgatggtt

SEQ ID NO: 4612 - DNA, 170 bp, Glycine max
  Clone ID: 701043120H1
tgattgaagaagatgccgatcagaaacatcgccatcggaaggcctgaagaggctactcaccccgacacgttgaaggcggggttggctgagttcatctccaccttgatcttcgtgttcgccggttcaggttccggcatcgcctacaacaagctcaccgacaacggcgccgc

SEQ ID NO: 4613 - DNA, 240 bp, Glycine max
  unsure (1)..(240): unsure at all n locations; Clone ID: 701043121H1
cttcgtctcaaacttcttcgttccttcgattcattccatttctnccaaaatggccaaagacccagttcgcgttctcgtcactggagccgcagggcaaattggatatgctcttgtccctatgattgctaggggagtgatgctgggtcctgaccagcccgtgatcctccacatgcttgacattcctccagcagtagagtcgttgaatggggttaaaatggaattggtggatgctgcattccc

SEQ ID NO: 4614 - DNA, 237 bp, Glycine max
  unsure (1)..(237): unsure at all n locations; Clone ID: 701043122H1
cttttnatttattttatttgttcatgtggggttattggttattttnctatgatcggttgatcacaggtgngggactganaggtagcnntggcgaccaggaacttggaaaagatggcatccattgntgcacagcttangcaattggctcctgccaaagtgagtgaggatgacaaactgattgagtatgatgctcttctgctggatcggttccttgatatccttcaagatttacatggg

SEQ ID NO: 4615 - DNA, 114 bp, Glycine max
  unsure (1)..(114): unsure at all n locations; Clone ID: 701043123H1
tgtttatcactatcacttccccnntcctatctctgaagacattctcgttcattttgttnttttatcttctctttatctccctcaacaagattcctataaagttcgtagcggctt

SEQ ID NO: 4616 - DNA, 240 bp, Glycine max
  unsure (1)..(240): unsure at all n locations; Clone ID: 701043124H1
ctcagatcccacgggtgacaagttacaggattggatacnagnnntggcattccatgtgaagaaaattgatccaaagcacctagtggaggttngagtagaaggnttttatggcccatcaacacctcaganaactcagttcaatcccnacanatatgctacacaggttggaactgattttatcagaaaccacctggttcttggagtggacttcgcttntgttcacntatatgcngactcttg

SEQ ID NO: 4617 - DNA, 243 bp, Glycine max
  unsure (1)..(243): unsure at all n locations; Clone ID: 701043125H1
ctcataggctcgtgtaagaagtaccgntcctgcntagtattaacttggcttgactcctctcatcagaagaaagcgataaaagcaaaaatgcaatctatgtccctgacgctgagcaagaggctctccaattcaaagcctctcttcagaatctcttccaacctcgtcgctcacgcatcctccgccacaacctctccgccgccaccttcgccgccagtcccctctccatccgccctcaacagcctc

SEQ ID NO: 4618 - DNA, 243 bp, Glycine max
  Clone ID: 701043126H1
agtcactgctctgtttcaccaagtttgggcgtttaaatcagaaccaaatcgtgttctcttccattggcaaacatggcaactcaaatgagcaagaagagaaagtttgttgcggacggagtgttctttgccgaactgaacgaggttctgacacgtgaattggcggaggacggttactccggcgtggaagttagggttacgccgatgcgcaccgagatcatcatcagagccaccagaacccaagcc

SEQ ID NO: 4619 - DNA, 244 bp, Glycine max
  unsure (1)..(244): unsure at all n locations; Clone ID: 701043127H1
gatgtacaagttttgggttcnntgagtgttcttgccactctactgcaaactaangaacttgatgaatcantgctagntaggcttggaattcttccacaacgcaaacagcancagaaacagttattgcaagctttggttggtgaggcgtcaggtgaagagcaacttttttcttctgaaaatagcttgatgagggatggcagtggatgtnagcctggtgtctatcttgaaaagatcaaggagcagt

SEQ ID NO: 4620 - DNA, 244 bp, Glycine max
  unsure (1)..(244): unsure at all n locations; Clone ID: 701043128H1
gtcgtttnacgctaaacgacattacctccgcaaccggtgaacggcagaagaagtaaagcgaganaaccgatattcgcactttaccgcacccagcgactccgcgtggttttggcgaaaacttctagaacattcttccatggaggttatcagggttctagcggcggcgatcgtggtagcggtgcttgcggcggctcttccggcggacgccgccnacgacaaccgagtattcgcgccgtgcacggac

SEQ ID NO: 4621 - DNA, 243 bp, Glycine max
  unsure (1)..(243): unsure at all n locations; Clone ID: 701043129H1
acaaaaccctnaagaaagacacagccattgtttacttttcattgattgagccaaanctttgtattttctgcgataattttccattgggtggaagaaagtctcaacctttattcgaaagagcaaggatctgagttgagttgagtgatcatgtgtggtggtgcgattatctccgacttcataccggcaggtcccgccancggggcgcggcgcgtgaccgccgacatcctgtggccgagtttgagg

SEQ ID NO: 4622 - DNA, 175 bp, Glycine max
  Clone ID: 701043130H1
tgattgaagaagatgccgatcagaaacatcgccatcggaaggcctgaagaggctactcaccccgacacgttgaaggcggggttggctgagttcatctccaccttgatcttcgtgttcgccggttcaggttccggcatcgcctacaacaagctcaccgacaacggcgccgccactc

SEQ ID NO: 4623 - DNA, 245 bp, Glycine max
  unsure (1)..(245): unsure at all n locations; Clone ID: 701043131H1
tcaagnttcagcaagtgcgtttnggaagcagagaccgaaatacttcgagatggcccgtacaaagcnaactgctncgtaagtcaactggaggaaaagctcccaggaagcagcttgcaaccaaggctgcacgtaagtctgcaccaacaactggtggtgtgaagaagcctcatcgttatcgccctggaactgttgctcttcgtgagattaggaaataccagnagagcactgagctcctaatcaggaag

SEQ ID NO: 4624 - DNA, 246 bp, Glycine max
  unsure (1)..(246): unsure at all n locations; Clone ID: 701043132H1
anagaagctttcttgagttgagttaacagcatggagagggaggaagatgttaaggttggagcacagaaattctcagagaggcaagcattggggacaggagctcagggtgacaaggactacaaggaggcaccaccagcacccttgtttgagccaggggagttaaagtcatggtctttttacagagctgggattgcagagtttgtggccacattcttgttcctctacatcactgtcttgactgtcatg

SEQ ID NO: 4625 - DNA, 243 bp, Glycine max
  unsure (1)..(243): unsure at all n locations; Clone ID: 701043133H1
attccacaacagtgggagggagatccaaaaagagagagtggaaaagatggcgcggttgatcacagtggtgtggtgcgcggtggcggtgctattatgcgccgcggccggtgcgtcgtgggtggaggaggcggcgaacccgatacgaatggtgtctggcgtggaggcggaggtggttcgggtgatcggggagtgccggcgtgcgttgaagtttgctaggttcgtgagcangttcgggaagagtta

SEQ ID NO: 4626 - DNA, 240 bp, Glycine max
  Clone ID: 701043134H1
aaggtaggaacacgactttcaaaccagttcattgaacctccaaaatgaatatctacaaatgcacttatttccactgttagctataagttcctatggtacaatttggcctatagctacatgggtgcaccaagctcatttgggcgatttggctgagccacctctccagctgcaacggcagcttgccttcgttgcctctcacgtagatacagcacagttaagaggcatacaaagagggtcaga

SEQ ID NO: 4627 - DNA, 241 bp, Glycine max
  Clone ID: 701043135H1
gcaaacacttccttgagggcacaaaagattccattgtttgcttctttcagattaatttttttgtcagttcagatcttcaagaagaagaatccagagaagctatatatacatcatcgttgttctttgccaagacaaagaagaaaaatggtgagggggaaaactcatgaagcgcatagaaaatgagacgagtaggcaagtaacgttctccaagagaaggaacgggttgctcaagaaggccttt

SEQ ID NO: 4628 - DNA, 239 bp, Glycine max
  Clone ID: 701043136H1
gctcttctctctagagctgctgcgttgctaaaacgcaccggtttgttcctgttctcgttcaaaagaaaactgacacaagtgaggcttggtgcataaacagcaatggcagaaaaaccccaaccggttcgggttctctactgcggcgtgtgcagtttgccccccgaatactgcgaattcggatccgatttcgagaaatgcaaaccctggttgatccaaaacgtccctgacctataccctga

SEQ ID NO: 4629 - DNA, 176 bp, Glycine max
  unsure (1)..(176): unsure at all n locations; Clone ID: 701043137H1
cacacatgcatggattctttgattttcatcttctctcgcgttttctgattctgatcttagggttccttatcccccaactttattgcttcctacacgcgtctttatctttntntcttttcgttgatccaaccttttccactaaagcttcgattntttgcttttnatttntnttnnat

SEQ ID NO: 4630 - DNA, 237 bp, Glycine max
  unsure (1)..(237): unsure at all n locations; Clone ID: 701043138H1
cagatttgctcataataggagggaatcgaatcgaatcgaatcgaaaggaaagtgcagaatggatgacatgccgttgccggcgctctttgagcaagcccgcaagatccacgccgcagccaccgattccggcgccgaccaggaggttgtgaagaaggggtgcgaggctctgcatagatncgaggacatggtcaataatctangtttgttctctcccaacgagaccaaagangatatcng

SEQ ID NO: 4631 - DNA, 228 bp, Glycine max
  Clone ID: 701043139H1
cacaccgcgtttcggagagagacgtcgcaatggggaggaggcctgcaaggtgttatcggcagataaaaaacaagccataccccaaatcacgcttttgccgtggtgttcctgatcctaagatcagaatttatgatgttggtatgaagaagaaaggtgttgatgagtttcccttctgtgttcatctggttagctgggaaaaagaaaatgtttcaagtgaagcattggaag

SEQ ID NO: 4632 - DNA, 235 bp, Glycine max
  unsure (1)..(235): unsure at all n locations; Clone ID: 701043140H1
accgtttcgaaccctgtcaaggagcaagaaacatcgaattcgattgttcctggtagcaacagttacntgacctacttngtcaccacgaagannaacattccggaatncggcgcctccggntcangttcncngtccggcggcggttccgtgacgtggtgacgctctctgatcggctcgcagaggngtancgcgggtttttcatcccgcnccggccggacnanagcgtngtggagag

SEQ ID NO: 4633 - DNA, 240 bp, Glycine max
  unsure (1)..(240): unsure at all n locations; Clone ID: 701043141H1
gttagatctgtacctgcctagccattgatttggaaaagtccaagcttcaaagatgagtaagcttcagagtgatgctcttagagaagctatctcaggaatcatgactgattccaagganaagaacaggaaatttgtggagaccattgaactccaaattgggctgaaaaactatgatccccagaaggacaagcgttttagtggctctgttaagttgcctcacattcctcgccccaagatgaa

SEQ ID NO: 4634 - DNA, 239 bp, Glycine max
  unsure (1)..(239): unsure at all n locations; Clone ID: 701043142H1
atcttcttcatctttttttgtcccttcgaaaagctaaggaattggtgnattggtgtatgacatgangccttctgcaaggagttcatagattttctcttcttagaataatcaattagaaccaccttgaagttgagacaagagtaattgcagccttatttnaattagacaatatcaggacaaatcactnttcaagagatattatgatcactntggatgtncnaaggtataagatgggttgg

SEQ ID NO: 4635 - DNA, 151 bp, Glycine max
  unsure (1)..(151): unsure at all n locations; Clone ID: 701043143H1
ataatatcatagcagaggcttttatctgcggttcaaaagtagtttttnngataanaccaacgtgtcactcatttattgacttcaaaatagatgagtgacacgttggtcttatccattttgaagtcaataaatccattttggcttccattat

SEQ ID NO: 4636 - DNA, 241 bp, Glycine max
  Clone ID: 701043144H1
caggcttcgaaatagcaagtttatgggttggattagttgttggcgtcccttcttattaccttgctggaagcctcgttgaccttggcatggcatggtggcagggcatagcaactgtggtggcagcaaacatgatcctcttggttcctttggttctcactggccatgcaggaacacgttatggcatatcattcccagtacttgttagatcctcttttgggatcaatggtgctcatgttcctac

SEQ ID NO: 4637 - DNA, 241 bp, Glycine max
  unsure (1)..(241): unsure at all n locations; Clone ID: 701043145H1
aacggagccctctcttcaggtcacnatctagactgcaatcatggctgatggatcacagcatccatcagttgttcagaagctagcnnganagtcgtacctggtgtccangnttagcnccanctttaactctagganttattntgcaantggtncttacgtcnatggcggnatgcactcgcctgggttggctgttgtgtnanctgggatctccagttactgtncatgntccagcagagnangg

SEQ ID NO: 4638 - DNA, 240 bp, Glycine max
  Clone ID: 701043146H1
caaatagcaaccaaacatacaaagatgaaagaaacatgttgttgtgctagttttagttttggcaaggcaaagccttatttgttaacggtgggacttcaatttgggttcgccggtgcatacatcttctccgtcgctagtctcaaccatggaatgaatcgttacgtcttcgttgtctatcgcaatgccatcgctgcattggcccttgctccttttgcattgattttcgagaggaaaattagg

SEQ ID NO: 4639 - DNA, 238 bp, Glycine max
  Clone ID: 701043147H1
gagagacataaaaaataaacatatattgagaatggagggttgtgtgaagaagttgctatgccttgttgggtttgtggtgcttgtgagtactattggtggggtggagagtgctggtgaatgtgggaaatctacaacccctgataatgaggcttataagcttgcaccatgtgcctcagcagcacaagatgagaatgctagtgtttctcagagttgctgtgctcaggtgaagaaaattggg

SEQ ID NO: 4640 - DNA, 241 bp, Glycine max
  Clone ID: 701043149H1
tcctaattgtttaaacctaattctcatttcttcatcgttcgattcttctcctcctaaagatgcagatcttcgtgaaaactttgaccggtaagaccatcacccttgaggtggagtcctccgacaccatcgataacgtgaaagctaagattcaagacaaggaagggatcccacctgaccagcagagacttatctttgcgggtaaacagcttgaggatggtcgaacccttgccgactacaacat

SEQ ID NO: 4641 - DNA, 239 bp, Glycine max
  Clone ID: 701043150H1
cttctctctctttctccggcgacgatctcagattccggtcactgctctccgccggcgatcccttattcctccgtcctccgtcgagtcctttccgattcgaatcgttcccagccttgtgccaccatgaatcccgaatacgattatttgttcaagcttttgctgattggagattctggtgtaggcaagtcatgtcttctcctgaggtttgctgatgattcataccttgacagctatatcag

SEQ ID NO: 4642 - DNA, 237 bp, Glycine max
  Clone ID: 701043151H1
gtttctgtctctgtgtttgcggctgaggattccgaacgagcgaccttcttcgtttctcgcaaagtttaagtcctcatgggtaaggaaaagactcacatcaacattgtcgtcattggacatgtcgactctgggaagtcaactaccactggtcatttgatctacaagcttggaggtattgacaagcgtgtgattgagaggttcgagaaggaggctgctgagatgaacaagaggtcattc

SEQ ID NO: 4643 - DNA, 237 bp, Glycine max
  unsure (1)..(237): unsure at all n locations; Clone ID: 701043152H1
atcatcacttgctgcttgttgttcaacatcaaataccctattggacttggagcttattagatcaatctctttcaaaaaaaaagttttcccatgacttcttgttcttctattacaatatccncaaggaaactgcgctatgatctctattcctattcatacaaagaagactccaacaccccattagtgataaatgttctggcttcactcattgagaggagcatggctagaacacaaagg

SEQ ID NO: 4644 - DNA, 71 bp, Glycine max
  unsure (1)..(71): unsure at all n locations; Clone ID: 701043153H1
ctctcncacttcacttccttccgntccctccttnaattcancnccagtancgggcntccattantgctctc

SEQ ID NO: 4645 - DNA, 234 bp, Glycine max
  unsure (1)..(234): unsure at all n locations; Clone ID: 701043154H1
cttccanataccccaatgccnaaagcaatcatagactttctaaaccttgatcaacttcctctntggtatggtgctaaggnaacccaatctacagatcaaatattcctgtatgatgctaagaaaacccaatcaacagatcaagttcctcctatcttttatggtgataagaaaacccaatcaacagatgaagttcctcctatctnttatggtgctnaganaactcaatcaatagat

SEQ ID NO: 4646 - DNA, 233 bp, Glycine max
  unsure (1)..(233): unsure at all n locations; Clone ID: 701043155H1
cgcaattgtttggagctggtgaaggtgaatgttctgttatcatgctatggacatatgctttggcctcagttgcagtcactttttggacaacttacttcatgtggcttgtggcttaattttgtattcattgctatctatggttattnccttatttatttttaaattttgccttataagtatctcttttcagccaggggtaggaactgcctacactatctgtagttttatacaaa

SEQ ID NO: 4647 - DNA, 236 bp, Glycine max
  unsure (1)..(236): unsure at all n locations; Clone ID: 701043156H1
tttntcttaaatcctatacaaaacaggcgcattcagcactatttcccagatccattaaagttttggcaaagatagnaagcttagaatcccttcataaactggagganatagtgcaagcttctgatgggatcatggtggctcggggtgaccttggtgtcgaaataccacttgaacagattcctacagtccaagaggatataatttacgtatgcagncaattaaacaagccagtgatt

SEQ ID NO: 4648 - DNA, 240 bp, Glycine max
  unsure (1)..(240): unsure at all n locations; Clone ID: 701043157H1
gagaaatcaggctctaacagtcctaaatctgctttgaagtttgtgaagaccacatctncagtctgcagctcaatggagcagtactaattcaagaggnatgacaaaagatgtactcaaagacaagttctatgacaagactaaagcttcacgaaggtctccacccaaagaaagttacatggcttcaagaaggtctccacccaaaganagtnacatggctccaccaaggtctccaccaaaaga

SEQ ID NO: 4649 - DNA, 240 bp, Glycine max
  unsure (1)..(240): unsure at all n locations; Clone ID: 701043158H1
tgatcttgaaagaatttgctccatctattcccgaganaaacatttcttgtttgnctagantggaccacaatagggcactgggccaaatttctgagagactgnacattcaggtttctgatgtaaagaatgtcattatctggggcaatcactcatcaacccaatatcctgatgttaaccatgcaactgttggggagaagcccgtccgcgagcttatagctgatgatgcctggttgaatggtg

SEQ ID NO: 4650 - DNA, 240 bp, Glycine max
  Clone ID: 701043160H1
ctctctaataacatttctaatctcattctccttctgttcaaacactctctctcatggcatcagataagaagattaggatcggcatcaacgggtttggaaggattggccgtttggtggccagggttgcccttcaaaggaatgatgttgaacttgttgctgtcaacgatcctttcatcaccactgattacatgacatacatgttcaagtacgacaccgttcatggccagtggaagcattttg

SEQ ID NO: 4651 - DNA, 240 bp, Glycine max
  Clone ID: 701043161H1
gaaaagagaaagagaagaagaaatccgtgatctccattttcttccttagcacctaacaaagcaaccattctaaattgcaagaaaccctagccctctctctctatctctcttcaatcccactgaacttcttcacaactttgggatttgaattaacgagagaaccagcaaaactggggaaagattttggaactttctgatccgggttttgcatctttccatcatcatcaccatttactttta

SEQ ID NO: 4652 - DNA, 239 bp, Glycine max
  Clone ID: 701043162H1
gaagtatcagatctggagcaggagaatagcgttggcagcgtttgcgtttgctctgctgttccaatcggcctcagcagacgacgtcgttgtgctctctgaagataacttcgagaaggaagttggtcaggacagaggagctctcgttgagttctatgctccttggtgtggacactgcaaaaagcttgctccagaatatgaaaagcttggtagcagcttcaagaaagccaaatctgttttat

SEQ ID NO: 4653 - DNA, 220 bp, Glycine max
  unsure (1)..(220): unsure at all n locations; Clone ID: 701043163H1
gaaagagagagaaacatcgagcangcagttctgttctagggttacacttgtttccattgctggtaaagaatctccaatcttccaacactgcgtcactcgctttgttcccaattcagtccacaatttactttttccactttcccctaacctcccactcggaactcgtcgttacctatcgataatgaatttggggttacctcgctcacatccatcggtgttt

SEQ ID NO: 4654 - DNA, 248 bp, Glycine max
  unsure (1)..(248): unsure at all n locations; Clone ID: 701043164H1
anagnnncgaactcaaatcaagcaatcaatttcaaatccaaaaatggggagctccacaaccttctgtgccttcttcctcgtgtgtacgatcttgtccgtccacgtggcgcaatcctcatcctccaccctcgacctggacacctttttcctccctctcaaatccggctggccgcggatccgtcgccgagtgcagctcctcgccggcgacgacgacaccgagtttctgatggagtcggagagcaacggcg

SEQ ID NO: 4655 - DNA, 237 bp, Glycine max
  unsure (1)..(237): unsure at all n locations; Clone ID: 701043167H1
cgaaaacgaaaacgaaaacgacgacaagtcgttcattccctgcgaaaaccgaattaccgaaaccctaatcaccactccgagaaccaaagattcgcccaatccgaagacccaaacctcaaaaaatcagaccatgaaaagcgtagaggtggccaagacggtgctcgangtcgccgacgtggcttggaccgccgtcgaacactcccaccattaccgccaccgctgcagtcatcccgtcgt

SEQ ID NO: 4656 - DNA, 232 bp, Glycine max
  unsure (1)..(232): unsure at all n locations; Clone ID: 701043168H1
ttttctattccccaaatctcctccttagactgccaacccaatatagccattggatcgaattcagtctgaattcggtctaatggtttgggagttctaattaagtctaaggaacagaattctgtacatatatatatttagaagatcacagggtgcttgatcagtggtgtatcaggatggacaaggtgncgaggttggctnctgaaaagggtgtggtgattttcacaaagagctc

SEQ ID NO: 4657 - DNA, 226 bp, Glycine max
  Clone ID: 701043169H1
caaaacactaaaacacacagcaatggagatattatcacaaatgtggtctctgttagggttacttaccgttctccagaacgttcttccatcgcagcttctctccttgcttcattctctatacgaatctctgcaagatctactttctccgtattcgtatttcgagattcctgaattcaacggctactgcggcgtcgaactcaacgacctctaccgtcatgtgcacctc

SEQ ID NO: 4658 - DNA, 232 bp, Glycine max
  unsure (1)..(232): unsure at all n locations; Clone ID: 701043170H1
tggaagactaagagaattaagagttgttgatattctaaccgtttattatggaatngaanattccttttctggatttagctcctaatgnngtgcagtggtagntgggatcttacaacacccagatacttcttatggtgttccttgcaatcgttgggatgctgttagctggtttctttggttaccatgcnaanctttgccttaccaacactaccactantgagacttttnagtg

SEQ ID NO: 4659 - DNA, 231 bp, Glycine max
  unsure (1)..(231): unsure at all n locations; Clone ID: 701043171H1
gccttttttcaggtttgatttcgaaagcgattttgagggaagaagaggatgaggccgatttttgctgggaacttggagtatgatactcgtcaatcagagctcgaacgcttgttcgcaaagtatggaaggattgaccgcgtgganctgaaatctggttttgcttttgtctatnatgaggatgancgtgatncagnagaagcaattcgtgcacttgacaatgttccatttggt

SEQ ID NO: 4660 - DNA, 235 bp, Glycine max
  unsure (1)..(235): unsure at all n locations; Clone ID: 701043173H1
ctcntccattcacaanctnaaaccttncnntnttgtnaactttattgattgattctgagaatagaactaagagggtatagacatggctancgcaattgcagcttcttcaatnggntctgcntctggnnttccccactgnatntngngctgaccatnaagntggtgacactngtggatgggccctcggngttaattanaanacctgngcctctgggaaaacttcacagttggtgac

SEQ ID NO: 4661 - DNA, 237 bp, Glycine max
  unsure (1)..(237): unsure at all n locations; Clone ID: 701043174H1
gtcccaccaatgcgtcactccattgtaatcaaccttggtgaccaacttgaggtcataaccaatggcaagtncangagtgtgatgcaccgagtgattgctcaaaccgatggtaccagaatgtccatagcttctttctacaaccctggtgatgatgctgtcatttctcctgcaccagccttggtgaaggaattagatgagacaagccaagtgtacccaaaatttgtgtttgatgattac

SEQ ID NO: 4662 - DNA, 220 bp, Glycine max
  unsure (1)..(220): unsure at all n locations; Clone ID: 701043176H1
atttgataatgtatttatgaataanatgatttaacatattacccatggatggcaggctaagcacttcatgcaattgttgagccatttgtcatagcaacaaacaggcaactgngtgtggttcaccctatttacaaacttctgtttcctcactaccgtgacaccatgaatattaattcacttgcccggaaagccctggtcaatgcagatggtattatagaga

SEQ ID NO: 4663 - DNA, 238 bp, Glycine max
  unsure (1)..(238): unsure at all n locations; Clone ID: 701043177H1
ttcctaattgtntaaacctaattctcatttcnncatcgttcgattcttctcctcntaaanatgcagatacntcgngnaaactttgaaccggtaanaccatcacccttgaggtggagtcctccgacaccatcgataacgtganagctaagattcaagacaaggcagggatcccacctgancagcaganacttatctttncgggtanacagcttgnggntggncgaacccttgccganta

SEQ ID NO: 4664 - DNA, 239 bp, Glycine max
  unsure (1)..(239): unsure at all n locations; Clone ID: 701043180H1
cngngntntcagggctgccaatgaattgctaaagcagattaggcaacactcttctcccattggggatgcntcacagaggttggctcattactttgccaatggcctcgaggcacgcttggttggggatggtacaagtacccaaggaatgtatacttttctgagctctaagaacaacactttttctgagttactcaaggcataccaggttttcagttcctccagccctttcaagaagtttg

SEQ ID NO: 4665 - DNA, 232 bp, Glycine max
  Clone ID: 701043183H1
ggcaatagcagagcagcgactcacactggtcttcgcttctcattcatcatttctcacctaaccttctcttcctctcagtctcagatcagaaacctccgccagccatggcagcgttccagaagatcaaggtcgtcaaccccatcgtcgagatggacggagatgaaatgactagggttatctggaagtcaatcaaggacaagctcattttgcccttcttggagttggacatcaa

SEQ ID NO: 4666 - DNA, 213 bp, Glycine max
  unsure (1)..(213): unsure at all n locations; Clone ID: 701043184H1
cttagcgtgacggagatggttgcacggcaccacgctcacgacggtggggcccaaccagtgangctccttcgtgatccaggcgatcgacgcgccggtctccgccgtgtggccggtggtgcggcgcttcgacaacccgcaggcctacaagcacttcgtaaagagcgaccaccgcctcaggaactaccggtccgtcaccacgctccacggcgacgg

SEQ ID NO: 4667 - DNA, 229 bp, Glycine max
  unsure (1)..(229): unsure at all n locations; Clone ID: 701043186H1
gaagctgtagacaactctagcaaaagtgtccacagattagtatacacatgaagtccaattttgctgttttcgtagtcttctctcttctcctgattgccaacttgagctgtgcaaggaaagacctgggatggtattggaagaatgtgatcaaggagcaacctatgccacaagcaattaaagaccttgttgaggattcacaagcatcagctgcagggnagaaggatcgttt

SEQ ID NO: 4668 - DNA, 233 bp, Glycine max
  unsure (1)..(233): unsure at all n locations; Clone ID: 701043188H1
ggaagaganttttcaattttcaattnttcattgggttctctganatggagagagatttcatgggtctcaacttgananaaccactanctgtggtgaaggaggagatnaacaatgntggctgcaaaaactctggcttcaaaaaaggtcggattgcacagtggccattctcgaacaaagtatctgcccttccacatttgatgtctttcaaggcttctcaagatgataagactnag

SEQ ID NO: 4669 - DNA, 234 bp, Glycine max
  unsure (1)..(234): unsure at all n locations; Clone ID: 701043189H1
gtttctatgtcttgtcatatgttctaagaaggcaatgttgggctactanccccactctgctgacaattggcgtgagccgaacatctgtagcttttatgtccacggaggaatcaatgcacctgtntttggtgggtcttgttcgtcttcaactggaaactattacctactttggtcagatcactggggctaaccctacaattcctggaatgtttccaaatatgtttccgttggcta

SEQ ID NO: 4670 - DNA, 236 bp, Glycine max
  unsure (1)..(236): unsure at all n locations; Clone ID: 701043190H1
tttcttttctactactctgtttactgtcacggtaaaaaaatatatatacttgcgcggtccagtaaaagtaaacaacgcccccacaatttcgggtagcggatatcntgtcctttgccnggcatgataangcagtgtttggtgggagtagttatgnntgaacantgatatttggttgttaanttgacttgcccacatnngtagcaccttcattggtcacacagtatatatgaccacat

SEQ ID NO: 4671 - DNA, 239 bp, Glycine max
  unsure (1)..(239): unsure at all n locations; Clone ID: 701043191H1
ctctgttctttctctctcaaaggaaagaaaaggaaagaaaagaaaaganaaagaagagagtgtaggtaaacagaagcacacactacacagttaccanaatcaggttcaaacgcacagatctgggagaagnnnnnnnnnnnnnnnnnnnnnnnggacaggatcagaaccagagatcgctgatctacgcgttcgtgtctcgcggcacggtgattctcgccgagtacactgaattcagtggc

SEQ ID NO: 4672 - DNA, 237 bp, Glycine max
  unsure (1)..(237): unsure at all n locations; Clone ID: 701043192H1
acagaacggntcnctctctctntcaaatccaatcattncctgagagncaagnnacannntnangatcgcgttcagatacantcacncananacacaaccancaatccccaatntctaacttttcccgagaaaattttagtttccantttcatgtctccctcagattcccggaaaatatattcacaacattaatttcgcacttcggccctctgcnaataagnagctccggcttcctct

SEQ ID NO: 4673 - DNA, 205 bp, Glycine max
  unsure (1)..(205): unsure at all n locations; Clone ID: 701043193H1
caaagaccaaaccaaccctttttattnganacnttgtaaangggcacacccctttctctctcctcctaccccctttaatttcctttnccttcttaattgtcttaatttcccttgtattctggtaatctagctaanccttttnatttccattagccacgatatcatcaccatcgccaccttctaggtgggatccagggtcaacaat

SEQ ID NO: 4674 - DNA, 236 bp, Glycine max
  unsure (1)..(236): unsure at all n locations; Clone ID: 701043195H1
tctcaactttcctaactttagcaaccatccaagaagttgatcagttccttgtctctccttgaattataaaaccattcacagtcttgaacccaatttcactctttgcacctcaaacaccttataagcctcaatttcacaaccaaaaatgcaaagttcaatctcacaatctgagatttgcatcactgattaccttctaccccaagaagttccatctcaatttcaattnccagatatga

SEQ ID NO: 4675 - DNA, 136 bp, Glycine max
  unsure (1)..(136): unsure at all n locations; Clone ID: 701043196H1
agngaacttcaagtgngggtgngagtnccacaaatctagagcnagcactantactcctaanagtcctattnnattcttcnaaatatganccatgcatcgcgnggtcttgggcctcttgtcntcggcgncntgggcc

SEQ ID NO: 4676 - DNA, 183 bp, Glycine max
  unsure (1)..(183): unsure at all n locations; Clone ID: 701043201H1
aaaaaaaccacagcttcatattatatatctagctcttcattttctcttgttcaatcaaggttatgctttaaaattcctgaaactcacagtttcaggcaaattttagcctaaagatctgtgcgttgacccttggcaggttcagcttttggaggggttggagtgggccttccacataanccattt

SEQ ID NO: 4677 - DNA, 243 bp, Glycine max
  unsure (1)..(243): unsure at all n locations; Clone ID: 701043202H1
gaaagatgcaggattaggtgtgtggatagggagggtccagcgtangtaactacctggcttctgttctttctacccacgacttttctctcaaaccaaccacatcattcaactattgcactgccaaggtttggacagtgttacgtgcttcacgaaacatgacctctgctcacgaccttactgataatgaagatgatggacagcagcagtcngantcacaaattcagtcccttctgaaatgggatc

SEQ ID NO: 4678 - DNA, 241 bp, Glycine max
  unsure (1)..(241): unsure at all n locations; Clone ID: 701043203H1
aataacatagcatagagtgagaagtgagaagagaaaaatggcaatctccatacccagtagacaacttttcatagatggagagtggaaagtccctcttctcaacaaccggtttccgatcatcaaccccgctactgaagacatcatagggcatattccagccgctactaaggaagatgttgaccttgcggtggatgtgctaaaagagcctttcccataacaaaggcaangattggtnttcagt

SEQ ID NO: 4679 - DNA, 244 bp, Glycine max
  unsure (1)..(244): unsure at all n locations; Clone ID: 701043204H1
cttttggtttttgcagaaagacgaagactgtggaagaggtcttgaaaatatatatcaaacctggttggaagaaaggcacaaaaataacatttcctgggaaaggcaaccaagaagcagaagctactgctcctgacgatctaatctttgtgggttgnngaaaaacccatgncttngtttcaagagagatggaaatgatttggttgtcacacagaaantcctacttgnggaagctctagtgggaaag

SEQ ID NO: 4680 - DNA, 174 bp, Glycine max
  unsure (1)..(174): unsure at all n locations; Clone ID: 701043205H1
gaagatccgaacttctgtcactttccacagaccgaggacattgaagaaggataggaaccccaagtaccctcgcattagcgcgcctccaagaaataagcttgatcattatcagatcctgaaataccctctgaccantgantccgccntgaggaggtnggggaaaaaaacttttgg

SEQ ID NO: 4681 - DNA, 172 bp, Glycine max
  Clone ID: 701043206H1
gtttctctctcttcggtcagaaacatgaatttggaaacgcaaccaggaacggcgtcgtattggtgctacagctgcacccgtttcgtgcacctctctgtccaaagcaccatcgcctgcccccactgtcaaagcggtttcgtcgaagagatccgtgccggcgccggagccgaat

SEQ ID NO: 4682 - DNA, 125 bp, Glycine max
  Clone ID: 701043207H1
ggcctgtgctgtgctctgaggggccatagtttgggaccctttgaaccctaatctccacccaaacccattttcccgggaaattgccttggaaaagaaagagcgaagaggaaaatgcagaatcacag

SEQ ID NO: 4683 - DNA, 174 bp, Glycine max
  unsure (1)..(174): unsure at all n locations; Clone ID: 701043208H1
gactcagtgagtgagcgagcgagcgagttactcatggcgaacgcggccgcttcggaacgtgaaggtgctcccgaactccggcgaatatggaggaagcgcgtcaccgagtcttcgaattcttcagaacggcctgcagatcgctaccctccgttatggaaatctacaacntctacg

SEQ ID NO: 4684 - DNA, 175 bp, Glycine max
  unsure (1)..(175): unsure at all n locations; Clone ID: 701043209H1
ctgtctcnncttcacctgtcttnttatgtttcgaaaatnttggcaaggaatctggannttcactgntagcaacaaggcttatagggcacgntgcagaagatgaactganaaaatganaaactatttcttanattctggaaacctnnaaagtntgttgaaccctgggttgtncggt

SEQ ID NO: 4685 - DNA, 240 bp, Glycine max
  unsure (1)..(240): unsure at all n locations; Clone ID: 701043210H1
attggtgcaaatggcgttcttcagaagcgtttctgcactttctcgacttcgctctcgcgtgggccagcaatctaatcttgcgaattcagttagatggctccaaactccgagctccagtaacactgatctttattctgagttgaaggaactagttccagagtatcaggaacgtgttaagaagctgaagaaagatcatggaagtgttgaatngggaaaaattactgttgatatggtacttgg

SEQ ID NO: 4686 - DNA, 240 bp, Glycine max
  unsure (1)..(240): unsure at all n locations; Clone ID: 701043211H1
aattacatagcctcaataatctgagagaganacaaaaacaatgaaggtttccattgccaagttccactcccttcccctatgttttttccttctcttggccttcaacacaaaacccctcctagcagcagaaccagagccagtggttgataagcaagggaaccctttggagccaggagtagggtactacgtgtggccactttgggctgatgaaggaggcctcacactaggccaaacaaggaa

SEQ ID NO: 4687 - DNA, 239 bp, Glycine max
  Clone ID: 701043212H1
gttgttgctgcaccaccgaacaacttcccctgtaaatcgcgtttcgtttgtgcaaggttttaaaagatggctgatgctgaggacattcaacctcttgttgttgataatggaactggaatggtcaaggctggttttgcaggtgatgatgctcctagggccgtgttccccagcattattgggagaccacgccatactggtgtaatggttgggatgggtcagaaggatgcttacgtgggtga

SEQ ID NO: 4688 - DNA, 239 bp, Glycine max
  Clone ID: 701043213H1
gctggtgcttctttttctctgcagcctcttcgatcccgctggtgctcacttcgatcccgttggcgctctcttcgattcagtttagcaggttgtgctgaggcttaattgacccttgaagcatatttcggagttttatcagagaacaaatgggatatattggggctcatggtgttgcagctctgcacagatataaatatagtggagtagatcattcctacgtggccaaatatgtactacaa

SEQ ID NO: 4689 - DNA, 205 bp, Glycine max
  unsure (1)..(205): unsure at all n locations; Clone ID: 701043214H1
cccagttactcgctcccactcccttcatcctcggcaagcgcatacgcaccgacgaagactcttccaaagacgaagctgtttccgtnggcccctctctcgtggggccgtatgcccctcccggaccaggggtcgtcccggcctggcccgatttcggacaaatttggagttttgtcgccgccgctgctgctcccgaaatggtgtcggt

SEQ ID NO: 4690 - DNA, 243 bp, Glycine max
  Clone ID: 701043215H1
gaatgaaaatataaagaaagagaagagagaaataattttccgggaaaattcaagttccaatcggaaccggaaatgaatagggtttggtttctactattccttctgctgatctcgaaatgcgatcatgtgtggagctcttacgcgggttccgctagctccgtcatcaacccttccaaggtcaaacagatttcctggaagccaagagctttcgtttatgaaggtttcctcacggattgggaatgc

SEQ ID NO: 4691 - DNA, 237 bp, Glycine max
  Clone ID: 701043216H1
gagctctggaactccactcgtgatccaacacgatagagagagaaaaagggtcttgcctttttttctgcttttgatttgactctttacaaatacaaataaataataaaatcccatcaagaagaaataaatatcaagcccaacccagtgcagtgctgcagggactgtcactgaactcaaaaatgaactgtcttcggaatctttctcgattctctgttttgcccgaaacacctgttacgc

SEQ ID NO: 4692 - DNA, 245 bp, Glycine max
  unsure (1)..(245): unsure at all n locations; Clone ID: 701043217H1
ggaagttgtttctcaatatggagagttgatatgggatctcttggtatcaggggtgaagcctgatgacatatgttcacaagttggtttatgttcttccaaaaggcatgaatctaagagtgctggaattgaaatggtgactganaaggagcagggagagttgacggcaagagataatcctttgtgttcttcttgtcagatgcttgttctttggatccagaatcaactaaaacnaaangnaacggngg

SEQ ID NO: 4693 - DNA, 86 bp, Glycine max
  unsure (1)..(86): unsure at all n locations; Clone ID: 701043218H1
gtnttccgaaaggngcagatgagttttgtaagaacagagtgnnngtnccctcctanagccaatcaaacantctntgtactgccatt

SEQ ID NO: 4694 - DNA, 245 bp, Glycine max
  unsure (1)..(245): unsure at all n locations; Clone ID: 701043219H1
gctggacttgtgcaataaacgaacaacaaacagagacactggttctcactttacgcgcaagnaattcaatcacgccacgccaagccaagccaaagccacaatttcacctatccaattattcacgacatgtaacaaaacgacaatcactttcgtcgttcgccaaattcgattncagagttcgggccatggcgctcngaaaacgnacggnagaaaaatttccttcgangttctcagcgtcgagggnc

SEQ ID NO: 4695 - DNA, 170 bp, Glycine max
  unsure (1)..(170): unsure at all n locations; Clone ID: 701043220H1
aatcgatgattttgatgtggaagaagaggtgagacctgattttccttgcccgtattgntatgaagactttgacatcgcgncngngtnttctcatctngaagatgaacattcntgngaancaanantcangatntgnccnanatgggcngttanagtngcacgggnctgtt

SEQ ID NO: 4696 - DNA, 171 bp, Glycine max
  unsure (1)..(171): unsure at all n locations; Clone ID: 701043221H1
attttctaatctctctctctcccacctttcacactctgtttttcctctccctttctcatccttctcaacacaaaatacacccttctacatggcgactnangctgagttcgaatatnangangngagttatgctgagatcanatatgatgaggaatacgtacagaattctcg

SEQ ID NO: 4697 - DNA, 170 bp, Glycine max
  unsure (1)..(170): unsure at all n locations; Clone ID: 701043222H1
gcaaattgatgatacacagtacccaaaaacattcttctataaagaagaccttcatccaggcaaaacaatgaaagtacaattcaccaagcgtccctatgcacaaccttatggtgtatatacatggttaacggatattaaagacacctctaaagaaggatatagttttgang

SEQ ID NO: 4698 - DNA, 234 bp, Glycine max
  unsure (1)..(234): unsure at all n locations; Clone ID: 701043223H1
cctttgttcactcttcttctcttgcggctagggttttagcgcagttcttctagatttaaggaagatgggtaaggaaaaggttcacatcagtattgtggtcattggccatgtcgactctgggaaatccactaccactggtcacctgatttacaagcttggaggcattnacaagcgtgttattgagaggtttgagaaggaagctgctgngatnaacnggnggtcntgcatgtccgg

SEQ ID NO: 4699 - DNA, 171 bp, Glycine max
  unsure (1)..(171): unsure at all n locations; Clone ID: 701043224H1
gccaaagagtattttnanaaggctgctgataatgacgaggttggcggccactataaccttggcgtcatgtatctcaaggggattggagtcaatagggatgttaagctcgcctgtaagttctttgtttncgccgctaaccatggcaanccannggcntncnaccagntcgtt

SEQ ID NO: 4700 - DNA, 240 bp, Glycine max
  unsure (1)..(240): unsure at all n locations; Clone ID: 701043225H1
attgggagcactcaacctaaccattcaagttgtgaaaccacatcgcaagaaaattcacaagcgatggatccgaagctgaaagaggtttctcagctcttcgatcgcttcaaggcttcgtttctccggaacgacttcgataactgttccaatctcctttctcagctaaaggtgttacttacaggtttcagaagcctgccaccgttgtttgcagatacacctaatgcagttcnangatttaaa

SEQ ID NO: 4701 - DNA, 239 bp, Glycine max
  Clone ID: 701043227H1
ctttcactcacccaaaaccaagctagtccgaggaagtcctctattcagaaccagatatggagacaaaacccaccgagatcagcagcggcaagatgttcggaggctacaacaagaggttcagacatttcagccctaccctcggctgctccatgaacttccacatctacttccctccatctccttctccctctcacaaattcccagtcttgtactttctctctggcctcacatgcacggac

SEQ ID NO: 4702 - DNA, 239 bp, Glycine max
  Clone ID: 701043228H1
tttcagtttcagaaagaaagcaaaagcaatagcaatgggttggatcggtgagactgttgattccatcaaatctcttcagatccgccaggtcctcacccaggctgtgagcctaggcatgattgttacgtctgcactgataatatggaaggcattgatgtgcgttactggcagtgaatctcccgttgttgttgttctttctggaagcatggaacccggattcaagcggggagacatcttgt

SEQ ID NO: 4703 - DNA, 239 bp, Glycine max
  unsure (1)..(239): unsure at all n locations; Clone ID: 701043229H1
cggaaagatcaggctttgctttgctttgtgtgagatctgaagaagagaggtatggcaaaaagggtcttcttgtacaaggatttggttccttttggggccatggtgaccatggaatgcctcaacgtagccttgaatactctgttcaaagcagctaccttgagagggatgagttaccatgtctttgttgtttatgcttatgctgttgctgctattgttctcnatcctgggacccttatntc

SEQ ID NO: 4704 - DNA, 239 bp, Glycine max
  Clone ID: 701043230H1
gagacataaaaaataaacatatattgagaatggagggttgtgtgaagaagttgctatgccttgttgggtttgtggtgcttgtgagtactattggtggggtggagagtgctggtgaatgtgggaaatctacaacccctgataatgaggcttataagcttgcaccatgtgcctcagcagcacaagatgagaatgctagtgtttctcagagttgctgtgctcaggtgaagaaaattgggcag

SEQ ID NO: 4705 - DNA, 241 bp, Glycine max
  unsure (1)..(241): unsure at all n locations; Clone ID: 701043231H1
aaagccccttcttttcccttcactccaggtatggaagctgttggggttgtgacagctgtgggtgctggactcactggtaggcaggttggagatcttgtagcttatgcaggtcaaccaatgggttcatatgctgaagagcagatacttcctgcaaataaagtagtccctgttccttcgtcaattgacccagctgttgcagcatccatcattctcnggggtataaaccnntttttnctncggg

SEQ ID NO: 4706 - DNA, 245 bp, Glycine max
  Clone ID: 701043232H1
gtgaactaatgcttggccagcctctattccctggtgagagtggagtagatcagcttgttgaaattatcaaggttttaggtaccccaacaagggaagaaatcaagtgcatgaatcctaattataccgagtccaaatttccacaaattaaagctcacccatggcacaagatctttcacaagcgcttacctcctgaggctgtggatctcgtctcaaggctactgcaatactctccaaatcttcgatgc

SEQ ID NO: 4707 - DNA, 248 bp, Glycine max
  unsure (1)..(248): unsure at all n locations; Clone ID: 701043233H1
cnacanccgacaacaacaacaacnttgaggataacatcatcnccatcaacgttgttgttgttgtcggttgttgttgtncggaggaggaagtgagtggnttccgtctaaggcttccaactgctcganatatcgataacaacaanaacgttgatgatgatgnngtatncctccaangcggttnccgtgttncgttatagctggcggnggcgcacgngcattnggttggangacgtngttnttcgggggaa

SEQ ID NO: 4708 - DNA, 232 bp, Glycine max
  unsure (1)..(232): unsure at all n locations; Clone ID: 701043234H1
tggaacccggctcgttgcttcattaaacaatgncatcttttgtgatgcnccaaactgcacttctccaagctcactacttcagtatctggggggttttcaggactgattttccagaccgccctccatcccctttcaactttactggtgcgcccctaactgccaatcttgccactttaactggcactagagttagcaagattgctttcaattccacagtggagctagttttgca

SEQ ID NO: 4709 - DNA, 238 bp, Glycine max
  Clone ID: 701043235H1
gagcccaagagaccctcagacaagcctttgaggcttcccttgcaggatgtctacaagattggtggtattggaacagtgccagtgggacgagttgaaactggtgtcttgaagcccggtatggtggtgacttttgctcccactggcctgacaactgaagttaagtctgtggagatgcaccatgaagctctcccaggaggcccttccaggtgacaacgtaggatttaatgtgaagaatgtt

SEQ ID NO: 4710 - DNA, 237 bp, Glycine max
  unsure (1)..(237): unsure at all n locations; Clone ID: 701043236H1
tggaaactccttcaacaacaaagatattgccagaggactatgttcagagagtgaagcatgttcatgaatctggtggttatgggtctagagggtatgcatatgactggaagagagaggaagcaaataaaaaccttctgcgaacccatacaactgctgtttcctccaggatgctttaccaattagcacagaaaccatttgcccccaaaaaaatntttcnctatagntntgtatccagaa

SEQ ID NO: 4711 - DNA, 168 bp, Glycine max
  Clone ID: 701043237H1
tggaccatgggcatggtgtttcacatcttaattaatgttactagttctaccttttacatttccaaacacatttaagtaacctttcatatgcaattgcaaatgttgtccaaacgttaagtataactatagacattatgttttattatcaatgatggatattaatctttt

SEQ ID NO: 4712 - DNA, 168 bp, Glycine max
  Clone ID: 701043238H1
cagaatcacactttccaaagcatgttgaacgtgatttctatgagattgattttgaaggtgattcaaagccaaaccaaaggcaaccttaatcattgtgctgagaccggggaatctactgttttatatctctttggccagaacaatgacagaagttaaaaagtttccttt

SEQ ID NO: 4713 - DNA, 167 bp, Glycine max
  Clone ID: 701043239H1
ttcaatctcagaggatgggtggtgaggaattgtgtttgatggagaactcagggaaatggaagaggctgtggaagaaggtgaagtaccagctggtggagtaccactccttgcccggttatttgagagacaacgagtacattctcggtcactatcgatccgaatggccc

SEQ ID NO: 4714 - DNA, 166 bp, Glycine max
  unsure (1)..(166): unsure at all n locations; Clone ID: 701043240H1
ctttcatggcacatgaaggctggaaccatgtgtgaattttccaagaaggagtttattgaaggtttacagtctttggggattgattctctggataagttccgtgaaaagataccatatatgcgctctgagctgaaagatgaacagaaattccncgagatatntanct

SEQ ID NO: 4715 - DNA, 170 bp, Glycine max
  Clone ID: 701043241H1
ctttttccttcaagtcactaagataatggcaagcatttataacattccatcacacataaaagcttgggtctattatgaatatggaaacatagaagagattctcaaatttgaatctaacatacccataccagacatcaaggaagaccaagtgctcatcaaggttgtggctg

SEQ ID NO: 4716 - DNA, 233 bp, Glycine max
  unsure (1)..(233): unsure at all n locations; Clone ID: 701043242H1
cctttttgtggcggatgttaacacccagttgaagaacaagaacatcaccactgatatcaaagtggacaccggttccaatcttttcacaactatcactgtcaatgagcctgctcctggtctcaagactatttttagctttagagttcctgatcaaaggtctggaaaggtggaagtccagtacttgcatgactatgcggataagcaccatgtgggtttaacagcaaacccantgg

SEQ ID NO: 4717 - DNA, 236 bp, Glycine max
  Clone ID: 701043243H1
ctctctctctcactcttttctgtcatctgcgcaacttcattcattcaggctaaatggggaggatcaagcctcaggctctgctacagcaaagcaaaaggaagaaggggccttctcgcataagtgccaccattgttacattctatgcattgattcttgtcatgcttgtgtttatcctgtttgttacatacagacattggtccaacaggacaagacttcaaccagagagctacatatca

SEQ ID NO: 4718 - DNA, 237 bp, Glycine max
  Clone ID: 701043244H1
ttctttgcttcagtgtgaagagtagaaagaaggaaggaggaaaggggcatcggagagagagaaagaaaaaagatgagcggtggtcgactttgtacattgcttggagaattagggtacgaaggctgggaagcattggaccctgacagcttcgaatggccctttcagtacgaagatactcgccctcttctccactggatctgctccaatcttcgcccctccaacgtcctctctctcgga

SEQ ID NO: 4719 - DNA, 237 bp, Glycine max
  Clone ID: 701043245H1
cagatcagaaccttggccatggcagcgttccagaagatcaacgtcgccaaccccatcgtcgagatggacggagatgaaatgactagggttatctggaagtcaatcaaggacaagctcattttgcccttcttggagttggacatcaagtattatgacttaggccttccttaccgtgatgagaccgatgataaagttacaattgaaagtgcggaagcaactctcaagtataatgtggca

SEQ ID NO: 4720 - DNA, 170 bp, Glycine max
  Clone ID: 701043246H1
cctttcctttccgccagaatccgttgagaatggcgttgccggtagtcgtcgatgcagagtacctcaaggaggtcgacaaggctcgccgcgatctccgcgcactcatcgctaacaggaactgcgctcctctcatgctccgattagcctggcacgatgccggaacttacgat

SEQ ID NO: 4721 - DNA, 180 bp, Glycine max
  unsure (1)..(180): unsure at all n locations; Clone ID: 701043247H1
ttgcaatcaaattagttcattctctttgcgcagttccctacctctccttcaagatgcagatcttcgtcaagacctcaccggaaagacanaccctgagtgaagccgaacatgaacgnangcagtcagcaagagatcccgtagacgctactcgcgnanagtgagagcgactgcgataatcaa

SEQ ID NO: 4722 - DNA, 243 bp, Glycine max
  unsure (1)..(243): unsure at all n locations; Clone ID: 701043248H1
tcaattcccanttttccgaatctacnctttctntctctacgatggagccttcctcgatctctccaccgccagctcccctgccaccgccgtccccttccccgccgaacccaacgnncaccttccaccanccattcccgatccaccttctaaccacccaccttacgccgagatgatatacacggcaatcgaggcgctgaaggagaaagacggttctagcaagagggcaatagcgaagtatattga

SEQ ID NO: 4723 - DNA, 182 bp, Glycine max
  unsure (1)..(182): unsure at all n locations; Clone ID: 701043249H1
cgtttacccccttttgttctgcgcgtgcgtgtggatctggcaagaaaacaaggaagggagggttcattgcggatctgaattcgcagtgttagggctttgaagggtttttccatttncttcaatggccacgccctttcccattcccgtcaccgcagctcaggttggaacgtacttcgtaggac

SEQ ID NO: 4724 - DNA, 238 bp, Glycine max
  unsure (1)..(238): unsure at all n locations; Clone ID: 701043250H1
ctgcacactacactgcccagtggccacccgccactgcattcatcccacactccaaacattaattctcaggaaaaaaaacaaaacaagcggcgtgatggcggcgaaacggcttattgtcgtcgtggagagcaccgccgccatggggccctattgggagaccattctgagggattatctcgacaagattatcagatgttttggtgaaaatgactcaactgtgcagaactnttgttccaat

SEQ ID NO: 4725 - DNA, 227 bp, Glycine max
  unsure (1)..(227): unsure at all n locations; Clone ID: 701043251H1
ctctcacctcacaacagaagcagnaatgaagangaagatgatggcaagcaccgccatactccgtcgtcttcgccgcgctcttcctcttctcctccgtccactccttctacctccccggcgtcgctcctcgcgattttcaaattggtgaccccctctctgtcaaagtgaacaagttatcatccaccaagactcaacttccatatgactactactcttgaagtattgca

SEQ ID NO: 4726 - DNA, 112 bp, Glycine max
  unsure (1)..(112): unsure at all n locations; Clone ID: 701043252H1
tattcacattagatcagactatggatcgcccaacactatcatcannattttcattcctactaacanttcatctatnattatcaggggtaatttcancancattnactcagtt

SEQ ID NO: 4727 - DNA, 168 bp, Glycine max
  Clone ID: 701043253H1
aaccctggctcgtagtcttggtgctgctatcatcttcaacaaggaccttggttgggatgatcactggatcttctgggtgggacctttcattggtgctgcacttgcagcactctaccaccaggtcgtaatcagggccattcccttcaagtccaagtgattcaatcaaac

SEQ ID NO: 4728 - DNA, 166 bp, Glycine max
  unsure (1)..(166): unsure at all n locations; Clone ID: 701043254H1
ttgcctcagagctatacctacatgccatcagcatttcagcaggcttttcctggaaatagcacataccaccaatctctggcagccatgcttccacaatataaaaatagcatttctgtcagtagcttacctcagtctgctgctgttgcatctggatatggtttnggaa

SEQ ID NO: 4729 - DNA, 168 bp, Glycine max
  Clone ID: 701043255H1
gcgagaggcgttctatatattattgaattgacaatgaggcctgctccttgctttgcttcctcttctatttgctttcttgttagctgccactacagaatcaagaaaagatacaggggaatattggaaaatgatcatgaaagatcaggaaatgccagaaggacttcaagg

SEQ ID NO: 4730 - DNA, 235 bp, Glycine max
  Clone ID: 701043257H1
acaagatggcttcttttcatatccaatattcattccttgtgcttgtgcttgctatggtgatcacattgatgaaccctaccaatgcaaccctctctccccatttctatgataaagtttgccctcaggcattgccagttataaagtcagtggttcaacgagcaattatccgtgagcgacgcatcggagcatctcttctgcgcttgcatttccatgattgtttcgtaaatgggtgtga

SEQ ID NO: 4731 - DNA, 235 bp, Glycine max
  Clone ID: 701043258H1
tgagcattcacatggaaacttgatgccacccccacctgcactcctaactcaatatcagagtccttgttcaagagagcttatgtcaaaacaagtgtcagcaaaaacttgtgaggctgtgaaaccaaaagatggtgactgtaagctatttggcttctcacttatcagtggccctactttaccagagccttctttatcacaaagaaatgtgagtgaggctgctgatcagatgcatctt

SEQ ID NO: 4732 - DNA, 234 bp, Glycine max
  Clone ID: 701043259H1
tctctgtcgaacttgaaggagctcaatgtgagttttaatgagcttgagtacgtgcctgagagcctgtgttttgctacctcgcttgtgaagatgaacatagggaacaactttgctgacatgcgatccttgccgaggtccattgggaaccttgaaatgcttgaggagttggatatcagcaacaatcagattcgtgtccttcctgactcttttaggatgctcactcgtttacgtgtc

SEQ ID NO: 4733 - DNA, 236 bp, Glycine max
  Clone ID: 701043260H1
gtatactctgaaacaatcatgtagtactcttcgtcttcgttttaagaaaaagaacattttggaggaaaagcgcatacgacgtttgcgagcgaaattgcgatttatttattaccaaagagaagaaaaaaagagaaaagaagaggcgaatggcagatcagagcgagcattcgaaaacggcgtcgcctccggaggaccaggaccgtcccgttcgagtgtacgcggatggcatctacgat

SEQ ID NO: 4734 - DNA, 236 bp, Glycine max
  unsure (1)..(236): unsure at all n locations; Clone ID: 701043261H1
gaaaaaaccccactttctctctttcactagctccgttcaagttctaactaancacttcgtcgctgcttttgcttctgtagaagatgtctctgcgagtgctgaaccctaacgccgaagtgctgaacaaatcggcggcacttcacatgaacatcaatgccgccaagggtctgcaagatgtcctcaaaaccaacctcggtcccaaaggaaccatcaaaatgctcgttggtggtgccggt

SEQ ID NO: 4735 - DNA, 243 bp, Glycine max
  unsure (1)..(243): unsure at all n locations; Clone ID: 701043264H1
attcttcaaaaattntcntctattccctggngncagtngagtagaacataaagtttcagntttttgcatcgtttttattaaaatttgttggcgaacaaaacagagaaaaaaaaaccanaaaattgaaatttcttatccgttttggcgaattgaactgcgtgttcaattgggttgttnaattcgaggcagagggaaccgcgggtgtacaaggaatttcgattctgctgttgttagaaacggtgt

SEQ ID NO: 4736 - DNA, 243 bp, Glycine max
  Clone ID: 701043265H1
gaagttgtttctcaatatggagagttgatatgggatctcttggtatcaggggtgaagcctgatgacatatgttcacaagttggtttatgttcttccaaaaggcatgaatctaagagtgctggaattgaaatggtgactgaaaaggagcagggagagttgacggcaagagataatcctttgtgttcttcttgtcagatgcttgttctttggatccagaatcaactaaaacaaaaggcaacgaag

SEQ ID NO: 4737 - DNA, 236 bp, Glycine max
  unsure (1)..(236): unsure at all n locations; Clone ID: 701043266H1
cgctctactccttgtttgaggagtctctcagcggccttgccacaatccgcgccttcaactggcagaaagcgctgaacgacagaaactacgaactcctggatcgctcgcagcggcccttctacctcttgtttgctgtccagcgttggctcactcttgttctggatctggtcgtcgctgccattgccgtactgctgatggtgnagtggttacgctccgcggtaaccatggctgccggg

SEQ ID NO: 4738 - DNA, 231 bp, Glycine max
  unsure (1)..(231): unsure at all n locations; Clone ID: 701043267H1
ttggttttcttttcctatccactctcaacatagcagcagcaactgcttcagtttctattttcagtagtttgttccaagtttctgatcaatggaacatagtttgaaaagaaagtctccagagagtggagacaatttactcttcaacagattttctctggatgaccttaatgaagatctcttggagagggtactttcatggcaacaacttcctcattttcggntcacttcggg

SEQ ID NO: 4739 - DNA, 168 bp, Glycine max
  unsure (1)..(168): unsure at all n locations; Clone ID: 701043268H1
ctaaactgtaacataacagagcttgagccttganccttgnancttgagccacgagccaccctcagacntagtncaccaacaccgntcaacnnnacnatggnancngcgttcgacnagctcnncgattcccccatgttccagagacagttatatgntcntgacagaatt

SEQ ID NO: 4740 - DNA, 165 bp, Glycine max
  Clone ID: 701043269H1
gctggatcagactgagataagattggagtagaaaacgtatgatggtcgatccctctgttcactttctctttcgtgaaaatcgcaggaaggtaactgctgaagactgaagtacctgaaggctgaggtggtgttttcatggcttccgacacggtacgaggccaaagg

SEQ ID NO: 4741 - DNA, 164 bp, Glycine max
  unsure (1)..(164): unsure at all n locations; Clone ID: 701043270H1
gcaacacaaagcagcacctctgtttgataggcttgtgtttgataagacaaaactagctctaggtggacgtgttcgcatcctgttatccggagctgctcctttgcctaggcatgtggaagagtttatgagggtcactagtggatctacattatcacaaggttnng

SEQ ID NO: 4742 - DNA, 163 bp, Glycine max
  Clone ID: 701043271H1
ggtttttatcgacatcgccacgtgcatgagggacagtgacggggttatagtaaatacttgtgaagccatggaaggtagggttgtagaagctttttccgaagggttgatggaaggaaccacgccgaaagtgttttgcattggacccgtgatttcttctgctcct

SEQ ID NO: 4743 - DNA, 140 bp, Glycine max
  Clone ID: 701043272H1
ctcggatcatcaaaatcagaaagaattgggggaatggagaacaaccagcaacaaggcgctcaagcccaattcgggaccgtaccccggcggcgccggtggaagtgcaggtgcaggtgcaggtgcaggcgcggccccgttcc

SEQ ID NO: 4744 - DNA, 232 bp, Glycine max
  unsure (1)..(232): unsure at all n locations; Clone ID: 701043273H1
gatagtgtggganagagaagagcggaagagaaaatgacgaccaggttcaagaagaacaggaagaagagaggtcacgtcagcnccggacacggccgtatcggaaagcaccgcaagcatcccggaggtcgcggtaacgccggtggcatgcatcaccaccgtatcctcttcgacaagtaccatcctggtttttccgggaaggtaggcatgcgtattccanaatttnggaaaaaat

SEQ ID NO: 4745 - DNA, 230 bp, Glycine max
  unsure (1)..(230): unsure at all n locations; Clone ID: 701043274H1
cgatgtcagatcttgaggctcnttgcgccctaagaggaagaaggtttgggtggactatttcgttcagtttcgatggatcctgttatttttgtggtccttcccatctccttcaccatttatttccttacataccttggggatgtaagatctgagtggaagtcctataagacgcgtcagaaggaacatgatgagaatgtgaagaaggttatcaaangtcttggatcaagcgc

SEQ ID NO: 4746 - DNA, 232 bp, Glycine max
  Clone ID: 701043275H1
caaactataggagggttaaggagcaggcggcggttgattatttagagttaaggtccgtggctcagggtgtctctagacaaagagaatttgacctttgtggcaaggaaagagagaattttgtgccttgttacaatgtttcagccagtttgttagcagggtttaaagacggagaggagtttgaccggcattgtgaactgttagttgaagcagagaggtgtttggttcgccctcc

SEQ ID NO: 4747 - DNA, 234 bp, Glycine max
  unsure (1)..(234): unsure at all n locations; Clone ID: 701043276H1
cagaagatcgatctggtagaaacgatgaaggaactatgggcacaaatggggtcactaatggccactattgtgttcatgtacacaatctttgagcgcttcttccctccacacttgcgtgaaaaactcaagcctatactcaaaaacncaccnaccatttcaacccnttacatccnaattaggctccctgggtcctnaggggaacgactgangaagngngagcnttacnccngcntc

SEQ ID NO: 4748 - DNA, 235 bp, Glycine max
  unsure (1)..(235): unsure at all n locations; Clone ID: 701043277H1
caaagatggaaagaagctatctcatctaaccatgtgaagttggttgttacacctgattgtcaatcttctaatgcggacagatttaacattcttgcaaatacagagaaccgattgcctgcaacttctggagttgctaaatccaaacccaaaacaaagcctgagaagggaatgaagataaagtacattcccaaacaaaaagaagcaacctagtaagaggaaacaagnagaaattggg

SEQ ID NO: 4749 - DNA, 237 bp, Glycine max
  Clone ID: 701043278H1
cctccccacaaatacacacagaaagttgggaggtggtggtagctgctgcgaacgtttctgcaaccaataatagctttcgcagcaaaagcaacgattcaaattcaacctcctcagatggcacattctttctcgccagccaaacgcgcccttgcctttgcccttcaacggcgagggtacgcagtggcgtctgatgcttctccttcgatgagagggggattggatagcattagtgtaatg

SEQ ID NO: 4750 - DNA, 242 bp, Glycine max
  unsure (1)..(242): unsure at all n locations; Clone ID: 701043279H1
cctaggtctattcttaccttgtcgcggtggaccgagttgacggtgataagctcctccctttctcctgccgccagatcctcatcgtcgccgtcgccgaatttctccttgggcgttttgtctccgcctctcactctcgttgaagcttattaagtaccgatagcatgtgccggcaaaattctccggtacaccatgccggtgaagaanaaattgcagctgatgagagccttttgatttattgcaag

SEQ ID NO: 4751 - DNA, 239 bp, Glycine max
  Clone ID: 701043280H1
gtggacagaagagagcgtcctagtcgcaaccctaataagaagaaccacagcttcaagcgagtgacatccaccagccatgggtcgtatgcacagccgcggtaagggtatatcctcttctgctttgccctacaaaaggacaccccctagctggctcaagatctcttcgcaagatgtggaagaaaatatctgcaagtttgcgaagaagggtttgaccccgtctcagattggtgtcattcttc

SEQ ID NO: 4752 - DNA, 186 bp, Glycine max
  Clone ID: 701043281H1
gggcaaagatggttctgactatattaccttgagagtctcagatgtcatggctgttctctcctagaacaacttgctttgggttttgtaacttgaaatttttgtgtttatctcgagaaaacgtggattcttttaatcgtaaggacttttgaaaaatagtttattgcaatctgttccgtagacaatctc

SEQ ID NO: 4753 - DNA, 166 bp, Glycine max
  Clone ID: 701043282H1
gtttaaaccaacaccaaaatctttgttattcacgaaaccccgatagcactttccttatcttttccgaatccgaggagtggcagtagtgtgtggtttttcacaatcattacctcgtttcagctcaattttgttaattgggcttccattcattaaagtttacaagttt

SEQ ID NO: 4754 - DNA, 232 bp, Glycine max
  Clone ID: 701043283H1
ttgcttttgaaattctcaccaccacctattccaccttggtaatacttactctttcacttaccaaccaaccaccatggtttctgagacactccaaagccaaaccaagaacgtgtgcgtgattggagcaggaccatcagggctagtggcagcaagagagttgagaaaagagggtcacagggtggttttgttggagcagaatcatgatgttggaggacagtggctatatgaatca

SEQ ID NO: 4755 - DNA, 232 bp, Glycine max
  unsure (1)..(232): unsure at all n locations; Clone ID: 701043284H1
atttcttttctgggggagcaaagatgggtgtgtcgaaattgggttttttggggcttctttttgctgattttcctctttgcagttggagctgtggagctgggcaggaaccaacccactgaaagaatttcaggtagtgctggtgatgtattggaagatgatccagtgggaaggttgaaggtttngngttnatnactcccnangtaaatcnnataaggaaattccgccaaagggt

SEQ ID NO: 4756 - DNA, 162 bp, Glycine max
  unsure (1)..(162): unsure at all n locations; Clone ID: 701043285H1
tttnttctagtgattccacaacgtgtcctaactctgaagtccccttactcttggttattctactcttctttctcctcctcagaacctcaaacaccaaaaccaagcattacaattcccaatttcacagaaacaccagaattaataaaacacataacaacaaaa

SEQ ID NO: 4757 - DNA, 163 bp, Glycine max
  unsure (1)..(163): unsure at all n locations; Clone ID: 701043286H1
gtctttgtgtaccacaaggaaatctcgagacctttgacttgccacagatttgggtcccctgatatggatgacgctgaanatgaggctggatcgtacttcattagtgctgtatgctggaagagtgatcgccccactattctaactgcaaatagtcaagggcacc

SEQ ID NO: 4758 - DNA, 227 bp, Glycine max
  unsure (1)..(227): unsure at all n locations; Clone ID: 701043287H1
gtcccctaataaacaaagaccaaaccaaccctttttatttgaaagcttgtaaaggggcacacccctttctctctcctccttccccctttaatttccttttccttcttaattgtcttaatttcccttgtattctggtaatctagctaacccttttatttccattagccacgatatcatcaccatngccaccttcnaggtgggatncngggtcangatatcacantcag

SEQ ID NO: 4759 - DNA, 166 bp, Glycine max
  unsure (1)..(166): unsure at all n locations; Clone ID: 701043288H1
ctgtctctctcgaacacaatgtccaactccancaccggcancaccgnggccttancacngaagcccacctgggtcntcccatancgaaccgagaatntccgcgaggtctacaccctaagccgaaagcttcggccagggccaattcggnacaancnttctgctnaag

SEQ ID NO: 4760 - DNA, 239 bp, Glycine max
  unsure (1)..(239): unsure at all n locations; Clone ID: 701043289H1
aatcaaagttccgcttccctccgcagagactggacgatctcgcgagccatgaatgctagacgagacaatcgtaacaatagagtttccctttttgatggtattgagnagggtggcatcagagcatcatctgtttactcctcttctcatgaaattgatggacatggtattgngcngggcnttgggtgggattgcaangtagnggtcaanncgntnaaaaagtttttccggggggnanaaaa

SEQ ID NO: 4761 - DNA, 231 bp, Glycine max
  Clone ID: 701043290H1
ggtggcacctgcccctgagtatacatttcttatttattgttctccagttggcagctaccagaagggtgcactaaatttaaaggttgaggataaactatatagagcaatatctggctgtggtggaactggagggatcaaaagtgtcaccaattatgcccctgtttatactgcaatggctgatgcaaaggccaacggattctctgatgtgctgttcttagactcagcaactgg

SEQ ID NO: 4762 - DNA, 156 bp, Glycine max
  unsure (1)..(156): unsure at all n locations; Clone ID: 701043291H1
atgagaagcaacaccttagctgtttcagataatagaagatcgtcagtgtnttgggatcaagcagctggacgctttgtctcgtcctcatcaagaggtcccggaacagaattattgtacacgggccgttctatattttttggcagccccgttgtgaat

SEQ ID NO: 4763 - DNA, 231 bp, Glycine max
  Clone ID: 701043292H1
ccactttcttttttcccgcagtcatgggcaaggtcaagatcggaatcaacggatttggaagaattggccgtttggtggccagggtggctctgcagagagacgatgttgaactcgttgccgttaacgatcctttcattaccaccgattacatgacatacatgtttaaatacgacagtgttcacgggcactggaagcatcacgatgtcaccgttaaggatgagaagacccttc

SEQ ID NO: 4764 - DNA, 224 bp, Glycine max
  unsure (1)..(224): unsure at all n locations; Clone ID: 701043293H1
attttntttcctatcattactttcagctttacagatacgcaacttcagtgtggccctggcttcgagcagccttgcgcttctaaatctgaaaatccaggtttgattgtttaacacagacataaagantgggtattatgttttggtacatacaaaagaatatgtaatttaacttgaagaatatgaactagaaataaaaanagattagctaattagtagctatttaa

SEQ ID NO: 4765 - DNA, 234 bp, Glycine max
  Clone ID: 701043294H1
gttctttggatgaggttacagctgcacttgcaaatgctgggctggaatcttctaatctcattgttggcattgatttcaccaagagcaatgagtggacagggaagaggtcattcaatcgaaaaagtttacatgacattagaagtggtcaaaacccttatgaacaagcaatttctattatcgggaaaactttatctgctttcgatgaagataacttgattccttgttttggatttg

SEQ ID NO: 4766 - DNA, 233 bp, Glycine max
  unsure (1)..(233): unsure at all n locations; Clone ID: 701043295H1
tttgagtgtaaaataacagagtatagtgtagggccttgttcttgatactgtgctaaatttgttggatggcggagaaatcatgcatcaagcgccttcagaaggaatatagagccctttgtaaagagccagtttctcatgttgtggctcgtccttctccaagtgatattcttgagtggcattatgtgttggagggaagtgaaggaacactttnggggggattnacttgggaaaac

SEQ ID NO: 4767 - DNA, 238 bp, Glycine max
  Clone ID: 701043296H1
gaaagttcatccaatctccgaagcccttcaccgcattgcaaccatgtcgagaagaaaggttagagagccaaaagaagaaaacgtgactctgggcccagctgttagagatggcgaacatgtctttggcgtcgctcgcatctttgcctccttcaatgataccttcattcatgtcactgatctgtccgggagggaaacacttgtacgcatcacaggtggaatgaaggttaaggctgacagg

SEQ ID NO: 4768 - DNA, 279 bp, Glycine max
  unsure (1)..(279): unsure at all n locations; Clone ID: 701043301H1
tccccatctcagaaacaaacagaaccaaaccaccaccaccattataatacactccctgcaaaccctagaaacccaataatttgggggaacctcaacccaatcccagaaaccaaaatcggcctcgcaatttaacgaaaccgaggaagagaaatctgggcacccttcaaaattcgagatttccccgacaaaatgtcccaactgaagccatgtcgcatatgacagtggcccttcgacccccagggaanttcaattggaaaattngggttttnncgngngggg

SEQ ID NO: 4769 - DNA, 275 bp, Glycine max
  unsure (1)..(275): unsure at all n locations; Clone ID: 701043302H1
gttggggtttgttttgtggcccatgatataactgctcagaagaatgtcatggacaaatttacgcgtattgaaggtgattacaaggcaattgtacagaaccgcaatccattaatccctcctatatttggcacagatgaatttggctggtgtgtgagtggaatccagctatgacgaagttaactggatngaancgagaggaggtgntnnaaaancttttggggnanntttntnggccccatanggctgcttgtcgcctaaagaatcaagaagctttg

SEQ ID NO: 4770 - DNA, 278 bp, Glycine max
  unsure (1)..(278): unsure at all n locations; Clone ID: 701043303H1
gtggtgaacaggctcccgaggcagagtatgaggaagtcaagaaatgacatttaggcgtggttttgtagcatttgtttcttattaatcatcacataattgcaagaatacaaggttacttcttttgtatctaatgttgaaaaccattttttgctggaaggctctttaatttgtagcacttttggagtccaaagttccgaacaananaanngngaanganananaaaaaanggggggncnncccnctaggggcccccnncnccnggnantttntnnnnggc

SEQ ID NO: 4771 - DNA, 276 bp, Glycine max
  unsure (1)..(276): unsure at all n locations; Clone ID: 701043305H1
gataaatataaacattacaagangctatggaaaccaactcagtttccaagcttctgttgcttgtcttcagtgttctctttgttggttctgagttgatccattgcagtgtcacctatgataggaaggccattntcatcaatggccaaagggaatcctcatctctggctccattcactaccccagaagcacccctgaaatgtgggaggatctaattcggaaggcaaaagacggaggccttgatgtcatcgacacttatgtcttttggaatgttcatga

SEQ ID NO: 4772 - DNA, 277 bp, Glycine max
  Clone ID: 701043306H1
tttgtttccaaggttgctctgggaatccgaggttctaaactctgcaactaactttaatggcaactgggcaagtcattaataaacctccttcacttcctccgtaccctgagatgattcgggaggcaattgaagcactgaatgaagagaatgttcgaataaatcatcaatttcgaagtacatcgaatccacctatggtggattgcctcaggcccacaaggttttgctcaatgtgcacctcgcgaaaatgagggaaagtggagtgctagtgttttggaag

SEQ ID NO: 4773 - DNA, 280 bp, Glycine max
  Clone ID: 701043307H1
accgcccccaaaatctcactcttctgccttctcttttctcttctcttcttcctccaaaacaagtaaacaaacaacactctcacattcaccacaacacaaacacaaacacaaacaaagacaacaaccttgtttgtctgcaatcaaaacctttaagctggcgttcgagaaccaagacacccctgtccgagaaatcaagcccaagaaccggagaatcatgggtgctggaggccctgatgacgaggacaataggtggccaccatggctgaaacctcttctcaaa

SEQ ID NO: 4774 - DNA, 278 bp, Glycine max
  Clone ID: 701043308H1
gaggaggcactgtggcagaagtcttaggagtgtaaaacagagacgcaaaatgaagacgattctatcgtccgagaccatgaatattcccgacggcgtgagcatcaaggttcacgctaaggttatcgaggttgagggccctcgtggaaaactgtgcgagacttccaccatctgaacttggacttccaacttattaccgacgatggcggtaaaaggaagctcaagattgattcttggtttggttctcgtaaaacctccgccgccatccgcacgccctcagc

SEQ ID NO: 4775 - DNA, 277 bp, Glycine max
  Clone ID: 701043309H1
caaacttcaacaacaatttgatagctacgtgtcccaatgccgagtcccccaacaccgttaatttggacgtgagaacccccgtgaagttcgacaacatgtattacatcaacctcttgaaccgccaaggagtgttcacttctgaccaggactcgcgggcagccccaaaaccaaggaaatcgtgaaccagttcgcttcagaccagaaactgttttttaagaaattttccgatgcttttgtgaaggtgagccagctagatgtgataacggatcgtattggg

SEQ ID NO: 4776 - DNA, 275 bp, Glycine max
  Clone ID: 701043310H1
cacaaaccttcttccaagtgttcttcccattattctacattgtcctctctttggttctctattatttattaattgtgcactccttttggttctctaatatttatttccaccgttttcttaaaacaaaagcctcttcaaattctccaacactaataaccaaaatggccactgaaaagcttagaagttgtgcaaacttccttgagaactctaaaccctactttgccatgattgctatacaatttggctatgcaggcatgaacattatcataagattt

SEQ ID NO: 4777 - DNA, 276 bp, Glycine max
  unsure (1)..(276): unsure at all n locations; Clone ID: 701043311H1
attttctctactgataatngggaagatttctttaataatcttcccagtcctaaagctgataccccagtatctacttctgccggcaactttgctgttgtggaaaatgccaatggttcagaganaatccaagatgatgtggaagtggagggagcagtgatccttcatttgacgacagtgttcagcatgctttagttgttggggactacaagggggcagttatgcaatgcatttctgcaaataaatgggctgatgcattagttattgctcatgttggga

SEQ ID NO: 4778 - DNA, 278 bp, Glycine max
  unsure (1)..(278): unsure at all n locations; Clone ID: 701043312H1
ctctcttcacaaacggtgccggaaaagtccattctttttctcaattccccggcaaaacaaatgcgacccactttctagaacctcgccgtgtgccggaaagttcactcctttctcacttttccgcagcaatgtcaatcttcgacggagcttcatgaacacgcaactctnccaagcacacttcgatcttcggcctccgtctctgggtcgtgatcggaattctcatcggagtcttcatcgtcttcaaggtcttctcctctccctctgccttgtctctcggc

SEQ ID NO: 4779 - DNA, 277 bp, Glycine max
  Clone ID: 701043313H1
gaattcagagaaggtcctgctctaccagttcttgatgaaatgattaaagatgagaagaaccatggaagctatgacttcatctttgttgatgcggacaaggacaactacctcaactaccacaagaggttgatagagcttgtaaaagttggggcgtgatcgggtacgacaacaccctatggaacggatctgtggtggcaccccctgatgctcctcttaggaagtatgttaggtatacagggacttcgtgctggagctcaacaaagccctcgctgtggac

SEQ ID NO: 4780 - DNA, 279 bp, Glycine max
  Clone ID: 701043314H1
ggtgtctcatcatacaaggtttcctgggtgccagatcccgtcaccggttactacaaaccggaaaacatcaaggaggttgatgttgccgatttgcgtgctacccttctccgcaaaaaattcaacaactaatttcaacaattttaattttttccaaaccttgggtgattgattcgttatggaattaattttgatactcatatgctctgcccaccttcattatacgattgctatagttttacaagtcagtagaataactattagcagctaataagaatgtaa

SEQ ID NO: 4781 - DNA, 278 bp, Glycine max
  unsure (1)..(278): unsure at all n locations; Clone ID: 701043315H1
ccttgatataggaatggctcaaatgtaaagggatattatgtatggtctttgttcgacaattttgaatggtcttccggttttacatcaagatttggaatgatttatgtagattacaaaaatgatttgaagagatacaaganattctctgcatatggtttgagaattttctgaagaaagaaaccaaactatatggttctagcaaatagtattatgaaatttgtttacaaaatagttatatatatttgtaaataattatttgatttgtatttggtcattct

SEQ ID NO: 4782 - DNA, 125 bp, Glycine max
  unsure (1)..(125): unsure at all n locations; Clone ID: 701043317H1
gggctgaggtaaaggangatcttaccagctgaggaggcatactgaaagtaagaagcataaacttgcagagttggggaatgccttgcttacagatccagagtccaatattaaatttctgaaggaga

SEQ ID NO: 4783 - DNA, 277 bp, Glycine max
  unsure (1)..(277): unsure at all n locations; Clone ID: 701043318H1
cctcaatccaactatgcttccttacattatcttacatcctttctaatccaagttatccatttgttcgtctgtntcgtggaagtgggttggttcataattccttcgctctctgagatcgtggagaatctcgtaatttgaagctaccaccattgccaaagttgagatttttacgcacctaagagtaatgcaagancttttangaaagattaggtnctgggtatcntgtattccanctccatnaganagttggggaggaaaggatntggccgtcgctagc

SEQ ID NO: 4784 - DNA, 277 bp, Glycine max
  unsure (1)..(277): unsure at all n locations; Clone ID: 701043319H1
accggaatcagaggctccccctaacttctggggccacaccccggaagaagaatactacacctncccaaggcgttcgcaacaccaagtcccacttcgaaacccccaacggcaaaatcttcacccagtccntcctccctctcaacctccaacccaccaagtcaaagccaccgtctttatgacccacggctacggctccgacaccggctggctcttccagaaaatctgcatcaacttcgccacctggggctacgccgtcttcgccgccgacctcctcggc

SEQ ID NO: 4785 - DNA, 274 bp, Glycine max
  Clone ID: 701043320H1
gaggaagtaagaaaacacaacacgaatttcattgcagagtgttattttgagtatcagcatcaatggctccaattgcagtgggaaacgtgattccagacggcattttggcttacttggatgaagaaaacaaaccccaaactgtctccatcactctctcgccaccggcaagaaagtcatcatctttggggttcccggtgccttcactcctacttgcagcttgaagcacgttcctggcttcattgagagagcagaagagctgaaagggaagggtgtg

SEQ ID NO: 4786 - DNA, 274 bp, Glycine max
  Clone ID: 701043321H1
ttggtgcggaagcagtgtatgctggagctaacttccgtacccctgttgagccctactaaagttttcaagtggaaaaaacctggagatccccacgagtttgagcaatgagatttggatgcgcggttttagttgtgatcaataagtcgaagttagaacaatagtcttggtataaggaccttgccaataattttttagttctgattcacagagctaagacagttccgtcttagactttaaaagttttgatatttagctttaatacttgaagtttact

SEQ ID NO: 4787 - DNA, 241 bp, Glycine max
  Clone ID: 701043322H1
caccatgtcacttgctgggaaaatcaccactgaaatcggggttcatgcaaccgctacaaagtggttcaacctcttcgcaacacaactccatcatgttcaaaacctaactgataagtgcatggaaccaagctgcatcaaggtgaagactggcatcacaacgagacagtcaagcactggacttataccatagatggtaaggttacaacatgtctggagagtattgaatccattgatgaacaga

SEQ ID NO: 4788 - DNA, 278 bp, Glycine max
  unsure (1)..(278): unsure at all n locations; Clone ID: 701043323H1
cgattgctagaatggaatttcgatgctcagtcatctcttttaccattctcttctctcttgctcttgcaggagagagccatgtccatgcatcgctacctgaggaagattattgggaagctgtttggccaaacactcccattcccactgcctgcgagagcttctaaagcctctccctgcaggtgttgacnctcgatgaactccctaagcaaattgatgatacacagtacccaaaaacattcttctataaagaagaccttcatccaggcaaaacaatgaaa

SEQ ID NO: 4789 - DNA, 281 bp, Glycine max
  unsure (1)..(281): unsure at all n locations; Clone ID: 701043324H1
ctacaaatcccctccaccaccaacgtcgcatcctccaccttaccncctatgtgagccctccaccaccttctccatctcctcctccaccataccattacacatcaccacctcctccttccccagctcccgctcccaagtacatttacaaatccctccacctccagtttacatatatgcttccccacctccacctatctacaagtaagtncganttgcggaagcaccattcacgataaatcatgttctagtttttatcgnggaataaaggcaagctctatttg

SEQ ID NO: 4790 - DNA, 273 bp, Glycine max
  Clone ID: 701043326H1
gctgtggctgggataatgtctgatgcgaacatcctaatcaataccgctagggtccaagcacaacgctacacatacgcctatcaagagcccatgccagttgagcagttagttcagtctctctgtgataccaagcaaggttacacccattcggtggtcttcggccatttggagtctcgtttctgtttgcgggatgggacaaaaactttggctttcaactttacatgagtgaccctagtggaaattacggtggctggaaagctggagccattgggg

SEQ ID NO: 4791 - DNA, 274 bp, Glycine max
  unsure (1)..(274): unsure at all n locations; Clone ID: 701043327H1
ggtgtctccatgttggatctctctcatttcttcttcaacttagtgttctccttcaacactctaactctaagtcacttttgtcttctccttcactctcttcaactcaaacctcacatgggttatggtgttgtgttgttattagcttgactcactcccaacgtctcttttctctttgttttgattgcaatattgtaacgctcgcattccatttattgcttcctttgacttggcttccttcctttgcaagagtttttntttttccttcncttctctc

SEQ ID NO: 4792 - DNA, 280 bp, Glycine max
  unsure (1)..(280): unsure at all n locations; Clone ID: 701043328H1
caacagtagcagaaccgaacccatagcccaaaacatcatcaaactncatcagcaatctctgcttctccgtctttgtcttctctgtcttaatcttcaccgtcatagccataacctaccatcccccagacccatggctcgagtccacccctgccctaaccaacctcttcacccaatcacaaaatgccactttccgaatcgactcctccgtcctcaaaaccggcgaagacctcgctccctcgccgcaagaccctcccctcccgtcgccgccaccctccgcctc

SEQ ID NO: 4793 - DNA, 278 bp, Glycine max
  unsure (1)..(278): unsure at all n locations; Clone ID: 701043331H1
ctcccctcgcaaggnactcaaggtcaccttccccatggaaagctcagtcgagatcgagatctaggtcaaggtcgagatctaggtcgaggtctaggcctagacaaaggccaagatcgcgttctagaagtcgtggcaggtcaaggtcaccattcgtggaaggtcaaggtcaccaattcatggaaggtctgaacctacaaatcctggtgacacactttatgtaactggtctatcttcgagggtcaccgaaagagacctagaggagcatttctccaaggaag

SEQ ID NO: 4794 - DNA, 281 bp, Glycine max
  unsure (1)..(281): unsure at all n locations; Clone ID: 701043332H1
ttcttcncaaccactactactcactcactgcagatctcaattgcatcgctgtccatggctaccatcgttagcatcaaggcccgccagatcttcgacagtccgtggcaatccaactgtcgaggtggatttgacttgctccgatggtacttttccagagctgctgttccaagtggtgcatccactgggatttatgaggcccttgaattgagagatggaggatctgactaccttggaaagggtgtatcanaggctgttgacaatgtgaacaccgtcattggccc

SEQ ID NO: 4795 - DNA, 262 bp, Glycine max
  unsure (1)..(262): unsure at all n locations; Clone ID: 701043333H1
ctttccaaactctcttcttcccttccaagacccttttgaagcaaccgatggantttcagtttcttcccagattctaccttcttgtttccttatccattctgttccttgcaccctttcacgctcaagctaaaattaaaggacttactgcgataagaaggcagactatgctgtgaaggtgtctgngtgananattncnccaanccngtggagaggnccnggggttctngatatcnccacattctggngaanncnttntgggggg

SEQ ID NO: 4796 - DNA, 276 bp, Glycine max
  unsure (1)..(276): unsure at all n locations; Clone ID: 701043334H1
gcaanaaggaagtgttgtnggaggaaagaggcagagctggcaatgcaccagagtggaagcgcgaaacggtcctccccggctttccattttttctcttcngntgaaattttagntcatcccagttgctgattganattgaatttaaattgnaaaagcgtacttgtgccactgtacttttacngatcgcnggtagaggggctagcctatcgnatntntgcgtagatctantgtccgtgangcgttaccatttcaccantnncnacnatnnancnnttt

SEQ ID NO: 4797 - DNA, 271 bp, Glycine max
  Clone ID: 701043335H1
cgatcagatcctcttcagattcggatcaccgccgagtccatgagcacgccagcgctttcagggggcacgggcctcttctctggattcacgcgtttatgcaagggccttgcggtggtgcttgtttgcggtcacattgcggttcagttatcccttcagctgttaactatcttgctcttattcccgccaggacaatcccatttgcctggaatctcattacagctggatatgttgaacaatctatatatggggtagtggtcagcacattaagtct

SEQ ID NO: 4798 - DNA, 271 bp, Glycine max
  Clone ID: 701043336H1
ctggtgtgcctgctgttgttcagtttgttctcatgctcttcctccctgaatccccaagatggctttttgtcaagaataggaaaaatgaagccgttgatgtgctttctaagatctttgacgttgctcgcttagaagacgaagtcgatttcctcactgctcaatccgagcaagagcgccaaagaaggtcaaatatcaaattctgggatgtttttagatccaaagaaatcagactggcattcctcgtcggtgccggacttctggctttcagcag

SEQ ID NO: 4799 - DNA, 270 bp, Glycine max
  unsure (1)..(270): unsure at all n locations; Clone ID: 701043337H1
gtttcgttccgtttcaatggggagcgaagagcagaacggcgaattctacctgcgttactacgtcggtcacaagggcaagtttggtcacgagttcctggagttcgagttccgcccagacggcaagctccgctacgccaacaactccactacaaaaacgacaccatcatccgcaaggaggtttacctaacccccgccgttctccgcgagtgccgtcgcatcatcgccgagagcgagattatgaaggaagtgataacaatgggccgaacggnt

SEQ ID NO: 4800 - DNA, 97 bp, Glycine max
  unsure (1)..(97): unsure at all n locations; Clone ID: 701043338H1
cagaaagannagtaagtnnagagnaggagcatggcagttgttganagaanggngggaattgatattcaggtccgaaagcctttccggatattctaca

SEQ ID NO: 4801 - DNA, 274 bp, Glycine max
  unsure (1)..(274): unsure at all n locations; Clone ID: 701043340H1
gttttattcttctctccctccttcattttcatttacttctctggaggtatataactattattcttttnttnttttnaaacataaaaattgtnnaaatctttnnccangggaacccannttttgnggcctcaggactgtttcgnagangaatcangtctccncccgctnacttttcccggcggaggagtnccggnaactacngnaattattattaccacngcaaccatgtngccanttccaggncgngccggaagccggttgcccgacccgataa

SEQ ID NO: 4802 - DNA, 273 bp, Glycine max
  unsure (1)..(273): unsure at all n locations; Clone ID: 701043341H1
ggcgtcatcaagtgttagggaggacaaataccgcccctttatgcgcgaagacagtgagaagaacatcaaatggagatatggtgctcctccaaattatgacgttgtcaacaaattatttgatgaaggcagaaccaaggtatggccccgggttcacttgaagaaaaggtgcagactttagtgaagaattgggagatggaaatgttccacaaggaggatttcaaggntaacagntcagtggacccagagaaatacactttcagcctaaacggaagg

SEQ ID NO: 4803 - DNA, 271 bp, Glycine max
  unsure (1)..(271): unsure at all n locations; Clone ID: 701043342H1
atttgtaaacacacactatcaaagcaaatggggtgctcattctccgggttgaacgcactttacgactccgtgaacggcggaggtgatgtttggatcaacgagaaccgtttccgcatcgtgcgccagtcggagaaggtggcttccctacgtctacctcgtcaaggaggctcccgacgactccgccgccgctggcctcgccaagaagctcaaaggctcctctcatctctccgatgatggnattatgctatgaaaaaggtcctcattcagaaca

SEQ ID NO: 4804 - DNA, 272 bp, Glycine max
  Clone ID: 701043343H1
gaaaatctcattccaccaagtaagaggagctggatacctatggagtatgcccctcaagaaagcaaacttctgacacgtcaagtgatgacccgagacatcatagaattttttgtcagaaacatggtaaatgaacatttgggtgcatctgcaatgcacatgtggtacatgctgattccagtgactatggtgccttggatgaaaaatgcatacacttggccgagctagcagccactgctgtcgattttccaaagaccgggaagcttgtcactatg

SEQ ID NO: 4805 - DNA, 272 bp, Glycine max
  unsure (1)..(272): unsure at all n locations; Clone ID: 701043344H1
gaacgggttttgaagaagaagcagttcaattgatcaactcagatttcagggacctaagtctagctgctaatagactcgcccatcatgccatcaaacttggtggcattggctttggagcctctntntncggattgtctgctgccatgctgctatttatctgttgattnnggatcgtacaanctggaaaacaaatatnctcacagcactactcatnccatacatntncttcagcttgccttcantaatttncgacgtcttcaggggagagcttg

SEQ ID NO: 4806 - DNA, 275 bp, Glycine max
  Clone ID: 701043345H1
catgaaatccctccttggcctttcttccttctttggttctggttcttgctctgtgtcctgctgttttctgctcttattcgtaacacttcggctattctgttcgtcgcttagacgagtctcacagatggggagagatggaaatgggaacacaacgatcgctttcactccattcaccagtacgagaccgatgatctgaccggtgcggttcataaccctcgatcttgtcgagaatgggtggttttgtttactctgacgttgatgctgcttataagtgt

SEQ ID NO: 4807 - DNA, 121 bp, Glycine max
  unsure (1)..(121): unsure at all n locations; Clone ID: 701043346H1
tcaccagaagttggtggaccttctattagctgaaagaattctaacatttttntnccatgatagataatttgttattgtttaccctttccaagctattatgatagtattttccctntgtaac

SEQ ID NO: 4808 - DNA, 274 bp, Glycine max
  unsure (1)..(274): unsure at all n locations; Clone ID: 701043347H1
gctcaagtgatctcaatgtgggaacctgaataaaattattttatatactgtaatataattaataatcccagaatatttttntcgtaatanttcaaggagagtcaatgaattggccttcctagttcaacaattttgtatttgacgttgtggaccatcctacatttttacatcttcagtatttttctactatctttagtgtatattatgtatatatntttatacattatctttagtatattaattaattaatctattaagtacgttttgttttatg

SEQ ID NO: 4809 - DNA, 275 bp, Glycine max
  Clone ID: 701043348H1
gaagaaataaaagtgaagttctaattggtgttattgagcagatagcatggagccacagtgtagaatcaagaaggatgccactgaattgatagggaataccccaatggtatatctgaacaacattgtggatgggtgtgtagcccgtatgctgctaaattggagtacatgcaagcgtgctgtagtgtcaaagataggattgcttgagcatgattgaagatgctgagaaaaaaggccttattacacctggaaagactgttctggttgagtatacaagt

SEQ ID NO: 4810 - DNA, 273 bp, Glycine max
  unsure (1)..(273): unsure at all n locations; Clone ID: 701043350H1
aatttccctaggggcttaatatctcccctcacttgtgcctagccttatgtcatagtattatcattcattctcatcttnctctcttctctctccacncaaaccctaactcccgaccctgttcccctctcgtatccgtcatgaaagaggaaagtccaagaccgaatctaagagagccgatcccaaaacttggcgtgaataagaagggagccgccaccanggtaggaaacccgccggcaaggggaaggcagcgaaagaccctaacaagccaaagag

SEQ ID NO: 4811 - DNA, 271 bp, Glycine max
  Clone ID: 701043351H1
attccaatatattccattctctctgtgtatttccctacctctcccttcaagatgcagatcttcgtcaagaccctcaccggcaagaccatcacccttgaggtggaaagctctgacaccatcgacaacgtcaaggccaagatccagacaaggaaggaatccccccggaccagcaacgtctcattttcgccggaaagcaacttgaggacggccgtacccttgctgactacaacattcagaaggagagtactcttcacctcgtcctccgtctccg

SEQ ID NO: 4812 - DNA, 268 bp, Glycine max
  unsure (1)..(268): unsure at all n locations; Clone ID: 701043352H1
gcggcggaagctccttcccacgtgctcactgggtaggtgtcaaattttgtcaatcggaaacacccggcgccggaaaagcagtgaaagtgtcggagccgatgaagaaaagtcgccgaggaccacgctcgcgtagttcacagtatgaggagttactttctacagaagaactggtagatgggaatctcatatatgggattgtggaaagcaagtgtatttgggtggattgacacagcacatgcngctgctcgtgcgtatgatagagcagcta

SEQ ID NO: 4813 - DNA, 271 bp, Glycine max
  unsure (1)..(271): unsure at all n locations; Clone ID: 701043353H1
cttcgtctcaaacttcttcgttccttcgattcattccatttcttccaaaatggccaaagacccagttcgcgttctcgtcactggagccgcagggcaaattggatatgctcttgtccctatgattgctaggggagtgatgctggtcctgaccagcccgtgatcctccacatgcttgacattcctccagcagcagagtcgttgaatggggttaaaatggaattggtggatgctgcattccctcttcttaaaggtgttgttgctacaaccgntg

SEQ ID NO: 4814 - DNA, 172 bp, Glycine max
  unsure (1)..(172): unsure at all n locations; Clone ID: 701043354H1
gtcattgatctggcttcatganacacaattacaagatggaaatcagaacttaaacaaattaatttctttgatttgcagcaggggaacaacaaaattaatttgtttaagttctgatttccatcttgtaattgtgtttcataaattcattgatctggcttcatgtttgtngcac

SEQ ID NO: 4815 - DNA, 271 bp, Glycine max
  unsure (1)..(271): unsure at all n locations; Clone ID: 701043355H1
gtctagaatgcctctattctcctctgtcggtcacacacagcgatagatagataatagagaagagaagcattcataggcgccaattgtgagtgagacagaagtttctgttttttctacttttccatttttttgggagagagagnggagagatctgattcttcaccataactgtcattgctttgcttctctcactcagcacaagttgacaagaagggcattgccatttcaatcccatacaaaaagcacacaccccaattcaccaccatttcct

SEQ ID NO: 4816 - DNA, 272 bp, Glycine max
  Clone ID: 701043356H1
cgtgtcttcccccaacgaaaccaacgaggaagcaagggggatcttgaattctgcgcttaacgcttcgaatctttgaattcattcaaagatctccctctacgcatatcagggcactatggctgccacggtgaaacaaatgtctttgtcgtgtcactgttgggtgtggtgtccttcattttgggagttgttgctgaaaacaagaagcctgtggctggaacacccgtgcctggttcggatggtatctctgtcacctgcaagtacccagccgatcc

SEQ ID NO: 4817 - DNA, 267 bp, Glycine max
  unsure (1)..(267): unsure at all n locations; Clone ID: 701043357H1
tctgggctcccgtggttggtactgtggaaacattccttgggaggccatggaaggagtactcaaggactgtttatatgcagtctttcatggatagtttgatagctccgggctggttggcatgaatggaatgggaatttttcactggcacctgtactacgcagagtatgataacacaggtcctggttcaaacactnccnaacgggtcaatgggnctggctatcatgtnatgatgnacngatgcagcnaatttacngtctccaattctgg

SEQ ID NO: 4818 - DNA, 268 bp, Glycine max
  unsure (1)..(268): unsure at all n locations; Clone ID: 701043358H1
gcaactcttagtgcaggtgagaggcgtcacgatgatagcccagatcacaccatatttgttggagacctggctgccgatgttacggattatcttcttcaagagacatttcgggcacgatatccctcaattaagggggccaaagtgtaattgataggctaactggacggacaaagggttatggttttgttaggtttggagatgagagtgaacaggttagagctatgactganatgcaaggggttcttgttcaacaaggcccatgcgaatt

SEQ ID NO: 4819 - DNA, 270 bp, Glycine max
  unsure (1)..(270): unsure at all n locations; Clone ID: 701043360H1
gtttcttcttggtggatccattcagatctcatccacgatgtgttgcatttgtntttcacgatgctgaacccgaagcngcggttcttctaatcanangacgactcattccgnanacttnacactctcgtcaacaatggccgatgtgccggagccacagtgantcccnctatcggtnannccaacgntgcgcagaagnatgtgttcgatttgggagcgtttgttggagacctaactttggaagatgatccaagcagcgatgatatatcatgg

SEQ ID NO: 4820 - DNA, 272 bp, Glycine max
  unsure (1)..(272): unsure at all n locations; Clone ID: 701043361H1
gttccttccattcctttcttccggatcacagggaaaataaaaaacaatggagttggacttgacaccaaagacagcagaagtgttgtttgagggagatggtggaggttactacacttggtggagttctaaagtgccactgctggcaagaccaatgttggtgctggtcggttagtgcttcagcctcagggctttgctattcctcattattcagatatatccaaagtaggttatgtgcttcaagggaacgatggcgtantgggatggccctccgc

SEQ ID NO: 4821 - DNA, 248 bp, Glycine max
  unsure (1)..(248): unsure at all n locations; Clone ID: 701043362H1
ttaaaaacttgcctgttcagcagcagttaccaaatgtcatctctcctatgtctaagtntgcntgggaggagattgagactgggtacctgatgcaatctcctcccatgcaagccctagcttacattgtcagcagcagagctttcctgaacctatgaggaatcatatttccggttctgatgtttcccctatccagagtctactagggtcattctcccaggatggaacatcccagttacttaacntgngtg

SEQ ID NO: 4822 - DNA, 273 bp, Glycine max
  Clone ID: 701043363H1
atagtttaacagcaaatagaacccttgcgaatcaaaaccttcctgctcctttcttcaacctcactcaacttaaagctgcctttgctgttcaaggccttgacactaccgatcttgttgcactctcaggagctcattcatttggcaagttcgctgcttattcattcttgaccgattgtacaatttcagtggtactggcagacccgatccaactcttgacacaacttacttaaaacaattgcgccaaatatgcccccaaggtgggccccctaacaa

SEQ ID NO: 4823 - DNA, 275 bp, Glycine max
  unsure (1)..(275): unsure at all n locations; Clone ID: 701043364H1
gctaatttctctcgttgtcatattctagtttcaacttatggagtttacctctaataatatgcttccttttgtttcaatgttttggcttgtgttcctaagtcctttagtgaactgtcaactttattataatttctatgactcanctgtccaaacctgaccggaattgttcgatccaacgtgtggtcagctatggccaaggatgcaagaattgctgcttctctcttgcgccttcatttccatgattgtnttgtcattggatgtgatgcatctgtgct

SEQ ID NO: 4824 - DNA, 138 bp, Glycine max
  unsure (1)..(138): unsure at all n locations; Clone ID: 701043365H1
tctttttccttcaagtcactaagataatggcaagcatttataacattccatcacacataaaagcnntgggtctnttatgaatatggaaacatagaagagattctcaaatttgaatctaacatacccataccagacatc

SEQ ID NO: 4825 - DNA, 199 bp, Glycine max
  unsure (1)..(199): unsure at all n locations; Clone ID: 701043367H1
acancaagactagtngntcanaatnaaaagtcnaatgagacaagcacatggnttggtgaacntanagaagttcatgcaacaactncgaggtngncnccataggggcaaagtnatngcatctacagtngatcctgatgtncagcctccaatggatgctgnggngtatnctgagtgtnaagctgtngtanaggactttcct

SEQ ID NO: 4826 - DNA, 267 bp, Glycine max
  unsure (1)..(267): unsure at all n locations; Clone ID: 701043368H1
gaaaatcactgttaaataaacctaatctttgtttagcttgttttgcaccttgatgaatggagcctgcaaccgagaagagagaggattttgggaagttgcagtacggatgcgagcactataagagacgatgcaaaattcgacaccatgctgcaatcagatttttccatgtcgtcactgccacaacgacgccgcgaactcntctagcaaccccgcagatcgtcatgaacttgttagacgcgntgttaagcnagttatatgctctgtctg

SEQ ID NO: 4827 - DNA, 266 bp, Glycine max
  Clone ID: 701043369H1
ttttcctccatttccttcttcgctagattacccagatctacgacgagtctctgctatgaattaattctcatatctcaaaatcattcaccgttttcatttcattctaactaatctttccagaaccctcgaatctcttctttcaacgtgcaaagatttttgacttgaccgaatgctgttgcggttgaaatcggtgtgagaaatagggtttcgacgatgccttcgcttccctttggactccttctacgccattggtcccttcctggccc

SEQ ID NO: 4828 - DNA, 268 bp, Glycine max
  unsure (1)..(268): unsure at all n locations; Clone ID: 701043370H1
atccctagctctgtcgttccgtcgttgacgatggcgtttcgggtgcgaancctgacctgcctctctctctttcttctctctctcttgtccatcgcttccgccaatgtcttcttcgaagagcgtttcgatgacgggtgggaaatcgatgggttaaatcagattggaaaaaagatgagaacgtggctggggagtggaaccacacctctggtcaatggaatggagacgctaatgacaaaggtattcaaaccagtgaggattacagattcta

SEQ ID NO: 4829 - DNA, 270 bp, Glycine max
  unsure (1)..(270): unsure at all n locations; Clone ID: 701043372H1
gcttattgcagattaattctatgttgcaatagttcttctagagttacagangcaatccgctctcgatgtctcaatgtgcgaataaatgcaccaagtgaagaacagattgttgaagttttagaattcattggtaagaaggaaggctgcaacttcctcctggttttgctgctcgcattgtggagaaatcaaatcgaaatttaaggagggccatattgtcatttgagacttgtcgtgtccaacagtatcctttcactaacaaacaaacaattc

SEQ ID NO: 4830 - DNA, 265 bp, Glycine max
  unsure (1)..(265): unsure at all n locations; Clone ID: 701043373H1
cttcaattcattctagttctggattccgactagccgcgttgactcngttccgtttttcattctcgcggatctaatatnaaggaatagcttaagggcacattacaatgaaggcattgattctggttgggggatttggaacaggctgaggccactgacactcagtttccctaagcctcttgttgattttgctaacaagcctatgattttgcatcagatagaagcccttaaggccattggagtgactgaggtagtgctagccatcatt

SEQ ID NO: 4831 - DNA, 264 bp, Glycine max
  unsure (1)..(264): unsure at all n locations; Clone ID: 701043374H1
gcatattttgatgagtacgattatcgggtgaaacttctacagaaaaagcaatggagagaggagttgagaaggatgagagagatgaagaaaaaaggtaacacaaaagaaaatgactatggttacatggaagaagatgatcaagagaatggaagtccagcagcagtgccagttccttgcctgatatggccatgccaccatccttgacgtgacaatccagcctatagataccggttcttagngccacttcacanttctgacaaggcc

SEQ ID NO: 4832 - DNA, 269 bp, Glycine max
  Clone ID: 701043376H1
ctgcaatttcagttgagtgggccatggctgagttgataagaaacccaagggtgcaacaaaaggtccaagaggagctagacagggtaattgggcttgaaagggtgatgactgaagcagacttctcaaatctcccttacctaaatgtgtgaccaaagaagcaatgaggcttcacccaccaaccccactaatgctcccacaccgtgccaatgccaatgtcaaagttggaggctatgacattcccaaagggtccaatgtgcatgtgaatgtgt

SEQ ID NO: 4833 - DNA, 272 bp, Glycine max
  Clone ID: 701043377H1
gatgtaataaagcaagaggtttcccaaagtggcagcttatatcaccatggacatgatcaggaatttcaggtttctggggcaccttggtcacatatggtgccaatttcttcttcccctaggtctagtgttgctagcttcagtataataatttattggatttcacttacaacaagacagatcataggaagaaccaactaccagatacatccgagtgtaatagcacagccactgctggagtttacaagaagactaagagccaaccatcttcaagc

SEQ ID NO: 4834 - DNA, 273 bp, Glycine max
  Clone ID: 701043378H1
ggaaaattagcctcacaaaagcaaagatcaaacaaaccaaggacgagaacacgatgttgcttgaacttgcacttggtttattggttttggctctgtttctgcacttgcgtcccacacccactgcaaaatcaaaagcacttcgccatctcccaaacccaccaagcccaaagcctcgtctctcccttcataggacaccttcatctcttaaaagacaaacttctccactacgcactcatcgacctctccaaaaaacatggtcccttattctctctc

SEQ ID NO: 4835 - DNA, 269 bp, Glycine max
  unsure (1)..(269): unsure at all n locations; Clone ID: 701043379H1
cagaaacagtttttccagacaaaagccgtttngccaaatgctgtttgtagtacttctcaaaaacatctttttcttgcaggtatcggaatagcatcatcaccttgtcaagggtaacttctacatcatcctcactaacccctttagacctttccggagtttatcatctacaaatagtgaaatgaactctggagaacgagggttcaagttgatgaaatattcaaatgaggaattcaatgcattctggaaagactgtcattgacgaatgccaa

SEQ ID NO: 4836 - DNA, 240 bp, Glycine max
  unsure (1)..(240): unsure at all n locations; Clone ID: 701043380H1
tttttatggaaaaanatattgtagcaatttcgtcgtagaaacaaaattcccctnttttcggcacgccgttgttgaattnccaatctgtgattttnttcttcttctatttatacgtgataattccaaaaagcctacgcgagagattcatcagcttttcaattattcctcgaattattttgaaggaatcatccaaactgcttganatattcatcatcaacaacctcacgctgttatagatat

SEQ ID NO: 4837 - DNA, 259 bp, Glycine max
  unsure (1)..(259): unsure at all n locations; Clone ID: 701043382H1
ctagacaacctgacatccaccatagttatggtttctctgttgcggaaattggngcctccatcagagtaccgaaagattcttgganctgttgttgtaatagcagcaaatgcggggggtgcatggactcctatggtgatgttacaactactatgctgtggatacatgggcaantatctacagttcaaacntgaaggatttgtttgtaccttnagccgtttctcctagnngttccccnnggntcnaatgtccctnacaagtg

SEQ ID NO: 4838 - DNA, 264 bp, Glycine max
  Clone ID: 701043383H1
ggttgctagtgctacagcaacatttgtgatgatgttttcatcatctctgtcagtggttgaattctaccttctcaagaggttccccattccttatgcattatacctcacctcagtgtctgttttggctggcttctggggcaattctttgtaagaagattgattgcatgccttgggagggcatcaatcattgtattcatcctctcaggtgtcatttttgctagcgccctcaccatgggtgtggttggcattgagaacagcattcaa

SEQ ID NO: 4839 - DNA, 265 bp, Glycine max
  unsure (1)..(265): unsure at all n locations; Clone ID: 701043384H1
tccaattctgctttcatttatgtggacaaacgaaaggnttctgttgaggtacaagctcatttagtggagaatggaattgaaattcgagagtatacagctgtaagctctgatacgacattgcttgcaactgatgagcttattctgtatctaccgccaaggttgctttagctgaaacagaggtccgaaaaattcccaatgaaactgctaagcatgcaaatggtgaacatcaagcagaagaaaatagtaatgacctcatatgggctga

SEQ ID NO: 4840 - DNA, 265 bp, Glycine max
  Clone ID: 701043385H1
cacagttcacacaataataacatcttcattcgtttacccacttttctttacgaccttattccttcgattctgtcttagaatgacgaattcactatctccctgaaaccatgactgtgagggacagtcatcatcattgagcttacccagaactaaaaaagcaatctttatcacatatcacaattcacaaagcttctgtggttgatgggtagaaggggaatccaactgtttgatgagaaaagagatgttttttctcgtctgcaatttg

SEQ ID NO: 4841 - DNA, 266 bp, Glycine max
  Clone ID: 701043386H1
aagtgttctaagagtgagcaacttcaaaacaccatagtgagaaatgacttccaagggtgcaattctcttgtgtctcaatgttctcttcttcactgtggttagttccacatatgttccatgcaacccaccccccaaaactccaaacacccacctgtcccaaagccaccttccccaaagcaagtttcttgccccaaggacactgttaagtttggtgtgtgtgctgatgtgttaggtttgattaacgtgcaatagggaagccaccaaaa

SEQ ID NO: 4842 - DNA, 268 bp, Glycine max
  Clone ID: 701043388H1
ctcaccacctctagtttatgatatcttcatttctctctagttgtttcaagggaagaacaagtgctatttgggaaccacattgaagaagtgagaaagaggaagctccaaaagcataagaaaaataagactgaagatggaaaaagtctaaattactatgtgctacttcttgtacttggtcatttcctttgttcaggttcaagtaggacacagaaggaagcaccagtacatatgaatgtactaaggcataatgaagaaaaacaactaaatt

SEQ ID NO: 4843 - DNA, 265 bp, Glycine max
  Clone ID: 701043390H1
gcaaacataacttgcagtaatggcttcaatgaataaccaaaaagaaattgagctctttgagggccaatctcttctgtacatgcagctatatgggcacctaagacctatgtgtcttaagtgggctgttcaactaggtatccagacataatacagaaccatgccaaacccatttctctttctgacttggtctctactcttcaaattccaccagctaacgctgcttttgtgcagcggttcatgcgcttcttggcacacaatggaatct

SEQ ID NO: 4844 - DNA, 265 bp, Glycine max
  unsure (1)..(265): unsure at all n locations; Clone ID: 701043391H1
ccaattttgcatgtacaagaaactgtcattaatactatccgattttgcagagaaaaaaaatccttgtgcttgttaatcttttgttggaaaatcatgcttctaaatgtaaagcattaaaaatctatcagtgaccaaatcacatggtggtttttatgtttctgaatatattcgcacccgattctgcagctatttgcttttgatacagtaaacaagaacctatccccaaagcctggagagcagtccaaaatcccantcctgcatcttt

SEQ ID NO: 4845 - DNA, 113 bp, Glycine max
  Clone ID: 701043392H1
gactattttcgtatctgaaattttgagaatagcacatttcttctgactttgataaatctttttgctaaggttgaatgtttttcgttttataagtctgagtggtatattttatt

SEQ ID NO: 4846 - DNA, 271 bp, Glycine max
  Clone ID: 701043393H1
atccaatcatttcctgaaagacaaaaacaaaaacaaaataaaaatcgcgttcagacacactcacaattcacacaccaacaccaccaatccccaatctctaacttttcccgagaaaattataatttccattctcttttctcctcagattcccggaaaatatagtattcacaacgttatattttggcaccgccaagctccaattcaatccgtcgtcgttttcgcgaattccgaatgcgtcgacttcgggttggagaatgagttctccgtgctc

SEQ ID NO: 4847 - DNA, 216 bp, Glycine max
  Clone ID: 701043394H1
gaggggatgatggacaagggggtgttggatgatgtgataagaaggcttctggaagggaaaggagggaaacaggtgcaactctctgagcggagatccgtcaactctgcgtcaacgccagacaaatcttcctctctcagccaattcttctcgacctccgtgctcccatccgcatctgcggtgatatacatggtcagtaccaggacttgctgaggcttt

SEQ ID NO: 4848 - DNA, 253 bp, Glycine max
  Clone ID: 701043395H1
ctttaaacctctctctctctcaaattattcgaaatccaaaaaacaaaaacaagtttcttattataaaaaatgaaacaaatagaaatggaaagtaacgcatcagcactagcaaagaaagtttggagcatggtacgtgtggtgtgttcatgcttcgaaaaggcataacaaaggggaagctcatgatggacctcaacatgatgctgaaacgccgcggcaagctcgccggcaaagccattgccaacttaatgtcgtc

SEQ ID NO: 4849 - DNA, 272 bp, Glycine max
  Clone ID: 701043396H1
ctcacacctctccaaaatccgttccccctttctttcaaacccttttttttttcttccaacaaatcagcgatggcgacgacgtcggtggtgccggcgaatcggcggcgtgcggcggcgaaccccgccgaggatatggacttcagacgacggagggcgtgaaggccatcgcgagcttcgaggagatggggatcaaggacgatctgctccgcggaatctaccagtacggcttcgagaagccctcagccattcagcagcgggccgtgactccgatc

SEQ ID NO: 4850 - DNA, 251 bp, Glycine max
  unsure (1)..(251): unsure at all n locations; Clone ID: 701043401H1
atcagaatcgcgtttgggagaagaagagcaaaatcgctgtgaaaatgagcggaacggtgaagaaagttagcgatgtagcattcaaggtgggaaggaacatcgattgggatggaatggcgaanttctggtctccgataggctcgcagggagttctccaatctccgtcgcgctttcgacgaggttaactcccaactccaaaccaagtttagccaggaacctgagcccattgattgggattactatagaaaggg

SEQ ID NO: 4851 - DNA, 240 bp, Glycine max
  unsure (1)..(240): unsure at all n locations; Clone ID: 701043402H1
ctggntnanagcagncattacttnatactcatgtgaacaaatantgntcatcgngaatngtaangttgagtgtcctaatgtgaagtacaccgagactgagattcagtccgtgtacaactacgaaacaccgaacttgttcacgagaacaggaatggcacctatcagtggattgtcaaacccaaatctgtcaaatacgaatttaaaaccaacatccatgttcctaaatnaggggtaatgctt

SEQ ID NO: 4852 - DNA, 226 bp, Glycine max
  unsure (1)..(226): unsure at all n locations; Clone ID: 701043403H1
acacaacatttacattactctcaccactttctccaatatngcttcttctcgaaatgagnnttatgcacttatgctagtggtggtggttggctccatagtggcttcctgtggtgcaacttcaaccaagactttgatctaacttggggtgatcagcgtgctaagatattcaatggtggtcagcttctatctctttccctggacaaagtctctggctctggcttccaat

SEQ ID NO: 4853 - DNA, 211 bp, Glycine max
  Clone ID: 701043404H1
ccccaaaacccaaaaacctttccttttactttttctcaaactgaaacataaaaaatggagggtcttattccttttgtttacaaggctatcatgcaatcaagggcgacaaagagggtcatcctataggatcatggctttgtgagtctccttactcatacatgagacttcctggtgactcgggtaggtttcaaattcaagcaccagctgctgc

SEQ ID NO: 4854 - DNA, 250 bp, Glycine max
  unsure (1)..(250): unsure at all n locations; Clone ID: 701043405H1
tcatcatccgcagctgctgttattcgcaccgcaaacaaacagtgagccatggccgtcggaaagaacaagcgcatctccaaagggaanaagggtggcaagaagaaggcagctgatccctttgccaagaaggattggttgacattaaggccccttctctttttcaagtgaaaaatgttggcaaaaccctcgtctctcgtacgcagggtaccaagattgcttctgaaggacttaaacatagagtgtttgaggt

SEQ ID NO: 4855 - DNA, 214 bp, Glycine max
  unsure (1)..(214): unsure at all n locations; Clone ID: 701043406H1
gggaagccatgagcaccaccgagagtcaaagatataagggcacantgaaatggttcaacgaggagaagggtttcggtttcataactcccgaagatggtggtctgatctcttcgttcactacagtgcgatccaaaccgncggnggcttccgcaccttgtcggagggtcagtcagtacagtccctcgtcactcaggacgacagcgggcgagccgcg

SEQ ID NO: 4856 - DNA, 250 bp, Glycine max
  Clone ID: 701043407H1
gagaaagacaaatggcaacaagcgaagaagtggttgccgcggcgccggaggaagccgcgctggaggcagggctgaagcacaaactggagagaaaatggacgttttggtgcgacaaccaatccaaacccaaacaggggctgcttggggtacctctcttcgcaaggtctacaccttcgacaccgttgaagagttctggtgtttgtatgatcaggtattcaagcccagcaagttgcaaatcaatgcggatttt

SEQ ID NO: 4857 - DNA, 249 bp, Glycine max
  Clone ID: 701043408H1
caggacttggaccagaagaaaacctaacagagagtggcagttcttataagcctcagatatttaccttccgggagcttgcaacagcaacaaaaaattttagggatgaaacctttattgggcaaggtggatttggcatgtttataaaggcacgatcgggaaaataaatcaggttgtagctgttaaaagacttgatactactggtgtccaaggggagaaagaatttctggtggaagttctcatgctttccct

SEQ ID NO: 4858 - DNA, 241 bp, Glycine max
  Clone ID: 701043409H1
gtgacttcaaaggggtagctatgatcacaaccagtgaccccagtcacggtaaatgtatctttccaggaagtaagaatttaaccaacaagacaaaggaagtggtgaacactactcaatcaagcaatgcaggggataattaaggttcagaacctttagaagcatgaaaataagtgcaatcaacaacattttgcacaattactttgctgctttcaccattttgttgttattcctctgtgaggtg

SEQ ID NO: 4859 - DNA, 238 bp, Glycine max
  unsure (1)..(238): unsure at all n locations; Clone ID: 701043410H1
gacaccacaaagtgtaacttgagtgattagatctgatgagtgcagaaagaagggaggattgttggtgatcgatcatcgatcatcgatcatcgatcatcgatggcgtctgctagccttggaagtggtgggtgggcagttccaggtctgttaatggtggcttcaggggttcttccagttccgtcgattggcttggcagagagatgcttgagangtcttnagagaccacgaggacgttaga

SEQ ID NO: 4860 - DNA, 249 bp, Glycine max
  unsure (1)..(249): unsure at all n locations; Clone ID: 701043411H1
cttcctcgtaaaagataactcccggtccggcgtgcatagccgccgnttgaggcaaaaaaaaaacacaaaacacactgtagctcatcacagccaaacgcggcgtcaacgatgacgagcttctgaaattccaacttcgccttcttctctgtgtatattctttttnatttatnnnnnnnnnnnnnnnnnnnnnnnncggtgaggttagctccatgcctagtcccaagagcagccgcagcggccagatcgaga

SEQ ID NO: 4861 - DNA, 248 bp, Glycine max
  Clone ID: 701043412H1
gttcttggaaacaagtatcaaagcaaattgcttgaagttatagatgccagtgagttgccagaatttctgggaggtacctgcacttgtgaagatcagggaggttgccttagatctgataaaggcccctggaaaaacctgatatattcaagatggttctcactggtggagcatggcggtcaaaacaagttgtaaaagttcttaacaatgaaaggaaggttattgtgtatgccaagccaggatacccgatg

SEQ ID NO: 4862 - DNA, 247 bp, Glycine max
  unsure (1)..(247): unsure at all n locations; Clone ID: 701043414H1
ggtggaggaggaangctggatgagttccaacctcatcccgtcanggancaacttcccggtgttnatnactgtgttaccagctctccttcatggcctnaagggattattcttggctttcancattacctacgttgtncttgggtccattctcatnctttccaccatccttgtccctagcatcggtggtggcaatgtggnaaaggctgaaacaattcagactctacttttgttgcggccattnacncac

SEQ ID NO: 4863 - DNA, 248 bp, Glycine max
  Clone ID: 701043415H1
ggaaaaactttttactgacaccttggctaaaaccatggtggaacctcggcgtcgttgtttcactttacctgctgttgatttaaggaaaaaagcagttggaggcattatatatattcgagtgatttcagcaaataactttctaggagttgctttaagacatgtaggaggcaaccaaatggtacatccaatggttgttcagaggataattttgatgataaggacctacaaacatttgtagaggtagaaat

SEQ ID NO: 4864 - DNA, 251 bp, Glycine max
  Clone ID: 701043416H1
attcaattctgttcatcctttgcttcccaaagaaagagaaaataaaaagcaatgggtagccttgaagcggaaagaacaacagtaggattggcagcaagagacccttcagggattctctccccatacacctacaatctagaaacacaggccctgatgatgtttacataaaagttcactactgtggaatttgccattctgatctccaccagattaaaaatgatcttggcatgtccaatatcccatggtcccag

SEQ ID NO: 4865 - DNA, 246 bp, Glycine max
  unsure (1)..(246): unsure at all n locations; Clone ID: 701043418H1
cttgaatcttcgttatccttctttttttctccttgaactcgaatattcactatggcagatgaggtggttctgctagatttctggccaagtccatttgggatgagggtcaggattgcacttgctgaaaagggttcaaatatgagtccaaagaagaggacttgcagaacaagagccctttgctcctcaaaatgaacccggttcacaaganaatcccggttctcatccacaatggcaaacccatttgtg

SEQ ID NO: 4866 - DNA, 245 bp, Glycine max
  Clone ID: 701043419H1
aaagaataataattttcatctaaaaaaaaaccaccgttgaatttgacagtcccggcgaggcatgttcttgctccgagtccactcagtggaagaggagcaccctctggatccccgaaccatcttccaatcccaaccaacaaccctaaattcagccaacgcagaggcgcgctccacttgttccgaacctcttcccactcctctccctcttctcttctcttcatcctcgccgtccccaactacctctc

SEQ ID NO: 4867 - DNA, 245 bp, Glycine max
  unsure (1)..(245): unsure at all n locations; Clone ID: 701043420H1
gtttgaggaaaagatagctaaggagaacagaggcatgctgattaagggatgggcgccgcagccgttgatcctgaaccaccctgcggtgggaggatttttaacgcactgcgggtggaacgcggtggcggaggcgtcagctccggggttccgatggtgacaatgccggctttcggggaccagtactataacgagaagctgataacggaggtgcacgggttcggggtggaggtnggggcggcggagtc

SEQ ID NO: 4868 - DNA, 249 bp, Glycine max
  unsure (1)..(249): unsure at all n locations; Clone ID: 701043421H1
cnattatnnatcangnnctantngcaggtgggnatganagttcagcagtaanantggantnggcnatcacacagcgattgagaangccagagattttcgagaaggcaacagaggagctagaccacggtaataggagagnnagatgggttgaagagcaggacatngtanatttnccttatgngantgccattgnannggangcaatgaggctgcaccctgtggcaccaatgttggngncaagactagccc

SEQ ID NO: 4869 - DNA, 248 bp, Glycine max
  unsure (1)..(248): unsure at all n locations; Clone ID: 701043422H1
cagagatcttcttcaaggatattnggccatccagtgaagaaatagcaaatgttgtacaatcaagtgtgctgcctgatatgtttagggacacatataatgcaatcacccaagggaatcccatgtggaataatttactgttccaacgggcactctttatgcttgggaccctacatcgacttatattcatgagccaccttattttagagatatgagcatgtctcccccaggctctcatggagtgaaggatg

SEQ ID NO: 4870 - DNA, 244 bp, Glycine max
  Clone ID: 701043423H1
aaaaaacctttttgtggggtcttttcgggaattaaccaacaagcgtgaaaggaagttttagagtgtcattgaaatgtttcactgttcttcgtgttaaagatgcttgcgaagactggatacctgcgtatttggtaattttatagtttattgatatttatatattagagatggagatggtctgaaatatgaggagagctatatttcctctttatgctactgtaatatttttattgttaatttattt

SEQ ID NO: 4871 - DNA, 246 bp, Glycine max
  unsure (1)..(246): unsure at all n locations; Clone ID: 701043424H1
tgtttacacactcaaggngatggaggaggcaacatgttcattcagtgatgagaatctgcttggtaaaggaggatttngcaaagtctaccggggaactttgcggtcaggagaggttgtagcaatcaagaaaatgagttgccagcaattaaagcagcagagggggaacgtgagtttcgtgttgaagttgacatcttgagcagacttgaccacccaaatcttgtttcttgntaggctactgtgcggatg

SEQ ID NO: 4872 - DNA, 249 bp, Glycine max
  unsure (1)..(249): unsure at all n locations; Clone ID: 701043425H1
acccatcaaaccacacacctcacctattagaagtancaaaagaccctccctctcaaaagaataaacaagtataaaaaagaaggcacttccctcaaacagaaactaccctctatctctctcttttcaagccttaaagagtaaaanagagtgaagacaggaaananaggagcaccatttttggtttgaganacataattagcaaganagttcnaatggggcagagagagtntaanggggtggtgttgntnc

SEQ ID NO: 4873 - DNA, 248 bp, Glycine max
  unsure (1)..(248): unsure at all n locations; Clone ID: 701043426H1
gttaggttacctctgtgacatttgtgctgctagttcatatatttnccggctgacaccgagaaggaaagcaggaaaaaaacaaaaaggagcagatgggtagctcaggtttctcatggaaattggcggatcatccaagcttccaaagggtaagactgtggctgttgtggtattggatggttggggagaggccacacccaatgagtacaactgcatccacaaggccgaaacaccctgcatggattcactta

SEQ ID NO: 4874 - DNA, 245 bp, Glycine max
  Clone ID: 701043428H1
gaaaagcgctacaaaagaagcaatctctatccttcacaagttccttgggtcgggtcattatcacactttaaacaaccctaatgaagaagatactacttctaagagaaggaagatatgcacacaagatgctgcgaggaatgtttcgacgagtctcccactgctaactctggagctgatggtaaactttcaagtcctgttaaagcagaggcagagaaagacggaatagctaatctttctttggttaa

SEQ ID NO: 4875 - DNA, 245 bp, Glycine max
  Clone ID: 701043429H1
gtagattttcgtagcaaaataccaataaataaaggcaccaaacaaagatcaaacgcttggaggaaacattcaccatttttctcttttccgttctgttctgttctgctttgcccctcttttctcccaatgactctcaccattctctctctttccaactcctctgagcctcgctcgttaggttctctgtctcttctcggagacccacaaaacaatttcttatttatttccttctcaaacaaagaacc

SEQ ID NO: 4876 - DNA, 244 bp, Glycine max
  Clone ID: 701043430H1
ggaaacaggtgcagctctctgagtccgagatccgtcaactctgcgtcaacgccagacaaatcttcctctctcagccaattcttctcgaccttcgtgctcccatccgcgtctgcggttttacggtccatttaaaaaaccgtggatgtacttcgtgttctagtgtagataagggattttggctgaggggagtgcattttaggatataaaatccaataatgtcccatcttcaatcccttgttcctaa

SEQ ID NO: 4877 - DNA, 248 bp, Glycine max
  Clone ID: 701043431H1
ctcaaccctctaaaaatcacagattctaccttttgatgcaaatgggatcaactcaccaaccctagggtcacataccagcaagattcattcgttcattcatctcaaaccaaaccaccccacttcaattatggcacatttcccacttcccattattacttcagggccttcactttctccattttgttcctcaaaaccctagcttttgacccaattcctctgttttattatgctggctttggaaaagatct

SEQ ID NO: 4878 - DNA, 228 bp, Glycine max
  unsure (1)..(228): unsure at all n locations; Clone ID: 701043433H1
gcattcttctgttatagtcttcanctgcactctccttctacttccttttctccgtcaattngtgcctccgacgatgacgtggcgctgcacgcgaagaagctcatcagagacctaacttgttccccgacgctgacgtcaacatcgttcccgttgctaattgcaccctccaaccccgcaggatcgtcgagaagcgcctgaggttcccgaagctgctagcttcggattccg

SEQ ID NO: 4879 - DNA, 239 bp, Glycine max
  Clone ID: 701043434H1
ttatgaggcagcactaatttatatagcaagctagctaggttgaaaatagtttggttttgtagtaagtgaggtgaggtgccaaaatggtgaagataactcttggtactttcgatgactcttttggtgttgctctctaaggctatttggcagagttccatgcaactctgattttcgtgttcgctggtgttggttcagccatcgcttacaacgagcttacaaaagatgcagcctggatccaa

SEQ ID NO: 4880 - DNA, 241 bp, Glycine max
  unsure (1)..(241): unsure at all n locations; Clone ID: 701043435H1
caagctagctattagttcgattttgtagtaagtgaggtgccaatatggtgaagatagctcttggtactttggatgactcttttagcgctgcctctcttaaggctatttcgcagagttccacgcaactctatttncgtgttcgctggtgttggatcagccatcgcttacaacgagcttacaaaagatgcagccttggatccaacggggctggtggcagtagctgtggcacatgcatttgcac

SEQ ID NO: 4881 - DNA, 243 bp, Glycine max
  unsure (1)..(243): unsure at all n locations; Clone ID: 701043436H1
aaatcaattcagcattagagcccttgtggcatgagcttagctgttgcataagcnagatagaatcctactcagagtctgcatctgagatttcgncatcttctagtacctttgtgtctaaaccatctggtgtatgcctccacttcntgctggctctcaaaatatctnaccatacattgaatctttcttngtggtntgtgaganattgcatcctgctcagccaggtgatagtcatgactcaagtat

SEQ ID NO: 4882 - DNA, 243 bp, Glycine max
  Clone ID: 701043437H1
atatcctcttagatgagaactttgttgctaaagttgccgattttggcctctccaagactggtccttctctcgatcaaacccatgtgagtactgctgttaagggtagttttggttatcttgatcctgaatattcagaaggcaacagcttactgagaaatcagatgtgtattcatttggggtggtgttaatggaagtgttatgcacaaggccagccttgaaccctgtccttccaagggagcaggt

SEQ ID NO: 4883 - DNA, 246 bp, Glycine max
  unsure (1)..(246): unsure at all n locations; Clone ID: 701043438H1
ggaaagagggtactatcaataaaacagcgcnacagatattgttcagaaatttctgtaccaaaanagtaaacactgaatttattgcactggctcaanccccctcttcctttctggctcacatgcacttctttgtcttctttgaagttcatctatccacacatacatatcccnttagcctttattacaagcctcagatataactacttcanttgttgtgantaagctcactaatcatatcatcattca

SEQ ID NO: 4884 - DNA, 245 bp, Glycine max
  Clone ID: 701043439H1
gtgaaagagaatccgaggcgaagagaagagaaaaattaagatggaggggaaggagcaggatgtgttcgctgggagcgaacaagttcccggagagacagccgattgggacggcggcgcagagccaagacgacggaaggactaccaggagccggcgccggcgccactggttgacccgacggagtttacgtcatggtccttttacagagcagggatagcagagtttgtggccattttctgtttctata

SEQ ID NO: 4885 - DNA, 223 bp, Glycine max
  unsure (1)..(223): unsure at all n locations; Clone ID: 701043440H1
ttgatgtgggtgctggtagtggncttttgtcattatttgctgctcaagctggtgcaaancatgtttatgctgtggaagcatctgaaatggcagaatatgcgcggaaactttagctggaaacccaacactggctcaacgaattacagtgatcaaaggcaaagttgaggatgttgaattgccagagaaagcagatattctgatctctgagcccatgggcaccttg

SEQ ID NO: 4886 - DNA, 247 bp, Glycine max
  Clone ID: 701043441H1
atctttctctcttctctctccccgcccaaaccctaactccctaccctattccgctttctctcatccattcatgaaaggaggaaagtccaagaccgaatctaagagagccgatgccaaacttgctgtgaataagagggcgccgccaccaagactaggaaacccgccggaaaggggaaggcagcgaaagatcctaacaagccaaagaggctccaagtgctttcttcgttttcatggaggaattcaggaa

SEQ ID NO: 4887 - DNA, 246 bp, Glycine max
  Clone ID: 701043442H1
ccattttcaagctctcaacgccatctccagctgcttccttatcagaagcgcttcgccccagagattctcgcttcctctccttcaatccttcttccaacgctattaattacaaaattaacctctccgcttcctccgatccattcactccctccctcttaaaacctccttgcggatcaaatgctcccaaacagatgggaatggaagtcctgcaaagaggacagtgcttcatgatctttatgagaaaga

SEQ ID NO: 4888 - DNA, 243 bp, Glycine max
  unsure (1)..(243): unsure at all n locations; Clone ID: 701043443H1
cttttttctctctcttgcaaaacctaattttcatttcttccctcaaatttcaaaatgcgtganatccttcacatccagggtggccaatgcggcaaccagatcggcgccaanttctgggaggtggtttgcggganacgggatcgaccctaccggaaggtacggtggggactcggagttgcagctcgagaggatcaatgtctactacaacgaggccagttgcggtcggttcgtgccgcgcgcggt

SEQ ID NO: 4889 - DNA, 242 bp, Glycine max
  unsure (1)..(242): unsure at all n locations; Clone ID: 701043444H1
ctatgttggtgggaaagatgggtgggttttgtacccttctgaganttacaatcattgggctgaaaggatgaggttccaagtcagtgatactcttgtttttaagtacaagaagggctcggatactgtgttgtggtgaacaaggangattatgagaaatgtaacaagaagaacccgatcaagaagtttgaggatagtgaatcggagtttcagtttgatcgatcgggtccatttnncttcattag

SEQ ID NO: 4890 - DNA, 243 bp, Glycine max
  unsure (1)..(243): unsure at all n locations; Clone ID: 701043445H1
attccttcttcctttccctcaaagctcaaactccaaaaacgctacccctcttgttgtacagtacgaggagaaagtcttcgagtttttagggttcgaaaaatccaaggtgaacaaatggcagagcatagagacataaggttgttgatgcatctcaggtagctccagctacaagtagaaccatgtcatttcctctatcattccttgacttgccttatgcacgtcttcnttatgtgaaacgtntat

SEQ ID NO: 4891 - DNA, 176 bp, Glycine max
  Clone ID: 701043446H1
aacaacagtaatttaccattaccccctcgtaaagcgcatagacgcttctaacagtgacattccgtttgggttttccaccgttttgcaatcctctccgccgcttatccctcttcggaaccccgtttcagcgaacctgctcagttagtcaaaagagaaacaccgtgggacaggggtgt

SEQ ID NO: 4892 - DNA, 236 bp, Glycine max
  Clone ID: 701043447H1
ttttgttcttcgatggcggcaacctcaacatcactggcttctcaactctacattggcctgcgccgcccctgcctcaagctcgattctttcaattctcaatctttctctctcttcgaccctaacttcgcctatccctctctccacccaaaccctcacgcgccgtcatcgccatggccggcaccgggaagttctttgttggtggcaactggaagtgtaacggaacaaaagactcaatc

SEQ ID NO: 4893 - DNA, 250 bp, Glycine max
  unsure (1)..(250): unsure at all n locations; Clone ID: 701043448H1
attcganggtntctngnttcagattttgtcattggtttgtgctttttattttgtttcttaatctcgatttcaattncattgattttgtgttttgttcttgttattgtctctttggtgtaatagcatgttttagattcaaatattcgtgcacataaacacaatgctcccccctgtcggtggaggatttggcgtccctgccgttgctagacatggcggcggagaagcgaatcgaggggctggcgatgaagtc

SEQ ID NO: 4894 - DNA, 244 bp, Glycine max
  unsure (1)..(244): unsure at all n locations; Clone ID: 701043449H1
cgcaanaaaaagaaagaatcccaggcgaggagaaagatggaggggaaggagcaggatgtgtcgttgggagcgaacaagttccccgagagacagccaattgggacggcggcgcagagccaagacgacggcaggactaccaggagccggcgccggcgccgctggttgacccgacggagtttacgtcatggtcgttttacagagcagggatagcagagtttgtggccacttttctgttntctctaca

SEQ ID NO: 4895 - DNA, 240 bp, Glycine max
  unsure (1)..(240): unsure at all n locations; Clone ID: 701043450H1
gttgacgacagcgacgacaacatcgtttcctcgtcgtttcgacctcccttgccgttcgatctcaacgcgctgccgtttgatgatgatgctgccgtcgtggatgatgatctacgctgcaccgcgctttgtctctgatgattatcgtgcgatgatgatttttaatttctcattttttttatctcttcaacttgattttntgttattgctatgagggaaaanatatattanaaanatgatcag

SEQ ID NO: 4896 - DNA, 241 bp, Glycine max
  unsure (1)..(241): unsure at all n locations; Clone ID: 701043451H1
cacaactacacatatattcttcgacagtcaactcaatagcctatccaaaaaaaaggttgtttcagaattgagagcaccggtcgctggacggaaacgaaatggatatttgtttaattgacatgagaaagaggaaattaattagggaaganatgtcatacagatcaaagttagtgccctataaatactaaccaaagcattgctctgcaccacaagccattgctagtttagttccatacatagc

SEQ ID NO: 4897 - DNA, 241 bp, Glycine max
  Clone ID: 701043452H1
tccaacataagtttctgagtttgaaacacagcataaacaaagcaaaatatgaatgccactctccctttttaaatggaaacaaagctgaagacaccacacgagcaatcgatagataacaaactaaagataagtgagagtgagagacatgtataggttcagcaacacagtaatcgggttctgaacttgttcacacttttagcatccataccaataattggagcaggtctatggatggcaagga

SEQ ID NO: 4898 - DNA, 240 bp, Glycine max
  unsure (1)..(240): unsure at all n locations; Clone ID: 701043453H1
attctctgtgttgtgttgtgtacttgtgttaattgtgttgttgttgtaggaaatttaagtgaagagagaatgatgatgaagtnctgctatgtgtgcattggtgcttgtggcactggttgtggttgaagtgggcccatggctgaggctgcggtgacttgcaacccaacacagttgactccttgtcttccggcaattaattcaggttctgcacctcgagtgcttgttgccagaagctgaagg

SEQ ID NO: 4899 - DNA, 239 bp, Glycine max
  unsure (1)..(239): unsure at all n locations; Clone ID: 701043454H1
ctggttttggggtactttgaaaagttgcaatggcgaacaggaacttggaaaanatggcatcgattgatgctcagcttcggctgttggttccggccaaagtgagtnaggatgacaaactggttgagtatgtgcttgcttttggatcggttccttgatattctcaggatttacatggggaggatctgaaaganacggttcaagaggtgtatgagcntctgctgagtatgaaggtaagcatg

SEQ ID NO: 4900 - DNA, 242 bp, Glycine max
  Clone ID: 701043455H1
tagtttaacagcaaatagaacccttgcgaatcaaaaccttcctgctcctttcttcaacctcacttcaacttaaagctgcctttgctgttcaaggccttgacactaccgatcttgttgcactctcaggagtcattcatttggcagagttcgctgcttattcattcttgaccgattgtacaatttcagtggtactggcagacccgatccaactcttgacacaacttacttaaaacaattgcgcc

SEQ ID NO: 4901 - DNA, 243 bp, Glycine max
  unsure (1)..(243): unsure at all n locations; Clone ID: 701043456H1
taaaaaaggaaacgtatagaaaaagcttctccaaagaatttgaaggagaaagattcattcatgttcattttttccttttccccttcgtccccatcaagtttctgattctctcttttcacttcctttctcttcttcattcttctttctcttttcaactattttctttacatttttttctttttctctcgcttttttcgcgttcactttctctactctgttttacgcattttatttattgtnttg

SEQ ID NO: 4902 - DNA, 241 bp, Glycine max
  unsure (1)..(241): unsure at all n locations; Clone ID: 701043457H1
agctagctaggttgaaaatagtttggttttgtagtaagtgaggtgaggtgccaaaatggtgaagataactcttggtactttcgatgactcttttggtgttgcctctcttaaggcttatttggcagagtncatgcaactctgattttcgtgttcgctggtgttggttcagccatcgcttacaacgagctacaaaagatgcagccttggatccaacggggctggtggcagtagctgtggccca

SEQ ID NO: 4903 - DNA, 242 bp, Glycine max
  Clone ID: 701043458H1
tcagaacctaggcaggtcgattgacataacacccgaatccaagtgaaacggaaaacactcatcattcatggattcagttgcattaaatggcaaaagcaatgataagcctcttcacgttgccatgctcccaggctggccatgggtcacatatacccttacttcgaagtcgccaagattcttgctcaaaagggtcactttgttaccttcataaacagccccaaaaacattgaccgcatgcccaa

SEQ ID NO: 4904 - DNA, 242 bp, Glycine max
  Clone ID: 701043460H1
cattaccctcacaaagtaagcaatggcataccaaaactacaacaactatgggtggcgatgcccctctgacgagtaccaagtgtacgaccccccagtagaggcaacatatcctaggcaaaatcatcacagaagggtcatgtggcattcagaaccaactatgaggattctatagctgaagtagaatccaacgttgaggctcgagaacataacagcaggttatggaatcacagtgcttacaaaag

SEQ ID NO: 4905 - DNA, 243 bp, Glycine max
  unsure (1)..(243): unsure at all n locations; Clone ID: 701043461H1
cctcaaagcaacacaagaacactctcttgaacattcatggatccagtgagcgtgtggggtaacacgcccttggcgaacggtggatcccgagatccatgacctcatcgagaaggagaagcaccgccaatgccgcggcatcgagctcatcgcctccgagaacttcacctccttcgcagtcatcgaggccctcggcagcgccctcaccaacaaatactccgagggcatgcncggnaaccgctacta

SEQ ID NO: 4906 - DNA, 242 bp, Glycine max
  Clone ID: 701043462H1
ccaaaacccaaaaacctttccttttactttttctcaaactgaaacataaaaaatggagggtcttattccttttgtttacaaggctatcatgcaatccaagggcgacaaagagggtcatcctataggatatggctttgtgagtctccttactcatacatgagacttcctggtgactcgggtaggtttcaaattcaagcaccagctgctgcttcaccctcttccaccaaccctaattcttcttc

SEQ ID NO: 4907 - DNA, 244 bp, Glycine max
  Clone ID: 701043463H1
ggaagggcgaagttgaaaaaccaaaacccttggcgagtgaagccctactcactagactacacacttcgcaatggcggttgttgctcaaacccctgacatcgccggcgagcggcagtccggccaagacgttgcacccaaaacgttgtggcatgccaagccgttgccaacatcgtcaaaagctctttaggccccgttggcctcgacaagatgctcgtcgacgacattggcgacgtcaccatcacca

SEQ ID NO: 4908 - DNA, 242 bp, Glycine max
  Clone ID: 701043464H1
ctcaccccaaaacccaaaaacctttccttttactttttctcaaactgaaacataaaaaatggagggtcttattccttttgtttacaaggctatcatgcaatccaagggcgacaaagagggtcatcctaaggatcatggcttgtgagtctccttactcatacatgagacttcctggtgactcgggtaggtttcaaattcaagcaccagctgctgcttcaccctcttccaccaaccctaattct

SEQ ID NO: 4909 - DNA, 246 bp, Glycine max
  unsure (1)..(246): unsure at all n locations; Clone ID: 701043465H1
gctcnngcnnatgtctcattccncannngttctcgtcnccttcccaatctncaattttagggttcctttaatctcgntattcctcttcantcccaaactccgttcactccaacaacactctgatttagaaatgatggaccagctggtcgaggtggtgctggactggacatgtttctgccaaattatanattgggaaaaacacntnggattggatctttggcnangtcaaaattgcanaacatgtat

SEQ ID NO: 4910 - DNA, 240 bp, Glycine max
  unsure (1)..(240): unsure at all n locations; Clone ID: 701043466H1
ctcaagaatagtgaatctcctggcaacagcagcaacaatctaccacttagcatgaatcggagcccctcaacttccgttactcctatccctgataagtactgttgtctctctagagaagatgtgctcctttcatcatcggttgtcttggcgcattggctccccttcctctcacttccattgctgctcttgaagcaattaattcaaactanaactatattgaatcttctactccagncattg

SEQ ID NO: 4911 - DNA, 238 bp, Glycine max
  Clone ID: 701043467H1
gcaaaacctaaattctgagcggctccatatccgtcacttatctcaccaaccataaaatatactcatggccgagcacggttttgatggacatgatgtaggatatgtgcctgaggaccctaattttcccagaatcattctgatgaacatgatgtagggactgtgattgatagctccggatttcctcacctgctacctgatgaagatgatgcaggcaatttgatggaggacgccaattttc

SEQ ID NO: 4912 - DNA, 215 bp, Glycine max
  unsure (1)..(215): unsure at all n locations; Clone ID: 701043468H1
caaaacggacgcttttgttattcttcgtgtcttgttgtgtttttcatcngagatgtgtggaggagctatcatctctgatttcattccggcggcggcgatcgccgggtctcgccgcctgaccgccgatacctgtggccggatttgaagaagcggaagtctgacttggacgttgacttcgaggctgatttcagggattttaaagacgattctgatat

SEQ ID NO: 4913 - DNA, 239 bp, Glycine max
  unsure (1)..(239): unsure at all n locations; Clone ID: 701043469H1
gttnagggntgcnctatancagnntgtctcagggaagaggcagtgcatcnntncctatngtggttcacngnggtntcactactgtgcctnttggaacgtgctaacgcngcnactnnctccgtngaangccnggggganggaccttcaacactaatgcntggcccaatggaaaaagntcanagctggtgatatcntaatctcaactatgactcgaagacccacaatgtggttgctgtgga

SEQ ID NO: 4914 - DNA, 241 bp, Glycine max
  unsure (1)..(241): unsure at all n locations; Clone ID: 701043470H1
ctcttcttcgtctcaaacctcttcgntccttcgattcattccatttcttccaaaatggncnaagacccagttcgcgttctcgtcactggagccgcagggcaaattggatatgcncttgtccctatgatgctaggggagtgangctgggtcctgatnagnccgtgntcctccanatgcttgacattccnccagcagcagagtcgttgaatggggttaanatggaattngtggatgcngcatt

SEQ ID NO: 4915 - DNA, 239 bp, Glycine max
  unsure (1)..(239): unsure at all n locations; Clone ID: 701043471H1
ggaggcaagagaataactacaagagtacaagattctccctgatgatggggcacaagtatttgtggttggtcttttgcttgtgggctttaacatgctcacttcttccttctttctcctttggactaatagaattggtttgaagaagagagatctagatcttgatagtatcagagcagctagnatggtaagagaaaagccaagattaggcagacctgtgttgggtgcgtatgatcatgatc

SEQ ID NO: 4916 - DNA, 243 bp, Glycine max
  unsure (1)..(243): unsure at all n locations; Clone ID: 701043472H1
atcaaaattcatcgaagaagaaggagaaggagatgtatagcaatttcaaagagcaagcaatanagtacgtgaaacaagcggtagatgaagacaataagggaaactacgcgaaagcnttttcaactttactgaacgcgttggagtatttcnaaacgcncctcaagtacgagaagnaccctaagatcaaggaggccatcactcagaaattcaccgagtatctccgccgggccgaggagatccggg

SEQ ID NO: 4917 - DNA, 242 bp, Glycine max
  unsure (1)..(242): unsure at all n locations; Clone ID: 701043473H1
agtttgtatagtgtagganttgttggtattcgtgataaaaacacctcatcctattcattttgccatgacgggcgaactccagataaaggttttgaaagtaatgagaaattattaattcatccatgttactgcttggtttgaatctaaatcgtaatgcacttgctccagaggaagcagaggagataaatgacgaatatgatattaatattatttcagataatcagccattagaaataanacnt

SEQ ID NO: 4918 - DNA, 239 bp, Glycine max
  Clone ID: 701043474H1
gggttttggaacgtgcaagatccggtgctctaatctctgcattctgtgatggctccaaaaccgataacgagtcccgtccccgattcgtggtaccccacgctctccgtcttcaccctcgccatcggctcgtcttaaccgcctctttcttcatttatgaagcaacatcttctaggaaaagtcgttcacttgttcaggagctgacaactggtgcagtggcttcagtcttcttgggttttggg

SEQ ID NO: 4919 - DNA, 220 bp, Glycine max
  unsure (1)..(220): unsure at all n locations; Clone ID: 701043475H1
tgaaggttgagtcttgcgtacaccacaagcatgaaatgtcgacaatgttaatataacagacnncataacanagaaatanganctcganccagatcaagctatttcagacttgagacaaattctgaaatagcttgatctggttcaactcttatttctttgttatgtgttctgttatatgaaggttgagtctgcgtacaccaaagcatgaaatgtcgaaatg

SEQ ID NO: 4920 - DNA, 239 bp, Glycine max
  Clone ID: 701043476H1
agaaggctcatgaagaagctttggctaagtacaaggagatagaagaacaactacaaaggaatgagagcttagctgctgataaagacattaagactaagcaggagagaaatttggcagctgctgctgaaaattagctgagtgtcaagaaaccatatttcttcttggcaagcagttaaaatctctgcatcctcaaacagagccaatgggatctccttattcaaaggccgaagttcacagag

SEQ ID NO: 4921 - DNA, 239 bp, Glycine max
  unsure (1)..(239): unsure at all n locations; Clone ID: 701043477H1
ctgttctggatcttgccatggctctttccatttttcaatttcttctgttctcaatcagcctctgcttcctcgcttcttcttttcaagatcttcttcttctctccgttaatgcgcaatcacacaattcactcaaccttcagttncgccaatcaactacgatctctaccattccagtgacaatttgatggaggagatcagggccttggtccatcgtcacccggataaactcactacggaga

SEQ ID NO: 4922 - DNA, 219 bp, Glycine max
  Clone ID: 701043478H1
agccgtcgcagtctctgccaaacactcgctcatccaaaattatgatcatttctgtgccgtaaattcgccggcaacacgagatctcaacttctcgcgccgttttctttccccctttaaaaaaagtacaagttcaggttaagttggggttccatggcttcggagacgaaggtcgtgaatctggctgaggaagccaagctcgccggagaaggtgtaacgact

SEQ ID NO: 4923 - DNA, 240 bp, Glycine max
  Clone ID: 701043479H1
ctttcatcaccgccgttgattacttctcctttctctaccctgacgccagcgttgaccgcatcttcgccgtggtttacatgatagtcgggctggtggggatctccctcataatcctctacagccacaatctgacgcctatgtgaggatcaacgttggattggccctattcgtcgtttcgcttctcgtcgttcccctccttgatgccttttacataaagggtcgggtcgggttttatagcgg

SEQ ID NO: 4924 - DNA, 243 bp, Glycine max
  unsure (1)..(243): unsure at all n locations; Clone ID: 701043480H1
cgngatcgtgcgagtgattggtttgaaaaacaattgcactttctgcggcntcttccgtcgacaggcccttgaccgaggtgcttctctcttgaaagtggacaaagtcgttactgggcacaatgccgatgtattgccgagaccgtcctcctcaacctcctccgaggagatgttgcccgattgagtagatgcacctctataaccaccggtgaggatggccccattccccgatgcaaacctttcaag

SEQ ID NO: 4925 - DNA, 253 bp, Glycine max
  unsure (1)..(253): unsure at all n locations; Clone ID: 701043481H1
tcttcttgnatncnctnngtnatagtcagccnttnctngagancntgggccgtttcnccataccangtgatgggtttntcntcatgacagtcntcatgtttgcncttgctanacctangancattggaagaaccacaacatattggctttgtngttatgtactcattcacattcttcttctccaactttggnccaaatgccaccacatntgttgtgccagcagagattttcccagcaaggctaagatcnactt

SEQ ID NO: 4926 - DNA, 74 bp, Glycine max
  unsure (1)..(74): unsure at all n locations; Clone ID: 701043482H1
antccatttctntccaacanacactttcttctactactatctgctcnactntacgctnctctctgggtgtntnt

SEQ ID NO: 4927 - DNA, 238 bp, Glycine max
  unsure (1)..(238): unsure at all n locations; Clone ID: 701043483H1
ctctgttcagtttcaatatggcgaacacactatatnacggcgccacatgccgaatccctctccgtgatgaatccctggccttctctcgccacgtttccagatccctctctttcctcctcaaaacagtgcgggaaaacaatcatacgcatttgcggttaaggcttcttcgcactctgacttcgacgttgacctttcgctcagtccacgtgtcaatgccgtcaagccttccaaaaccgtc

SEQ ID NO: 4928 - DNA, 236 bp, Glycine max
  Clone ID: 701043484H1
gcttctcactgatctccattcccattccatggcttccactgaatcatcccctttcaagaaaattcagattcaaagggatgacactacatttgacgcatatgtggttggaaaagaggatgctcctgaattgttgtgattcaggagtggtggggtgtggattacgaaattaagaaccatgccgtgaagatttctcagcttggtagtgggtttaaagctctattccagatttatacaga

SEQ ID NO: 4929 - DNA, 239 bp, Glycine max
  Clone ID: 701043485H1
cttttgtgtggggaattatggtaattgattttgagggtttgactactcatggattatgatggtatgagaaaaccttccaaaaacttatttcactctcgcttcttcctttttgggttctattgctggattgggagttcttgaccgctctcctcctttttagttcttccccttaatcttctttcttcacaatttttatttccttccttattagacgtattagatcagattgaacaaaaggg

SEQ ID NO: 4930 - DNA, 237 bp, Glycine max
  unsure (1)..(237): unsure at all n locations; Clone ID: 701043486H1
attcgagattgctcgatccaccaaagcgtacaagacgattctccagaaccttccctacatattcgttggcacgtgcgagcggttgcagagcatcgtggcgctcgtgtcggaggcagcgaanagagctgaagaagaagggaatgcacgtgcctccatggaggagaaccgaatacgtgaaagcgaagtggctctccccttacacgcgcactcacgatatcaaagaggagaagaagaagg

SEQ ID NO: 4931 - DNA, 234 bp, Glycine max
  unsure (1)..(234): unsure at all n locations; Clone ID: 701043487H1
ctttgatcaatacgatgttgatttgattgtnttttgtttggtttcatcgatcttcaattttcataatcagattcagcttttattatctttacaacaacgtccttaatttgatgattctttaatctagatttgctctaattagagctttttcatgtcagatcccttacaacaagccttaattgttgattcattaatcgtagattagggcttttttcattgattactcagatccgt

SEQ ID NO: 4932 - DNA, 239 bp, Glycine max
  unsure (1)..(239): unsure at all n locations; Clone ID: 701043488H1
gacaaataagacatagatttccagaagctgttgtatgtggtctttaccggagtgggaaaatatacttccacccaaacgatggtgaaattctgcagcaaaccgacaaagtattgtttattggatccttcgggatacaaatactaaaaagccagaagtaatcctagatgggaaagaaggaatgtatganattcataatgaggaaatacttgaaaaggatgtggaacatgccattgaattga

SEQ ID NO: 4933 - DNA, 239 bp, Glycine max
  Clone ID: 701043490H1
ttcaaaggtaaggtaggttaacactcttcttcatcgtccgcaatgggacgtgtgatccgtgcgcaggtaagggagcaggctcggtcttcaagtcccacacgcaccaccgcaagggccctgctcgttccggagcctggacttcggggagcgcaacggctacctcaagggcgtggtcaccgacgtcatccatgaccctggccgcggcgcgccgcttcgccaaggtcgccttccgccaccct

SEQ ID NO: 4934 - DNA, 237 bp, Glycine max
  Clone ID: 701043491H1
ccaagaccaagttgcagataaagcctgctccagccatggcagctttctctcctagagggcccaacacagtcacaccggagatcctcaagcctgatgtcattgctcctggtgtgaacattattgcgcctactcagaaggggttagcccaacaaatctgggatttgataagcgcagggttccttttatcaccatgtctggaacatccatgtcttgtcctcatgtggctggagttgttgg

SEQ ID NO: 4935 - DNA, 237 bp, Glycine max
  Clone ID: 701043492H1
cttgagactaataatggatggtatagttcaactgcagaggcaacttgttgattatactgcttccctatttcatgagggttttctagatgaccaatttaaccagcttcagcaacttcaagatgaagcaacccagattttggcgttgaagtggtgactctcttttttgaagatgcggagaggcttcttaatgagctcacaaaaacactaggccagccaagcattgattttaaaaggttg

SEQ ID NO: 4936 - DNA, 236 bp, Glycine max
  unsure (1)..(236): unsure at all n locations; Clone ID: 701043493H1
ctccgcgtgtntgtatgtgtgtatactctctcaagtacgcacntacatacacatccattcgtacataaatacttatatctcttcttccttcgccgttaattctctgaatccctagctcttctgtctccgatcngatcatggcctcgcttgtcaacaacgctaacggcgccgtcaatggttttcctggaatatcccagaagctcattatcgataccgaccctgggatcnatgatagc

SEQ ID NO: 4937 - DNA, 241 bp, Glycine max
  unsure (1)..(241): unsure at all n locations; Clone ID: 701043495H1
cttcactcccattttttcaaaacattcaacaatgtcgtatttntcanggggacgtcgcgacgacgacgacacggtggacgactacgacgagtacgaccccaccccatacggcggcggctacgacattcacctcacctacggccgccccgtctctccttcagaagaaacctgctacccactcggagcctcttccgatgaaaacttcgattacgatcgcccccagtacacctcttacgctgaa

SEQ ID NO: 4938 - DNA, 255 bp, Glycine max
  Clone ID: 701043502H1
tgcaaagcgcaaattaaagcgcaaaaaccattctccttcggtgctcttgaaaacatgggaaaacagagcacagaattctctgccctcaactgcatcgacctctccaaccctgacatcaaccaatccgtcaatttactcaaacaggcatgtttggattccggttttttctacgttgtcaatcatggaataagccaggaattcatggaagaggtttttgcacagagcaagaaattcttctctcttcctcacaaggag

SEQ ID NO: 4939 - DNA, 252 bp, Glycine max
  unsure (1)..(252): unsure at all n locations; Clone ID: 701043503H1
atccgtacattctaggagggatcatggcttgtagttttgcatttttgtatgttgtgtacagttttggagcaaagaaggtcacagattcaagttcaatacatgtaaagagtaatgagtgtgcaaagacatcatcagaaggtggaatatgttcntcagatgaggatgcaggaagtgctgacatcatcattgtgggtgctggggttgctggtgcagctcttgcttacactcttggaaaggatggacggcgagtgc

SEQ ID NO: 4940 - DNA, 252 bp, Glycine max
  Clone ID: 701043504H1
attctagttctggattccgactagccgcgttgactcggttccgtttttcattctcgcggatctaatattaaggaatagcctaagggcacattacaatgaaggcattgattctggttgggggatttggaacaaggctgaggccactgacactcagtttccctaagcctcttgttgattttgctaacaagcctatgattttgcatcagatagaagcccttaaggccattggagtgactgaggtagtgctagcca

SEQ ID NO: 4941 - DNA, 253 bp, Glycine max
  Clone ID: 701043505H1
attccaaaccagttcaatctttaattttcagtcatcactttatattggtcacattttcaaagtaacaaatataagatattctgtgaaaagatggcaaaacttgctggctgtgtagctcatttttttattgcagcaatggttttgagcacgttttacgtgaccaaaactgtggcacaatcagagatagctcctacttcacaaatggagactggagaagggtttgctttgtctgtttctggggtgaccttgtgtt

SEQ ID NO: 4942 - DNA, 253 bp, Glycine max
  unsure (1)..(253): unsure at all n locations; Clone ID: 701043506H1
ctagnacatggagaaggaaatggaggctgctttagttcatgtggagacgacccagcaacacatgaatccacatgtactaaggcgcaagggtggcttcattaccatgcctttcattatagcaaatgaggcactagctaagctggctagtgttggacttatgccaaacatggtattgtatttgataggggattacaggctccgagtactgaaagcaaccaaaattatgttctattggtttgccgctaccaatttt

SEQ ID NO: 4943 - DNA, 253 bp, Glycine max
  Clone ID: 701043507H1
gtttacgatgctgttaaatcaatgacccaaaacaatgttggagctttggttgttgtgaaatctgacgcgaataaggcaattgcaggaattattactgaaagagattacttaagaaagatcatcgtgcagggaagatcatccaagtctactaaggttggagatattatgactgaagagaacaaacttatcacagtcacccctgataccaaagttctgcaggctatgcaactgatgactgacaatagaatcaggc

SEQ ID NO: 4944 - DNA, 252 bp, Glycine max
  Clone ID: 701043508H1
actctttctgcttcttccaccaaagtggcatcagaaaaccaaaaatggggtgtggcaatttattcttcacaattctgataactttctcagtggcactcataacatacaatatcataatctcagccaatgcccctctcaagcaggacttcccggggccctcacgcccttccatcaaggtggatcctctcatcaagatgccactgcacagaaaatcatcatcctcggaggaatcgaagaagaggttgttgttcc

SEQ ID NO: 4945 - DNA, 257 bp, Glycine max
  unsure (1)..(257): unsure at all n locations; Clone ID: 701043509H1
ctcttctgtttcttcgaanccaaaaccctaattccctcaatttcatttttcaacctcgaaaaacctatctctctctccgctctaagttcccaacggttatcaccattcaactgctcgatccacaggggcatatttgctactgaagagatgtctcctgcttccaaatctaagtccaaagacaaaaaggccgtcaaggaagctcaaaagtcttctgccaagtcttcaggatctggtaatgctgtggctggtgtaccagc

SEQ ID NO: 4946 - DNA, 253 bp, Glycine max
  Clone ID: 701043510H1
ctcgagcggaaataatattccctacaattagcagaaaaaatggttcagcaagatcatccgaagggtccctggacagaacaggaggactacaaattggtgtattttgttggcatgttcggagatcgtagatgggactttatagcaaaggtatcaggtttgaaggtggagggagactgtaaataaaataggtatgaatatttggacatgctaagttatactatgaagcaccctttaaccacctcacttttttgta

SEQ ID NO: 4947 - DNA, 253 bp, Glycine max
  unsure (1)..(253): unsure at all n locations; Clone ID: 701043511H1
tctctctctctgacagctaaaatgcaaggaggaatgagatcatttttgtcacatgggaatgtcattagaaatgctgttctacaacgcgtgcgcatggtgaaccccctgctacagacaattgcctcttcgcggtttgaatctgttacgcctgctcgcattgaggagcatggttttnagagcaccacaatttcagacatcttgaatgataaaggcaagggtgctgatggctcctggctttggtgcaccacagatg

SEQ ID NO: 4948 - DNA, 255 bp, Glycine max
  Clone ID: 701043512H1
gccattggaaggcacatagtctgggcaagtgtgaaggcagggaacccaacatttgtgttggtgaggaacacccctggctctaacaacagggtcaatctggtcaaagctgctaatcctgaaaccaaggaagagctcattgagagcttcaaaaattcaggagtaaatctaattcagggagatatgaatgatcatgagagtctggttaatgcaatcaagcaagttgatgtcgtaatctgcgcatttggtagactacta

SEQ ID NO: 4949 - DNA, 233 bp, Glycine max
  Clone ID: 701043513H1
caaccatcgatctcaattttcaaccttaacctctaagaatgtcttacgcttatctcttcaaatacatcatcatcggtgacaccggagttggaaagtcttgtcttctacttcaattcacggacaagcgctttcagcccgtccatgacttgaccatcggtgttgaatttggtgccaggatgatcacaattgataacaagccaatcaagttgcaaatatgggatacggctggtcaa

SEQ ID NO: 4950 - DNA, 254 bp, Glycine max
  Clone ID: 701043514H1
ggaaattataacattaccactggatcggggcagtctgaaacagaatcctcttctaatgtgaatatcagcgcaatacttgaggaggaagaagcactaattgctgctcataggaaggaaattgaagacacaatggagattgttcgtgaagaaatgaaactactggcagaagtggaccagccgggaagtcttattgacaactacgtgacccagttgagtttcgtgcttctcgcaaagcagctagtctcgtcagtctc

SEQ ID NO: 4951 - DNA, 257 bp, Glycine max
  unsure (1)..(257): unsure at all n locations; Clone ID: 701043515H1
ccttctcaaaccacaaagcaatttgtccaatttggatcacacactcagatacagccgtttagaaagaccttcgcatttcacttttctttctcttctcacacaagatagatannattttctttcttctgctaccttcaaaacatcacaagaagcaacatccccctatacgagttaggtgagctcagttcaacacatcgtgtgaaaaaacacataaagggagaaaattactattttgtaatttgtatgtgataaagtgc

SEQ ID NO: 4952 - DNA, 258 bp, Glycine max
  unsure (1)..(258): unsure at all n locations; Clone ID: 701043516H1
gcagaggaagaaggagaagaaggagatcttgagagatcaggtcgcaactcgtcatggggagagaagttacaggaatgcaagttgtggacaagaagccaaatggtgttataccagcttcaaatggtagttctaatgataaagtatgtttttctcctagcnaagaagcagctaaggttcaggcaaaggatcacaaggtaaatgaatgtaccaaaactaactcttttgaggagaaaagccatgagaagatggatggtttga

SEQ ID NO: 4953 - DNA, 253 bp, Glycine max
  Clone ID: 701043517H1
gtgcattcgtaaatagctaagaatcttgtctcctacgattcgttttgccccttttgttgccctaatttcaaccatgcctcgccgtagctccggtggaagatctgcccgtcctgctcctcgggcagctcctcgtcctgctccagttcaccatgctcctcctccagcccctgctcagagtggtggtggatctatgcttggtggcattggttcaaccatagctcaaggtatggcttttggcaccggaagtgcagtg

SEQ ID NO: 4954 - DNA, 249 bp, Glycine max
  unsure (1)..(249): unsure at all n locations; Clone ID: 701043519H1
ggaagaagctcatgagggaggatgtctcccgagttctcggcattttaaaggtttcagctgcgattgggtttgatgctggggttttgttcttgtttggagtacttggaagcagcgccatgggcngaggatgaggaggagaaggtggcatcgctcctgtctgagcttcgtcttgaagcagttggagctggggaggttttgaagagggtttcgactggtgttgccaatggaaatgaagaggggagtgataac

SEQ ID NO: 4955 - DNA, 253 bp, Glycine max
  Clone ID: 701043520H1
caattattaatcaggatctaatagcaggtgggactgagagttcagcagtaacagtggaatgggcaatcacagagctattgagaaggccagagattttcaagaaggcaacagaggagctagacagggtaataggtagagaaagatgggttgaagagaaggacattgtaaatttgccttatgtgaatgccattgcaaaggaagcaatgaggctgcaccctgtggcaccaatgttggtgccaagactagccagaga

SEQ ID NO: 4956 - DNA, 240 bp, Glycine max
  unsure (1)..(240): unsure at all n locations; Clone ID: 701043521H1
cttttgcagctgatattggggataatagcctcagcaacaggcacagctgggggtgtagcatntttgggtttgaagggaaacagacacgtggngggttggaataaaatttgccatgtttacgacaagttctgtaggcatgntggtgcctccatagcagtggctttgtttggaagcgttgtgacagtcttgctcattggcttcagcttacagcattcatagccgagtccccaagtngatggc

SEQ ID NO: 4957 - DNA, 225 bp, Glycine max
  Clone ID: 701043522H1
gatggcgttgttggttgagaaaacaagcagtggaagggagtacaaggtgaaggacatgacgcaagccgatttcggaagattggaaatcgagctggcggaggttgaaatgcccggcctcatgtcctcccgcaccgagttcggcccctctcaacccttcaagggcgctaggatcaccggctccctccacatgaccatccaaaccgccgtccttcatcgagaccctca

SEQ ID NO: 4958 - DNA, 251 bp, Glycine max
  unsure (1)..(251): unsure at all n locations; Clone ID: 701043523H1
cagaggaacactcccaaacaaaccatggacgtgggtcagatgcagagacagtggatcgantacaccaaatccctcttcctcgagggcttcctggatggtcagtttctgcaacttcagcagcttcaggatgagaacaaccctgactttgtggtcgaagttgtctctctcttctttgaagattctgaaaggcttctcaaagatctcacctttgccctgtcagtactattactatcataccactctcgttttcc

SEQ ID NO: 4959 - DNA, 251 bp, Glycine max
  Clone ID: 701043524H1
cgtgtttgagagaaaggttgagctatagcctaaagggagagacacataaatagtttctactttctattcatagatagatggctggcccaattatgagacctcagattgtgctatttggctcctccataattcaaatgagcttcgacaatggtggttggggtgctattctagctaacttgtacgctaggaaggcggacatcatcttaagaggatactctggttggaattcaaggcgggctttggaggttttg

SEQ ID NO: 4960 - DNA, 251 bp, Glycine max
  Clone ID: 701043525H1
gtaattttctgcgttgcttcgtggttaattcttcgtgttcttgtgatctttctgttggagtatttacaacactcctttgtaagtttaactaaagaggctaattaattttcaattggaccgcagcagatggctgaggagggtcacagggttactctaaatgtttatgacttgagccaaggtcttgcacggcagctttcaatgtcctttttggggaaagctattgaaggcatatggcacacaggagttgttgt

SEQ ID NO: 4961 - DNA, 253 bp, Glycine max
  unsure (1)..(253): unsure at all n locations; Clone ID: 701043526H1
ctttgttccttcctacttctctctctctctcgtcttcacnaatggcgtcgtcgtcaccaccaccttctnnnnnnnnnnnnnnnnnnnnnnnnnnnnnngccgccacggcatcctgcctcacctgcaccacccaaaagctcaccgactccaacaaaaagctcttctccaactgcctggaccttccctcactcgattccttcctccactggacccacgaccccgccaacgcctccctctcggtggccttcgtggc

SEQ ID NO: 4962 - DNA, 252 bp, Glycine max
  Clone ID: 701043527H1
caaccctaacgcgtgcagagcagagagagacgcagccatggggcgaagacccgcgaggtgttataggcaaattaagaacaaaccataccccaagtcacggttttgccgtggtgttcctgatcccaagatcaggatttacgatgttggtatgaagaagaagggtgttgatgaatttcctttctgtgtccatctggttagttgggagaaggaaaacgtttctagtgaggccctggaagctgctcgtattgcttg

SEQ ID NO: 4963 - DNA, 256 bp, Glycine max
  Clone ID: 701043529H1
ccccaaaaagcacaagcctggtaaaacaccaaagacacccacagtacccgttgttaagccaccagtgcacaatccctgcccattgttaatccaccagtcacaatccctcccattgttaatccaccagtgacagttccacccgttgtgcttccaccaatagtgaagcccccgggttttctccctccaattcttaacccaccaagtacaccaacaccgtcgccggggaagggagggaacactccatgtccaccaccaa

SEQ ID NO: 4964 - DNA, 248 bp, Glycine max
  Clone ID: 701043530H1
gtttttgtggaggtgctttttaagtgcagtaatttggcttcctagaagtgaaaactcatgctttcatattgcaggatttggacgtgtttcatctagttggttacctaactggttcctaatgtccatgacaggagtttctcttcagggctattcctgactttccattttggggattcaagagttatggaagaaacacctaatttttctcctttctttggttaatcggtaatctattgtgtattatacat

SEQ ID NO: 4965 - DNA, 259 bp, Glycine max
  unsure (1)..(259): unsure at all n locations; Clone ID: 701043532H1
ggcttgnctgtcacgagactcatacattgtgctgccaattatagtaatctctgcnattgtctctttcnatctctcaagttctgaagaagaaacatgtgtggaggtgctatcatctcagacttcattggtgtgaagcgtggccgcaacctcgccgcgcaggaactatggtctgagcttgaccctttctctgacttcctggcttcgataccaccaattccaaaaaccaaccacccctgcagaaaattccagacanaaaagt

SEQ ID NO: 4966 - DNA, 252 bp, Glycine max
  Clone ID: 701043533H1
gtttgtttccactttgcaaatcagtgtgtacccaggaatctcttgattgagaaagtgtgttagggtaagagttgtgtcgtgtccacgagacactgggagaaagaaagtgtgtgtgagttgttgtaaactgaattttcatttttctttagccatgagcacacttgttcgcaacaccaccctcaccttcagccgcagaaacagatacgagcttcttggtttgcagggcaaagacaagatggtcaagtccatcag

SEQ ID NO: 4967 - DNA, 252 bp, Glycine max
  unsure (1)..(252): unsure at all n locations; Clone ID: 701043534H1
cgatcanatcctcttcagattcggatcaccgccgagtccatgancangccagcgctttcanggggcacgggcctacttctctggattcacgcgtttatnnaagggncttgcggtngtgcttgtntgcngtcacattgcggntcagtttatcccttnagctgttaactatcntgctctnattcccgccaggacaatcccatttgcctggaatctcattacanctngatatgttgaacaatctatatatncggt

SEQ ID NO: 4968 - DNA, 183 bp, Glycine max
  unsure (1)..(183): unsure at all n locations; Clone ID: 701043535H1
caaaaattgtagctgatgttattcatgctagctcttcaaatcatattatatcctataatctgctaccttgaagataacaacaataaggatcatccttgttatatgttccatctgtttgcattatgtttcttaataaagaatacaaataaatcttgatgcnaaaaaaaaaaagngnaananaac

SEQ ID NO: 4969 - DNA, 255 bp, Glycine max
  unsure (1)..(255): unsure at all n locations; Clone ID: 701043536H1
cgtttatcacactccaacaacgcctttccgctcttaccaccctcgcgggtncatttncttggganaactcgtttgncatccaagnaaatcgatttccctggaaacaancagtcgcgaatctccgatgcgantngtttcantntaattcgatgatgatcgccactatatgccgccctgtgnnttccccgtgggaggaaccaatggatcgctgcttccgattttntccatgcctcgccgatcctggtcgaaggtctt

SEQ ID NO: 4970 - DNA, 252 bp, Glycine max
  unsure (1)..(252): unsure at all n locations; Clone ID: 701043537H1
caagagcgagnaggtcagagaagatggaaggagaagagggttctcagcagccacagttggtgctncgcggacaagctattccttctccggcaacccgatgtgcaagacattgacaaggttcgctacaaagaggatgtcttcactcatgtcaaggaaaacgatatggtccctctgtacgaaaccctagtcgctgattccgtgttggacttggatcgtgcccttttggactctatgcgcgctaaaattgacgac

SEQ ID NO: 4971 - DNA, 250 bp, Glycine max
  Clone ID: 701043538H1
tcgctactgcgactgcgccttcagcacaatgggtgcctacaagtatgtttcggagctatggcgcaagaagcagtctgatgttatgagattcttgcagcgggtgaggtgctgggagtatcgccagcaaccttctattgtccgtttgacaaggtctactcgcccagataaggctcgtcgcttgggtttcaaggctaagcagggttacgtgatttaccgtgttcgcgtacgaaggggtggccgtaagagacca

SEQ ID NO: 4972 - DNA, 249 bp, Glycine max
  Clone ID: 701043539H1
gctggtgttatcctcaagggaaaaatcagtatcgtggccaatcctggtgttaagctggaagttcccgatggtgctgtcatttcggataaggaaattaatggcccagaggacctcctgtgaggaagcccgctgagtttagaagtatcagactgtatactatctttatggtctcatgttttttccaattattactactcccaagtttgatgggcaaagaaaataagtccctttttgtttgtcttctgattc

SEQ ID NO: 4973 - DNA, 250 bp, Glycine max
  Clone ID: 701043540H1
tatctttctctcttctctctccccgcccaaaccctaactccctaccctattccgctttctctcatccatcatgaaaggaggaaagtccaagaccgaatctaagagagccgatgccaaacttgctgtgaataagaagggcgccgccaccaagactaggaaacccgccggaaaggggaaggcagcgaaagatcctaacaagccaaagaggcctccaagtgtttcttcgttttcatggaggaattcaggaagg

SEQ ID NO: 4974 - DNA, 252 bp, Glycine max
  Clone ID: 701043541H1
ctcgttttttctcaaaaagttgcaagagttaaagcaaaaaccaaagtgagagagaaaatgatgaagccatcgatgctcagatctcttcactctgccgccacccgcggcgcctcccacctctcccgccgtggctacgcctccgagccggtgccggagcgcaaggtggccgttctaggtgccgccggcgggatcgggcaacccctctcccttctcatgaagctcaaccccctcgtttccagcctctccctctac

SEQ ID NO: 4975 - DNA, 252 bp, Glycine max
  Clone ID: 701043542H1
gcaaaaagaaagaatcccaggcgaggagaaagatggaggggaaggagcaggatgtgtcgttgggagcgaacaagttccccgagagacagccaattgggacggcggcgcagagccaagacgacggcaaggactaccaggagccggcgccggcgccgctggttgacccgacggagtttacgtcatggttcgttttacagagcagggatagcagagtttgtggccacttttctgtttctctacatcactgtctta

SEQ ID NO: 4976 - DNA, 248 bp, Glycine max
  Clone ID: 701043543H1
ggcaaatgagtgtattcttctgttcttaaaaacaagggtctatgtggacaattaacagtgagcagagaggatccacaaatttgtctggacatagtggtttctgatttacaattgcctatttgttcgttcttgccagctcaaatactactgtactaattactaggaagattatagacaaaaagcatcaaattgtttgtgattgtaatttgcaattttaactagaaaaagtatttagatctagattgtgg

SEQ ID NO: 4977 - DNA, 255 bp, Glycine max
  Clone ID: 701043544H1
ctttttcgcttttgtctttctttgtcctttgattgctgccataaattaattaattaatattgtccctcccttcttctcctcacatcaagaagaagttagaagtccatgccgtgtcagcttgtgaagaagaaatgtgagaaggatctgggtttacacctgacctgactgttctggcagtggagtgcaacaggctactatctaatctaatggggtccgagcaaaatcgatttcctctgcacgaaaggcgaaagagat

SEQ ID NO: 4978 - DNA, 251 bp, Glycine max
  Clone ID: 701043545H1
gcggtgagaggaaacagaagagagaagagcaatcggtgagtgaatggaatggattcaggtcctccggcgaacgatttgtgttcagtgtgccatggcaactttcatattccatgccaagccaattgttctcactggttttgcggaaattgcataatgcttgtgtggcagcacggatcagtgggttgttcatgcaagtgcccactgtgtcgtcgagccatcagtctcttagtccccacagaagagtctctgag

SEQ ID NO: 4979 - DNA, 251 bp, Glycine max
  Clone ID: 701043546H1
gcaattttgcctcattgagtgaatactacttacttatatacacattcattcttcaacaaacattttagtttattttttctctctttgatcaaattcccttcccatggtctctctctcttcaattaattccatttagctttccccaaatcccaaaccctttttcgcttagatcccaatccaattgggttatggacatggcttccagtccccgcaccgtagaagagatcttcaaggattacagcgccagaaga

SEQ ID NO: 4980 - DNA, 252 bp, Glycine max
  unsure (1)..(252): unsure at all n locations; Clone ID: 701043547H1
ggcaataaaacagcaaaagtttcaattttgtttctgttgaattttctcgggttggtttgcagtagcaatggcggagacatagtggtttactggggccaagacgagagngagggcacattgagcgaaacatgcaactctggactatacaaaatagtgaacataggctttctggcaaaatttggcggtgggcgggaaccagaaataaacctagcaggacactgcgaccctgcatcaaacggttgcaaaagtttg

SEQ ID NO: 4981 - DNA, 256 bp, Glycine max
  Clone ID: 701043548H1
gtctaaacagtcaaaaaacataatacttgttagatgaaggtaagtacctgttaatcctttcttcatcttcaacaaagtctcttctgcgatctcgcgagcatggctttgcgggcttttggtatcgcaggttgcaagacgacagattaaaagtgtgtttgttacaagctatttttctgtcaataagtttggagatcgtgcagggaataggcttttgggtgcccaagagagatttcagtctagctaccttagtagcata

SEQ ID NO: 4982 - DNA, 250 bp, Glycine max
  Clone ID: 701043549H1
gcttcttctcttcttcaactggttttgagattgccattttcttatcttgtttagtttagcttgtttggttgagaggaattaattattttgtataaaacaatgaaggagagtgtaggaaaccctttgcgtcttcaatctgtgaatcatatctccctcatatgcagatcagtggaacaatcaatggatttctatcagaacgttcttggattttaccccatcaggaggcctggctctttagattttgatgggg

SEQ ID NO: 4983 - DNA, 248 bp, Glycine max
  Clone ID: 701043550H1
catggctgaagctgcaagtgcggcacaggatcatatggggggttcaattaaccaaggttacaattcctatcctacaaatcctgtctatgcatctccgccctcaagtgctgctggtcatgcgggccatgcaccttctgcagattatggttccgtttacggcaccaattatggctattgagaacattactttacattcaattttaaatgaggagccctacgttttgtaaacattgagagttcaatttcag

SEQ ID NO: 4984 - DNA, 248 bp, Glycine max
  unsure (1)..(248): unsure at all n locations; Clone ID: 701043551H1
ccagaatgcaagtttcaagaggccacaattaaccaagacagaaatgacanaggcttgtaacatgantaangatctaaagaggattcttagtgagantttccatgatgatgatgaaggagcagagcctcagactgtattatataagancctgtggcttgaggctgangctgcactttgttccgtctattacaaggctcgctataatcaaataaagattgaaatggatanacattcataccaggnaaaag

SEQ ID NO: 4985 - DNA, 249 bp, Glycine max
  Clone ID: 701043552H1
tccaaccaaacccatggttgttgaaactttctccgagtatcctccacttggtaggtttgctgttagggacatgcgtcaaactgttgctgtgggagtcatcaagaacgttgagaagaaggatcctaccggagccaaggtcaccaaggctgcccagaagaagaagtgaatcgtgcgggctggttcatcaggggatgttggttacaataaatgttggtttcttttctgtactcttgtgtcttcttttctagg

SEQ ID NO: 4986 - DNA, 205 bp, Glycine max
  unsure (1)..(205): unsure at all n locations; Clone ID: 701043553H1
tttnaagtaaatagacatgaaggcnattaatcttctcaagctgattaccccttcctcctataaaattatgatcttatgttcaaatcaattgcaataagtgtcatggggagttggagacagttgaagctaatgttgattttggttgactttgtctgagaaaccaaaganaatgataatcaagggactaattgtgaggacctttcat

SEQ ID NO: 4987 - DNA, 247 bp, Glycine max
  unsure (1)..(247): unsure at all n locations; Clone ID: 701043554H1
ctaactagaattttncttctctctttcataacctagtgagactctgtgtcagagtttgtgaagtgaatcccataatcatgaagaaaggaaacttgggacttggtctcaaactctcagttcctgtgtctgatcaatctaattttgccaggttcctgactgaaagtgggacttttaaggatggggatctgcttgtcaacagggatggagttcgaattgtctctcagaatgatgtcgaagctccacctcc

SEQ ID NO: 4988 - DNA, 251 bp, Glycine max
  unsure (1)..(251): unsure at all n locations; Clone ID: 701043555H1
caacaaagaatcacatcgtcaacgaatcagaggcccctttcaacgaatcacatggcagaaccgtcgtccaccgccgccaccatcgctaccgctgatcctccggttccagcgaccaaaagctgggccgacgaagcggacgaagaaaccaacgcctccaccgccgaggcagaaacctcctccgttaacctggaagcgttaaccatcgacgacaaagaaaagaactcttcaaaactcttggacgaccccgacnt

SEQ ID NO: 4989 - DNA, 249 bp, Glycine max
  Clone ID: 701043556H1
caagattctaagagagattttgctgctctttgaagaagggtgtttgcttgattttggtgatgtcgctgcttctcagatctcatcaaccttaacctctcagacactactgagaaggtgatcgcagagtacatatggatcggtggatcaggaatggacctgaggagcaaagcaaggactctcccaggaccagttagcgacccttcaaagcttcccaagtggaatatgatggttcccgcacaggcaagctcc

SEQ ID NO: 4990 - DNA, 232 bp, Glycine max
  Clone ID: 701043557H1
gttttgacgcaacacactttcactgagaaaggatctctatctaccaaggagcagaataaaacccttctctctggtaagtgaataagagaatggcttcagatcggaaacttcacactttcgaggaggtggcaaagcacgaccagaccaaggattgctggctcatcatttctggcaaggtgtatgatgtcaccccttcatggaggatcatcccggaggtgatgaggttttgtta

SEQ ID NO: 4991 - DNA, 206 bp, Glycine max
  Clone ID: 701043558H1
agagcgtcgtcgtttagttagggcagaaaaccccttttcggatcggtggagcgaacctcgccggcgagacccccgaggctgttcaatcggcgatcgagcaacggcgaaaagcgacgaagatgaaggttttcgtgaagactctcaagggcacgcacttcgaaattgaagtgaacccttcggacacgctttctgaagtgaagaaaaat

SEQ ID NO: 4992 - DNA, 249 bp, Glycine max
  unsure (1)..(249): unsure at all n locations; Clone ID: 701043559H1
gcggcgggancgatngatctcgtgacggtgcttgacgttaataacagcatgagcggcgcgcagtttcacatgctaaagcgcgccatgcgtttggttatatcgtcactcggcccggctgaccggctcgccgtcgtggcttcctcggctaataccaaacggttgttacctctgaggagaatgacggctcagggacaacgcgcggcgcggcgctccgtggatcggctcgtgtgtgaccatggaaacagcgtt

SEQ ID NO: 4993 - DNA, 252 bp, Glycine max
  Clone ID: 701043560H1
atagcctcaataatctgagagagaaacaaaaacaatgaaggtttccattgccaagttccacttcccttcccctatgttttttccttctcttggccttcaacacaaaacccctcctagcagcagaaccagagccagtggttgataagcaagggaaccctttggagccaggagtagggtactacgtgtggccactttgggctgatgaaggaggcctcacactaggccaaacaaggaacaagacatgccctcttt

SEQ ID NO: 4994 - DNA, 248 bp, Glycine max
  unsure (1)..(248): unsure at all n locations; Clone ID: 701043561H1
ggaaaattgacnggtatggcatnccgngntcccaccgnggatgtctctgtngttgacctcacggnagaggctggagaaggaagcctcatatnatgnnatnaaaaatgctatcaaggaggnatcaganggcaanttgaanggaattctngttacactgaagatgatgtggtctccaccgactttgttggtgataacagatcnagtatttttgatgcnaaggctggaangcattgnataagaattttgtc

SEQ ID NO: 4995 - DNA, 252 bp, Glycine max
  unsure (1)..(252): unsure at all n locations; Clone ID: 701043562H1
anaattttcaacaaaaacatcatgccnagtaaggaacctctcttccctttccaagttatcattttttcangccatgcnccatcttcctgccccctttttcatttcctccaatcccaaacaaaacccccaaaaaatgcaatcattcccccccatcnccactctcgnatgcctttaccttanttnctttacgtcactactattnctactaccttttncncgtcccgntcnactctncgaacnggtnantgncnc

SEQ ID NO: 4996 - DNA, 255 bp, Glycine max
  unsure (1)..(255): unsure at all n locations; Clone ID: 701043563H1
cttccactcacaaaatccatgccttcccaaacgtaacaccagagttaaaaacaacttctgcaattaaacttcacatcttatgatctccccaaggcaagaccctctgttgccccanacccacttctctaccatgttcaagctcctcaacaagaatttcngcngcctcctccgccgtctccggtggccaattcgccgccgctcaaagcccaaagtagtagtgatcaacaagctcggaaagaacgccccataacccca

SEQ ID NO: 4997 - DNA, 157 bp, Glycine max
  unsure (1)..(157): unsure at all n locations; Clone ID: 701043564H1
tattatnggcatttgctttggccctttggtcaggaacttagttttatgctgtncatattcnatagcattgttngtaattctaaatgaagatatggcgagaaacattgtatttaagaaatcttcctatgcatcaatatgaaaaaagtaatttgtatct

SEQ ID NO: 4998 - DNA, 249 bp, Glycine max
  unsure (1)..(249): unsure at all n locations; Clone ID: 701043565H1
ctttactctctctgctaaaatgcaaggaggatttcaatcatttttgtcacacgggaatgtcattagaaatgctgttctacaacgggtgcgcatggtgaaccccctgttacagccaattgtctcttcgcggtttgaatctgttacacctgctcgcattgaggagcatggttttnagagcaccacaatttcagacatcttgaatgataaaggcaagggtgctgatggctcctggctttggtgcaccacaga

SEQ ID NO: 4999 - DNA, 250 bp, Glycine max
  Clone ID: 701043566H1
aaccactcttaatttctctctgtctcgtttacacatctctccaacctttcactttcgtttctcagttttattcgaatccctctctcaatctcctttccaaatggccagcgttgaggttgcacagcaaacaccaacaacagttccagaaaatgaaacaaccgaggtaagcaagacccaggaaacaaccccagtcactgaggctcctgcaacagaacaaccagcagctgaggttcctgcaacagaacaacca

SEQ ID NO: 5000 - DNA, 246 bp, Glycine max
  Clone ID: 701043567H1
ggcaatcccatgattcaatgacagaaatgcactctgaaggaatgacttttactaacagacctgggcatacaagcagtaatgtgccatttcaagggtgggatgaccataatcaggatgctactcaccattcaaatataatgtcaataaactcactgactccagtcaatggggctgctgttcaagctggccatgcagcaacgaactcggtcttacacagaaacttggattttaattattgtgatccct

SEQ ID NO: 5001 - DNA, 241 bp, Glycine max
  unsure (1)..(241): unsure at all n locations; Clone ID: 701043568H1
gancaaaattgccctccatcactttccttgttagagttggtttctgcnacctaccatgcaattccctcacctgaatccgttttctattgccacgttgtggaagcgtaacgaagatgaatggcattgggaaactcaaatcgtcgagttctgaattggaccttcacattgaagattacctaccttctggatccagtgttcaacaagaacggcatggcaagctccgactgtgtgatttgctaga

SEQ ID NO: 5002 - DNA, 251 bp, Glycine max
  unsure (1)..(251): unsure at all n locations; Clone ID: 701043569H1
tgttactaccctaacaagtttgacaaaccccaaaaaagaatcaaactttccctgcaaattttcactncttttctgcaccgccagtnatgggagatgggtgcgcggttgagggcaccacggggaattccaattctaataacnnnnnnnnnnnnnnnnnnnnnnnnnnnnnnnnnnnnnnnnnnggtgggagcaagaagaagatgacccacgaacaggtcttggccttcaagttagtgagtgagtgggttttc

SEQ ID NO: 5003 - DNA, 248 bp, Glycine max
  unsure (1)..(248): unsure at all n locations; Clone ID: 701043571H1
gatttgccccctacttttttcccctctttctatttttcgttttttttaggtcttttgaagcagaagaatggacttcctttactagagacataaatgaggactctatgcttagatgtccattcttgaggaacatcaatgagcctactaacttctcattcttttcacctttggctttaccaatgcctgttcgtggagctaaaggtccaatttttgaagatggtcccaattttgatttggcatttaggcnt

SEQ ID NO: 5004 - DNA, 246 bp, Glycine max
  Clone ID: 701043572H1
tgaagatgggaattttgagcactatagcaagcttttttggatttggaatgggaacttcaattgggctagtcattggatactatttgttcatatacttccagtcaacagatgttacggatccagtaattcaacctttgattgagcaagatgctaaaacattacaactgttgcttccagagatacccacttggattaaaaacccagactatgaccgtcttgactggctaataaatttatcgagtatat

SEQ ID NO: 5005 - DNA, 250 bp, Glycine max
  unsure (1)..(250): unsure at all n locations; Clone ID: 701043573H1
ctctttctctctcttacatgccggaatttcctctctctttctctctccggagaatagaataaaaaccctaaaccttcgctttgctgccacacacatcagatnngncactacaacttccaagttcaggaattatgtgtcactagcgatgtccgattccgttcccaaaacgcgaaaccgtccggggccgtggccgccgggatcggacgccaaggcaatgccgcctgcttcctgggctaagaaaacaggcttc

SEQ ID NO: 5006 - DNA, 248 bp, Glycine max
  Clone ID: 701043574H1
gaaggtgtcttgatagagtagctatagtatccgattatgagagtaaaagtggtgactattctaattccatggagactttgcaccgtgacccaggtggaggaattgaaaatcttgatctgcgtgtttccaatttgggccaccaggatcatttttgctgcagtctatgcccagatgtcaacattgtttatggagcaaggaacaatgatgaacacatgcattggttccttctaactacccctctcaacttt

SEQ ID NO: 5007 - DNA, 249 bp, Glycine max
  unsure (1)..(249): unsure at all n locations; Clone ID: 701043575H1
cttntncttcccatttcacncctcgtcttnccttgtttncnntgagggccaaccacnacatatgttaaacnaggaacaacctccaaaacataacatcctacgccaaacaaaactttgacctccttcagatctatacccttctntctctntctctcncngttctattttganattcnacatcatgggcacggaggttctacggccacaagattgtttcacccaacgcntcggtgttcnaccgcgtggctt

SEQ ID NO: 5008 - DNA, 250 bp, Glycine max
  Clone ID: 701043576H1
caattcccaattgaaattcccccaaagccaccttttttttattcaataaatcaacacccaattttcaaaattccaacttgtaaattgtaatcaattttctttccatttgtcaaaccataccaatcaaccaacctcgttgcttcttgtgatcactctttgaaccaccctcatggatattgatgagtgggagtttctctctgatgatggctaccttgatttcaatgaagagggtgggaagcaaaagcaaaag

SEQ ID NO: 5009 - DNA, 249 bp, Glycine max
  Clone ID: 701043577H1
ggaaagttggacttgatctttcagccatttgagaagaatttggagctgcaaattccagaaagtgaggaatacaggtgggatggtaaatatgagaattcagcttatgctcttccaaattgagaaattcctatgtctgttaaatgttgcttcttttagaattcccccaaaaatatgtcatggatttctgtactttctggtatgcattaatccaggctactttttgagttcttgaacaaatttcaacagatg

SEQ ID NO: 5010 - DNA, 248 bp, Glycine max
  unsure (1)..(248): unsure at all n locations; Clone ID: 701043578H1
atacaatcagaataacggccatccccatatttgctataccantacagtgtttttngngtcagccggtatgcntttcaataatgttatacagatgttgatgcnactttagttaaaatgtaggtcaggtgttgaacattagttatggtatagaaaactggantggaagaacatntttntcttgatncaataggatgatacgccgannaatatanagcatgatattgggagcaaaanagganacagnaccc

SEQ ID NO: 5011 - DNA, 250 bp, Glycine max
  unsure (1)..(250): unsure at all n locations; Clone ID: 701043579H1
gcgtttggccttcaggttttgangtccgaagaganagaagaagagattcctgacagcgtaatcatgtttggtgtcgtaaggcgaagggttgcttctggcagcccgtctccttggttgctaggtcagtcagctcagaaaatccggtctggcccatcagtttctgctagagcttcttccattgtggaaaaagagattgtatttcgttcaggcggatgtggatttgtccagaacttcagtcatatcagccctg

SEQ ID NO: 5012 - DNA, 253 bp, Glycine max
  unsure (1)..(253): unsure at all n locations; Clone ID: 701043580H1
gaaaccttaaaaaacaagtagtgttccgaaaagatgggctcagcaggaagtggtagaagggttcnagttcgaacagaggcacgggaaagagcgcgtgagagtggcgcgcgtgtggaagacgaggcaggggcagcacttcgttgtggagtggcgcgtgggcatcactctcttctcagactgcgtcaactncgtattctccgcgatgacaactctgacatcgttgctactgataccatgaaaaacacagtgtatg

SEQ ID NO: 5013 - DNA, 246 bp, Glycine max
  Clone ID: 701043582H1
ctaatctccatctaatagtgttaatttgtctttctctatctctatcggtcatgggtgcttttgcttttgatgaggaaaactcctccaccgtggctccggcaacactctacaaagctctgacaaaagatgctgacactatcatcccaaagattattggggccatccaaactattgaaatcgttgaaggaaatggaggacccggaaccgtcaagaagataacagctagtgaaggtgaccaaaccagtt

SEQ ID NO: 5014 - DNA, 248 bp, Glycine max
  unsure (1)..(248): unsure at all n locations; Clone ID: 701043583H1
ggcagttctagagagagaaagagaaagatcatcagtgagagattcttcattcttcttcttcattctctantctaaattncttatctaagctaacgatgatgatgaattagaaattcgtggtttccctaaaccaaactcgattcaccctctcattttctgaatttcaatggccgatcactcagattcttctcctctcgttcctccccttcccctcaccgacccttctgagatcgacctcgaagctggtt

SEQ ID NO: 5015 - DNA, 246 bp, Glycine max
  unsure (1)..(246): unsure at all n locations; Clone ID: 701043584H1
gctacatgtcaaaaacagggagaagcttctcacatcccttcgtcaacacctctccgactcttctcgttctctccatggcttcgtcctccttcaaggtggcgaggagcaaacgcgttacgacaccgatcacttggagctcttcaggcaagagagttacttcgcttacttgtntggagtcatagagcctggattctatgcagctattgacgttgcaactgggnattctatcctatttgctcctaggtt

SEQ ID NO: 5016 - DNA, 249 bp, Glycine max
  unsure (1)..(249): unsure at all n locations; Clone ID: 701043585H1
gaaacgccagagctccatcaccggaacaagacccaggcaggtgtcgcagtacgcggagaaaggacgctatataaatatatttgtccccgatgctcnctatttcagccactcgtatattcttcctccgctcaacaactataagattannnnnnnnnnnnnnnnnncttcaattcttctccaatcccaaccgcaccctncttccgtccctttcttcacacttccttcaaaccacttccttcgtctttctct

SEQ ID NO: 5017 - DNA, 212 bp, Glycine max
  unsure (1)..(212): unsure at all n locations; Clone ID: 701043586H1
tctggtttttttattctgaatcagaancaatccctgcttcccttgaattattntcatggcttatcatccaccgccgttctacttgtttctctcatcctccttctctcccaattccttccanatcttacttttccgtcacattcgcattcaatcctgtaacactttctgacgcttagcaggnaccaccaaactcaacagcgtaggagccgnta

SEQ ID NO: 5018 - DNA, 118 bp, Glycine max
  unsure (1)..(118): unsure at all n locations; Clone ID: 701043587H1
ctcaactccatcctcctccntttttcctttactttcttctggnattccccttagtgcgattgctacctccaccttctccctaaagacccatcaaactttacaaaaaanaaaaaaaggg

SEQ ID NO: 5019 - DNA, 245 bp, Glycine max
  Clone ID: 701043589H1
gaaacatgtctgcttcaagcttacaccataacctgtctccatggtgcttctctccagtccttactatattcttctctctgcgcttcttttcaggcaatttccatcttccatgatccaaggaaggtttcatctatctttcttgcaaaataaacatttgtttgaatttccattgttcagctcaaacctctgttgttttttctctttgtttggtgggtaccccactgaacatggcaactgaagctgca

SEQ ID NO: 5020 - DNA, 246 bp, Glycine max
  unsure (1)..(246): unsure at all n locations; Clone ID: 701043590H1
gtcaccgattgatacacccttcttcgttcctcactcaccagccacngattctctcttctctattcagtaaacggctgttttgtatacgagctgtcccggtctcagcctctacatcccaaaacatcaaaacaactggttgggctccttgtatggcttcttcctcagttggtagaagagctacatattcaacacaatctgtatcgacaaatgagccagttgtatctgtagattggcttatgataacct

SEQ ID NO: 5021 - DNA, 248 bp, Glycine max
  unsure (1)..(248): unsure at all n locations; Clone ID: 701043592H1
gctagcaatcatgtcttctcgcttagatgagtgcttgttggaggtggatgggtacggtgatggcgatggaaaggcgaaacccaaattcctgataaggaattctcagcagagtttcggangatggggttcccatcctcaaaggcataaatcttgagatcccagagggtgtgatcgtgggagtgataggccccagtggtagcggcaagtcaacgttcttgagggcccttaaccgcctctgggagccaccc

SEQ ID NO: 5022 - DNA, 247 bp, Glycine max
  Clone ID: 701043593H1
gtgcaaggcatcaccatttatgctcctgtcacatctccaaacactgatggcatcaacccagattcttgcacaaatgtaagaattgaagattgctatatagtttctggggatgactgtgtggcggttaagagtggatgggatgagtatggcataaaatttgggtggcccaccaaacagctagtgataagaaggctaacatgcatctcaccatacagtgcaaccattgccttgggaagtgagatgtcag

SEQ ID NO: 5023 - DNA, 246 bp, Glycine max
  unsure (1)..(246): unsure at all n locations; Clone ID: 701043594H1
gttatcttctcatatagtgcagagttagtgttgtagaagcaacctgtgtcttggtatttttnttnttcanagatacttataanaagggaagcaactgagataaanttcctgaatctgtttctcattgagaagatggtggtaatgcagcattttgttgagatgggttcaggtgaaaagtctgcaagattttgttgtatgtcaaatgttatttgtattattataagaatatattgggggtgttagttg

SEQ ID NO: 5024 - DNA, 251 bp, Glycine max
  unsure (1)..(251): unsure at all n locations; Clone ID: 701043596H1
gtaattttggtcattgattaattctgcaattgancagaggagccatggccaaaatncgcacttggaagcacccgagaggccactcagccagactgcattcaggccctcatcgttgaattcatagccaccttcctctttgtctttgttggcgttggttcttccatggtcgttgacaagcttggtggggatgcactagtgggattgtttgctgtggccgtggcacatgcacttgtggtggctgtaatgatctc

SEQ ID NO: 5025 - DNA, 268 bp, Glycine max
  unsure (1)..(268): unsure at all n locations; Clone ID: 701043601H1
gcttggtcccccgatcccctcgcacttcaaaccccaacgctatgaaaactaagcgcgccgttgacgccggagganttncccccgccgacgaaccttccttcaagcggaccaacttctccggcgagaaaactacggccgaagctgaggaggagcaagccttcgatcccgagcctcacggcggcgattccaccggtctcaaactctcggtctgctcctccaatgcgcggatgcgtcgccatggacaacctcgattcgccaaggacctcnt

SEQ ID NO: 5026 - DNA, 264 bp, Glycine max
  unsure (1)..(264): unsure at all n locations; Clone ID: 701043602H1
ttttaaggacaactttntttaatgccaccaatattgttggctgaatgatatatttatgctcaatctggaagaaatgaagagaaataaaaatatcttcttcatgatagaaaaatangaggtacaagcagctgaatggatganattatgcttaatgttagccactattttctttctggaacttaccacaatcgtgagcttgcatgagagttgtaagangaacttgtggaatacagaggatgtgaagagggtcataagtatttctgg

SEQ ID NO: 5027 - DNA, 264 bp, Glycine max
  unsure (1)..(264): unsure at all n locations; Clone ID: 701043603H1
ctcgaaggagagacccacttcttggtggcacgcggattaagacccgcaaacggaatattgctgcgccgctggaccctgcagcattctcggatncagtggtccagatttatttggataatgctggtgatctggaacttattgctaagagcattgaatcttcagaccttaacttttcaagatacggcgatacctttttngaggttgttttcactgggggtcgtacacaacctggaataccaagcctgatgagggggaccgccatcc

SEQ ID NO: 5028 - DNA, 263 bp, Glycine max
  unsure (1)..(263): unsure at all n locations; Clone ID: 701043606H1
aaacatctcaatgggttcttcttctattacaacatcgcccncaaccatgaccatggctgcgatcgtgctcctgttcacggtctttgccgtttcctccgccctagacatgtcgataatctcgtacgacagcgcccacgcggacaaggccgccangcngcgcaccgaggaggagctgatgtccatgtacgagcagtggctcgtgaagcacgggaaggtgtacaacgcgctcggcgagaaggagaagcgttccagatcttcaagga

SEQ ID NO: 5029 - DNA, 262 bp, Glycine max
  Clone ID: 701043607H1
gggacttgacgaggtatgaggaactggacaaagagactcaagatcagatgaacgaggagctctctggatggaaacttgttgtgggtgatgtgtttagggagcctgattgctcgaagcttctctgtgtgatggttggagatggggttcaaattcttggaatggctggtgttactattgtttttgcagcacttggattcatgtcacctgcatcccgaggaatgctactaacagggatgatcattttatatcttatcctgggaat

SEQ ID NO: 5030 - DNA, 264 bp, Glycine max
  Clone ID: 701043608H1
ggtttatggaactcctagctattgggtgcagaaactttttattgaatccagtggagcaacatttattgactcgacactcagtacaacttcatctaataaacttgctgcatctgtaattatttggcaagattcttcagataagaaaaattacctaagaataaaggcagtaaactttggagcagccgctgagagtcttgacattgatttaagtgggttggactcaaatgtgcaacaatatggttctacaataacagtgcttacatc

SEQ ID NO: 5031 - DNA, 263 bp, Glycine max
  Clone ID: 701043609H1
cgcgacatgcaactcatctctgaagcctacgatgttttgaagcacgtcggtggcttgtcgaattccgagcttgcggagattttcgtggagtggaacagaggggaacttgagagtttcttgattgaaattaccgccgatatttttaaagtgaaagatgaagatggtgaagggtttttggtggataagattttggataagactgggatgaaggggaccgggaaatggacggtgcagcaggcggcagagctttcgatagccgcgcc

SEQ ID NO: 5032 - DNA, 265 bp, Glycine max
  unsure (1)..(265): unsure at all n locations; Clone ID: 701043610H1
gaattcggagttccgtgaggntcctgagaaggatcagatccacgcggcgacgcttttgagcttgggaggccatccgaatcgattcggcgcggaacaaggatgatgtggcggaggcgctgtcgaggcagtactgggaatataatgtgcttgactatgaggagaaagtggtagatggttttnatgatgtatatggncccctataatgattcagtaatgcaaggaaagatgccatctcgaacagatcttgaagcaaaccctggaggtt

SEQ ID NO: 5033 - DNA, 263 bp, Glycine max
  unsure (1)..(263): unsure at all n locations; Clone ID: 701043611H1
ctgcagggcttttcctaacacttatgngacaccctttggctcactttctcagggccactgccaaagtccctgatgctcagatcataactgagttccctcctattagggtggggattgtcttttgtgggagacaatctcctggagggcataatgtcatttggggtatccacaatgctctcaaaattcacaatcccaacagtgttttgcttggntttcttggtggttcagaaggtctatttgcccagaaaactctggagataact

SEQ ID NO: 5034 - DNA, 263 bp, Glycine max
  Clone ID: 701043612H1
gaagaacgctcgctcgcactgtccagatcttaatcaagaggagtgagttttgtttttccagccatgacgccgctgatcctgcatgctgggaaaaccaacaaaaattcttacaagacactcattgcagccgagtatgctggcgtccaagttgattttgcccctaattttgagatgggtgtctccaataaaactcctgaatttctcaagatcaatcctattggcaaggttcctgtgctggaaacccccgatggtccaatattcga

SEQ ID NO: 5035 - DNA, 254 bp, Glycine max
  unsure (1)..(254): unsure at all n locations; Clone ID: 701043613H1
ggcgaatatgaacatgtacaacaacaccactccgatgggtggttactcttcgtttctgccgttatctggcgccgtcacggagacggtgcttccgtcctcggttttcaacaaccattctctcggtaacgccgtgaaatccgaaagcggcgttacctatannnnnnnnnnnnnnnnnnnnnnnnnnnnnattaacaacgttgttatgactcccacgtcgagaaagcgttcccgagataacagcaacaattacggtt

SEQ ID NO: 5036 - DNA, 261 bp, Glycine max
  Clone ID: 701043614H1
gttcatccttattacaaggactgggcacgttaagcttcacaattcattcacattcacattgtagctccgttaacaagattcactttcatctatccactcactaacgtgatcacacactcatcatcatcaataatggcggagttgttggaaaaggccaaaaactatgttgcggagaaagtcaccaacatgcccaagccagaggcgagtgtcaccgacgtggacttcaagcgcgtgagccgcgacaggtcgagtacttggcca

SEQ ID NO: 5037 - DNA, 261 bp, Glycine max
  unsure (1)..(261): unsure at all n locations; Clone ID: 701043615H1
gatgactgatgcagaactgagaaatatggttagcaagaccctcacttgtagaattgataagagagagaactgcaatgagaagatggaccaatttctaataagatgtttctaccattctggtcaatatgattctcaggaaaactttgcagcactagacaagaagctgaaggancatgagggtgggagaacttctaatcgcctgttttatctttcaattcctcctaatatattcatagatgctgttaaatgtgcaagcttgtc

SEQ ID NO: 5038 - DNA, 267 bp, Glycine max
  unsure (1)..(267): unsure at all n locations; Clone ID: 701043617H1
anncgttaaggcggatctatcgtcgaacaaggtgactgttaccggtaaaatggacgccgagaagctgcgagataagattgccgagagaacaaagaagaaggttgatatcatatcagctccgccgaaaaaagaagccgccgttgcggaaaaaccgccgganaagaaggcagaagacaagaagcctgaggagaaaaaaccagaagaaaaacctaaagagagtacggtggttttgaagatcaaactacactgtgacggttgcnttgcgaa

SEQ ID NO: 5039 - DNA, 263 bp, Glycine max
  unsure (1)..(263): unsure at all n locations; Clone ID: 701043618H1
cagaaaggtatgagaacattatggacctgaccttggagatattgggttgggttgagtcactggaagatgcgctgactcagtttacttcccctgaagatttggatggagagaatatgtacagatgtggaaggtgcacatcatatgttcgagctagaaagcaactgagcatacatgaggctcctaacatcttgactatagttctgaagagatttcaggaaggaagctatgggaaanttaacaagtgcataacttttcctgaaatg

SEQ ID NO: 5040 - DNA, 263 bp, Glycine max
  unsure (1)..(263): unsure at all n locations; Clone ID: 701043619H1
ggaggatatttacggtgtggaattgatggattgacattaatagatcaaacggtttatagtttccttacctgtgcaaaaagttgatttctcttgccgtgatggagcattataaatgacattctacatgtccatgttgacaacaaaataataaaatgagaatacgttttggacatgaagaagagattcaaattggttgcgcttttaattagattttagcatgagaatgttgtgtagcactgtaatgttatattnccatgagtatg

SEQ ID NO: 5041 - DNA, 263 bp, Glycine max
  unsure (1)..(263): unsure at all n locations; Clone ID: 701043620H1
ctgtctctgtgtttgcggctgaggattccgaacgagcgaccttcttcgtttctcgcaaagtttaagtcctcatgggtaaggaaaagactcacatcaacattgtcgtcattggacatgtcgactctgggaagtcaactaccactggtcatttgatctacaagcttggaggtattgacaagcgtgtgattganaggttcgagaaggaggctgctgagatgaacaagaggtcattcaagtatgcctgggtgcttgacaagctcaag

SEQ ID NO: 5042 - DNA, 260 bp, Glycine max
  unsure (1)..(260): unsure at all n locations; Clone ID: 701043622H1
cagagaaacatttcactaatagagagacataagcataatattgagaaataatggagggttgtacttattgtgtgaagttgctatgccttgttgggtttgtggtgcttgtgagtactattgcaggggtggagagtgctggtgaatgtgggaaanctaccaccccagataatgaggctataagcttgcaccatgtgcctcagcagcacaagatgagaatgctagtgtttctcagagttgctgtgctcaggtgaagaaaattg

SEQ ID NO: 5043 - DNA, 262 bp, Glycine max
  unsure (1)..(262): unsure at all n locations; Clone ID: 701043623H1
cacagacccctctcatggcatcttcttctggtagtttagacacctctgcaagtgcaaactccttcaccaacttcaccttctccacacancctttcannacccacttctttctctgacctccttgcttctcccttggacaacaacaagccaccacagggtggtttgtctgagagaactggctctggtgttcccaaattcaagtccacaccaccaccttctctgcctctctctccccctcccatttctcctcttctnacttngc

SEQ ID NO: 5044 - DNA, 262 bp, Glycine max
  unsure (1)..(262): unsure at all n locations; Clone ID: 701043624H1
gatcaagtcatttagagtgccagagctttttatagaggttccagaaactgcaacaattgggtccttgaagaggacagtgatggatgcagtgactgctgtgcttggaggtgaattgcacattggtgtttttctccagggaaaacaagttaaggatgacagtaaaactctacttcaaactggaatttctcntcataacgagttggatgctttgggtttcaccctggagcctaattcttcacaaagcctaccgattgtatgtgct

SEQ ID NO: 5045 - DNA, 261 bp, Glycine max
  Clone ID: 701043625H1
ttttcctgcaactgatgactagttcggtcataatttacgtacaagtagaatagcccacagttgtttatggaaaatcgaaattaaaacctccaattttattgtattttcacgttgggttctcgtactcataaaatgtttgtttttacatatcgtaggcaatgaatgcatgtatttgacaattgacgggatcattttacaacactataagttggcctgtatgtcgttaagttgttgctgttatctacatattcatgtaatgaa

SEQ ID NO: 5046 - DNA, 264 bp, Glycine max
  unsure (1)..(264): unsure at all n locations; Clone ID: 701043627H1
ccaaaactgaacccaccctcttcgtccggttcacagttcactagcgttcgattcgtttctctccctctgtactctcctaatgggttcactcgaggccccaaccgccgcggaaaacggttccgctcccgccgccggcaacggaaaatccccctccgtcaacggcgcggaggcggcgctggagcccgacgcatcgaagcggcggagatcgtcggtgctcccactggaggtgggcacgcgcgtcatgtgccggtggaaggacaacna

SEQ ID NO: 5047 - DNA, 265 bp, Glycine max
  unsure (1)..(265): unsure at all n locations; Clone ID: 701043628H1
ggtgtttgttgatcaactaccgggnccnaaanacgcngggcatagnttngncntcncatagatttacgcaccaaanggnnntgancgctccccacagtcanccncggngcactgagatccttatagtccttgagggtactctctatgttggatttgtgacttccaatcaagatggaaatcgcctcttcaccaaagngctgaacaagggtgangtgtttgtgttcccaattggtctcattcatttccaactcaatgtgggatatgg

SEQ ID NO: 5048 - DNA, 243 bp, Glycine max
  unsure (1)..(243): unsure at all n locations; Clone ID: 701043629H1
gtncgagaccgccaacgccgccacacgacaccttcaaggnatacggcgtcgacatgaaaccaccccaccaacacgttctccaactacgccggcggngcaacggcgccgtcgagagattctccagctaccgcgataaggccaacgtcggagccgactccttcacctcgtacgccaagtccgccaacgccgccgacatcggattctccaactacggcaagtccttcaacgagggaaccgacacgt

SEQ ID NO: 5049 - DNA, 248 bp, Glycine max
  unsure (1)..(248): unsure at all n locations; Clone ID: 701043630H1
ctggtaatatacctctcatctctcattagaagtgtaattgcactccacancttgattaacaacaagatgcttaacaaggaacatgagcgggcagaagattcgaaatcagttacggtgccaggtgcagctgcttaagttttgaggggttgtgatgttcggagctctaaatgtcatttgagtacatggatttgagattgttacacctttcctatttctgctagggttagagtacttacacctaacatggc

SEQ ID NO: 5050 - DNA, 262 bp, Glycine max
  unsure (1)..(262): unsure at all n locations; Clone ID: 701043631H1
gttttgttttttcactctttggccatttttcctattcatncttttgagtcccgaccaaaaccctaattcgagttcgattgcaaaacatctcagtttttgaattccaccttctccgaccaanggctgccaaacctcttactaccgaggcgattgcgcttacggaaaagaagatggacatgacactagatgacataatcaaaatgtctaaaaacccgaagaataagaagcaaagaagggttccgaacaaaagtnnnanattttc

SEQ ID NO: 5051 - DNA, 263 bp, Glycine max
  Clone ID: 701043632H1
aatcttcgtgattttagggatactctcgctgcatattccagaactcttctcttctgctttggttttttcgttgtttcgtgttcgagttttcgtgcatttggcttgaacttgtgctgatctattctgtttcttcgtcatggcaaccggacaactattctcgcgtactacacagggcttgttttacaactacaagcaacttcccatccagcggatgcttgattttgacttcctttgcggcagggaaacaccatcagttgctggaa

SEQ ID NO: 5052 - DNA, 256 bp, Glycine max
  Clone ID: 701043633H1
cctgcatttcagcagagtgattctgttcactacaatgccatcatcactatcctctttcctccatatggttcctattctctcccttcttgtactctcatgtgtgatttgttctagtagtgctcagggaccaccttcacctggctactaccccagttccaaaattagtcctgttagtttttatcaagggtttagaaacctatggggacctcagcatcagaggctagaccaggctcattgacaatcggcttgatctaac

SEQ ID NO: 5053 - DNA, 263 bp, Glycine max
  unsure (1)..(263): unsure at all n locations; Clone ID: 701043636H1
tttttctttaagatggcgatgacgncaacgacggagtccgatctcgattncgagcttcgctatctcagtctcgccnnaaccgataccttcactgctttccaaaacctcttaccggatgcgatgacttccttttcagcttgtggactaatagaccctctttgttctcaaaacctcactcccaagcattccaccatcactgcaaccattgattctcagtcatcgatttgcgccactagtaatgttgggagcccagtctcagctaa

SEQ ID NO: 5054 - DNA, 251 bp, Glycine max
  unsure (1)..(251): unsure at all n locations; Clone ID: 701043637H1
ctcttctgcgttcttcccaccaacatcgaaaccatgtccaccgacttgcacctccacaacgacctgccccagctccgaatnnnnnnnnnnnnnnnnnnnnnnnnnnnnnnnaaaaccgacgacctcccctccgacgatgacgaccgcaacgccgtctcttccgtcatcactcaaaccgagaccgaaactgacggagccaccatcgtcgacgtcgccgtcgccgtcgccgtcaacgtcaacgtcaacgtcaa

SEQ ID NO: 5055 - DNA, 259 bp, Glycine max
  unsure (1)..(259): unsure at all n locations; Clone ID: 701043640H1
tagagagagagaaganggcttttttcttctttttttttncttttttgttggtttctcttgtncttttttgtaggtactgaggaagaaagaccaagactttatccgtgtgcttcacttagctcaagagcgtacaattcaggcaaaggcctnaagtcggagtgtgtnaaggtttcttaggagttgctgctgtcttgnctgaagaaatggnggtatatggcaaatctatggttgcaggtcctgcaaatgttatttttcngtc

SEQ ID NO: 5056 - DNA, 260 bp, Glycine max
  Clone ID: 701043643H1
cacaacactagctatagtaagctacacttatttgaggttggagaaatatggctaaagatgttgaggttcaagagcaaggaggagagtactctgcaaaagactaccatgaccctcctccagcacccttgttcgacccagaggagctcacacagtggtccttttatagagccctaatcgctgagttcatagcaacccttcttcttcctttatgtcaccgtgctcaccattattggctacaaaaggcagactgatgccacgct

SEQ ID NO: 5057 - DNA, 262 bp, Glycine max
  unsure (1)..(262): unsure at all n locations; Clone ID: 701043644H1
cgtgtcnctcccacacngnttgcnaacacaaacaagtaattgaaactcctanagttgaatcagaaacactccacgcctacgctattgccttataatcntngttccangctntnccctctccncnncgnanacagccttcctttcgagggtntcatccaattatgaactgtnaagtgtnnnagctacaaggaantggnactggagcantttgagatacgcgaggtcttgcgatgcatattgcacacgatcgactttcaccgtg

SEQ ID NO: 5058 - DNA, 261 bp, Glycine max
  unsure (1)..(261): unsure at all n locations; Clone ID: 701043645H1
gcgagcattttccgctatggccgaagaatttgtgaagggctctgttcatcaaaacggcgtcgctgtcataaccctccgattcgccccaaagctctcaacgccatgaacctagatatggatgtaaagtataaaagttatcttgatgaatgggaatctgacccaagggtcaaatgcgtactggttgatagcagctcgcctcgagccttttgcgctggtatggatattanaggggttgttgctgaaatacaaaaggacaaaaac

SEQ ID NO: 5059 - DNA, 256 bp, Glycine max
  unsure (1)..(256): unsure at all n locations; Clone ID: 701043646H1
gaaaaaagaggcgcaagatgagtggtagggtttctgggaaggtgaagtggttcaacgatcagaaggggtttggattcataacccctgacgatggcagcgaggaactcttcgttcaccaatctcagatcaaatctgacggtttccgaagcctngctgaaggagagtccgttgagttcgctattgaatctgaatctgacggacgcgccaaggctgttgatgtcatggccccgacggcgccaggtccanggaaccagac

SEQ ID NO: 5060 - DNA, 257 bp, Glycine max
  unsure (1)..(257): unsure at all n locations; Clone ID: 701043647H1
acaacttctgctacttcctactccaaccgcacttctgttccgcaattatcatgggcaaggtcaagatcggaatcaacggatttggaagaattggccgtttggtagccagagtggctctgcagagagacgatgttgaactcgttgccgttaacgaccctttcatcaccaccgattacatgacatacatgtttaaatacgacagtgttcatggacactggaagcatcacgatgtcnccgttaaggacgagnagnccctt

SEQ ID NO: 5061 - DNA, 260 bp, Glycine max
  unsure (1)..(260): unsure at all n locations; Clone ID: 701043648H1
acatgccaaacgacagcgttctgagtcttttcttcttcgtnggnctcttcacatgccttctctctgctaattcccacgatgaccatattttcctaccgagtcaactccatgacgatgactcagtgagttgcactgctaccgacccaaaccttaactacaagccggtgatcggantcctgacccaccccggcgacggtgcctctggccggctcagcaacgccaccggggtttcttacatcgccgcctcctagttaaattcg

SEQ ID NO: 5062 - DNA, 259 bp, Glycine max
  unsure (1)..(259): unsure at all n locations; Clone ID: 701043650H1
cttatatctatatttcagttcattttgttctccaataatttcnnctgctactttagagaccttgctgcaaaggttctctcttagcntggtaacaatgggtttgaaagcactttttgtttggtgcataatatggttggcgtttgcacagttgtcactaggnggnagagtgaggcattacnagtttnatgtggagtncatgatcagaaagccagattgcttggaacacgttgtgatgggaatcaacggccagtttccaggc

SEQ ID NO: 5063 - DNA, 263 bp, Glycine max
  Clone ID: 701043651H1
atgcaacgaccacaattttgttcctcaccaaaatgggaactcttaagcctattgctatccagcttgctcttccaactgggaatccaaatacttcatccaagcaagttctcactcctcccaaagatgccacctctaaatggctctggcaacttggcaaagcacatgtttgctccaatgatgctggtgttcatacacttgtgcaccactggttacgtatacatgcttgcatggaaccgttgataattgcaactcatcggcaattg

SEQ ID NO: 5064 - DNA, 78 bp, Glycine max
  unsure (1)..(78): unsure at all n locations; Clone ID: 701043653H1
cagncctaagatcgnaanttgaagttagcgcaaatttgtggcttatntttttnnttcaaaaaanaaaatttgngtnat

SEQ ID NO: 5065 - DNA, 261 bp, Glycine max
  unsure (1)..(261): unsure at all n locations; Clone ID: 701043654H1
gattgtggtgagtagcataatggaggcaccgaagctgaaggtagtgacactgaaagccatcgaagcaactccgncaaccttcaaagagttcggtcaggtcgtggaggcttcgcgagacggccaggaattcggtccccacgatgctcaactcgacctttcccaaggaactccaaggttctacattatcaagcttgaaaaatgcccgcttaagttttctagtattacacatcatgcaatcgtgactcagtgcctcgggtctat

SEQ ID NO: 5066 - DNA, 259 bp, Glycine max
  unsure (1)..(259): unsure at all n locations; Clone ID: 701043655H1
aagtatctctaacccaccaaaatcaccaaaacgacaccttcctttaccttctcttccttcattcgaccaccaaacgcaagctcccatgcccgaanctacatttccaaacgacactgcgcattgatgtgtcccacctcgctcctcttcctgatccgttcctgttccgtctccgttcacgctatctgatgaataggtggatgactatgaagaacctcatgctagaggacacgggaataccacgctctgataggatgtgaca

SEQ ID NO: 5067 - DNA, 265 bp, Glycine max
  unsure (1)..(265): unsure at all n locations; Clone ID: 701043656H1
taaagcatttcaacaacttcacctgcgctgcgtgttgtcgtttggcttgctttcctcaccgaaacgaaagtaacttaacccgcaaacttccaaaatannnnnnnnnnnnnnnnnnnnnnnnncaaccactatgttgcagagacctagacgccgttgcgagggcactgccatgggcgccatcgttctcgatctccgtcccggtctcggaatcggacccttctccctcgggatgcctatatgtgaagcatttgctcagatagagcag

SEQ ID NO: 5068 - DNA, 259 bp, Glycine max
  unsure (1)..(259): unsure at all n locations; Clone ID: 701043657H1
ggctgagtctaatcccacaattaacctctctgtgttggaagtggcatcaccacaagcttatggcctggttggaatggcagcgactcttgcaggagtttgtcaagtaccacttactgcagttttgcttctgtttgaattgacacaggactatcggattgttctaccacttcttggagcagtaggcttgtcgtcatggatttcatctgtacagacaaaaagaggagatgatggaggggcaaaanaaattgagttagaaaac

SEQ ID NO: 5069 - DNA, 257 bp, Glycine max
  unsure (1)..(257): unsure at all n locations; Clone ID: 701043658H1
tattttcccccctaattcttcttttttgtccatggtacccccattctaattagcatgattccctaccttaagcaggttttcaattagattggattctggctgtttatgggtatntgttggtccaattttgctaggggaagaaatcgaagtagtgaagactaaagacaaatattgctatgggnacaaacggcnnggagggaggatctggggtaacatatcaaganatggtggangatgangccanggacattaagnat

SEQ ID NO: 5070 - DNA, 260 bp, Glycine max
  unsure (1)..(260): unsure at all n locations; Clone ID: 701043659H1
cagcgatctgggacttttctttctcccccacaccacacccagattcaaaaactcgctctgcttctgctactgcaattnccccttccgtttcgtttcgatctcaaaacatgttcttcttcgattggttctatggcattctagcttccctcggtctctggcagaaagaagccaaaattctcttcctggtctcgataatgcagggaagaccacacttcttcacatgctcaaagacgagagattagttcagcaccngccgaccc

SEQ ID NO: 5071 - DNA, 259 bp, Glycine max
  unsure (1)..(259): unsure at all n locations; Clone ID: 701043660H1
ctctgcaacaaatctctctccttccaaaactaagctctggttcaatcactgtcattcttctcctgcagagcaatctcagatctattattcatcatctatcacaaaacacaatgttgcaagacatgtggaatgctcctcccggtttcagaccctccaagtctgcaccttcttctccggcgaagctcttgggatggttcccagaacgcgttctgagaccttccacgtggctcacnaggtccccatcggtgacactccttat

SEQ ID NO: 5072 - DNA, 256 bp, Glycine max
  unsure (1)..(256): unsure at all n locations; Clone ID: 701043661H1
aaattgggtggttttcgattgaactgtgatgtccaagccactgctaggcatagcggaagaggaaggtcaaagcnatgtcactttgttggtttcttcctcagccaccatggaaagtgtgtgcctgaatagctcaaaactgaaagagcgcaactacatggggttatctgattgttcatctgtggacagctccgcgccgtccttctcagatgagactaagagcaatctgaacctcagggctactgagctcagncngggg

SEQ ID NO: 5073 - DNA, 256 bp, Glycine max
  unsure (1)..(256): unsure at all n locations; Clone ID: 701043662H1
taatgcatcggatgacgntgntacgagtgacagaatttatacaattgactctgttcattgtggggcaccatataatggtttcacagattccaaagctggtgcttttgaagattatgcaaccactcctagggagtcagggaatcatgctgctgattttgaggatccctacataaagaagcttcatatgaggcttcaggcacttgaggctgatagggaatcaatgaggcaggcaatcatttcaatgcgcacggataaa

SEQ ID NO: 5074 - DNA, 260 bp, Glycine max
  unsure (1)..(260): unsure at all n locations; Clone ID: 701043663H1
tcaacatctaacaccatanacacgnaacanncttcagccactattcttcaaggaaaaacaaaatgaaagacacaatggaaactcctacgacactcaccaccttgctccgccacgtcgccgccaaattcccctcccgccgtgccatctccgtcgctgccaaattcgacctcacccactcccgcctccaccgcctggtcgaatccgccgccgctcagttagtctccgccggcgtcaaacccggcgacgtcgtcgcnctcacc

SEQ ID NO: 5075 - DNA, 262 bp, Glycine max
  unsure (1)..(262): unsure at all n locations; Clone ID: 701043665H1
caggaaggtacnttggtggagagaagatacatcaaagggaagtggaaatgggtagtccatggaagtcctgaacatcaaactttgacatcgattacacttgcgctgcaagatgaatcaagcgaaacattcatttctttattctttcctacttcaaatggatctgtttttgagtatcaaatgccaaaacagttaggaactgttccaaacaatcagtttccnggagcntggggaagtcatgagcatcccttacatgcaaaagcag

SEQ ID NO: 5076 - DNA, 238 bp, Glycine max
  unsure (1)..(238): unsure at all n locations; Clone ID: 701043666H1
tgaagatcactcaaaccaatctactctatctatctggtanaggcatggagctttgttggcaaaaatctatccatggctcttaaaagaagcatggaggattgtgtgagagggttctcacccttcacactccacctcctaaagtttgcttatgctttagctattggcttctctaatcaataaccacaaaagggtatgacacatggaggaacatagttctctctatgagtggctgaagcag

SEQ ID NO: 5077 - DNA, 203 bp, Glycine max
  unsure (1)..(203): unsure at all n locations; Clone ID: 701043669H1
acttctacttccctttgttctcaaaccttatcccttatcctcccaaaaccaaaccatgtctacctccgcagcttctcncgcactcccaaccctcactctccgaactcgacaacctctctgttctccccaatgcttctcctcgtccctctccctcacccctaactccaaacccatttccatttccgccgttttcctcaaaacaa

SEQ ID NO: 5078 - DNA, 258 bp, Glycine max
  unsure (1)..(258): unsure at all n locations; Clone ID: 701043670H1
aatatataaatataatggcggaatttacatccaccaccactaacactaacagtaacagcggtctcaggttgaaagccaaagtagccatagtcaccggaggtgcaagtggcatcggcgaacgaacggcgcgtgtgttcgcggagaaggngcccgtatggtggtgctcgcagacatccaagacgagcttgggaatcaggtggctgcgtccattggaacccagcggtgcacctacatccactgcgacgtggcagacgaaga

SEQ ID NO: 5079 - DNA, 259 bp, Glycine max
  unsure (1)..(259): unsure at all n locations; Clone ID: 701043671H1
ggttggngttggagtgagtaacccagcacagcaatggcattgagactgagactcaaagtgtcttcaattgggtcaccttttctgcagttaggtnccttctgcaagtgcagcatgctctgtttccaaacttggttttcatccaccacgcttgcaactcaacaaaaattcacacccaataaggctttttgttcgggctgctagaattgagtccaaaggtgttaccttgggtttcaggaccccacaatttcagcttccggag

SEQ ID NO: 5080 - DNA, 261 bp, Glycine max
  unsure (1)..(261): unsure at all n locations; Clone ID: 701043672H1
cgaaaatggggtgggtttggnaggatgacaacagcgacgatgttcgacgcgataactncttcggaacgatgcgccaccaccaaggtcgtcaaatctcagtgcagaacagaggaggtcgaaactggaaagttcgtcagaaagtgcgagaaaaccgaagagattctcaggaattgcatcggaaagcccgccgaagtgttgcaatcaaacaaagagtatactgaagaggatatcacagatgaagtacttaaaggaaggtctgtt

SEQ ID NO: 5081 - DNA, 257 bp, Glycine max
  Clone ID: 701043673H1
caactttttcgacggcaaggttatgaaggaggcactgaccaaggtgctggtgcccttctacccaatggctgggcggctccggcgagatgacgacggtcgcgtcgagattgactgcgacggtcagggggtgcttttcgtggaggccgacactggcgccgtcatcgacgatttcggcgatttcgctcccacccttgagctccgccagcttatccccgccgtggattattcacaaggaatagcatcctatcccctgttgg

SEQ ID NO: 5082 - DNA, 256 bp, Glycine max
  Clone ID: 701043674H1
gacagagtagtacagattactaccaatggctaccaaggtttacattgtttattattctacgtatggacatgttgagaagctagctagagagatagaaaaaggggctgcttctgtggagggagtagaagcaaaactgtggcaggtacctgaaacattgcctgaagaagtccttgctaagttgggagtccctccaaagagtgatgttccaattattactcccaatgagcttcctgaggctgatggctttttgtttggt

SEQ ID NO: 5083 - DNA, 252 bp, Glycine max
  Clone ID: 701043675H1
aaaatgggaaggctttaagctttatatacggtagcaaacagttgaaaacaaaggggggtctggcggctagaactgccacaagcaacgtgttctgtagtgctggttacaagtgtgcaatgagggcactccaatcccaatgctgcagcccggatgaagtgatatttggtcctgattttttccaatcactgtactgccatctgctgtgtggtctgattttccgggaggaagttgagtttgtatcttccacattgc

SEQ ID NO: 5084 - DNA, 257 bp, Glycine max
  unsure (1)..(257): unsure at all n locations; Clone ID: 701043676H1
cccaaggccaaaatgaggaggttggngcatgtcactactatccaataattcttcantgacngggtgactgcagaattattggatagtagtnacatgccccaangccaaaatgaggaggttggtgacgctcaanatgaagatggtgaaattgctgttgggaatgatgaggaatccaaanntccacagaacttggatgttactggtcaagaggnnttacaaggtgacaaaactggaactttagaagagaatccggatca

SEQ ID NO: 5085 - DNA, 188 bp, Glycine max
  unsure (1)..(188): unsure at all n locations; Clone ID: 701043677H1
gttcaggggtggtggtaggggtgncagaggcagaggnaggggcggtngaggaagaggaggagacagaggtacacccttcaaagctagaggcggtggtagaggtggtggaggccgtggaggaggcaggggtggtggccgtggcggtggcagaggtggaatgaagggtggtagcaaggttgttgttcagc

SEQ ID NO: 5086 - DNA, 255 bp, Glycine max
  unsure (1)..(255): unsure at all n locations; Clone ID: 701043678H1
cattaccctcacaaagtaagcnatggcataccaaaactacaacaactatgggtggcgatgcccctctgacgagtaccaagtgtacgaccccccagtagaggcaacntatcctaggcaaaatcatcacaagaagggtcatgtggcattcagaaccaactatgaggattctatagctgaagtagaatccaacgttgnggctcgagaacataacagcaggttatggnncacagngcttacaaaagcgtggnccaagag

SEQ ID NO: 5087 - DNA, 258 bp, Glycine max
  unsure (1)..(258): unsure at all n locations; Clone ID: 701043679H1
cttccaaagtgggcatcaaaaactagaagaaaatggggtgtggcaatttgttcttcacagtcctcataaccttctcagtggcactcataacatacaacatcataatctctgccaatgcccctctcaagcaggacttcccaggcccctcacgcccctccatcaaggtggatcccctcatcaagatgccacttccacagatcatcatcctcggagaaatcaaaaaagaggttgttncacatgctgtcatgcctctggttt

SEQ ID NO: 5088 - DNA, 258 bp, Glycine max
  Clone ID: 701043681H1
gttggctgcatatttgttgggagtcatggttgtccaagatttggttgaagtgagtgaaactgtaatctcaatattcacaggggttctcttgttgatcctccttgtcccaattgttattcccattacattgacttttggcccagagcaaaggcatccggaggaagaggcacttcttccaccaccacagaataaagaagcagggaaatctcagctggattctgatgaagtgatactgagcgagttggaagatgagaagcc

SEQ ID NO: 5089 - DNA, 254 bp, Glycine max
  Clone ID: 701043682H1
gagaccatggtgaacctagtggtagcacagagaccattgctacatgggcttatgaagatggcggggatcaggccctacacggtggagatagagcccgggactaccatgagcttctgggtcccttcggagaccataacaaagcctaagaaaaaggacgagaagcccagaatcagggcgaaccagcaagcccgcggtgattctggtgcacggcttcgcggccgaggggatcgtgacgtggcagttccaagtaggcg

SEQ ID NO: 5090 - DNA, 259 bp, Glycine max
  unsure (1)..(259): unsure at all n locations; Clone ID: 701043683H1
ggttcattcactgtcaccagggatacctctggtgaggttcttggcaggggtactaagatcactctcttccncaaggaggatcagctagagtaccttgaggagcgccggttgaaggatttgattaagaagcattctgagttcattagctacccaatttctctttgggttgagaagactaccgagaaggagatttctnacgatgaggatgaggaagagaagaaggatgaggagggtaaggtggaggatgttgatgaggaga

SEQ ID NO: 5091 - DNA, 257 bp, Glycine max
  unsure (1)..(257): unsure at all n locations; Clone ID: 701043684H1
cattttcagaggaaaatggcgggtacggtttcgacttgtttcntcttcgtgtttcttctttctctccttcttccttttcagatctccgctgaggaatcctcggagaaggagttcgtactcacattggatcactctaactttcacgacactgtcagcaagcacgatttcatcgtcgtcgagttctacgccccatggtgtggtcactgtaagaagcttgctccggagtatnagaaagctgcttctatcttgagtagtca

SEQ ID NO: 5092 - DNA, 256 bp, Glycine max
  unsure (1)..(256): unsure at all n locations; Clone ID: 701043685H1
aatttcgtttgtnagacaagctaggcacaatttttgttattcctatcttatcttaacattgtttcttggagttgattganatggcagtgcaacctgaaattgagcatcccaggaaggcctatggatgggcagctagggatacatctggtgttctctcccctttttggttctctagaaggaaaacaggggagaaagacgtgacatttaaagtgttgtattgtggagtatgccactcggaccttcacaagttgaaaaa

SEQ ID NO: 5093 - DNA, 254 bp, Glycine max
  Clone ID: 701043686H1
aaatagatgaagggcaatagaggctgctccgtagtctaggcaaacttttcttcataatcatctttatattgatattcatctattttcccctcaagtttgatgaagctatgtatacgttgtatcttcctggttgtagtgtattgccctttctcgcatttgtttttccccacaatactaatggtttgaacagcaattagacttctatatgaactgaagttgtttctctataagtattggagtccattattatcaaa

SEQ ID NO: 5094 - DNA, 258 bp, Glycine max
  unsure (1)..(258): unsure at all n locations; Clone ID: 701043687H1
gtgacactaatttcaaatggaaattgctctctcataacagaattcnagaggaggaagaacaagtatataaaaactatatctacatagttatatctctctcttgagatttcaaacgtagagatatggaatggaggaagtgctacttggatgtgatattggtgcccttgggatttctaacaagcattgggtaccatttctggctatggcacaaggttcgaactcagccacacacaaccatcattggcatcaatgctagtg

SEQ ID NO: 5095 - DNA, 236 bp, Glycine max
  Clone ID: 701043688H1
tatatcctctccttcaccgtcgctctctccaacgatcacaacaacatcgtcatcccatggcaaacgccgcatctggtatggcagtccatgatgactgcaagttaaggtttttggagctgaagacaaagaggacacaccgtttcatagtttttaagattgaggagcagcagaagcaggtcattgtggagaagctggtgagccagcccaaggctatgaagatttcactgccagccttc

SEQ ID NO: 5096 - DNA, 254 bp, Glycine max
  Clone ID: 701043689H1
acgccgtcgacgccgtggctggaagaatatggcttcatttgtttctacccactgtatccttcctagcggggttggatttgtgcatgaccaagatcgttcttgtggtagaactaacactttgcatcttcaaaatgctcctaaaagccctagctctctctcctttttgctctccgtgcgagaaagtagatcagatgccgttgttgttcagagcaagggtcgatcgtctttttctcaaacagctgctgtgaggcatc

SEQ ID NO: 5097 - DNA, 255 bp, Glycine max
  Clone ID: 701043690H1
gcgacaacgaggaggaggaagaagtgcagagccagttaaagatacgaactgggttgggttctttggatgctttggaagaatctcttcccatcaagaggggattgtcgagtcattttgatggaaaatcaaaatcgttctcagatctatctcaaatgagtaatttgagtaatctgaaggagttgcaaaagcaagagagtccttcaacaagagaagaagggttttgattgcatccaagtggtccagaagatcatcttt

SEQ ID NO: 5098 - DNA, 159 bp, Glycine max
  Clone ID: 701043691H1
cctcaaccagagataaagagtcaccttcttatttttctgaatctcgcggcgttgttctttctgctgctgcggctgtggttccggcggcgatgggacagcaatcgttgatctacagcttcgtcgctctcaggctcaagatttcaggcagcagggaaccaa

SEQ ID NO: 5099 - DNA, 255 bp, Glycine max
  unsure (1)..(255): unsure at all n locations; Clone ID: 701043692H1
ttggaagtcatggctgcccatggatgcaagangctcgtgttctcttcttcagcaactgtatatggttggccaaaggaagttccatgcacagaagagttccctctgtcagcaatgaacccatatggacgaactaagcttatcattgaagaaatttgtcgtgatgtccaccgtgcagagccagattggaaaataatattgttaagntacttcaacccagtcggtgcacaccctagcggttgtattggggaggatccc

SEQ ID NO: 5100 - DNA, 254 bp, Glycine max
  unsure (1)..(254): unsure at all n locations; Clone ID: 701043693H1
cttctttctttttctgtgagcctttctttcaggttcttaacttnatcagtgtgcagtgtccaaatcataagggtagttgcaaattgcaatggctaagcatgatgttgagggtggttccttctctgcaaaggactaccatgatcctcctccagcaccgttgattgatgctgnggaactcacacagtggnccttctacagggctttgattgctgagtncattgccacaatgctctccccttancntcacagngcac

SEQ ID NO: 5101 - DNA, 254 bp, Glycine max
  unsure (1)..(254): unsure at all n locations; Clone ID: 701043694H1
tgaagatcatgcccgtccagnagcagacccgcgccggtcagcgaacccgcttcaaggccttcgtggtggtcggcgacaacaacggccacgtcggtctcggagtgaagtgcagcaaggaagtcgccaccgccatacgcggcgccatcattctcgcaaagctctctgttattcctgtgaggagaggctattggggtaacaagatcggaaagccccacaccgttccctgcaagttaccggaaagtgtggctccgtca

SEQ ID NO: 5102 - DNA, 255 bp, Glycine max
  unsure (1)..(255): unsure at all n locations; Clone ID: 701043695H1
ttaattccaaattagaatcctcaaattccaaaattgaaaaggtcaagatgactggtacaggatctccttgtggagcctgcaagttcttgagaagaaaatgtgtgagaggctgtgtttttgcaccttacttttgccaagagcaaggtgctanccattttgcagccattcataaggtcttggtgcaagcaatgtctcaaagctcctcgctcaccttcctgtgagtgatcgttgtgaagctgctgtcacnatctccta

SEQ ID NO: 5103 - DNA, 260 bp, Glycine max
  unsure (1)..(260): unsure at all n locations; Clone ID: 701043696H1
gtgatttcagtgagtgatcngtgttcacttgatctcatcataatcgtcagcgtcaattgaagaagatgcccgatcagaaacatcgccgtcggaaggcctgaagaggcgactcaccccgacacgttgaaggcggctttggctgagttcatctcaaccttcatcttcgtgttcgccggctcaggctccggcatcgcctacaacaagctcaccgacaacggcgctgccacccctgccggcctcatctccgcctccatcgccca

SEQ ID NO: 5104 - DNA, 270 bp, Glycine max
  unsure (1)..(270): unsure at all n locations; Clone ID: 700966901H1
ttcccttgtgttgtgcctccaaaagtcacgtgcgacgacacgtcgtcacgtgtcgacaccgngttgggcctttgtgtgtcgtttatgtataagaatgcgtgtgggtttgggtgttaaggtatcgttgggtgtgatcggtgtgagtctaatatttgcagtgctgaaaatgtcgcagttgttggacaaagccaaaaactatgttgcggagaaagtcacgaacatgcccaagcccgaggcgagtgtcaccgacgtggatttcaagcgcgtgac

SEQ ID NO: 5105 - DNA, 259 bp, Glycine max
  unsure (1)..(259): unsure at all n locations; Clone ID: 700966903H1
caaaaatggatgattctggaagtaaaactaaactgttgaatccatggatgntccacttccagaaactcgctctcgaactcaagtgccctctctgtttgagtttgttcaagaggccggtgttacttccatgcaaccacttgtttctgcaattcatgtttggctgattgcataacggctgggcctggatgtgctgtttgtaaggcaacgtatgctcaaacagatgttaggcatgtgccttttgtggaaaacgtggtggcaa

SEQ ID NO: 5106 - DNA, 267 bp, Glycine max
  Clone ID: 700966904H1
gcagtatgagtttaagatcacatcttgcttccatgaaaacttgcccctaatactgacaagggttgtccttgggatagccttacaagtcgtatgcagttacatcacattccctctctattccctagtaacacagatgggatctcacatgaagaaaacaatctttgaggagcaaactgcaaaggcacttaagaaatggcaaaaggctgcaaaggacaagagaaagttaaggaaagcaggaatagatattccttcagggactatgagtgg

SEQ ID NO: 5107 - DNA, 264 bp, Glycine max
  Clone ID: 700966905H1
caaccttgactggtacaagggaccaactctccttgaggctcttgaccaaatcaatgagcccaagaggccctccgacaagcctctaaggcttccattgcaggatgtctacaagattggtggtattggtactgtgccagtgggacgtgtagagactggggttgtgaagcctggtatggtggtgacttttggtcccactgggctgacaactgaggttaagtctgttgagatgcaccatgaggctctcacagaggctcttccaggtga

SEQ ID NO: 5108 - DNA, 262 bp, Glycine max
  Clone ID: 700966906H1
attcaggacaaagagggtatcccaccagaccaacagaggctcatctttgctggaaagcagctagaagatggccgaaccttggctgattacaacatccaaaaagaatctaccctccacttggttctccgccttcgtggtgggatgcaaatctttgtcaagactctcactggaaagaccatcacccttgaggtggagagctctgacactattgacaatgtcaaagccaagattcaggacaaagaaggtatcccaccagaccaac

SEQ ID NO: 5109 - DNA, 263 bp, Glycine max
  Clone ID: 700966907H1
gaaagagagagcaatgagagagatacagttacccttaagccaaacacagaaggttcgtcttcagaaggctctggaacagttagagtctctgtcaacgaaggtgaattccgatgcttcggtaatcatcgccgattccatccacgtcaaccacgaagatggcgtcctcaagggacacggaaccgccgacctcaacggcgaagtcgtcgccaccctctgcggcgtcgtcgagcgcgtcaacaaacttgtctacgttcgcgcgttac

SEQ ID NO: 5110 - DNA, 263 bp, Glycine max
  Clone ID: 700966908H1
aaccccccttttccaacccaatttttctccataaaccctagattcaacgaacccgccgaccaagctcgaacctcacgtcgcaaaaaaacacttcttttcccctctccgaggttgtcgtgtcggagcatagccatgttgttccctcgaggaaattgatgatttttcataacattggggtctcgttttgcttgtggggtcaccttgaaggagggaaaagtaacgagctttggggctgaatcgtggtgggtctgttgagtatgcat

SEQ ID NO: 5111 - DNA, 265 bp, Glycine max
  Clone ID: 700966909H1
cactgagtaacacgcccgaatatggcaccctcaatctccgacgaaatgccaagcaccaccacctctctcctccgccgcaaccggtggctcccctccagcatcaaactgaaaacaacccttttctcagaactctccggcgcggtgggtgacctaggcacctacatccccatagttctagccttatccttagtgaacaacttggacctcaccaccacactggtcttcactgctctctacaacatcgccaccggtctcctcttcggcc

SEQ ID NO: 5112 - DNA, 264 bp, Glycine max
  Clone ID: 700966910H1
gaatcatatacacatatattaaactgaacgaagttgtcctagaagagaagaaccaatggctgctggcgtgggtttccgcagtcacaaatctttgttaataattcttttgggttttcttggcttgttctcctttacagttgaagcagacacaaagaaataccaatttgatattcaagtaaagaatgtgagtagactatgtcatgcaaaacccattgtaacagtaaatgggaggttcccagggccaacgatttatgtgagagaagg

SEQ ID NO: 5113 - DNA, 134 bp, Glycine max
  unsure (1)..(134): unsure at all n locations; Clone ID: 700966911H1
ttttagtcccctgctactgcatctatctctcactttcagnatagcatgggatttggtataanaccatcncanagaagtacaaaancgatgtgcagctgattccattgtgaagaagagagcaganagnnatangc

SEQ ID NO: 5114 - DNA, 223 bp, Glycine max
  unsure (1)..(223): unsure at all n locations; Clone ID: 700966912H1
ggtagagaaagtgaaaaagagtttgggggagatcttgtaaataaggaaaccctagtttttccttttntgggttatttttccttgattttcccattaatttttcagctccaacctgctactgttaccaataaggaatctcttgtcattgcttcaatcgaacaagagtgaacgagttttgtgggattgtgtattgttagaaagccgcaaagatgatgtccaggtc

SEQ ID NO: 5115 - DNA, 262 bp, Glycine max
  Clone ID: 700966913H1
aagatttcacatagagctcaaggcattgtttcacttgcaagcagatggcatgcgctagtaacatgcacttctgattcatctaaactgagatattgtgctagtacagggagcttggaggctgcaaaacatttaaactcaatgtttttggattactcagaaagtgatctagagtcatcagattacattggtgtgccttcacatacccagttagcttcttatatgtcctcgcataacaagagacaagcctttggtacgtaataca

SEQ ID NO: 5116 - DNA, 262 bp, Glycine max
  Clone ID: 700966915H1
ttcgttcgctcttaccttcttcaccttccttcctctctctctctagagaatggaaccggaatccggaacttcgacttctcggaatccttctcagttgtcttgggtgaatctgtctaggaatttattattagcgtatcaaagctttggtgtggtgtatggagatctgagcacttctcctctctatgtcttcacaagcaccttcaaggggaagttgcagaatcaccatgacgaggaaactatattcggcacgttttcgttgatt

SEQ ID NO: 5117 - DNA, 264 bp, Glycine max
  unsure (1)..(264): unsure at all n locations; Clone ID: 700966916H1
cacaanatcaagcacacaagcnnattcacttctctgntctgacacacatnttaagttcccgagaaagatctagagagtaattaagatgggtacgtggttcacaaatgcaaggccgtatctgctgttagtggcagttcaatttgggtctgctggcatgttcatatttgcgatggatgctataaagaagggtatgagccattacgtgttcatcgtctatcgtaatgccatcgcctctgtatctcttgctcccttcgcatttgttct

SEQ ID NO: 5118 - DNA, 270 bp, Glycine max
  unsure (1)..(270): unsure at all n locations; Clone ID: 700966917H1
tttcactaccacgcccactgttagatcttctcctttctcacctcttccaacaatacatcttctgcctactgctaggtgaaatgcagaatccagatgcaaatcaacttcccgaagttgattcgttgccagatgggtttgttgagagtactacagagcctcttgctcctgcaactccatctcctgaacaagagaaacccctgaatagttacaaggatgatggtccctctgaccttattcattctaatgaacgatcaaatgatttgggagana

SEQ ID NO: 5119 - DNA, 265 bp, Glycine max
  Clone ID: 700966918H1
ggcattttgggcatcgcttgggccttcggtggcatgatcttcatccttgtttactgcactgccggaatctctgggggacacatcaaccctgcggtgacattcgggttgttccttggacgcaaggtgtctttggtgagggcgttgttgtacatgatagcacagtgtgccggtgcaatctgcggtgctgggttggccaaagggttccagaaatcgttctacaacaggtacggaggtggggttaacactgtcagcgatggctacaaca

SEQ ID NO: 5120 - DNA, 265 bp, Glycine max
  unsure (1)..(265): unsure at all n locations; Clone ID: 700966919H1
tcccaatttcgcgataccaaaacctcagcaatcaacaatgtcgtttttctcaaggggccgtngcgacgacgacacggtggacgactacgacgagtacgaccccaccccttacggcggcggctacgacatcgccctcacctacggccgccccatcccaccctccgatgagacctgctaccctctaggagcctcttcttctgatgacaacttcgattatgatcgccctcaatacncctctaacgctgaaccctctgcttatggtgat

SEQ ID NO: 5121 - DNA, 264 bp, Glycine max
  unsure (1)..(264): unsure at all n locations; Clone ID: 700966920H1
gcctgnaaaaggggtctcctgaatatgatgcgttggctaagaaccctgagaaggagtttttgaagactattactggcaagaaggagaccctcattgaccttacagttatagaaatcttgtcaaggcacgcatctgatgagttctaccttgggcagagagatggtggtgactactggacttctgatgccggtccattagaggcatttaagaggtttggaaagaagcttgaagagattgaaaagaagcttatagagaagaacaaag

SEQ ID NO: 5122 - DNA, 260 bp, Glycine max
  Clone ID: 700966921H1
tgttgatcactttggttttgaggattgtctaaatgacccccgtgagtcagagactttccggccattagacatgcatcatgggatggaagttcgccttggtctatctaagggaccagtgtacccaagtattatataattaaatttgactgttattctagtaccagaaaacagtattttgtgatcgaagcttcttgttattcattaaaatggaagtgtccgaggattctccatatgtagtcgtggacttgtgttttcctatg

SEQ ID NO: 5123 - DNA, 261 bp, Glycine max
  unsure (1)..(261): unsure at all n locations; Clone ID: 700966922H1
tctcatgggcatcttcttctggtagtttagacacctctgcaagtgcaaactccttcaccaacttcaccttctccacacaccctttcatgnncncttctttctctgaccttcttgcttctcccacagacaacaacaaaccaccacannnnnnnnnnnnnnnnttgtctgagagaactggctctggtgtccccaaattcaagtccacaccaccaccttctctgcctctctctccccctcccatttctccttcttcctactttt

SEQ ID NO: 5124 - DNA, 257 bp, Glycine max
  Clone ID: 700966923H1
ggtttctttaacaagggactggtccctgggctttgttttggtgcgggtcttggaattactgtctttgggatggcctacatgtttgtacacgatggattggttcacaagagattcccggtgggccccatagccaacgtgccctatctcagaagggtggcctctgctcaccaacttcaccattcggaaaaattcgatggagtgccttatgggctgtttatgggaccaaaggaagttgaagaggtgggggggctagaaga

SEQ ID NO: 5125 - DNA, 262 bp, Glycine max
  Clone ID: 700966924H1
cttattcaactgctttttaaactgttaatggaaatggcttcctcatccttcatcttaggctcagatttcaaatgcatgttctcttcgaggaacactaaaaccatgtctggatttggtgcactgagacatccacacccaaatggtttgttcagtaaatgcttccactttcatactctatctactagaacggtgtcagggactacaaagatggtttctgatgtttatgttggtggagtcacaagtttcagagtcaatagcaaga

SEQ ID NO: 5126 - DNA, 261 bp, Glycine max
  Clone ID: 700966925H1
cttgctggttgccacactacaccgatatttccaccaaacccgtttgcgttgttgtttgcgaataaatggcgactaagaggagcgtgggaacgttgaaggagggtgatttgaaggggaagagggtattcgtgagggtcgatctgaacgtgcctttggatgacaaccttaacatcaccgatgacactagagtccgtgctgctgttcccaccatcaagtacttgactggttatggtgctaaagtgatcctttctagccatttgg

SEQ ID NO: 5127 - DNA, 82 bp, Glycine max
  Clone ID: 700966926H1
gttcatgtggctatgttagatgcttacttttatattaaattagactgcatgttatggtaaatgtatctttgtttccttcagt

SEQ ID NO: 5128 - DNA, 208 bp, Glycine max
  Clone ID: 700966927H1
cacaatggtcatggaagaatctaaccctttagacaatgaagttcaaccaaccacttcatcatcctctttcaccattactactccctctacctcctcttcctcctccatagaagaagccactaacactactactaaggagaaaaagaagaagagagccattagtaatattgaagggaagcaccctacgtatagaggagtacgtatgcgt

SEQ ID NO: 5129 - DNA, 260 bp, Glycine max
  Clone ID: 700966928H1
cagaggtgttgagtgagttcaaatcaattttaggcagaaaaatgaggtgttttggtcttgtagtgataggtctagtggttgtgcttggagggttacccttctcttcaaatgcaggattagatcccttcttttacaagaagagttgtccccaggtgcatttcattgtatttagagtcgtagagaaagtttcaagaaccgatacacgtatgcctgccagcctcgtcaggcttttctttcatgactgctttgttcaaggctgt

SEQ ID NO: 5130 - DNA, 262 bp, Glycine max
  unsure (1)..(262): unsure at all n locations; Clone ID: 700966929H1
ctcactcgttcattccaacctacccttattcttcttcttcaattccacacccatcatggaattgntttccgatcctctttctcctcgccaccctcatcaccctcgcctccggtgcccgccacgatattctccggttaccctccgaagcatccacttttttcaaagcacccggtggcgatcaaaacgatgagggcacgaggtgggccgttttaattgccggttccaatggctactggaattacaggcaccagtctgatgtttg

SEQ ID NO: 5131 - DNA, 261 bp, Glycine max
  Clone ID: 700966930H1
gctaacccacagtccctccctcacccacgtctctccccgcttcagatcttaaacgtctttcgctgttccaagatgggtgtggctgagaacattcccgatatggaggagggtaccttggagattggaatggaatacagaactgtatctggagttgctggaccattggtcattcttgacaaagttaagggacccaaatttcaagagattgttaatattcgtttaggagatggaactactcggcgtggacaagttctagaggtt

SEQ ID NO: 5132 - DNA, 261 bp, Glycine max
  Clone ID: 700966931H1
gcatgttaggatttccttttatttttttccaattatataggtaacccttaaattttcccttcagtttatgcatgtttggatttccttttattttttccaattatataggtaacccttaaattttcccttcagttttttgagtttatatatgtattccctgaatcgatctaacatgaatagctttctaagggtactcttctcgggatgaggcaaaccatttttgagtttatatttgattccctgaatcaaaggtacccatcc

SEQ ID NO: 5133 - DNA, 164 bp, Glycine max
  unsure (1)..(164): unsure at all n locations; Clone ID: 700966934H1
ctttccccaaacaatggttggtttttgggtgcaatcaatgattggcacttctaattgctacnnnnnnnnnnnnnnnnnnnnnnnnnnnnnnnnnngattgttcaatgtagcgttttgttttacctgtattgtaagatttacacgatataacgttctcgttacaa

SEQ ID NO: 5134 - DNA, 265 bp, Glycine max
  unsure (1)..(265): unsure at all n locations; Clone ID: 700966935H1
gaaactatcaatcttgaaccagcattgaataacaacagcatcactgttgttccacagcaaccagtgccacaagcaacaccaacatcaactccaacaccacaacaagcacaaacaacaacagttcctgaggccccacaagtncagccattggtcnnnnnnnnnnnnnnnnnnnnnnnnatagtggtgagtaatgtggaaatcaacaaagctgataataacggtgagaatttgatgatggaagcaagctcttcaaggtggccaaaag

SEQ ID NO: 5135 - DNA, 261 bp, Glycine max
  unsure (1)..(261): unsure at all n locations; Clone ID: 700966936H1
aatcaatcttctgagagcgtttggttgaaagtagcaaagatgtttcctttcgggcaaaagggtcaaaagataaaggggactatggtggttatgcagaagaatgtgttggatatcaacagcatcaccagtgttggagggatcgntgaccaaggcttaggcttcataggcagtgcagtcgatgcacttacttttgcagccaccaaaatctccatccagttgattagtgctaccaaggctgatggtgggaaaggaaaaattggg

SEQ ID NO: 5136 - DNA, 260 bp, Glycine max
  Clone ID: 700966937H1
ggttggcggattaaccctaatttgtacgaagaagggaaggtttgccttagccttctaaatacatggacaggcagaggaaatgaagtatgggatcctaaatcttctagcatccttcaggtcctagtttcactgcaaggcttagtactcaactctaagccttacttcaatgaagctgggtatgataagcaggttggaacagccgaaggagagaaaaattcattgtcatacaatgagaatacctttttacttaactgcaagac

SEQ ID NO: 5137 - DNA, 258 bp, Glycine max
  Clone ID: 700966938H1
ctctttcttcttttttagccacccctctcttgaaaaatctagatctcgttcttccttgatctacgttacgcttttagtgaccggatctgtatggatctgaaccagatctacacgccgatggtggttttggcctggtacaataaatcttccatcggagttttgctctgtataggttcgatccatcgttattagcgtcttgatattgttattttcatttgtcatataggtctttcatagatctgatgcatggaggctcag

SEQ ID NO: 5138 - DNA, 149 bp, Glycine max
  unsure (1)..(149): unsure at all n locations; Clone ID: 700966939H1
ttctcatatcctcaatcaccccccctcgcactcgctcttcccttcctctggtggcgacaatgtcgactcctgcnaggaagaggctgatgagagactcaagangctgcaacangatccgcttgcngggntcantngtgccccccaggata

SEQ ID NO: 5139 - DNA, 259 bp, Glycine max
  unsure (1)..(259): unsure at all n locations; Clone ID: 700966940H1
caaacgtttcagggaagtcgctgataantgcggagnattgnttctctgcgacatggcgcacactagcngccttntggccgcgcaagaagtnaacagctccttcnagtattncganattntgaccaccangantnacaanagcttncggngcccacgtgcgnggatgatcttttaccggaanggccccaagccgccgnagaaggggcagccggagaacgcggtttatgatttcgaggacaagattaacttcgcggtnttc

SEQ ID NO: 5140 - DNA, 259 bp, Glycine max
  unsure (1)..(259): unsure at all n locations; Clone ID: 700966941H1
gattgctagaatggaatttcgatgctcagtcatctcttttaccattctcttctctcttgctcttgcaggagagagccatgtccatgcatcgctacctgaggaagattattgggaagctgtttggccaaacactcccattcccactgcactgcgagagcttctaaagcctctccctgcaggtgntgaaatcgatgaactccctaagcaaattgatgatacacagtacccaaaaacattcttctataaagaagaccttcat

SEQ ID NO: 5141 - DNA, 258 bp, Glycine max
  Clone ID: 700966942H1
aactagtaattaagcaagcaagaatcacaaattggaaccatgtttctcaaatgttttggcttcggcgctcagagacagtatccaacggtgatagaagagttgtgccatcgattttctctcgcagatctaaggaaatcaaccaacaatttcgatcaaaacacagtaattgatcgtggaggatgtggtagagtatataaaggttgtctccagcacaatgaacatgcttctgatacagtcgctgtaaagcgattgggaatg

SEQ ID NO: 5142 - DNA, 259 bp, Glycine max
  unsure (1)..(259): unsure at all n locations; Clone ID: 700966943H1
tanaaagagggttagaacaacttaacacagatgggtcaaaatcaaaacatgttgttcagctttccattttcgtagtgggattcttctcttcttgctttctccagtgtcatgaagaagagttcttcatcatcattccagaacttgggatctttcccaagtccaggggnaccctattatagggagagaaacattaggagccaaaagggttggtgctcagagagagtttcaaattcaaagctttcaactagtgctagtagcg

SEQ ID NO: 5143 - DNA, 258 bp, Glycine max
  Clone ID: 700966944H1
aacgatgttcttttggatcttctgtctatcggatcaccttctgctgaaagcagctcatctacagtagacatcttatcctccaattcgagtaacaaagcaccagtttcttcatcattggatggtctctcatctctttcactttcgacaaaaacaacttcaaatgctgctcctatgatgaatttattggatggttttgcccccagcccgccaacagaaaacaatggatcggtttatccatcagtaactgcatttgagagc

SEQ ID NO: 5144 - DNA, 258 bp, Glycine max
  Clone ID: 700966945H1
cacattttctgtgcgctctaacaaacattctcgttcacactttcagattgtgtgaagatgggggcgggtggccgaactgatgttcctcctgccaacaggaagtcagaggttgaccctttgaagcgggtgccatttgaaaaacctccatttagtctcagccaaatcaagaaggtcattccacctcactgtttccagcgttctgttttccgctcattctcctatgttgtttacgacctcaccatagccttctgcctctat

SEQ ID NO: 5145 - DNA, 257 bp, Glycine max
  Clone ID: 700966946H1
gccagctagggcttgagatctcatatatcatggctacctccatggtgaagcttatgcttttctctgctctcatactcttgtccttgcaagcagttgtgtctgtaacaccactgcattttcaacatccactagaccctttaaccaaacaagagataagtcttgtccaaaccatagtccaaaacaagtacccaagctcaagtaacaggttgagcttccactacattggactcgacgaacctgaaaaggatgccatcctc

SEQ ID NO: 5146 - DNA, 258 bp, Glycine max
  Clone ID: 700966947H1
gaatgtttcccttgtttgtgtgaactaccttctagctaggctttccattctttccattgatctatctttctactttttggttgtcttcaacatgttttgtaccttaaattgagtctaggtccctatctcttgcttcatatgtatatttcaatagggtgtcatcgttgagaaatttcatctgtgggaagcctataacatgttgctaatataatttaagcacttgttggcaaacttgtaaatgatttcatagttttctga

SEQ ID NO: 5147 - DNA, 258 bp, Glycine max
  unsure (1)..(258): unsure at all n locations; Clone ID: 700966948H1
cncagcttttgttctcgcacttcgctgtctgaggttctggattctcagtgtttgcgaacgctggcatcatcctttngggaagaatggatcatcaagggcatagccagaacccatctatgggggtggttggtagtggagctcaattagcatatggttctaacccatatcagccaggccaaataactgggccaccggggtctgttgtgacatcagttggtaccattcaatccacacctgctggagctcagctaggacagc

SEQ ID NO: 5148 - DNA, 265 bp, Glycine max
  Clone ID: 700966949H1
gtcaacttccggcgccggcaggtacatggcttttccgccgtctccgtccgcgcctccgtcgccgcacctctccggtcttcgctccactcccctctccgacccggacaaatatctagctgagttgttgggagaacgtaacaagcttagtcccttcatggctgtgcttcctcactgctttcgattgtttaaccaagaaattttgcgtgtaaccacgctgatggggaatgcatcagttttaggtcaaagtgggcttgaacacgctagc

SEQ ID NO: 5149 - DNA, 262 bp, Glycine max
  Clone ID: 700966950H1
tgttaactggcgtgatgctcttgctgtggtagcagaggttgcccaccaagtcaaaccggaagaaattgttggcatagctggcaaactttctgatgctgagtccatgattgcactaaaagatttcataaataggatggggtcaaatgatgtatggggtgaaggcattggtgtaaatactaatgctgatttcagatcaggatatattatgaatactagcattgctggtcttgaaaaagcggatgcgttcctgttggttggcacc

SEQ ID NO: 5150 - DNA, 256 bp, Glycine max
  unsure (1)..(256): unsure at all n locations; Clone ID: 700966951H1
tatatatctggaatggcatttacacctgagccagtagttcccccagtcagtgctcgccctgatcaagtggaaaaggttcttaaaactcggtatcacgatgccaagaataaactgcaaggaaaagagcttgatttactcattgttatcttgccggataataatggatcactatatggtgacctcaaacgtatttgtgagacagatctaggacttgtttcacaatgttgcttaactaagcntgtcttcaaatgagcag

SEQ ID NO: 5151 - DNA, 260 bp, Glycine max
  Clone ID: 700966952H1
ttgaccttttgccggttgttgtgttgcattggtgcaaatggcgttcttcagaagcgtttctgcactttctcgacttcgctctcgcgtgggccagcaatctaatcttgcgaattcagttagatggctccaaactccgagctccagtaacactgatctttattctgagttgaaggaactagttccagagtatcaggaacgtgttaagaagctgaagaaagatcatggaagtgttgaattgggaaaaattactgttgatatgg

SEQ ID NO: 5152 - DNA, 258 bp, Glycine max
  unsure (1)..(258): unsure at all n locations; Clone ID: 700966953H1
caggcaagccccactcaaccaccacacctctcctcgttcacgctacccctttctgctcttcttctacctttcaagttttaaaagtataaagatggcagagacattcctatttacctcagagtcggtgaacgagggacaccctgacaagctctgcgaccaaatctccgatgctgtcctcgacgcttgcctcgagcaggacccagacagcaaagttgcctgcgaaacatgcancaaaaccaacttggtcatggtcttcgg

SEQ ID NO: 5153 - DNA, 255 bp, Glycine max
  Clone ID: 700966954H1
ggaagcgcttctcacttgcccacaataagaattcctctcaaatttcaatttttcatttgaaaataataaaaccctaaaagaggggttgcaagcaaaatgagaagctcgaagatgtggatggttttcatgtgtctgacggtgagcttcttcgctcgcattgaatcgctatccgtgacggtgaacgacgtcgagtgcgtctacgagtacgtactttacgagggcgacaccgtttcggggaactttgttgtcgtcgac

SEQ ID NO: 5154 - DNA, 256 bp, Glycine max
  Clone ID: 700966955H1
aattacaacaccaatctcacccatttcaaaaaaaggccgttagtgttactattcgtaaaatggccactcttgttctttaccaattctttctcaaactcttgctcctaatttcagtctttcagctttcctttgctgctaggagactcaaccagctggttcaggaccagtcacagttactccattaccacaacggtcctcttctatacggcaaaatcgccgtgaacctaatctggtatggtcacttcaaaccatccca

SEQ ID NO: 5155 - DNA, 258 bp, Glycine max
  Clone ID: 700966956H1
atttattaattttatgtttttatggctttccacgaccatctccagcacgaaatagcgttccagcgtttcacggaggagcaagagttgaccgagaacagagacatgcagcagaggctcccacctccgacatggctcaacaacgttaacgcgcgtcaacagaatttcctcgacaccgagaagagcgtggatcggaacaaccgaagcgagagcaattgcgaatccgaggatttgagggaatacaaagcggacattctaggt

SEQ ID NO: 5156 - DNA, 254 bp, Glycine max
  Clone ID: 700966957H1
tcctgtcttctcgtgctggccagtctagagctgactaagaaaggagttgtgctgcaaaatattctttgaccacccatctgttttaacctctttttagagggggtgagggaggtaattattagtttttccgagcttagcaatgttcaggcagcattttcaggctttagcaattgtgtgaaagttcaattcaccatttgtggtgtttgtttgtgtaattaggtttatgtttacttaataaagcttcttaagcttcc

SEQ ID NO: 5157 - DNA, 194 bp, Glycine max
  Clone ID: 700966958H1
gttaatgatttaggatatacaaagagatacgtgcgctgcctacagatatcagaagtggtaaatagtatgaaagacttgatagattacagcagagaaactgggactggacctatggagagcttagcaaaattccctcggagaacaagtggttcatctggacctcgtggtcaagcacaacagcatgaagaacaatt

SEQ ID NO: 5158 - DNA, 256 bp, Glycine max
  Clone ID: 700966960H1
ctaatctccatctaatagtgttaatttgtctttctctatctctatcggtcatgggtgcttttgcttttgatgaggaaaactcctccaccgtggctccggcaacactctacaaagctctgacaaaagatgctgacactatcatcccaaagattattggggccatccaaactattgaaatcgttgaaggaaatggaggacccggaaccgtcaagaagataacagctagtgaaggtgaccaaaccagtttcgtgctgca

SEQ ID NO: 5159 - DNA, 257 bp, Glycine max
  unsure (1)..(257): unsure at all n locations; Clone ID: 700966961H1
tgtttatcactatcacttccccttcctatctctgaagccattctcgttcattttgtntttttatcttctctttatctccctcaacaagattcctataaagttcgtagcggctttcacacaactttaagaanattgtatggagccttgcaccaatcaactgacacctctttttaacgcagaaaatctcgtgaatccgtgatcgcaaacaaaacaatgtctccccctttctatgttaggcaaccgcaaagacggttctg

SEQ ID NO: 5160 - DNA, 226 bp, Glycine max
  unsure (1)..(226): unsure at all n locations; Clone ID: 700966962H1
aatagtgttaatttgtctttctctatctctatcgannatgngtgcttttgcttttgatgaggaaaactcctccaccgtggctccggcaacactctacaaagctctgacaaaagatgctgacactatcatcccaaagattattggggccatccaaactattgaaatcgttgaaggaaatggaggacccggaaccgtcaagaagataacagctagtgaaggtgaccaa

SEQ ID NO: 5161 - DNA, 259 bp, Glycine max
  unsure (1)..(259): unsure at all n locations; Clone ID: 700966963H1
gcgattttcggtgaaaaagagtggtactttttcagccccagagacaggaaatacccgaacgggtctncgacccaacagagtagctgggtcgggttattggaaagccaccggaaccgacaagatcatcaccaccgaaggtagaaaagttggcataaaaaaagccctcgttttctacgttggcaaagcccccaagggcaccaaaaccaattggatcatgcacgagtatcgcctcctcgactcttcccgaaagaacactggc

SEQ ID NO: 5162 - DNA, 258 bp, Glycine max
  unsure (1)..(258): unsure at all n locations; Clone ID: 700966964H1
ggntctgtgttgctttgtttgccgctttcttctctttctccgtagcaggatgtcatctgtcttagttgattagggacagttcattttacataacctgcgtcgtcaaatatttcaacatacacaaattatttggttgcatgccccattcatactacagtcaaggagtactggactattttctttataaaaatggagtacttgacttggtgaagattgtgaagcttgtagttccctgattcctgtgcggcactaaatttc

SEQ ID NO: 5163 - DNA, 262 bp, Glycine max
  unsure (1)..(262): unsure at all n locations; Clone ID: 700966965H1
gttgattgatcgatgattgatgatggttcgggcgtcggtgaaggtgggttccgccaagttcgtagtgatctgcgtggggcttttgggcttcgctctcgtcgccgactttctatgggcctctacctcttccactcttcccacctccaccaaaccctccgcatttgtggttccctccaaccacaataagaagaaatatgagnntgccactgcttctggaagattccttgccgcggcttacgccgatttggatgcgccgcagctc

SEQ ID NO: 5164 - DNA, 227 bp, Glycine max
  unsure (1)..(227): unsure at all n locations; Clone ID: 700966966H1
tttcaacgcagcgattcatcatcgtccccgcccacacccaacaacgccgatccgaagaaaaacacttgttctgacccaatgcattcatggtgggaatcagtctcaaaagcccgttcccgaatccacgccctcgccgccatcctnnnnnnnnnnnnnnnnnnnnnnnnnnnnnctttagcggactccgaccgccccgctttgtcgttactttcctcccccgccgccta

SEQ ID NO: 5165 - DNA, 259 bp, Glycine max
  Clone ID: 700966967H1
ccgagttgtgtcgagttgtgtcaagtgtgaactcaaaacatctctctcaatctctctaccctgtttaggttttgttttggagtggtgttgctatctctatagctccatgaactttttctgacacaacccaacccaagaggaggagggggatgaggaagaagatcgaagaagaacaagatatgttgcttggaaaacgtcctcgggcaccgattatgaaaagaactacaagcatgagtggtggtttggccgtggaaaccaa

SEQ ID NO: 5166 - DNA, 256 bp, Glycine max
  Clone ID: 700966968H1
gaagaattaagatggctaccttgactgtacctccagttcctccttcccccagagatgatgccatgcagctttaccgtgcttttaagggatttgggtgtgatacaagtgctgttatcaatatacttgctcatcgagatgctacacagcgtgcctacatccagcaagaatacaaagcaatgtattctgaggaactttccaagcgcttagcttcggagcttagtggaaagttagagactgcagttctgctctggttgca

SEQ ID NO: 5167 - DNA, 256 bp, Glycine max
  Clone ID: 700966969H1
ggctaattcagaagcatgtgttggattctggttcaattgatactgttggcactgtcggtatcctggaactgcatcctggagcaatcaacagcatccccagcaaatctcacctagaaattgacacaagagacattgatgaggaaagaagaaataaagtggttgagaaaattcatcaatcagcaattaaaataaccaaaacacgaggtgtcaagctctctgatttccgtgtcatcaatcaggatccaccagccatttc

SEQ ID NO: 5168 - DNA, 78 bp, Glycine max
  Clone ID: 700966970H1
caaagctcccctttcacatttcaattctctgaaccctgctctccattttgtctcttcctttctctctctacaaagagt

SEQ ID NO: 5169 - DNA, 252 bp, Glycine max
  Clone ID: 700966971H1
ggaacgggtgcaacaatgtccgacgatgaagaagatcaggcagagagtaatgccaacttgtacgaaggaagcatggatggagctgatagtctcagctttggtcctcttgttcccacagaaactgaaagatctttgatggagcgtgtgaggcaggagctgaagcatgagttaaaacagggttacaaggacaagattgtggacataagagaagaaattttacgaaagagaagagcgggaaagctaccaggcgac

SEQ ID NO: 5170 - DNA, 255 bp, Glycine max
  unsure (1)..(255): unsure at all n locations; Clone ID: 700966972H1
aacaaattaaattagtggttaaggttgttggaggagctctaacaagagatggagacacaaaattggttcgaaagagtgaagcctttagcagctgtggtatcaatgcagtttggatatgcagctatggatgttctatccaaggctgcaatgaacaaagggatgagcaactatgtgtttgtcgtttatcgtcatgctgttgcattctttgttatggccccttgggcatggttttttgacnaganagtaaggccaaag

SEQ ID NO: 5171 - DNA, 255 bp, Glycine max
  Clone ID: 700966973H1
gacgccgtagagtcagagagagagattcactgaaacagagcgcagaagaaaatacataaactaatccagaaaatgagcagcggcgctggaaaggtggtgtgtgtcaccggcgcttccggttacattgcttcctggatagtcaaattcctcctcaatcgcggctacaccgttaaggccaccgttcgcgacacaagtgatccgaaaaaaataaaccacttggttggcctcgacggtgctaaggagaggctgcacctc

SEQ ID NO: 5172 - DNA, 253 bp, Glycine max
  Clone ID: 700966974H1
acgaagcccatttcatgtttttgtagcgtctctgtcattctgcacgcactctgcaacaaaccactcaacaatggcttccaattccaaatcggagacttttctgcaacgaaatggttacgattttctgttgggatcaatcgctgctttctacgtactcaccgtgccttacactaaggtcgaagagagtttcaacgttcaggcaatgcacgatattctctatcaccggctgaatttagacaatgtgctttgcttg

SEQ ID NO: 5173 - DNA, 254 bp, Glycine max
  Clone ID: 700966975H1
ggagaaccttcttttctctctgttttgttgttattcttatttcagacctaaaaaccaaaagcaccgattctgctttctagaattacatcatcgtatcaagaaaaccttggaactacacgaaaatggtgtcggcgaacaaggagatggtcgtgtactgcttcgacaccctcctcgctcactacaacagcacggaagctccttcccctgccttcgatcaggctcaacatccattgtttgttacatggaagaaagtg

SEQ ID NO: 5174 - DNA, 253 bp, Glycine max
  Clone ID: 700966976H1
gcatttctcaccgactgcgaagggagagcgaataaaaaaaggcaaatcaaattcgagagaaggagagaatttagagagggaaaggatgaagatcacggcgttgttggtgcttaaatgcacgggcgagggatccgatccggtgattctggcaaacgcttccgatgtcagccacttcggctacttccagcgttccagcgttaaggaattcatcgttttcgttggtcgtacagtcgccagtcgcactcctcagggc

SEQ ID NO: 5175 - DNA, 254 bp, Glycine max
  unsure (1)..(254): unsure at all n locations; Clone ID: 700966977H1
tccggcttcaacatgcacagttacctgaagaagcaagagagcttgacaaggagnntagacagattgtaaaggagaaagaagaatctgttcgcaatcaagactttgagaaggccggagagctaagagataaagaaatggatcttaaggcgcagatatctgcacttatagaaaaaggcaaggagatgagtaaggcagaaagtgaggcaggagatgaaggtcccatggtcactgaagttgacatacaacatattgtc

SEQ ID NO: 5176 - DNA, 253 bp, Glycine max
  unsure (1)..(253): unsure at all n locations; Clone ID: 700966978H1
tatgcttccgtcatatctctgcttacactctgtcctccgtttgtcatacttctatggtacaccatgactcttgctgacggatctgtttccgagacattccattatttaaggcagaatgggttgcagggtttgctacatatatggcccacccccacttcccaccgcctgcaaaatcattgcagtctatgctgcatttgaggcagcacttcagctcttcttcccgggaaaaccgtttacggcnctatttctccaa

SEQ ID NO: 5177 - DNA, 254 bp, Glycine max
  Clone ID: 700966979H1
cctcgctctatttctcagtctctgtgtttgcggctgaggattccgaacgagtgaccttcttcgtttctcgcaaagtttaagtaatcatgggtaaggaaaaggttcacatcaacattgtcgtcattggacatgtcgactctgggaagtcaactaccactggtcacttgatctacaagcttggaggtattgacaagcgtgtgattgagaggttcgagaaggaggctgccgagatgaacaagaggtcattcaagtat

SEQ ID NO: 5178 - DNA, 199 bp, Glycine max
  unsure (1)..(199): unsure at all n locations; Clone ID: 700966980H1
attaacacnaataacagcaaactaaaggtgaagtttgccagaaacaagatgggaaggaaccattttcagcagcaacactgtgctgatgggagcatgtggatggagagtcagggtcagcaacagagctatgccttccaagaagagtcttggagccctgataacaactatggccacaaccacaagcaattcccaggcatgc

SEQ ID NO: 5179 - DNA, 260 bp, Glycine max
  Clone ID: 700966981H1
gacagatactatcagatttcagaggcggaggcggaggctggagctgcctcaactcaagtcttcaactatctgaatctgaactcatccactcactcgttagcgctgctagaacgaaaactgagtaatggaaagtggagggaactcccttccatcagggtcagatggtgtgaagagaaaggtttcatatttctatgatccagaggttggaaactattattatgggcagggacacccaatgaaacctcataggattcgaatga

SEQ ID NO: 5180 - DNA, 219 bp, Glycine max
  Clone ID: 700966984H1
tcttctcatcaagcacagagttacagactcaccgatcttccgattctctttcgtcttggtttatgagctcgaaggagagacccactcttggtggcacgcggattaagacccgcaaacgaaatattgctgcgccgctggaccctgcagcattctcggatgcagtggtccagatttatttggataatgctggtgatctggaacttattgctaagagtattg

SEQ ID NO: 5181 - DNA, 132 bp, Glycine max
  unsure (1)..(132): unsure at all n locations; Clone ID: 700966986H1
gtgttttacaggttagaattgctagaatctttaacacctacgggcctagaatgtgcttagatgatggccgtgttgtcagtaacttcgttgctcaggcactanggaaggagcctttgaccgtttatggagatg

SEQ ID NO: 5182 - DNA, 134 bp, Glycine max
  Clone ID: 700966987H1
caatatccggactctctgcatctaattccaaaattgtgaaaaacccagaagcagaaggagcaatggcagataagccaagtcgatccctggttttattcggtgatgggttagctcgtttcatcgattcatcgcac

SEQ ID NO: 5183 - DNA, 251 bp, Glycine max
  unsure (1)..(251): unsure at all n locations; Clone ID: 700966988H1
ttgaggtttccaatgactgttcctatggggactgctttggttgacatgtatttaaagtgtggttgcgttgaaaaagctaggatcttgtttgatgggatggcaaagaaggatgtgtngatatggaatgtcatgatttgtgggctggcttcacatgatcatgccaaggaggcactcgcgctgtttcagaggttcgttggtgaaggttttcagcccgtgaatgtgacgtttgtgggtgtgcttaatgcttgtag

SEQ ID NO: 5184 - DNA, 252 bp, Glycine max
  Clone ID: 700966989H1
gcagcagcggaagctctagcttgggcagcgaatcacaatggcgagaggattgaagaagcatttgaagaggcttaatgccccaaagcattggatgcttgacaaactgggtggtgcatttgctcctaagccctcatctggaccacacaaatccagggaatgcctgccactcatactcattttgcgaaaccggctgaagtatgctctgacataccgtgaagtcattgctattctgatgcagcgacatgtccttgt

SEQ ID NO: 5185 - DNA, 253 bp, Glycine max
  Clone ID: 700966990H1
gggatggctcaatacggttagtaatgctgcgtcttctgcggcagggaaagtctcaatcccatctggtgctgtttctgctgtctttcatagttccattccttataattcacacaatgcatactcaaaaattcatgccatggagcacttattagtttataccccttctggtcatttaattcaatataaactactgccaccattggtggcagagccaagtgaaactgcttcaagaacagccccagttccttcagca

SEQ ID NO: 5186 - DNA, 253 bp, Glycine max
  unsure (1)..(253): unsure at all n locations; Clone ID: 700966991H1
accaaatccaaattccaatgcttcttcttccttcttcttatttcaatttcaatcactactacttcacgcttttgtttctccatttttaaaccctaaatctatctatctaatagagataagatagggcaaaaacaaaaccctagccaaagaaaaaccttgttgnnnnnnnnnnnnnnnnnnnnnnnagagagaggaatatggaaggagtaccgcacccaatacccagaacagtcgaagaggttttcaccgattt

SEQ ID NO: 5187 - DNA, 253 bp, Glycine max
  Clone ID: 700966992H1
aaaattgggtggttttcgattgaactgtgatgtccaagccactgctaggcatagcggaagaggaaggtcaaagcaatgtcactttgttggtttcttcctcagccaccatggaaagtgtgtgcctgaatagctcaaaactgaaagagcgcaactacatggggttatctgattgttcatctgtggacagctccgcgccgtccttctcagatgagactaagagcaatctgaacctcaaggctactgagctcagact

SEQ ID NO: 5188 - DNA, 251 bp, Glycine max
  Clone ID: 700966993H1
gccagtagtagccaatttgttggagctggttgggaatggcgtcgaaaccgaaatcaaatggaaattccaaatgcaacaaaggattcgctgacagctatatgctgttgaatcctgaagacgctcatttcttcgatcttgttcatgtgctgtattcccgtaacttgggaaaccgaaaatttgtggacagcaatgctgagggatcttatgagggaagcttccgccaaagatggcttatattcgtctctgtggtg

SEQ ID NO: 5189 - DNA, 254 bp, Glycine max
  Clone ID: 700966994H1
aagaaagcggtttcacagaccgagaaatcccaatcctatggcagaggaagggaaacccgatgaacagctctttcagcttctctccaatcttctccaccaggtggaatcactgacgaatcaagaagaagttgagctgcgttctaaaattgaaactcttggattagaggttacaaaagttccttcaaagtcaacgcagcaccttaacgaggtgtttttcacttgatgcagagttctcttatccctgttgaaatgtg

SEQ ID NO: 5190 - DNA, 253 bp, Glycine max
  Clone ID: 700966996H1
gtcgctccgcaccagtttcaccgcacgaatatcttgttgtttggagcgatccgagaaaaactctgtaaacatgttggtttaccaggacctccttacaggtgatgagcttctctctgactccttccgttacaaggaaattgagaatggaatgctgtgggaagttgaggggaagtgggttgttaaaggagcagttgatgtagacattggtgcaaacccttctgctgagggtggaggagaagatgagggagttgat

SEQ ID NO: 5191 - DNA, 61 bp, Glycine max
  unsure (1)..(61): unsure at all n locations; Clone ID: 700967001H1
aaaangaaacatgatnnctnggcaatttcngttgtacaaacaaaatncccctatttngggg

SEQ ID NO: 5192 - DNA, 265 bp, Glycine max
  Clone ID: 700967002H1
cttacaatgatgctgtggtccattgtgcacgcaaaatgtcaagctttggattggtgtcaacacagactcagtatcttttagcatcaatgctaaatgatgatgagtttgtggaaagttttctggtagagagtgcaaaaaggctggcacaaaggcatagagttttcactggggggttggccaaagttggcataaagtgcttgcaaagcaatgctggtctctttgtgtggatggatttaaggcaacttctcaagaagccaacgcttga

SEQ ID NO: 5193 - DNA, 263 bp, Glycine max
  Clone ID: 700967003H1
tttattcataccattttcgttgggcttcggttttcatagagagagaaagagaggaagaggaaatgggagtgctgtccaatatgatcgatcgggaacaactgaagcccggtgatcacatttactcttggaggcaagcgtacatctatgcacaccacggaatatatgtcggtgatggaatggtgatccactttaccagaggagcaggtcaagaaattggaacaggaactgtgttggacaatctccttttcagttcatctccctct

SEQ ID NO: 5194 - DNA, 262 bp, Glycine max
  Clone ID: 700967004H1
ctggtcttggtttcgaggctctccatcaacctaccctacacaaccgagtgtttccgcaacttcatgggtagccctcgcttcgtttttctcctgggaaacgtcatcatcataacgctcttcgcacaatctggccacttttcatcttcagccaaacgtgccccagaacctgcagatctctatctcgagttcctccaaaacaccaccatccatcagaaacttcaagtccacgtcagcaaaccaaagccaagtgcgagagtattgg

SEQ ID NO: 5195 - DNA, 261 bp, Glycine max
  Clone ID: 700967005H1
ccagcttaactcttaggggaggagaaaaacccttagccgccagcagtcgttgaactcattcttcttcaactcaacagagcaagggttcgcactcgcagattcttgagcaagaataatggggaagaaaagaaaacacagtgagactactcaagctgtagcacaacccaaaaaggaagaggctgctccagagagaccggctaggacccttttggggtggaaggataagaatcaagttgaggatgattcaccaatatttaggag

SEQ ID NO: 5196 - DNA, 261 bp, Glycine max
  Clone ID: 700967006H1
attttcaagctctcaacgccatctccagctgcttccttatcagaagcgcttcgccccagagattctcgcttcctctccttcaatccttcttccaacgctattaattacaaaattaacctctccgcttccctccgatccattcactccctccctcttaaaacctccttgcggatcaaatgctcccaaacagatgggaatggaagtcctgcaaagaggacagtgcttcatgatctttatgagaaagaagggcagagtccatgg

SEQ ID NO: 5197 - DNA, 259 bp, Glycine max
  Clone ID: 700967007H1
tctttctcttgtttattatctcagatagatgatcacaaggccccaatgatgggaagagtcatggaaaaaccaagccaagatcttcttcagcagcaacaacaagccctaaagtgccctcgctgcgagtcttcaaacaccaagttctgctactacaacaactacagcttgtcacagcctaggcacttttgcaaagcctgcaagcgttactggacaagaggtggcatctcagaaacgttcccgttggtggtggctgcagaaa

SEQ ID NO: 5198 - DNA, 261 bp, Glycine max
  unsure (1)..(261): unsure at all n locations; Clone ID: 700967008H1
aganatgagtacgctgcgctgcaaaaccagcttcagctgcttaagcagaagcaggtggcgctaatgcgacactttgcggcaattagagacagaaaaggttgatctggagaacactgttgttgacgagagccaaagacagttgaatgatcaagaggcttcctctagattgaggcaggagaaatctagtggcaagtgcaagtgagtctgnggatgataacgngagaaatgatgcagccgaggaagaaacagatgaagatgnct

SEQ ID NO: 5199 - DNA, 260 bp, Glycine max
  Clone ID: 700967009H1
gtcgtcatttcctcacaaaaccagtgtccgtaacatctccaccttaacgatgtcggtaaaggagtgtcaccaccacaagggaaagaagcacaaactctggagacgcatcttctggggcatagtgatcttcgccttcatcgtgttgctaacagttcttataatctgggcaatcctaaagccttcaaagccaaccttcatcctccaagacgtgaccgtctacggcttcaacgccaccatccccaacttcctcacctcaagtt

SEQ ID NO: 5200 - DNA, 260 bp, Glycine max
  Clone ID: 700967010H1
tcgggtgggaagaaacggggacccgctccgtatagaatatttaacctggggaacacgtcgccggttactgttcccactcttgtcagtatattggagcgccatttgaaggtgaaggccaagaggaatattgtggacatgcctggaaacggcgacgttccgtttactcacgcgaatattagttcggcccggagagaactcgggtacaagcccaccaccgatttgcaaaccgggttgaagaagttcgtcaagtggtacctttc

SEQ ID NO: 5201 - DNA, 209 bp, Glycine max
  Clone ID: 700967011H1
cccaaaagaccctttctttcaatattcatagcatcatcatgggtgactcttccgcggctaatgaccatttgggtgaatccccggccgttgagttaaccggaaagataatgattgtggttattattatcatgttcttcgttattgtaattgctctctgccttcatctcttcgccagaaacttctggtggcgcagcctggctccccaatct

SEQ ID NO: 5202 - DNA, 262 bp, Glycine max
  unsure (1)..(262): unsure at all n locations; Clone ID: 700967012H1
ttttccctcactttctcgctccccaaacgcccctctctctcctccaatggccgaccagctcaccgacgaccagattcgccgagttcaaggaggccttcagcctcttcgacaaggacggcgatggttgcattactaccaaggaacttgggactgttatgaggtcacttggtcaaaacccaactgaggcagaactgcaggatatgataaacgaggttgatgctgatggcaacgggaaccatcgatttncccagagttcctcaac

SEQ ID NO: 5203 - DNA, 261 bp, Glycine max
  Clone ID: 700967013H1
gcttctaacgtcaccgactcagttgctgtcagcgagtgagtgagtcgtttctctgcagcaacaaggtttagccactccaaacagacgggaaatgggtcgtggggtcagtgctggtggtggtcagagttccttaggttatctctttggcagtggggtgcctgccagcagtgcaaacagtcagcctgcaaatggtgctcgcactcaaaatgctagtgctccttcaccaccagtcgataagcaaagtccagcaccagcaccagc

SEQ ID NO: 5204 - DNA, 262 bp, Glycine max
  unsure (1)..(262): unsure at all n locations; Clone ID: 700967014H1
ttcttctcttgcggctagggttttagcgcanttcttctagatttaaggaagatgggtaaggaaaaggttcacatcagtattgtggttattggccatgttgactctgggaagtccactaccactggccacctgatctacaagcttggaggcattgacaagcgtgttattgagagatttgagaaggaagctgctgagatgaacaagaggtctttcaagtatgcctgggtgcttgataagcttaaggctgagcgtgaaagaggaa

SEQ ID NO: 5205 - DNA, 268 bp, Glycine max
  Clone ID: 700967016H1
ggagttaggttctgcacgctctgcttccagcgagtgttctttcttcgtttcaacaccttaatttgcacacgctgcttcttcagcttgagaaatggcacaagaaacctttctattcacatctgaatctgtaaacgagggtcaccccgacaagctgtgcgaccagatctctgatgcagtgcttgatgcgtgccttgaacaggaccctgacagcaaggttgcctgtgagacatgcaccaagaccaacatggtcatggtctttggagagatc

SEQ ID NO: 5206 - DNA, 93 bp, Glycine max
  unsure (1)..(93): unsure at all n locations; Clone ID: 700967017H1
caaatacaganaaaaagagtcaagcgggcgatgcntattggcgacattcgctggtgcgatccgggttttcttccgaagcgccctaagaggana

SEQ ID NO: 5207 - DNA, 262 bp, Glycine max
  Clone ID: 700967018H1
aaaattcctattcttcttctcatttcaactctttgcaattgcgatctttcattcctttttttttactcttggtaagcgtagttcggtgttggagaaccagcttccagttccagaatactgctgaacagagttcggcttcgctttattgggactcagttgtgtttctactaggttatcttctctgaattgcaaatgaatgatcgttgaaaaaccatgaagaaggtgaggagaaagatcggcaagtatgaggtgggtcggacta

SEQ ID NO: 5208 - DNA, 257 bp, Glycine max
  unsure (1)..(257): unsure at all n locations; Clone ID: 700967020H1
cgcgcaattcgctgctgataaacccgctcactgcaaattgttgtgatccctacccatccatccttcatttccatctcgtttttttgtttcaaacaaagaaatctttatttttttcctattatattttcaatcacgcgaaagtgaaagttcttcggttgttgctattgctcattcattttctcaggggaagaaaaatcatttttgttcccccggattacgttcctagatantagcttttagccaaatatcaaatatca

SEQ ID NO: 5209 - DNA, 258 bp, Glycine max
  Clone ID: 700967021H1
gtcagagacagagacgcagccatggggcggagacctgcgaggtgttataggcaaattaagaacaagccataccccaagtcacgtttctgccgtggtgttcctgatcccaagatcaggatttatgatgttggtatgaagaagaagggtgttgatgagtttcctttctgtgtccatctggttagttgggagaaggaaaatgtttcaagtgaggccctggaagctgctcgcattgcttgcaacaagtacatggccaaattt

SEQ ID NO: 5210 - DNA, 239 bp, Glycine max
  unsure (1)..(239): unsure at all n locations; Clone ID: 700967022H1
cggggtttataaactccctaatgannaaagaggctgtttaacggggcgttagacnantggacagcttgggaaacagagttccctgtgattgcagtgtctaaggctttaaaaatcttaaggaaaaggggtcactgggttcgtgtnattcaagtagctaagtggatgttaagcaaaggtcaaggagcaacgatgggaacatatgacacccttcttctggcatttgatatggacaagagggt

SEQ ID NO: 5211 - DNA, 256 bp, Glycine max
  unsure (1)..(256): unsure at all n locations; Clone ID: 700967023H1
cttgtgttgttattttatttcatctgcatctgcatctgctacgttgtgttgagcagtgagatctgtatcgtcaaaattcatgatttcgtgttgaatgcatcgtccgagttaggttaatttttcgacattttttggtgtaaaatggaggtgccaactaggagaaaacccgtgatctactggatttgccttttcgtcattgtcaatggcntttgtacaaattagcaatgcattttatcttccgggaagctacatgcac

SEQ ID NO: 5212 - DNA, 258 bp, Glycine max
  Clone ID: 700967024H1
cgcactcctcctcctcctaggtggaattggaattggggatctactagatgggcctaatcagaagcatgagatcgcggtcacagcgtgtggtgcaggagcaagaagctgctgagtgtgtcggtgtcgtcgtcggcgacagcatgcgacagagttgttgggccaacatgccccaagagcttctccgagaggtcctcctccgaattcgaggcctccgaggacacgtggccgccgcggaagagcgtcgtctcctgcgccggc

SEQ ID NO: 5213 - DNA, 258 bp, Glycine max
  Clone ID: 700967025H1
ccgaggcgaagagaagagaaaaattaagatggaggggaaggagcaggatgtgtcgctgggagcgaacaagttcccggagagacagccgattgggacggcggcgcagagccaagacgacggcaaggactaccaggagccggcgccggcgccactggttgacccgacggagtttacgtcatggtccttttacagagcagggatagcagagtttgtggccacttttctgtttctatacatcactgtcttaaccgtcatggg

SEQ ID NO: 5214 - DNA, 258 bp, Glycine max
  Clone ID: 700967026H1
cttgaagaaagtaggatacaaccctgacaagattccttttgttcctatctctggttttgagggagacaacatgattgagaggtccacaaaccttgactggtacaagggtccaactctgcttgatgcacttgaccagattagtgagcccaagaggccctctgacaagccccttaggcttccccttcaggatgtgtacaagattggaggtattggaactgtgccagtgggacgtgttgagaccggtgtcttgaagcctgg

SEQ ID NO: 5215 - DNA, 257 bp, Glycine max
  Clone ID: 700967027H1
ctaatttcctcaatcctggttttggaattcgacaatggagcagaagaggagcagcaagatgtacaacctgttcgtgaagcacttggacgggaaaaccctaaccctcctattcccctctccgatcctctacgcgagttccatcaaggatcgcctcttccaactcactggaatccccgcccaccaccagcgcctcgtcaccggctgtcgccactcaacgatgacaatccgctatccagtgctccccgggggacggcaac

SEQ ID NO: 5216 - DNA, 260 bp, Glycine max
  Clone ID: 700967029H1
gagagagagagcagaaataatattgattttttaattgaatggaagtaaacgttgtatcaagagggataattgtctaacctttgaagtagactcagccaaaggttcctcctcaagagggataattgtgcttcaaatccgttgtgcccctccatttgagttgattgatcagccattggattctcatcctcactcacttgctccatttcagctacatcaacagaatctccagtcttttcagatgcttcatgtgtgatttctgg

SEQ ID NO: 5217 - DNA, 260 bp, Glycine max
  Clone ID: 700967030H1
gctgagtgcagagcaaagggtggggcacctggattcaaagttgcaattttgggggctgctgggggaattggtcaacccctttctttgctgatgaagatgaacccattggtttcagttcttcatctttatgatgttgtcaacacccctggtgtcactgctgatgttagccacatggacactggtgctgtggttcgtggctttctggggcagcaacaacttgagagtgcactcactggcatggacttggtaatcatacctgc

SEQ ID NO: 5218 - DNA, 263 bp, Glycine max
  Clone ID: 700967031H1
ctcaaaccgtttaagcttctccgagttttgacctacaacactctcgaatcccctcttgtgtgttgtagccgccccgtgaccatcaatggcggaaactgctgccgacaaatcccaatctctcgctgaggaatattatgtgaaggataagcaaacagctgtagttgaaaaacctgttgaggtcaaagaagttgaaaacccagaggaggctgcttctgaggaacccgttgctgagaaaactgtggaagaaacaactcctgttgccc

SEQ ID NO: 5219 - DNA, 259 bp, Glycine max
  Clone ID: 700967033H1
ggcgtcttcataaacgccgcccaaaacttctcatacccttttattcattccattcctttctaagggttttcttttctttgccgagaaaatgagagagtgcatttcgatccacattggccaggccggtatccaggttggaaacgcctgctgggaactctattgccttgaacacggcattcagcccgatggacagatgccgagtgacaagaccgttggcggaggagacgacgcttcaacacatttttcagcgagaccggcg

SEQ ID NO: 5220 - DNA, 256 bp, Glycine max
  Clone ID: 700967034H1
cagaaattgtgatcctgaaggtcctctgatgctctatgtctccaagatgattccagcatctgataaggggagattttttgcctttggccgtgtattctctggcagggtttcaactggtttgaaggtgaggattatgggacctaattatgtccctggggagaaaaaggatttgtatgttaaaagtgtgcaacgaactgtcatttggatgggaaagaggcaagaaactgtagaggatgtcccctgtggtaatacatgg

SEQ ID NO: 5221 - DNA, 258 bp, Glycine max
  unsure (1)..(258): unsure at all n locations; Clone ID: 700967035H1
ctgatgagcagatagaaagagaagagaagttgatgtcaacagcagaagctcctcctccgttccaagaagcagcgcgatgcgttgtgtgcaattgcagtttcaacaccttcagaagaaggcatcactgtcgatcctgtgggagaacattgtgcaatgaacattcatcagatcaaatggctttaccacaatttggcatttantcaaatgtccgagtatgtgctgattgtttcaacaactcacggtctgggaaggatgaac

SEQ ID NO: 5222 - DNA, 255 bp, Glycine max
  Clone ID: 700967036H1
catttatcatttcatgggaacatccacttttagtcaatacactgttgttcatgacgttagtgtagctaagattgacccggtagctcccttggagaaagtttgccttcttggatgtggtgtttcaactggacttggagctgtctggaacactgcaaaagtggagtcagggtcaattgttgctatttttggccttggaactgttgggcttgctgttgcagagggtgcaaaaactgctggtgcatcccgggttattgg

SEQ ID NO: 5223 - DNA, 255 bp, Glycine max
  unsure (1)..(255): unsure at all n locations; Clone ID: 700967037H1
gcaggccttcctgtttatttcattgagccccatcatcctgataagttcttctggagaggaaaattttatggcgagcatgntgatttcagacgattttcattttttagccgtgcagntcttgagtttcttcttcaagctggcaagaagccagacatcattcattgccatgattggcagacagcattcattgctcctctgtactgggatatatatgccccaaaaggattaaattcagctaggatttgctttacatgc

SEQ ID NO: 5224 - DNA, 232 bp, Glycine max
  unsure (1)..(232): unsure at all n locations; Clone ID: 700967038H1
gttgaaagaaacatccccgaagannatccaagaaatccanctgtgattgctgataatgttggtgataatgttggggatatcgctggtatgggatctgatctttttggttcatatgccgagtcatcctgtgctgctcttgttgttgcttccatctcttcttttggggtgaatcatgagtngactgctatgttataccctctcattatcagttctgtgggtatccttgtntgtt

SEQ ID NO: 5225 - DNA, 252 bp, Glycine max
  Clone ID: 700967039H1
ccctaccaaggttgacagaagtggtgcctatatcgtgaggcaggctgcaaagagtgttgtggcaaatggccttgccagaaggtgcattgtccaagtttcctatgccattggtgtccctgagcccttgtcagtgtttgtggacacttatggaactgggaagattcctgacaaggagattcttcaaattgtgaaggagaatttcgacttcagacctggaatgatcaccattaacttggaccttaagaggggtgg

SEQ ID NO: 5226 - DNA, 253 bp, Glycine max
  unsure (1)..(253): unsure at all n locations; Clone ID: 700967040H1
agcgtgagagcacagcagtgtacgaaatgcctccgcggcggtgcacggcggcgtattcggcagtggcgcagatgggcagcaacacgagcnagagcgacgcggaggagctggtgatgcggtgcctctcgtgcgaggaggagtacgacgtggacgactcgggaacctgcagggagtgctaccaggaggccaacgaggccgaggaggagctccgccacgagatcgaggagctcaaatccaaagtctccttcctcac

SEQ ID NO: 5227 - DNA, 255 bp, Glycine max
  unsure (1)..(255): unsure at all n locations; Clone ID: 700967041H1
attctattccatcatcaatggagaacaccgagggatccggatctgcgacgaacggggtgctggcncccgccgcgcaaggtggcattgataaccggaattaccggacaagacggttcgtacctgacggaattcctcctggacaaggggtacgaggtgcacggcctgatccgccgctcgtcgaacttcaacacgcagcgcatcgaccacatatacgtggatccccacaacgcccacaaggcccgcatgaagctccac

SEQ ID NO: 5228 - DNA, 255 bp, Glycine max
  unsure (1)..(255): unsure at all n locations; Clone ID: 700967043H1
ctttctccaagattaagtttcagtagtaatgggtaaggaaaaggttcacattaacatcgtggtcattggccatgtcgactctgggaagtcaaccaccaccggtcaccttatctacaagctcggaggtattgacaagcgtgtcatcgagagattcgagaaggaagctgctgagatgaataagaggtctttcaagtatgcctgggtgcttgacaagctcaaggctgagcgtganagaggaatcaccattgatattgc

SEQ ID NO: 5229 - DNA, 254 bp, Glycine max
  Clone ID: 700967044H1
gtaaaagtgttgtcccaaagaaagaccatctttctcctttctgtcatcaccgttggaagagactgagatgggttcaaaaaccaagacttttacctttgaggaggtggctaagcacaatcacaggaaggattgctggattatagtcaaagggaaggtgtatgatgtcaccccatttttggatgatcatccaggaggtgatgaagttttagtgactgcaacagagaaggatgccaccactgattttgaagatattg

SEQ ID NO: 5230 - DNA, 256 bp, Glycine max
  Clone ID: 700967045H1
cttgaggtggaaagctctgacaccatcgacaacgtcaaggccaagatccaggacaaggaaggaattcccccggatcagcaacgtctcatcttcgccggaaagcagctcgaggacggccgtaccctcgccgactacaacatccagaaggagtcaacccttcaccttgtccttcgtctccgtggtggcatgcagatcttcgtcaagactctcatgggcaaaaccataaccctagaggtcgaaagctctgacaccattg

SEQ ID NO: 5231 - DNA, 257 bp, Glycine max
  Clone ID: 700967046H1
gctttcctcagatatgcagcatccgcaggaggatattggaagattgcatgagctggcaattctaattggaatcttcagacgaaatccttcaaatagatttttatgataccattgacgaatctatcatagggaagggttttgacgataaaatccttggtctcctcaaagttgcatgtgactgtgttaaaggatctttaaagcaaaggccaaagatggttgatatgcacaaaactataagagccatgtgggaaggctat

SEQ ID NO: 5232 - DNA, 257 bp, Glycine max
  Clone ID: 700967047H1
agggcatcagatcaaaacaaagctctttgccccaactgggacttgtgcaattttattgttgaaatcgcaactcgagaggataatagcaaattaagtttttatggcctggagtttatggctaaatggattgtaaagggtgaacgtcaaagaccccctatatatctttctgtagatgaaggtttagtactgtcagctcttttgactgctggtagaacctataattctgatctgctagtggcatcatgggctgttttgga

SEQ ID NO: 5233 - DNA, 260 bp, Glycine max
  Clone ID: 700967048H1
tcttcttcccaaccactactactcactcactgcagatctcaattgcatcgctgtccatggctaccatcgttagcatcaaggcccgccagatcttcgacagtcgtggcaatccaactgtcgaggtggatttgacttgctccgatggtacttttgccagagctgctgttccaagtggtgcatccactgggatttatgaggcccttgaattgagagatggaggatctgactaccttggaaagggtgtatcaaaggctgttgac

SEQ ID NO: 5234 - DNA, 253 bp, Glycine max
  Clone ID: 700967049H1
cgagagagatgatcttgctgaaactaaaatagtggatggtcttgctgaaactaaaatagtagatgatggcacgaaggagaagaatgctgaatctagtttcaagcgagataccgaatgagcaaagcatagttggcatatgtatcttctaattcgcattttatcttgtcttgttcatatcttgtaataagctatagtcctctatgcgggtgatttacattgcccaaatgtgtaattggcaggagttccatcccga

SEQ ID NO: 5235 - DNA, 253 bp, Glycine max
  Clone ID: 700967050H1
caaaaccctaagggttcttccaatcgccgccggattttaacccttacattgtcactctctcattccatcttgttgcacgaaccctcacctcaatttcacccttattactgatttcttttcactaattatgccgtgcttaaatttgttttcccaacctgactgattcttcagttagttttcgtttcagctctgcgaatgacctgggtataattttcatgggccataatttattgtgactattatgtttgattta

SEQ ID NO: 5236 - DNA, 254 bp, Glycine max
  Clone ID: 700967051H1
gtaggtactcagtgaagaggttcaggaaggcgcagtgccccattgttgagagactcaccaactctctcatgatgcacggaaggaacaatggaaagaagctcatggctgtcaggattatcaagcatgcaatggaaattattcacttgctcactgacctgaacccaattcaggtcattgttgatgccgtcatcaatagtggtccccgtgaagatgcaactagaattggttctgctggagtggtgaggagacaggcc

SEQ ID NO: 5237 - DNA, 252 bp, Glycine max
  unsure (1)..(252): unsure at all n locations; Clone ID: 700967052H1
aacgacttaatagaaaaacgaaggaacaaactcaaagatgaaggtaaggtatgtggttaagaaaagagaatagagaaagaaagaagtgaaaatggcatcccatattccattagnnnnnnnnnnnnnnnnnnnnnnnnnnaaaaaagaaaagaaaagtggcgcacgggtgagtagtgagtagaagcataataataaccctgttagttgcgtgcgtgcgtgttaggggagagaaggataagagagananagcag

SEQ ID NO: 5238 - DNA, 252 bp, Glycine max
  unsure (1)..(252): unsure at all n locations; Clone ID: 700967054H1
ccaccttggcctagccagctagcgcttcttctctcgacattccgtggagatctagtgntgccaaacctcgctnnaaattagggtttcgtttcggangtagacgaagatnttcggnagggcaccgtagaaaagcgacagcaccaggtactacganatcctcggcgtttcgaagaacgcttcgccggatgatttaaagaaggnttacaagaaagccgncattaagaaccaccctgacaaangcggtgatcctgt

SEQ ID NO: 5239 - DNA, 250 bp, Glycine max
  Clone ID: 700967055H1
tgggaagatcgtgttgtgtgaccgtgggttgaccgctagggttcagaaaggctcggtggtgaaatccgccggagcgttggggatggtgctgtccaacaccgccgctaacggcgaggagctagtggcggatgctcatttattaccggccaccgcagttgggcagaaagccggtgacgctattaagaagtatttggtttccgatgcgaaaccgacggtgaagattttttttgagggaaccaaggtggggatt

SEQ ID NO: 5240 - DNA, 252 bp, Glycine max
  unsure (1)..(252): unsure at all n locations; Clone ID: 700967056H1
cttttcctttccttcatttgaaattgaccttacccacccagatcccaaattcccaccttgtaaattatccgccttattttcccattccaaggaaagaagccaatccacgaccgatccaatgccgctttgaatcgcgtgccgtcctccttccgtgggaacatctttgttgcttttgaattcgatttttggagcagttgggccgatgagtaacatgtcanactgtttctgaaacacaaaaagacccttttcttt

SEQ ID NO: 5241 - DNA, 252 bp, Glycine max
  Clone ID: 700967057H1
aaagcttttgtttctctctgcttatggaaggcccttaaactttcgctctctctgcttcactttctcgcttttgcattttcttgtgaaaaaaaaaatcctcagaacaaaaataggtcttcttcttctctgatctaccaaagcttcaaattctccttagtttggtttgtctgtgagtttggagtgtaatgtcgccgccgacgctggtaacggaggaggaggggcggagcaccgtggcgtccgattcttcgcaat

SEQ ID NO: 5242 - DNA, 251 bp, Glycine max
  Clone ID: 700967058H1
gatgatgttataacttgtaagctttccctgttctacctttttcttttcgtactcataaaactacttttctgacatctcatcatattctgttctccgaaggtaacagctgcttcttctggttccattttgcatatctctatcttcatttgattttcaattttcttcatttggggaagtgggtaatgtttttcgtggcacccaattgcttgttttaaattctcactaccattttagtggctagagattgatcc

SEQ ID NO: 5243 - DNA, 253 bp, Glycine max
  Clone ID: 700967059H1
attcaattcctttgaatcttgttctctctaatctctctcactacaatggagactccatcatccacagcaagaagaatcacaagatcccaaatcgcctccaacaacaacatccccgtttcaagaaaaaagaacgaggactgcccagaaaagagcgtttcaaaaacgcggcagagaagcagcgtgcaacagcaggaacggtgtgcgctggtcgacatatcgaacgattcaccgatcgcggggctggcgaacggga

SEQ ID NO: 5244 - DNA, 253 bp, Glycine max
  unsure (1)..(253): unsure at all n locations; Clone ID: 700967060H1
gttgttttctctgtttgcagcttcttctgtttctctctctcaaattcaatgttgttcatgttcatgtctatgtccatttgaggttgagagagagaggcactcagatacgtttccgttcagagacagacacaacacaacagaaagtgttcagagagagaaatagtgaacgcaacaaaacaatgtcttctctgncatttgttactattttctctgagcagggcttntccagtccccatcgcgttttctttcagat

SEQ ID NO: 5245 - DNA, 254 bp, Glycine max
  Clone ID: 700967061H1
caacaatgaagacttaccacctccctggaaagtcatggttctcttggttcttacttggcctactttcaatcattgcttcccttgcttcagctgcagagaatcattaccatgagtttgttatccaaactgtgccagtgaagaggctgtgcagaacccaaaacatactcacagtaaatgggcagtttcctggcccaacagtggaagcaagaaatggagattctcttgcaatcaaagtagtaaatgctggaccatac

SEQ ID NO: 5246 - DNA, 254 bp, Glycine max
  Clone ID: 700967062H1
aagagagcgatgttggtgttccgaagattgatccagaatcctcctatgaatgacgataagagatgagagaacaaagctttggagataaaatgcatggaataactctccctctcactgcaactgcaaatagcttccttttgagatctcctctaccaagttgtttcatacccacttgtaaagttagctacggatttcgttttaaccattctcagtggaagcaccataaaacagaaggatggagcaataggaataga

SEQ ID NO: 5247 - DNA, 257 bp, Glycine max
  Clone ID: 700967063H1
gcctcttgtctccttacttgcaaagccggaacagaaatcgcatataaaatgcgaaaagaaatgaattcaatgttcggagatctgcacaggatctctctccgtgtccgttgaactttctttacgccctcctcgtaacataaaaattcagatcccgccaactctgaagacctctattctctttccctcccctttccactttcccgagaaaaataaacttttccgtcaattttctctccacggtttccttcttcctcaca

SEQ ID NO: 5248 - DNA, 245 bp, Glycine max
  unsure (1)..(245): unsure at all n locations; Clone ID: 700967064H1
cgttttttcagnatatgtctcaaaggnncacggttcctcactcctcttccatagcntgcggccttcactctcatctcctggnctccagtgagatgaaccctagcnccaattggtcccnttaatcaattacntctnaattagtaattacttaatcnnaattagcatttcacnntnccacacaacaacatnaagaggcgtcaaaggttttgtcgaaggaggcatcgttncatcatgcaggangtncc

SEQ ID NO: 5249 - DNA, 253 bp, Glycine max
  Clone ID: 700967065H1
caaatacagaaaaaaagagtcaagcggcgagcaatggcgacatcgctggtgcgatcgggttttcttcgaagcgccctaagaggaagcgctcgtggctcccaggttccgaagcgaaactttgcttcctctggtcatcacgatgatgcatatgagacggccaaatgggagaagattacatatctaggcattgttagttgcactggtttagccgtttataatctatcaaagggccacccacacttcaaagaactcc

SEQ ID NO: 5250 - DNA, 243 bp, Glycine max
  Clone ID: 700967067H1
tgttctcttccttggaatacaaaatgcttcctctgttcagccagtggtagcagttgaaaggactgtcttttatagagaaaaagctgcgggaatgtattctgccttaccctatgcatttgcacaggttctggtagagataccatatatcttcgctcaagctgtgacatacggtttaattgtttatggccatgatcggatttgactggactgcagagaaattcttttggtatctattttcagttt

SEQ ID NO: 5251 - DNA, 248 bp, Glycine max
  Clone ID: 700967068H1
tagagatcctccgtttatatgcttgtccatatctagaaacacttcctcctagcatgtgtgacatgaagagattgaagtatattgatatttctcaatgtgttaacctcacatgcttccctgaagagattggtagattagtatgcttagagaagattgacatgagggaatgccccatgattaggtatttaccgaagtctgcagtgtcatgcaatctctgcagcttgtaattgtgatgaggaggtacaaga

SEQ ID NO: 5252 - DNA, 248 bp, Glycine max
  unsure (1)..(248): unsure at all n locations; Clone ID: 700967069H1
ggtgtgttgttttccattacacttgtactccttctgcgtaggattcgatgctgctactccttcttcagtttctacaactgagtttcatatcttctttctgtngatgnttatgctgaagactgaataaaaatctgagtgcctatggcgatgcaaactgtntatcttanaaagcatgaaggaaatgcacacaattttgtgggnacgttgtcgtctgcagcttcagcancctggtggagtgctttnggatc

SEQ ID NO: 5253 - DNA, 250 bp, Glycine max
  unsure (1)..(250): unsure at all n locations; Clone ID: 700967070H1
aaaccctaaccctacctcctcgcccccatgcccatggctaagaaacgaaagcttcgatcctccaacccagaacccaccaaacccgtcgagccacagcaacagaaccatgagnctgttgaantcgaccaacagcaacccatccccgaaccaaccctagaagactnccaanaccatggccatcgacgnaccaanacatgaacaagaagaagaaccgcaaaangccganagcgaacaagaggtagaggaagag

SEQ ID NO: 5254 - DNA, 247 bp, Glycine max
  Clone ID: 700967071H1
acttgcctaatggattgggatattgaccgtaaattgttttccatgatactggatagttgttccacctgcggataaaattgctgttagaattggtgagagacttctgcaaaacaggtttctttattgcaacggtcaattatttgatatacgctgtgctgcaaatgttattaacaccatggttcagcatgctctgggaactgtaagggaaatagtcaataagattcgtcaaactattggttacattaaa

SEQ ID NO: 5255 - DNA, 94 bp, Glycine max
  unsure (1)..(94): unsure at all n locations; Clone ID: 700967072H1
gtggaactcttccttcaaatgaaattggnttacaantcacttggctccctctgcttcctgttgntttctaaacantggatgncattnttccttg

SEQ ID NO: 5256 - DNA, 249 bp, Glycine max
  Clone ID: 700967073H1
tgatgatacacagtacccaaaaacattcttctataaagaagaccttcatccaggcaaaacaatgaaagtacaattcaccaagcgtccctatgcacaaccttatggtgtatatacatggttaacggatattaaagacacctctaaagaaggatatagttttgaagagatatgcatcaagaaagaagcgtttgagggagaagagaagttttgtgcaaaatccttgggaacagtaattggttttgccatttc

SEQ ID NO: 5257 - DNA, 209 bp, Glycine max
  unsure (1)..(209): unsure at all n locations; Clone ID: 700967074H1
gggnngcttttgctagcttcactttcttcttcctgtgtttgnatttgctaatagctcccatcaaaggcccaaaaatgggtaccatcgttgaagcagataacacatataccaagatcctaggaagatggccagtcttttattatggcatgggacacatgctcaatgacataactgctgcttgttggttcacatatttattattgttcttg

SEQ ID NO: 5258 - DNA, 250 bp, Glycine max
  Clone ID: 700967076H1
gtagcattcagtgaaacactagctagggtattgggagctctcgttgtttcggagttagggaccttacgcagccatggccactgctacgaatgccgccgccgccccaccacgccagctctcccagaaggaagctgacatccagatgatgttggccgccgacgtccacctcggcaccaagaactgcgacttccaaatggaacgttacatcttcaagcgccgccacgacgggatttacattattaaccttggg

SEQ ID NO: 5259 - DNA, 194 bp, Glycine max
  Clone ID: 700967077H1
tgaaagagggatggtaggagaaaaatgagaatggcgtgaatgtgaggagagaagagcctgaatattagaatcggatacccttaaagaagcggagataggagtgtgcgcctccaaacccaaggggcttcggaggggctcttcatcggaggcggtgctatattcccctccggattcccccaccatgaagagcctct

SEQ ID NO: 5260 - DNA, 252 bp, Glycine max
  Clone ID: 700967078H1
gttcataaaaacgaacaactacatagcatttatttttcgctcttctctcttctattcagccactgctcacaccatgagtgccgagaagaagaaactgattggcagattacgcctatttttcactaatgcaaaaccatacctcttaatgattggcttgcaatttggcatggctggaaattacatcttcggcaaggatgttcttaaccatggcatgagtcgttttgtgttcattgtttaccgaaatgctatggc

SEQ ID NO: 5261 - DNA, 253 bp, Glycine max
  Clone ID: 700967079H1
gctaaggagaaatattgagaagcaggaagaagcaagttatggcgacgaagcagcttccgcagatcgccattctgggagctggtatctttgtgaagactcagtaccttccgagactctccgagatctctcatcttttcattctgaaatccatttggagccgcactcaggaatcagctacagctgccgtagacatagctcgtaagcattttccccaagtagagactaagtggggagataacggttttgatgacat

SEQ ID NO: 5262 - DNA, 256 bp, Glycine max
  Clone ID: 700967080H1
agaaatggaattgcctctttcaagaagcatctgagtgtttattattcgtaatatatagtcactcaagcttctaggatttctgccagctacatgaaaatgggaagcaacttgaggtttttgagtctttgcctcttggcattgattgcatcaactcatgcccaacttcagcttggtttttatgcccagagctgcccaaaagctgagaaaatcattttgaaatttgttcatgagcatatccacaatgctccatcactag

SEQ ID NO: 5263 - DNA, 251 bp, Glycine max
  Clone ID: 700967081H1
cttagtcattgtttgctacatcaccatcgaaggcacttgcaagtcacgctcttaacactaacactcttcaatctctctctattttttcaatttcatggcattgggtagaaacaagactgtccaattagcattgcttctcctctgtttggatctgggaatagcgcatcagcatcagggtcactccccttcccattctggtttctgtgcttccgatgcccataatcactgcggtgatgaccatcatcatgacc

SEQ ID NO: 5264 - DNA, 249 bp, Glycine max
  unsure (1)..(249): unsure at all n locations; Clone ID: 700967082H1
cgacgatggaggacgcggaagggcgaacacgcttcgcattctggtggcgacggactgccacctcggttacatggagaaggatgangtgcgccgccacgactccttccacgccttcgaggaganttgcgccgtcgccgagcgccaccgcgtcgacttcgtcctcctcggcggcgacctcttccacgagaacaagccctcnacgtccangctcgtcaaggcnatcgagattctccgncgctactgcctcaa

SEQ ID NO: 5265 - DNA, 249 bp, Glycine max
  Clone ID: 700967083H1
aatttgttccgcaaaatggtgatggagattgtgaggaacaagaaagttaggttttggaagaaagtgtatgttatatacagctttttctttgttcgcaaaatcatcgcccacatggtcaccttcttcttctactgtgttgtgattccccttacaatcttggtcccagaggttcatgttccaatctggggagctgtttatattccttctgtcatcaccattctcaattcagttggaacaccaaggtccatt

SEQ ID NO: 5266 - DNA, 247 bp, Glycine max
  Clone ID: 700967084H1
gtgacgagcatcatggcctcgagagcagtgctattgttggctatgtgtgtgcttccggccatggttgtggccattcgcccagcaaagaaccctttttgcgtgaagggtcgcgtctactgtgacccttgccgtgctggttttgagacctcagcaaccacctacattgccggtgctgagattatgttgcaatgcaagagcagggttagcaacgaggttgtgtacaccaagaaggggtacactgactcaa

SEQ ID NO: 5267 - DNA, 246 bp, Glycine max
  unsure (1)..(246): unsure at all n locations; Clone ID: 700967085H1
ctagtatccgatcctctgtcctctcgaagctttcatcgttcaacatattctcaccatctcagtcatgggcctgctatcttgttttaggtctaccgtcctgagaaaatgttccaaaggaagctctggcatgtcaagattcctgtatacgaacaattttcaacgaaacttgatttcgtctggtggcaatgaatcgtattatgggtattttaacaggagatcatacacttcactttatatgggnactgg

SEQ ID NO: 5268 - DNA, 237 bp, Glycine max
  unsure (1)..(237): unsure at all n locations; Clone ID: 700967086H1
ttctcttgttctctctctcccaaactcaatccctgtgagtgctttctttctgtaantaacttgttccctcgttaaccctaatcatcaactcaagcagtgantgaatctgtggacggacgagaactcctcggtganggaggccttcatgtcgtcctnngatctctcctcaatctggccctcgccggcnccgccgcaatccacggcggtcttnaatcnggacaccctcnannatcgcnt

SEQ ID NO: 5269 - DNA, 244 bp, Glycine max
  unsure (1)..(244): unsure at all n locations; Clone ID: 700967087H1
gaaaaatcaccggccagtcatactttggatgatagttctggtttcgatagcatgccaggtcatgatatcttgaatttgactgatgcacctatcaatgagggccagacgggatgctcaccacatggaaatgttgatcgagagagtcaagagagacagaaatatatggtgagaaaggtgataagacctcatggaagaggaaacgaagtgaggaaaacgatggaagaagactaggtgtgncctcccc

SEQ ID NO: 5270 - DNA, 198 bp, Glycine max
  Clone ID: 700967088H1
gttgtgtacttccttgttgccatcttggctttgacatcctctcttgtctctgcctctgaccctagtcctcttcaagatttttgtgtggcagccaaagaaaaagatggtgtatttgtgaacggaaaattttgcaaagaccctaagcttgtcaaacctgaagatttcttcctacatgtggaacccgggaacactgacaac

SEQ ID NO: 5271 - DNA, 247 bp, Glycine max
  Clone ID: 700967089H1
gaagctgccacagaaggcttcagcttcagcatcacaaacatctgagcaagctgatgatacagcttcccaggatagcaattctgattttgtcgcaagaactccacctcctaaaagtagtatagttagtcctactgctacaacaccagcagggaattttgctactcctgtttctatgaatgttcctgtgcctaacttgtcgagtccaccagccattgcatcagtcatgcctggttcaaattctgttcag

SEQ ID NO: 5272 - DNA, 247 bp, Glycine max
  unsure (1)..(247): unsure at all n locations; Clone ID: 700967091H1
gcataacagagacatccatcctcagtcattcgcaatggcccgacgactccttccacttcacctccctccgccacctctccatcgcngcctcgcgtngcctcctctcctctgcactccccgtngctccccgcccctatccgcccctcaccgcccgcttcgccgtncgtccggtgctctgcaaccgccccggagatcggcgtactcgnccctgaacacgggaaagcccactccatcttgtcgtcgatca

SEQ ID NO: 5273 - DNA, 248 bp, Glycine max
  Clone ID: 700967092H1
ggaggtggaaaaagaaaaaggaagaaggaatgagtgcaacagtgactctaactctaaacctatgccgttcttccatcgtcgcttcttgtccacattatagccacaaaccaaaccctaatttcaatgccttttttagcttctctttgtctctgtctctgtctcaccacagacgcatcgttatctacaagaaaccattcccctctagacggacgtgggctttatggatatatgaatagagatcgagatta

SEQ ID NO: 5274 - DNA, 248 bp, Glycine max
  Clone ID: 700967093H1
ttttagtatcaatttctatatagctaaagaaagtgatactattaagcataattaatataatggggtacatgtgcattaagatttcgttttgtgtgatgtgtgtgttggggttggtgatcgtgggtgatgttgcctacgctcaagattcagcagaagactacgtgaatgcacacaatgcagcacgagcagaggtgggttctcaatcaccaagacaaacagtgattgttccaagtttggcttgggatgat

SEQ ID NO: 5275 - DNA, 250 bp, Glycine max
  unsure (1)..(250): unsure at all n locations; Clone ID: 700967094H1
caactccttctgttcacaaactcatcttcaattccttttctgatctacgcaaggttaaggttaattttatctatctacttggacatgaacgaaatcgatgttccttcgttctttctctgccccatttcgctagatatcatgaaggatccagtgacggtctcaacgggcatcacctacgaccgtgaaagcatcgaaacctggctgttctcgaagaaaaacacgacatgccccattaccaaactgnccttga

SEQ ID NO: 5276 - DNA, 205 bp, Glycine max
  unsure (1)..(205): unsure at all n locations; Clone ID: 700967095H1
tcacaatcacaatggcgcgagtggatctggatggtaaccccatcaagccacttacgatctgcatgatcggcgctggcgggttcatcgggtcgcacctctgnganaagctcatgtccgaaacccctcacaccgtcctcgccctcgacgtctacagcgacaagatcaaacacctcctggatcccgncgattcccccctncctgggat

SEQ ID NO: 5277 - DNA, 108 bp, Glycine max
  unsure (1)..(108): unsure at all n locations; Clone ID: 700967096H1
cgttttttcagcatatgtcctcaanaggcccacggttgcctcanctgcctncttnccatcagcctgnnggccttanactnctgcntgctacgtggtcctccagtgaga

SEQ ID NO: 5278 - DNA, 251 bp, Glycine max
  unsure (1)..(251): unsure at all n locations; Clone ID: 700967301H1
ggtggcagttgtgtgacacagaaattaagctagagcttcatagtttcttcttcttttctcaccttccttctctcccttcagacaaagggacaaaaaatcnnnnnnnnnnnnnnnnnnnnnnnnnttccaaaaccatgtcccacagtcatctaagtttcgcctttgggattctaggtaacattgcctccttcgtgtgctttctggcaccactaccaacattttatagagtttgtaagaaganatcaaccgag

SEQ ID NO: 5279 - DNA, 249 bp, Glycine max
  Clone ID: 700967302H1
gactcgcagattcaaacgtttccgaggtgaggctgaggcatctctctctgctttctagaatgggagctgggcgtggagtctccatctcacttgatggggtgagggacaagaaccttatgcagctcaaaaagctcaatctcgctcttttccccgttcgttacaatgacaaatactatgtcgatgcactcgcttccggtgaattaccaaactagcttactatagtgatatttgtgttggagcattgcatgc

SEQ ID NO: 5280 - DNA, 247 bp, Glycine max
  Clone ID: 700967304H1
gacctcgtgttttcttctctctctcacactttctctcagcgttgaaacttgaaattcttcttctccgaaacctctttgaaccgggtcaagaaataaacctcgctgggaaccgttgattgggtttgtacgaataatttgaaatgaagattcagtgcaactgtgcgaggccgcggaggccaaggttctgtgctgcgcggacgaggcagcactgtgctgggaatgcgacgagaaggttcacgcagcaaac

SEQ ID NO: 5281 - DNA, 250 bp, Glycine max
  unsure (1)..(250): unsure at all n locations; Clone ID: 700967305H1
gaatgatggtagttcctgtagttacacggtgagcataaaaacaagctgcagttctccctcctacaccagagattacatcggtcttgcatttggtgatgcttatggctatcaggtttatgttccaagactggatgatcctggttcaggtacattcgagcggtgctctacggatacatttgagatatacgatccatgtacgtaccagacatgttatctngcatctataccggagtggatacgacggttggat

SEQ ID NO: 5282 - DNA, 246 bp, Glycine max
  unsure (1)..(246): unsure at all n locations; Clone ID: 700967306H1
ggggggggaataggagggggcaaattgagttgggtgttggaaaggcagagcaagaggagtancataatcaaacatggcggttaggcaaagagccgtgtctgcacttccaactcttctacgcactctccgcaaagaacctttgaagcctcgcaaccacgcacacgtcaatgccttgccctctcttcgacgcgcttctctttgtacgatcngatcaacctcatcgatcaagtcccngaagaccagctc

SEQ ID NO: 5283 - DNA, 243 bp, Glycine max
  unsure (1)..(243): unsure at all n locations; Clone ID: 700967309H1
ggcgccttcccaccgtaaaccctaacaataatggagttgtggaacgtggtgtttgtgtgttgtgttttatgttacagtttttgtcacactgcggaggctatcgttaagctacgaggcaatgaaacaataccagcattgattttgttcggggattcgatagttgacacnngaagtaacaataacttaataacggggctaagtgcaattttcctcctatgggagggatttcgagggtgggatacc

SEQ ID NO: 5284 - DNA, 241 bp, Glycine max
  Clone ID: 700967310H1
ggcacttcaattgcaatcaaattagttcattctctttgcgcagttccctacctctcctttcaagatgcagatcttcgtcaagaccctcaccggaaagaccatcacccttgaggtggaaagctctgacaccatcgacaacgtcaaggccaagatccaggacaaggaaggaattcccccggatcagcaacgtctcatcttcgccggaaagcagctcgaggacggccgtaccctcgccgactac

SEQ ID NO: 5285 - DNA, 234 bp, Glycine max
  Clone ID: 700967312H1
ggaagatccaaaaacaataggaaaaaataaatgatggctcactgtgttttccctgttaatgcacttcctactccttcaccatgtttccactccaaagttggaaagcaatggcctcagggatttgccttgagtgtgaggccaacgaatccgaagaggctttcaagtgcctgcaaagtgagagcaactttgggtgcttctgataaatcaattggaatcccaaccatggtacatgta

SEQ ID NO: 5286 - DNA, 238 bp, Glycine max
  unsure (1)..(238): unsure at all n locations; Clone ID: 700967313H1
ggaagaaaaaaaggaaaaaagaaaaaatcttacgccctaatctgtgtccgattttatcaatcacagactcaaaggtgtgcagnnnnnnnnnnnnnnnnctacatatttttgcaaagctgcttcatctgtattattacgcagatcagattcaggtccttatcaccaagatccaacaacttctcaaccacaacgagttgctatttccttcgattcacgaacccagaaaattaaagaatta

SEQ ID NO: 5287 - DNA, 236 bp, Glycine max
  unsure (1)..(236): unsure at all n locations; Clone ID: 700967314H1
tcagttgataattattttctttaatattcttccttttcctttatttttatttttattttaggtcattttctatacacatgtcaagatggtagaagatcagcttattgcgtttttagccaaccaactttacaggggaaaataaggcagcgcatgaatattcttttggatttgcaaattttgtacttcactttcgagagatatgtttggtttcttnnnnatgcatattgcaccagtag

SEQ ID NO: 5288 - DNA, 53 bp, Glycine max
  unsure (1)..(53): unsure at all n locations; Clone ID: 700967315H1
atcntattaatatatncatataaccctttacctttccaaaaaaaaannaataa

SEQ ID NO: 5289 - DNA, 245 bp, Glycine max
  unsure (1)..(245): unsure at all n locations; Clone ID: 700967317H1
ggatgcattggggcatgcttttaatttcctagatctcccaaacaaattgtagcataagtcccatggccaaagagactagtgttgtttatctatatcccagcaaatcacaagtttggggtgagaattttgatcataaaaaacttgtaataacaacactagctgctaatggaaagaaggaggagagtaatggagcacctaatgacacatatcctgcgtnnncnngtggtatgctgatgtttcctggc

SEQ ID NO: 5290 - DNA, 246 bp, Glycine max
  Clone ID: 700967318H1
gaacgggagtgtttgtggatggccctggggctggcaaacacatccaagcaggtgctaagaaggttatcatcactgctccagcaaagggtgctgatattccaacttatgttgtcggagtaaatgaaggggactacactcatgagatctctaacattataagcaacgcttcctgcaccacaaactgtcttgctccctttgtgaagatcctggatgcagagtttggaattgtgaagggaaccatgacaa

SEQ ID NO: 5291 - DNA, 93 bp, Glycine max
  Clone ID: 700967319H1
ataaatgacgaatatgatattaatattatttcagataattcagccatagaaataaaacaataggtcaaataactactcatctagatcagatac

SEQ ID NO: 5292 - DNA, 228 bp, Glycine max
  unsure (1)..(228): unsure at all n locations; Clone ID: 700967320H1
gaggcagaagagattangagaaacaactatggaagncgaaaatggaaagaagctgaaaatattgtgcctccatggattcagaacaagtgggagttttcttaaaaagcaaatcagcaaatgggatcctctatattcactcaatttgatatggttttcccagatggtaaataccctgcaggagggaagtctgacatagaaggcatcttccctccaccttactttgagtgg

SEQ ID NO: 5293 - DNA, 247 bp, Glycine max
  unsure (1)..(247): unsure at all n locations; Clone ID: 700967321H1
gatcgaagcaaaaaatgaaaacccaaagtgcttctctcctctgtctttttctctctcttgctatccttttggctagtggcactgctgcaagtgcaactccaagaagcgcagtgccaagccaccatgtttcaacattcaacagaagcctttttccttccacttttctctttggaattggttcttctgcttaccaggcagaaggagcagcaagtgtagatggnngaggaccnnnnatatgggacaccta

SEQ ID NO: 5294 - DNA, 241 bp, Glycine max
  unsure (1)..(241): unsure at all n locations; Clone ID: 700967322H1
tactatattaatcaagtaccacgattttttaaaattgcaaaatggtatgcaaaattcgtagcttctttaattttcataaagagatgttgtttatactttttttcatattgtgtcttttttcctgaaagtgaaggctaaaggattattagtgtttgatcattgaactcattgcatcaacacagaactgcatgaacttaatctattattcacacccattcaattcnttgtaaaaaaaaagtca

SEQ ID NO: 5295 - DNA, 136 bp, Glycine max
  Clone ID: 700967325H1
ggaacctttgcattctattcattcaagattcagcaagtgcgttttggaagcagagaccgaaatacttcgagatggcccgtacaaagcaaactgctcgtaagtcaactggaggaaaagctcccaggaagcagcttgc

SEQ ID NO: 5296 - DNA, 233 bp, Glycine max
  unsure (1)..(233): unsure at all n locations; Clone ID: 700967327H1
gacacattccaaaacacaaacacatacattgtagtatcacttttgtctcggaatttgttcttttgagttatggcaagcttaaaggttgcatgtgtggttttgatgtgcatggctgtgatgagtgcaccaatgatggtgcaagccgtgtcatgcaatgacgtttctgtgaacctagcaccgtgcctatcttacctgatgcaggtggagatgttccannnccgtgctgtagcgga

SEQ ID NO: 5297 - DNA, 209 bp, Glycine max
  unsure (1)..(209): unsure at all n locations; Clone ID: 700967328H1
agggtggttttgatttggagtgcagctatgcgattgtacagagagccaagcagcagttattgtataagcttcgtagatttganaaactggcggagttggatccantggaacttgaganaagaatgcaggatcaagaagaggacgaggatgacacatttatggaagaggaagatggtcatgatgngaaaaaccaagcatcatgcaaagaa

SEQ ID NO: 5298 - DNA, 235 bp, Glycine max
  unsure (1)..(235): unsure at all n locations; Clone ID: 700967329H1
gacaacatatccattttatttacaacaacaatggcttctgtgcctcaaccaaaaatctcccttctaaccttattcttcttctcgtccttcaccatcattgcgcatgcaattgttcctcaaaacgaaaccttcaaatttgagaactcaggtgaacttggaccctacatcgttgagtgcggtgcagattacagaatgataagcatcttcaactctncattccaagttggtttctaca

SEQ ID NO: 5299 - DNA, 240 bp, Glycine max
  Clone ID: 700967330H1
caaggaaataattctacaaaccaaggggtgactggaaacccattaccagcagggttaggaaatgcccagccacagcaacaagttcagcagtctcagcagcaggtcaaccagagccaaatgcaaaatgttgctaatggccagcctaatcaagcaaatagaactgcaacccctttacctcaaggaatatctaggtgtgttcagggtcctgtgtttttcaattgagctatgtaaaatctgtta

SEQ ID NO: 5300 - DNA, 216 bp, Glycine max
  unsure (1)..(216): unsure at all n locations; Clone ID: 700967331H1
tattatnatctagtgctaatctantaagagaaatgatagtaacccaatttttttatcacactttttcataccgnttannctattttaggatcatattnnatgggattntccacatttggctgaagcgantagnttggctccacttttttccnggaagncttgggaaatgnttcatcgngatagncctaattccacnntntaatancngctgaattc

SEQ ID NO: 5301 - DNA, 192 bp, Glycine max
  Clone ID: 700967333H1
ggaagagaagaaaaggaaaggtgttgttgtggagtaggaatttgaaagaatcgaattcgaaggaatagaggtgatagggtttgtgattctgatatagcgatgagtgagagtaacgggaacagcaggaggcgaaatgttgaagatcaagatctgggactgtacttcttggaggctgtagggagatgaaagagc

SEQ ID NO: 5302 - DNA, 103 bp, Glycine max
  unsure (1)..(103): unsure at all n locations; Clone ID: 700967334H1
gggtttaatatcatgatcctgtacttaaagtcaatgttatgatacgtttctattctattctcgaaaannaaaaaaanaaanaannanaaanngaanangaana

SEQ ID NO: 5303 - DNA, 245 bp, Glycine max
  Clone ID: 700967335H1
ggaagaaggttggttgattggtcccattgattccgaagagaaaagaaaagatgtttgagccacaacagctatacactcgcgcgaagaccgaggaattcgacctcgaatcaggagaaaccctctacccagggctgagcgtcggcgagaaccagctccgatggggtttcatccgcaaggtctacggcatcctctccgcgcagatcgtcctcaccaccctcgtctccgtcaccaccgttttctatatc

SEQ ID NO: 5304 - DNA, 244 bp, Glycine max
  Clone ID: 700967336H1
ggagcatagagctgtggctcatgaggagaaagatagactctcaattgtgacattttttgctcctagctatgaagtagagcatggtccaatgccagagtttgtggatgaaaaccacccatgcaagtataaaagatacagtcatggagagtacagtaaacactatgtaacaaacaagttacaaggaaaaaagaccctggactttgccaagatccaaaccaaaaacaaaaactaggaaggtccccaa

SEQ ID NO: 5305 - DNA, 249 bp, Glycine max
  unsure (1)..(249): unsure at all n locations; Clone ID: 700967337H1
gaacctgaagaattgaaatccaaatcaaaatttcaagcggggtgttcttctggaagtgtgggggcaactgcaaattccttcactaaaactacacttggaagtgatcgtcagtcacaatgtctcaggattacagagctgaatcgggtacttggaaactctgattcaagacatggcaaagcaatgcagaattcagttcatggagatgttgtggtcactaagaatnccatggangncaatcgtcagtcacaa

SEQ ID NO: 5306 - DNA, 240 bp, Glycine max
  unsure (1)..(240): unsure at all n locations; Clone ID: 700967338H1
ggcacaagtgagtttgttgatcgagataactagaaacagtgtgatgaaaatgaaggtccttgttttcttcgttgctacaattttggtagcatggcaatgccatgcgtacgatatgttccctctccgaatgaacactggctatggtgcccgtactccggaggtgaaatgcgcaagttggaggcttgctgtggaagcacacaacatctttggcttgagaccattcctgaagagtgcgttgna

SEQ ID NO: 5307 - DNA, 241 bp, Glycine max
  Clone ID: 700967339H1
ggatgcattggggcatgcttttaatttcctagatctcccaaacaaattgtagcataagtcccatggccaaagagactagtgttgtttatctatatcccagcaaatcacaagtttggggtgagaattttgatcataaaaaacttgtaataacaacactagctgctaatggaaagaaggaggagagtaatggagcacctaatgacacatatcctgcgtttcccgggtggtatgctgatgtttc

SEQ ID NO: 5308 - DNA, 238 bp, Glycine max
  unsure (1)..(238): unsure at all n locations; Clone ID: 700967340H1
accattttcaggaatcggattccattcttcctgctgatcaaaatcaccatattccaacaacttccaatcggtgcgctgaggaaattggtgaagaaataactaaagttcgggacttattgtccgagtatgactgtaaaattggtaagcttacactagcaagacttttgagtgctcttgattcgttatcatttcaatatgatggaagaaaatctaacacttnttcaaagttctcaacttt

SEQ ID NO: 5309 - DNA, 202 bp, Glycine max
  Clone ID: 700967342H1
tcagatctggagcaggagaatagcgttgggagcgttcgcgtttgttctgcttttcctatacggcctcagcagacgacgtcgttgtgctctctgaagataacttcgagaaggaagttggtcaggacagaggagctctcgttgagttctatgctcctggtgtggacactgcaaaaagctgctccagaatatgaaaagctggtag

SEQ ID NO: 5310 - DNA, 243 bp, Glycine max
  unsure (1)..(243): unsure at all n locations; Clone ID: 700967344H1
gggatattgactggtgacgattatcagcattgtctatgactccagcctgcatacatttccctctttattggaggattgaaagtgattttcccttgaaagtaaactctcctaaaccttgataatgttnntttgccagtttnttgcttttgtattcaaggcagatgtaagtttgtatcaatgccgnaggtntgtnactgtaagantatctcttgtttctattcttngacantngtatcgcacctc

SEQ ID NO: 5311 - DNA, 202 bp, Glycine max
  Clone ID: 700967345H1
tgcaacttcctctgttttgctcccctgtttaagccttatcataagcttagaatggcacacaaggaattttccattgccctagtgactctcattgttctctttgtcaacacgaacctccaaggtgccacggctgactatggtggtggttggcagagtgctcatgccactttctatggtgggggtgatgcttctggcacaatgg

SEQ ID NO: 5312 - DNA, 240 bp, Glycine max
  Clone ID: 700967346H1
ggagaagagagatggatccagacgcgttggcaaaggcattcgtggagcactactacagcaccttcgacaccaaccggaacggtttagcgaatctgtatcaggagggttccatgctgaccttcgaagggcagaagatccagggcgcttccagcatcgtcgctaagctcacttccctccctttccagcagtgccaccactccatctccaccgtcgactgccagccctccggtgtcaagctgg

SEQ ID NO: 5313 - DNA, 226 bp, Glycine max
  unsure (1)..(226): unsure at all n locations; Clone ID: 700967347H1
attgctattttttagaatagtattacactaagttgttaaatattaaatgttggaacaaattaaagtaacattcttttatctttactctagttacccatgtattcctcttattttgatccatataaaatttcctatcntatagccatnnatgtactagtacccccaatcccttaacaccatcagttccattaacntgaacaaatcatgtattttnataaaagaaatt

SEQ ID NO: 5314 - DNA, 111 bp, Glycine max
  unsure (1)..(111): unsure at all n locations; Clone ID: 700967349H1
gtttatttgtatgcctaaaaaaaaaaananaatccnnaaaaaaanagtagcataagtcccatggccannngngaccccggnnnttnatcccggtcccgggccctttcaggg

SEQ ID NO: 5315 - DNA, 222 bp, Glycine max
  unsure (1)..(222): unsure at all n locations; Clone ID: 700967350H1
ggttgcaaaaaggatcggaaacagactctctgatangcactgggagcttaggaacttcagtgctaatcttgttacttcaatatgccaaagatttgggcatatttatcacaatctgcagccacgtgtgatgaagacatttcttcattctttcttggaccctacaaaagctttgcctcaacactatggtgcattaaagggatagaagctcttggatcaagactg

SEQ ID NO: 5316 - DNA, 115 bp, Glycine max
  Clone ID: 700967352H1
gaggcctccaaatattttcctttttagctttgattagagtggcctagttgttgtttttctcaatgagaagggcttccactatgcattgcgcactttggcgcttctgtgttccctt

SEQ ID NO: 5317 - DNA, 244 bp, Glycine max
  Clone ID: 700967353H1
ggggatccaaatgcgaaaaaaggtggcgaattagtttttggtggtgttgacccaaagcacttcaaaggaaaccacacttatgttccaattactgaaaaaggttactggcagattgaaataggagattttttcattggaggtgtttcaactggtgtttgtgagggtggctgtgctgctattgtggattcaggaacatctttgcttgctggtccaactcctgttgtggctgaaatcaaccatgcta

SEQ ID NO: 5318 - DNA, 238 bp, Glycine max
  unsure (1)..(238): unsure at all n locations; Clone ID: 700967355H1
aaagcacagtttgttttcattgggtgctgatccggaacaaacagggaatagaagagaggagaagatgggtttcataatggaatttgcggagaacttggtattaaagttgatggaagatccgaaggaaagggatcggaggttcagggagcacgtttatagagtgaaggacaggtgcgagaagacgaaggagatgtggagctaccctatgcgaccctatgggttttggacntcgaacgcc

SEQ ID NO: 5319 - DNA, 203 bp, Glycine max
  unsure (1)..(203): unsure at all n locations; Clone ID: 700967357H1
gggannccctaatanctgcgaggtgagtgaaaatggcggtaaccttgctctccaagaagatcgtgaagaagcgcgtcaagaagtttatacgcccccagagtgatcgcaagatctccgtcaagccaagctggcgcagacccaagggtattgatcctcgtgtcaggagaaagttcaaaggatgcatttgatgcccaacattggtt

SEQ ID NO: 5320 - DNA, 233 bp, Glycine max
  Clone ID: 700967360H1
ggtgatggagcagaagaaggcaaagatagtggcagagctccaagctgtgaagcacaacagtggcaagtcctacaatcagttagcggaggggactggactcaccaacgtctatgttgctcagcttctcaggagacaggctcagctcaatccccaaactgcccctctacttcgggcagcgctgcccgacctgccccaagaccttgtttctgagatgatgagaccccctttgaggt

SEQ ID NO: 5321 - DNA, 234 bp, Glycine max
  unsure (1)..(234): unsure at all n locations; Clone ID: 700967361H1
gacctcaacattctcacattccatcaccaaagcagtgtagttttccgttgtcactgccatggctttcaaaaaagtactattccaatatttcactctggctttgtgtcttgtcttcgcattttgtgcttttgagggcaatgctcgcactctcgaagatgctccaatgcgtgagaggcatgagcagtggatggctatacatggaaaagtctacacncactctatgagaaagagcag

SEQ ID NO: 5322 - DNA, 232 bp, Glycine max
  Clone ID: 700967362H1
ggcgtacacagcctcaacaaccctaacgcgtgcagagcagagagagacgcagccatggggcgaagacccgcgaggtgttataggcaaattaagaacaaaccataccccaagtcacggttttgccgtggtgttcctgatcccaagatcaggatttacgatgttggtatgaagaagaagggtgttgatgagtttccttctgtgtccatctggttagttgggagaaggaaaacgt

SEQ ID NO: 5323 - DNA, 86 bp, Glycine max
  unsure (1)..(86): unsure at all n locations; Clone ID: 700967363H1
ggacaagtgagtttgttgatcgagataactagaancagtgtgatgaaaatgaaggtccttgtttcntccgttgcnacaattttggt

SEQ ID NO: 5324 - DNA, 218 bp, Glycine max
  Clone ID: 700967366H1
gtacaaggctcggaagaaggcgagtgggagcctggtggctctgaagaagacgcgtctggagatggacgaggagggtgtccctcccaccgcactacgcgaggtgtctctccttcagcttctctcccaatccatctacatcgtccgcctcctctccgtcgaacacgtcgacaaggtccccaagtcccagaaatcctcctccaaccccctcaccaagccca

SEQ ID NO: 5325 - DNA, 243 bp, Glycine max
  Clone ID: 700967367H1
gacatataaacaatgccaacgtaagtttcagcaatcacccttcatttatttccgaatggtttctcttgatggtctgggatattgcaccaaggctttcaatatgctgtagattgtgatcctcttgcctcatctttccattagtgttgcataccataattgcagctgtcttattgatacattgactgctactgagagttattgaagggcaaaaatgagtacacatagtatgttggatatgttgta

SEQ ID NO: 5326 - DNA, 187 bp, Glycine max
  unsure (1)..(187): unsure at all n locations; Clone ID: 700967368H1
tagatacgatcttttatcctataattttatcaattatgcagataagaaagactcatatatttatggatatagatccctatttcaagtanaaaaaaaccaagtgatttcttctaattacaacncgtataaaaaagatttttggatatctagataatctctttatcaagattatatatcggaagtgcgt

SEQ ID NO: 5327 - DNA, 238 bp, Glycine max
  Clone ID: 700967370H1
ggtggcactcaaacattgtttgttgtaggaagaggaatcttgagaaatggcaggggacagcaagagcaagattctgttcatcggagggactggttacatcggaaaattcatcgtggaagccagcgccaaagctggccacccaactttccttttggtgagggagtccactctctccaaccccgcaaaatcacccctcatcgacaatttcaaaggcctcggtgtcaatcttgttttagga

SEQ ID NO: 5328 - DNA, 217 bp, Glycine max
  Clone ID: 700967371H1
gtgtggagagaggggcactgactcacacccacaatagttcgggggcagcttcaaagtacctccacattgtctcctactcttactgttctcttctcttctcatcatttttattttttccaatcaaaccaaacaaaacataagcaccgctcttttctctccgaaatccccatctcccttcacttctgagctctggacgagatcccagatctcaccatct

SEQ ID NO: 5329 - DNA, 124 bp, Glycine max
  Clone ID: 700967372H1
gacaacacaacacaacacaacacaattacacacacgaatttccttagttaggcattgctttgcgatggaaaaaatggaactggcagagacacctctacctttgctttcactaaaccacgtttct

SEQ ID NO: 5330 - DNA, 232 bp, Glycine max
  unsure (1)..(232): unsure at all n locations; Clone ID: 700967374H1
tttcagttgtagatgaaaaaatctaacagttcatttttcaacatattatgatttgttatgcatgtgtaacagttcatttttcaacatattatgatttgttatgcatgtgttcttgatattttctcttcaacgaccaagataacttttttggttttctaccggtnctcttatttggaagcaattctattcgaaacatggtcattcagatattaaatgtaaacacttcttctaa

SEQ ID NO: 5331 - DNA, 230 bp, Glycine max
  Clone ID: 700967375H1
gggggtctgattaattctctagttatggctgagagcagagcgaatcacacagtgagcgtatttgggtgggcagctcatgattcgtcgggcaagattaccccctacagcttcaaaagacggcagaacggtgtgaacgatgtgacaataaagatcctctactgtgggatctgccacacggatctccactgtgctaaaaatgaatggggcatcactatgtaccctgtggtacc

SEQ ID NO: 5332 - DNA, 128 bp, Glycine max
  unsure (1)..(128): unsure at all n locations; Clone ID: 700967376H1
gccttgtagtcgctgccggggttgaggcgaggaggccctacgccgttgtccgagatggatgcttcggttattgctggcatggttgcatattcccctcatcatactgcaattggnggtgtgataaagtg

SEQ ID NO: 5333 - DNA, 220 bp, Glycine max
  Clone ID: 700967377H1
ggaaaaagggagtgcctgataacccataaccgaccgcaccaccgttttcctttgctttgcgttctacaatgtcgaaaacctcagagattattacatgcaaagctgctatttgctggggaataggaaaacctgtgactgtggaagagatacaagtagaccctcccaaagccaccgaagttcgagttaagatgctttgtgccagtatatgctccacagacat

SEQ ID NO: 5334 - DNA, 229 bp, Glycine max
  Clone ID: 700967378H1
gaaatgcgaaattgaatttaaccttaatagatggcttgtttttggagaatgttgagttcagaatcttagaattattataacattaatggttgttttagcacatgactttctgatagaaggctcgttcttttttccttagagatatagagatggtgaaaaaaggaaacattgtgcagtatcgggaaaggttggacaacacccttgccttacctgatctgacaaatgaaca

SEQ ID NO: 5335 - DNA, 113 bp, Glycine max
  Clone ID: 700967381H1
taagagatcaatgtcaccaaatgcccatctcaccattttcagagcagaggagtacaatgcgactgtggaatttctctgggctcctcttcttgctgaatctaattctgatgatc

SEQ ID NO: 5336 - DNA, 237 bp, Glycine max
  Clone ID: 700967382H1
ggatgcacaagtttgttgagatagctagaagcaataagatgaaaatgaaagtgcttgttttgtttgttgctacagttttggtagcatatgaatgccatggctcagactaccagaagttccctctccaaatgaaaactgggtttggtgggcagtacagcaatgaggtggcatgtgccagttggaggcttggcctggaagcaaacaacgtatcaagtggcaaactgttcctgcagcttg

SEQ ID NO: 5337 - DNA, 251 bp, Glycine max
  Clone ID: 700967383H1
ggatgcagagaaggtactagtttagtttcaccaaaataacccgcagacgcaaacgttgaaaacacatccgtctgccccaacattacaagggtttgagattataaagacttggtggaagggtaagctaaagttgaagagttgaggggaatacaagaagagaaggaggttgaggtactcaataaagttttgatttgtttgaatcggggggctgatgccaatgttggatacagttgtatgtgctagaaacagtc

SEQ ID NO: 5338 - DNA, 238 bp, Glycine max
  Clone ID: 700967385H1
caatgaaaagggatgataaaggacttgaagaatgggaactctcagaaagtcctcaacatttttgtgtcaaagagaagccttatgctattcaacattcagatatagaagccatgaaggataaattttcaaagcttttgctaggtgaagatgttacaggaggaactaagggcctcagtacagctttggcactgtctaatgccatcacaaacctagcatgacggtttttggtgagctgtgg

SEQ ID NO: 5339 - DNA, 124 bp, Glycine max
  unsure (1)..(124): unsure at all n locations; Clone ID: 700967386H1
gaaggaagaacaaggatgtaactgangcaattcagaagattgccgcagcgtatgattgtaaaattgttgagggtgttcttagccaccaaatgaaacagtttgtgattgatgggnataaggttnt

SEQ ID NO: 5340 - DNA, 217 bp, Glycine max
  unsure (1)..(217): unsure at all n locations; Clone ID: 700967387H1
aacgatgcttctcatgannctgctcatgtttggagagttcgtgatcttgctctctcccttgccaaagaggaaggcctctcttccaatccccactccatggaaattgttgagcttgctgcgcttctccatgacatagctgactacaaatacctcagggacccatctgaggaaaaaatgttgagaatttctcgatgcnactggcagttcaggaggacaa

SEQ ID NO: 5341 - DNA, 227 bp, Glycine max
  Clone ID: 700967389H1
ggacataaatattaagtagtttgttttctgcatgttaggaataggatggagggggttgagagcaaagaaagagaagtgatggtggcaaaaccagttgcagtgggtgtcagtgatttgcttctgaggctgttggccttcacagtcactcttgtcgctgctatagtcattgcggtcgataagcagaccaaggttgttcccattcagcttcagatccttaccacctttgg

SEQ ID NO: 5342 - DNA, 229 bp, Glycine max
  unsure (1)..(229): unsure at all n locations; Clone ID: 700967391H1
ggcacaagtttgttgagatagctagaagcaataagatgaaaatgaaagtgcttgttttgtttgttgctacagttttggtagcatatgaatgccatggctcagactaccagaagttccctctccaaatgaaaactgggtttggtgggcaatacagcaatgaggtggcatgtgccagttggaggctggcgtggaagcaaacaacgtagtcaagnngcaaactgttcctgca

SEQ ID NO: 5343 - DNA, 230 bp, Glycine max
  Clone ID: 700967392H1
ggcatcaattcaaaatatgtcatcaattataagcatgggtttgtggaacacaacgaatgcagtgtcttgccgctttcacaagtttggtgatgaccaaaagaatctggtcttccaaggtgatgccacgtcttcttccaggggcatagaactcacaaagttagacggtggaggaaaaccagtgggtggcagtgtggggagagtgttatactcttctccagtgcacctttggg

SEQ ID NO: 5344 - DNA, 220 bp, Glycine max
  unsure (1)..(220): unsure at all n locations; Clone ID: 700967395H1
gatacatgctttaagcactaatnggnttccaaaaaaactaaacccatnggnacnccaatctaaatagnataaatatncnaaatnccccacngnacnctgcngcnggnaaaatccntagctgntaccaaccatttttcnataccccttcnaaggtttaanaccagnttttttaaaaaatggngtgcggnctggtttagggccccatgnccatgttggacca

SEQ ID NO: 5345 - DNA, 246 bp, Glycine max
  Clone ID: 700967401H1
gaggggcacatcaaattctttatttataacatggagtactctgtggaaactttggaaagagatcttaagaacacgaggaaatactacgggagtggaaaaacaaaggaagcaccatggagagaatcacagcttaaagggttgcacaattttctcgtggaaaaagaggaagaaattgtgacggccctcaagcatgatttggggaagcattacgtggaggcttttagagacgagcttggaacattaatg

SEQ ID NO: 5346 - DNA, 116 bp, Glycine max
  Clone ID: 700967402H1
gacacgcagttgtattgtagaactgaacaagggtttctctttctcttctctgtctgcttcttcactttctctcgtttcaatcgaaaaaaatcatgggcagaaaattcttcgtcggt

SEQ ID NO: 5347 - DNA, 239 bp, Glycine max
  Clone ID: 700967404H1
gatcaattcaaaatatatcatcaattataagcatgggtttgtggaacacaacgaatgcagtgtcttgccgctttcacaagtttggtgatgaccaaaagaatctggtcttccaaggtgatgccacgtcttcttccaggggcatagaactcacaaagttagacggtggaggaaaaccagtgggtggcagtgtggggagagtgttatactcttctccagtgcacctttgggaaagctctaca

SEQ ID NO: 5348 - DNA, 237 bp, Glycine max
  Clone ID: 700967406H1
atcagcggtgccccccaggataacaacataatgctgtggaatgctgtcatatttggtcctgatgatactccatgggatggaggcacgttcaagttgactctccagtttactgaggattatccaaataaaccaccaactgtgcgatttgtgtctcgcatgtttcatccaaatatttatgctgatggaagtatttgtttggatatactacaaaatcagtggagtcctatatatgatgtg

SEQ ID NO: 5349 - DNA, 232 bp, Glycine max
  Clone ID: 700967410H1
agagcaggcctttaccaaaggtgcctactttattgggaagatgatatggagcaaaggctacaaggaactactccaacttcttaaagatcatcaaaaggaattatctgctcttgaggttgatttatttggcagtggagaggactcaaatgaagttcaaaaagctgcagaaaagttggaactagcagttagcgttcacccagctcgtgatcatgctgatgctcgatttcatgat

SEQ ID NO: 5350 - DNA, 113 bp, Glycine max
  unsure (1)..(113): unsure at all n locations; Clone ID: 700967411H1
gttcttatcaaggatcaaattgaataaagagtttaacataaggggccaaagagtanttttacctagttttttttggcaaaaagattactatatgtcacaaataaggatgctaa

SEQ ID NO: 5351 - DNA, 237 bp, Glycine max
  Clone ID: 700967412H1
gagagtggtggagtgtgtaaaagagcgtcgtagtcgcaaccctaatcagaagaagcgtagttcaagcgagtgacagccaccagccatgggtcgtatgcacagccgcggtaagggtatatcctcttctgctttgccctacaaaaggacacctcctagctggctcaagatctcttcgcaagatgtcgaagaaaatatctgcaagtttgcgaagaaaggtttgaccccgtctcggattga

SEQ ID NO: 5352 - DNA, 238 bp, Glycine max
  Clone ID: 700967413H1
gatcgtggcgaaagaacttctgaatgggcagaaggtggtggtggtacgctgcgaggagatttgcatctccggtgggctcgtcaggcagaagatgaagtacttgcgtttcctccgcaagcgcatgaacaccaagccctctcacggccccatccatttccgtgcacccggcaagatcttctggcgcaccgttcgtgggatgataccacacaagacaaagcgcggggaagtgctcttgcgc

SEQ ID NO: 5353 - DNA, 237 bp, Glycine max
  unsure (1)..(237): unsure at all n locations; Clone ID: 700967414H1
gaatgaagtgaatacagatgggaagcttgtaaatgaagaactagcaaaaacaagccaacaaggatatgacaaagaagcaaaatttaaaggatttttttcaaaacctattccaaaaccaatttctgttgttaagcctattcctattccactatatnagtctataccaaaatcaattcccatagtgaaacctatcccaaagtcaattcctantgnagaagaaaaatttaaaggactttt

SEQ ID NO: 5354 - DNA, 115 bp, Glycine max
  Clone ID: 700967415H1
ggcgtgagagtgaagcgagaagcgagaagcgacatggatccagacgcgttggcaaaggcattcgtggagcactactactccaccttcgacaccaaccgcaacaatctcgccaatc

SEQ ID NO: 5355 - DNA, 243 bp, Glycine max
  Clone ID: 700967416H1
ggtgctctgctcgtgcctctagggttatcatttctccatttccattttctctctcacttttcaagaatcgtaagctatgggaaagtcttacccaactgtgagtgctgattaccagaaggccgttgagaaggcgaagaagaagctcagaggcttcatcgctgagaagagatgcgctcctctaatgctccgtttggcatggcactctgctggaactttgacaagggcacgaagaccggtggaccc

SEQ ID NO: 5356 - DNA, 212 bp, Glycine max
  unsure (1)..(212): unsure at all n locations; Clone ID: 700967417H1
tcagatctggagcaggagaatagcgttggcagcgtttgcgtttgctctgctgttccaatcggcctcagcagacgacgtcgttgtgctctctgaagataacttcgagaaggaagttggtcaggacagagganctctcgttgagttctatgctccttggtgtggacactgcaaaaagcttgctccagaatatgaaaagcttggtagcagcttca

SEQ ID NO: 5357 - DNA, 239 bp, Glycine max
  unsure (1)..(239): unsure at all n locations; Clone ID: 700967418H1
gaggacagtgaggactgagaactactacaatactcaaacgctgttgaagcgaccgacgagtcttgtgtgtgacctcaaaaccctgccgtcagtcaccgtcttctctgccgccatgaagcttgtcaggtttctcatgaagctgaacaacgaaaccgtttcaatcgagctcaagaacggaacagttgttcatggcaccattacaggtgttgatatcagtatgaatacgggncgtganaaca

SEQ ID NO: 5358 - DNA, 239 bp, Glycine max
  Clone ID: 700967419H1
gcctcgctgcgtttctattgtgcaaaatgcccttggctgacagtaattacacaccacatgcggaattagtccctcactagtgggttggaagacacacgtactctatgacttgggacaaaaaaaagacgacctaacatacttaactcccagcttcattaatttttccaatgtatttcttgcacgatttgtcaaaactcctataactaacccagaatatgtagaacagtatgtgcaatact

SEQ ID NO: 5359 - DNA, 250 bp, Glycine max
  unsure (1)..(250): unsure at all n locations; Clone ID: 700967420H1
atgcccccttttcttnntactagtcatccaaccatttcttntattagcctctgaagtgtaaagtcttncatggctataagaggctaaacctcatttgggagcctagcagccaacgcccttgtaatgnaattgctacttcttatctattaatacaatntcaatttctattattcttttctgctttncanngttantgtgtggttngnncatccatgcatatgnttncngggantactcattgggaaatggt

SEQ ID NO: 5360 - DNA, 242 bp, Glycine max
  Clone ID: 700967422H1
gagacaaaacattgaaaagaatcagagcaaaagaaaagggattctctacgtatcagtgcagcgatggcgttatccctactaatccactgttctcccaccgttaaccctctccgacgatccccaaaacccaccctccgccgcgtcaaccaccgcgtctgcgtggccagcgccgccactcccctcctccaagttaatgacttgagggccaagattgtcgaatccaacgtcgacattctccacgg

SEQ ID NO: 5361 - DNA, 236 bp, Glycine max
  Clone ID: 700967425H1
gaagcaaagtctttggtgtgaggaaagtgttgatggcgcagagagctgaaccaatattggtcaccacagatgttttccaaatgggaaatatcaaatggaagcaattcaacattgatacatccaatgcttcctcctcacctccaaaaccattgttaatctttacaccaaccgtgcctggctcataccctgtaatattgttctgccatggattttcccttcgcaatagctactactct

SEQ ID NO: 5362 - DNA, 148 bp, Glycine max
  Clone ID: 700967426H1
gggtcgtgtgttgttgtatactataatagccagaatcgtgagtaacagcagagcagaacaccgataaatcgctatgactgctcagacccaagaggagcttcttgcggccgaccttgagcaacaaaagatccatgatgatgagcctgta

SEQ ID NO: 5363 - DNA, 233 bp, Glycine max
  unsure (1)..(233): unsure at all n locations; Clone ID: 700967427H1
ggagagaagttattagggtttttgagtgcggcggtccaaacactcttctctgcagcttttgcctacaactcccttcaccatggctgaacaaaccgagaaagcttttctgaagcaaccaaaagtgtttctcagcacaaagaagactgggaagggaaagagacctggaaaaggtgggaaccgcttttggaagtccattgggcttggatttaagactcccngggaagccatcgaag

SEQ ID NO: 5364 - DNA, 119 bp, Glycine max
  Clone ID: 700967428H1
tcccttgactttgtcacctccaaagatggtgtagtgattgtgactgtagcatttacggattaattacctcgctatcttcatgtagtagggattgggaaaggttgtttcgtgtgggaggg

SEQ ID NO: 5365 - DNA, 234 bp, Glycine max
  Clone ID: 700967429H1
caacaggggcaacccccttctctttggtgtatggtatggaagcagtactccctgtggaggttgagattccatcaatgagagttctaatggaggcccagttatcagaagctgaatggtgccaaagcagatatgatcagttgaatctaattgaagaaaaacgcatgaaggccttgtgccacggacaactttatcaacagaggatgaagcaggctttcgacaagaaggttcgtcctc

SEQ ID NO: 5366 - DNA, 240 bp, Glycine max
  unsure (1)..(240): unsure at all n locations; Clone ID: 700967431H1
gctacatatatatattatagagattttatacattctaaattttgtgagtgtggacatactctgagcgtgaganagagaaggggaagaaagagagagagtgatgggaaggggaagagtggagttgaagagaattgagaacaagatcaacaggcaagtgacctttgcaaaacgaaggaacgggcttttgaagaaagcttatgagctttccgttctttgtgatgccgaggttgctctcatcac

SEQ ID NO: 5367 - DNA, 239 bp, Glycine max
  unsure (1)..(239): unsure at all n locations; Clone ID: 700967432H1
ggaaggggagggtgagtgagagagggagtgacactccaaggagccaagggaaaaacaaaaaacctgacctttccctttctccaaaggatcatcgaactaaaccaantcanaatcaaactttgtcacagttattggtgtgctacctccgttagttntataaganccttttatnaactcctttnaggctttcaatctcnaatcattcttcttgtgttgtcataanttcaannacttctttc

SEQ ID NO: 5368 - DNA, 239 bp, Glycine max
  unsure (1)..(239): unsure at all n locations; Clone ID: 700967433H1
gcacgaatttatgacagcagtcaagcaaacttatggggaaaaggtcctaattcagtttgaanactttgcaaaccacaatgcttttaatctgtttgagaaatatagatctacacatctggtcttnatgatgatattcagggaacagcatccgtggttcttgctggactagtgcatctctgaagttggttnggggtaacttagctgatcacagattcttattccttggtgctggagtggnt

SEQ ID NO: 5369 - DNA, 118 bp, Glycine max
  unsure (1)..(118): unsure at all n locations; Clone ID: 700967434H1
gaagaagaagggagcaagcttcgtgatcgattgcgcgaancggtggaggataagattatggacattggcttctctggagaagttccttcaggngaggattaaggtcggcggcaaggcc

SEQ ID NO: 5370 - DNA, 246 bp, Glycine max
  unsure (1)..(246): unsure at all n locations; Clone ID: 700967435H1
gattgcatatgtatcataacataacattaagatatatattcagcttcttgtcttttccgttacctttttcccctgaaatcactgatccacaacaagaggcactcagagagcatttgttgatttggatttggaaggttccactttggttatggaagcaacttagctcccttcctctctctttattttccacattgtacaaatgaattttcagggtacttgttggtagtggtggntgacaaagatatt

SEQ ID NO: 5371 - DNA, 234 bp, Glycine max
  unsure (1)..(234): unsure at all n locations; Clone ID: 700967436H1
gacggacgagggtttcgtttcgggtttgacgttgttcacaatcactttctgcgcttcactcactcccttcgtgcggttttctttctttgtcgaactcgtgcgaaaatgcgtnagattcttcacatacagggagggcaacgcggaaaccagatcggagcgaagttctgggaggtggtgtgcgcgganacgggatcgattccacggggaggtaccagggggacaacgagttgcaac

SEQ ID NO: 5372 - DNA, 112 bp, Glycine max
  Clone ID: 700967437H1
ggcatcaattcaaaatatatcatcaattataagcatgggtttgtggaacacaacgaatgcagtgtcttgccgctttcacaagtttggtgatgaccaaaagaatctggtcttc

SEQ ID NO: 5373 - DNA, 233 bp, Glycine max
  unsure (1)..(233): unsure at all n locations; Clone ID: 700967438H1
tgatccttctttttctccttgaactcaaacatggcagatgaggtggctctgntagatttctggccaagtccatttgggntgagggtcaggattgcacttgntgaaaagggnatcaaatatgagtacnaagaagaggacttnaggaacaagngtcntcttntcctccaaatnaacccggttcacaagaagnttccggttctcatccacaatggcanacccatttgtgaatccct

SEQ ID NO: 5374 - DNA, 112 bp, Glycine max
  Clone ID: 700967439H1
gacacatacaaaagtgacacaccaaatcaaagacacctgagccattcaattcccctcctttattgctttcaagtttcaacactaattttattatctgaaaaaatggctttca

SEQ ID NO: 5375 - DNA, 244 bp, Glycine max
  Clone ID: 700967440H1
tgcaatgggcgtgtttatatggctgaatttggccttccaccatgttctgccattgataacactggtgttaataacgattagctgatccccttttttgattattttgtaccaaccctggctaatgttcttttgattattttatattggctaatattctttttattaattgtactatgcttggctagtattcttctcatctatgctccagtttacatgaaagtatttttgcattggcattgctttt

SEQ ID NO: 5376 - DNA, 230 bp, Glycine max
  Clone ID: 700967441H1
gacagcatatatatcaataatctattttatactatacctacattttgataattttctttgtagttgatagccatggctacccgtggaaagcttgaggttgacattgatctcaagtccaacgcagacaagtactggcaaacccttaggaattctactgaaatattccctaaggccttcccacatgattacaaaagcattgaggttcttgagggtgatggcaatggtcctgg

SEQ ID NO: 5377 - DNA, 231 bp, Glycine max
  Clone ID: 700967442H1
ggccccctttctcactccctcctcttcacacattttcttagctctctccaacaatccctctcgttcacactttcagattgtgtgaagatgggggctggtggccgaactgctgttcctcctgccaacaggaagtcagaggctgaccctttgaagcgggtaccatttgaaaaacctcagtttagtctcagccagattaagaaggccattccacctcactgtttccagcgctct

SEQ ID NO: 5378 - DNA, 232 bp, Glycine max
  unsure (1)..(232): unsure at all n locations; Clone ID: 700967443H1
gacaagtgagtttgttgatcgagataactagaaacagtgtgatgaaaatgaaggtccttgttttcttcgttgctacaattttggtagcatggcaatgccatgcgtacgatatgttccctctccgaatgaacactggctatggtgcccgtactccggaggtgaaatgcgcaagttggaggcttgctgtggaagcacacaacatctttggctttgaanntattcctgaagagtg

SEQ ID NO: 5379 - DNA, 234 bp, Glycine max
  Clone ID: 700967444H1
ggcacaagtttgttgagatagctagaagcaataagatgaaaatgaaagtgcttgttttgtttgttgctacagttttggtagcatatgaatgccatggctcagactaccagaagttccctctccaaatgaaaactgggtttggtgggcaatacagcaatgaggtggcatgtgccagttggaggcttggcgtggaagcaaacaacgtagtcaagtggcaaactgttcctgcagctt

SEQ ID NO: 5380 - DNA, 234 bp, Glycine max
  unsure (1)..(234): unsure at all n locations; Clone ID: 700967445H1
gatatcagtgattctacagaacatgacatctnctccttacttctttcatagttgctttcatagttgaatggagggtttccttgctcatcttggcaactttccctctccttgttctagccaattttgctcagcaactatctctaaaagggtttgctggagacacagccaaggctcatgcaaagacaagtatgatagcaggagagggagtgagcaacatcagaacagttgcagcat

SEQ ID NO: 5381 - DNA, 238 bp, Glycine max
  Clone ID: 700967446H1
cgcatctgttttgaagagttcagagaacaactcttatggagacgctaagttagtaggctgtaggaagggattgaaatcaatactcgggggattggaggagctatgggaccaatcacaatatacagaggagtacaatctgcgtcaatttttagcaaggcttaatgactaatattccagattcatttcagagtcagagtgtacatatccatgagtacaaattttgccattgtaacatctc

SEQ ID NO: 5382 - DNA, 239 bp, Glycine max
  unsure (1)..(239): unsure at all n locations; Clone ID: 700967449H1
gattgctgttctttccttcgatcaaagatcagtgaccatgtntcttcagttttacataaacgatancggcgacaaagtctacaccactaagaaagagtcgccggtagggctacctacacaatctgctcatccagcccggttttcacccgatgataaatattcaagacagngagttcttctgaagaagcgttttggattattaccaacccagcagccacctccaaagtattgagtgatgt

SEQ ID NO: 5383 - DNA, 237 bp, Glycine max
  unsure (1)..(237): unsure at all n locations; Clone ID: 700967450H1
gtctttgaatttcttattaattcttatcatcattatatatttnagttgtgacttctttgtaatataactttatacaaacctcagaaagagacagaatatcactaacagaattgaggtgaagagttatattattcaacccaatgagaaaaggttacacctcggtttatataggcagttacacaaaagtanctgtcaactgactctagtcagttanctataaaggccnctaaactgtag

SEQ ID NO: 5384 - DNA, 235 bp, Glycine max
  unsure (1)..(235): unsure at all n locations; Clone ID: 700967453H1
ggcacaagtgagtttgttgatcgagataactagaaacagtgtgatgaaaatgaaggtccttgttttcttcgttgctacaattttggtagcatggcaatgccatgcgtacgatatgttccctctccgantgaacactggctatggtgcccgtactccggaggtgaaatgcgcaagttggaggcttgntgtggaagcacacaacatctttggctttgagaccattcctgaagagtgc

SEQ ID NO: 5385 - DNA, 235 bp, Glycine max
  unsure (1)..(235): unsure at all n locations; Clone ID: 700967454H1
ggaacggaaaagcactggcgcagntaaccctgaggcttctcttctcttctcttctctgtcgtgagtcaccatggtgagggttagtgtgctgaacgatgctctgaagagcatgtacaatgctgagaaaaggggaaagcgccaagtcatgattaggccatcctccaaagtcattatcnaattccttttggtgatgcaaaagcacggatacatcggagagtttgagtatgttgatgac

SEQ ID NO: 5386 - DNA, 91 bp, Glycine max
  unsure (1)..(91): unsure at all n locations; Clone ID: 700967456H1
ganncctggcagcatatacncataaatcacatagctagtngtttaaagtaagagagaagaaagangcaaatggcanactttccagttgttg

SEQ ID NO: 5387 - DNA, 219 bp, Glycine max
  unsure (1)..(219): unsure at all n locations; Clone ID: 700967457H1
cagatcaggcaagtgtggaattgcaattgagccatcttatccccttaagaatggtccaaatccccctaatcctggaccatcacccccttcacctgtgaagccgccaaatgtctgtgacaactactacagctgtgctgatagtgctacttgttgctgtatttntgagttcggaaatgcttgcttcgagtggggttgctgtcctcttgagggtgcttcctg

SEQ ID NO: 5388 - DNA, 232 bp, Glycine max
  Clone ID: 700967458H1
gagagcatcataggccattcaaaccttcaacataaaatggaagaatccaagggttttgttggtggtgagtctcaaaaaccacatccagaaatgccctctatttcttttcaaattcctatgccagggaggaatcgatctggtggtctctacccttggggatggaggcaaagagcaataataccacagcacaccgtgcgaaactctaacggggcaagtgagaacacaaatttga

SEQ ID NO: 5389 - DNA, 232 bp, Glycine max
  unsure (1)..(232): unsure at all n locations; Clone ID: 700967459H1
gacgctcacttttttccttttcttcttcatcctcccctttccctaacctccttcttcttcactantaatcttcacaaccatatcatccccaaaacaaaaaanatccacgtatttganatccgacgctgtttttgatggatttagcgtgcaacgatgaaccacctaccgcgantattcggnaatagnnagaagcaagcctccgacatggacccgacnangaagnngaagaagg

SEQ ID NO: 5390 - DNA, 229 bp, Glycine max
  unsure (1)..(229): unsure at all n locations; Clone ID: 700967461H1
tgnttgtcctagcttangagcaacatcatgaagatctccattctctttatcacantcttttcttgtggttttcttggaaatgttgtttcaaatgctagtcctcttccatatgaagctatttttaactttggtgantctataagtgatactggaaatgctgctcataaccacccacctatgcctggcaatagtccttatggttcnacatactttaaacatccttctggac

SEQ ID NO: 5391 - DNA, 233 bp, Glycine max
  unsure (1)..(233): unsure at all n locations; Clone ID: 700967463H1
tcccctaactctctgcagcaataataaatatgatatggaggaagtagagatgataatttgaggagttggaatccaatgcaggaattgacttcttaganttcagaccctcagagnttgcagcagcagtggcaatatctgtggtgggggagggccaaacagtgcacactgagaaagcaatttctgttctgattcagcttgtggaaaaggtantacatntggtgtggtccatgaca

SEQ ID NO: 5392 - DNA, 235 bp, Glycine max
  unsure (1)..(235): unsure at all n locations; Clone ID: 700967464H1
gggggcccggtggtgatcgcagtggtgctgttcgtgctgttaagcccggggcttctgtttcagatgccagccaggggaagggtagcagagtttggaacatgcaaaccagtggggcctccattttggttcacgccatcatctactttggcctcatcactagcttcctcattgccattggcgttcacatctacactggtanctcctggatctggttcagtttcacccatctatgtta

SEQ ID NO: 5393 - DNA, 242 bp, Glycine max
  unsure (1)..(242): unsure at all n locations; Clone ID: 700967465H1
gatctcaatttcttttctctttgtcgcaaagagaagagatctgcctcctttttatcnaatctatctcttcttcaanaatagttgaaaatggggctgtctttcaccaagttgttcagccgantgtttgccaacnaagagatgcgtatactgatggtgggtctcgatgctgcgggtaagaccaccattctgtacaagctcaagcttggagagnttgtcaccaccattcccaccattgggtttaa

SEQ ID NO: 5394 - DNA, 242 bp, Glycine max
  Clone ID: 700967467H1
gtgttgttactgttagtaggttagtttccatggattcgttggatgctatatcttctcctcattcttattcagtcacggccggtatctctgcttaatttcacatcacccattaattacttttttctttgatttcacccttgggtatttggtcaatttttcattattatcaaattatttgctgactaatatgagaggaaccattaattggtatatttattttgcaagtgtatatgtacgtgtgt

SEQ ID NO: 5395 - DNA, 235 bp, Glycine max
  unsure (1)..(235): unsure at all n locations; Clone ID: 700967468H1
gaagaaagaagatcanaagaaaaaagagaaccaaatggcagcactgggtggctttaccgacatcaccggagcacagaacagcntcgntatcgaaaatctcgctcgctttgctgttgatgaacacaacaaaaaagagaatgcagttctggagtttgtgagggtgattagtgcaaagaaacaagtggtttctggcaccttgtactatatcactttggaggcaaatgntggtgtgacg

SEQ ID NO: 5396 - DNA, 236 bp, Glycine max
  unsure (1)..(236): unsure at all n locations; Clone ID: 700967470H1
ggggatgtgaaactactcatcactcactccaaacccaccacaccaccattattcatatctcattctctaacctttcactattccctctcattcactctctagctagtttcctcntcatcgtngnagaaccaatacttgtactctctcttactttttaaccatgtagaatgattcacctaaggaaaaattagtagcttcttgttgtgctgnatatnttgtntngttttgtgtagaga

SEQ ID NO: 5397 - DNA, 91 bp, Glycine max
  unsure (1)..(91): unsure at all n locations; Clone ID: 700967472H1
tanggttgaacttactatgctgtggctactttgcgaacaggctacctagctagtatatgaaaaaatcatctgtgtgcttgtattaaataaa

SEQ ID NO: 5398 - DNA, 215 bp, Glycine max
  unsure (1)..(215): unsure at all n locations; Clone ID: 700967473H1
gcaccctcgtcacaagaaaaaaagaaaactccccttaaacccccccccttcatgttcttttcttttctctttttgctctaagcgaaaaccaccactccgcaccacaccaccaccatggcagcaagagcaaaaactccccttaacactctctcctctttcacattcacactctttctctcattctctntcctccaactttctctctcctcccccac

SEQ ID NO: 5399 - DNA, 226 bp, Glycine max
  unsure (1)..(226): unsure at all n locations; Clone ID: 700967474H1
gatagccttaagggggttaaatacagcttctaaaattgttgtgggttaaataagctaagatattaggaatattttatcatccaacctcacataatatatggaagcagtttaccgggttaatagcagatgtgaagagaaaaagatcgtttaacatgaatcattcaaggaaaacaacaccattgtagcataagtataagaagtgaatcaagtgattaaggnatattaa

SEQ ID NO: 5400 - DNA, 240 bp, Glycine max
  unsure (1)..(240): unsure at all n locations; Clone ID: 700967476H1
gacggcaacagaggaataatcaaatttctcagatctatccgacgtcgtcgcagatccaccaaccgttatggctgccttcagcggtgatgaaacggctccgtttttcggcttccttggagccacagctgccctcgtcttctcctgtatgggagctgcctatggcacngcaaagagtggtgtgggcgtggcttccatgggtgtgatgagacctgagctggtgatgaagtctattgtccctgt

SEQ ID NO: 5401 - DNA, 231 bp, Glycine max
  Clone ID: 700967477H1
ggagaaaagaagatgcagtgagtcacagtcatagaatagaaacagaggcaccatttccgttttccaacaacctctaccctaacgccgttataacggttcgtgcttccgcgacgcgacgcttcaactgtgaaacggacgcgacgtagtttatataaagcgccgtccctttccgtttgtgcgttaatcaatcagcaagacgatgaccagtaccgaattattttccctcttttc

SEQ ID NO: 5402 - DNA, 237 bp, Glycine max
  unsure (1)..(237): unsure at all n locations; Clone ID: 700967478H1
gggaggaaagtgagtgagagaaagagatcgcagacacagagcagaatggcttctacccaatgtttcttgcaccaccatgctcttaccacccctgccagtgccagntccccatcactacgcatcttggttagcaccaagcctaaccagcttgtttgcaaggcacagaaacaacaaacaccacaagaggatattgatgtcagcccaatctctcgcgtttagccctaactgtgctcattg

SEQ ID NO: 5403 - DNA, 111 bp, Glycine max
  Clone ID: 700967479H1
ggagtccaaaggtgtcgaaacgcaatgtccactctgcttcactccgcatcaacttcttctccttccttctctcagatcaccactcctcgtttcgccccaatcactcgtatc

SEQ ID NO: 5404 - DNA, 237 bp, Glycine max
  unsure (1)..(237): unsure at all n locations; Clone ID: 700967480H1
atcctaggtcgtctcccaacgagcaatggtcaaccaaacgttcataacaaatagtaataaaatagtaacgaattnnnnnnnnnnnnnnnnnnnnngtaaattaaacagcaagcaaatttgaattagaaaataacagaattaaaacatgttgtttccccttgattcacaagcaagtctcttatcctaggttatgagaattatccctaatcagttccaaccacttaatccaacccaant

SEQ ID NO: 5405 - DNA, 205 bp, Glycine max
  unsure (1)..(205): unsure at all n locations; Clone ID: 700967482H1
gacagaagaccgagnncaaaagaagcgaaactaaagtcagcatncgnaaaagatgagtagcatcggtacaggttacgatctatcggtcaccactttctcccctgatggccgcgttttccagatcgagtatgccgctaaagccgtcgacaacagcgggactgttattgggatcaagtgcaaagatggggttgtgttgggcgttgag

SEQ ID NO: 5406 - DNA, 239 bp, Glycine max
  unsure (1)..(239): unsure at all n locations; Clone ID: 700967483H1
gggttagcaacatctccaaccagttcaactgattcggcacaagttgtatatgttgaaactgaccttgaaaccaaaagtaaaactcttgatgaggaaaatanagattcattttcaacagatgtaagttctgaaaagaagcatgttgtgcaaaatgctantgnnttatctgccagcagtgaaaatccggaagtagaagaaaagcaggaagatctcagccccccatctggttgtagtaaaga

SEQ ID NO: 5407 - DNA, 107 bp, Glycine max
  unsure (1)..(107): unsure at all n locations; Clone ID: 700967484H1
ggtaggcaacttcaacctcaccaaaggaactaagaatttcattgaggctagagaaagtggtgatcaatatgtcaaagaatccaaaagtttnctttgatattctaatt

SEQ ID NO: 5408 - DNA, 229 bp, Glycine max
  Clone ID: 700967486H1
gaagaaggccttcaccaagtactcaaagcagtatgaaactgaggagggaaagaaaaacattgaggcacagctggagaaactgaagaagtatgctactgtggttcgtgttttggctcacacccagatcaggaaaatgaaagggttgaagcacaagaaagcccatatcatggaaattcaggttaatggtggtactattgcacagaaggtggactttgcatacagtttcttt

SEQ ID NO: 5409 - DNA, 228 bp, Glycine max
  Clone ID: 700967487H1
gggcatcatatttcaaaggaggctcagaattcctggtcgacacgccagccagatccacaaatcggaagaatcagagcgccgtcggaaaccgccgtccacggcggtgaaactcgccttcgcatcctctcgtcttcgaacccgaagcctctctcggttcctcactcttctcacatcgccaaaaactcaaattcacgatggaagagttggagcagtggaaggaacaacttt

SEQ ID NO: 5410 - DNA, 213 bp, Glycine max
  Clone ID: 700967489H1
gggtcaaagaagtagcacctgagaaccctgaatattcaacctgtgatatggggtacctcaattcagttctgtcctcttcaagccaggttcatgctgcagaagagtcacctgtcagtggagggggcctcagtcagaatggaaaattcagctatgggtatgctagctcccctggcaagagatcttcaatggaagatttttatgagacaaaaattg

SEQ ID NO: 5411 - DNA, 228 bp, Glycine max
  Clone ID: 700967491H1
gatagaagaagcagaaagagaagcattagcaaaagcaagaagaactagtctaagcagaaatggcctcttcagtgatggcatctgtggccctcaaacctgcccctttcactgttgagaagtcctcagttagaggccttccctccctctcaaggaactcctcttcattcagagttgtggccagtggtggcaagaagatcaagactgacaagccttatggaattaatggtg

SEQ ID NO: 5412 - DNA, 108 bp, Glycine max
  Clone ID: 700967492H1
ggaactcaatgggtgtttgttggtttcattggtgggagtggaagctccaatccaatggcaatttttgtctgtgactgtgatgcacagtgaaataatcaaccctattca

SEQ ID NO: 5413 - DNA, 229 bp, Glycine max
  Clone ID: 700967493H1
ggcactttcattctctaaaaaaatctaagtccctttggtcttcatcttctgttctgatccaggtatggcttctaaacgcatcttgaaggagctcaaggatttgcagaaggatcctcctacctcatgcagtgcaggccctgtggctgaggacatgtttcactggcaagccacaatcatgggacctgctgatagcccatatgcaggtggtgttttcctagtttcaattcat

SEQ ID NO: 5414 - DNA, 231 bp, Glycine max
  Clone ID: 700967494H1
gacagttccgagttctctaattcttgactccgttgggttcttaatccacttatatccccaactagaatcagaattactttcttttttcctttatcttgttcaattcattggcattcttctaaaatgattattatagcacgccttatgtttcttcttgcattgtttcttttactcgtaacaaatacaggccaaatggtatttgcacaagatgacaataatgttagagatgct

SEQ ID NO: 5415 - DNA, 236 bp, Glycine max
  Clone ID: 700967495H1
ggcacaagtttgttgagatagctagaagcaataagatgaaaatgaaagtgcttgttttgtttgttgctacagttttggtagcatatgaatgccatggctcagactaccagaagttccctctccaaatgaaaactgggtttggtgggcaatacagcaatgaggtggcatgtgccagttggaggcttggcgtggaagccaaacaacgtagtcaagtggcaaactgttcctgcagcttg

SEQ ID NO: 5416 - DNA, 240 bp, Glycine max
  Clone ID: 700967496H1
gctgtgcagacatggtacagattcgtttctttgttttctgttttctgtttcctgattttcgtttgagtggtgaaaattgggtgggttgtggtggcagttgttcttctcgtacttcaaggatttggtggggagggaagtaatcgtggagctgaagaacgatttggccatcaaaggaacattgcattctgttgatcagtaccctcaaacatcaagctcgaaaaacactagcgtcgtcaatca

SEQ ID NO: 5417 - DNA, 235 bp, Glycine max
  Clone ID: 701144301H1
atcctcacatcggcaataggatttgaatccacgtctttgtggaatttgagtccaatccttaccaactggatcaacttttgttcgctgcatccattttagttattttaaaacattgtgattagagtattcttcttttctttgaccaggttgccatcaatttgcagacttaacagaatccataatgttttgatttgaacactagtccagtaaactttgaaatttcactcagaatcct

SEQ ID NO: 5418 - DNA, 246 bp, Glycine max
  Clone ID: 701144302H1
ggggataacatcactcactcccacccaaaagaatcaagaagagaagaaaagcaaagaggaagaagacacagaaggagaggttcaacatcttcttcatctatggcgacgccgattctgacgctaccactcagcctcaagattccgacactgctcccaattccagtcctcccaacgccctcgtccccgccgctcccgccgtttgcctccttcgcttcgccaccgactccgccggcggcgctctcatgg

SEQ ID NO: 5419 - DNA, 243 bp, Glycine max
  unsure (1)..(243): unsure at all n locations; Clone ID: 701144303H1
ggcatcaattcaaaatatatcatcaattataagcatgngtttgtggaacacaacgaatgcagtgtcttgccgctttcacaagtttggtgatgatcaaaagaatctggtctccaaggtgatgccacgtcttcttccaggggcatagaactcacaaagttagacggtggaggaaaaccagtgggtggcagtgtggggagagtgttatactcttctccagtgcacctttgggaaagctctacagtg

SEQ ID NO: 5420 - DNA, 60 bp, Glycine max
  unsure (1)..(60): unsure at all n locations; Clone ID: 701144309H1
ggtggtagttgtgtgacntcanannttaagctcagangctacatagtttnnttctctttc

SEQ ID NO: 5421 - DNA, 244 bp, Glycine max
  unsure (1)..(244): unsure at all n locations; Clone ID: 701144312H1
ggcacacaatcatgcagctctagggaatcaaganaattattataccctttaagatgaaaccgtacctacgtgcaatattcctattattccttatccttctcgaccaatccattcggcgagtgcttttttaaatttaaatggnttgctaaacattgaaaagtggccctctggcgagaaaagtttggaaatgggaaagatagggaaggagacgacagatcatatcaaagaccttttaaagaaactg

SEQ ID NO: 5422 - DNA, 69 bp, Glycine max
  unsure (1)..(69): unsure at all n locations; Clone ID: 701144313H1
gantctcactactnctactnctgctcctttgctcatttgctctactcccgtgcgtgnccttgaattact

SEQ ID NO: 5423 - DNA, 237 bp, Glycine max
  unsure (1)..(237): unsure at all n locations; Clone ID: 701144314H1
ggaagcnaaaaatganaacccanagtgcttctcncctctgtctttnnctctctcttgcnatcnttntggctagtggcactgctgcaagtgcaactccaagaagcgagtgccaagccnnacatgtttcaacattcaacagaagcntttntccttccactttnctctttggnggttggttcttctgcttaccaggcagaaggagcagcaagtgtagatgggagaggnccaagcatatgg

SEQ ID NO: 5424 - DNA, 96 bp, Glycine max
  unsure (1)..(96): unsure at all n locations; Clone ID: 701144316H1
gagttcnagnnagtgtancctcaatactccganactgatcaagtggaccatgtgngagacaaagaatattaccacctctctttctccacacaacat

SEQ ID NO: 5425 - DNA, 244 bp, Glycine max
  unsure (1)..(244): unsure at all n locations; Clone ID: 701144317H1
ggaagagaganagggcggttgcaattgcatagagaagtgcagagagagcgcagcgaaaacgactcagtcaaacagtcggtaactctttcttttcttttctttctttctccgtcgcatcgctcgcaaccacaatcatgccttcccgnagaagaactctcttgaaggtcatcattctcggtgacagcggggtggggaagacgtctttgatgnnnngnnntgtgaataagaagtttagtaatcagta

SEQ ID NO: 5426 - DNA, 226 bp, Glycine max
  unsure (1)..(226): unsure at all n locations; Clone ID: 701144319H1
ggggctatttnactgcactgtgctggctactatcatggagagaaagggtcaagtatgtctgggtcaatctctgaatattccgcttatacatggtgatacaacctgattaaccagtccaaggttgttgtcctgaaacagaaaatttcacataaattatcagcctgtcgcatagacaaacaatttcagagaaatcttattaagtaaccacataagaaccggaaattaa

SEQ ID NO: 5427 - DNA, 240 bp, Glycine max
  Clone ID: 701144320H1
ggagagaaaaaatggccaaatcaatcaaattctttgagttgaacacaggggccaagattccttctcttgggttagggacttggcaagctgaacctggtgttgtagctgagctctcaccacagccattcaggttggatacaggcatattgactgtgctagtgcgtataagaatcaagcagagattggttctgctcttaagaagcttttgatgatggtgtggtgaagcgtgaggacttatgg

SEQ ID NO: 5428 - DNA, 243 bp, Glycine max
  Clone ID: 701144321H1
gtattttattagtgacaaaatctcatcatggagaaattgccacgttcaatccgttttgatttgttacagataagaacagttaaggttagcaacatatcattggttacttcaagaaggacattgaagaattcttttcattctcaggtgatattcgatatatcgagatgcaaagggaaagtggtcacactcaggttgcttatgttacatttaaggatacacagggagcagacacagcagttctct

SEQ ID NO: 5429 - DNA, 242 bp, Glycine max
  Clone ID: 701144323H1
catgaacacaaggcattcagaaatcaaataatatcaacaataaacagcattcagaaagtgtatacattgaacacaatagttcaaaaatcaaataaacaagctaactaataaattgtatttgtgttccgtagaaaacatatgaacacacaattagctgcaacagcagtttttccatgttttagattgcaagaatgcctatgcccacaagtcacataaaatcaatcacatgataacaaatgaca

SEQ ID NO: 5430 - DNA, 241 bp, Glycine max
  unsure (1)..(241): unsure at all n locations; Clone ID: 701144324H1
ggggtttntgttacttggttcactcgaatggcgacatccttgtcaaacatgttcttgaagggaatcgcagctcgttctctcagcagacccttaaatgggttgtnttattgacaagatactcgactactgtgtcaaatggntcngacatgcatgatgacttcaagccagctaataagcttgagaattcnggcattctttgtcaaatgttattgagcaggatgtcaaggataatcctgttatg

SEQ ID NO: 5431 - DNA, 245 bp, Glycine max
  Clone ID: 701144326H1
ggcaaaagttagtagtagtgaagaaaatgaaagtccttgttttctttgttgctatagttctagcagcatggcattgccatggctcagaccatgaccatgaccatggccacacctccaaattttccctctgagaatgaaaaccggccatggtggccactacattccggaggtatcatgccaaagttggaggcttggtgtggaagcacacaacgtcattgactggaaaaccgttcctcaagattgcg

SEQ ID NO: 5432 - DNA, 238 bp, Glycine max
  unsure (1)..(238): unsure at all n locations; Clone ID: 701144327H1
gggaggcgagangtgagagcctacgcgttctttgcgctcgcactacctccgcaacggcgtacgttttcctcttctctctactccgaagtgttccgttccgttctcgctttccgaaaaacgcgttcgcgtgcgtctctttaagcggcggttaccgttttcttccgctagggttttgcatttgccgcttctaagttcccagtgcttcttcttcttcgaatcgcgtttgctgcaataaaaa

SEQ ID NO: 5433 - DNA, 235 bp, Glycine max
  Clone ID: 701144328H1
ggtatcaagcaaattaacaataattcagaaatgttactgcaaacattagctatccctacaatactccttgcgatattcatatgggtggtacaaccaaagcaacgcatgggaagattgcaccaggtcccaaggcgttgccaattattggtaacctccacatgctagggaaactcccgcaccgcacccttcaaacctttgcaagaaaatatggacccataatgtccttgaagctagg

SEQ ID NO: 5434 - DNA, 233 bp, Glycine max
  unsure (1)..(233): unsure at all n locations; Clone ID: 701144330H1
atccacataaacatcaacncgagaaaggttgttaattttcaactcaatggttcttccctcaggtnttgtttccatgttgatactttttggcatggttttggtagtggggtgaatattgtcccaggggttgaggcanaggcaagggctttctttgtatttggagactcactggttgacagtggtaacaacaattacttagcgaccactgcacgggctgattcccctccttatgg

SEQ ID NO: 5435 - DNA, 65 bp, Glycine max
  unsure (1)..(65): unsure at all n locations; Clone ID: 701144332H1
agggaggtgagggttggttcatttgatctgacgactgatagaagacnaagagacattgtgatggg

SEQ ID NO: 5436 - DNA, 116 bp, Glycine max
  unsure (1)..(116): unsure at all n locations; Clone ID: 701144333H1
gtgttcttatgttttaccctgtgatganggattatggatttcagaacattgtgtgttatttgctttgaagacttatatgaaaacggttnatggacccccgtatttaatcttatttc

SEQ ID NO: 5437 - DNA, 246 bp, Glycine max
  unsure (1)..(246): unsure at all n locations; Clone ID: 701144334H1
ggagatccgcataagcaaatcaatcatcctgttccttccttatctctgtctctgcatttccctccctaaaaccctaattctacatttggaaaggaantctcaaatctaatgataattaatcaatcaatcgtattaataatccatcgatcaagtatggagtccgaactcaaagacctcaattcgaagccacccaactgcaacggcaacgccaacagcgtttgcgacgaccgtcctctgctgaagccg

SEQ ID NO: 5438 - DNA, 240 bp, Glycine max
  Clone ID: 701144336H1
gaacctttgacgtatcgaaaccttaagtttcggatcaggtctgagcaatctggttggtagaacctttggtcttagagagtcaagttttatgtctgaattagacgatcaattcctactgccttcgatccttttgctgatgcaaatgctgatgactcgggtgctgggtcaaaggagtatgtgcatattcgcgtacagcagcgaaatggaaggaaaagcctgacaaccgttcagggattgaaa

SEQ ID NO: 5439 - DNA, 240 bp, Glycine max
  unsure (1)..(240): unsure at all n locations; Clone ID: 701144338H1
gggagcagttgtgcttgggaagaacgctcgctcgcactgtccagatccttaatcaagaggagtgagttttgtttttccagccatgacgccgctnatcctgcatgctgggaaaccaacaaaaattcttacaagacactcattgcagccgagtatgctggcgtccaagttgattttgcccctaattttgagatgggtgtctccaataaaactcctgaattctcaagatcaatcctattggca

SEQ ID NO: 5440 - DNA, 240 bp, Glycine max
  Clone ID: 701144339H1
ggcacaagtttgttgagatagctagaagcaataagatgaaaatgaaagtgcttgttttgtttgttgctacagttttagtagcatatgaatgccatggctcagactacagaagttccctctccaaatgaaaactgggtttggtgggcaatacagcaatgaggtggcatgtgccagttggaggcttggcgtggaagcaaacaacgtagtcaagtggcaaactgttcctgcagcttgcggaga

SEQ ID NO: 5441 - DNA, 242 bp, Glycine max
  unsure (1)..(242): unsure at all n locations; Clone ID: 701144340H1
gggtctctgaagatcagatnctcatcntnctaccatttcaggtgctcactttacttgcgcccatttttatttgtttgttgttttaacaaaacccataatcagatccgatcccttgagattgggatcaacgccgagtccatnagcacgccagcgctttcagggggcacgggcctcttctctgggttcactcggttatgcaagggccttgcggtggtgcttgtttgcggtcacattgcggttca

SEQ ID NO: 5442 - DNA, 245 bp, Glycine max
  Clone ID: 701144341H1
ggtgagagagcgagcgagcgagcagtttcaaagagaggatttgggattgggaaggcgagggattgcgctgcgtctcttcctcttctctttcgattcatccctcattcataatctccaatccaacaacctcagcctcacactcacacatacacacatctgaacgcgtatcgtccctcccatggcttcaaagcgcatcctcaaggagctcaaggacttgcagaaagacccaccaattcttgcagcgt

SEQ ID NO: 5443 - DNA, 242 bp, Glycine max
  unsure (1)..(242): unsure at all n locations; Clone ID: 701144342H1
ggcacaagtttgttgagatagcnagaagcaataagatgaaaatgaaagtgcttgttttgtttgttgctacagttttggtagcatatgaatgccatggctcagactaccagagttccctctccaaatgaaaactgggtttggtgggcaatacagcaatgaggtggcatgtgccagttggaggcttggcgtggaagcaaacaacgtagtcaagtggcaaactgttcctgcagcttgcggagagt

SEQ ID NO: 5444 - DNA, 233 bp, Glycine max
  unsure (1)..(233): unsure at all n locations; Clone ID: 701144343H1
gtggatatacatataatgtattgcaataattattataattatcgtttgttacacacttgcacctttgatttattaagacatcagatataggattcacgtttttctatatctttcgatgaatcctttcnactcaatagatataagactaatcactcactgggttatcctaatggtgggagattggagtaattataatgtataaaaacttaagtatgatctttatgttacagtta

SEQ ID NO: 5445 - DNA, 235 bp, Glycine max
  unsure (1)..(235): unsure at all n locations; Clone ID: 701144344H1
gatgtctcataaggnaagccaagggtaagtgtgggactcaaaacggtgatgatggttgaagttaagaggaaggagccggacaccgaaaccagtcccggagatgcacaacaaggcatactaagaagacaaaggtccaaccaggtgaaacctttttcgcagttaaggtcacagacaacatcaacacatcatctccgtcgtttattcagccaatgcttgacagcgagaaaacgccatc

SEQ ID NO: 5446 - DNA, 219 bp, Glycine max
  Clone ID: 701144347H1
gagagaaagagagagaaagatgtcgaagcgtggtcgtggtggttcggcggggaacaagttccgcatgtcgctgggtcttccagtggcggcacggtgaactgcgccgacaacacgggggcgaagaacctctacatcatttcggtgaaagggatcaaaggccgtttgaaccgtcttccctcggcctgcgttggcgacatggtgatggccaccgtgaagaag

SEQ ID NO: 5447 - DNA, 255 bp, Glycine max
  unsure (1)..(255): unsure at all n locations; Clone ID: 701144349H1
gatcgaataaaaaaatagaagaaaaattgcgacgatcgagcaaggtggagaaacagggatcagtgtagaggaagagcatcagtgttgtgagaactgaggacaatgtcttctgaattgccaagtctgtncgcaaagtggttgttcatctcagagccaccggcgatgctcctatcctcaagcaatccanattcaagatagcaggaactgataaatttgctaaagtgntagacnttcttcgccgacagctccacaggg

SEQ ID NO: 5448 - DNA, 241 bp, Glycine max
  unsure (1)..(241): unsure at all n locations; Clone ID: 701144352H1
gataggatagagatcaccaacaaaatatttgctttttgttttatttcattgcaaccatgtttggctatgcagcagcaataattgcagcaatcctcttcttccaatactcttccatatgagacgatgttnccaaacaccccattttgacagaataccctatcattggcatgctaccacaattactcttcaatttatggcgtgcccatgattattcaactcaggtgttgcaacgacatggtgg

SEQ ID NO: 5449 - DNA, 239 bp, Glycine max
  Clone ID: 701144353H1
gtggatatacatataatgtattgcaataattattataattatcgtttgttacacacttgcacctttgatttattaagacatcagatataggattcacgtttttcataatctttcgatgaatccttttctactcaatagatataagactaatcactcactgggttatcctaatggtgggagattggagtaattataatgtataaaaacttaagtatgatctttattgttacagttataca

SEQ ID NO: 5450 - DNA, 229 bp, Glycine max
  unsure (1)..(229): unsure at all n locations; Clone ID: 701144355H1
aagctttggaggttctgggctcaagaaaagtggaaagaaataagggctctttatcatgattgtatacatccaatattgagccctgtagtttattaccagataacttctgtcttattgtggccttctttattgctctaatgttagtactgaactgaggtatttcgtgatgtaagctgcaacaagttacttgtttgtagctttantgtgtggcccttcatggggttctgat

SEQ ID NO: 5451 - DNA, 85 bp, Glycine max
  Clone ID: 701144357H1
ataaatgacgaatatgatattaatattatttcagataattcagccatagaaataaaacaataggtcaaataactactcatctaga

SEQ ID NO: 5452 - DNA, 218 bp, Glycine max
  unsure (1)..(218): unsure at all n locations; Clone ID: 701144359H1
aancagcggtgcctcccaanntaacaacataatgctgtngaatgctgtcatatttggtcctgatgatactccatgggatggaggcacgtcaagttgactctccagtttactgaggattatccaaataaaccaccaactgtgcgatttgtgtctcgcatgtttcatccaaatatttatgctgatggaagtatttgtttggatatactacaaaatcagtg

SEQ ID NO: 5453 - DNA, 233 bp, Glycine max
  unsure (1)..(233): unsure at all n locations; Clone ID: 701144360H1
gaagaagaagaaggagcatggccatgagcatggccatgacagcagcngcagcagtgacagtgattaaactgctgcatcacctatatatttaaaaggtttatggaccatagtagtgagggctgtgccttaannnnnnnnnnnnnnnnnnnnnnnnnnnnnnnnnnnnnnnnnnnnnnctttntccctatcntgngatntatttatgagtgagaaaaacaagagtgagatantgt

SEQ ID NO: 5454 - DNA, 230 bp, Glycine max
  unsure (1)..(230): unsure at all n locations; Clone ID: 701144363H1
ggctgcaaatcacttttctactttgagtcttcttgatccttcnntttctccttgaactcaaacatggcagatgaggtggttctgctagatttctggtcaanccatttgggatgagggtcaggattgcacttgctnnaaagggtatcaaatatgagtacaaagaagaggacttgaggaacaagagtcctcttctcctccaaatgaacccggttcacaagaagattccggtt

SEQ ID NO: 5455 - DNA, 235 bp, Glycine max
  Clone ID: 701144364H1
gatgctaatggcaaccaggtatatgaaccaagactggatgatccaatttcaaggacatttgagcagtgttcttcagatacatttcagatagatggtgcttgtgcatcccaatttgctatgtgtacctatatagatctggggcagaggaaggttgggagcctgagagtgtgaaaatctatggctacaactcagagcctattacttttgatttcaacacctccatccccaatggcac

SEQ ID NO: 5456 - DNA, 237 bp, Glycine max
  Clone ID: 701144368H1
gacacgagaaaattaataatcccaatcatcaagataggaaaagaatggaggccatttgttccaagcaccttatgacatcccttgtcataattcttgcttctagttgaccttatcacagggtgccaagaaaggcagtgacagtgaaaggccataccaagaagcgagcacggtgttcattagaacatcttgcagctccacgacctatccaagactctgctacagctccttagtgaagca

SEQ ID NO: 5457 - DNA, 236 bp, Glycine max
  Clone ID: 701144369H1
ggttctagtgtgtgattgtttgttgttgtaactcgttcttcttcttttgttgttctgtgtttgtgtttgttttttctctcacctgaaaatgtcttgctgcggtggaactgtggttgcggaagctcctgcaagtgcggcaacggctgcggaggctgcaagatgtacccagacttgagctacactgagtcaaccaccaccgggaccttggtcatgggagtggcacctgttaaggctca

SEQ ID NO: 5458 - DNA, 156 bp, Glycine max
  unsure (1)..(156): unsure at all n locations; Clone ID: 701144370H1
ggcgtgatatctattctatttttcttattttttatcccttaatcattgggaanactcctcctcctcccgtactaggacatctggatttaagaagtactactataacatcacgttttgcatccccaatctttgtcttatcaatttgggacggcncct

SEQ ID NO: 5459 - DNA, 228 bp, Glycine max
  Clone ID: 701144371H1
gagagcggagacatgggcgagtcaagcgactctgtctccattgacattgatttgattcctttgggaggaaaggaatgcacggttaaaactagtaaagttccgtgtctgtgcttgtttgtggggatcaagaaaaacccgctctaataacctacccagacctggctctcaattatgtgtcttgtttccagggtcttttattctgcccagaggcagcttctttgttgcttc

SEQ ID NO: 5460 - DNA, 240 bp, Glycine max
  Clone ID: 701144372H1
gtaatagaataagttaggaaagagaaagaataagggttaatttggcctaatcgaaattcggagtgaaactcgggatctcgtccaggcttccatggaattgaattaatattcaattccatttctattaataaaagagtgaaagcagaaatttaaatggaatgtatagggtgggggcaacaatatcataaaaaatacttagttaaaaaaacgaaaatactgtattgcaattgtattgcaatt

SEQ ID NO: 5461 - DNA, 183 bp, Glycine max
  unsure (1)..(183): unsure at all n locations; Clone ID: 701144373H1
catttttttccctcttcccttttttcgatggacacggacagcttcgtttcctngatcatgtttcgccggaggattcccacgaggttcatgtcttggccgttgatgacagcctcgtcgatcgaaaggtcattgaacgcttgcttaaaatctcagcttgtaaagttactgctgtggatagtggaa

SEQ ID NO: 5462 - DNA, 182 bp, Glycine max
  Clone ID: 701144374H1
gagctccacaagaatgaaatgggtctccatcttcacacttctattcctctccactcgcccctcacaaccttcgcagaagatgggctagtggcgaatggagattttgaggttagcccatcaagtgggttccctaacgaggcgattgtggagggccccagcgaggtcccaaactggaagtcaaa

SEQ ID NO: 5463 - DNA, 232 bp, Glycine max
  unsure (1)..(232): unsure at all n locations; Clone ID: 701144375H1
atcagcggtgccccccaggataacaacataatgctgtggaatgctgtcatatttggtcctgatgatactccatgggatggaggcacgttcaagttgactctcagtttactgaggattatccaaataaacnaccaactgtgcgatttgtgtctcgcatgtttcatccaaatatttatgctgatggaagtatttgtttggatatactacaaaatcagtggagtcctatatatga

SEQ ID NO: 5464 - DNA, 242 bp, Glycine max
  unsure (1)..(242): unsure at all n locations; Clone ID: 701144376H1
ggggtttgaggaaactgagttaaggcttggactgcctggaaacggaggcactgaagaagtgctcatcaggaagaggggtttctctgagactgaaactggtcatgaagatgagctgccaccactgtggatttgatgcttaatctttcttctaaggaggccgcaaccactgctgntgctgctgcagatccaactgataagcacaagactttgcctaaggagaagacccttctgccagcagatcc

SEQ ID NO: 5465 - DNA, 232 bp, Glycine max
  unsure (1)..(232): unsure at all n locations; Clone ID: 701144378H1
gatagtggagtagggnctttttgcgtttgagagaagcatgagcaggagtttgggaattccggtgaagctnctccacgaggcttcggggcacgtggtgacggngagctcaagagcggagaactctacagaggcagcatgatcgantgcgaggacaactggaactgccaactcgagagcatcacctaacactgccaaggatggcaaaacatcgcaacttgagcatgtttttatt

SEQ ID NO: 5466 - DNA, 232 bp, Glycine max
  Clone ID: 701144379H1
ggcacacgaagtgacccaatttggtttcagtttctcgaattctgggaacgtgtctccgccctctggtctcttccccttctccgcaagcaaaaccccaatttctcttcacgaaccctaattcactcttcccattccaaatctcaatcacctttctgattcaatctttctctcctcgccaatctcttcgttcacctcgcaaatcaaggtgagggattcgaattgaaacctcaag

SEQ ID NO: 5467 - DNA, 211 bp, Glycine max
  unsure (1)..(211): unsure at all n locations; Clone ID: 701144380H1
gtggataaattcatgactgnntccancacntacatacaccctatgaaccttagtacaattatngcnttagattctacaacctatgcaccatnactgtatgagttgtcttcttntcttgtctatgcacacnnannaannacaagatattgtatttttcttgaatgtttaaaactatgacgttaattacttaagtatttttttnttnnccaaa

SEQ ID NO: 5468 - DNA, 217 bp, Glycine max
  Clone ID: 701144381H1
gcctatctactttaccagaatagaatatactatggtttataagatgtaaccaaactccagaaccacatattttaagcaactttcctgaggggattctaattgcacaggtggatgaccacatcatagataaagttggaacgaaaacaaatgatagacaacctttagatctcccacgaggagtagtagtgcttatggaattttgaatttatgatattat

SEQ ID NO: 5469 - DNA, 239 bp, Glycine max
  unsure (1)..(239): unsure at all n locations; Clone ID: 701144382H1
tttggcaacaaaacacgccggtcataattattttcattggattagtaaaaacaaaaaaaaaccctttcagacagaaataccatatatgaatcacctagattatataatatatatatatgatcgtgcagttcagtaatgatttttatatttgagtggatatattccaaatttgttgaaattgtactatcatcccttcgatcaatttctaaaatcagtnnntatctatatatggttagaaa

SEQ ID NO: 5470 - DNA, 178 bp, Glycine max
  Clone ID: 701144383H1
ggagtaagcaagacaagataccccttgactcagcaatgaaatgaacagcggtttgaggttttgatcacctgctgaaaacttgaagactcttcctaatttgacgtttggttctattgtctgatgaaaagaacatggaatgaagctagttgcgtacattacaactaagtaatgtgatgaa

SEQ ID NO: 5471 - DNA, 233 bp, Glycine max
  unsure (1)..(233): unsure at all n locations; Clone ID: 701144384H1
gtatggggggcgtgttctttggttttgctagttttgtncggttttgttaatttgttagttgtgttaatttgttaatgttgttagtttcgtcggattttcagtttaaattttgggtcaattttgtgtgcacgtacgaatttgcatgtttttctttgaattataggatatgttcaagaaatgggtaatgttttgaaaataaaagttcttgacatttgtgactgaaatcctgattc

SEQ ID NO: 5472 - DNA, 239 bp, Glycine max
  Clone ID: 701144387H1
ggaatcaggggcaaaatcccgtgaacctgatgatataaacttgtatttctctccttaaaacccgacctcgacgtttgcgtcgctcagtctcagtctcagtttcagtttggatccctttcttctctcacaccaatttccaggatttgaaacatggcagattcaaaatcaggattgaggaaaccagtgttcatcaaggttgatcagcttcgcccggggacaagtgggcacatttaactgtg

SEQ ID NO: 5473 - DNA, 128 bp, Glycine max
  unsure (1)..(128): unsure at all n locations; Clone ID: 701144388H1
gagagaagagaagaggaagaangcgaagaagaatccanaancaatcccatctntgngtttgcacatcaaaaggganggctatcaaactcaaagagcantggttntntggatgctataaaangcctaca

SEQ ID NO: 5474 - DNA, 225 bp, Glycine max
  unsure (1)..(225): unsure at all n locations; Clone ID: 701144389H1
gaaagagaaaacacagagagaaacaaaacattacttctttgaacttgatgtgtattgtagcaaatgtccttccgcagtattntncgtgntgttaggacggatttggaagcttatcaaggcggagttttgatgtaaggctttctggtgggggcaagtngaatagtttggtccatgangtgcacgaatncctgccagttgtacagancagccggtgggctagccttc

SEQ ID NO: 5475 - DNA, 208 bp, Glycine max
  unsure (1)..(208): unsure at all n locations; Clone ID: 701144392H1
aacggcttganccttgaaaatggatattcctaaggataataactccccctacgttctgcattactctagctacgacggaaaaccaatggagctggtgagaagcgtaccttggaagttgacgctgtcattggcgccgatggggccaattctagagtcgccaagtctatcgatgccggtgattatgagtatgccatcgcttttcaggaga

SEQ ID NO: 5476 - DNA, 230 bp, Glycine max
  unsure (1)..(230): unsure at all n locations; Clone ID: 701144394H1
gggananaanngtatcttcgtttgctttatatctcctgaagcagaacatcacctttcctatttactcactgtgtgatctaatcttcttctatgggttggctagtcggttcataactgccgtggctttcttagccatcggagtgatattctcaccggagacactggggtcaaaatcaaccacactttccacctacctcaaacttnncncacctcctctgcttctccaccgc

SEQ ID NO: 5477 - DNA, 228 bp, Glycine max
  unsure (1)..(228): unsure at all n locations; Clone ID: 701144396H1
ggctgcaaatcacttttcnactttgagncttcctganccttcnttttctcctggactcaaacatggcagatnaagtgggtcnggcnaaatttccggncaatccatttgggatnanggtcangatgcactgctgaaaagggtatcaatatgagtncaaagtagaggacttgagggacaagagtcctcttcttcctcccaatgaacccgggtcaacagnanattccggnt

SEQ ID NO: 5478 - DNA, 266 bp, Glycine max
  unsure (1)..(266): unsure at all n locations; Clone ID: 701144401H1
gggtttaatgatattgtncacagacagttaggtccatctgttgatgatgaaagtgggctgtttttgtttttgatggaaaactgaagctggggattttgccggcaagttcttctgtngtggacatacatattttatccaggctatgtaccagcaactaaggttggagccatatgcagtgcanacaacgtttcaatntggaggcactgaaggaaagcgccatcgactgcgagnagccatgcacttcctcgatccaccagaatactata

SEQ ID NO: 5479 - DNA, 255 bp, Glycine max
  unsure (1)..(255): unsure at all n locations; Clone ID: 701144402H1
ggcatcaattcaaaatatatcatcaattataagcatgggtttgtggaacacaacgaatgcagtgtcttgccgctttcacaagtttggtgatgaccanagaatctggtcttccaaggtgatgccacgtcttcttccaggggcatagaactcacaaagttngacggtggaggaaaaccagtgggtggcagtgtggggagagtgttatactcttctccagtgcacctttgggaaagctctacagtggtcgcaagcttt

SEQ ID NO: 5480 - DNA, 250 bp, Glycine max
  Clone ID: 701144404H1
ggaacctttgcattctattcattcaagattcagcaagtgcgttttggaagcagagaccgaaatacttcgagatggcccgtacaaagcaaactgctgtaagtcaactggaggaaaagctcccaggaagcagcttgcaaccaaggctgcacgtaagtctgcaccaacaactggtggtgtgaagaagcctcatcgttatcgcccgggaactgttgctcttcgtgagattaggaaataccagaagagcactgag

SEQ ID NO: 5481 - DNA, 227 bp, Glycine max
  unsure (1)..(227): unsure at all n locations; Clone ID: 701144405H1
gngngaattncgtangcaatttgtaaagcntcgaccggattcgttttgaggagaagaatggcgtgaagcntccgagtnacagaggggataacattaacggagactctntcnacgannagtcgaggattccggatccgcanaggatgatagggcttatngccannccgcggcnacgctgaatcttctcanagcttttnccaccggnggttatgctgctatgcatngng

SEQ ID NO: 5482 - DNA, 233 bp, Glycine max
  Clone ID: 701144406H1
tcgtgggatgataccacacaagacaaagcgcagggaagctgctcttgcgcgattgaaggtgtatgagggcattcctcctcctttgacaagaccaagaggatggttgttcctgatgctctcaaggtgttgaggcttcagaagggacacaaatactgtcatctgggccaattgtcatctgaggttggatggaactactatgataccatcagggaacttgagaagaagaggaagga

SEQ ID NO: 5483 - DNA, 217 bp, Glycine max
  Clone ID: 701144407H1
agtagacgagtgattgcgttgcgattgacgacgacgaggaatcatgtcttccggcggcggcggtggtagccgttcttctgccacgtgtgcagtcagaggattacgtgctccgatgagtcggaaccattctgcccgatgtgtatggaaagtttcgtagaagaatgcaaccctaacaattcccaaccctaatctcttccccgacagtgatgaatcttcg

SEQ ID NO: 5484 - DNA, 237 bp, Glycine max
  Clone ID: 701144408H1
ggatggccaatggccaatactcgttttgtcgcatgcccagcgatgggttggcggcatgcaagccgagtgtgagtggggactatcctgctatccctccactgcttgttgctcagccattgccaaggctgatcttaaatgcttctgccgcttcaaggattcgggccttctctctatgtatggtgttgatcccaacaagtgcatggaactccctgttaagtgcaaggttgtcgactcttt

SEQ ID NO: 5485 - DNA, 142 bp, Glycine max
  unsure (1)..(142): unsure at all n locations; Clone ID: 701144409H1
gatcgaagcanaaaatgaaaacccaaagtgcttctctcctctgtctttttctntctcttgctatccttttggctagtggcactgctgcaagtgcaatccaagaagcgcagtgccaagccaccatgtttcaacattcaacaga

SEQ ID NO: 5486 - DNA, 242 bp, Glycine max
  unsure (1)..(242): unsure at all n locations; Clone ID: 701144410H1
ttccccaaactanatacatnntnnnaatnnataaattagcaaaaataagattcatcagagagatcttttgtttccccgacaaattaaaccnttgtagatatttaagtccaaacatgccctcagccgcataacaaaaanataatgcggattagacttaaatttcagtgagaaaaggataatgtaactataaatagatatatttgaattgaacccatgaacttgttgcatggtggaagatcaaa

SEQ ID NO: 5487 - DNA, 107 bp, Glycine max
  Clone ID: 701144411H1
gatttctaggacgcgttcattaatttttatataaaaattcaaaaatcacagccaccaccagtatggtctggtttcgtcttcaatgaaactagaatatgagagagagc

SEQ ID NO: 5488 - DNA, 243 bp, Glycine max
  Clone ID: 701144412H1
ggaaaaagggagtgcctgataacccataaccgaccgcaccaccgttttcctttgctttgcgttctacaatgtcgaaaacctcagagattattactgcaaagctgctatttgctggggaataggaaaacctgtgactgtggaagagatacaagtagaccctcccaaagccaccgaagttcgagttaagatgctttgtgccagtatatgctccacagacatctctagcacaaaaggattcccaca

SEQ ID NO: 5489 - DNA, 249 bp, Glycine max
  unsure (1)..(249): unsure at all n locations; Clone ID: 701144413H1
ggatctgggacttgcacttgttcntgttttgtgggtttttgcngctttaaacttcccttcgggaacatcattgccacttctatggctgcctcacacatcctttataatcctcctcccctttccaaaacttttattaatcaccctttgaaccaaaacccttctcctcaaaacctaattcnaccactcaaagctactatnaaaccgcgggttcttagagcagttcacccccagaagatcnctggctaactc

SEQ ID NO: 5490 - DNA, 92 bp, Glycine max
  Clone ID: 701144414H1
ataaatgacgaatatgatattaatattatttcagataattcagccattagaaataaaacaataggtcaaataactactcatctagatcagat

SEQ ID NO: 5491 - DNA, 98 bp, Glycine max
  unsure (1)..(98): unsure at all n locations; Clone ID: 701144415H1
catctatttatcgagtgtgtcctcagctgtacttctaacaatttttgcatttnttctgaagtgacatatgtgntatttctcttccatntaagaanggg

SEQ ID NO: 5492 - DNA, 253 bp, Glycine max
  Clone ID: 701144416H1
atggtgtacgtcaaggctcagaaatcaaaagcctacttcaagagatatcaagtcaagttcaagagaagaagagagggaaaaaccgattaccgtgccaggattggttgattaatcaggacaagaacaaatataacactccgaaataccgatttgttgttcgctttagcaacaaggacattgttgcacaaataatatctgctagcatgctggcgatattgttcttgctgcagcatatgcacatgagctgccacaa

SEQ ID NO: 5493 - DNA, 257 bp, Glycine max
  unsure (1)..(257): unsure at all n locations; Clone ID: 701144417H1
ggcacaagtgagtttgttgatcgagataactagaaacagtgtgatgaaaatgaaggtccttgttttcttcgttgctacaattttggtagcatngcaatgcatgcgtacgatatgttccctctccgaatgaacactggctatggtgcccgtactccggagncgaaatgcgcaagttggaggcttgctgtggaagcacacaacatctttggctttgagaccatcctgaagagtgcgttgaagcaacaaaggaatacatc

SEQ ID NO: 5494 - DNA, 253 bp, Glycine max
  unsure (1)..(253): unsure at all n locations; Clone ID: 701144418H1
ggatattgctgaggaggcaaccaccattaacgagctgaagaagcctgttgtggagaaagaagctccagggcatgccatatgaggnnatgcacgtacggcctcggaggggaaccagaaaattatgttaacaaaataatctggaaccctaatgtatcagtgtcatcatcagtgtgtagtttaagctagctttggctatggttangttccttgagntgagagtcttgatgaccnntaccattccggngtatgcttc

SEQ ID NO: 5495 - DNA, 254 bp, Glycine max
  unsure (1)..(254): unsure at all n locations; Clone ID: 701144419H1
ggacgacgaagaaacgaatcaggttgatcaaatacgcgagtaggagtggcacaatgtgttgagtgtggagcaagaacgtttttatcaatggcggaatgtgtggcttctgcattctgtgttaagctgaatgcgcagagaaggcctgttagagagaggggcttctcgggccagattacaagtctcaagtctgttcaaagaaagtatccaganatggatgtnaatttgttcacttttctatgtggaagactttgagc

SEQ ID NO: 5496 - DNA, 241 bp, Glycine max
  unsure (1)..(241): unsure at all n locations; Clone ID: 701144421H1
ggaggtattggaactgtgccagtgggacgtgttgagaccggtgtcttgaagcctggaatggtggtgacttttgcaccaactgnactgacaatgaagtcaagtctgtggagatgcaccatgaatctcttacagaggcacatcctggtgacaatgtgggattcaatgttaagaatgttgctgttaaggatttgaagcgtggttatgttgcctcaaactcaaaggatgaccctgcaaaggaggc

SEQ ID NO: 5497 - DNA, 241 bp, Glycine max
  Clone ID: 701144422H1
caaatcttcaagcattctgctataggttatcttccggttaaaagtattaagtatgtctaacctcagaatccttctagagaggtattagagcatgactttgggttaggacattctcgtggttcagagtgcaaacatcatgagggtagacacactaatttagtcccatcatcatttataagctctccttctaagcaagagtttgatagcatctgaaggttcttgtctctaatcagttcaatgg

SEQ ID NO: 5498 - DNA, 178 bp, Glycine max
  Clone ID: 701144425H1
tatgaacaatattccttagggtcagttacaatttactagagtttatatatagcacattcttttgaggctttacctcaatatactcgtgccattggaatgtagaaaagcggaactagagacgggttgcccgtttaaactttagataagttttttaaaaaaatattttttcttgaccatt

SEQ ID NO: 5499 - DNA, 224 bp, Glycine max
  unsure (1)..(224): unsure at all n locations; Clone ID: 701144426H1
ggagagcgggntaaagaaaaagaagaatacaaatnncnggcgaagcgggtcataggtgtgaantgaaagagncattctgcgtgcaggncagagcgaangngntgagtgtggcaatggcggaggagcaaggtgaattcaggatttacaattccatgactcagcaganggncgatcttcaaaaccaaagtccccggcaaggtttccatgtacgtttgcggnctcac

SEQ ID NO: 5500 - DNA, 240 bp, Glycine max
  unsure (1)..(240): unsure at all n locations; Clone ID: 701144427H1
gacaacacagaacaaaaacaaaganaaaaacnaaacccttagccaacacaaccattcatggccacctcngctattcagcaatcagcattcactggtcaaactgctctgacgcagctcantgagttcgtccgnaagaccggtggcgccggcaaaggtcgcactaacttgcgccgaacngtcaanagtgctcctcagnagcctttggtatggcctgacccgtccnaagtacttcggtccatt

SEQ ID NO: 5501 - DNA, 244 bp, Glycine max
  unsure (1)..(244): unsure at all n locations; Clone ID: 701144428H1
gggaaagagaaatggcaaaaaatattctctcaacctcaaaccccatcctactacctagttcatcaccatcctcatcctcatcatcatttgtaaaaccaatacatgtttgctccaatccgataatcaaaagcactttgaagagggaattaactctttgcaaagcaacaccacactctccaattgttgtgacaaagagaggcttgtccatcagcttnntnnccagctttgtgctttcattggctgg

SEQ ID NO: 5502 - DNA, 244 bp, Glycine max
  unsure (1)..(244): unsure at all n locations; Clone ID: 701144429H1
ggtgtacatgatgaactctaggaagtttgcaaaacggataaagagtgagcggaagttatattccggaaagttatatctttttcagttgtagtgttttttgtttttatttttccctagataagcagaccgtggaaaactgcaagtnaaagctggagcttttgcttcaatcacatttgactatttcactgattagaacaggcaaagatgtctcttttgggttgatctttttatgtttcgatcaatt

SEQ ID NO: 5503 - DNA, 252 bp, Glycine max
  unsure (1)..(252): unsure at all n locations; Clone ID: 701144430H1
ggagggagagtgttgacgctccatcaagatgggtatttctagggattccatgcacaagaggcgtncccactggtggcaagaagaaggcatggagaaagangagaaagtatgagcttgggcgtcaggccgcaaacaccaagttatcaagcaacaaaactatccggaggatttcgtgttcgaggtggcaatgttaaatggagggcattgaggttggataccggcaattactcatggggtagtgaagcagttact

SEQ ID NO: 5504 - DNA, 248 bp, Glycine max
  Clone ID: 701144431H1
ggtggaagggtggtggcacttgggttggtagcggcgaagaacgtcgttaatggaagaagagaaagaagcagtgatggtaacaccgggagaagtgttgggtagaaccagcgatgtcaaagctggaagaggagcatacgcggcgcttcacaacaacaccgtatacgcctccctaaccggctttcaccacaccgtacctcccgcccccgactcttccgacctgagaccgactgttgaagtaatggtcacaa

SEQ ID NO: 5505 - DNA, 59 bp, Glycine max
  Clone ID: 701144432H1
gtgtgtataaccctcttagcccgggattaatggactagttctgctgatccaataatagc

SEQ ID NO: 5506 - DNA, 100 bp, Glycine max
  Clone ID: 701144433H1
gacccaatattctttactttcttcctccgtcttcttccctttcaaaccctagaaacagcaaaatcccccttttgatgcaaatgggatcactccacacaca

SEQ ID NO: 5507 - DNA, 107 bp, Glycine max
  unsure (1)..(107): unsure at all n locations; Clone ID: 701144435H1
ggtgacgagggacaacacaacaganaagtnncngggccaaaaccanaagacaaatcagaaactgaaaaggaactgcnntaagcattcacaaaagcaccanccaacgt

SEQ ID NO: 5508 - DNA, 199 bp, Glycine max
  unsure (1)..(199): unsure at all n locations; Clone ID: 701144436H1
aatcatcaccagtggttcttttccttctgngaagatcgaattgtgtttgcaaaaatgggagttccagagaaggaccctctntcccaattgagtttgcctcctggttttcggttttaccccaccgacgaggagcttctcgttcagtatctgtgccgnaaggtcgctggccaccatttctctcttccaatcattgccgaaa

SEQ ID NO: 5509 - DNA, 222 bp, Glycine max
  unsure (1)..(222): unsure at all n locations; Clone ID: 701144437H1
gggcatcaattcaaaatatatcatcaattataancatgggtttgtggaacacaacgaatgcagtgtcttgcgctttcacaagtttggtgatgaccaaaagaatctggtcttccaaggtgatgccacgtcttcttccaggggcatagaactcacaaagttagacggtggaggaaaaccagtgggtggcagtgtggggagagtgttatactcttctccagtgca

SEQ ID NO: 5510 - DNA, 240 bp, Glycine max
  unsure (1)..(240): unsure at all n locations; Clone ID: 701144440H1
ggaggnaagcgcgatcctncgtgactcgcgacccctcgggtttaaatcccctgcgacgcagcacaggctactacttcaccatcgccggntanatggtcgacgacggagcaacctcggcggcgacgagccggagaaagccgtcgtggagagaaanagaaancaacaggagaagagaacgncggagaagagcaatagctgcgaaaatatactctggacttcgagctcaggggaacttcaant

SEQ ID NO: 5511 - DNA, 231 bp, Glycine max
  unsure (1)..(231): unsure at all n locations; Clone ID: 701144441H1
ggtggcactgtggctaagtagagangtagctttccctgtaagactgttacttaagattaccaagaattctagctagctggtagttcttttgtcatttcaaagagaaactgagagagccatagctagggagaataccatggacaaattgtatgggtgngagtcntctcttcatgacagtgtttcttcataacttctccataancatggtggtaccagccanacaccgatgtt

SEQ ID NO: 5512 - DNA, 236 bp, Glycine max
  unsure (1)..(236): unsure at all n locations; Clone ID: 701144442H1
gaattcaaaatatatnatcaattataagcatgggtttgtggaacacaacgaatgcagtgtcttgccgctttcacaagtttggtgatgaccaaaagaatctggtcttccaaggtgatgccacgtcttcttccaggggcatagaactcacaaagttagacggtggaggaaaaccagtgggtggcagtgtggggagagtgttatactcttctccagtgcacctttgggaaagctctaca

SEQ ID NO: 5513 - DNA, 238 bp, Glycine max
  unsure (1)..(238): unsure at all n locations; Clone ID: 701144443H1
gtcacgttcgtttatcatccgggtttagctgggaaaattgcacacaagaatggtgtggatggagaaatggaaccgtttttcggtgaggaagagtttgattttcttgtgtggttcaaggaaactgtgcagcatgctgattttgtggttctgaagatgcatgcnggggaagttgaaatgaagttccttgcggatatatttgagagtggagctatatgctctgttgatnagttgtttctta

SEQ ID NO: 5514 - DNA, 243 bp, Glycine max
  unsure (1)..(243): unsure at all n locations; Clone ID: 701144444H1
ggaacaagaaaganaagaaaagaagaggaaaaggagagtggagaggaagaaaaggattgaagttgttgctgtgaganagagaaagagtgaaatggagtttgggaaggaattgcaatcaatggatgtgataaagacgcagcaaatctcatctcgaccaatcgagaaggtggtggttcaccctctcgtgcttctcagcatcgtcgacaactacaacagagtcgccaaagacactcgcaagcgcgt

SEQ ID NO: 5515 - DNA, 248 bp, Glycine max
  Clone ID: 701144447H1
gccgtccgtgagtgagttggttgaatggcgagtagccggagaagaacgtttggcaacatgaggtcattcgtaagcaattcgatgggaggtctcagggcggaagcaaccttgcttcttgggtcgtcgccggaaccctagcctacttcctctggatcaaaccctcccaagacttcaagcgtcaacaacaggagaaggccactcttgccgccgctgagtctgattcttatcgtaaacccattcccgaccct

SEQ ID NO: 5516 - DNA, 77 bp, Glycine max
  unsure (1)..(77): unsure at all n locations; Clone ID: 701144450H1
ggactgtccaaagtcatgcatcttctgttcccctttcccgttactactagtncactttccaactttgttccacacaa

SEQ ID NO: 5517 - DNA, 202 bp, Glycine max
  unsure (1)..(202): unsure at all n locations; Clone ID: 701144451H1
aganacagagggcatagaaaatgcaaggnatgaagacttctttggagtanaaaggaaanggggtcaaaaagaaaagctcaagcacttcaggaatctgattattctgatgaagatgacatggaattggacaagcagacgaaagggactgcatctgcccatgataagcaactggaaaagattcagtccangatagagcagatgg

SEQ ID NO: 5518 - DNA, 189 bp, Glycine max
  unsure (1)..(189): unsure at all n locations; Clone ID: 701144452H1
ggagggngtgaattctaaaaggaangaacagctgagctggtcagaaantcaatggcatcatccttgggttttgagttcctgacgaagaagccttacagtcctccatcctgggcatcccatctccaccctttaccttcccnnttcttctctcttgcccatcttcccactccanttcacagnnggaanctt

SEQ ID NO: 5519 - DNA, 78 bp, Glycine max
  unsure (1)..(78): unsure at all n locations; Clone ID: 701144453H1
gatagatgaatttgttatcgcaatccactgccccttctactncctctatncaccttgcctgttttcttccacacaaca

SEQ ID NO: 5520 - DNA, 233 bp, Glycine max
  unsure (1)..(233): unsure at all n locations; Clone ID: 701144455H1
ggggggaagaatttgcttacttaactttgtgctcaaatcgttatctctttttttcctttctttttccaaaattcctattgtgntggtaanaaagtggtgaggctacaaatagagtttttgtggggtaagagggaagagggagggaaaatagcttgggtgaaatggaataggatttgttggcctaaggaggaagaagggttgggtgtaaaagatatccatctcttcaatttagc

SEQ ID NO: 5521 - DNA, 237 bp, Glycine max
  unsure (1)..(237): unsure at all n locations; Clone ID: 701144456H1
gacactaaacaagttaaaagaagagcatcactgaactaacaaagcaacnnnntgtcgnnggtggtttgtgtcaccggagccagcggcgccatcggatcatgggtggtcctactcctcctccagcgtggttacaccgtccatgccaccgtccaagatatcaaggatgaaaatgagacgnaacattnggaggaaatggaaggagcaaagagtcatctccatttttttgaaatggatctt

SEQ ID NO: 5522 - DNA, 63 bp, Glycine max
  unsure (1)..(63): unsure at all n locations; Clone ID: 701144457H1
gacctancaaaatattgagtgggtggttagaacttgagnctantaatggtatngtatngtncc

SEQ ID NO: 5523 - DNA, 88 bp, Glycine max
  unsure (1)..(88): unsure at all n locations; Clone ID: 701144458H1
gaactaaggccaccttncttttagcnagttaacancagcttttgtcttncgttccattatgctagntcctnanttcnacttcaccctt

SEQ ID NO: 5524 - DNA, 237 bp, Glycine max
  unsure (1)..(237): unsure at all n locations; Clone ID: 701144459H1
ggggaacgtactgtgcaacagaaatggtggcaccaaccttgaatgtttttcctccttcttctctaagactaagactcgaattgccctctttcttcactcgaagctcaancaagcacgctttccgtttccgtcgttctcgcttcaaaaccctaccttccgtcctgttatctgcagagcctccgagtcacccaccgttccacntaanatgcnnngaccnnacnanagaattaccnnnaa

SEQ ID NO: 5525 - DNA, 249 bp, Glycine max
  unsure (1)..(249): unsure at all n locations; Clone ID: 701144462H1
gggtgtaagtgttgttcttccgatttggttcaatcaaatcaatgatgttgaggaggaggggttctgtgacctccttctattccanatnncncnannaccnnaatcttaattgtgggcgttcctcttcgaatccccatcgcgtcgccgcttctgcaanttnatnngncnnactcttcngcttctgcgtctaaanctacgaccgactttgtgtcgttnaanccgcnactatggaaggtgctatgggactct

SEQ ID NO: 5526 - DNA, 187 bp, Glycine max
  Clone ID: 701144463H1
ggcgggaatgacagaaacgggggtttctgataatttcaagggcttaatactggcgatgggttctagtgcattcatcggttccagtttcatcttgaagaagaagggtcttaagcgtgctgctgcacgcggtactcgtgcaggagttggtggctatacttatctactagagccgctttggtgggctggc

SEQ ID NO: 5527 - DNA, 247 bp, Glycine max
  Clone ID: 701144464H1
ctagccactatcatagggatttgcacaaagaatagcaaactctaactcaaggttccacgagtatggaggactactacaagaagatggaaatagcctgattagagtcaatgttgaagaagatcgtgagacaactatggtcagattcattggaggtgtaaagaaggagataacttatgtggtagaattgcaacattatgtggagatggaggacttgttgcacaaatctattcaagtggggaggtattga

SEQ ID NO: 5528 - DNA, 254 bp, Glycine max
  unsure (1)..(254): unsure at all n locations; Clone ID: 701144465H1
ggggacgcataggtaacgaatttaccgttacctgtggcgtcgcgtctcagatccctctctctttggagagaacgccccaacaatctaaatctgcacgnnnnnnnnnnnnnnnnnnnnnnnatanttcatttatggggttttattagctacaatacttgtttgctgcaggcngccaacgaaaaggtcaaggcattttggatcagacatcttggccctgcaagcttgatgcaacacaacaaatatatatatcatgg

SEQ ID NO: 5529 - DNA, 244 bp, Glycine max
  unsure (1)..(244): unsure at all n locations; Clone ID: 701144467H1
gagcacagtcactctctaaatcgttcnacctcacacccactcctccgatattcttttctgctttaatcttcgctctgttttcgggggtcaatcttaatgccgaaggttncgtattctgtttgaattttgttatctattgggagtggagtagtatttgagatcgagcgtaaaatatataaaaataataaaagaagcaaaggcgatgttttnctttgattggttttatgggattctggcatcgctt

SEQ ID NO: 5530 - DNA, 221 bp, Glycine max
  unsure (1)..(221): unsure at all n locations; Clone ID: 701144468H1
tccagagagaagaagaaacttaatcgatcatcacttcacttcactaatacatcatggcagacgagacccgaacaagtatgagagctctgaggttgaggtccaggatcgtggtgtttttgactttctcggtaagaaaaaggatgaagaagacaagcctcatcctcaggaggnggtcatcgccaccgagtttcaaaaagtcatgtctcagaccaaggagagaa

SEQ ID NO: 5531 - DNA, 241 bp, Glycine max
  unsure (1)..(241): unsure at all n locations; Clone ID: 701144469H1
tcttcaagatctnattcacatttgctgcattattatatggactgcttcagcactaccatgcagctgtgaattncggacaatacccttatgcggtttcatcctaaatcgtccaactctaaccagaagattgctcccagagccaggaaccaaagaatatggtgaacttaccagtaatcatcaaaaggcttatttgagaacaattacaggaaagactgaggcccttgtggacctaacagtgata

SEQ ID NO: 5532 - DNA, 237 bp, Glycine max
  Clone ID: 701144470H1
ggcacttagcaatcaatcaaaacattcccaataacaataatatacacatcttcaattaagctccttctcctatagccatggctcttttaagcttataattgcttcccttcttgcgtcgcttctccttcttcatttcgttgatgctgatcaatcggcacatgcacaaacgcaggggtctcttcttcagcagatagattgtaacggagcatgtgctgcgaggtgccgtttatcatctcg

SEQ ID NO: 5533 - DNA, 239 bp, Glycine max
  Clone ID: 701144471H1
ggggttcgaacttggccaacatagaacagatgaagagggctcccagttaccaaatggatatacacatgaattggaaaatgcaccttctggtcttcatggaggtgttattgatccccatcaacagttattgattgttctaagcaatatcggatattgcaaagatgaactttcttatgagttgtatgacaaatacagacacatctggcagcattccagggggaaggatgaaggaaacagtg

SEQ ID NO: 5534 - DNA, 241 bp, Glycine max
  unsure (1)..(241): unsure at all n locations; Clone ID: 701144473H1
gacgaaaaaagagatgcatgccatgtgggtctccttgaaggataatgtcaaatgnggaaacnagctcaacgatgtaatcnagcagcaaacaaatgcggcaaaggaagtggctatgttgcagaaaaggagaaaatcgaatggatatnatagacctctaatggaaactccaactactagcctagtggtttcaagaccaagcaacgcactgggnaggcttcatgagctgagtgttggagaccca

SEQ ID NO: 5535 - DNA, 236 bp, Glycine max
  Clone ID: 701144474H1
cagggaatcaggagtgttccaaggaggattagggtaagaattgctcgcaagaggaatgacgatgaagatgccaaggaagagctatactctcttgtcaccgttgttgagattcctaaggatgagctcaaagggttaggcaccaaggttattgatgatgaggattgatttgtatttgtttgaaccctggagacatatatgtaggttttttgtttctgcaattcagtcttgtttttcta

SEQ ID NO: 5536 - DNA, 239 bp, Glycine max
  Clone ID: 701144476H1
aggaagctcttcaacaagtgctgtccatactatttgaatacaagcccaagtttcaaggagaaaagtccaaggttgtgagttgtatcatggcccaaatggaggactaaatgacaccactttatttcaattttagagtgtttagtttgtctaaataatggcccaatccttgtaaagctggctgaccaaaaatatgttttgggttaatcaactaaaagggctttagttcaagttgtaataag

SEQ ID NO: 5537 - DNA, 238 bp, Glycine max
  unsure (1)..(238): unsure at all n locations; Clone ID: 701144477H1
ggttgacagttgtggtggtcgttcaagatttttaacctgaaatcttcacttcacatctctctatcctctcattctcatcaccaacaagttttctgtaaccatggcatccacnactctatcccctacaaccccttctcagctatgctcaggaaaaagtgggattttcagttcctcacaggcacttcttgtgaagccagtgaagaggcagatgatggggaagagcaagggattgagattg

SEQ ID NO: 5538 - DNA, 245 bp, Glycine max
  Clone ID: 701144479H1
caaaggaaatggatcacttgaagtaaatgaagataagaaaccatctgtacccaaaaaattattgaagcacgttgaaagagaacagccttcacatcaactgcctccataaaatcaaagggaaaagacactgatgttgctaggaaatgctttgagccttcggaagtgaaaaagtgggccattgatgatttgaataaaacaattcagtggctggaaagtcaagaagaaaagcctgatccaggtgagtt

SEQ ID NO: 5539 - DNA, 245 bp, Glycine max
  Clone ID: 701144480H1
gggacattccaaacgaaactgaaagtcttaaaccagtctttccttttttggttattattggtcgaaaaaacacggttccttttattttttatgcaactaatcatgttttcttaatatatcagaactctatgtttggccccagaaaagtaggtccaattttgatgtatacggacagtttttcactagcagcccagctagcaagcttttgttggtgtccatctctattgttgtcaagaaacttattc

SEQ ID NO: 5540 - DNA, 246 bp, Glycine max
  Clone ID: 701144483H1
ggagaaagggatgatggactgcttatatgcaaaatgcaccccttgtattacggactgtgtgatggcagaactcgagaagttaggccaaaaattcgtgtagctctaaggattgccaaggatcctcgatttgagagaatactatgtactcataaagggacctatgctgatgactgccttgttgagagagttactcagcacaagtgctacattgttgcaacatgtgattgggacttgaagaggagaatt

SEQ ID NO: 5541 - DNA, 242 bp, Glycine max
  unsure (1)..(242): unsure at all n locations; Clone ID: 701144484H1
cagttacctttgtccagaaaattgcctaacaccactcctcctccttgtctcctaacactaccacactaataaaaatgaaatatataactgtctgcatattaaatatgtaactgtcctacataactgtttgtttgcataattaaatatgtaattgtcctacataactgcataactgtcactgtcctgcataatgccccacgacagagtccttatacaccccatgccctcttcanttgtctagg

SEQ ID NO: 5542 - DNA, 232 bp, Glycine max
  unsure (1)..(232): unsure at all n locations; Clone ID: 701144486H1
ggaagctgctcttcggtgtgttttcattttatttgtttctgcctacttttgtatttgcatttttggatttgttatagatgtgtacaaatcacattctcagccatttattttcttatcaactgttatagttgaattttattctccaagtttatatttctcactttagaagagctagattctgttttnttttttaaaacttctatcattctatcatgtncgtatatatttacct

SEQ ID NO: 5543 - DNA, 233 bp, Glycine max
  unsure (1)..(233): unsure at all n locations; Clone ID: 701144487H1
attgccaattgtctcctacatgtttgttttatatattttttatcttatttataatttatccatcacataaagtgaancttctgactagctgttaattgggttcaatttttctaagagatattatgcatggttgatgaggtatgtatatatatgttgagacccttcctttactttgctggtttttgggtccaaaattcaaactttggaagttatgttattgttatatatatgcc

SEQ ID NO: 5544 - DNA, 232 bp, Glycine max
  unsure (1)..(232): unsure at all n locations; Clone ID: 701144488H1
ggagtgagagtgagtgagtggttctncttgcagcaacaaggtttagtgncaccaaacagacgggaaatgggtcgtggggtcagtgcggtggtggacagagttccttggattatctcttggcagtggggtacctgccagcagtgcaaatggtgctcgcactcaaaatgcaagtgctccttcaccaccggttgataagcaaagtccagcaccagcaccagcaccagcactgcat

SEQ ID NO: 5545 - DNA, 233 bp, Glycine max
  unsure (1)..(233): unsure at all n locations; Clone ID: 701144489H1
ggcacaagtgagnctgttgatcgagataactagaaacagtgtgatgaaaatgaaggtccttgttttcttcgttgctacaattttggagcatggcaatgccatgcgtacgatatgttccctctccgaatgaacactggctatggtgcccgtactccggaggtgaaatgcgcaagttggaggcttgctgtggaagcacacaacatctttggctttgagaccattcctgaagagtg

SEQ ID NO: 5546 - DNA, 240 bp, Glycine max
  unsure (1)..(240): unsure at all n locations; Clone ID: 701144490H1
ggagaaganagananagagnagggagagggcatgggaatccgatcggtattcgatggtcggcgagctgagaaggganntggannaaaagtggaattgacccnaaattcattccaaagatatggaagcatatcctcatctctgccaaagatgaagattgggattgggagaaacatgttccctccttgccctcttcggcctactctctccttcgttcaaactttcaaaacccctctctcttc

SEQ ID NO: 5547 - DNA, 236 bp, Glycine max
  unsure (1)..(236): unsure at all n locations; Clone ID: 701144491H1
ggtggctggctgtagtagtgctttgctgtccgagagtaaagagtaagcctctttctcactctctaatctatttgtgaactaggttttggtgcagagacatgggagaaaggattccgtgtgggagtggcatgtatttccccttccctcctccgccatctcccattcgccnnnnnnnnnnnnnnnnagatcgcgataggtatttggccgaacttcccgctgagaggcaangttggtac

SEQ ID NO: 5548 - DNA, 239 bp, Glycine max
  Clone ID: 701144493H1
ggatgcacttcacttgttttctgcaccagagactcttgaagggtaccgaacatcactcactgcaaaggccggtgttgtgactgcaaggaatctgttcgaatagtgacactcccgaaaataatgatattgcacctgatgcgttttggttatggaagtcagggaagcaccaagttgcataagcctgtccactttcctcttgagttggtattgggtcgtgaatgcttgtttcaccatctact

SEQ ID NO: 5549 - DNA, 82 bp, Glycine max
  unsure (1)..(82): unsure at all n locations; Clone ID: 701144494H1
gacacaagtgaagagaaagagccttccaaaatgttcaagctancctcgcatgctnccctnctcacttccacacaancatang

SEQ ID NO: 5550 - DNA, 243 bp, Glycine max
  unsure (1)..(243): unsure at all n locations; Clone ID: 701144495H1
gacctcacagcagagcaaaaganaganagaaactgcaacttcctctgttttgctcccctgtttaggccttttcataagcttagaatgacacaaaggaattttccattgctctagtgactctcattgctgttctctttgtcaacatgaacatccaaggtgccactgctgactatggtagttggcagagtgctcatgccactttttatggcgggggtgatgcttctggcacaatgggtggagcat

SEQ ID NO: 5551 - DNA, 257 bp, Glycine max
  unsure (1)..(257): unsure at all n locations; Clone ID: 701144496H1
gagagaagagaaggaagaggagagcatggcagagattcagattctaaaccttcggaggcccgccaagcttaagtacgaggaaactgccatgccattcgcattcccaaaactggacttgtttgcagcacaagctcaagtgcaacggncagattccttgccttttctccaacaacagaaaggaggaacaagctagaaaagcttagaaggtgcataagtgggaagaaaatgaattgacaatggaacaaggaantaaaaga

SEQ ID NO: 5552 - DNA, 234 bp, Glycine max
  unsure (1)..(234): unsure at all n locations; Clone ID: 701144503H1
tactgcctagacaggtttttggacatcaaagtacctgaaacaagtaatctgcaagggcgttatttacatcttgatgaattattggttgatagcatcatttgggttgatgaagttgaaggtttgcttgatgcaacncaggcatattaagggttttataagttataggtcttgattgtgaatggaaacccaattacgtaaaaggcagcaaacccaacaaggtttctatcatgcaaa

SEQ ID NO: 5553 - DNA, 230 bp, Glycine max
  Clone ID: 701144504H1
gggggtgttcctcttgccaatgcctattctcgcagggctgatatacttgttcgtggttatggtggatacaacactaagtgggctatgttcttactggaccatctcttccctctggactcaactaaaccacctattgctaccacaattttcttcggcgctaatgatgcagctttgttatgaagaaccagtgaaaggcaacatgtacctattgaagaattcaaagagaacct

SEQ ID NO: 5554 - DNA, 232 bp, Glycine max
  unsure (1)..(232): unsure at all n locations; Clone ID: 701144505H1
gganacggtancagataagcctaaacacgaaactcgcnaattccctgcaacactggagtcgctggaaaattcattctgggantcagctgagctgaccaagcatgattcaaaatggttgcattgtatcccaagggtgtgcccctctganttctaggtcangcaaccatggcatacctagtacctctgcctttcgttgcgcttctctaatgcctcccaaggttgccgtntctaa

SEQ ID NO: 5555 - DNA, 229 bp, Glycine max
  unsure (1)..(229): unsure at all n locations; Clone ID: 701144506H1
gaccacattccaaaacacaaacacatacattgtagtatcacttttgtctcggaatttgttctttngagttatggcaagcttaaaggttgcatgtgtggttttgatgtgcatggctgtgatgagtgcaccaatgatggtgcaagccgtgtcatgcaatgatgtttctgtgaacctagcaccgtgcctatcttacctgatgcagggtggagatgttccagaatcgtgctgt

SEQ ID NO: 5556 - DNA, 226 bp, Glycine max
  unsure (1)..(226): unsure at all n locations; Clone ID: 701144507H1
gacccattaattgtgacaaaacccataaatcctctcaccaaataaacctcaatttattgcattgcataataccatgtcaatgaagttgtatgcttnnctcacccttacggtgtggcttttcatggccacattttcgcgagcccaatacgttattgacacaaatggcgaacccgttgacaatgatgatgagtattacatcaggccagccataaccgacaacggaggg

SEQ ID NO: 5557 - DNA, 233 bp, Glycine max
  unsure (1)..(233): unsure at all n locations; Clone ID: 701144511H1
gggagaattaggtttttagggtttacaccgagcagcgacacctccctcccgcagtagccatggttctcaaaactgaactatgccgattcantngngccaaganctaccccggaaaggncatcanatttgttccgtngtgattctnaggtttnnctgtntgcnaactcaaaatgtaagnntatttncacaaccgcctnaggcnctcaaagctcacctggactgctatgtacaga

SEQ ID NO: 5558 - DNA, 219 bp, Glycine max
  unsure (1)..(219): unsure at all n locations; Clone ID: 701144512H1
ggtagggaantngatcngnggtttggttgcgatttcggtgtgttgcgaatnactnnnccaatcccgatcgcntgntccagacagtgaatcagantcagaatcagaatcngaatcagagagaaacgatgagggcagtaagtgcgttaatggtggctcggatgttgacgcgggaccactcgctccctgtccttggcaacgaaagcatacccttcggatcgg

SEQ ID NO: 5559 - DNA, 232 bp, Glycine max
  Clone ID: 701144514H1
gatagtgggttaagcctcgcttctaacgtcaccgactcagttgttgtcagcgagtgagtgagtcgtttctctgcagcaacaaggtttagccactccaaacagacgagaaatgggtcgtggggtcagtgctggtggtggtcagagttccttaggttatctctttggcagtggggtgcctgccagcagtgcaaacagtcagcctgcaaatggtgctcgcactcaaaatgctagt

SEQ ID NO: 5560 - DNA, 220 bp, Glycine max
  unsure (1)..(220): unsure at all n locations; Clone ID: 701144515H1
ggggtttttgttacttggttcactcgaatggcgacatccttgtcaaacatgttcttgaagggaatcgcagctcgttctctncagcagacccttaaatgggttgttttattgcacaagatactcgactactgtgtcaaatgattctgacatgcatgatgacttcaagccagctaataagcttgagaattctggcatttctttgtcaaatgttattgagcag

SEQ ID NO: 5561 - DNA, 226 bp, Glycine max
  Clone ID: 701144516H1
gatataacactttcactcttacaatctcagctcatagcattcttcttcttccaacgagaatcagtctttgtgttccaaatggctcgtacgaagcaaacagcaagaaagtccaccggaggaaaagctccaaggaagcagctcgccaccaaggcagcacgcaagtccgctccggcgacgggcggcgtgaagaagccccaccgtttcaggccggggacagtggctctga

SEQ ID NO: 5562 - DNA, 243 bp, Glycine max
  Clone ID: 701144517H1
gagagaaagagagagaaagatgtcgaagcgtggtcgtggtggttcggcggggaacaagttccgcatgtcgctgggtcttccagtggcggcgacggtgaactgcgccgacaacacgggggcgaagaacctctacatcatttcggtgaaagggatcaaaggccgtttgaaccgtcttctctcggcctgcgttggcgacatggtgatggccaccgtgaagaagggaagacccgatctgaggaagaa

SEQ ID NO: 5563 - DNA, 231 bp, Glycine max
  unsure (1)..(231): unsure at all n locations; Clone ID: 701144518H1
gaccacagagagagaggttttgatgcaacgctgtcactgagaaaggatctctatctacgaaggagcggaataaaacccttctctctgtgattaagagaatggcttcagatcggaaacttcacacttttgaggangtggcaaagcacaaccagaccaaggattgcccntcatcatttctggcaaggtgtatgatgtcaccccttcatggaggatcatcccggaggtgatgag

SEQ ID NO: 5564 - DNA, 64 bp, Glycine max
  Clone ID: 701144519H1
ttgaggtttggatctgtgattcccatttcgggatctgatttcgttcgagaggtgtcacaagctc

SEQ ID NO: 5565 - DNA, 212 bp, Glycine max
  unsure (1)..(212): unsure at all n locations; Clone ID: 701144520H1
ggnccgctttcttcttcatngtcgtnntggtcgtgncgcancaaaaccaagccaccnactaacttgtttggtccaagacatggctctgatcctgcatgctaccanaacaaanaagaatgccttcaagactctgattgcggcagagtacagtggcgtccaagtggaattggcccctaacttcgagatgggtgtctctaacaaaactcctgaat

SEQ ID NO: 5566 - DNA, 237 bp, Glycine max
  Clone ID: 701144521H1
gtaatagtgggaggacaggaaacaatagcctgaattgaatttgtctttggatcttactagccaactttaaagttgaccttatgagtagagtggggtatgcgggtaaaccctcccagcgaaacccgcattcttaacatgcttgttattttgagtccaaacccgccctgcatagttcgcgggctgagtggaccgatccacatttgacaaaaaaaaatttaaaaatagaaaattaaatta

SEQ ID NO: 5567 - DNA, 228 bp, Glycine max
  Clone ID: 701144522H1
ggcagcgcttgatttgaggccaggcaagccccactcacaccaccacacctctcctcgttcacgctacccctttctgctcttcttctacctttcaagttttaaaagtataaagatggcagagacattcctatttacctcagagtcggtgaacgagggacaccctgacaagctctgcgaccaaatctccgatgctgtcctcgacgcttgcctcgagcaggacccagacag

SEQ ID NO: 5568 - DNA, 237 bp, Glycine max
  unsure (1)..(237): unsure at all n locations; Clone ID: 701144523H1
ggaaacgaaagagaatggagaacagggtaatattacaggaatggtttgaccgcgttgactcggagaaaagtggaagcataacagcggtacagctgaagactgctcttncctgtgggcaacctggaatttccgctctcagttgttcagcaaatgatcagntgagctgaccctcggatccatcttcttcttctctattttaacttcaatttntgttttcccttaggatgtacgatttcg

SEQ ID NO: 5569 - DNA, 160 bp, Glycine max
  unsure (1)..(160): unsure at all n locations; Clone ID: 701144525H1
gacaaacgggagagtgagaattaaaaaganagaanaaaagaggtttttgataaagcaaaagaatattattgnnacataaattttggactttctttgcatttggcagccacccccacaacgaaataaaacaaaacaagcacacaaccagagacanacacgc

SEQ ID NO: 5570 - DNA, 219 bp, Glycine max
  Clone ID: 701144526H1
agaggagagagaaaatgaagaagcacaagcattactccaggaagctgaaaagcgtattaaaaagaagggaaagaaaccaatcatagagggggacaaaatcaccaagcagacattgatgaagttgactttgactgaacaactccgggaaagacaggaaatggaaaagaaactgcagaagttagcaaaaaccatggatctttggaaagagcaaaaagagaa

SEQ ID NO: 5571 - DNA, 219 bp, Glycine max
  unsure (1)..(219): unsure at all n locations; Clone ID: 701144527H1
gaccacattccacaacacanacacntcccttgnagtatcacttttgtctcggaatttgttcttttgagttatggcaagcttaaaggttgcatgtgtggttttgatgtgcatggctgtgatgagtgcaccaatgatggtgcaagccgtgtcatgcaatgatgtttctntgaacctagcaccgtgcctatcttacctgatgcagggtggagatgttccant

SEQ ID NO: 5572 - DNA, 158 bp, Glycine max
  Clone ID: 701144528H1
ggagatgagaaccaattcatctttgcagcttagggagttatttgtagggacgcaaaatttattcaagttttagatttatttatcttaaattcagaagtaatgacagattcactgggtgctaattcagttcaattctccataccatgagttagttcacc

SEQ ID NO: 5573 - DNA, 221 bp, Glycine max
  Clone ID: 701144530H1
gagggaagaatagaatgggatctggaagtggaaaacacactggagagttcttcaggagaagggatgcatggaggaagcatccgatgctcaccaatcagctccgccacgccacccctggccttggcatcgccgtcgtcgccttcggtatctacctcgtcggcgaacaagtctacaataggctctatgctcccgatcctcattcgatttctcacgtgaaagcc

SEQ ID NO: 5574 - DNA, 233 bp, Glycine max
  Clone ID: 701144533H1
taatttgggaattattgctcccatcgccattggtttcattgtcggcgctaacattttgttgggtggggccttctctggagcggccatgaaccccgctgtgacatttgggcctgctgtcgtgagctggacctggaccaaccactggatctactgggccgggcctctcatcggtggtggaatcgctggccttgtttacgaggttgtctttatcagccacacccacgagcagcttt

SEQ ID NO: 5575 - DNA, 231 bp, Glycine max
  unsure (1)..(231): unsure at all n locations; Clone ID: 701144535H1
gaccacattccnaaacacnnacacatacattgtagtatcacttttgtctcggaatttgttcttttgagttatggcaagcttaaaggttgcatgtgtggttttgatgtgcatggctgtgatgagtgcaccaatgntggtgcaagccgtgtcatgcaatgatgtttctgtgaacctagcaccgtgcctatcttacctgatgcagggtggagatgttccagaatcgtgctgtag

SEQ ID NO: 5576 - DNA, 224 bp, Glycine max
  unsure (1)..(224): unsure at all n locations; Clone ID: 701144538H1
attcatgaaaccgatgtgtataagtgggatcccgaggatttgcctgggcaatctatattnaaaacgggagataggcaatggttctttttctgtcacagagataggaaatatcctaatggtggaaggtctaaccgagcaaccagacgtgggtattggaaagcaacaggaaaggatcgtaacgtgatatgcaattctaggtcagttggngtgaaaaagaccctggt

SEQ ID NO: 5577 - DNA, 75 bp, Glycine max
  Clone ID: 701144539H1
ggtgtgaagtttttgtgcagaaagaaacagaatcgggaagagaggaagccgtagattccaacgccttctctcctc

SEQ ID NO: 5578 - DNA, 202 bp, Glycine max
  unsure (1)..(202): unsure at all n locations; Clone ID: 701144544H1
ggcatcanttcaaaatntatcatcaattataagcatgggtttgtggaacacaancgaatgcagtgtcttgncgctttcacaagtttggtgatgtcncanangnatctggtcttcnaaggtgatgccacgtnttcttccaggggnatagaactcnccaaagttagacggtggaggaaanncagtgggtggcagtgtggggnna

SEQ ID NO: 5579 - DNA, 214 bp, Glycine max
  Clone ID: 701144545H1
ggcacaagtgagtttgttgatcgagataactagaaacagtgtgatgaaaatgaaggtccttgttttcttcgttgctacaattttggtagcatggcaatgccatgcgtacgatatgttccctctccgaatgaacactggctatggtgcccgtactccggaggtgaaatgcgcaagttggaggcttgctgtggaagcacacaacatctttggcttt

SEQ ID NO: 5580 - DNA, 239 bp, Glycine max
  unsure (1)..(239): unsure at all n locations; Clone ID: 701144549H1
aanggaacaaatganatcnaacaatggnaaactncaggcttcaanactctttgnctgnccaccagatttctgctgtcaatgaaacattatttgaaggaaaggnctctnaacnaaatgagatgtttcgtgttttacatactgagaaaacagnattgcaaagaatggtggaagatcnnaagactaaatatgnngaanccagggtnatgctnaggaaaaggctagtcgaattttgaaatntc

SEQ ID NO: 5581 - DNA, 230 bp, Glycine max
  Clone ID: 701144551H1
ggcgtacacagcctcaacaaccctaacgcgtgcagagcagagagagacgcagccatggggcgaagacccgcgaggtgttataggcaaattaagaacaaaccataccccaagtcacggttttgccgtggtgttcctgatcccaagatcaggatttacgatgttggtatgaagaagaagggtgttgatgagtttcctttctgcgtccatctggttagttgggagaaggaaaa

SEQ ID NO: 5582 - DNA, 227 bp, Glycine max
  unsure (1)..(227): unsure at all n locations; Clone ID: 701144552H1
ggtggcagttgtgtgacacagaaattaagctagagcttcatagtttcttcttcttttctcaccttccttctctcccttcagacaaagggacaaaaaatcnnnnnnnnnnnnnnnnnnnnnnnnnttccaaaaccatgtcccacagtcatctaagtttcgcctttgggattctaggtaacattgcctccttcgtgntgctttctggcaccantaaccaacattttata

SEQ ID NO: 5583 - DNA, 227 bp, Glycine max
  Clone ID: 701144554H1
ggaatagcatcggcagcaccacaacactgtgccctctttctctctttccttcgcagaagccatggcctcatttgcacgtggagccgcatctttaacccgcattggtctttccacttccaagactccccttcaactcatccaccgccgtggcctcgccgatcaccatggtcctcccaaagttgcctgctggaaagatccaatgagcccatctaaatggaaggaggagc

SEQ ID NO: 5584 - DNA, 221 bp, Glycine max
  unsure (1)..(221): unsure at all n locations; Clone ID: 701144556H1
ggcatcaattcaaaatatatcatcaattataagcatgggtttgtggaacacaacgaatgcagtgtcttgccgctttcacaagtttggtgatgaccaaaagaatctggtcttccaaggtgatgccacgtcttcttccagggtcatagaactnncaaagntagacggtggaggaaaaccagtgggtggcatgtggggagagtgttatactcctctccaggnac

SEQ ID NO: 5585 - DNA, 215 bp, Glycine max
  unsure (1)..(215): unsure at all n locations; Clone ID: 701144557H1
ggaagaacaagtcttgcattgngtggagcatacttagaaacagcaactatgtctctcatgcagcttantagctcccctgttggctcactggtccgtttcattgtaatattgctttatggnatcagaaccatggctttggccaagttgccaccaancgcttcancngttccagcagttntagcgttnngagattccatcgtggacccaggcnacat

SEQ ID NO: 5586 - DNA, 213 bp, Glycine max
  unsure (1)..(213): unsure at all n locations; Clone ID: 701144558H1
ggcacaagtgagtttgttgatcgagataactagaaacagtgtgatgaaaatgaaggtcctgttttcttcgttgctacaattttngtagcatggcaatgccatgcgtacgatatgttccctctccgaatgaacactggctatggtgcccgtactccgggngtgaaatgcgcaagttggaggcttgctgtggaagcacacaacatctttggcttt

SEQ ID NO: 5587 - DNA, 214 bp, Glycine max
  unsure (1)..(214): unsure at all n locations; Clone ID: 701144559H1
aagttcttcttggnttccttgcttgctttgctcataacagcttatggagttgcaggncagcataatntgtgacaacattggcatgctcgaagaacttaaaagcctagaggccctggacatnnnnnnnnnnnnnnnnnnnnnnnnnctttctgacatcccttcatggagaagcgagcgcggtggaaaagttcttgtgaatattgatagctttggt

SEQ ID NO: 5588 - DNA, 134 bp, Glycine max
  Clone ID: 701144567H1
tcttttgaagaaccaatgggaagggaggaccttcaatatctttggtaaaagtataaggttgacatagcaatgtatggacatgtccataactacgaaaggacatgcccagtgtatcaaaatatctgcaccaacaa

SEQ ID NO: 5589 - DNA, 224 bp, Glycine max
  unsure (1)..(224): unsure at all n locations; Clone ID: 701144569H1
ggtaaaccaaattaaataaaagcagaaccttaagttgacttgtgaaagcgggaaatgaaaaatttccatgagagttaggttcccatagcggtttaaaattccagcagtagcacccacgaaattgccgtaagtttcactaaataactcattgacgcacccactcacaccacaacaactaactcncttcnttcttccatgatgacgacgacgnccaacaacgttgg

SEQ ID NO: 5590 - DNA, 221 bp, Glycine max
  Clone ID: 701144570H1
ggaagaagaagaaggttggttgattggtcccattgattccgaagagaaaagaaaagatgtttgagccacaacagctatacactcgcgcgaagaccgaggaattcgacctcgaatcaggagaaaccctctacccagggctgagcgtcggcgagaaccagctccgatggggtttcatccgcaagtctacggcatcctctccgcgcagatcgtcctcaccaccc

SEQ ID NO: 5591 - DNA, 219 bp, Glycine max
  unsure (1)..(219): unsure at all n locations; Clone ID: 701144571H1
ggccattgttgttgctattatcatccgcagctgcttttattcgcaccgcaaacagtgagccatggccgtcggaaagaacaagcgcatctcgnaggggaagaagggtggcaagaagaaggcagctgatccctttgccaagaaggattggtatgacattaaggctccttctgtttttcaagtgaaaaatgttggcaaaaccctcgtctctcgtactcaggg

SEQ ID NO: 5592 - DNA, 230 bp, Glycine max
  unsure (1)..(230): unsure at all n locations; Clone ID: 701144572H1
gagacaagcagaatccgttttgagtttcataagggtgcagctgattgcacattcatgagaattgatggagagccatggaagcaaccccttccaaaagatgatgacacagttgttgttgagatatcacaccatggccaagttagcatgctggccaccccatagcnnncgttctaagagtgtgaatgatccttcctccccttccgttgaccgcgaagaagatgatagcagtg

SEQ ID NO: 5593 - DNA, 215 bp, Glycine max
  unsure (1)..(215): unsure at all n locations; Clone ID: 701144573H1
gtgatgggaggaaactagtttcgggattgataccagattcgggcacaatccatgcacatggagaggnnacagtcaagattcctcttactttgatttttgatgacataaggaatacctatgatgatattaaaccaggaagcatcattccttatagggtgaaggttgatcccattgtggatgttcctgtctttggaaggctcactctacctttggag

SEQ ID NO: 5594 - DNA, 212 bp, Glycine max
  Clone ID: 701144574H1
gacaggtaaatgtttcatctttatgcttatcacttccttaggacgctcgtttaagcttcttctatgttttgaaagcttgctacgtcagctgatttcccctttctccaggaatggcttatgttccacatggaaatgcaaatttcaactctttattcctaaaatttgcaatttctcatgtgggtatttcttctttgcccttcttgcacccggga

SEQ ID NO: 5595 - DNA, 173 bp, Glycine max
  unsure (1)..(173): unsure at all n locations; Clone ID: 701144575H1
gacggtaaagtcanatattntttatagacacccctgtggacggtgntgaggctcatggcaaangcttatccattgatacgccgactctgattctgataaaaacagcacttattcaaatattcagcttagcaattttcagttcattcagttgtgatttcctcaagacaagttgc

SEQ ID NO: 5596 - DNA, 205 bp, Glycine max
  Clone ID: 701144576H1
ggaaacatgcagaaatatctgcaatctacaactgtaagagtggaggagatgagagtgaagagacaggacgcagaacagtggatgtcccaccgtatgctacctgagaacttgagggacaagaattagaaagtacgaacagtaccaatggcaagaaaataggggtgttgaggaggaggcattaattcgtaaccttcctaaagatctc

SEQ ID NO: 5597 - DNA, 236 bp, Glycine max
  unsure (1)..(236): unsure at all n locations; Clone ID: 701144577H1
atgggaattcctgttggtaaattggccttgtacacagcactagganacnnttagaccatcagcatgtttgcctattacgattgatgtggggacaaacaatgagaaattactaaatgatgagttttacattgggcttagacaaaagagggcaactgggcaggaatattctgaacttttgcacgagttcatgactgctgtcaagcaaaactacggagaaaaagttcttgttcagtttg

SEQ ID NO: 5598 - DNA, 218 bp, Glycine max
  Clone ID: 701144578H1
ggcacaagtttgttgagatagctagaagcaataagatgaaaatgaaagtgcttgttttgtttgttgctacagttttggtagcatatgaatgccatggctcagactaccagaagttccctctccaaatgaaaactgggtttggtgggcaatacagcaatgaggtggcatgtgccagttggaggctggcgtggaagcaaacaacgtagtcaagtggcaaa

SEQ ID NO: 5599 - DNA, 80 bp, Glycine max
  unsure (1)..(80): unsure at all n locations; Clone ID: 701144580H1
ggagcgtcttacctttcccattatcaaaatggctgtttcggctatcacaggagcgaggctaancctagggatagggttgg

SEQ ID NO: 5600 - DNA, 227 bp, Glycine max
  unsure (1)..(227): unsure at all n locations; Clone ID: 701144581H1
ggcaagagtgaaaaccttctcttacccttctctcaagtttcaaganatttcatcatggctccaaagaaggacaaggctccaccaccttcctccaagcccgccaaatctggcggtggcnnnnnnnnnnnnnnnnnnnnnnnnnnnggaaagcaaaaggagaaggtgaacaatatggtgctgtttgatcagggcacctatgacaagctcctttctgaagctcccaaata

SEQ ID NO: 5601 - DNA, 93 bp, Glycine max
  unsure (1)..(93): unsure at all n locations; Clone ID: 701144582H1
ggagtntgtgaganagcgagcgagcgagcagtttcaaagagaggatttgggattgggaagggcgagggattgcgctgcgtctctttcctcttc

SEQ ID NO: 5602 - DNA, 222 bp, Glycine max
  unsure (1)..(222): unsure at all n locations; Clone ID: 701144583H1
caaagacagaaagtcaggatctattggcggtcgccaaacaaatatgttcagtgatgattttnatggatcatcccagcagtcttataggaacagtagggggtctcgggaaaatgaccataatcggaagagttttgaagattttgatggaccgtctcggcaatcatatggtgatggtagagggtcccgaggaaacaacggtaatggatcatcccggcagtctta

SEQ ID NO: 5603 - DNA, 65 bp, Glycine max
  unsure (1)..(65): unsure at all n locations; Clone ID: 701144584H1
ggagggtttcccagttggaagccatnagctaagatgttagaagngaaccanannaanaaaaaatt

SEQ ID NO: 5604 - DNA, 218 bp, Glycine max
  unsure (1)..(218): unsure at all n locations; Clone ID: 701144586H1
ggatcacaaatctttcgctaacactcattaattgcaagaatggcacttcgttgcttggtgatgtccctttctgttctcttcactctnggtcttgcgagagaaagccatgccagagacgaagatttttggcatgctgtttggccaaacactcccattccaagttcattgcgagatccttctaaagcctggccctgcaagtgttgaaatcgatgatcacc

SEQ ID NO: 5605 - DNA, 217 bp, Glycine max
  unsure (1)..(217): unsure at all n locations; Clone ID: 701144587H1
ctggtaaatgatgggtatcgctggcgcaaatatgggcagaagctagttaaagggaatacaaacccaagaagttattatcgatgctcgaatcctggatgccctgtcaaaaagcatgtggaaagggcctcttatgattcncaaactgtaatggctacctatgagggacagcatgatcatgaaattccccctggaaggactgtcactcagaatgcagcta

SEQ ID NO: 5606 - DNA, 213 bp, Glycine max
  unsure (1)..(213): unsure at all n locations; Clone ID: 701144589H1
gatncaacnaatgttgctattgtcnctaattatgagnnnctatttatgtgggttaggtgntaagaantcaaggttaaagcaantggatgaaattcaagtgaaaactatcaatacttctaatgggaagaatttacataantgtccagctttaatctttgnatntcacatgtgttgtnnttggtacaagaattaataatttacaactagcatatt

SEQ ID NO: 5607 - DNA, 213 bp, Glycine max
  Clone ID: 701144592H1
ggatgggatatttcttgttgtttgagaatatgttaaattcggtgctctatgctcgtgacaaatggcttgtggatggcggagttgtgctaccagacaaagcatccctccatctcactgctattgaagatgctgactataaagaagacaaaattgagttttggaacaatgtatatggatttgacatgagctgcatcaagaagcaagccataatgg

SEQ ID NO: 5608 - DNA, 209 bp, Glycine max
  Clone ID: 701144593H1
ggctgacaagccaatcctttgtgtaggtgctcaaccctagtaagccgcaatggtgaagtactcaagggagcctgacaatccaactaagtcttgcaaggctagaggcgccgaccttagggttcattttaagaacacaagggaaactgcctttgcaatcaggaagttgcccttggtcaaggctaaaaggtacttggaagatgttcttgccc

SEQ ID NO: 5609 - DNA, 236 bp, Glycine max
  Clone ID: 701144594H1
ccactctaatatcttctggtcatctctgttaccttggtggcgaggttcgttactgcttttactttacttttccaccttcaaaatcgtaaccaactctactttatttatttattattattgatgtaattaagtgctcaactccttagttacaatttaggactgttagaaattgatatcgtcttttttgttttttgcagtggaggcaagatgttgcttttgcgggttttgaggttcca

SEQ ID NO: 5610 - DNA, 202 bp, Glycine max
  unsure (1)..(202): unsure at all n locations; Clone ID: 701144595H1
tacgnntgcgagaagacgacanaagggatatcacattttanttttctgtttttcctttctataatattcatagtttcattaccccctttatgtgcattggtcttgcaggccttacagtatgtgcaggagaacccagatgaagtttgccctgctgggtggaagcctggggagaagtccatgaaaccagaccctaaacttagca

SEQ ID NO: 5611 - DNA, 218 bp, Glycine max
  Clone ID: 701144596H1
ggtgtaaggaacacagcaaaacatactcttccgaggaagaaaaactgtacaggctcaaagtgttcgaggacaactatgcctttgtcgcccaacacaaccaaaacgccaataataacaataataatccaagctacactctttccctcaacgctttcgccgatctcacccaccatgaattcaaaaccactcgtctcggtcttccccctaccttgcttcga

SEQ ID NO: 5612 - DNA, 165 bp, Glycine max
  unsure (1)..(165): unsure at all n locations; Clone ID: 701144601H1
tggtgttctgggcagtaatgagagaagnaacaataatggttatggtagtactaggcaagaagtggtgaagacaatactcgtgataccaacaattggtccctgatttggatggataaaaatagaagggagttaaaggaaaacgtttaaaaattagtctagatctca

SEQ ID NO: 5613 - DNA, 241 bp, Glycine max
  unsure (1)..(241): unsure at all n locations; Clone ID: 701144603H1
gatggatagacggtggtggagagcacaggcagtacgctacttaatgaggttcccaaccgaatacacatgcaatttaatgaacgaggcccgccacgctagctttggaaaattagctgcaaaaatggtccttgaaagtcttgctggggattggccaaaagaaagtagtgccaggccaaggcctgatgatattgatgaatacgtgtggtccaatcacaagccatgggtccctaggnctcttctg

SEQ ID NO: 5614 - DNA, 51 bp, Glycine max
  unsure (1)..(51): unsure at all n locations; Clone ID: 701144604H1
ggtgttgagatgcantggctgnagnatgnantttgtgagantaaatgtacc

SEQ ID NO: 5615 - DNA, 244 bp, Glycine max
  unsure (1)..(244): unsure at all n locations; Clone ID: 701144605H1
ggcacacagtttactcactaactcactgtgagagcaaagaagaagaagaatgaaggacgccggaaagagccacaaggcgaacggaaagctgtcgccggagactcggaaggatcggaagtcggcgacggggctgagcggatcgcccaagaagggaggccacggcgggaagttcacgtggaccggccacggctacgagcaagttgagatgccgcacggtnnccnngacgnccntgacccgaacttc

SEQ ID NO: 5616 - DNA, 240 bp, Glycine max
  unsure (1)..(240): unsure at all n locations; Clone ID: 701144606H1
tacggtgatttgtntttcatgtctggcattgcgtgctttcaaacgccgatttngcatnttcaaatgtggacnangatcatattgttggctggagancatcatccntnagacgtcagnnntggncctgcaaattgganngatancnncaacganaaatntccacatgttgtatatggccagcattgcaaggcttgttcngatgctgagcagtgtgnntcngnaggnggnaacagctnngag

SEQ ID NO: 5617 - DNA, 101 bp, Glycine max
  unsure (1)..(101): unsure at all n locations; Clone ID: 701144607H1
ggatcntnancatagagatttgggtctccgntctcggcgaaatccctagcggattganatgacgatggcgctgtcactgggtcagaactccatttcctcgg

SEQ ID NO: 5618 - DNA, 70 bp, Glycine max
  unsure (1)..(70): unsure at all n locations; Clone ID: 701144608H1
ggagaagacnagtgacaanantgtgaactgcnnagggcttcnncagcctagtttgttctcatatnttctt

SEQ ID NO: 5619 - DNA, 259 bp, Glycine max
  unsure (1)..(259): unsure at all n locations; Clone ID: 701144609H1
ggccataagaaagagcaagtcgaaaagttcatctctccctctctctcacacatcccagccatgancctcttcggtataggcagaaaccagagaacattccgcccgaaaaaaagtactccttctggaagtaagggagctcaacttagaaaacatattgatgccacgttgggtagtggaaatctgagggaagcagtaaagctacctcctggggaggatttaaatgagtggctagctgtcaacactgttggatttcttcaac

SEQ ID NO: 5620 - DNA, 249 bp, Glycine max
  unsure (1)..(249): unsure at all n locations; Clone ID: 701144611H1
actagtagttttctcctgataaaataattatgcttccttcttcagcaataaaattttccatatatagcttagttcacaatcgttatggggtttttgagaagattaaacttttggtatttagatgatcaanataataggttgaagttgcattcattacagtgatgcttacaacccagttcctgggctgatggaaggggtgccctcgtcaggggattataacggagggtttgcatccaagcttatggtaag

SEQ ID NO: 5621 - DNA, 239 bp, Glycine max
  unsure (1)..(239): unsure at all n locations; Clone ID: 701144612H1
gancaattcanantatatcatcaattanaancatgggtttgttgnacacaagcgnntgcagtgtcttgccgctttcacnattttggtgatgactaaaagaatctggtcttccaaggtgatgccacgtcttcttccaggggcatagaactcacaaagttagacggtggaggaaaaccagtgggtggcagtgtggggagagtgttatactcttctccagtgcacctttgggagagctctac

SEQ ID NO: 5622 - DNA, 252 bp, Glycine max
  unsure (1)..(252): unsure at all n locations; Clone ID: 701144613H1
gactgtgaagtgtatntggtcacttccactatcttggtaganatttgaagtntaaaccttcaaattaatcacaccattttaatttgcctatagattctgagtcactgctgctatggcgctacgcgtacttcttgtgttggggatgttgctgatgttgtgccttgttaaggtttcatctgatccanagatagaagaagaaatactggaagcagaagaagaactgcagtttcccgataacgagccacttatcgt

SEQ ID NO: 5623 - DNA, 86 bp, Glycine max
  unsure (1)..(86): unsure at all n locations; Clone ID: 701144614H1
ggacacanccnnttccattattaaanggataagcctcaaccttgcnacccaanacaancannattcgctacttgttaagggctgna

SEQ ID NO: 5624 - DNA, 242 bp, Glycine max
  unsure (1)..(242): unsure at all n locations; Clone ID: 701144617H1
ccctatttatgcaggatgttcctcaanaaatttgtccatatgtcctagttttattggntctttgacatcacaccactatacgagcatagtcatgtctcttgcctacatggtacatggtgcatgattgtatgtgtccaatatgtgaagactcaacgtctttataatattgtcatcatgtctcaacagtttggctcgtacatattggtacaagactaatttcttgagatatctaagtcagtcta

SEQ ID NO: 5625 - DNA, 243 bp, Glycine max
  unsure (1)..(243): unsure at all n locations; Clone ID: 701144618H1
ggaagagagagagaggcaaggaacgaacgangtattctctctcctccactcacctcaaatccanatccanatcccaattctccagtctttgctatggcatcaatttcgtncttatctctcacttctgtttccctccccaaatctcaatctctggaccccaagaaaatctctgattcttcttcctcctctggcagcaggagtcaaagttgttgttgcgcgccatcgttccaacgaagaaagatg

SEQ ID NO: 5626 - DNA, 239 bp, Glycine max
  unsure (1)..(239): unsure at all n locations; Clone ID: 701144619H1
ggcagttgtattgttgaacaagggtttctctgtctgcttcttcgctttctctcgtttcaatcganaccaaaacaaaaacatgggcagaaaattcttcgtcggtggcaactggaaatgcaatgggaccactgaggaggtaaagaagattgttactactttgaatgaggctaaagtccctggagaagatgtcgtagaagttgttgtgagccctccttttgtgttccttcctgttgtaaaaa

SEQ ID NO: 5627 - DNA, 242 bp, Glycine max
  unsure (1)..(242): unsure at all n locations; Clone ID: 701144620H1
cacatttgtttcttgttctactgatgtcgatgttctcaacaatgttcagtctaggtttgaggtggatataaagcagcttcctgagcagattgatacctctacctatatgccatcgnagatttttttgggagcaatgttagatgcttggtggcatgagtaatagtgacgcatggtaatttgaacggtgcagctggatgattaaccggtgctgatagacaccagagtctctctacagactgcca

SEQ ID NO: 5628 - DNA, 239 bp, Glycine max
  unsure (1)..(239): unsure at all n locations; Clone ID: 701144621H1
tgttccgtcgtggcggcgtggtggaacttcattcacagtgggtggcttgcgttttggaaaaacggtgtcgtgcggaaacagaggctacgtttacgactctcatcatatggacagcttacgccaggagaaagttcaaagatttgaagaatttgttgacaaacgnctgaaacctgatcttgttcatgctattgctcagcgggacaaggtatttgaacaacagaaaattttcactgatttga

SEQ ID NO: 5629 - DNA, 224 bp, Glycine max
  unsure (1)..(224): unsure at all n locations; Clone ID: 701144622H1
gaccccttcagntatttaccttctgagctttgattactgtggcctagttgttgttttctcgntgagaaaggcttcttccactatgcattgcgcanntctgcgctttanggttcccttgttgctgcttgctagcttcagctatgctccttctgtttcggccacaactgaaatttcagggaatgaagtgaacacagatgggaaggtgataaatgaagagttagcaa

SEQ ID NO: 5630 - DNA, 218 bp, Glycine max
  unsure (1)..(218): unsure at all n locations; Clone ID: 701144623H1
ggagcatttannattgattaattttagannanggtgcaaggagcaaatgagggaaatgtttaagacagtaaggcatgtgtgcagctctttagtatattcggatggaggggaacgattgaatttctaagggtttctctctgtccttaccaggtgatctgactatggcttctttaaggcaatcacccttgttgatatgcagaggaactggagagcttcac

SEQ ID NO: 5631 - DNA, 248 bp, Glycine max
  unsure (1)..(248): unsure at all n locations; Clone ID: 701144626H1
catttactaaatgctgaatcncctaaccctaagagttgacttcaatatgacgtgttttagtttcttgtttggtattaagggggcaccgagctctccatggattgtgaaaatagcaactaatataaatatacagtactggtctatttaaatttatttgttaaaataaatacttattttaataaactaaataatttttttaaaatgtttgtctaaatttttcttaactttanatatagattttntattta

SEQ ID NO: 5632 - DNA, 254 bp, Glycine max
  unsure (1)..(254): unsure at all n locations; Clone ID: 701144628H1
gacactagggagcagcgcatagaagaacctattctttacattangattcaaatagcantattncaancttgagcaaggtgatcaaaaggaangcaaganacttctagnagatgggangagtacactcgacagcatgacagatattgatccatctgtanatgctagctattactgggtatcatctcagtttcataagacacgccaagaatttgctgagttctacaaaggtgnccttctctatttggcatacacat

SEQ ID NO: 5633 - DNA, 87 bp, Glycine max
  unsure (1)..(87): unsure at all n locations; Clone ID: 701144629H1
ggacgaagcacatgaaggagncacgtagatggancacattagcacagcgagancagatcatctcttccagaagcataaatggcnttg

SEQ ID NO: 5634 - DNA, 75 bp, Glycine max
  unsure (1)..(75): unsure at all n locations; Clone ID: 701144631H1
gtgtgtntaaccctcttagcccgggattantggactagtctgctgatccaatnatagcaggnngaagnnnaanaa

SEQ ID NO: 5635 - DNA, 238 bp, Glycine max
  unsure (1)..(238): unsure at all n locations; Clone ID: 701144634H1
gggggttttcgttgaaactaacaaattcaatatggttggaagttgcttaattagaggacattatggtttatacaatagccaatcaccccattttnccttcaccttttttctcttcgagctgttttaatctcaagctgtctcgcgcagggtgtattcgtcttatagtaatttttgggtcacaggccaggtaaaatacaatagcattcgggtcgggtggttaggagatatggccttcctt

SEQ ID NO: 5636 - DNA, 239 bp, Glycine max
  Clone ID: 701144636H1
gattaagtccttggttgatgttggaggtggcattggagggtctctttcggagattgttagggcttatcctcatatcaatgccatcaactttgacttgcctcatgtggttgccactgctcctaagttcgatgggatcacccatgttggaggtgacatgttcgtgtccattcctagtgctgatgctatttacatgaagtggattctgcatgactggagcgacgagcactgcatcaagatct

SEQ ID NO: 5637 - DNA, 215 bp, Glycine max
  unsure (1)..(215): unsure at all n locations; Clone ID: 701144637H1
aaccctaggtnagaagaaaagntgccggctggtcatggtttganatcccgcaccagagattccttctctcgtcctttcaggaagaagggaaccatcgccctcaccacntacctgaaaaacctaccacgtcggcgnctatgttgacgtcaaggttaacggtgccgttcacaagggnatgccccacaaattctaccatggccgcaccggncgcgtct

SEQ ID NO: 5638 - DNA, 214 bp, Glycine max
  Clone ID: 701144638H1
tggaacatggcttccccaaaggcaagttcaagagcctctgtgtcttttgcggcagaactctggcaaccgtcaagttttcagtgacgccaccattgaattggccaatgaactggttaagaggaacattgacttggtgtatggtgggggaagtgttgggctgatgggcctaatatcccagagaatgtatgatggaggctgccatgttctaggggtt

SEQ ID NO: 5639 - DNA, 242 bp, Glycine max
  unsure (1)..(242): unsure at all n locations; Clone ID: 701144639H1
attgggtttgggaagccgagtgccgatgttactgcgntncgcattccatcanttnntcttcncnnagcagatcttgttgttgatgtgctcntcnagaacccgagtccggtgccgatccctctgattgacatagattacttggttgacagtgnaggaaggaagntagtttccggattgatacctgatgcgggtaccntccatgcacatggagagcnagctgtcanattcctgtcactttggtt

SEQ ID NO: 5640 - DNA, 244 bp, Glycine max
  Clone ID: 701144641H1
gtcatgggcaagaacaaagtccttgtcaaggtccacccagaaggaaaatatgtcgttgatattgacaaaagtattgacattacaaagattactccatccactagagttgcacttcgcaacgacagttatgttcttcacttagttctgccaagtaaagttgatccattggtcaatctgatgaaagttgagaaggttcccgattctacttacgacatgattggtggtttagaccagcaaattaaag

SEQ ID NO: 5641 - DNA, 245 bp, Glycine max
  unsure (1)..(245): unsure at all n locations; Clone ID: 701144642H1
aagacaaaaggtcaataaagccagatgatgttgagtttgaaccaaagtcaagagattctgatataagggaagataaaaaatcccgtaggagggacgatgatgattttttaagcaagtcaagagaacctcatagtaacagggaagacatgacgtnnaganagcacggtgaagatgaatctgcaccaaagtcaagagaaaattatgctaggaagcaagatgatagatcatatagaaatgatgccagt

SEQ ID NO: 5642 - DNA, 244 bp, Glycine max
  unsure (1)..(244): unsure at all n locations; Clone ID: 701144643H1
gagagtgttccagagagtntgtnaaagaactgtgaagaaganggtaactgcaaacaaagcaagcannacaaaagacgcagtgatggagaggatgaagagggtgcttctgntgcttctggccttcactgttcttctnatgttgncagaagcttctgntacaaagtttactgttggaaacaaccagttttggaaccccaatattanctacactgagtgggctaaaggcaaacatttctaccttggt

SEQ ID NO: 5643 - DNA, 249 bp, Glycine max
  unsure (1)..(249): unsure at all n locations; Clone ID: 701144650H1
ggggcagcagaagaacaagtagttgagaactaagaaggagaagcaaatggcttcctcaatgatctcttccccagctgttaccactgtcaaccgtgncggtgccggcatggttgctccattcactggcctcaagtccatggctggcttccccaccagaaagaccaacaatgacattacctccattgctagcaacggtggaagagtgcaatgcatgcaggtgtggccaccagttggcaagaagaagtttga

SEQ ID NO: 5644 - DNA, 238 bp, Glycine max
  unsure (1)..(238): unsure at all n locations; Clone ID: 701144651H1
ggctcttgctattttcntccncctantgtgacnagtagagtatgcaagttaaacagacaactgcaagggaaataggggcctaactttatntatctgcgtgagtgagtgcgtcatttctttctttctctgcttccctanccaactgaaccngcagcaacatttgcgcaaatcgaaattgattctctgccacttaacctagaatggagatntnnccgnttcccgccggatcctacactct

SEQ ID NO: 5645 - DNA, 236 bp, Glycine max
  unsure (1)..(236): unsure at all n locations; Clone ID: 701144654H1
gaagtcagttgcgtctgatcctgatcagttgaagagcgccaganaagatatcaaggagcttctcaactccaagttctgccatcctattctcattcgtttgggatggcatgatgctggtacttatagnnagaatattgaggagtggccacagagaggtggagctaatggtagcttaagatttgaaattgagctgaaacatggagccaatgctggacttgtaaatgcattgaaacttc

SEQ ID NO: 5646 - DNA, 212 bp, Glycine max
  unsure (1)..(212): unsure at all n locations; Clone ID: 701144655H1
ttcgcaaaccctaatttcggaaagatcggcgatggctgcctccaaggatcgcgagancttcgtctacatcgccaagctcgccgaacaggccgagcgatacgaagagatggtggaatcaatgaagaacgttgcgaatctcgacgttgaactgactgtggaggagcggaatttactttctgttgggtacaagaatgtgattggtgctcggagac

SEQ ID NO: 5647 - DNA, 242 bp, Glycine max
  unsure (1)..(242): unsure at all n locations; Clone ID: 701144657H1
ggcacacagttatacagctctagagaattatcataccctttaagatgaaaccgtacctacgtccagtattcctattattccttatccttctcgnccaatccanttcggcgagtgcntctaatagtaggtttatagaattcttttcnaaattaaagaattcttttaatcctaagtctgaagaactagaatcaaaagatataaagaagctcccgagcgtcgaatttttgaagaagaaacatgac

SEQ ID NO: 5648 - DNA, 245 bp, Glycine max
  unsure (1)..(245): unsure at all n locations; Clone ID: 701144658H1
caccaaaggacagatgtctggcattntagtaagaaagattgatactggggaggaatatgtgcttgaggcaanagggctgtnntatggcataggccattcgccaaataccgaactgttgaaaggccaagtcgaattagaccactcaggctatgtacaagttcaggagggtnctgcaaaaacttcagttgaaggtgtatttgctgctggagatgtgcaggaccatgaatggaggnaagctataactg

SEQ ID NO: 5649 - DNA, 253 bp, Glycine max
  unsure (1)..(253): unsure at all n locations; Clone ID: 701144659H1
ggcattgggtggagcatacttaganacagcaactatgtctctcatgcagcttactagctcccctgttggntcactggtcngtttcattgtaatatttgctttatggtacagaaccatggctttggcnaagttgccaccaaacgcttcatcagttccagcagtttgagcgttnggagattccatcgtggacccaggcaacaacaacaacatngagacattgatcangtncccntnncaccttatggaaaggatt

SEQ ID NO: 5650 - DNA, 206 bp, Glycine max
  unsure (1)..(206): unsure at all n locations; Clone ID: 701144660H1
tggcgtcgggctggggaattaccggaaacaaaggtcgctgctacgatttctggatggatttcagcgagtgcatgtctcgctgccgtgagcccaaggactgtgnttttctccgcgaagactacctcgagtgcctccancattccaaagagaatttggccatggattgtgaactttgaattacaactggactttcaatatttgatttg

SEQ ID NO: 5651 - DNA, 221 bp, Glycine max
  unsure (1)..(221): unsure at all n locations; Clone ID: 701144665H1
cgaaggacattganttnttgcacgatgccacnngancganaagcccggggctgttagtgtcttcattttgtgatgtatcttatttatgagaattcggtgggcttacataaggtggatgttaaccttcctacttcagnaggnnactcttttcagatgttaaaggtnatgtaactgtattggcttttnctttagttcttttggnagctttgtccagttctaat

SEQ ID NO: 5652 - DNA, 175 bp, Glycine max
  Clone ID: 701144666H1
agccacatttgatgtccactacttcaacaattttagattttttcttcttatcctttttcttcgtaactggacttgtctccagtggaaggttctggtaaccaagaatgggtatttgatgggtatgtttgccattaagttttgttttggggccaatcccaggacttatatggtttaa

SEQ ID NO: 5653 - DNA, 215 bp, Glycine max
  unsure (1)..(215): unsure at all n locations; Clone ID: 701144667H1
ggagggaaggancngaagacaaattaaccaccaacaacagcagaagaaaataaaggagcaaactaaaatggcagcaaataaatacgttgcattgttgttggtggtgttccttatcgctggaagtgctaatgccagaccaaaagaagtcagctgcgcaagtatttgcatcgacaaagaatgcaaaagtgactttaacagttggtgtgcaatattca

SEQ ID NO: 5654 - DNA, 233 bp, Glycine max
  unsure (1)..(233): unsure at all n locations; Clone ID: 701144669H1
ggctgacaagccaatcctttgtgtaggtgctcaaccctagtaagccgcaatggtgaagtactcaagggagcctgacaatccaactaagtcttgcaaggctagaggcgccgaccttagggttcattttaagaacanaagggaaactgcctttgcaacacaggaagttgcccttggtcaaggctaaaaggtacttggaagatgttcttgcccacaagcaggcaattccattcaga

SEQ ID NO: 5655 - DNA, 234 bp, Glycine max
  unsure (1)..(234): unsure at all n locations; Clone ID: 701144670H1
ggagagtcagattcgcacgcattgcttcgcctcacaacagcagctgcagcagcaatggctcccaaacgaggtggaaaggctccggctcttgccgctaagaagaagcctgagaaggtcacgaatccgttgttcgagaagcgtccgaagcagttcggaatcggaggggcgttgcctccgaagagagacttgactaggttcgtgaagtggccaaagaatgttcaaattcagaggnag

SEQ ID NO: 5656 - DNA, 212 bp, Glycine max
  unsure (1)..(212): unsure at all n locations; Clone ID: 701144671H1
ggtatgaatcgattcttgncactnttctatagtgcattccttttnaactgttttcttctcttcctttcctatggcttatacttttcttttggttatttcagtgttgagatttataagcatcctanagaagaaagaatagcccgaacttggggaaccactgcccctggcctaccctatgttgaacaaactataaccaatgctggaaattggtt

SEQ ID NO: 5657 - DNA, 235 bp, Glycine max
  unsure (1)..(235): unsure at all n locations; Clone ID: 701144672H1
gacacttcaaaatnctctagtanccnttcttttctctctntntntctcgtgttctgagctgctagnagcaatggagaggaaaagaagccatgcttctttcaccatgtttgcantgcttgtnggattgctctctcagagccttgtnattcctgtaatatccaccactgttgcagatcagaaganctactacaccccagatccacatgctggaagtccccccacaggctcacacatt

SEQ ID NO: 5658 - DNA, 243 bp, Glycine max
  unsure (1)..(243): unsure at all n locations; Clone ID: 701144674H1
ggcgaaattagggttcgctcacttgtcttcaatttcccaaattcaccctggcaccatccttgaatcctccaattgacangccttttggatccatttttctccgtgaggccgtgacgcatcgcgattttgttttgggaacccgcgaaactgaatcagatagtgcggcacggaaactaggaattagagcaatggcagaagatctggtgctggatactgcaatcagagactgggtgctgatccctc

SEQ ID NO: 5659 - DNA, 246 bp, Glycine max
  unsure (1)..(246): unsure at all n locations; Clone ID: 701144676H1
tgggatcagttacatatatatacatcaaatacttattaactgtggtatatctgaagaaattgctatgcataggggactcatgcnaggngagattttcttgccccttttctttttcttcttgtagcgtaattaatgagaagggcatcagagttggggtttaattttaacatattcaaggtggacagtaattgtatatgtggtttcataattataatatgcagatcgacacattgttcgtnagtnnaa

SEQ ID NO: 5660 - DNA, 255 bp, Glycine max
  unsure (1)..(255): unsure at all n locations; Clone ID: 701144680H1
ggannaagaaagttggttgattngtcccattgnttccgaagagaaaagaaaanatgtttganccacaacagctatacactcgcgcgaagaccgngnaanttctacctcgaatcaggagaaaccctctacccagggctgatcgtcngcgagaaccagctccgatggggtttcatccgcnnggtctacgngcatcctctccgngccagatcgttcctnngtatnnntnnnnnnaattnaggccgtttnttgccncna

SEQ ID NO: 5661 - DNA, 234 bp, Glycine max
  unsure (1)..(234): unsure at all n locations; Clone ID: 701144681H1
gggtgatgggtgggtgagtccgaattgtgaaagtaagcaaagatggctttcacggaatcgtctctcctccttccttcggtttcagganccaacaagaacaagaacaaggttccagaagacaaatggtatttagcctacattgtgtattttaccctnagtctcggttaccttctcccatggaacgtttcatcancgccgttgattacttctcctttctctaccctgacgccagcg

SEQ ID NO: 5662 - DNA, 231 bp, Glycine max
  unsure (1)..(231): unsure at all n locations; Clone ID: 701144682H1
ggtgaagtgtatttngtcactgacctatcttggtagagatttgaagtttaaaccttcaagttaatcanaccattttaatttgcctatagattctgagtcactgctgctatggcgctacgcgtacttcttgtgttggggatgttgcngatgttgtgccttgttaaggtttcatntgatccaaagatagaagaagaaatactggaagcagaagaaggactgcagnttcccgat

SEQ ID NO: 5663 - DNA, 231 bp, Glycine max
  unsure (1)..(231): unsure at all n locations; Clone ID: 701144683H1
ggcgaggattgantgcggtggcggtgacngcgtcaatangccctcccggtcctcgattcagagtagacagcggcacatcaaggattccctcttccggatgcagaatctcggtgcggtgtaaagctgtcggagaaagccgacaaggttccttggaggaaaccgttgtttatgagggtatttatggcccctggaccattgacgactccgatgttcgagaggtaattttgtaca

SEQ ID NO: 5664 - DNA, 233 bp, Glycine max
  unsure (1)..(233): unsure at all n locations; Clone ID: 701144685H1
gacagcacaacttgtttatcggaacgttgctataaacgttgttgttttcagatanacacgtgannnnnnnnnnnnnnnnnnnnnnnnnnnnncgagttcagccgnaccaaactccgaagctatggcagagctccaaaccaaggttgaacctgtnaacggtccnggctccggtggatcccgagccaccgctagctgaggctccgccgctcgagaagaaagcngtggcggtgcca

SEQ ID NO: 5665 - DNA, 240 bp, Glycine max
  unsure (1)..(240): unsure at all n locations; Clone ID: 701144686H1
gaagaaaggaaggtacgcccagcgtgtcggtaccggtgctcccgtttacttggccgcagttctcgagtacctagctgctgaggtgcttgagttggctgggaatgcggcacgtgacaacaagaagaacaggattattccgagacatgtnactattggctgtgaggaacgatgaggagttggggaaattgcttgctggtgtcaccattgcacatggtggtgtgcttccaaacattaaccctg

SEQ ID NO: 5666 - DNA, 239 bp, Glycine max
  unsure (1)..(239): unsure at all n locations; Clone ID: 701144687H1
gataccaaaaacaaaacacaagccaagtgaaagtnaganaaaataaaaatcaaagagcataatgtncagggatcattcacaagattgnggagacccttcatgtgggagggcacaagaaggaggaggagcataagggtgagcaccatgctggagaatacaaaggggagcaccatggtgaacacagtagtgagtacaaaggagagctcatggtgaacacaaagctggagagtaccnggtga

SEQ ID NO: 5667 - DNA, 239 bp, Glycine max
  unsure (1)..(239): unsure at all n locations; Clone ID: 701144688H1
gctncacngcctccngcngccctagcgcgtgcagagcnantgnnagacgcaggccatngggcgaanacccgcgaggtgttntagagcgtantaagnncganccataccccgantcgcggtcttgccgtggtgttcctgatcccnggatcaggatttacgatgttggtatggaagnaggagggtgttgtgngtttnctttctgtgtccatctggttggttgggagagggaagacgttctt

SEQ ID NO: 5668 - DNA, 219 bp, Glycine max
  unsure (1)..(219): unsure at all n locations; Clone ID: 701144690H1
ggcacaagtttgtacngatagctagaagcaatanngatgaaaattnaagtgcttgtttggtttgttgctacagttttggtagcatatgaatgccatggctcagactaccagaagttccctctccaaatgaaaactgggtttggtgggcaatacagcaatgaggtggcatgtgccagttggaggcttggcgtggaagcaacaaacntntcaagtggcaat

SEQ ID NO: 5669 - DNA, 240 bp, Glycine max
  unsure (1)..(240): unsure at all n locations; Clone ID: 701144691H1
aaagagacccggaaagggtgggaaccgcttttggaaatccattgggcttggatttaagactcccagggaagccatcgaaggaacctacattgacaagaagtgccccttcactggcaatgtttccatccgtggccgtatcttggctggaacatgtnacagtgctaagatgaacaggactattattgttaggaggaattatctccattttatcaagaagtaccagaggtacgagaaaaggna

SEQ ID NO: 5670 - DNA, 238 bp, Glycine max
  unsure (1)..(238): unsure at all n locations; Clone ID: 701144692H1
gactttgatcactgatctnatctcaattttnagatatgtcgacatctgntaagccagnngaggtggaaaggggtngcaaggatgancaagcacaaggaagatgatcaagaggaggggaagggtggattcattgagaangtgnatgatttnattcatganattggtganaagattgangangctattgggtttgggaagccgagtgcngtgttacngcgntngcntccatccattatct

SEQ ID NO: 5671 - DNA, 102 bp, Glycine max
  unsure (1)..(102): unsure at all n locations; Clone ID: 701144701H1
gacacttcaaaancctctagtaagccttcttatctctctctctcnctcgtgttctgagctgctagaagcaatggagaggaaaagaagccatgnntctttcac

SEQ ID NO: 5672 - DNA, 232 bp, Glycine max
  unsure (1)..(232): unsure at all n locations; Clone ID: 701144703H1
tactgaaacttgggcatctttctttgctgctctcattccgggaatcaatatatttcggatgcttgttattggacttggaatattgaaagatgaggccacagtgaaatcaatgagcagatttggagattacagggaacttcttaaaggacctgngtattatgccgcaactattactttggcagccataatatactggagaacttcacctattccattgctgcatatgtatctg

SEQ ID NO: 5673 - DNA, 228 bp, Glycine max
  unsure (1)..(228): unsure at all n locations; Clone ID: 701144705H1
ggcatgggaatgaagaatgtgaatcagtacctaaggtggtggaagcattgagcaatgtcaaagctgttcatgttgcaacaggagattacacaacctttgtcgtgtctgatgntggtgatgtgtattcatttggctgtggagaatctgctagtcttgggcataatgctgctggaaatgatgagcagggcaacagacatgcaaatgtgttaagtccagagcttgtcactt

SEQ ID NO: 5674 - DNA, 116 bp, Glycine max
  unsure (1)..(116): unsure at all n locations; Clone ID: 701144711H1
gaggagaaagaaaaatctccatnaataacggaggaggaggaagagcacttctactancaccacccacatcatcancntcnccttcttgcacaacaagcatagcctncttccacngc

SEQ ID NO: 5675 - DNA, 214 bp, Glycine max
  Clone ID: 701144713H1
atataaagctgaggatgaagttgcaggcctgggtgagattgtgaggccaaagaagcttgatcgaccaaagggttcaaataggatgagtattatcacagttttaaagtctgaaaggccattgctttctgttgaggaaggtagtgccgatgatgaaggtgcaggcctaggtgagattgtgaggccaaagaagcgtggtcgaccaaagggttccagg

SEQ ID NO: 5676 - DNA, 63 bp, Glycine max
  unsure (1)..(63): unsure at all n locations; Clone ID: 701144714H1
ggcattcaggtcagagactcatgagtatcnncannccancaacatgctatctgnnctctgtgt

SEQ ID NO: 5677 - DNA, 222 bp, Glycine max
  unsure (1)..(222): unsure at all n locations; Clone ID: 701144716H1
ggcacaagtgagtttgttgatcgagataactagaaacagtgtgatgaaaatgaaggtccttgttttcttcgttgctacaattttngtagcatggcaatgccatgcgtacgatatgttccctctccgaatgaacactggctatggtgcccgtactccggaggtgaaatgcgcaagttggaggcttgctgtggaagcacacaacatctttggcttgagaccatc

SEQ ID NO: 5678 - DNA, 232 bp, Glycine max
  unsure (1)..(232): unsure at all n locations; Clone ID: 701144719H1
atcgactcaacgaacacttccaagagttgggaaacgcgttagatcctgatagaccaaagaatgacaaggcaactatcctcactgannaccgtccaaatgctaaaggacttaaccgctgaagttaataggcttaaaacagagcataaaacactttctgaagagtcacgcgaactaatgcaagaaaagaatgaactcagagaagagaagacatctcttaaatctgatatagaaa

SEQ ID NO: 5679 - DNA, 230 bp, Glycine max
  unsure (1)..(230): unsure at all n locations; Clone ID: 701144721H1
gaccccaaaataaaataaaataaatctatcatntcctctttctccgggccttgttgccatcctggatacatatggacggcgaaaggttgagggagatggaggagatggggtgtggtcattatgtgggtcatggctacgtgagtnattggggcatncaatgcaacagcatgcgtcgtcgtcaccatacgggtgaagcaccactgtcgacgacggcggtttccagctacaaa

SEQ ID NO: 5680 - DNA, 228 bp, Glycine max
  unsure (1)..(228): unsure at all n locations; Clone ID: 701144722H1
ggaggagtgatgattaaatgaggaaataggctctcaaatagaanatagcatgtacgtaggattaacttgtttctggttaatgctatacatcttttgggcattgaggggaagagggtgttagagttaagagttaacatttcatnatccataatcttnaatcattttttttctttttttggttttaaaatggtgttttggcggtagtgnctttaggttgtctgtgaattg

SEQ ID NO: 5681 - DNA, 235 bp, Glycine max
  unsure (1)..(235): unsure at all n locations; Clone ID: 701144723H1
ggcaccttggtaaggtgaganaatatggcatttgcaggaacaacttcagaagtgcatggcttgtgacaaaacagtttatctggttgataagttgaccgcagataaccgagtgtaccataaggcttgcttcagatgccaccactgcaaaggaacactncaagctcagcaactataactcttttgaaggagttctttactgnaggccacactttgaccaactgttcaaaagaactgg

SEQ ID NO: 5682 - DNA, 235 bp, Glycine max
  unsure (1)..(235): unsure at all n locations; Clone ID: 701144726H1
gatatntatacttcnttcnaggtgtccggaaatcgttccnactcatcatcctctnaaatactngaagcctactgcgttcgtgccnntnactaggncacacttcatcaatgntcnggnagaggcaaaaccctaggatccagcgccgctaagaaggccaccttcaaggagcagcaaagccggcctccaattccccgtcggtncgtatnggaggttttcaaggccggaaagtacgccg

SEQ ID NO: 5683 - DNA, 121 bp, Glycine max
  unsure (1)..(121): unsure at all n locations; Clone ID: 701144729H1
atgtatgagtgtccacatggatgtgtgtatgatcagttttgcataaatttctaatcatcattgttatatgtgtgacatgganatgatttggggcattcacttattcttgaaccgctcgcta

SEQ ID NO: 5684 - DNA, 115 bp, Glycine max
  unsure (1)..(115): unsure at all n locations; Clone ID: 701144731H1
gggtntcagagtggtggggtgtgcagaagagcgtcgcagttgtaaccctaatncagaagaagcgcagttcaagcgagtnacagccaccagccatgggtcgtatgcacagccgcgg

SEQ ID NO: 5685 - DNA, 91 bp, Glycine max
  unsure (1)..(91): unsure at all n locations; Clone ID: 701144732H1
agaatataactactgagatggtgaagacaccagangtctcaagatggatggatcaagtcatccctacaatagccccttgtgatgcagcaga

SEQ ID NO: 5686 - DNA, 229 bp, Glycine max
  unsure (1)..(229): unsure at all n locations; Clone ID: 701144734H1
ggcacaagtgagtttgttgatcgagataactagaaacagtgtgatgaaaatgaaggtccttgttttcttcgttgctacaattttggtagcatggcaatgccatgcgtacgatatgttccctctccgaatgaacactggctatggtgcccgtactccggaggtgaaatgcgcaagttggaggctnnnatggaagcacacaacatctttggctttgagaccattcctgaag

SEQ ID NO: 5687 - DNA, 118 bp, Glycine max
  unsure (1)..(118): unsure at all n locations; Clone ID: 701144735H1
gatgntcacttcgggttaatatcccactcccatcagcaagncnnagnntcgatgctcccttcaccaagttgccnaatacnctgaaatcanagaacactccttaaanacctttcagnng

SEQ ID NO: 5688 - DNA, 194 bp, Glycine max
  unsure (1)..(194): unsure at all n locations; Clone ID: 701144739H1
gtgaacnaacnagcnctcctagatttccttgtctctggttgacttacngcaatatttggctannaaggcttcttcaccttctttgcacatagcaatggncnatggttacaatgggacacanacaccaggtctacctcgccaacaagcttgcagaaagagaacaganntctnctcattcaagcaccacatgcagc

SEQ ID NO: 5689 - DNA, 230 bp, Glycine max
  unsure (1)..(230): unsure at all n locations; Clone ID: 701144740H1
ggaaagataaatgtggcatattcatgtcttcccctcaccattcctttctntggagtcaaggactggtcggttaggtttgtacttaatnacgcttcttaatttcttctttatcgatcacccatgatnnacctggctagctagctagggttgcttctgctgcattctcgaccgccaatcaaggactcttctgcgcttccatcttaacaggaaaatggtgagaaggaagtacc

SEQ ID NO: 5690 - DNA, 119 bp, Glycine max
  unsure (1)..(119): unsure at all n locations; Clone ID: 701144743H1
ggaagatacggaggctgctgctatcgaatactcggataaggaggaacatcntttcaatggcgtcccaaattacccgtgagtngtctggaatcaatacattcaccnnctnctacccagac

SEQ ID NO: 5691 - DNA, 128 bp, Glycine max
  Clone ID: 701144748H1
attttagaaactgctgattctgagaccttgcaggacagggctgtgcttgaggatttagatgcagatgcatctgagtcaaaattagacttgaaatgccctttatgtagaggctcagtattgaactggga

SEQ ID NO: 5692 - DNA, 235 bp, Glycine max
  unsure (1)..(235): unsure at all n locations; Clone ID: 701144749H1
ggagagaaagagatcacatagcagaatggcttctactcaatgnttcttgcaccancatgctcttaccanncctgncagatccccatcacaacgcatcatggttagcaccaagcctaaccagcttgtttgcaaggcacagaagcaagaggatattgatgtcagcccaatctctcgncggttagctctaancgtgctcattggtgcngctgctgttggctccaangtncattntgtg

SEQ ID NO: 5693 - DNA, 227 bp, Glycine max
  unsure (1)..(227): unsure at all n locations; Clone ID: 701144755H1
ggctgcaacagctacctcatattgttccgaatggaatgatattgccgggtgatacccttgcttaacgatgaagatgtcactggttcaacttcgacctctcttgacaaggcgagggttcagcacaagctctgagaaccttgttgctctgtgctctttgagagactgccagtggtcattcccaaaattgaccctgtagtntatgcatttcaagaatctcgtttcgatgg

SEQ ID NO: 5694 - DNA, 100 bp, Glycine max
  unsure (1)..(100): unsure at all n locations; Clone ID: 701144756H1
ggatttggganacnaagtatgatccttcaactcggtatttatggaatgganatctttgttgttctggagcgtcctggctatcgtgttggacgtcgccgca

SEQ ID NO: 5695 - DNA, 226 bp, Glycine max
  unsure (1)..(226): unsure at all n locations; Clone ID: 701144757H1
ggcacaagtgagtttgttgatcgagataactaaaaacagtgtgatgaaaatgaaggtccttgttttcttcgttgctacaattttngtagcatggcaatgccatgcgtacgatatgttccctctccgaatgaacactggctatggtgcccgtactccnggaggtgaaatgcgcaagttggaggcttgctgtggaagcacacacatcnacggcttggagaccatnccg

SEQ ID NO: 5696 - DNA, 60 bp, Glycine max
  unsure (1)..(60): unsure at all n locations; Clone ID: 701144758H1
aacgcataaacattccagacttaaagaactnatataggtctgaattcctncattcggcac

SEQ ID NO: 5697 - DNA, 112 bp, Glycine max
  unsure (1)..(112): unsure at all n locations; Clone ID: 701144759H1
ggatattgaaatatatggaatgcaagggattccaccagatatcctggcngctcattatnctgaagaagaggatgntgttccancaaaggcagcnacnctggatattccacna

SEQ ID NO: 5698 - DNA, 121 bp, Glycine max
  unsure (1)..(121): unsure at all n locations; Clone ID: 701144762H1
cnagacagagnactctgttctctnatttganttttgggagcatgnncaagttccctactccttcaacttgttgaaatagctcatgcccttgaggattcagaccatgatttcatttgggtgg

SEQ ID NO: 5699 - DNA, 116 bp, Glycine max
  unsure (1)..(116): unsure at all n locations; Clone ID: 701144766H1
gggagaaagaangggtttactctaaccggcaatcagattcggaagccttgacttgngttcactctgttattctcgcaatggaggttcanattccaaatcacactgttttcgncatg

SEQ ID NO: 5700 - DNA, 230 bp, Glycine max
  unsure (1)..(230): unsure at all n locations; Clone ID: 701144767H1
ggaagctgttggagttcatagttgttacaggctggacggtgtaagantcttgtgtgttcagtttaacaaaccgatcaagctgtcgtgtggtgtacccactgatctgtaaccgtggtctnnnnnnnnnnnnnnnnnnnnctattggctcagaacataaaagatcccaaataacaagaccacacaccatgagtgtcatcgacattctcaccagagttgantccatttgcnaa

SEQ ID NO: 5701 - DNA, 221 bp, Glycine max
  unsure (1)..(221): unsure at all n locations; Clone ID: 701144768H1
ggaatcgaaagcgtagaaggatttcactcctcccttacttcatcaattctttcagtttgaatggcgagtgaggatgatgcagtgaagaaggcaatgatagtagatgctcgtncaagaaacantngtcntaatgtgangtgcacggagtgtgggaatnnntccttgaggcnctccagnagtgttagccnttttggggnagnaattcagnggggttgcanccc

SEQ ID NO: 5702 - DNA, 203 bp, Glycine max
  unsure (1)..(203): unsure at all n locations; Clone ID: 701144769H1
tcagtgntacnccccaggataacaacataatgctgtggaatgctgtcatatttggtcctgatgatactccatgggatggnggcacgttcaanttgacactccantttactgaggantatccanatnnaccaccgactgtacgatttgtgtctcgcatgtttcatccaaatatttatgctgatggnagtatttgtccggntata

SEQ ID NO: 5703 - DNA, 115 bp, Glycine max
  unsure (1)..(115): unsure at all n locations; Clone ID: 701144774H1
cgaggttttgtcggttgaacttccagctccttccggttggaatgaactgtttttccctaagaaactgggaacaccaagaaaaagtgagattgtattcattnnctccaactggaga

SEQ ID NO: 5704 - DNA, 113 bp, Glycine max
  unsure (1)..(113): unsure at all n locations; Clone ID: 701144775H1
acctcaacaagtagtatagtaganatttgcnatctantacaaacagtttaggaaggtannaacttaccagtgccgctatcttggattacagaagcttcntaggccagctgctg

SEQ ID NO: 5705 - DNA, 197 bp, Glycine max
  unsure (1)..(197): unsure at all n locations; Clone ID: 701144776H1
gattgcagttancagatattttgttcgtcactatctccctctctgtgtctctctgcgacaaacccaaattccaaaaattccaataaactcaagtgacctcattctgaactctgaaactcaaccttctttcttctcttctctcgggtctaacngtaatttccccccggtgnccaaaatgggnncngnantggnggggg

SEQ ID NO: 5706 - DNA, 218 bp, Glycine max
  unsure (1)..(218): unsure at all n locations; Clone ID: 701144777H1
gggagaagaatttgcatagagcaagcaaagcgggggagaagaagaagcaggcgagttgagagagaatgggaaggaagaaggggtatgttgagttcgaggagtcgccgccggacgatttcgatccggcgcatccgtacaaggacccggtggcgatgctggagatgagggagcacatcgtgagggagaagtggatccaaatnnagaaggccaagatcatt

SEQ ID NO: 5707 - DNA, 109 bp, Glycine max
  Clone ID: 701144778H1
catatttatcttgtttcttagatgtgggtcttgtctctttgttagaatgtatgaattgtattactgagggatcattcaacatcacagctattcatgtcatatctcacag

SEQ ID NO: 5708 - DNA, 78 bp, Glycine max
  unsure (1)..(78): unsure at all n locations; Clone ID: 701144779H1
cngatgagggtacgcagatcagatctgcannnccaagcttgtaagcagccctcaccctnantgcaaggaagtcacccg

SEQ ID NO: 5709 - DNA, 120 bp, Glycine max
  unsure (1)..(120): unsure at all n locations; Clone ID: 701144780H1
gncacacngttatacagctctagagtattatnatnccctttaagatgaaaccgtacctacgtccaatattcctattattccttatcnctctcgaccaatccacttcggcgagtgcttcta

SEQ ID NO: 5710 - DNA, 241 bp, Glycine max
  unsure (1)..(241): unsure at all n locations; Clone ID: 701144781H1
gaagcttagtgatgaccaagttaatctccttgaacaaaactttggaaatgaacacaaacttgagtccgagagaaaggacaggctggcaatggagcttggnttggaccctcgacaagttgctgtgtggtttcaaaacagaagagctcgttggaagancaaaaagttggaagaagagtactccaaccttanaaaaaatcatgaagccancttgctcgagaatgtcgcctagagactgagccat

SEQ ID NO: 5711 - DNA, 220 bp, Glycine max
  unsure (1)..(220): unsure at all n locations; Clone ID: 701144782H1
cctctaatggccaggagaaaatgttaccatcactagaacagcaagcattgatcaatgaggtgagaaggttaattgggccacagtctggtaaggcgtccattttttgttctgatgcatgcatctcaaggtatttgagngcacggaattggaatgttaagaaggcagccaaaatgttgaagctgaccttgaaatggagagaagaatacaaaccagaagagtt

SEQ ID NO: 5712 - DNA, 246 bp, Glycine max
  unsure (1)..(246): unsure at all n locations; Clone ID: 701144783H1
ggtcaattttgtgtgcacgtacgactttgcatgtttttctttgaattataggatatgttcaagaaatgggtaattgttttgaaaataaaagttcttgacattttntgacttgaaatccttgattcttctctacatgtcatgatagttttgaaaactcaatttgaaagtgatgattttacctttgtgagaatttgagccatccatcattataatcattggtgngtttgctccattgattgcttgcac

SEQ ID NO: 5713 - DNA, 252 bp, Glycine max
  unsure (1)..(252): unsure at all n locations; Clone ID: 701144785H1
agtgagagaggacactccttgagctccanacatcacaaaaacactcntgtnaaaacccttctagcctaaagccttgctaataaacactaacatggcctcccaatttgctagggatgtaaaatgcaagagactaatgcactgtgcagcctcttatggagaaagaggaagccatttnnacactgtctcgtcgccaaaattatggntncaancaatccaacccggagnagggganttcaatgganatcctaatcc

SEQ ID NO: 5714 - DNA, 227 bp, Glycine max
  unsure (1)..(227): unsure at all n locations; Clone ID: 701144786H1
ggcatcaattcaaaatatatcatcaattataagcatgggtttgtggaacacaacgaatgcagtgtcttnccgctttcacaagtttggtgatgaccaaaagaatctggtcttccaaggtgatgccacgtcttcttccaggngcatagaactctgaaagttagacggtggaggaaaaccagtgggtggcagtgtggggagagtgttatactcttctccagtgcactttg

SEQ ID NO: 5715 - DNA, 226 bp, Glycine max
  unsure (1)..(226): unsure at all n locations; Clone ID: 701144787H1
tctgnaaacctctcnaaccaattgatcangaaaacatatncatcttttgcagtaggcttatctcctgaatgatcatantcngaagtagtgtttgagtaggaaaagcccacccnngcaggggattccaagaacagcacatttnccactgcataatgaatgcacaattgtatgttaattcnntcatgtttcacaagtgcatcaaaannggtggatctcgaaaaatagt

SEQ ID NO: 5716 - DNA, 230 bp, Glycine max
  unsure (1)..(230): unsure at all n locations; Clone ID: 701144788H1
ggaggtcgtgttgcagaggccacaacgtttttcattagaaattttcagttccaccacatnctctgannnnnaagaaacctcttgcactgtggacgcagcctccgccggcggcattaccgccatagaagctcattcaagctttttttcaccgttccncacaagactagntnnganagctgntatcattggaaattagcanttcntnntnancnaancntaggnttgggnna

SEQ ID NO: 5717 - DNA, 148 bp, Glycine max
  unsure (1)..(148): unsure at all n locations; Clone ID: 701144790H1
gaattcaaaatatatctcattataagcatgggtttgggaaaaacgaagcatgtntgngtttcancttttgtatananaancttntcaggtgcagtactcaggatgatccaatgcgtgagaacatgtgattggatgtanctccagcttg

SEQ ID NO: 5718 - DNA, 219 bp, Glycine max
  unsure (1)..(219): unsure at all n locations; Clone ID: 701144792H1
ttctgacatctaaatcaataagtacnacctctcatacttcnatctgcatatcantccnattcatgnntactcatcccattgngcagancaatctaattcatacaacatnntcacanatatnttcagttgatagtatccaaggatttaaattacagttgcnatnacagtcatggttactgaaatttcagggcantgtggcgattnccggcacanaacttc

SEQ ID NO: 5719 - DNA, 120 bp, Glycine max
  unsure (1)..(120): unsure at all n locations; Clone ID: 701144794H1
caagacagagaactctgttctctatttganttttgggagcatgaacaagttccctactccttcaacttgttgaaatagctcatgcccttgaggattcagaccatgattncatttgggtgg

SEQ ID NO: 5720 - DNA, 222 bp, Glycine max
  unsure (1)..(222): unsure at all n locations; Clone ID: 701144796H1
ggaagctggaaaagttagaagtagtgaagaaaatgaaagtcattgttttcttcgttgctataataattttaggtgcagaatggcaatgcaatgggtcagagcatgagcatgagcatggccacagctaccaaattttccctttgcgaatganaacncnccccggtggncactactttccggaggatcgtggcaaaatttggagcctggtggggancccccacc

SEQ ID NO: 5721 - DNA, 248 bp, Glycine max
  unsure (1)..(248): unsure at all n locations; Clone ID: 701144801H1
gtggcgctgagactgagtctgtgtctgctcctgggaatgggtattgtgcacttgaacatgncctaagctgnttagggtgctgctgttcctttaactgaaacacttgttgggctaatagcaagctgttgagccatgcgacttgagagaagagactctccaccaagttctgcgaccgtgcatctnaaacgcgncacttcagcatccaggtctcnttcagagctggccaaaaatagcncncaanttttttt

SEQ ID NO: 5722 - DNA, 126 bp, Glycine max
  unsure (1)..(126): unsure at all n locations; Clone ID: 701144804H1
ggtggcactcaaacattgtttgntgtaggaagaggaatcttgagaaatgncaggggncagcaagagcacgattctgtgacatcgganggactcngttacatcggnaaattcatacgtggaagccag

SEQ ID NO: 5723 - DNA, 248 bp, Glycine max
  unsure (1)..(248): unsure at all n locations; Clone ID: 701144805H1
gtggacattgaattattgcacgntgccacangaagagaagcccggggcggttagtgtcttcattttgtgatgtatcttatttatgagaattcggtgggcttacataaggtggatgttaaccttcctacttcagaaggaaactcttttcagatgttaaaggttatgtaactgtattggcttttccttttagttcttttggaagctttgtccagtttgaaatgtgacaaaaatgatacnggtgtaaaana

SEQ ID NO: 5724 - DNA, 177 bp, Glycine max
  unsure (1)..(177): unsure at all n locations; Clone ID: 701144806H1
ggaagaagangnagaagangatggcnttgggtgttcctgctacttccccttgncntacgtggcnccacgttctggcacttgttagncagcatacttggtcgtnctctgtggtcctcaattttaggggtggctngncnngggattcagataacagggaccnacaanttaannntnnng

SEQ ID NO: 5725 - DNA, 252 bp, Glycine max
  unsure (1)..(252): unsure at all n locations; Clone ID: 701144807H1
gaggaaagtgagtgagagaaagagatcagatagcagantggcttctactncaatgtntcttgacacnancatgactcttaagcnccncngannagatgaanatcanaacgncatcatggttagcannaagcctaaccagcttgtttgcaaggcacagaagcaagaggatattgatgtcagcccaatctctcgncggttagctctaancgtgactcattggtgctgctgctgttggctccaaagtccaacctg

SEQ ID NO: 5726 - DNA, 246 bp, Glycine max
  unsure (1)..(246): unsure at all n locations; Clone ID: 701144810H1
ggcagcatcgtagagaaataagggaaaaatggtgtcgctgaaactgcagaagcgcctctccggcaagcgtgctcaagtgcggcagaggaaaggtttggcttgaccccaatgaagtcaacgaaatctccatggccaattctcggcaaaacatcaggaagttggttaaggntgggtttatcatcaggaagccaaccaagattcactcccgctcacgtgctcgtaggatgaaggaggcaaagaggaagg

SEQ ID NO: 5727 - DNA, 250 bp, Glycine max
  unsure (1)..(250): unsure at all n locations; Clone ID: 701144812H1
cctnggctatttcaaatagtgactcagagtgggaatagacatattaaagtatcaataaccctaccttgtacaatgacataataaattatttaaacgggctatttcaaatagtgaatagagtgggantagacatattaangtatcaataaccctaccttgtactatgactcataaattatttaaacatagaaacaataagggaaagctaccactagggtaagcaatgaaagctcaaaagaaggcccgcgag

SEQ ID NO: 5728 - DNA, 258 bp, Glycine max
  unsure (1)..(258): unsure at all n locations; Clone ID: 701144815H1
cttcccgttaacaataaganaaatgtcacaaccatattacagtttctacagattacattagcctgcaatggctgcaactgtaacttgtntggctgccaatgtcaaattccactcccaccagagccatgacaataaaacaaaagagcatcccacnaattacattgcaggatnctcnnggcataatcaacaananacccanggnaatccaaatataagnngaacaagaangngggttttntttgcgngcagggggttaaa

SEQ ID NO: 5729 - DNA, 117 bp, Glycine max
  unsure (1)..(117): unsure at all n locations; Clone ID: 701144820H1
gggatagtagttttactggtacaaatttgagtgtatgcgagaaaagagaaaactcagtgcgagaganatttctnccaccgtancncatnatcnttaaaatgccaacaatggatgtgt

SEQ ID NO: 5730 - DNA, 107 bp, Glycine max
  unsure (1)..(107): unsure at all n locations; Clone ID: 701144821H1
cagaccttgtcaatgctctnaagagcaagatnanagagtttggcnggacnacactcggntattctagagtctctgncgcccaatgtccgaaagcgtgttgaggttct

SEQ ID NO: 5731 - DNA, 250 bp, Glycine max
  unsure (1)..(250): unsure at all n locations; Clone ID: 701144822H1
ggagcgcagtcgaagatctagctagaggcagagaacgttctcttctccctgatcctctggaaagttcttagccgatcagcgancttctacgctttggtggccagagntacggtggtgctggcggagttcagcgccgtcaccggcaacaccggcgccgtctcccgccgcattcttgagaagcttccggcggagtccgactccaggctcngcttctctcaggatngntacatcttcganatactcgatngga

SEQ ID NO: 5732 - DNA, 112 bp, Glycine max
  unsure (1)..(112): unsure at all n locations; Clone ID: 701144823H1
catcccacaaattacaattgcaggatactcttgcataatcaacaacacacccaaggtaatccaaaatataaccnannaaaanaannacggatnttcntttccggncncggng

SEQ ID NO: 5733 - DNA, 130 bp, Glycine max
  Clone ID: 701144826H1
gggagcagatgaagttatgagtgatgatgatattgacgggaaaacatgtcctatcttatgtttcttccctttgagttgagaattccttgttgatcactcactcacacccatctgtttcttgcttcccaac

SEQ ID NO: 5734 - DNA, 251 bp, Glycine max
  unsure (1)..(251): unsure at all n locations; Clone ID: 701144828H1
gatagtaagtcattnnntganagtcattggaactgcacatgggaaacctgactttggaaatggttactcaaaaggcgcaagagaaaaaggcacaagctggaaantgggctgaaccnccngtggaaaccattaaaactanatgggtcccagctgtaaaagaacagtggtctgtggtgaagacanatgctgaaacctcatgtgcaattattgaccacgaaaactgttgangtttacgaggcatcaaagaatgc

SEQ ID NO: 5735 - DNA, 251 bp, Glycine max
  unsure (1)..(251): unsure at all n locations; Clone ID: 701144830H1
gctagtttttcgctactgcgactgcgcttcacgatgggtgcttacaagtatgtttcggagctctggcgcaagcngcagtctgatgttatgagattcttgcagcgggtgaggtgctgggagtaccgccagcaaccttctattgtccgtttgacaaggtctactcgcccagacaaggctcgccgcttgggtttcaaggctaagcagggttatgtgatttaccgtgttcgtgtacgaaggggtggccggaagaa

SEQ ID NO: 5736 - DNA, 260 bp, Glycine max
  unsure (1)..(260): unsure at all n locations; Clone ID: 701144831H1
gacaacaattcaagcatagaagtaacctctcttttcttcacaagctcaaatcaaagagtgagtagtacttcaaaaaaatttaaacatgtctactacacacttttcccttctagccatttacctcctcctttcactaaattctcttgttggcacaaccatgggtggacgantcattcccccaagtgctccaagcacagttacaagaccactagtttcatcagaagttgaaaactacgtgaagccacagctgaatcacaagc

SEQ ID NO: 5737 - DNA, 50 bp, Glycine max
  unsure (1)..(50): unsure at all n locations; Clone ID: 701144834H1
gnctanaaatcagtntttnacttgaattntactttcatncctatactctg

SEQ ID NO: 5738 - DNA, 243 bp, Glycine max
  unsure (1)..(243): unsure at all n locations; Clone ID: 701144835H1
gattagaagattcctgcgtgcncgtgatttagatgtagagaaggctcggcaatgctcctcaagtacttgaaatggagaaattcatttgttccaaatggctctgtatctgtgtcagatgttcctaacgaacttgcacaagataaggngttcatgcanggacacgacaagataggtcgaccnatacttatggtctncggtggaagacnttttgcagaacaaggatggtcttgatgaattcaagcg

SEQ ID NO: 5739 - DNA, 269 bp, Glycine max
  unsure (1)..(269): unsure at all n locations; Clone ID: 701144838H1
attgaggatgatactaaaacacagctaaagtatatgagatgtcaatttcatgagaattcagtcagagaaaancngtttctattcaggcaacagtgatgctttcngatggagggagcacattggatttgggatattttgatgtaactaaagctcccaaaagtaaatgggagcataatggntatcatgggaagangnanaccngggnaanggacgntgggctaantaaatgggttngngnancnatcctagaatnngtnggggaccctttt

SEQ ID NO: 5740 - DNA, 248 bp, Glycine max
  unsure (1)..(248): unsure at all n locations; Clone ID: 701144850H1
agctatggtagattatacttggtctgttggggatagggttgntgcatgcagtgaagacagttggcaggaaggagttattacagatcagaacaagaaagataaaacattaactgttcacttccctgtcagtggaaaaacaaaacttgtcagagcttggcatctacgtccatcccgtttttggaaggatgggaaatggattgagtatcccaaggttggaaccggtgacagttctacccatgagggtgata

SEQ ID NO: 5741 - DNA, 252 bp, Glycine max
  unsure (1)..(252): unsure at all n locations; Clone ID: 701144853H1
ggggtgccattgttgctgtcatcatccgcagctgctgttattcgcaccgcaaacaaacagtgagccatggccgtcggaaagaacaagcgcatctccaaagggaaaaagggtggcaagaagaaggcagctgntccctttgccaagaaaggattggtcngacattanggncccttctctttttcaagtnnanaaatgtnggcnaaancccgcgtcttctcgtcacgcngggtacccaagaattntttctgangg

SEQ ID NO: 5742 - DNA, 224 bp, Glycine max
  unsure (1)..(224): unsure at all n locations; Clone ID: 701144854H1
gggttcacatcantnttgtggtcattngccatgtcgantctgggaaatccactaccactggtcacctgatttncaagcttggaggcattgacaagcgtgttattgagaggtttgagaaggaagctgctgagatgcnacaagaggtctttcaagtatgcctgggtgctgggacaanacttaaggctgagcntgaaagaggaatcaccattgatattgcttngtgg

SEQ ID NO: 5743 - DNA, 250 bp, Glycine max
  unsure (1)..(250): unsure at all n locations; Clone ID: 701144856H1
cctgtgctgtgtctttgacatccgtaataangtaaggtcactcaggctcccatacatgcagcaccagaatcagaaatttccatgccccaaacaactccaattctccactccaatcattgacacgtggtaaatcacggaggatgatttcgaaacctatatcagcggctcttcccgctccaccgccattgacctcanagaaaacaangtgaaacaggttttagaggaggcnccccagaagtggggtcaaatt

SEQ ID NO: 5744 - DNA, 246 bp, Glycine max
  unsure (1)..(246): unsure at all n locations; Clone ID: 701144857H1
tcgaattgagtgagctccgccttgctcacaatgagattaantctctcccagcggaattaaagcttaattcaaagctccggagtttagatttggggaacaatgtgatcacgaggtggtcagaactaaaggtcctcgaattgctcacgaatcttagaaatctaatctacaaggaaatcctgctgccacagtcaataaagttatgagaaagattaagaaagcatgccaaaattacagatattcngnntt

SEQ ID NO: 5745 - DNA, 246 bp, Glycine max
  Clone ID: 701144861H1
gggctatgtgatacatattgaaattctttagttgtaactgacaaagttttctgagaaaataaggattattattgagagaatggctggctcatcggaagagggacaagtcattagctgccacaccgttgaagaatggaacgatcaactccagaagggcaacgaatccaagaaactcattgttgtggattttactgcttcttggtgtggaccatgccgtttcattgcaccatcttggctgagctggct

SEQ ID NO: 5746 - DNA, 74 bp, Glycine max
  unsure (1)..(74): unsure at all n locations; Clone ID: 701144862H1
ggaggtgaggtancnnagagagtgatacaatacagagtgcgttgttgctaccttacgaanacaaacntcnnngt

SEQ ID NO: 5747 - DNA, 245 bp, Glycine max
  unsure (1)..(245): unsure at all n locations; Clone ID: 701144864H1
gacacatacatcatcaaaaaacacanacgacanactcccatacacacacgttgtctcgnacacattccttcattccgnagcagnaaacatctttaccttaaagacaacatggccgatgncgaggatattcaacccctcgtttgcganaatnccacggaatggncaaggctggttttgccggagatgatgcgccnanggggtgttacccagcattgtggggcgtccacgtcacagggagtgatggt

SEQ ID NO: 5748 - DNA, 116 bp, Glycine max
  unsure (1)..(116): unsure at all n locations; Clone ID: 701144865H1
gatcgaagcaaaaantgncaaacccaaagtgcttctactcctctgtacnttntctcactncngctatcnttttggactagtggcactgctgcaagtgcaactccaagaagcgcagt

SEQ ID NO: 5749 - DNA, 240 bp, Glycine max
  unsure (1)..(240): unsure at all n locations; Clone ID: 701144866H1
ggcgcattnaangaanattagggnttgtagtgtagcaggaagaagcagnaatggcgcngaagataanacgtaaggttagcagaaagccnggattgaganggggaatnggaaagtactcgaggtngcagatgtaccataagaggggcatttgggctatcaanggcnaaaaagggtggggttncctngganaaganntaaantnaaangtaaaaggcntgggaaaaancnnccaaatttgnt

SEQ ID NO: 5750 - DNA, 189 bp, Glycine max
  unsure (1)..(189): unsure at all n locations; Clone ID: 701144867H1
gatcgagtctttanctcctttcactagcaaaaaagcattcaattaagatatttgcttggtgcagaatttacttgcacgtacataatatatggatagtacttctttattatttttggcatcacaaaatataagtganagaagtagtgtcattcattangcatggttataccnattnctatggagtacaaa

SEQ ID NO: 5751 - DNA, 117 bp, Glycine max
  unsure (1)..(117): unsure at all n locations; Clone ID: 701144872H1
gggagggcgcatgtgtntgtagcgtgcacccttccacatngctntctcgttctcgnnctctctacgagttnatccttccnttttactcgcanaaacgaggtgcttcagatttgctca

SEQ ID NO: 5752 - DNA, 244 bp, Glycine max
  unsure (1)..(244): unsure at all n locations; Clone ID: 701144877H1
ggtgttaagnnatttaagtgaggagctagagaatgatgatgaagtctgctatgtgtgcagtggtggttgtagcacttcttcttctggcggnggtggggcccatggctgaggctgtgacatgcaccccaacagagttgagtccgtgtcttccagcaatcacttccggtgctaaaccttccatgcttgttgcacgaagctgaagcagcaaaaaccatgcttaatgtggctacctnaaaancgctaa

SEQ ID NO: 5753 - DNA, 242 bp, Glycine max
  unsure (1)..(242): unsure at all n locations; Clone ID: 701144878H1
tgtccatntaagtcttacttagttcaaacacgattttgtnacgtgtgatttctagaaagnantatnatttantattatnattantatatgatattgtntaaaggntttgcctgtntgtatatttaaattaaattgnatngnaaaaaactgaaaactcnnctcaaatatgtgtaggcgttggtgttaattaaaaaagtctttgaaaagaaggtgccaagttaaaagtgtggatcangagccac

SEQ ID NO: 5754 - DNA, 245 bp, Glycine max
  unsure (1)..(245): unsure at all n locations; Clone ID: 701144879H1
ggcacaagtgagtttgttgatcgagataactagaaacagtgtgatgaaaatgaaggtccttgttttcttcgttgctacaattttggtagcatggcaatgccatgcgtnacgatatgttccctctccgaatgaacactggctatggtgcccgtactccggaggtgaaatgcgcaagttggaggcttgctgtggaagcacacaacatctttggcttnnagaccattctgaagantgcttgaaagcac

SEQ ID NO: 5755 - DNA, 245 bp, Glycine max
  unsure (1)..(245): unsure at all n locations; Clone ID: 701144881H1
ggggcgaggtagccagagagtgatacaatacagagtgcgttgttgctccttcgccacaactccctgccaacatgggtatctccagagattcnatgcacaagaggcgtgccactggtggcaagaagaaggcatggaggaagaagagaaagtatgagcttggtcgccagcctgctagccactaagctgtcaaggcaacaggncngtccgggaggtccgggttaacngggaaanttaaattggggncc

SEQ ID NO: 5756 - DNA, 239 bp, Glycine max
  unsure (1)..(239): unsure at all n locations; Clone ID: 701144882H1
ggcacaagtgagnttgttgatcgagataactagaaacagtgtgatgacaatgaaggtcctgttttcancgntgctacaattttngtagcatggcaatgccatgcgtacgatatgttcccnctccgaatgaacactggctanggtgcccgtacttcggaggtgaaatgcgcaagttggaggcttgctgtggaagcacacaacatctntngctttgagancattcctgaagagtgcgttgc

SEQ ID NO: 5757 - DNA, 65 bp, Glycine max
  unsure (1)..(65): unsure at all n locations; Clone ID: 701144884H1
aacaaagggaatcaaaattcagagatgaacacccnnnnactgnggataaagcaaacgacaaaaaa

SEQ ID NO: 5758 - DNA, 244 bp, Glycine max
  unsure (1)..(244): unsure at all n locations; Clone ID: 701144885H1
aaagctgtgcagnaattacttgatgagcatcgcaaccaagctgatccttttaatcaaattgagcaaggatggtgtgatattcctggaactgtggatgaagttaaagcaaagctacaaatgaggcaagnaggagccatcaagngggatagagcantggcatactctctctccacacagtcaagaatnccagctagtccaaacccaaagcnatagggcaatgantnccctnaangaanaanancta

SEQ ID NO: 5759 - DNA, 221 bp, Glycine max
  unsure (1)..(221): unsure at all n locations; Clone ID: 701144886H1
ggcacaagtttanttgagatagctagaagcactaagatgaaaatgaaagtgcttgttttgtttgttgctacagttttggtagcatatgaatgccatggctcagactaccagaagttcccnctccaaatganaactgggtttggtgggcaatncagcaatgaggtggcatgtgccagttggaggcttggcgtggaagcaaacaacgtngtcaagtggcaaac

SEQ ID NO: 5760 - DNA, 220 bp, Glycine max
  unsure (1)..(220): unsure at all n locations; Clone ID: 701144887H1
tgggaagaataggaatagcattgggaatcaatcagcgaccnaagcaagacctcagagaacgtcgatccacgccgtcacgacatgggtgaggcgacagccncccaaaggtgaaggcttttctcgccgtcgtttccggcatggcggctcncgtgctccttcgcttcatcgtccacgatcatgacaacctcttcgtcgctgccgaggccgtccactccctcgg

SEQ ID NO: 5761 - DNA, 242 bp, Glycine max
  unsure (1)..(242): unsure at all n locations; Clone ID: 701144889H1
ttactgtagagtgatgcttattacgaaagtgaaaccacaaganttgtacganatgtaaaatggacggtgaatgttgtaatttttaanataaatattgattannatttttttaaaacatgtnatgtaggatttcgtggaaatcaactgtcgtgtgataataacgaaatccattttcttgacaaacaacattttccatactttttcacaacttaagtataagggtgcatttagaatagttgatt

SEQ ID NO: 5762 - DNA, 242 bp, Glycine max
  unsure (1)..(242): unsure at all n locations; Clone ID: 701144891H1
gggaagatatattattgtgattgtgaacaaaaaagtgtagtgggaaatggcaggtgcgggtgcaggaggagggtatggggacgcgaaccagaggatagactacgtgttcaaggtggtgctgataggggactcggcggtggggaagtcgcagatatcagctcggttcgcgaggnacgagttcagcttggactccccgtccaccatcggtgttgaatttcagacgaggactttggttatcgatc

SEQ ID NO: 5763 - DNA, 253 bp, Glycine max
  Clone ID: 701144893H1
tgattgcaaaggaaaaacgtgaaactggaggcaatgaggttgttggaagacgagcagaagcagaggactgcgatggaattgcttgaacagtacatgcaattcaaacaagaggcagaaaaagatggcaagaagaacaagaaagagaaggatccattgaacccaaagcaccccatgtcagcttatttcttgttcataatgataggcgagcagctcttgctgccgagaacaagaatttcttggaggttccaaaaat

SEQ ID NO: 5764 - DNA, 250 bp, Glycine max
  unsure (1)..(250): unsure at all n locations; Clone ID: 701144894H1
ggtatcacaacacaagttgaaacacaaagaagaaaaaatgggttcctctttgtggacttgnctgattttnttatcacttgcttctgcttccttcgccgccaacccaagaacaccaattgatgtgccatttggcagaaactatgtgcctacttgggcctttgatcacatcaaatacctcaatggtggttctgagattcagcttcatcttgataagtacactggtactggcttccaatccaaaggatcctac

SEQ ID NO: 5765 - DNA, 227 bp, Glycine max
  unsure (1)..(227): unsure at all n locations; Clone ID: 701144895H1
gggagacagaanagagagaagttttcagttncagaaagaaagcaaaagcaatagcaatgggttggatcggtgagactgttgattccatcaaatctcttcagatccgccaggtcctcacccaggctgtgagcctaggcatgattgttacgtctgcactgataatatggaaggcttgatgtgcgttaactggcatgaatctccgntgtngttgtcccttncnggaancc

SEQ ID NO: 5766 - DNA, 289 bp, Glycine max
  unsure (1)..(289): unsure at all n locations; Clone ID: 701144901H1
ggtgttaagaaatttaagtgaggagctagagaatgatgatgaagtctgntatgtgtgcagtggtggttgtagcacttcttcttctggcggaggtggggcccatggctgatgctgtgacatgcaccccaacagagttgagtccgtgtcttccagcaatcacttccggtgctaaaccttccaatgctgttgcacgaagctgaagcagcaanaaccatgcttatgnggctacctcaaaaacgctagttgaagcattatgttaactctcctaatgcccgaaaaaccgttgctt

SEQ ID NO: 5767 - DNA, 269 bp, Glycine max
  unsure (1)..(269): unsure at all n locations; Clone ID: 701144903H1
cctgatacttcgtccttcactgcgtttctctattctctgttgtctacttcggattccggggataaagttggtgaagctgataagaagaatgatgatgaggtggcaggtgatgactcttactatcagactcagccacgaaggaaagttttgttgtgaagnaaagtttgttttccaggagcaaacattcacttggtagggccatcaccaaatgggtggatttagcaacagggatagcaattacaccgacgaaggtggcgtgagatgaagcc

SEQ ID NO: 5768 - DNA, 276 bp, Glycine max
  Clone ID: 701144904H1
aaagagacccggaaagggtgggaaccgcttttggaaatccattggggcttggatttaagactcccagggaagccatcgaaggaacctacattgacaagaagtgccccttcactggcaatgtttccatccgtggccgtatcttggctggaacatgtcacagtgctaagatgaacaggactattattgttaggaggaattatctccattttatcaagaagtaccagaggtacgagaaaaggcactccaacattcctgctcatatatcacctgctttcc

SEQ ID NO: 5769 - DNA, 276 bp, Glycine max
  unsure (1)..(276): unsure at all n locations; Clone ID: 701144905H1
ggggtttgtctgtgagctttctcagcataatcttnctaccaatagttggaaatgcagctgancatgcaggagcaatcatatttnctttcaagaacaagctgganatttcattgggtgttgcattgggntcagcaactcagattgccatgtttgtggtcncattatgtgtaatcgttgcttggataatgggtatcgagatggacctgaacttcaacctcctagagacaggttcccttgcgttggcaataatagtcacatgcttcncntnacaggatg

SEQ ID NO: 5770 - DNA, 276 bp, Glycine max
  Clone ID: 701144909H1
gacggggtgttaattatggtggtcagctaccagtagatgcggtttccagacctggacctgagacaggatctctacctccagatgcttcaagtactttatatgttgaaggtctcccttctgatagcaccagaagggaagtagctcatattttccgcccttttgttggatatagagaagttagacttgtgagcaaagaatcgaaacatcgtggtggagatcctcattacctttgttttgtggacttgcaaatccagcttgtgcagcaaccgctatgag

SEQ ID NO: 5771 - DNA, 274 bp, Glycine max
  unsure (1)..(274): unsure at all n locations; Clone ID: 701144910H1
gatctatatttccagaaaaatcaacaagtcagctcctcaacagggaagagtggagagttaagatgactcccatccaagtcttgttcttaacatgtcaaccagtagctcacattacagctaaatgtatatctgaagcagatgattacccacccgagattcctggtcatatcaccaaattcttcgagattcaaattgtcctcgaaattnnncggaggatatcataatggatttgctgttggactgttagcggttataactcgtccagaggnacaag

SEQ ID NO: 5772 - DNA, 203 bp, Glycine max
  unsure (1)..(203): unsure at all n locations; Clone ID: 701144911H1
gaggaaggacaacctgtgttagtattggaagcaatgaagatggagcatgttgtaaaggcaccttcttctggctatgtgcatgggcttcaacttatggtgggtgaacaggtttcagatggcagtgttcttttcagtgtaaaggatcaataaaatcgcacttgacagctttacgccaagactttggcaaaggggacaatatcntg

SEQ ID NO: 5773 - DNA, 274 bp, Glycine max
  Clone ID: 701144912H1
ggcatcaattcaaaatatatcatcaattataagcatgggtttgtggaacacaacgaatgcagtgtcttgccgctttcacaagtttggtgatgaccaaaagaatctggtcttccaaggtgatgccacgtcttcttccaggggcatagaactcacaaagttagacggtggaggaaaaccagtgggtggcagtgtggggagagtgttatactcctctccagtgcacctttgggaaagctctacagtggtcgcaagtttgaaaccggcttcacctttc

SEQ ID NO: 5774 - DNA, 282 bp, Glycine max
  unsure (1)..(282): unsure at all n locations; Clone ID: 701144913H1
accatatgtttgtngatgagatctttatgcaccatttnctcttatctagtcnngtctagacccttaatcctnaagaagcttattggttttataccccctnctacaccacctgtgacttgacaccaaatggccttcctttacctttaaagtcaccacgaatgatgagangtgccatacaacttattttttcacaactggcctcattggaataggacaacaggggaagctcattcttngtgacccccatgaattggggcgtgcttccattatcaagtaagaaat

SEQ ID NO: 5775 - DNA, 281 bp, Glycine max
  unsure (1)..(281): unsure at all n locations; Clone ID: 701144915H1
gcacttcaaagtggagaaaaacacacacggttggttcattctctctcnattctttttccnccaaaaagttgaaaaagaataaagggggaacaatcgngtgaagttgttgctcttcaatagtaaacttacctatggaggagggaagggttgtgagtgagtacacaaaagatggaactgtggatcttaaagggaaacccattctcaaatccaaaagtggtggttggaaagcatgctcctttgttgttgtgtacgagatatttgaaagaatggcttattatgga

SEQ ID NO: 5776 - DNA, 273 bp, Glycine max
  unsure (1)..(273): unsure at all n locations; Clone ID: 701144917H1
caggtcggnccaattgatacgaatagcgnnactttattctangctaaggaactaaganaagctaattgaggtaattgttctcttctnttcttatttcctcgattcctnatttatagattgtnttanaaaatatcctataatttgttataacaaaattgtgaatattgtcactaatggtaatgataataaaacgtgcaaaatgcttgggttggcatccgttgaatagcaaaatgcttgtgttggtatccgctgaattgttatcagacaccttaa

SEQ ID NO: 5777 - DNA, 274 bp, Glycine max
  Clone ID: 701144918H1
ggcgacggagaggatgaaagaaaggattccctgtgcacaccacacggtggcgtcgccgcaacccactgatgatctgacgatgggtttctttgacacagtggtttcacgtgttggtggcaacgggttctggtttgagggtttgacggtggtgagtggcggagttgtgacgtgtgcgaaggggaacaagaaaaggggaagaaagcatgcgtcgtcgccgccaggggccgtttccgacggtgtcacacggttcaacacagcgacgaaggtttcacat

SEQ ID NO: 5778 - DNA, 254 bp, Glycine max
  unsure (1)..(254): unsure at all n locations; Clone ID: 701144920H1
ggcacaagtgagantgttgatcgagataactagaaacagtgtgatgaaaatgaaggtccttgttttcttcgttgctacaattttggtagcatggcaatgccatgcgtacgatatgttccctctccgaatgaacactggctatggtgcccgtactccggaggtgaaatgcgcaagttggaggcttgctgtggaagcacacaacatctttggctttgagaccatcctgaagagtgcgttgaagcaacaaaggaata

SEQ ID NO: 5779 - DNA, 272 bp, Glycine max
  unsure (1)..(272): unsure at all n locations; Clone ID: 701144924H1
gggcgcacccagagaggaggaagctttgagagagagagggaggagggagagtgttgacgctccatcaagatgggtatttctagggattccatgcacaagaggcgtnccactggtggcaagaagaaggcatggagaaagaagagaaagtatgagcttgggcgtcaggccgcaaacaccaagttatcaagcaacaaaactatccggaggattcgtgttcgaggtggcaatgttaatggagggcattgaggttggataccggcattactcatggg

SEQ ID NO: 5780 - DNA, 218 bp, Glycine max
  Clone ID: 701144925H1
ctctcacacccccaaaagcttcttctgttccgtgcaggcaatttttctttggtttggttgcatcttttgatctgatcaacaagtttgagaattcagtttgggaaaggccattcctctttagtacaaaacagattgagggtgcctttgtgctgatggccactaatgaaaatcttccaccaaatgttaattaagcaacttgccaaggagttgaaaagtct

SEQ ID NO: 5781 - DNA, 250 bp, Glycine max
  unsure (1)..(250): unsure at all n locations; Clone ID: 701144928H1
ggagaggagtatggagagaagagtgaagaangcaaatcgcgaagactagatctgatctgagagaatggctcctcngtctagcagcaaggacgcccaagaccttttccgcgctctttggtctgcttatgctgcaacccccnataatctcaagatcattgatctctatgtcatctatgccgtattcaccgctttcatccaggttgtttacatggctttggttggatcattccattaactccttcctatcagg

SEQ ID NO: 5782 - DNA, 281 bp, Glycine max
  unsure (1)..(281): unsure at all n locations; Clone ID: 701144929H1
ggttgcagaggaaccgtgttctctaatcttgtaattttctgtgtcgcntcgtggttcattcttctcgttcttgtgatctgttctattttggagtacttacaacactcctttgcaagtttaattaattaaagaggctaatcaattttcaattggactgcagcgaatggctgaggagggttgcagggttactctaaatgtttatgacttgagccaaggactagcacggcagctttcaatgtcctttntggggaaagctatgaaggcatatggcacacagggag

SEQ ID NO: 5783 - DNA, 269 bp, Glycine max
  Clone ID: 701144930H1
caaaatgctgcttgaaaattatgaggagtatgctagacatgctaggctttacaccggaatccatgcaaaaccaaagcccaaattcaagagcggagtatatctgaatcaacaactgctctgaatgtggatcagacaaacacctctgtgattagtgctgacatcaaaaccacaccggcgagtgctgcattgccagcagccaccgcaacaagaggaaataatcaggaacaggcagcagcggctgttaatggttctaatgctgccgctacagt

SEQ ID NO: 5784 - DNA, 281 bp, Glycine max
  unsure (1)..(281): unsure at all n locations; Clone ID: 701144931H1
cgagcgagggagttgaagcttacatttggttactggcaaaggcttatgttgttgtgaatgattcgtgctaccatcaactcgtcagccactggctaaacactcatgcggttgttgagccattcgtcatagcaacaaacaggcatctgagcgtggttcaccctatttacaaacttttgtttcctcactatcgtgacacnatgaacattnnntcacttgcccgcaaatccttggtcaatgcagacggtattatagagaaaacatcttgtggggtaggtactctt

SEQ ID NO: 5785 - DNA, 82 bp, Glycine max
  Clone ID: 701144932H1
tgctgtagcggagtgaggaacattctgggttctgccagcaccacctttgacaaacaaaccgtgtgcaaatgtcttcagcaag

SEQ ID NO: 5786 - DNA, 276 bp, Glycine max
  unsure (1)..(276): unsure at all n locations; Clone ID: 701144933H1
aanctcagatacatatctggcatgacaaaatcanagttntnacagaatacaaatgtaggtngtagaatacctcttcattaagcatggggctttgcacatttgcatcattaaggtcctttgcttgatccatcatccccttcatcatcactatattgcccaagtaacagcaggggattctgtggttgttgacctgaagacaagaagccagcatgttagaaactacagaaatgttggattattgtccatgcaatatcaagaatattanaaaagaatgcc

SEQ ID NO: 5787 - DNA, 285 bp, Glycine max
  Clone ID: 701144934H1
gtttatttaatttgttgcaatttaagaaacaatgcaggaatatttggaacccctttcaagctttctgaggacaatattgaactgcaatttgccacaaatcacatgggtcattttcttttaacaaatctgttgttggatactataaagagaacaacgcatgaaagtaagaaagaaggaagaattgttaatatctcctctagtggtcatcaatggctcaactatcgtggaggaatcctttttgataaaattaacgatgaatccagttatcagaattctgcgcgctgg

SEQ ID NO: 5788 - DNA, 81 bp, Glycine max
  unsure (1)..(81): unsure at all n locations; Clone ID: 701144935H1
ggatacggtatatttgcnaanantggtacttcctatttagagtttntgtaagagggtcgtcntttncactcggacagtcgc

SEQ ID NO: 5789 - DNA, 272 bp, Glycine max
  unsure (1)..(272): unsure at all n locations; Clone ID: 701144936H1
caagttagtagatatgtaactgaaaaagtttcaaaaanatttcaactttcttcctctcgagtccgactttcttcttgacacttcctgtttatttgatgtgcatcctctttcttcccctcgggtctgacccatattctgtgtcgacacctgagttgtgtcgtgtcaacacgggtatggtggggggaataggcaagtctgagagcatcacagctggtagcagtgtatggctcacatggccaacccaactttctcgctttcctctttcactgcca

SEQ ID NO: 5790 - DNA, 228 bp, Glycine max
  unsure (1)..(228): unsure at all n locations; Clone ID: 701144937H1
atgctaatatttctaactaccatanataatactgcatagttatgtttagtgcttttcagtcattgaccattgatgtnatttagtttccattatatgctaatttccatatattatgtgttttttcctgattgtatttttcgtagattntttactgttccttggtgtaatattctgctaggcaatgaattgcacatttcaatcatatccaaacgcaccataagtgccaaa

SEQ ID NO: 5791 - DNA, 284 bp, Glycine max
  unsure (1)..(284): unsure at all n locations; Clone ID: 701144938H1
ggccgcgaaaacagaacagggactcactctggcagcggcactctcggtggctataatctttctgtggtgagttgtcaagatgtacacatcaaggaagaaaatccacaaggataaggatgctgagccaactgaatttgaggaatcagtcggacaggcattgtttgatctggaaaataccaacaatgagctgaaaagtgatctgaaagatttatacataaactcagctgtccaaattgatgtttctgggaaccgcnaggctgtggttatccatgtcccctacagat

SEQ ID NO: 5792 - DNA, 290 bp, Glycine max
  Clone ID: 701144939H1
tattggttaccacaaatactaaacctagtaaagagattgtttcaaatttagcgagagcagttcagggccaggtggtggagaaagtaggaagatctgttttcaagggcaatacaattgcagataatctcctgatcttatcttgtgaagaagattatgcctcttgtgtgccttttcttgaaaagggggcaatggtgtacagttcagaactgttgctgaatggcatagttactcagaagctggagtatcaaagttgcaggcatcgactttttgcagacaatgtgaagaaaact

SEQ ID NO: 5793 - DNA, 272 bp, Glycine max
  Clone ID: 701144940H1
gcacaagtgagtttgttgatcgagataactagaaacagtgtgatgaaaatgaaggtccttgttttcttcgttgctacaattttggtagcatggcaatgtcatgcgtacgatatgttccctctccgaatgaacactggctatggtgcccgtactccggaggtgaaatgcgcaagttggaggcttgctgtggaagcacacaacatctttggctttgagaccattcctgaagagtgcgttgaagcaacaaaggaatacatccatggcgaacaata

SEQ ID NO: 5794 - DNA, 255 bp, Glycine max
  unsure (1)..(255): unsure at all n locations; Clone ID: 701144941H1
ggataccaaaaacacaacacaagcncaagtgaaantgaganaaaataaaaatcaaagagcataatgtcagggatcattcacaagattggggagacccttcatgtgggagggcacaagaaggaggaggagcataagggtgagcaccatgctggagaatacaaaggggagcaccatggtgaacacagtagtgagtacaaaggagagcatcatggtgaacacaaagctggagagtaccatggtgagcacaagccagag

SEQ ID NO: 5795 - DNA, 276 bp, Glycine max
  unsure (1)..(276): unsure at all n locations; Clone ID: 701144942H1
ggaccacattcccaaaacacaaacacatacattgtagtatcacttttgtctcggaatttgttcttttgagttatggcaagcttaaaggttgcatgtgtggttttgatgtgcatggctgtgatgagtgcaccaatgatggtgcaagccgtgtcatgcaatgatgtttctgtgaacctagcaccgtgcctatcttacctgatgcagggtggagatgttccagaatcgtgctgtagcggagtgaggaacatctgggttctgccagcaccactttgacna

SEQ ID NO: 5796 - DNA, 271 bp, Glycine max
  unsure (1)..(271): unsure at all n locations; Clone ID: 701144943H1
ggcagcgcttgatttgaggccaggcaagccccactcaaccaccacacctctcctcgttcacgctacccctttctgctcttcttctacctttcaagttttaaaagtataaagatggcagagacattcctatttacctcagagtcggtgaacgagggacaccctgacaagctctgcgaccaaatctccgatgctgtcctcgacgcttgcctcgagcaggacccagacagcaaattgcctgcgaaacatgcaacaaaaacaanttgtcanggnc

SEQ ID NO: 5797 - DNA, 259 bp, Glycine max
  unsure (1)..(259): unsure at all n locations; Clone ID: 701144944H1
tcacataaaactcctataanaagaataatcacaaaactccaaaaaatcaacaatgtgagacagcatcatacctagtttatagttcaatctatcatatctgtgttcactgcatacactaccttgttggcaataataagctgaattancagaactaattaatataacagaataaaatcaagcatcaaagagtgttaaacttaaacataagataacaccacagctcagttccccattctgtttaccctcataatcacagtgg

SEQ ID NO: 5798 - DNA, 156 bp, Glycine max
  unsure (1)..(156): unsure at all n locations; Clone ID: 701144945H1
ggaaggaaatcggtggacacaggtctaagttttctgaatttgtttaaagcggcggtgccgccgtgccggctctcantgtgaactgcacgtatctcttctctctcaggcctgcaccttcgtctccgccaacagttgttcganaccacacaacntang

SEQ ID NO: 5799 - DNA, 273 bp, Glycine max
  unsure (1)..(273): unsure at all n locations; Clone ID: 701144946H1
ggagttgttgtctatctcttcttctctttgtgttttggctgtggacgtaaaataatggctctgtcttttggttttgggctcttgnnnnnnnnnnnnnnnnnnnnnnnnntatgtgttctccctccatcagaaacccacactttcatganaaggccttctgcttcttctggtttgcgcatgatgcgtaccagtcgcatacctgttgcaccctttctcagtcttctaagccagcccgcaaaatccgtggtatcatgaaaccccgcaaagtctccc

SEQ ID NO: 5800 - DNA, 278 bp, Glycine max
  unsure (1)..(278): unsure at all n locations; Clone ID: 701144947H1
gcacaagtgagttngttgancgagataactagttacagtgtnatgaaaatgaaggtcctnttttcctcgcngctacnattttngtagnatggcaatgccatgcgtacgnnntgttccctctccggatgaacnntggcnanggtgcccgnnctccggaggtganatgcgctagntggaggcttgnnntggangcacanaacatctgtggctttgagacnatcctgaagagtgcgttgnngcaacaaaggactncatccgtngcgtncantatanatcag

SEQ ID NO: 5801 - DNA, 280 bp, Glycine max
  Clone ID: 701144948H1
atgactcaagtcttaacccaattagtgttccccgaagttggatctggaaccttgataggcgaacagtgtattttggaacctccataccatctatattcaaaggtttatcaacacgagaaattcaacaatgcttttggagaggatatgtctgcgtgcgtggatttgaccgggaaaagcgagcaccccgacctctgttgactagactacacttcccggttagcaggttgcctaagaatagggataagacccaacaagagtccgcatcggcaaactcacaagg

SEQ ID NO: 5802 - DNA, 262 bp, Glycine max
  Clone ID: 701144949H1
aatccaatccaattgaaagagacttcagtcattgatgccagtgccactccacctactactggtacaagggaagaaaccacccagaaagtaggcatctcacccagtaaaagggcagaaagaactacagtgaagaaaggctccatagctttgattgtgtgagtgaaagatacagcaaccttgccaagactaatgttggtcaagaggtttcccatgtgtgagccacagccagtggaaggattgctgcaaactgtgaaccatgatg

SEQ ID NO: 5803 - DNA, 280 bp, Glycine max
  unsure (1)..(280): unsure at all n locations; Clone ID: 701144950H1
caaagatagaagaagaaatactggaagcagaagaagaaccgcagtttcccgataacgagccacttatcgtgaganacgcgaacagaaggctaatgcaagatatggattgtggtgggttgtgcaagacgaggtgcagtgcacattcgaggcccaacttgtgcactagggcgnntggcacgtgctgtgtgaggtgcaagtgtgtnnnacctggtacatctggaatagggaactatgtggaacctgctacactgatatgaccacccatggcaacaagaccaat

SEQ ID NO: 5804 - DNA, 247 bp, Glycine max
  unsure (1)..(247): unsure at all n locations; Clone ID: 701144952H1
gggggngaagtagnattgtagncgcanactcagcagatcagatcctctgtcttcaattcaagttcaaggtatggctcaacaacagggggacgaaatggagtatgctgctgatgataatgaaatggcggaagtagaagatgncatgtatttcagtggtagagtgtttggtgattcagagtccgaatcagacgacgatgatgaatatgactccatggaaaatcggtgacagatacctctgctgcagaag

SEQ ID NO: 5805 - DNA, 270 bp, Glycine max
  unsure (1)..(270): unsure at all n locations; Clone ID: 701144956H1
gactacagccacttctatagcttcaatttataagaatggcactttctcctattcgnnnnnnnnnnnnnnnnnnnnnagctattgttgcattggctgtgttactgcttcttacagggacctcttcagctaacctctcaaagaacttctattccaagacatgtcccaacgttttcaacactgtaaaatctgtagttaaatctgctgttgtcagagaacctcgcattggggcatctattgttcgtctcttcttccatgactgctttgttcaag

SEQ ID NO: 5806 - DNA, 273 bp, Glycine max
  unsure (1)..(273): unsure at all n locations; Clone ID: 701144957H1
gatgacagaaaagtaaacagcatcgacttgaatttgagtgatgaatttgttgttgaagcttcactttggaaattttgaatgttacgagacacaagtttctccaacttgctgggtcccacacagtttcttcctntgtctatttccctcgcagatctcaaccaattcttatatataaacccctttcgagatctgcttcaagctctnnancccttcttccacttccaccctcctctcaggtttttgtggataagagtgagctataatggctgccag

SEQ ID NO: 5807 - DNA, 273 bp, Glycine max
  Clone ID: 701144962H1
ggcacaagtgagtttgttgatcgagataactagaaacagtgtgatgaaaatgaaggtccttgttttcttcgttgctacaattttggtagcatggcaatgccatgcgtacgatatgttccctctccgaatgaacactggctatggtgcccgtactccggaggtgaaatgcgcaagttggaggcttgctgtggaagcacacaacatctttggctttgagaccattcctgaagagtgcgttgaagcaacaaaggaatacatccatggcgaacaata

SEQ ID NO: 5808 - DNA, 277 bp, Glycine max
  Clone ID: 701144964H1
ggaagaagctgctagctattagctatgggctagaggaaagatccagatcaagaggatagagaacaacaccaaccgccaggtcacttactctaaacgacggaatggccttttcaagaaggccaacgagcttaccgttctctgcgatgccaaggtttctattattatgttctccagcactggaaaactccaccagtacatcagcccctccacctcaacaaagcatacttcgatcaataccagatgactctgggagttgatctctggaactctcattacg

SEQ ID NO: 5809 - DNA, 270 bp, Glycine max
  Clone ID: 701144965H1
ctcttaccatcatatttactcgtgctttattccttttttttcaactttaattaatacttttgttttttgtgctggagaaaaacagttctgtggggagggaatctaatttggtttttcatacatcaaactctaagattttttaaaaaagaagataaaaacttaattttgaacataagtaactgtactttatataaattaactcggtaaacattaaacttatttatgaaatgtctatgtaacaatatttattctgttttctatggcactcac

SEQ ID NO: 5810 - DNA, 269 bp, Glycine max
  unsure (1)..(269): unsure at all n locations; Clone ID: 701144967H1
gggagaacatcgacaaaaagataaagagtgaataattagcagctccttctagttccggtgtcggtgtgggtgtttgaatctggtgaaggatgtcaattgttccaatcaaccagggtgatgccaacggctcctaancccttcgcttcgtggggtcaattcgtggattttcctctccctccttccatctccggcttcttccccggcttggaattcggattcggattcggatcatccgtgaacacacgtgtggactggagggagactcccag

SEQ ID NO: 5811 - DNA, 267 bp, Glycine max
  unsure (1)..(267): unsure at all n locations; Clone ID: 701144971H1
ggatgaaaggtggtttttccactttataaatacccnattcttcagccactttgcttttattttctgatatatctccttcctgttctgctaagtggcnnnnnnnnnnnnnnnnnnnatttcaagggctgaaacatctatctttaactgtattctccctttgtttcctcaccagttgattcaggttgcaaacatggctttccagacccatccatgtcagctttctccacagaggaagatgggaagggggaagatgagatcaagaggatt

SEQ ID NO: 5812 - DNA, 270 bp, Glycine max
  unsure (1)..(270): unsure at all n locations; Clone ID: 701144972H1
ggtagagtgaagagaatggctcccaaggntttaacctttccggctgtgttaatatgcgtttcagcactgtcactgagtccttctgttgcgggggaagggcaaaataatggccttgttatgaacttctacaaggaatcatgccctcaggctgaagacatcatcacagaacaagtcaagcttctctacaagcgccacaagaacactgctttctcctggctcagacatccttccatgactgtgctgttcagagttgtgatgcttcactgttgc

SEQ ID NO: 5813 - DNA, 267 bp, Glycine max
  Clone ID: 701144973H1
gtagctgaagcatctgctagtaaagaacaagatacgaaagatgctgtaagcagcgatgcaaaggatgcacctgatactaaagcataaaaaattcgagaatggtgaacggtaacatagctttgactatgtaagggcaagacaagcatttctgaaaggttgcttaccataaatctttgcagggttaactgatggttcagtgaccctggatttttaacaagctagacatatgtgttggccatacataatacatttgagatggaagtgtta

SEQ ID NO: 5814 - DNA, 274 bp, Glycine max
  unsure (1)..(274): unsure at all n locations; Clone ID: 701144974H1
gggttangaaaccattgtcaccgacggcgatgacaatggtcaatagccgcttcctcactgtcttccccnnttctctcctacaccaaattctccaaccctactccgcgcttcacgaactcaaaaaattccatctttgccctctcgtgttcttctccgaagagcattccggtgacggagaaggaagtgctccaagccatagccgactntnacggcaagaacctcccatgcgtcagaacctacgacaccgacctgtctcagctcactctcgtcggaa

SEQ ID NO: 5815 - DNA, 291 bp, Glycine max
  unsure (1)..(291): unsure at all n locations; Clone ID: 701144975H1
aagcacntgtatgttcttttgctttgaatcccctgatccaattatactgcttcatccttaatgctatatgtctagtacctgcttctaaatttgtttatgcagtgaattctgatagttggttcancaccaattgaacttgcagttaagtttgttctgtgatatagtgaaggaagatttgtgttcactgtccctttatttgctgtctgggctgtaaaagctttcaagtgatttatgcaataactantaactatactatttggattgctgacattttcagagtttctagggtag

SEQ ID NO: 5816 - DNA, 273 bp, Glycine max
  unsure (1)..(273): unsure at all n locations; Clone ID: 701144977H1
ggtggtaggtgagttgggacttgtggcggcgagattgctgctgctccaaacgttacaggagancaaagccttctttgccgtgaattcggatcgagatcaatgggttcagcggagaaagagccactgttaacagcggagggaactcgatcaaactcnnagcacgagtcctcctcccatgggcaacttgagagaattctctccgacgacaccctacccttcctgcaaccgtgcgggatncgccacctggatcgagttgaagcctcctcttctctt

SEQ ID NO: 5817 - DNA, 276 bp, Glycine max
  unsure (1)..(276): unsure at all n locations; Clone ID: 701144978H1
ggttgtaaacatcccttctttcatctttcaactctctctctcnncccctcctttctctcacacacaaatgtctaaaataacaataacctctccaaaacactgtgctgacaaagaaggactaaaaatcaagaactacaagaagatctacttcactttctcagcatttttcatcacaatcctactactaatacttgttatatggctcatcctccaccctgcaaagcctcaattctccctcaaagaagtcgacatcttccaacttaacctttcagggcc

SEQ ID NO: 5818 - DNA, 285 bp, Glycine max
  unsure (1)..(285): unsure at all n locations; Clone ID: 701144979H1
gggtggtgagcgtgccaaaatctatgagaatggaaaccttctcacactctcccttgaacagagcctctggctctggctttcgttccaaaaaagagtacttgttcggaaaaattgacatgcagctcaagcttgtgcctggtaactctgctggaacggtaactgcctattatttatcttctctggggcctactcatgacgaaatagactttgagtttttgggtaacttgagtggtgatcctacactctccacacgaacgtattcanccaagggaaagggaacagaga

SEQ ID NO: 5819 - DNA, 173 bp, Glycine max
  Clone ID: 701144980H1
gggacacatcaacaagttcatctgccatcagctcttccagagcatgatttcttgaatgatttggagcctttaggatggatgcatactcaaccaaatgaacttcctcagttgtcgcctcaggatctcacttcacatgccaagatcctagagaacaataagcaatgggatgggga

SEQ ID NO: 5820 - DNA, 267 bp, Glycine max
  unsure (1)..(267): unsure at all n locations; Clone ID: 701144981H1
atcgaacagagagagagagaatggcagcacttggtgggaatcgtgatgtgacaggaagccagaacagcgttgagatcgatgctctagctcgctttgctgttgaagaacacaacaaaaaacagaatgcccttttggagtttgaaaaggnggtaactgcggaacagcaagtggtttctggtaccttgtacaccatcactttggaggcaaaagatggtgggcaaaagaaggtttatgaagccaaagtttgggagaagtctggttgaactt

SEQ ID NO: 5821 - DNA, 267 bp, Glycine max
  unsure (1)..(267): unsure at all n locations; Clone ID: 701144983H1
gatttacaattaaaaaataagaccagcttattttgactcgtgagtgtagaagacgaaaagagagtggagatnagagagaagtgagagtgtgagagggagcacagtgaagaagagaacgaaggaacgaagatggagactcctcctccgcaacaaggtatggtgaagaagaaggagacaaggggccgaaaacccaagccgaaagacgaacacgccaaggcgttgaaggaagggagaaaaacacagcaacaacaacatgatcagcagcac

SEQ ID NO: 5822 - DNA, 72 bp, Glycine max
  unsure (1)..(72): unsure at all n locations; Clone ID: 701144985H1
taacaatacacactgacgttcaaaaaccanttctaaccagtcaatttctcaacatttccagtaacaagtgag

SEQ ID NO: 5823 - DNA, 62 bp, Glycine max
  unsure (1)..(62): unsure at all n locations; Clone ID: 701144986H1
gggagcataactcnttgtttcccacttgacccctaaattcgtgcccattcccacaantgnac

SEQ ID NO: 5824 - DNA, 193 bp, Glycine max
  Clone ID: 701144987H1
ggtgtacatgatgaactctaggaagtttgcaaaacggataaagagtgagcggaagttatattccggaaagttatatctttttcagttgtagtgtttttttgtttttatttttccctagataagcagaccgtggaaaactgcaagtgaaagctggagcttttgcttcaatcacatttgactatttcactgatta

SEQ ID NO: 5825 - DNA, 272 bp, Glycine max
  unsure (1)..(272): unsure at all n locations; Clone ID: 701144990H1
ggaagtaaagaacataactaaacactagcaggaccaaaagggtattcttccgacgaagaaacacgatcgtatcgtatcaccggaaattctgactctcacagattcctgggagcgacaattgcaactccgattcgacttgaagagagggaggaaggtnnagaagattggcaaattataagaatacgttgagatgtcagcgcttttcaatttccattcatttctaaccgtgatacttctgggaatatgtgcctgcacttatttcaagatgcagt

SEQ ID NO: 5826 - DNA, 269 bp, Glycine max
  unsure (1)..(269): unsure at all n locations; Clone ID: 701144991H1
gatttttgtttcaaaatatgaactcaccaccccanctaggttggcctcctaatggtgatgatccatgtggacaatcttggaaaggcatcacttnctcaggcaaccgtgttacagagattaagctatctantcttggactaactggatcggttccttacggattacaagtcttgacatctttgaatgacctagacatgagtagcaaccgtcttggtggaagcataccttaccaacttcctccatatttgnagcgcttaanccttgctant

SEQ ID NO: 5827 - DNA, 268 bp, Glycine max
  Clone ID: 701144992H1
ggaggttgaaaggggatggtgagagtaagcaaagaggctctgcaaaaagcagccaaaaccctatccgaaatcctcgtgtgccctctctctaagcagcctttgaggtattgtgaggaatcaaattccttaatcagcgatgctattggcgttgccttccccataaaaaatgggataccatgcttggttccaagagatgggaagatacttgaggaagaagatgcctcaaaacctgataatgataccatttatctgcagtaaatgaagagaa

SEQ ID NO: 5828 - DNA, 269 bp, Glycine max
  unsure (1)..(269): unsure at all n locations; Clone ID: 701144993H1
ggagtgtgagagaaaccagtgactgacttttcgagaaagaaaaacaaaaatgagtttccgtcattccatcatgaacgctcttccnttctcctcttcttcctcttcgtttctgcattagtttctgcgaagaaaactggtgatgtgacgganctgcaaattggcgtgaagcataaaccagtatcatgtgaagttcaggcacacaaaggtgacagagtcaaagtacactataggggaaaactcactgatggaactgttttcgattctagctt

SEQ ID NO: 5829 - DNA, 269 bp, Glycine max
  Clone ID: 701144994H1
ggatcctttgtattctattcttcaagattcaggtactgcgtttcggaagcagacacagatggctcgtacgaagcaaaccgctcgtaagtccacaggaggaaaggctcctaggaagcagcttgcaaccaaggctgcacgtaagtctgcaccaactactggtggtgtgaagaagccccaccgttatcgtcctggtaccgttgctcttcgtgagattaggaataccagaagagtaccgagcttttgatccggaagctccccttccagaggtg

SEQ ID NO: 5830 - DNA, 271 bp, Glycine max
  Clone ID: 701144995H1
gccttaatagtgaacattggagacatgatggagaggtggacaaattgtttatacaggtcaacacttcacagggttatgccaacaggaaaagaacgttattccgtggcattcttctttgacccggcctcagactgtgtggtggagtgctttgaaagttgctgcagtgaatcatctcctcccagattctctccaatacgtagtggggactacttgaatgaacggttcagactcacctatggttctgaaaaggatctaaaatgtgattatccag

SEQ ID NO: 5831 - DNA, 273 bp, Glycine max
  Clone ID: 701144996H1
tggcttatactctgtctaattaacataataattctgatggataaaaggcaatgaatgtttcccagtcatggatcaagtttgtctagtgaatgaaagagtccgagggtacctgcattacaatgtgggtgatgggccaccatatacgcgaatgaaaacttacatgtaaaccttgtcgatctaaactttaatatctcacacattataatctatggcatcatatacatgttgtacataatactgttatgtattggcaattggtaaatggcaccactg

SEQ ID NO: 5832 - DNA, 236 bp, Glycine max
  unsure (1)..(236): unsure at all n locations; Clone ID: 701145001H1
gaggggcatacacantagctgaaaagttgttgangcatttcttccaggaaagtcttactgnggcagttgtcatctagtacattantctggaancttcctgagtccattctcggganagacctgctaggcatagtacagaacttgtggcaaaagggagcacgaattnttnccanaagggttggcccaaaggngaancgttatggcngcttccagtngtgncncccatatnggnnagg

SEQ ID NO: 5833 - DNA, 250 bp, Glycine max
  unsure (1)..(250): unsure at all n locations; Clone ID: 701145005H1
ggagaagagagatggatccagacgcgttggcagaggcattcgtggagcactactacagcaccttcaacaccaaccggaacggtttagcgaatctgtatcaggagggttccatgctgaccttcgaagggcagaagatccagggcgcttccagcatcgtcgctaagctcacttccctcctttccagcagtgccaccattccncttccacgtgattgcnancctcggtgtcaagntggcnaggtttntttttt

SEQ ID NO: 5834 - DNA, 216 bp, Glycine max
  unsure (1)..(216): unsure at all n locations; Clone ID: 701145007H1
gacatagaaaatagatatacctacatacctacctaggttcctcgctctctcccttggcctcctcaagactcgtctaaagtgacacagaacgctatctgggtatattatttacaaatggngaagcagaagatgaagagagcgagaganggagatgatganactcagaacgcaaagaaaagagagcttgttgcctngaggacgngnnnaaggaggggg

SEQ ID NO: 5835 - DNA, 181 bp, Glycine max
  unsure (1)..(181): unsure at all n locations; Clone ID: 701145008H1
aacgttaacatgaagaatgttttagtaaggtcagctgcgcgagctnctgcttggcggcggtgggcggagtactaccgccagctctcaacggcggcgatcgtggaacagagacaccagcacggtggcggcgcgtttggaagcttccatttcgggggatttccctntttccnagggaaaagat

SEQ ID NO: 5836 - DNA, 251 bp, Glycine max
  Clone ID: 701145009H1
ggggagagaatagagaagagagatggatccagacgcgttggcaaaggcattcgtggagcactactacagcaccttcgacaccaacaggaacggcttagcgaatctctaccaggagggttccatgctcactttcgaagggcagaagatccaaggcgcttccaacatcgtgccaagctcacctccctcccttttcagcagtgccaccactcatctccaccgtcgatgccagccctccggcgtcaagcggcatg

SEQ ID NO: 5837 - DNA, 252 bp, Glycine max
  unsure (1)..(252): unsure at all n locations; Clone ID: 701145010H1
gacanananaacattctatngtcgatgctgctgcntacatattagatgnacaacataacnngtcttatttatacacatattctttcatngagccttctcttgctgttaatttctgcacgacgtgaaagcgaagacaaatgagacatctaagaannngcaancgcggaagtaccacaaatcggaaaatccacgcttgcggtggacacctgaactccatgaatactttgttgaagttgtggaaggtcttggccg

SEQ ID NO: 5838 - DNA, 263 bp, Glycine max
  unsure (1)..(263): unsure at all n locations; Clone ID: 701145013H1
ggcactgcaaatcacttttctactttgagtcttcttgatccttctttttctccttgaactcaaacatggcagatgaggtggttctgctagatttctggccaagtcnatttgggatgagggtcaggattgcacttgctgaaaagggtatcaaatatgagtacaaagaagaggacttgaggaacaagagtcctcttctcctccaaatgaacccggttcacaagaagattccggttctcatccacaatggcaaacccatttgtgaa

SEQ ID NO: 5839 - DNA, 232 bp, Glycine max
  unsure (1)..(232): unsure at all n locations; Clone ID: 701145014H1
gtagatgaaanggagtagaaggaagaattanaatgctttagttgcagcccagttggcagacattaaggaattgnaggataaagttgagaaaatgaaggatgatttgaatgaagctagtaggaaggttgaattggggaatgaaatgttagtggttgtgaggaacaagagtgacgaaaatggtgttgaatgtaggaaantaggttttttgtatgcataatgtngctntngtcgg

SEQ ID NO: 5840 - DNA, 71 bp, Glycine max
  unsure (1)..(71): unsure at all n locations; Clone ID: 701145015H1
gacggacgaaatgattgatgaaaccnaatttgtgtaccgtgcctntgcnctaatgccacactcgtgactac

SEQ ID NO: 5841 - DNA, 122 bp, Glycine max
  unsure (1)..(122): unsure at all n locations; Clone ID: 701145017H1
ggagagcgagttgattaangcaaagggtgtgatgagattagttttgagaagaaaccagcaatcggcgattaggagtgaganagatatggagggaattgaaggaaatagcagcagatacagtc

SEQ ID NO: 5842 - DNA, 246 bp, Glycine max
  Clone ID: 701145018H1
gatgcataagaacaagcacaaggtctgattcgtgtttccttacatcaacttgtggtctaaaaatgggaaggatgccatgctgtgagaaggtagggttgaacaaaggaccatggaaaaccgaagaagatgagaagctcgtggcttatgttgaaaggcatgttcctggaaactggcgttcagtgcctgccaagcgggtcttcaaagatgtggcagagttgtagactgaggtggatcactactaaaccc

SEQ ID NO: 5843 - DNA, 169 bp, Glycine max
  unsure (1)..(169): unsure at all n locations; Clone ID: 701145021H1
gaaagaacaaagagagtgaattgactcggggtgagttgactcagcgatggcggaagaggtgactcgggtgatggtggcagtgaacgagtcgagcatgaagggataccctcatccttcgatcagcagcaaaggggctttcgaatggaccatcaacaaantnnttcgnanc

SEQ ID NO: 5844 - DNA, 166 bp, Glycine max
  unsure (1)..(166): unsure at all n locations; Clone ID: 701145022H1
ggacttatacacattctattcttcaacaaacattgtggtttgatcaaattcccatggtctctctctctccaattaattcgatttagcttttcccaaatcccaaaccctttctttcgcttagatcccaatccaattgggtnanggnngggntccnnncccngnacgg

SEQ ID NO: 5845 - DNA, 216 bp, Glycine max
  unsure (1)..(216): unsure at all n locations; Clone ID: 701145024H1
ggcantngagagagantgttagcacccaaaaatntcgaagttaatcttcgtgttccttgcactaattcctcntctctgcacctccttntcgccagagaaaccctcagatcggcgcatcctcgttttgctcgaggattcgcnatcaaatctgtcatcnctcttctanaactcccaaaaatctngnggtttcgatcnccaattccacanaacanangc

SEQ ID NO: 5846 - DNA, 246 bp, Glycine max
  unsure (1)..(246): unsure at all n locations; Clone ID: 701145026H1
gagcattaagtatcgtgtaacataacaaaaaagtagtggcttgtgttgtgtgactgagggccaaaggcaaaacatggaggtggatcagatgcagagagagtgcttggactacaccaaatccttattcttggaggtaaggtagataaacaacagtatgtgcaataaattcacatttaattctgtggttgttttcatcattgtgattttgtgggcttgtggttttcctnacatatggtgagagaaggg

SEQ ID NO: 5847 - DNA, 168 bp, Glycine max
  unsure (1)..(168): unsure at all n locations; Clone ID: 701145027H1
cattgtattttacacttgttgtcaactaaagataacaagatataactggtgcagttaggtgcacgcctcttantttactacatgatatagataagtacatgtttcttgctttgttacataacacgagacattatttgattttnattattttatttccacacaacanag

SEQ ID NO: 5848 - DNA, 254 bp, Glycine max
  Clone ID: 701145029H1
ggtggcaggtgtgggttcttcaattcattctagttctggattccgactagccgcgttgactcggttccgtttttcattctcgcggatctaatattaaggaatagcttaagggcacattacaatgaaggcattgattctggttgggggatttggaacaaggctgaggccactgacactcagtttccctaagcctcttgttgattttgctaacaagcctatgattttgcatcagatagaagcccttaaggccattg

SEQ ID NO: 5849 - DNA, 146 bp, Glycine max
  unsure (1)..(146): unsure at all n locations; Clone ID: 701145031H1
gatcgaagcaaaanatgaaaacccaaagtngcttctactcctctgtctttttctctcacttgctatccttttggctagtggcactgctgcaagtgnagctnccaagaagcgcatgccaagccaccatgtttcaacattcaanagaa

SEQ ID NO: 5850 - DNA, 246 bp, Glycine max
  unsure (1)..(246): unsure at all n locations; Clone ID: 701145032H1
tatgatggtgaattgaaacttccaagtcattaccttgtttctccaccagagattgacaggacttctggtgaatatttagtgtataatggtattcggacttttgcttgcagtgagactgttaaatttggccacgtcacattcttctggaatggaaacngctctgggtattttaatgcagaattggaggntatgtggaaatcctagtgatctgggattacatccaatgaacacctttatgaagctngg

SEQ ID NO: 5851 - DNA, 128 bp, Glycine max
  unsure (1)..(128): unsure at all n locations; Clone ID: 701145033H1
gggaagaggaanatacattacagcagcaaaggaaggttgtggtaagtaaatagtagtaacctaacccttgcgtttgcnagtgaggctgaggttgggtttggaaggcaaaggctgggtgttgtccccat

SEQ ID NO: 5852 - DNA, 226 bp, Glycine max
  unsure (1)..(226): unsure at all n locations; Clone ID: 701145034H1
ggctgtttaaatancnnaganaatacaacattangattaaattaaggaactatgtgacataagtccatctaggatttagcacanggtactataacaaaaattatatattttttcgtgggtcaaaatcntnnngcnagtgtctaaggttacacttgcattatactanagcatataaaatatctcgtgttaatgtccttgatccaaaagttgatggtctatatagagc

SEQ ID NO: 5853 - DNA, 171 bp, Glycine max
  unsure (1)..(171): unsure at all n locations; Clone ID: 701145038H1
ggcagcgcttganaccaagccccactncaaccacnacaccactctctctggcttcttcttctacctttcaagtttttaaagtattaagatggcagagacattcctatttacctcagagtcagtgaacgagggacacctggaaangntcggggcaaattnngnagngganct

SEQ ID NO: 5854 - DNA, 255 bp, Glycine max
  unsure (1)..(255): unsure at all n locations; Clone ID: 701145039H1
ggagagccagacgacagantgcagcattgctttgcttcgctgttgatccattctggagagagaaacactttttcagtnnnnnnnnnnnnnnnnnaagatgaccgacgatccaatgcccacgcgctggtctttccaggacttcaaattgtgttatgatgctaagtttggtagaaagaaagtcgcggagaacggagatgatgctgccggtaaagcggtcagcatggaatggaattcagtgacagtngccattgtgtc

SEQ ID NO: 5855 - DNA, 151 bp, Glycine max
  unsure (1)..(151): unsure at all n locations; Clone ID: 701145040H1
atcagtggtgccccccagncntaacaacantaatgctgtggaatgctgtcatatttggtcctgatgatactccatgggatggaggcacgttcaagttgacactccaatttactgaggnnnatcaaantaanccanggatttnnctttttnt

SEQ ID NO: 5856 - DNA, 174 bp, Glycine max
  unsure (1)..(174): unsure at all n locations; Clone ID: 701145041H1
gggtgtgncgtagtantgtatgtatgtgtgncttacgtnatgttagtatcnctcccncctactgnctcagagacagagagagagtatcaaagttcactccaacttcgatantaaaaaaatgagaaaanaganaatgagtnttgatcacataaatcgccttgaaacatgtccctt

SEQ ID NO: 5857 - DNA, 246 bp, Glycine max
  unsure (1)..(246): unsure at all n locations; Clone ID: 701145042H1
tcggttacgtcgaggcctctaaggtggtcgcccgcatcgctcaccgcaccggcaagaaagcagagctctggccctacgtcccctacgacgtcgttgctcacccctacgcacccggagtctacgacaagaaagccccctccggttatgtccgnaacaccgatgatcctcactattccnatntcgcangtgcaagntcnattgnggtcggntacaccatgttttnngggagnaaanccnctcggttgt

SEQ ID NO: 5858 - DNA, 247 bp, Glycine max
  unsure (1)..(247): unsure at all n locations; Clone ID: 701145043H1
aanggaggcattgaccatagtgcctgagcgctatgttcgaccagttcatgaacgtcctatattatctaactctacacctttacctgaaattcctgtcattgacttgagcaaattgttgtctcaagaccacaaggagcatgaactcgacnggcttcactatgcatgcaaagaatggggtttctttcagctaattaatcacggagggactcttcatnggtggaaaaagtgaagagaggtgcncaaggtt

SEQ ID NO: 5859 - DNA, 257 bp, Glycine max
  unsure (1)..(257): unsure at all n locations; Clone ID: 701145044H1
ggcgcgagatagagactgaagattgaagaacagtcgtcggctcctcgctcgcccttcgctgctgcgccatcaccgtgcccttctcaaagcgattttaacctaaccgcgttctttttttcttcagaaatcgagcataaggatttgaggattgaagtattgaacaccaaatcctttatactttgactgtccaggttgggcaagaagggagggaaaaaggagaaccncaaaangttttncccntagtgctgggcgaaata

SEQ ID NO: 5860 - DNA, 251 bp, Glycine max
  Clone ID: 701145045H1
gcacaagtttgttgagataactagaagcaataagatgaaaatgaaagtgcttgttttgtttgttgctacagttttggtagcatatgaatgccatggctcagactaccagaagttccctctccaaatgaaaactgggtttggtgggcaatacagcaatgaggtggcatgtgccagttggaggcttggcgtggaagcaaacaacgtagtcaagtggcaaactgttcctgcagcttgcggagagtacatagctg

SEQ ID NO: 5861 - DNA, 242 bp, Glycine max
  unsure (1)..(242): unsure at all n locations; Clone ID: 701145050H1
ggagacacacancgagagagaatcgtaacanaagcggtaaccggaataagttgnctctaacgatttgagccatggcaacaacaacaccctcaaaccgatcntcagaggcgtttgctctcatggcaatcctcagcactctgctttnnanggcggtngcggcgaaggagagcgtgtanaaaatacncccnngnnngggccttccngaacggtcttttacgggacacgtcncngttacangntcg

SEQ ID NO: 5862 - DNA, 163 bp, Glycine max
  unsure (1)..(163): unsure at all n locations; Clone ID: 701145053H1
aaagatttccttcagatttgttgacacagctgaagacagattgtctcgtcctgcacaatcatcgttatgccatatccccacgcaagcttcaatataataccaagttatctgacttttttgagattctggcnacatctgaggttgnnttgaaaattnntncccc

SEQ ID NO: 5863 - DNA, 241 bp, Glycine max
  Clone ID: 701145055H1
ggtgcacaagtgagtttgttgatcgagataactagaaacagtgtgatgaaaatgaaggtccttgttttcttcgttgctacaattttggtagcatggcaatgccatgcgtacgatatgttccctctccgaatgaacactggctatggtgcccgtactccggaggtgaaatgcgcaagttggaggcttgctgtggaagcacacaacatctttggctttgagaccatcctgaagagtgcgttga

SEQ ID NO: 5864 - DNA, 248 bp, Glycine max
  Clone ID: 701145056H1
aactgttgttgagggaactatacagaagctatttgaagggcatcatatgaattatatcgaatgcatcaatgtggactataaatcaactagaaaggagtcattttatgaccttcagcttgatgtgaagggctgtcctgatgtttatgcttcctttgacaagtatgttgaagttgaacgtcttgaaggggataacaaatatcatgcggaacaatatggtttgcaggatgctaagaggggtgtcctgttct

SEQ ID NO: 5865 - DNA, 248 bp, Glycine max
  Clone ID: 701145057H1
ggggatgaattgtggcctgcggataagcttggatttactaaaaccgccatccaagcaaagccggactctgtctactttgttgtcagcaggggtgctgaagtagacgttaaaaagctcacaaagcgacctgctcctcctcgatttggaagaaaactgaccgagactcaaaaggcgagagtactcacatttgccttgattgtggatacatatacaccttacagaaaccttttgatgagcagccggacaca

SEQ ID NO: 5866 - DNA, 245 bp, Glycine max
  Clone ID: 701145060H1
tcttcttccaatattggatcatgtacagcaacaaggaagagtggtggatcttcaagatgtcttcaatcgcttcaccttcgataacatatgttctatagttcttggaaatgaccctaattgtctttccattgatttttctgaagttgccattgagaaggcttttaatgaagtagaagagtccatattctacagacatgtactgcctaggtgtgtttggaagatccagagatggcttcaaattggtc

SEQ ID NO: 5867 - DNA, 142 bp, Glycine max
  unsure (1)..(142): unsure at all n locations; Clone ID: 701145061H1
ggataatgggtttggacttgcctcacggangacatttgtctcatggattcatgacacccaaaaaacgtgtatcagccacatcaatttattttnaatctatgccttatcgacttgatgaatcaacaggtcttattgattatga

SEQ ID NO: 5868 - DNA, 145 bp, Glycine max
  Clone ID: 701145062H1
gagggtgagttgcaggcagtgtcatctctcctttgacgacaagatgagcatcccaattccccatcggcagttattcatagacggagaccggaaagtccccgtcctcaagaatcggattcccatcatcaacccttccacacaacat

SEQ ID NO: 5869 - DNA, 201 bp, Glycine max
  Clone ID: 701145063H1
gaaggaagaaccagctgaagaatctgatgatgacatgggtttcagtctgtttgactaatttatgtaatgcttttgttgagtttatttggttagaattgaagttgtgtttgcctttcatttcaggtgttattttagtgtattcatgttacattgcaactacttttaatttccatagttaattaaagcttcaacgtttctgtc

SEQ ID NO: 5870 - DNA, 221 bp, Glycine max
  unsure (1)..(221): unsure at all n locations; Clone ID: 701145067H1
ggcagcgcttnatttgaggccaggcaagccccactcaancaccacacntctcctcgttcacgctacccctttctgctcttcttctacctttcaagttttaaaagtataaagatggcagagacattccnctttacctcagagtcggtgaacgagagacaccctgacaagctctgcgaccaaatctccgatgctgtctcgacgcttgcctcgagcaggaccca

SEQ ID NO: 5871 - DNA, 236 bp, Glycine max
  unsure (1)..(236): unsure at all n locations; Clone ID: 701145068H1
gaaatgagtgcggcaganagggaagcaaattttgttcctagagtttgtatatttgggggaaaagcatttgctacatatgtgcaagccaagagaattgtgaaatttattacagntgttggggctacagtaaatcatgaccctgaaataggagatctacttaaggttgttttgtcctgattataatgtcagtgttgccgagatgcttattccnccagtgaatngtcacaacatatcag

SEQ ID NO: 5872 - DNA, 196 bp, Glycine max
  unsure (1)..(196): unsure at all n locations; Clone ID: 701145069H1
gttttggctgtggacgtaaaataatggctctgtcttttggttttgggctcttgnnnnnnnnnnnnnnnnnnnnnnnnntatgtgttctccctccatcagaaacccacactttcatgatgaggccttctgcttcttctggtttgcgcatgatncgtaccagtcgcattacctgttgcaaccctttctnagnnttnaa

SEQ ID NO: 5873 - DNA, 160 bp, Glycine max
  unsure (1)..(160): unsure at all n locations; Clone ID: 701145070H1
caacccaaaaggtacaagcaacgctctcaaggttcttactccaatgtaaccttccaacactctttgagcctctctaatcctttctttcatagccctcttacccctgaccatattacaagcccaataaagcccatgtggatcagggatacnattttttttg

SEQ ID NO: 5874 - DNA, 93 bp, Glycine max
  Clone ID: 701145071H1
gggaggattttgagttaagaggatttggtccacttctccctgcacaaaccatcttggatttttcaaggaagaataacctcggcagtgacagtg

SEQ ID NO: 5875 - DNA, 149 bp, Glycine max
  unsure (1)..(149): unsure at all n locations; Clone ID: 701145072H1
gagtactagaagacaattaaagcctcttttacagttcagtctcangttnangcaaaatggtcttngaagagtgtgtagtgcatgatgtgaggctatcctcagttgggccaggccgggccaccaggtcggaggtgttnccacncaacata

SEQ ID NO: 5876 - DNA, 238 bp, Glycine max
  unsure (1)..(238): unsure at all n locations; Clone ID: 701145074H1
ggcacaagtttgttgagatanctagaagcaataagatgaaaatgaaagtgcttgttttgtttgttgctacagttttggtagcatatgaatgccatggctcagactaccagaagttccctctccaaatgaaanctgggtttgggggcantacagcaataaggtggcatgtgccagttggaggctnggcgtggaagcaatcancgtagncantggcaaactgtnctacagttgcgganaa

SEQ ID NO: 5877 - DNA, 252 bp, Glycine max
  unsure (1)..(252): unsure at all n locations; Clone ID: 701145075H1
ttaccactggatctggtgcatcgtcttccttgcacatcacccaagggaccccagttcccatttccacagccatttttgcagcccaattcacatagttttgaccagcagctccttgcaacttactctgtgccccatattcattctcaatctaaaacgncaaacacatggtgaatcatgaatgcatcattaaaattcaaactagatctagagtgaaaagctcataagtcatngccctagnggttgaggaganac

SEQ ID NO: 5878 - DNA, 203 bp, Glycine max
  unsure (1)..(203): unsure at all n locations; Clone ID: 701145076H1
gagagagtattggcgcttcatcaagatgggtatttctagggattccatgcacaagaggcgtgccactggtggcaagaaaaaggcttggagaaagaagagaaagtatgancttggancgtcaggcagcaaacaccaagttatcaagcaacaagacaatcaggaggattcgtgttagaggtggcatgttaaatggagggcttgag

SEQ ID NO: 5879 - DNA, 253 bp, Glycine max
  Clone ID: 701145077H1
gagctagggtttcagtggtgttagatctgtacccgcctagccattgatttggaaaagtccaagcttcaaagatgagtaagcttcagagtgatgctcttagagaagctatctcaggaatcatgactgattccaaggaaaagaacaggaaatttgtggagaccattgaactccaaattgggctgaaaaactatgatccccagaaggacaagcgttttagtggctctgttaagttgcctcacattctcgccccaag

SEQ ID NO: 5880 - DNA, 247 bp, Glycine max
  unsure (1)..(247): unsure at all n locations; Clone ID: 701145078H1
gggttgcagctgaagcaacgaaggatatggcgattcttccttctcttgcagttccttcaactcccatttctcgggtaaagctgtttcagtgccaaccctgtcaattccatagatgcacagaactatatcttccccatcaaacatattatactcgaactagatcaattaaagtatcaatggcagaccataatgagccgagtgaggttaagatgcagattgggatcatgagggagaanctnnnngaagc

SEQ ID NO: 5881 - DNA, 243 bp, Glycine max
  Clone ID: 701145080H1
ggaacaatgagcaattaatcaatcacattaagaaattaacttgctttcatagttttcacatatttgaagtgacatcatgaatatggaggggcagaagaaaaacaagagggtggctgttttggtgggttgcaattaccccaacactagcatggaattgcatggttgcataaacgatgtgttggcatgaaggacacgtggagaagcgtttgggtttgatccctctaacattgagcttctcactga

SEQ ID NO: 5882 - DNA, 223 bp, Glycine max
  unsure (1)..(223): unsure at all n locations; Clone ID: 701145082H1
gggactggatgatgatgcaaacttcaggattgatacatatacttgctcagatatttaaagagaagaaaaatcaagctggaggtgaaactgctcattcccagctagtgctgttcaaacttagaatcctttcgttgttggaaatgtccttcatgaaaatccaggtaagcctcaggttctnaggtntactcaaatttggcncaggctttggtnaacccnnaaacag

SEQ ID NO: 5883 - DNA, 146 bp, Glycine max
  unsure (1)..(146): unsure at all n locations; Clone ID: 701145083H1
gggacatcgaagcaaaaaatgaaaacccaaagtgcnctctccacngnacnngactcactctagcnanccanttggctagnggcacngctgcaagtggcaactaccaagaagcgcagtgccaagcnaccatgtgtcaacatgcaaca

SEQ ID NO: 5884 - DNA, 236 bp, Glycine max
  Clone ID: 701145084H1
ctggatggaagaagatttgatcacaaaagtgacgaatggttggaatccagtttcttcttctacgacgagaacagtaactatgtgcgtgtgaaggtcaaagactgcctcgactccaagaagatggggtatgattaccaacgtgttgaccttccatgggctgttggctggggaactcatcaaaccaaagaaggggattattcccttcgttcaaaaccagaagctttcaacattccaga

SEQ ID NO: 5885 - DNA, 206 bp, Glycine max
  unsure (1)..(206): unsure at all n locations; Clone ID: 701145085H1
gacagcacagcactctttgcnngcacaacaaaaaaagacaacacagagagaagcgtcttaataaacgctcttctctgaaaaacctgatttcttctcttcttctcttctctttcgtttcgatcttcgatctctgaaaatgagagagtgcatttccatccanntggttcaggcgntttccngggggnaaancctnctngggnntntct

SEQ ID NO: 5886 - DNA, 85 bp, Glycine max
  unsure (1)..(85): unsure at all n locations; Clone ID: 701145086H1
ttanttattctagaanggggtaacntggacattgctgngttanttagagaatngtggaganggngaattttgnnataagggtggg

SEQ ID NO: 5887 - DNA, 239 bp, Glycine max
  Clone ID: 701145087H1
ggcacaagtgagtttgttgatcgagataactagaaacagtgtgatgaaaatgaaggtccttgttttcttcgttgctacaattttggtagcatggcaatgccatgcgtacgatatgttccctctccgaatgaacactggctatggtgcccgtactccggaggtgaaatgcgcaagttggaggcttgctgtggaagcacacaacatctttggctttgagaccatcctgaagagtgcgttga

SEQ ID NO: 5888 - DNA, 238 bp, Glycine max
  unsure (1)..(238): unsure at all n locations; Clone ID: 701145088H1
gagtgcagcatcatagagaaataagggaaaaatggtgtcgctgaaactgcagaagcgcctctccgcaagcgtgctcaagtgcggcagaggaaaggtttggcttgaccccaatgaagtcaacgaaatctccatggccaattctcggcaaaacatcaggaagttggttaaggatgggtttntcatcaggaagccaaccangattcantccgctcacgtgctcgtaggatgaaggagncaa

SEQ ID NO: 5889 - DNA, 220 bp, Glycine max
  unsure (1)..(220): unsure at all n locations; Clone ID: 701145089H1
ggtaccgcgtctttagtcctaaaggagcaggttcacccagatggctcagctatcccacaccgaatcctgatgactccagcggctcttccactacacaatgatgggtgttggggttgggcaggacttgnccgcccaccctggaagctcagagccaccatcagttcccaccgccgaatttctgnattaaccaacacacaacaattataaaaaatcccatccc

SEQ ID NO: 5890 - DNA, 243 bp, Glycine max
  unsure (1)..(243): unsure at all n locations; Clone ID: 701145090H1
ggggtgccattgtngttgtnattatcatccgcagctgcttttattcgcaccgcaaacngtgagccatggccgtcggaaagaacaagcgcatctccaaggggaagaagggtggcaagaagaaggcagctgatccctttgccaagaaggattggtatgncataaaggcnccncngttngncagtgaaaaatgtgggcaaaacccnngtcnctcgaactcagggnaccanatgccnccggaggncc

SEQ ID NO: 5891 - DNA, 109 bp, Glycine max
  unsure (1)..(109): unsure at all n locations; Clone ID: 701145091H1
ggatnagagagagananaganagaacatacgttncagtggcgcgcccaatggctctgggaatctcaaacatactgcactgccccaaattgagtttctcccacaaaaatt

SEQ ID NO: 5892 - DNA, 240 bp, Glycine max
  unsure (1)..(240): unsure at all n locations; Clone ID: 701145092H1
ggtggcnagaagttcataactctcttggacttgaagcgtccattaaaccaatgaaggatttggacatggaccaaggtcatctcggacatcattgaggaaatatcaaagactagttgatttcagctgttttgcaagagccttttatggcttgacttacagtgaagctagatatattttgttcacatggtagaaatcctacaatggaaactgntcaaaatgtggttatagccatgtatggga

SEQ ID NO: 5893 - DNA, 247 bp, Glycine max
  unsure (1)..(247): unsure at all n locations; Clone ID: 701145093H1
gacactagtctctgtgaaaagcgacacgacacaacacaacacaagctttattctttttcttcgcttcttctgtacagcacccaagattgaagatgatagaccttgcgcgcgtgcagaaggagcttgtggaatgcagcaaggacgcggagggatcgggcatcaaagtcagccccaaaaacgacaaccttgtnctcttgatcggcaccattcctgncccgtcggaactccatatgaaggggcntttcca

SEQ ID NO: 5894 - DNA, 242 bp, Glycine max
  unsure (1)..(242): unsure at all n locations; Clone ID: 701145095H1
atttgagttcataatcaacaatggcggcattgattctgatgaggattacccataccgtggtgttgatggtagatgcnacacatataggaaaaatgctaaagtcgtttctattgatgactacgaagatgttcctgcctatgatgagttagccttgaaaaaggccgttgcaaatcagcccgtgagcgttgctattgaaggagggggcagggaatttcaattatatgtatctggtgtatcagggg

SEQ ID NO: 5895 - DNA, 135 bp, Glycine max
  unsure (1)..(135): unsure at all n locations; Clone ID: 701145096H1
ggtccagcatcanatgcttattgggattcgcactgttgctgaattccaagatccacaaccatncattattatccntcctttaaatttaaaaacaattgtttcaaaaattanaactagatttgcctatttgnccnt

SEQ ID NO: 5896 - DNA, 220 bp, Glycine max
  unsure (1)..(220): unsure at all n locations; Clone ID: 701145101H1
atggcgactgtggtgccaacctccgaagaagacgctgcactctccgtcgttcgattcgcctctgaacttgcctgggccgatgccggtcccgaggttgctgagccccaagttagcagnctctgcgtggaggctgaagaattcattgttatgggaaggtggttggagctagcatcattgatgattacctctgctgaattgattttctcgaaggtttctgaaa

SEQ ID NO: 5897 - DNA, 254 bp, Glycine max
  unsure (1)..(254): unsure at all n locations; Clone ID: 701145103H1
ggcacaagtttgttgagatagctagaagcaataagatgaaaatgaaagtgcttgttttgtttgttgctacagttttggtagcatatgaatgccatggctcagactaccagaagttccctctccaaatgaaaactgggtttggtgggcaatacagcaatgncgtggcatgtgccagttggaggcttggcgtggaagcaaacaacgtagtcaagtggcaaactgttcctgcagcttgcggagagtacatagctgac

SEQ ID NO: 5898 - DNA, 242 bp, Glycine max
  Clone ID: 701145104H1
ggtctccaaccggtgatgtctacgctggcggtacgactggcttggctatctgggctgtgactctacttggtcttttagctggtggtgcacttcttgtctacaacacaagtgctttcgttcaatagactttgcaaatcgatgtttaagttataacatagtccatgtaactatctaaaaatgaagaactattcgtgaagtactttgtggatatgttccttctgttctataaatgagtggatgtg

SEQ ID NO: 5899 - DNA, 217 bp, Glycine max
  unsure (1)..(217): unsure at all n locations; Clone ID: 701145106H1
gattggaaatnntatantagagaagaagctatatagccatggcnnctaagtgtgaaagttggatgattttgggtttgttgattgctatttcgttctcaagcatgcatatggacatggcattcgcagcaaggantctcctgcagacagaattgatacctgagtgcagcaatagtgccactgtcatacanctagagagatagacatctcngattgcgcc

SEQ ID NO: 5900 - DNA, 249 bp, Glycine max
  Clone ID: 701145109H1
gagggttttgcgctgttgttgctgctcatcctccgtaacctccgagctctgcaccgaagaacgaagccatggggaagacacatggaatgggatctgctcgcaagctcaagtcccaccgcaggaggcaaaggtgggctgacaagtcatacaagaaatcacatcttggaaatgaatggaagaaaccttttgctggttcatcccatgccagggaattgtccttgaaaagataggtattgaggctaagcagcc

SEQ ID NO: 5901 - DNA, 253 bp, Glycine max
  unsure (1)..(253): unsure at all n locations; Clone ID: 701145110H1
ggacacttatggtgtgtttgcggaccctgttgatccagaagagcttcctgattatcatgatgtgattgagcatcccatggactttgctactgtgaggaagaagttgggaaatggatcttatactaccttagaacantttgagactgatgtccttttnantttncncaantgcnntnccaatacatgccnccagagactntatcccanaaaaggnncgncnntacaagacttgggcggaaantttttnantttt

SEQ ID NO: 5902 - DNA, 244 bp, Glycine max
  unsure (1)..(244): unsure at all n locations; Clone ID: 701145111H1
atcagcggtgccccccaggataacaacataatgctgtggaatgctgtcatatttggtcctgatgatactccatgggatggaggcacgttcaagttgactctccagtttactgaggattatccaaataaaccaccaactgtgcgatttgtgtctcgcatgntcatccaaatatttatgcgntnggaagtatttgtttggatatnnnncaaatncnggggnccnaaaanaannggggcgccaaacc

SEQ ID NO: 5903 - DNA, 248 bp, Glycine max
  Clone ID: 701145112H1
ggacaccagaatgaagattgcgcttgatgctgcaaggggactttcatacctgcatgaagactcacagccctgtgtaatacatagagacttcaaggcatccaacatattgcttgagaacaattttcatgctaaggttgcagattttggtcttgctaagcaagcacctgaaggcagatctaattatttgtctactcgtgtcatggggacatttgggtacgttgctcctgaatatgccatgactggacacc

SEQ ID NO: 5904 - DNA, 248 bp, Glycine max
  unsure (1)..(248): unsure at all n locations; Clone ID: 701145113H1
gatcgaagcaaaaaatgaaaacccaaagtgcttctctcctctgtctttttctctctcttgctatccttttggctagtggcactgctgcaagtgcaactccaagaagcgcagtgccaagccaccatgtttcaacattcaacagaagcctttttccttncacttttctctttgganttggttcttctgcttaccaggcagaaggagcagcaagtgtagatgggagaggaccnnnntatgggacacctaca

SEQ ID NO: 5905 - DNA, 256 bp, Glycine max
  Clone ID: 701145114H1
ggcacaagtgagtttgttgatcgagataactagaaacagtgtgatgaaaatgaaggtcctgttttcttcgttgctacaattttggtagcatggcaatgccatgcgtacgatatgttccctctccgaatgaacactggctatggtgcccgtactccggaggtgaaatgcgcaagttggaggcttgctgtggaagcacacaacatctttggctttgagaccattcctgaagagtgcgttgaagcaacaaggattactc

SEQ ID NO: 5906 - DNA, 256 bp, Glycine max
  unsure (1)..(256): unsure at all n locations; Clone ID: 701145115H1
ggtttcggagaagaattaagcactcggttgcagaacagaacaaacttctttcactctttcgcttctgaatcttcaacaatggtgctcgaggcgacgatgatctgtatcgacaattctgaatggatgcgtaacggagattactctccttctcgatttcaagctcaagcagacgctgtcaatctcatatgcggtgctaaaacgcatctantccggaaaatacatgggagtctcacatggctggggaaagggntccttt

SEQ ID NO: 5907 - DNA, 261 bp, Glycine max
  Clone ID: 701145118H1
ggaagttgaagatctgaaaccctaattatccatcgatcgatctggtgtggagggtgtgaattgtgaatttgtgattgtgggaaaaagatgccgcagaggcactcgaagaacaacaacgatcttgcgttcttcacgtacgatgagaagcgaaaactaggttatggggcccagaaggagaggttgggcaaggactccattaagcccttcgatgcttgctctctctgcctcaaatccctaattgatcctatgagctgccagaaa

SEQ ID NO: 5908 - DNA, 257 bp, Glycine max
  unsure (1)..(257): unsure at all n locations; Clone ID: 701145120H1
gaaggagattgatgatggtagtgaagaagaaaattttgatagtgatgatgacaataacgaagaaactagcctcgaacaatttttagatttcatgataaagaagatagaaactcaggaaatggaggcttaaaagaaggaacaggaggctaaagacgaagaggaacagcagaggaaggagattgatgatggtagtgaagaagatttgntagtgatgatgaccataatggagagagaagcttnctgagttanccccactt

SEQ ID NO: 5909 - DNA, 247 bp, Glycine max
  unsure (1)..(247): unsure at all n locations; Clone ID: 701145121H1
ggcaaatgattaaccatggcttcttctacatcacatccatccntttngtccctcctgaacctgtctgcatccattcccatttcttcttccgtatgcatgttcccaccgtctaaaaaacctagcaaagcaacaaaacggcgtcatgcttggggantagcatgcaatggtaaacctagaaattaggggggactttctgatcggcttggggggctctatgggggtacaacaagtncacaagtnacaacat

SEQ ID NO: 5910 - DNA, 247 bp, Glycine max
  unsure (1)..(247): unsure at all n locations; Clone ID: 701145122H1
ggatttcatttcgtttgcaattgaatttcaatttccctaggggcttaatatctcccctcactagtgcctagccttatgtcatagtattatcattcattctcatctttctctcttctctctccacccaaaccctaactcccgaccctgttcccctctcntatccgtcatgaaaggaggaaagtccaagaccgaatctaagagagccgatcccaaacttgctgtgaataagaagggancgcccaccagg

SEQ ID NO: 5911 - DNA, 227 bp, Glycine max
  unsure (1)..(227): unsure at all n locations; Clone ID: 701145123H1
gaggggggaaatggangtatgtgatgagagtgggantggcgtcgttcttcaccggggctgcagtggcgtcgtttctggggctctacaccctccacaaggattacaaggtcgcgcaccaatcctttactcaacagatgaatgacctccacaaatcgctggaaggtcgaatttcttccttggaaaaaatgaaacaaacggaaacgtctgaacnggttnaagcaatgant

SEQ ID NO: 5912 - DNA, 258 bp, Glycine max
  unsure (1)..(258): unsure at all n locations; Clone ID: 701145124H1
catggaaacggtgatcaagaagaagaggaagaggaggagggtggttttgatttggagtgcagctatgcgattgtacagagagccaagcagcagttattgtataagcttcgtagatttgagaaactggcggagttggatccagtggaacttgagaaaagaatgcaggatcaagaagaggacgaggacgacacatttatggaagcggaagatggtcatgatgnganacnnccagccatcatgnatttggntnnctttttt

SEQ ID NO: 5913 - DNA, 247 bp, Glycine max
  unsure (1)..(247): unsure at all n locations; Clone ID: 701145125H1
gcgtccactcaaatcttatactcctctcttgtctgtgtaatcaaaacaacaacattcattcatactcacttccttgcctactacacattcttcatcacttcattcaacatttctccccttagcttgtttcaccaatggctgctgcggttagtgctgcagtctcttttccatccaccaagtctacctctcttccaagcaggacctccctcattgccccagagagagttgtgtttnaagaaggttcatt

SEQ ID NO: 5914 - DNA, 245 bp, Glycine max
  unsure (1)..(245): unsure at all n locations; Clone ID: 701145126H1
aaattcatttattttactcctttcacacataaatttttanctgacattttacaaccagaaagaataagtaaatgaagttttgtaaaaatttaggactagagtaactcaaaattataattttagagtttaattagtacgtaaacatgaagagtttattctctgcatganncggttcncaattntattcccattcnncnaggttttaaaannccggnggattangnggaaaananttttanccnggt

SEQ ID NO: 5915 - DNA, 251 bp, Glycine max
  unsure (1)..(251): unsure at all n locations; Clone ID: 701145127H1
ggttgaacattcaactgctgtgcagcaacgccttgaatctgcacccacttcgttggcaatgacactaagggattctattaattcagcatcatcaattactcaaaccttgagtagagaagtgcttgagggccagagaaagctagtgacgctcgnagctacangaacaaantcnggcanttaaataactctgnntgtccagctaaaaaanggcnttntttcanaaagggggggngcttttntncccccaagng

SEQ ID NO: 5916 - DNA, 240 bp, Glycine max
  Clone ID: 701145128H1
ggcatcaattcaaaatatatcatcaattataagcatgggtttgtggaacacaacgaatgcagtgtcttgccgctttcacaagtttggtgatgaccaaaagaatctggtcttccaaggtgggccacgtcttcttccaggggcatagaactcacaaagttagacggtggaggaaaaccagtgggtggcagtgtggggagagtgttatactcttcttccagtgcacctttgggaaagctctac

SEQ ID NO: 5917 - DNA, 244 bp, Glycine max
  unsure (1)..(244): unsure at all n locations; Clone ID: 701145129H1
gctctctgttcacaagtttcgtttccaggtttcggcgcaatcggcttctgcttcaaggaaggagagcttgttattctctatcaacaagtaaaatgtcaggtgaagagggtgtcattgcagttgagcnnnnnnnnnnnnnnnnnnncatccaggcgaacctcatggatatcatgactgccttacaattgtgctcagaaantctctggcttatggtggtttgtcgcgtggccttcagaaggtgcaa

SEQ ID NO: 5918 - DNA, 259 bp, Glycine max
  unsure (1)..(259): unsure at all n locations; Clone ID: 701145130H1
ggagttaatttcctttgacatatactgtgcagattttgagttttgtcattcttacaaagacaattctgaggctttgaaactggtattcctaattcctaacaatatacaacggggggntgcgtgtcagtaccttctaatgcaataaaagcaccaaggaagatccgtagacggataacaaaacctcgtctaaagtnctcaaatctctntcctggtgagatcatcaagaagaggaatagcaatgcagggcacgtgtaacaga

SEQ ID NO: 5919 - DNA, 255 bp, Glycine max
  unsure (1)..(255): unsure at all n locations; Clone ID: 701145131H1
ggcgagtgagtgagatttgaatgggagaaaccgggatcattgtcagcttccagggtaacttagacccgagagcagaggagttcagacccctcaatcttcaatgccaatggtatcctcttcctcttcccacacccctctccacnncctccacccgctccctcctcctcactccgctcccattcgcntccnantcngccctccgggnanaattccaggccttcggngaatcagagccctccaaaccgatccctccgt

SEQ ID NO: 5920 - DNA, 268 bp, Glycine max
  unsure (1)..(268): unsure at all n locations; Clone ID: 701145132H1
ggttctagtgngngattgtttgttgttgnaactcgtcctnctcctttggtngncctgtgtttgggnttgtttttcctctcacctgaaaatgncttnctncggtggnaactgtggttccgnaagcncctgaaattccggnaacggntgcgnaggctnnaanatgtacccagacttaancnacactgagtcaacccacacaccgaaacnttggncatggaantgggcacctgtnangntctcacnaccaagtgcnctaaannggtgtgcc

SEQ ID NO: 5921 - DNA, 252 bp, Glycine max
  Clone ID: 701145134H1
gagggcaaagagaactctatcttcaactgcccaaaccaccattgaaattgattctctctatgagggaattgatttctactccaccattactcgtgctagatttgaggagctcaatatggatctcttccgcaagtgcatggaaccagttgagaagtgtttaagagatgctaagatggacaagaggactgtccatgatgttgtacttgttggtggttccaccagaattcccaaggtgcaacaactcctgcaaga

SEQ ID NO: 5922 - DNA, 248 bp, Glycine max
  Clone ID: 701145136H1
cacatggtggggaatgtgtacgttcagttcagagaggaggagcatgccgctaatgctgttaggaacctcactggaaggttttatgcaggtcggccaattattgttgatttttcgccggtgacggatttccgagaagctacttgcaggcagtatgaggagaatacttgcaaccgtggtggttattgcaacttcatgcacttgaagagaattagcagggaattgaggcgtcagttgtttgggaagtccca

SEQ ID NO: 5923 - DNA, 169 bp, Glycine max
  unsure (1)..(169): unsure at all n locations; Clone ID: 701145137H1
accaaagacgaaacactctagtcattacttttgcttcaaagtctggaggaggatttcacttaactcgttactgaanagccgtaaaagttgcggaggaaagggggcaattgaatgtcctggatgtaaggggagggaaagaataaaaagaacggaaatatnttgaacgngg

SEQ ID NO: 5924 - DNA, 242 bp, Glycine max
  unsure (1)..(242): unsure at all n locations; Clone ID: 701145139H1
gatcaccaacacggtgtgtgtccttcatcctggattagagccacaaacataacacattccgctttgactttggaggctaagggcctaaggcaggtttttttgctttgtcaggttcccaatcactgtgatatcatggaatccccacaatccgttgtgtcaccattcaagagctctgtcttgggtgaagccgagaagtataggtctgatgtttccacacaaatctcgggtctttgtcnaaggat

SEQ ID NO: 5925 - DNA, 144 bp, Glycine max
  Clone ID: 701145140H1
gggtctgcgtaatttgatttccttccttcgtatcaaaattctatttgggacatctcttctcaaaccaaacagtgccttatttgtgtagtgtgaatgtgtgatggcgagtcgttcctcttaaaaaattggaaaatcctgattttg

SEQ ID NO: 5926 - DNA, 244 bp, Glycine max
  Clone ID: 701145141H1
ggagaagttgttgatcaaagagaaaaaaacatcagaacaagaagaagaggaattatcattggtgaagagggtgtggaatgagagcaaggtgatgtgggtagtggcagcaccaggcatttttacaaggttctccacctttggtatcaatgttataagccaagcatttattggtcatattggttcaagggaacttgctgcttatgctcttgtgttcactgttctcatacgctttgccaatggaatt

SEQ ID NO: 5927 - DNA, 64 bp, Glycine max
  Clone ID: 701145142H1
ggaagatgacagcaaagtggtatcttcattgtgtgtgttgtagcgatctgggccgttgatctgg

SEQ ID NO: 5928 - DNA, 226 bp, Glycine max
  unsure (1)..(226): unsure at all n locations; Clone ID: 701145144H1
cacgcacaaatcgangaatggaccctataaccaaggaggcactcgacacgtgcaagcaacttcatgaacctctccatcggggagttcacgaggtcactcgacaagttcgccaagtttgacctgnacaaccttgacaacatcctcacaagtttgaaggtttggctcagcggtgcaatcacgtaccaagaaacatgtttagatgctttcgagaacacaaccaccgatg

SEQ ID NO: 5929 - DNA, 173 bp, Glycine max
  Clone ID: 701145145H1
gattctaagatcgatcatcttcaatttccctatactacttgcaatattgattgaacactactagatcatgtgtataacgttgtatagctagctagctagctttctattgtctaatatacctttgtctgtgttgtaaattaaggtgcaagaagcaagtaaatccctcataatac

SEQ ID NO: 5930 - DNA, 244 bp, Glycine max
  Clone ID: 701145146H1
gatggtgtctttgcctcttccgatggaacaccatatctccaacccaacatgatttgcatttttgagagttatgctggtgacattgcgtggcgacatgcagagtgccccatcactgacctcaaggttacagaagtgaggccaaaggtgacactagtggttaggatggcagcagcagtagcaaactatgactatatcgtggattgggaatttcaaactgatgggctaatcagagcaaaggttggac

SEQ ID NO: 5931 - DNA, 249 bp, Glycine max
  unsure (1)..(249): unsure at all n locations; Clone ID: 701145147H1
ggaacctttgcattctattcattcaagattcagcaagtgcgttttggaagcagagaccgaaatacttcgagatggcccgtacaaagcaaactgctcgtaagtcaactggaggaaaagctcccaggaagcagcttgcaaccaaggctgcacgtaagtctgcaccaacaactggtggtgtgaagaagctcatcgttatcggccctgggaactgttgctcttcgtgagattaggaaataccnaagagcatga

SEQ ID NO: 5932 - DNA, 251 bp, Glycine max
  unsure (1)..(251): unsure at all n locations; Clone ID: 701145148H1
gtggaagaagtaaaagaggttaaggaagttgatggtgtgaaagaaatcaaggaggataaggaagttgatggggtgaaagaagtcaaggaggataaggaagttgatggtgtgaaagaagtagttgaagataaaaaaagtgatgagttgaanagaaatagnagcggataagaaagatgatcntatatctgagaatgatcnantggatgaaggncccngggnctgccganntannggccaagtgnnncncgncc

SEQ ID NO: 5933 - DNA, 249 bp, Glycine max
  Clone ID: 701145149H1
ggggccccccaacttgagggaggacagattgatcgatgtctaactctaagcagtactgtaaagccacggtgtacttgggcacaaaggaagggtaaaaaaatgaaaaagaaaagtgtgcgttggatgatgaaaagaccaaagctattgaattgaaagtaccctttgtgacactgtgctttcaaccaaattttatttttaattctaatatctaatgatgcgttggtaattagtggggatatgtcttaaagc

SEQ ID NO: 5934 - DNA, 222 bp, Glycine max
  Clone ID: 701145150H1
gaaagatgagtagttcatcaaggccggtgccgaggagagagagtccatggggagtcaccggagagaatcatcctgaacccaaagctcaccgctgcaatgaccgtgtcgaggacgttattcaggcttgctttgagggaaacccattcaagactgttccgggacctttcaagctcttctggcagtgcatgcgttccaaacccgggtcagattctcatcttctct

SEQ ID NO: 5935 - DNA, 247 bp, Glycine max
  unsure (1)..(247): unsure at all n locations; Clone ID: 701145151H1
gaagaagccttggaatatatttcaagccttgaatcaagtcaggcagggatgacaataaaggagtatgggaagattctgatagagcacaagccagtggagacaattcagattctcataaggctttgcacggaagatggtaacaaaagagggngctcaaatggagtgtatatgtctatgttgccatctcctgttganttnctagcatcttcattcatcatcctcagtcccttatggattttcttgaaaa

SEQ ID NO: 5936 - DNA, 248 bp, Glycine max
  unsure (1)..(248): unsure at all n locations; Clone ID: 701145152H1
gaggacagttcctttcctacctcatcaacttggccttcaccaaggcaccagggacatggaggtggatgttaggggtagcagcagtgccagctttgttacaaattgtactaatgttgacactcccagaatcgcctcgttggctttaccgcangggtaaggaagaggaagcaaaatcgattctgaaaaagatttatccaccacatgaagttgaaggcgaaattcaggccttgaaagaatcagttgacatg

SEQ ID NO: 5937 - DNA, 246 bp, Glycine max
  unsure (1)..(246): unsure at all n locations; Clone ID: 701145153H1
ggagcgaagaagatattagggtttttgagtgcggtgcggcgatcctagcactctcttctgcagctttcgccgacagcttcattcaccatgggctgagcaaaccgagaaggcttttttgaaacaaccaaaagtgtttctcagctcgaagaaaactgggaagggaaagagacccggaaagggtggggaacgttttgggaatccattgggcttggattnagcnncccagggaagccntcgagggaacct

SEQ ID NO: 5938 - DNA, 242 bp, Glycine max
  unsure (1)..(242): unsure at all n locations; Clone ID: 701145154H1
ggcagaagaagcgagagagagagaagaaagaatcaagcttagtcaaagtgtctgtgactgtcacacacagtctttaagatctggaagcgcttctcacttgcccacaacaacaattcctctcaatttcaaaattttcagcttcaaaataataaaaccctaagagaggggttgcaagcaaaatggggagcgcaaagatgtggacggttttgatgtgtctgatggtgagttcttncgcncgcatt

SEQ ID NO: 5939 - DNA, 240 bp, Glycine max
  unsure (1)..(240): unsure at all n locations; Clone ID: 701145155H1
ggcacaagtttgttgngatagctagaagcaataagatgnaantgaaantgcttgttttgnttgtngctacagttttggtagcatatgaatgccatggctcagactaccagaagttccctctccaaatgaaaactgggtttggtgggcaatacagcaatgaggtggcatgtgccanttggaggcttggcgtggaagcanacaangtatcaagtggcanctgttcctgnagcttgcgagant

SEQ ID NO: 5940 - DNA, 256 bp, Glycine max
  unsure (1)..(256): unsure at all n locations; Clone ID: 701145156H1
ggaggaagagaatcgcaagcgtgaaggtgaaaaggttctatttgcagttgaaaacacacagaatattggttccgcactgaaaaatttgcatcttaattgtaaagctaccgagttacttaagttagaggaagagaaaacaaaactgcaaggcagagatgaagatctctctagaaaaactcggggttataaganagganctggggantctaaacnnganggnngcaanttagngccnccnnttgctatntttccacnt

SEQ ID NO: 5941 - DNA, 240 bp, Glycine max
  unsure (1)..(240): unsure at all n locations; Clone ID: 701145157H1
ggatgcagatgcagcctatcatggcagcctactaccccaacaacgtcaccactgatcacattcaacagtacctggatgagaacaagtccttgatcctgaagattgttgaaagccagaattctggcaagctgagcgagtgtgcagaganccattcagggctgcagagaattcccangtacctagngcaatngtgnttctcaaccccaaccntctccaatgcntggtcagtatctttcgggg

SEQ ID NO: 5942 - DNA, 181 bp, Glycine max
  unsure (1)..(181): unsure at all n locations; Clone ID: 701145158H1
agagagagaagcagcgattcatcacaatgggtaaggttcccggatctctcgcacgtgcgggtaaagtgagaggacaaactcccaaagtggcgaacnagacaagangtaaaaccgggnggncnctctananangattttnntntanancngccgnttntcaccccgtggtgggnttngnaaa

SEQ ID NO: 5943 - DNA, 230 bp, Glycine max
  unsure (1)..(230): unsure at all n locations; Clone ID: 701145159H1
atccataggttcttcaaaacttttttgcgtacctcttcttctccggcgacaaaaaccgaccaaaatttaccgtgtactcctgaacaacgcacgtacaccaccggagaccaaatatgcttcaaaatcgaccttaacggaagaaacttacactaagtgatggagattttgtgggaaaaaaanggttcgcnagtttnaaancccncccggtntngggggggtttttngggnnt

SEQ ID NO: 5944 - DNA, 182 bp, Glycine max
  unsure (1)..(182): unsure at all n locations; Clone ID: 701145160H1
gtcgttattgtatataattttatatgcataatcctttaggcttcatcatcaatcatatattgtctccttgagattcctggcttgttcaagagcaagccagaggtcattcattggatatcatttattttgaatgaaatattgagactactagactattttgagctgnttgtgttgtggaggtg

SEQ ID NO: 5945 - DNA, 243 bp, Glycine max
  unsure (1)..(243): unsure at all n locations; Clone ID: 701145162H1
ggcacaagtgagtttgttgatcgagataactagaaacagtgtgatgaaaatgaaggtccttgttttcttcgttgctacaattttggtagcatggcntgccatgcgtacgatatgtcccctctccgaatgaacactggctatggtgcccgtactccggaggtgaaatgcgcaagttggaggcnttctgtggaagcacacaacatctttggctttgagaccattcctgaagagtgcgttgaagca

SEQ ID NO: 5946 - DNA, 242 bp, Glycine max
  unsure (1)..(242): unsure at all n locations; Clone ID: 701145163H1
ggatccaaatcaagctccagaagcgtcttctcagaagaaaatgggaagagggaagattgaaatcaaacggatcgagaacaccaccaataggcaagtcaccttctgcaagcgccgcaacggtttgctgaaaaaagcttatgaattatcagttctgtgtgatgctgaagttgccttgtggtcttctcaacccggggccgtttgtntgattatnccaacaacgtntngggccattttgggggntc

SEQ ID NO: 5947 - DNA, 257 bp, Glycine max
  unsure (1)..(257): unsure at all n locations; Clone ID: 701145165H1
taggtataatttttaagataattgttattaaaggaagaatttattatacatgataatatgtggtataaattctttttataatgtcaatacattttaattaaattcttcaattcttcaaaggacaccccaaacactgtaaaatcttttgatttctctntnattttattatattttttagttcattatatcnntaaagtggcttacgcatcatttctatcaaagaaaaacttaattgaaatacagtaccatctaattat

SEQ ID NO: 5948 - DNA, 246 bp, Glycine max
  Clone ID: 701145166H1
ggaagaaatgcaagattggttattgagtgttggtattatatcccctgttacgaaagagtctgcgggtgctttgtatcatcaacaactttctcgtcagttggcagattttgttaaagttccacttgagaaagctgggggaattatcaatcttattgatatatattgtctcttcaaccgtgctcgtggcacagaattgatctcacctgatgatttgttgcaagcatgttctctgtgggagaagtttga

SEQ ID NO: 5949 - DNA, 98 bp, Glycine max
  unsure (1)..(98): unsure at all n locations; Clone ID: 701145167H1
ggccgttcactgcacttcgtcgccaaaccaggttaattgcagtgtttgttattttcagaatacagcaaganggancatcagattcaagcatttccttg

SEQ ID NO: 5950 - DNA, 241 bp, Glycine max
  Clone ID: 701145168H1
aatttaaccattttcaatgaaagttcatgaaatatttttttatatgaaatttaaaacaaattttgaataataacctttttgtactctattttgatctgtggtacctatatgcaggttctgttctgcagcacagagaatgggcggtcatcgtttgttcggcaattggaacctgattggcatattgattcaaatcctgaaattgtcactcagttggctgtatgtttctatacatctcagtttc

SEQ ID NO: 5951 - DNA, 238 bp, Glycine max
  unsure (1)..(238): unsure at all n locations; Clone ID: 701145169H1
gaattcaaaatatatcatcaattataagcatgggtttgtggaacacaacgaatgcagtgtcttgccgctttcacaagtttggtgatgaccaaaagaatctggtcttccaaggtgatgccacgtcttcttccaggggcatagaactcncaaagttagacggtggaggaaaaccatgggtggcantgtgggganatgtanacctccttctccagtgcactttgggaaagctctacntggt

SEQ ID NO: 5952 - DNA, 241 bp, Glycine max
  unsure (1)..(241): unsure at all n locations; Clone ID: 701145170H1
ggcacaagtgagtttgttgatcgagataactagaaacagtgtgatgaaaatgaaggtccttgttttcttcgttgctacaattttggtagcatgggcaatgccatgcgtaacgatatgttccctctccgaatgaacactggctatggtgccctgactccggaggtgaaatgcgcaagttggaggcttgctgtggaagcacacaacatctttggctttgagaccattcctgaagagtgcntng

SEQ ID NO: 5953 - DNA, 251 bp, Glycine max
  unsure (1)..(251): unsure at all n locations; Clone ID: 701145171H1
gagggtgagtgagagagggagtgacactccaaggagccaagggaaaaacaaaaaacctgacctttccctttctccaaaggatcatcgaactaaaccaaatcaaaatcaaactttgtcacagttattggtgtgctacctccgttagttatataagacccttttataaactccttttaaggcttttcaatctccaatcacttcttcttgtgttgtcataacttcaacaacttctttcttctcgatctcangag

SEQ ID NO: 5954 - DNA, 237 bp, Glycine max
  Clone ID: 701145173H1
gggatctgataggaatagatttcgtcagtgttgaaatcacgagaaattcatgggctgctccaccggcaagagctcgtgcggattacgattatctcataaaacttctcttgattggcgatagtggtgtcggaaagagttgccttcttctacgattctctgatggttctttcacaactagtttcatcacaactataggcattgattttaagataagaaccatgagcaggatggaaaacg

SEQ ID NO: 5955 - DNA, 237 bp, Glycine max
  unsure (1)..(237): unsure at all n locations; Clone ID: 701145175H1
gaagaggggtgagtttctcaagtgggacactaggctcaaaatagccatagaagctgcaaaaggactttgctatttgcaccatgattgttcccctttgatcatccatagggatgtcaagtcaaacaacatactgctganctcngatttnnaggcccatgttncnnatttngnatttnccaggttcnntccaaatnatngggcttcggggctattnncnaaagggggcttnnggnantt

SEQ ID NO: 5956 - DNA, 238 bp, Glycine max
  unsure (1)..(238): unsure at all n locations; Clone ID: 701145177H1
ggcacaagtgagtttgttggtcgagataactagaaacagtgtgatgaaaatgaaggtcctgttttcttcgttgctacaattttggtagcatggcaatgccatgcgtacgatatgttccctctccgaatgaacactggctatggtgcccgtanccccggagntgaaatgcgcaagttggaggcttgctgtggaagcacacaacatctttggctttgagaccattcctgaagagtgcgtt

SEQ ID NO: 5957 - DNA, 248 bp, Glycine max
  unsure (1)..(248): unsure at all n locations; Clone ID: 701145178H1
ggagtgagtgagggggcattctgaacaaagttggggctgaaaaacagagtctccgacccagtaaggagaaatggactggtgggtgtcaatgccaaagatannactgcatgctcacctcaatggatccattagagactctacacttctagaactcgctagagctttgggtgacaaaggtgtcatagatttctcccaagtcgaacatgttatccttaaaatgatcgttccattagtgaggtattccagtg

SEQ ID NO: 5958 - DNA, 241 bp, Glycine max
  Clone ID: 701145179H1
gacgaactgacctttcatatgttggtgccgtggacgaggatagttgatttacaagattttttattggttgggagtatgcaaaccccttatcaggtgtatttgttgtttcattgtccgttattgatggcatgactggcatgaagatgtcattttgtgcttgcccttcctgtgttgaagggaagttgaggggtcatcaattgagaaacaggtgaagggatgttttctttgttgaagagaagtg

SEQ ID NO: 5959 - DNA, 253 bp, Glycine max
  unsure (1)..(253): unsure at all n locations; Clone ID: 701145180H1
aaggaaactgagattgtcatgtatgtcgagaatatgttaaggctggagagtggtgcaattggagaaactgtcggttctataatgctgcctgctcttgtggataggttgctagagttggatgtggaaattggatgggatggaatcctgcaagaagatgccaaaggcatatttgaaatggagttagtagatgttactgaatttgcagatgaggatgagattgtgatagtatncctccgtcagagtnataaataga

SEQ ID NO: 5960 - DNA, 255 bp, Glycine max
  Clone ID: 701145181H1
ggcacaagtgagtttgttgatcgagataactagaaacagtgtgatgaaaatgaaggtccttgttttcttcgttgctacaattttggtagcatggcaatgccatgcgtacgatatgttccctctccgaatgaacactggctatggtgcccgtactccggaggtgaaatgcgcaaattggaggcttgctgtggaagcacacaacatctttggctttgagaccattcctgaagagtgcgttgaagcaacaaaggaata

SEQ ID NO: 5961 - DNA, 238 bp, Glycine max
  unsure (1)..(238): unsure at all n locations; Clone ID: 701145183H1
cccacagcagcttcctccgccgccgtcaaagccgtttgagaatcgatgtcccttcttctcatgtttccgcctggtattctattcgatgtctaaatcaaaaggctattttttttttatgtgtgcatttgctcgtttttggtggcgaaattaggatctaaaatgtgtggagacttgttattgtatgaatggagtttgtaatttacctcagtcatngggatcgtaagttttcttcatcatt

SEQ ID NO: 5962 - DNA, 240 bp, Glycine max
  unsure (1)..(240): unsure at all n locations; Clone ID: 701145184H1
gtagatgggagaggaccaagcatatgggacacctacactagacagcatactgaaaagatttgggatcatagcaccggtgacatgggagctgatttttatcatcgatacaagggtgacataaaaatagcgaaagaaattgggctgntcnctttcagatnccctatctcatggtcaagaatattcccaaagggcangggagncnttaacccccttggggtnaattcnanaacaatgtccncg

SEQ ID NO: 5963 - DNA, 238 bp, Glycine max
  unsure (1)..(238): unsure at all n locations; Clone ID: 701145185H1
ggaagtgtgaagcactgagcagttgaggaaatgggaacccttgggagagcgatctacagcgttggtaactggattcgagaaactggacaggccattgatcgtctcggttcccgtcttcagggcggttactacttccaagagcagcntctctangctcgaacnctgatgaaccattttganangggcncctgtngttgaaaaggttttttgttgccccaaggctccgtcnttgggagac

SEQ ID NO: 5964 - DNA, 236 bp, Glycine max
  Clone ID: 701145186H1
ggtcataggggtgattttgttgatgggtgcttgctggagtaataggattaaggctgtgagtccttccaatacagggatcacttctagaagtgtcagcaggagtggccatgacatcagctcaaatagcaggagctcatcagcctccatacccgtcacttctcggagtgagggtgagatcttgcatcttccaacttgaaaagcttcagctatcatgagctaagagcagccacaagatt

SEQ ID NO: 5965 - DNA, 235 bp, Glycine max
  unsure (1)..(235): unsure at all n locations; Clone ID: 701145187H1
acagcaacaacaagtgaatggtggtgaggtacaaagtagccgtagggcagtgctttcacttgttgctgctggtttgaccactggctcttttgttcaagctgtgcttgctgatgccaaacctatcaaagttggaccacctcccggcccttctggcggattacctgnaacattgaactcagatgaaccaagagacctaagctgccattgaaagataggttcttctncaacnatngnc

SEQ ID NO: 5966 - DNA, 233 bp, Glycine max
  unsure (1)..(233): unsure at all n locations; Clone ID: 701145188H1
gatgatggtgaaacggtaggcatggagacagaaggttttgccatttatgatgcaatgatgcagttgaaaaatgagatacacacagtggcggttggatctgctataggtcaagcctgtttgctactttcagcagggtctccgggtaaacgctttatgatgccacatgctaaagccatgattcagcagnctcgtattcctnnntctnggtngatncngtatttttttcnnagggg

SEQ ID NO: 5967 - DNA, 233 bp, Glycine max
  unsure (1)..(233): unsure at all n locations; Clone ID: 701145189H1
gttagtactttaataaactatcacatttttaactatggaaacttctaaagaaacataatatagtttanaaatagattaaataatatatccactgaaagtataaaatgtcatccaatatgcactgattatttaangantttaaccacccttgggttananggaaccccaaagngcttggaaactcttttttntgnngcantntatngtgtgnccaaanntngtggngttatnct

SEQ ID NO: 5968 - DNA, 50 bp, Glycine max
  unsure (1)..(50): unsure at all n locations; Clone ID: 701145190H1
ggggggagcatctnantcnggaaagttacgtacntantgattanagttta

SEQ ID NO: 5969 - DNA, 251 bp, Glycine max
  unsure (1)..(251): unsure at all n locations; Clone ID: 701145193H1
gagggtttaagcgagatcagagaagaaggcatcatgtttccgggaatgttcatgcgcaagcctgacaaagctgcagcactgaagcagctgaaatctcacgcggccatgttcgggacatgggttgttgttattcgagtcaccccttacgttcttcactttctcgtggccgagaaagaggaacttaagctcgagctttagcttctcaaatcttccccgccatggatctccngngtaggttttnccttgggttg

SEQ ID NO: 5970 - DNA, 241 bp, Glycine max
  unsure (1)..(241): unsure at all n locations; Clone ID: 701145195H1
gaagagtagaaatagaagtttggtttgtcatgtttaaaagaanagaaggtagagaaggtgttgtgaaangttaagatcgagaaattagggtgnagtgaaggagaagctcttgagaagctgacttgaaagttgaaacagaagatgggagaagccacagaaagatttgcattgtgacgggtgccaattaaaggattgggttaggggtagttagncngttagcttcnnccggaatccaagtgtt

SEQ ID NO: 5971 - DNA, 257 bp, Glycine max
  unsure (1)..(257): unsure at all n locations; Clone ID: 701145196H1
ggagagaggaaaggtgtggcgtgggtagataaagagtgtatctggattctgatctgaatatattggcacgcataaaagggaacgaacgtaatggctgcagcagcgttgctcgaacttgatcgagttctcaagtccaagaagggcgtgttttgatatccgatttatgaccaaatatctgcctttctaggaaatgttgacgcctcgggaagcaaatattcttctatcgngtanattctaaatctctgatggatctcgct

SEQ ID NO: 5972 - DNA, 286 bp, Glycine max
  unsure (1)..(286): unsure at all n locations; Clone ID: 701145201H1
gacattccaanacacaaacacatacattgtagtatcacttttgtctcggaatttgttcttttgagttatggcaagcttaaaggttgcatgtgtggtttgatgtgcatggntgtgatgagtgcaccaatgatggtgcaagccgtgtcatgcaatgatgtttctgtgnacctagcaccgtgcctatcttacctgatgcagggtggagatgttccagaatcgtgttgtagcggatgagggacattctgggttctgccagcacacttgacaacaaacgtgtgcaatgtct

SEQ ID NO: 5973 - DNA, 278 bp, Glycine max
  unsure (1)..(278): unsure at all n locations; Clone ID: 701145202H1
ggcagcaaaanggtgcggactgaganagggaaganaagctttgaatttantttcagttgngtttgctttnacgntttcactttcaggcgatcaaggtctttgtctnngcncttgcngacttcttcaattcnngtcngaagcgcgttnctctgtgtgacncntcccctntctctgtctcgctactcngtaagatgtanaataagtatggtaggcncngngngtanttagcatnagacanaagctgacaatnggctcngagactagnnctggtngggnat

SEQ ID NO: 5974 - DNA, 274 bp, Glycine max
  unsure (1)..(274): unsure at all n locations; Clone ID: 701145204H1
aaggtgatcatcatagacatggtggtggagaatgagaagagagatgatgaatcagttgaaacacagctcttctttgatatgctgatgatggtgttggtcactggaaaagagagaagcaagaaagnatgggctaagttgatttcctctgctggttataacaactacaagataactccagtcttgggcttaaggtctctcattgggatctatccatagtaagttaatgagatgtgccagcactctatcattcatatatgtaagggctatatttttc

SEQ ID NO: 5975 - DNA, 272 bp, Glycine max
  unsure (1)..(272): unsure at all n locations; Clone ID: 701145205H1
tggaatcgacatgactatcctcattngagcaatctgatcactttggtaatattttgtgtttttgtttgtaatctttaactttttttaggcaanatatnnnnnnnnnnnnnnnnnnnnnnnnnnnnnnnnngagaantatggagaagattctaatattggcaatagnggttggcgggtcctcctgaatttacangggactgtctttctttaancgaaacttttntncananagagaatagtgcatattgtnatatccgtctaatgaccggaag

SEQ ID NO: 5976 - DNA, 264 bp, Glycine max
  unsure (1)..(264): unsure at all n locations; Clone ID: 701145206H1
ggaggggaagacatgggaaaagcttgggtaggcctggtggtattgctgtgtttgattgtcacggccatcgccgaacaatgcggtcgtcaagctggcgggcagacatgtcccaacaacctatgctgcagccagtacggttggtgtgnaantaccgaagaatactgttccccttctaagaactgccagancaactgctgggggagcggcggcggtggcggtggcggcgncggcggtgaaagtncttctaatgtcgcgccacatatc

SEQ ID NO: 5977 - DNA, 274 bp, Glycine max
  unsure (1)..(274): unsure at all n locations; Clone ID: 701145207H1
acaggcatgcagcactgtcagtgtgtaaaagtttaccagttagaaatcttttttattagttattataacaatctcagacttatcatatgataatttatagttagatgataatgttaaaggtcatcggtgcatatcttaattattctttaactaatgtatattacattacttatatctgtcanaaaaatgtattaccattattgttgtgaatttatgagaganatgcatatacnctnattttatagttgcgtgtaaattaatcatggctataaat

SEQ ID NO: 5978 - DNA, 273 bp, Glycine max; identical to SEQ ID NO: 5807
  Clone ID: 701145208H1

SEQ ID NO: 5979 - DNA, 278 bp, Glycine max
  unsure (1)..(278): unsure at all n locations; Clone ID: 701145209H1
ggatgcaaaagttagtagtagtgaagaaaatgaaagtccttgttttctttgttgctatagttctagcagcatggcattgccatggctcagaccatgaccatgaccatgggccacacctaccaaattttccctctgagaatgaaaactggccatggtggccactacattccggaggtatcatgccaaagttggaggctggtgtggaagcacgcaacgtcattgactgganaaccgttcctcaagattgcgaggatatttgggaactacatgcttggcga

SEQ ID NO: 5980 - DNA, 200 bp, Glycine max
  unsure (1)..(200): unsure at all n locations; Clone ID: 701145210H1
gagggagagtgttgacgctccatcaagatgggtatttctagggattncatgcacaagaggcgtgccactggtggcaagaagaaggcatggagaaagnagagaaagtatgancttgggcgtcaggccgtaaacaccaagttatcaagcaacaaaactatccggagattcgtgttcgaggtggcatgttaatggagggcntg

SEQ ID NO: 5981 - DNA, 273 bp, Glycine max
  unsure (1)..(273): unsure at all n locations; Clone ID: 701145212H1
gatgctccactttgttctttctnntgttatgcctcatggctgcaactgcaaccgcaaaaaccaacaatgacaacaaccctgaaataacaagggaggaaatccaaactgccatagccaaagcagtggaattaagggcccttcatactgcattaacacaaggagtagtccaggcanaaacaatgctagatttcgtcactttcccgggttctcanttctctgccaagctacctgttttcacaccaagttatgaagangggcgcacagaacccaact

SEQ ID NO: 5982 - DNA, 263 bp, Glycine max
  unsure (1)..(263): unsure at all n locations; Clone ID: 701145213H1
gtagtcatagctgatattcaagacgacttgggtctctctgttgccanagagttagaatctgcttcctatgtccattgcgatgtgacaaaggaagaggacgttgaaaactgcgtgaacacaacgggtttccaagtatggcaaattaggtatcatgtttaacaatgcaggtgtatctgatgagatcaaaacangcttcttaacaacaacaagtcggtttgagagagtgtaagtgtnactggtggtcctttctgggaacaaagcag

SEQ ID NO: 5983 - DNA, 276 bp, Glycine max
  unsure (1)..(276): unsure at all n locations; Clone ID: 701145214H1
gacacgaacttttataaacccttgacttcatttctttccantctctcttaatacatatcactttcttcaccgttcgctctttctttctcccctacacaaaacatgggctttggcccaatcagcaaacgtcgattaccccagcttcaagcttgtcatcgtcggngacggtggcacaggaaaagacaaccttcgtgaagaggcatctcatggtgattcgagaagaaatatgnaccgaccatggtgtggaggtcatccgttggatttttcacgaatggg

SEQ ID NO: 5984 - DNA, 280 bp, Glycine max
  unsure (1)..(280): unsure at all n locations; Clone ID: 701145216H1
tagaaatgggaaggtttttnttctagcgatctgaatactgtttcnaaagaatgatgatgattcattacatggnatgagnactcngntttagttttaacattaatattactaggtttcattggatagttgcattgagagtttccatttagggggtattgaccaattacaatgatattcatntgtangggncnctttttgcgggggnnantttgnnggagggcgtcnttcgnnactgnatgacacnaggnngatgannaaatgtcngtnctcccctggggng

SEQ ID NO: 5985 - DNA, 273 bp, Glycine max
  unsure (1)..(273): unsure at all n locations; Clone ID: 701145217H1
ggtgcacaagtgagtttgttgatcgagataactagaaacagtgtgatgaaaatgaaggtccttgttttcttcgntgctacaattttggtagcatggcaatgccatgcggancganatgttccctctccgaatgaacnctggctatggtgcccgtactccggaggtgcnangcgcaagttngaggcntgctgtggaagnacacaacatcttggcnttgagancattctgaagantgcgtgaacaacaaggnatncntccatggcgaacaattag

SEQ ID NO: 5986 - DNA, 279 bp, Glycine max
  unsure (1)..(279): unsure at all n locations; Clone ID: 701145218H1
gacgggctcacggnctgtaaccctcgaaacgcgaatncgccgtgtcggccacctaattctctgtttaacgtcttcaatccttcttccattgatcactatttcgcagtgtttgccttagtctcttgaggtgcaatgagattggagaagtgttggttctgntcttctaccacataccctggacatggaatccagtttgttcgtaacgatgccaagatttttcggttttgtagatctaaatggccacaaaaacttcaaaatgaagaggaaccctcggnaagt

SEQ ID NO: 5987 - DNA, 276 bp, Glycine max
  unsure (1)..(276): unsure at all n locations; Clone ID: 701145219H1
tatcaactaatttcctgagttctgtgcacattgtacgatgtaccttcaaacaagaattaccatcaataaaatgcttagttccatccaatatacaaagnagttgttaaaaagggtaatattttttacaccccaatagtgcaaatactcaataatatccctcatttctgtcagttttctcctgtggtatcatatcacctattacatttatcatttctctctttgctattctttctctatcagggtatagacttttatcagggtgtcnacggaacattt

SEQ ID NO: 5988 - DNA, 276 bp, Glycine max
  unsure (1)..(276): unsure at all n locations; Clone ID: 701145220H1
ggagagcgtagggtagcagagaaagagaaaatgaagaagtcttcgggaagcgcagtgagcaagaagagggtgcgacggtcctccgccctagatcccacctccgacgcccctccaaggaaacaagctgtcaagaaagatgtgttccgggtgtttgctgagaaggttagagaccataaagaattggtttcaagatgggctgttctacaggagacgcgtgttgagtatttnagngggaaggtttcgtgagcttcttaaaaagccatccgggctcagagt

SEQ ID NO: 5989 - DNA, 272 bp, Glycine max
  unsure (1)..(272): unsure at all n locations; Clone ID: 701145221H1
gggtatctaggcgctctgaatatcgtgttctagtcactggattgccctcttcggcatcctgggcaggatcttaaggatcacatgcgcaaggcaggggatgtttgcttttctcaagtttttcatgatggaaggggtactaccggtattgtggattacacaaattatgatgatatgaaatangctattaggaagcttgatgactctgagttccggaatgcatttccaagggatatgttcgggtgagggaatatgattcaaggcgggattcttct

SEQ ID NO: 5990 - DNA, 257 bp, Glycine max
  unsure (1)..(257): unsure at all n locations; Clone ID: 701145222H1
ggagcgacgaagatnttagggtnnttgagtgaggtncggcnatcctagcactctcttctgcagctttcgccgncagcttcattcaccatggctgagcaaaccgagaaggcttttttgaaacanccaaaagtgtttntcagctcgaanaaaactgggantggaaagagacccggaaagggtgtgaacgcttttggaaatccatnggttggattangatcccagggangccatcganggancctacattgacaagaagt

SEQ ID NO: 5991 - DNA, 272 bp, Glycine max
  Clone ID: 701145223H1
atttaactgatgccttagtatatggctaatcatgggtttcgattgtattggtaatttttccaatgacttgtgcatgaatgcaatgttaagctagtttttccaagagtttgcatcaggcagattagcttcctttagtgagaagtatcgcagcatgttatttatgtagaagagttggtacttggtagccatattttgttgctttaaatgtaaacaagaatacaagctggttatgctgttcagttgtctgatagcatgagggcttgctactgatg

SEQ ID NO: 5992 - DNA, 273 bp, Glycine max
  Clone ID: 701145224H1
ggggagtgacactccaaggagccaagggaaaaacaaaaaacctgacctttccctttctccaaaggatcatcgaactaaaccaaatcaaaatcaaactttgtcacagttattggtgtgctacctccgttagttatataagacccttttataaactccttttaaggcttttcaatctccaatcacttcttcttgtgttgtcataacttcaacaacttctttcttctcgatctcacgatggctcattggccctgtctcagatggctgtaactgttc

SEQ ID NO: 5993 - DNA, 275 bp, Glycine max
  unsure (1)..(275): unsure at all n locations; Clone ID: 701145225H1
ggttgcatcagatgaaagctatgggagttggtgggagagaaatggatagaaattgtgacgtgtttggtaatttcaacaacattaatgcggagtgtaagtggaagtgaaagcgagtgcattttcccagcgatattcaacttgggagactcgnnttcagacactggcggtctctcagnagcgttcggacaagctcctccccccaacggaatcacttgtttccactcccctaacggacgcttctccgatggtcgtntcataatcgattttatagccga

SEQ ID NO: 5994 - DNA, 273 bp, Glycine max
  unsure (1)..(273): unsure at all n locations; Clone ID: 701145226H1
gactttcatttgcttcggaattcgagaatgagagaagaggttatcagctacggagggcaccgttgatccaacacctgctgcaagttctgctggggcatcatccccagctgttccaatgaatgttggcagcatagatgggtcaagtcatggacaagtctctaaagcggcttctctctcgtgtgttggttcacaaccaccatggacttcattgagcacaagtgctggcggttctgcttttngattcttcaagatcttcatgtagacttgggaaag

SEQ ID NO: 5995 - DNA, 265 bp, Glycine max
  unsure (1)..(265): unsure at all n locations; Clone ID: 701145227H1
atataacctttttttgccaaccgaaataatatatttgttaattgttattgacaccatgcaattgtattttgccggccatacagagtttntaaaggagcagaatgaacttaaaagattaaaattttgatattataccggacggtgtatataattatntatattctncatttattggacctataaaagtatagtcctaaatgtacgtttttttttatatataattnncttngaacntcatgatttttgncgntngggnccncaaatt

SEQ ID NO: 5996 - DNA, 142 bp, Glycine max
  unsure (1)..(142): unsure at all n locations; Clone ID: 701145228H1
ccagcaaaagtagangctgcannggtcgggttcaccccaccaganttgaccnaaacaccccttccccgntcttngggggcagcacggngggctctgcgaaggnaangtggaggntttatgtcatangtgganncaacaaaaa

SEQ ID NO: 5997 - DNA, 291 bp, Glycine max
  unsure (1)..(291): unsure at all n locations; Clone ID: 701145230H1
ggngcattgaacgaaaattagggtttgtagtgtagcaggnacaagcagcaatgggcgcngaangtaacacgcaangttagcagaaaccccgaattgataaggnggaatggaattnctccgaggtcgcagngttaccacaagagggggcattggggctatnaagggccaaaaatgtnnggcnttntacctngccacggccctngacnnaacctggaaanacccgctganaanccancaatatttnacctgctgatgatatcaggagccccttgtnanaagcacaaccnaanc

SEQ ID NO: 5998 - DNA, 253 bp, Glycine max
  unsure (1)..(253): unsure at all n locations; Clone ID: 701145232H1
gggaggtgagggttggntcatttgatctgcgactganagtangagaagagnttgtgatggggggagnacagggtcacggcacgannnccanagtgttacatcatcagccaagcgctggnacctatcaccggcanggttgtncgcgtatgtgtttggtattctacaggncaagcagatggtccgtngatggtacactgnggtattattcanttgntctnnnncctctgtgtgtcaaaanccctctttttttttt

SEQ ID NO: 5999 - DNA, 274 bp, Glycine max
  unsure (1)..(274): unsure at all n locations; Clone ID: 701145233H1
gacaacacagactcacacaaagagttacaagagaaatcatcatggcatcagcagcatctgggtttgtgttgtcacttaatgttgcagctgccaccacaaactcaaggtggtcatgttcancaccaagaacaacacttctaggtttgttgtaaaggcttcagatgagcctgcagcggcggcaccnacancgccacacccccngctgangtgaagnannncaaagccagnnactntggnncncaagagggtggnaggtnangttttngggaggctc

SEQ ID NO: 6000 - DNA, 258 bp, Glycine max
  unsure (1)..(258): unsure at all n locations; Clone ID: 701145234H1
gtgtacgctcattttcctatcaacgctagcattngcaacaacagcaagtccatcgagatcagaaatttcctcggcgagaagaaggtgaggaaagtggacatgcttgggggcgtgtcggttgtttagatctganaaggtcaaagatgaattggtcttggatggnaacgacattgaacttgtttctaggtcatgtgctctcattaaccagaatgtcatgttaaggacaggatatccggnagttcttgaggtattatgtag

SEQ ID NO: 6001 - DNA, 63 bp, Glycine max
  Clone ID: 701145235H1
gaattctttttgttgatgaagcctatagattgataccaatgcaaagtccgcgataaggctatg

SEQ ID NO: 6002 - DNA, 270 bp, Glycine max
  unsure (1)..(270): unsure at all n locations; Clone ID: 701145236H1
ttcctatacttacgatgttcgcttaatcaaattaaaggaganaatatcaacttactaccgaggaagaaattggcttatagacatttgattgttcgagaatggtgtagaagtgnnnnnnnnnnnnnnngaacttgatcattcgcaactggattttcatgcattctaccatgcaagaaaaatgcaggcctngtggtgttggcattcaatagggtgactagtcagatatgaagcaactgtcaccattgtaggtctagcatcgggtcttgttga

SEQ ID NO: 6003 - DNA, 271 bp, Glycine max
  unsure (1)..(271): unsure at all n locations; Clone ID: 701145237H1
ggagatctcacactggcaattccttcttctcccagaatcggtcactaaatccgcaatcatgaagctcgataccaccggtctcgaatcgtttcccacactgntgngcntnaaaacgacgtcgttggagaactctccgccgntccagccttngaccttccgaatnccaacgatttcgatgggtttgtgaaagaagctattnattggtgaancccgcgnngggtactagactcttgctttatattgaaggnggngtgatggtagctgctgattc

SEQ ID NO: 6004 - DNA, 269 bp, Glycine max
  unsure (1)..(269): unsure at all n locations; Clone ID: 701145240H1
ggaggttgatacctacaatgtctgaaatctgctgagttacttactttgcatggagtacaatgtgaaaagccttctctttcctctcgaactcacaccggcccattcgcngcaaccgcaacactattatcgctctnacncanacatttcatgnaattgtaancacgccttgtaacttgtgagtagtatcccaggttttgtttttccctttccttcaatcatcaagttttgtttccttgggaagatcgacattgtgctgggagacactcttt

SEQ ID NO: 6005 - DNA, 265 bp, Glycine max
  unsure (1)..(265): unsure at all n locations; Clone ID: 701145241H1
ggcacaagtntgttgagatagctagaagcaataagatganaatgaaagtgcttgtttggtttgctgctacagttttggtagcatatgaatgccatggctcagactaccagaagttccctctccaaatgaaaactgggtttggtgggcatacagcaatgaggtngcattgccagttggaggctggngtggangcaaacacgtagtcaagtggcaaactgttcngcagcttgcggagagtacatagctgactacgtctaggagacca

SEQ ID NO: 6006 - DNA, 208 bp, Glycine max
  unsure (1)..(208): unsure at all n locations; Clone ID: 701145242H1
tgattaaactgctgcatcacctatatatttaaaaggtttatgggaccatagtagcganggctgtgcttaannnnnnnnnnnnnnnnnnnnnnnnnnnnnnnnnnnnnnnnntncctttttccctatcttgtgatctatttntgagtgagaaaaacaagagtgagaattgtgcgtgtatctggttgctaatcgagtgctattagtctgt

SEQ ID NO: 6007 - DNA, 263 bp, Glycine max
  unsure (1)..(263): unsure at all n locations; Clone ID: 701145243H1
gtatggttaatgcttatgctaatcatggggcttgttgagaatgctgtgcaaatttttattcagatgccggtgaagaatgtggtttcttggaattcaataatttgctgccatgttcaagaagagcagaagctgtgaaagttttccacagntcgtgtatttcaggtgtgatgcctgatgatgtaactcttgttagcattctttcatgctgcagtaacatgggtgatctggcttgggaaacaagccccgttncattgtgatatnat

SEQ ID NO: 6008 - DNA, 266 bp, Glycine max
  unsure (1)..(266): unsure at all n locations; Clone ID: 701145244H1
tttgtctttaatacttactgtatttcttgtcggagctcccctccaccccaaaattgcatccaccctgacttataagcttttgctgaatgacctaacttataagtnataacttaatgcataaagggatgatttggttgtgttcaaatngctagcaaacgagagaaaatttnaaattttatgtggaataccactttactattttaatttaatattcttctcaatttattttcaacaacccgtttcantaacagcttatagaatggcnt

SEQ ID NO: 6009 - DNA, 278 bp, Glycine max
  unsure (1)..(278): unsure at all n locations; Clone ID: 701145246H1
ggagcctattattatttcccttctctccttggctccttgctccaaaaccccttcttcagggtcancgctgtcagggttagggtttttccaccttctttatntaccaatcttcttctantaccnacttttccctcggtccctctcntaagtctcttcaattggnaagtttttggcgctaggggttnccnctggcaatctcttgtncttgnagctcgttccctcttccggatctcgtctatggatacccgcaagaggggagaccgaacccggcttcagct

SEQ ID NO: 6010 - DNA, 50 bp, Glycine max
  unsure (1)..(50): unsure at all n locations; Clone ID: 701145247H1
cacaagttantttgntngatcganatanctcatacacagtntgcatgaaa

SEQ ID NO: 6011 - DNA, 277 bp, Glycine max
  unsure (1)..(277): unsure at all n locations; Clone ID: 701145248H1
ggagaagatgtttatctcttcaccagctatagtntttctgaactaactgcactggccactggagcacaacagcaatgggcagcttcttcttctctttctcctcttcaatggcatatggagtgttgctccaaaggncatcaaaggtgtncccanaattngaangnngtcatnagnaaaatctcctntatggncctantttttgaaaaccngtatgcgggccnantgnaagancttnagnagnnagntncnatcaaaanggnanaangganngagtnct

SEQ ID NO: 6012 - DNA, 271 bp, Glycine max
  unsure (1)..(271): unsure at all n locations; Clone ID: 701145249H1
gactttaacattgggctgatgtcagcagagagcatggactcttgatgataaattatgctactgggtgcatatttgagtatgatgcagctcatccagagggttctggcattgggcttaaggatgaagacagacccancttctttggttcttctattcncaaaactaagggtatggntgaggagctcttaaaagaatatnacantntgtgcacctncaggntcncatgccaatttcatctganttgagcaatccangnattccatcacaagnt

SEQ ID NO: 6013 - DNA, 267 bp, Glycine max
  unsure (1)..(267): unsure at all n locations; Clone ID: 701145250H1
gactttaacattggctgatgtcagcagagagcatggactcttgatgataaattatgctactgggtgcatatttgagtatgatgcagctcatccagagggttctggcattggctttaaggaggaagacagacccaacttctttggttctttctattccaaaactaaggctatggttgaggagctcttaacngantatgtcaatgtgtgcaccctcagggttcgcatgccatttcatctgacttgagcatccacgcnattcatcaccaa

SEQ ID NO: 6014 - DNA, 59 bp, Glycine max
  unsure (1)..(59): unsure at all n locations; Clone ID: 701145251H1
ggacaaccatttctgcatacaaaaggtgtgtagaattcagagggagangcagantcatt

SEQ ID NO: 6015 - DNA, 246 bp, Glycine max
  unsure (1)..(246): unsure at all n locations; Clone ID: 701145253H1
gggtttcagcgatctttggaaagagtcctagcaaaggagtaaatcccgatgaggcagttgccatgggagcagctattcagggtggtatcctacgtggagatgttaaagagctactactcctagntgtcagtccactttctctgggtatgagactttgggtggtatctttaccaggttgattaaccgcaacaccacattcctactaaaaggagtcaggggtttncaacagnagctganaatcnagnc

SEQ ID NO: 6016 - DNA, 278 bp, Glycine max
  unsure (1)..(278): unsure at all n locations; Clone ID: 701145255H1
gttgccgagcacactgtcagagcccttcagagaancgtgcctgctgcagttcctgctgtcgttttcttgtctggtggccagagtgaggaggatgcatccgtcaacctcaacgccattaaccaggtcaatgggaagaagccatggtcatctctttctcctttggaagggcacttcancagagcacccttaaggcatggggcggaaaagaagagaatgtgaagaaggctcaggaagcccttttggtaagagccaaggntaatcagaggcaactctgggaa

SEQ ID NO: 6017 - DNA, 265 bp, Glycine max
  unsure (1)..(265): unsure at all n locations; Clone ID: 701145256H1
gatcacantctcattcgttaacacatcaatttctatctctcttatactctcactactctctttgctctttcttttctccactatggntgcacaagaaaacaacttccaagactacttgcctgtgatggccaacaagcttggtggggatggcctaattgatgaactgtgcaatgggttcgatcttttgaaggattctgataaaggggtcatcacttttgagagcctcaagaggaattcttacttgcntggtcttcaggtctcagtg

SEQ ID NO: 6018 - DNA, 271 bp, Glycine max
  unsure (1)..(271): unsure at all n locations; Clone ID: 701145257H1
gtcctacaattgcagcggcctcaaaaagattgctcaaaaacctcaacccacttcgaccagagagccctcgacgactgtntcaaactgttcgaagacaccaacgttgagntcanagccaccatcgacgatctctccaanagcnccatagggtcgaagcggnancatgacctgcagatatgttaagcgganaatgaccaattgtacacgtgnctcgatggattgcttacagcaaggacncntgagggacagaatcganaagaagtgntgagnt

SEQ ID NO: 6019 - DNA, 268 bp, Glycine max
  unsure (1)..(268): unsure at all n locations; Clone ID: 701145258H1
ggacagcatatatcaataatctattttatactatacctacattttgataattttctttgtagttggtagccatggctacccgtggaaagcttgaggttgacattgatctcaagtccaacgcagacaagtantggcaaacccttaggaattctanagaaatattccntaaggccttcccacatgattacaaaagcattgaggttntgagggtnatggcagtctcctgggtctatccggcacatagttntggggaggtcaccacttgtga

SEQ ID NO: 6020 - DNA, 125 bp, Glycine max
  unsure (1)..(125): unsure at all n locations; Clone ID: 701145259H1
gacactcatctantcccacattgtnctntnnccactctccaattgnaaangcttcngtatnaaaagatggatgggcncaaggtntgtttgnntcttggtgnggcttctcacgaaggntctcctct

SEQ ID NO: 6021 - DNA, 265 bp, Glycine max
  unsure (1)..(265): unsure at all n locations; Clone ID: 701145260H1
atcganaagaaaattttgcacctaaaagacttgtctatgatgaaagaagggctattgggaaatgncctttgactcctgaggaggttgggtcttattttgcgtgnattgggtttgacaattctaccatgatatatcttgncagctggtgaattgtttggtggggatcngntttatgatgccatntcgaagttngttcccctcgacttgaaaatcatcttcgtngaanacccggagagttgncngaaacactgnggggatggcagtt

SEQ ID NO: 6022 - DNA, 252 bp, Glycine max
  unsure (1)..(252): unsure at all n locations; Clone ID: 701145261H1
gggtcattcaattaacttatttggaaagangcaatagtatctcttatcatttaaannacatntttgaanggttgcaatagtggcttggttggtaactgaccgcttgaatanggtattcnncacgtggtaatgttgattctaangnctatatnngctggtgttcatnggnggctanctgacctccggnacatggcgaganactcttgggagcaaaggcttnnccgtgtnantttgcggggattgcaccncctt

SEQ ID NO: 6023 - DNA, 284 bp, Glycine max
  unsure (1)..(284): unsure at all n locations; Clone ID: 701145262H1
ggttgtngtntgttgttgcattttgcacttgcaaaatntntngttgcagangcagagagaggaggcaacgccacaccgcaccactctcactctgcaacanccgnntctngtttcacctanacgggntcntttacanagttctgttccantaacntntnctgcgtntaggtttngagaganggnagtnnggagcagnaatgngnctnangggcgnatgatcntcgaacgtcgaagaggttttaagggattcaagggccgaatagcngntctnatcaaagccctaa

SEQ ID NO: 6024 - DNA, 280 bp, Glycine max
  unsure (1)..(280): unsure at all n locations; Clone ID: 701145264H1
ggatgcacaagtttgttgagatagctagaagcaataagatgaaaatganagtgcttgttntgtttgttgctacagttttggtagcatatgaatgccatggctcagactancngaagttccctctccaaatgaaactgggttggtgggcaatacagnatgagggtggcatgngccattggnaggcntggcgtggaagcaaacaacggngtcaatggcaaactgtcntgcacttgcggagagtacatagntgactngttctngggaccatatagacagatcc

SEQ ID NO: 6025 - DNA, 156 bp, Glycine max
  unsure (1)..(156): unsure at all n locations; Clone ID: 701145265H1
ggaatgatattttccttaanananaaanccanttgtggnatgtaatacatgctaaacanaagccttgacttcatagtccntaccctaagattcctctttcctcttctnttcttcttcnttncttccgnaactgncgcaggtnnnaggaagncantc

SEQ ID NO: 6026 - DNA, 265 bp, Glycine max
  unsure (1)..(265): unsure at all n locations; Clone ID: 701145266H1
gtccacattcatattttcctttcgtttcctttcattttccctcactttctcgctccccaaacgcccctctctctcctccaatggccgancagctcaccgacgancagatcgcngagttcaaggaggccttnagcctcttcgncaaggacggcgatggttgcattactaccagggaactgggantgttatgaggtcactggtcaaaaccaatgaggaangactgnaggatatgataaacgagngtgatgntgatggcaacggnaca

SEQ ID NO: 6027 - DNA, 266 bp, Glycine max
  Clone ID: 701145267H1
gataaaagagtgtttgatactaaagatgttgaggctaaactaaagcaatcaaattgagattctttaaacaaatttactaagttcttatcttagatttacttgatcttgttcttttgacttgattcaatccatgctcatcaagtaacctttttggcatcatcaaaacttggcatgatatacattcacaaaaatatatattagatcagcatgacgaaatacaattcacgatttcgaggaaaaatatgtatttgaccaaattcctttgc

SEQ ID NO: 6028 - DNA, 264 bp, Glycine max
  unsure (1)..(264): unsure at all n locations; Clone ID: 701145268H1
gtgggagaagggtttggaaaaatgacactaccttaccatgcatcatgtcaagatacactgtcaattttcaccctcttccctcaacttagctcatgtttacttgcacaagggcacgagattaatttatcaatctaacaaggctgtcccacagantcatttgctcaaacttatnaacctatgttagtatgtaaccaatatattagtgcattatttttatttattaaattctatatgctgccagatcttcttgttcagctgcgcaag

SEQ ID NO: 6029 - DNA, 248 bp, Glycine max
  unsure (1)..(248): unsure at all n locations; Clone ID: 701145269H1
ggatcaagatcgtcctgataaacttgcagcttcagcacanncactatcaattcccctagtagctcagcagtttcttccaagttctgcttctcctggtgcntttcctgggtccatggctataccatctnctgttcaaccagctaaccaagctcctggtgctcatttatggccccttccttcatctgacacccctgaacagttgccaccatatccattattcccanctggcctcattcctggaatggtta

SEQ ID NO: 6030 - DNA, 264 bp, Glycine max
  unsure (1)..(264): unsure at all n locations; Clone ID: 701145270H1
ggcacaagtgagtttgttgatcgagataactagaaacagtgtgatgaaaatgaaggtccttgttttcttcgttgctacaattttggtagcatggcaatgccatgcgtacgatatgttccctctccgaatgaacactggctatggtgcccgagctccggaggtgnaatgcgcaagttggaggcttgcgtggaagcacacaacatctttggctttgagaccattcctgnagagtgcgttgaaacaacaaaggaatacatccntggc

SEQ ID NO: 6031 - DNA, 201 bp, Glycine max
  unsure (1)..(201): unsure at all n locations; Clone ID: 701145271H1
ggttataagatataggtagcaaaagcaaaggttaggcactgtggcatatcagccaagggagaggatcaagaacgctnatgctnntnttttnngcaatttttacaacnttntatnctttcttattngggcnnttcngngaatcctgtancgttcctgttngnccgtacnagcagcnggnggnatgngactttccccnnacgg

SEQ ID NO: 6032 - DNA, 271 bp, Glycine max
  unsure (1)..(271): unsure at all n locations; Clone ID: 701145272H1
ggggtgctgcggctgaagatctcgattagccgaaaattgcaagaacggcttcaggctcttgcgatcaacaaacgcagcgttttgatctcagatttgagggggagagaatggcaacaacagtgagaagtctgaagataaagacaagtacgtgcaaacgtatagtgaaggagctgcattcttatgagaaggaagttgagagagnagctgccaaaacagctgatatgaaggaaaaaggagccgatccctatgatctcaagcancaggaaaatgt

SEQ ID NO: 6033 - DNA, 144 bp, Glycine max
  unsure (1)..(144): unsure at all n locations; Clone ID: 701145273H1
ggaagcananattganaacccaaantgcttctctcctctgtctnttgctctctcttgctatccttttggctagtngnactgctgcaagtggcaactccaagangcgcatgcnaanccaccatgtntcnncatcngcagnngcnt

SEQ ID NO: 6034 - DNA, 263 bp, Glycine max
  unsure (1)..(263): unsure at all n locations; Clone ID: 701145275H1
ggagcagaggacaagatgggtagtgtgagttatagcaatctnaagaacgccatgatagcattcttggtccctctaccctccatcctattctacctctcattccatcggccattagtactccttnttcttggtcttctctgtggantngtgctatcaccaccctntgctattggccaatggtccttttccgcttcaatggcaatttctctncnggntcatcggcctaatccaatccagccactgggtacactttcaatttttct

SEQ ID NO: 6035 - DNA, 252 bp, Glycine max
  unsure (1)..(252): unsure at all n locations; Clone ID: 701145277H1
ggcacaagtgagtttgttgatcgagataactagaaacagtgtgatgaaaatgaaggtccttgatttcttcgttgctacaattttggtagnatggcaatgcnatgcgtacgatatgttccctctccgaatgaacactggcnatggtncnngtactccggaggtgaaatgcgcaattggaggcttgcngtgaatcacacaacatctttggctttgagaccattcnngagtgtgcgttgaagcaacaaaggatac

SEQ ID NO: 6036 - DNA, 278 bp, Glycine max
  unsure (1)..(278): unsure at all n locations; Clone ID: 701145278H1
gncaacacaacacancacnaacacaattatcnnacacgnatttgccntagttnggcattgctttgcgatggagaaaatggaactggcagagnacacctcnacctttgcnttncactaaaccacgtgtncctntgtatgcangangtgngagngagncagtgagattcctatnaggatgnccttggaattgttgcgccncaagngggccgtcntcttcaaattggaaggggccntgtaagtctnatncttcaantantacttgctaagatcttcatttc

SEQ ID NO: 6037 - DNA, 273 bp, Glycine max
  unsure (1)..(273): unsure at all n locations; Clone ID: 701145280H1
ggttgttgaggttttttgtagcagaattcagtgcggtgtgttgtagcagcgattagaaggaaggaggnaagatgaanncagacatcactgcatcgacgaagccagagtacccagtcattgatcgcaanctcctttcaccaaagtcgtcggcaaattcaacanctcgnctatttcgattcgtcacaatcncggggtttcggtcanggnggntancntctcgggnttancccgggaatgggggncctccantgtnaagggnttnnnccgtttntg

SEQ ID NO: 6038 - DNA, 275 bp, Glycine max
  unsure (1)..(275): unsure at all n locations; Clone ID: 701145281H1
gtatcatatttgtttactctttcccaatcaatggttcaattcaatattttgtttactctagtattataaantaattctccatgctttagattttttgatgatataaccatggtnttgttcagtgcaagtttcactttgcnttgntcattagtntgnaaaataggagacaatnatgattcccntttcttcaantgntncagagtcatgaccactgataattgtnacatcgnatcaacagaaagggaacaaggacctgtttcccaccnggngnggtg

SEQ ID NO: 6039 - DNA, 265 bp, Glycine max
  unsure (1)..(265): unsure at all n locations; Clone ID: 701145282H1
gggcaatatcaaggagaccctcttgantccaagattctacaccactgactttgatgagatngagacactcttcaacactgagatcancaaaaacctcaaccaggatgagtttgaggcactgctccaggagttcaagactgactacaaccagacacactttgtcaggaacaggagttcaaggaagccgctgacanncttgagggtcccctcagacagatcttgtggagttccttgagaggtcntgcactgctgaattctctggctt

SEQ ID NO: 6040 - DNA, 274 bp, Glycine max
  unsure (1)..(274): unsure at all n locations; Clone ID: 701145283H1
gganaaagttttgaagcaaagtctggtctatgcaggggctgagctacaattaaagccaaagaaggactttgatgcacaaagagaaaaggaattagaagagcaagaaaaattccggccaccttagggttcaggtcaccagaataacacaaatacagaagcaaactacccnaaaggcttacttatagccttcaaactacagagcatttctgatcaagttccttggatcanaataacattgatcagcaagccatgacagtntgttgtgaaggataat

SEQ ID NO: 6041 - DNA, 264 bp, Glycine max
  unsure (1)..(264): unsure at all n locations; Clone ID: 701145284H1
atagcaattttgacgcggagaggctgcttccgcgagaaggaggcttcaagagaactacaaagaggctgaaattgccaaaaggcaaagaacgattcangtgatggacatccatgagttaccgaagttcanancccnnnaataatgtcttctgtgggaagacacaaangnngtngtgntggtagtggtctctcntgtnagtnnntggtgtngggtgattatatgatggngangctgttntnccattgttggtgccacgttgcgtna

SEQ ID NO: 6042 - DNA, 269 bp, Glycine max
  unsure (1)..(269): unsure at all n locations; Clone ID: 701145285H1
gatctcatttatgtaatatatgttctagcataaccttctaacggtgatgctcttttgagagttcttccgaatgatggtgaaaggancnagtgaaatgtancttcagaagtactttgacagcatataagaatacaggttgaattattngttggngngacttgaccttaaagacctttgggatnatanttggaattgtcantttcagcactgcnagntaatnttttgtcaagtatnnatgtangtattatcagtagatgattgtgtatatc

SEQ ID NO: 6043 - DNA, 288 bp, Glycine max
  unsure (1)..(288): unsure at all n locations; Clone ID: 701145287H1
acacaccgtttgttctattcttaactcaacttctggctacccactctcttcttccaagtccaaccacgcttttctctacagtcgtgggcaaggtcaagatcggaatcaacggatttggaagaattggccgtttggttgccagagtcgctctgcaaanagacgatgtggagctcgttgccgttaacgaccctttcattaccaccgattacatgacatacatgtttaaatacgacagtgntcacggacactggaagcatcacgatgtcaccgttaaggacgagaagaccc

SEQ ID NO: 6044 - DNA, 245 bp, Glycine max
  unsure (1)..(245): unsure at all n locations; Clone ID: 701145288H1
gggacaacatcaacctacatccagtttcgttattcgcncgacacattttttctccgatcccctattcctctgccattctccgttgtgtcgatttttgttactcaaaagggaaattgatttgatagatagacngatagatcgttnctatgggttaaagtgaaatccgaatccgaatctgaatctgaatctgatccaatcattttcatgttagggcgtgcgatctccaatcaagcgcggttgtgttt

SEQ ID NO: 6045 - DNA, 265 bp, Glycine max
  unsure (1)..(265): unsure at all n locations; Clone ID: 701145291H1
gaggtaccgagagcttgctaaccgagttgatgaggcccttggattcatgggctgctgctgggctcanggtggaccatcccataatgagaacaactgaattctgggacatctcatgagtgcttattgttggccttatgancaatccctcacaaggttggattcaacttctggtctctactatgaatgttcagcccatatgatctgggttggagaacgaaccaggcagcttgatggtgcncatgttgagtttctaagaggagttgct

SEQ ID NO: 6046 - DNA, 259 bp, Glycine max
  unsure (1)..(259): unsure at all n locations; Clone ID: 701145292H1
atatganagaacttttacaaaattagtttatgtctaaattaatgttagcttatgaagaagtttattttatttttcngtgctattttcttctccaattagtgtnaagttctactagatgaaaatggtggacaaatttttaatacattgnattgctttctaatcttntcctgctaggtggccaagtntgcaagnacttaccanagcgaactgntaacganacaagnacntatgggnctcatntccgggaaagcagttggaa

SEQ ID NO: 6047 - DNA, 270 bp, Glycine max
  unsure (1)..(270): unsure at all n locations; Clone ID: 701145293H1
gcaaaaggtacanaacanattaaaagaaaaagggnaaagtatactacgcagaagaggtngttcaaagttcaatggctgagcaagaaggaaatgattccgcaacnttngacatcgatgccaaatgggnngctgcattnatctcaccgtacgtcgctttnntctantncgtcaaccgncggtgcatttgggcnggtctctnattttccaggagtcctggtgactcgatggggatctattggntttggngctggagtggaatcgaacngcata

SEQ ID NO: 6048 - DNA, 273 bp, Glycine max
  unsure (1)..(273): unsure at all n locations; Clone ID: 701145294H1
gggaaatggaaataggcactcactcacttgcagcgaagaagnaaaaaaatanaaacaccatccagcatcttcacttcaccacgaaggttccattctctgtggatcnatatctctagggcacgttacgtggaaggaagctcttcaccgacttcaatcgaagaagatggattacagtgctggttcgagtctgtttccgttgcaccgttgcaagaaccattcacctggtgaggcacgcgcagggattcacaatgtggagggtgacaaanactacaa

SEQ ID NO: 6049 - DNA, 207 bp, Glycine max
  unsure (1)..(207): unsure at all n locations; Clone ID: 701145295H1
ggaatcanaatcctggttaaaaattcangantttgttagcgtctctcctccaaatggaatagnaagacgcactaaaggttccatccatttggnacttgggagtgtagngtnccattgctccaggtgtcggngggccannntgttttntcggggtcagaccattngnagncacgtcctcatcgagtanatgnagnccgtccngnnnnc

SEQ ID NO: 6050 - DNA, 276 bp, Glycine max
  unsure (1)..(276): unsure at all n locations; Clone ID: 701145296H1
ggcgctagttctgagtatttctgatcgctccctgagatagctcgtcgcgggcggttgcagaagaagattgcaagatgaagttcaacatcgcgaatcccancactggatgccagaaggagctcgagnncngcggaccgatcngaaaactgcgggcnttttggggacaagggttctcacaggngntaancgnanatncnctccggtnaggatttaaggggctatgtnttnaaaatcncggggntgnaananaaaggtttccnatgagnagggactgct

SEQ ID NO: 6051 - DNA, 260 bp, Glycine max
  Clone ID: 701145302H1
cacgaagaagagcgtggagacctacaagatctacatcttcaaggtcctcaagcaggttcaccccgacattggtatttccagcaaggccatgggcatcatgaacagcttcatcaacgacatcttcgagaagctcgcccaggaagtgtcgcgtttggctcgctacaacaagaagcccaccatcacctcgagggagatccagaccgccgtggtctcgtgctccctggtgaattggccaaacacgccgtttctgaagggaccaa

SEQ ID NO: 6052 - DNA, 259 bp, Glycine max
  unsure (1)..(259): unsure at all n locations; Clone ID: 701145304H1
gatgcaaactcgtgaagagttgattgaagcctcggctaccctcgtatggatcgcttcagcccttcatacagctgttaactttggacagtatccatatggaggtttaatcctaaacaggccaaccantagcaggagattcatgcctgagaaagggtctgctgagtatgcagctttggctaagaacccctgagaaggagtttttgaagactattactgggcaagaaggagaccctcattgacttacaattatagaaatctt

SEQ ID NO: 6053 - DNA, 255 bp, Glycine max
  unsure (1)..(255): unsure at all n locations; Clone ID: 701145305H1
tggaatcgncatgactatcctcattgagcaatctgatcactttggtaatattttgtgtttttgtttgtaatctttaactttttttagcaaaatannnnnnnnnnnnnnnnnnnnnnnnnnnnnnnnnntgaaaattatagagaagattctaatattggcaatagaggttggcgggttttcctgaatttacaagggacatgtctttcnttaatctaaacttttttcaaaannagaaagtgcaatatttgtattnnc

SEQ ID NO: 6054 - DNA, 254 bp, Glycine max
  unsure (1)..(254): unsure at all n locations; Clone ID: 701145307H1
ggtctcgtggaagtgtaagcaagcaaaaccctagcggcgcctgctttctttgttcgtgttttgcatcaggatggagtctcaggtgaagcacgcacttgttgncgaagttatgggtcgtactggtccagaggacaagtgacccaggttagagtgaagttttnggatgatcagaaccgtcacatcatgaggaatgtgaaaggacctgtgagagaaggagacttctcaccctaatcgantctgaaagggaagcaaga

SEQ ID NO: 6055 - DNA, 226 bp, Glycine max
  unsure (1)..(226): unsure at all n locations; Clone ID: 701145308H1
ggcacaaaaatacaatacaaaacaaaacagagcaaagagagagtgtgtgaaaagtgaaacaaaaaacagaacaacaatggcgacactaaggttcctcagcctcttccccccgttgcgatgttgtngcagtccgaaaagctttcagtgggnaatacgagagtgttgtatcgatctggctctagatgtgctcgggatcttcaagactttcccaccttggagagtctct

SEQ ID NO: 6056 - DNA, 273 bp, Glycine max
  unsure (1)..(273): unsure at all n locations; Clone ID: 701145312H1
ggcatcaattcaaaatatatcatcaattataagcatgggtttgtggaacacaacgaatgcagtgtcttgccgctttcacaagttcggtgatgaccaaaagaatctggtcttccaaggtgatgccacgtcttctttccaggggcatagaactcacaagtttagacggtggaggaaaacccagtgggtggcnatgtgggggaaantgtatantcttctccagttgcnacctttggggaaaanntcttacagtgggtcgcaaagctttggaaaccc

SEQ ID NO: 6057 - DNA, 109 bp, Glycine max
  unsure (1)..(109): unsure at all n locations; Clone ID: 701145313H1
taatggacgaatatgatataatattatttcagganaattcagccaattnggantanaacatcngtccaatanctangncatctaggtccaatancgatagggaatnggg

SEQ ID NO: 6058 - DNA, 273 bp, Glycine max
  unsure (1)..(273): unsure at all n locations; Clone ID: 701145314H1
cagctggagctgagtcccactatgagcaactcctcctcctcgctatccatggagctggacgagtccccggagagcagaatccaacggttgatatcggagcacccggtcatcatctttcacccgatcctcctgctgcatgtgccacgtcgtgaaagaagttcctcgcnaccatcggcgtccaccccacngtcatcgaattggacgacaaggagattcgcggccttccccggacacaagggcccctcggcntttaataggcggcaactgcattgg

SEQ ID NO: 6059 - DNA, 282 bp, Glycine max
  unsure (1)..(282): unsure at all n locations; Clone ID: 701145315H1
ggcagttcaattccaatatattccattctctctgtgtattttccctacctctcccttcaagatgcagattcttcgtcaaagannctcancggcaagaccatcaanctttgaaggtggaaagtctgacaaccatcgaaaanntcaaagggcnaagattccaaggacanggaaggattccccccgganccagcaaacggctcattttcgccgggaaagcatnttgaggagggccgtaaccttggtngattacaacnttcaggatggaggtactctttcactnng

SEQ ID NO: 6060 - DNA, 275 bp, Glycine max
  unsure (1)..(275): unsure at all n locations; Clone ID: 701145316H1
ggagtccaataaacaatgagcaatctaagctcgaaggttcaacttctgaagaaggagctgcacctgatgaacacaaaagaaagcgtggacttgactatatttttactttcagttccaaataagaatgctgagggggaagcacttaaagattcttctggggaagagcctgtgatgatgatgtggaaagaaccatgtggaaaggagncctagagttgccccaaaatagtactgctaactatgtggaaagcaattggccgagcaaaagaaangatgnc

SEQ ID NO: 6061 - DNA, 256 bp, Glycine max
  unsure (1)..(256): unsure at all n locations; Clone ID: 701145317H1
cactgaggataaggaagaggaacaaccagtggagcggcctcgaaagacatcaaaatatatgactaagtatgagcgtgctaggattttaggtacccgtgctcttcaaatcagtatgaatgcacctgtcatggttgagttggagggggaaactgacccacttgagattgctatgaaggagctccgagagcggaaataccctttacattcggcgctacttgcctgatggaattatgaagatggggagtcgtgaactgnt

SEQ ID NO: 6062 - DNA, 259 bp, Glycine max
  Clone ID: 701145318H1
ggggtgccattgttgctgtcatcatccgcagctgctgttattcgcaccgcaaacaaacagtgagccatggccgtcggaaagaacaagcgcatctccaaagggaaaaagggtggcaagaagaaggcagctgatccctctgccaagaaggattggtatgacattaaggccccttctctttttcaagtgaaaaatgttggcaaaaccctcgtctctcgtacgcagggtaccaagattgcttctgaaggacttaaacatagag

SEQ ID NO: 6063 - DNA, 265 bp, Glycine max
  unsure (1)..(265): unsure at all n locations; Clone ID: 701145320H1
gactagaaaaactagggaagagagaagaacccagttgcaacactaattttctctttccctttttttggacttatccttctttctgcaactccaaaatgggttccaaaggggcaaaaaatctagcactctcttcagccntgttgctccttttggtcggttttggcaacctcagacatcaatcaagacaaagcagaatgtacggataaacttcttgggtctagctggttgtctttcctatgttggtggcgaaccaaaagtccccacc

SEQ ID NO: 6064 - DNA, 257 bp, Glycine max
  Clone ID: 701145321H1
ggtaccgatcaattaacaaccatatctatctattgagaaacatgaagaaggtttcacccttggcattttccattctctttttggccttcaccatagaaccctttattggcattgctgcagcagcaccagaagcagtgcttgacacctcaggccagaagctgagaacaggtgtcaagtactacattctgccagtgttcagaggcaaaggtggaggcctaacagtttcaagcagtggcaacaacactgccccctctttg

SEQ ID NO: 6065 - DNA, 255 bp, Glycine max
  unsure (1)..(255): unsure at all n locations; Clone ID: 701145323H1
gacaagtgagtttgttgatcgagataactagaaacagtgtgatgaaaatgaaggtccttgttttcttcgttgctacaattttggtagcatggcaatgccatgcgtaacgatatgttccctctcgaatgaacactggctatggtgcccgtactccggnnngtgaaatgcgcaanttggaggcttgctgtggaagcacacaacatcttgggctttgagaccattcctgaagagtgcgttnaagcaacaaaggatact

SEQ ID NO: 6066 - DNA, 262 bp, Glycine max
  unsure (1)..(262): unsure at all n locations; Clone ID: 701145325H1
gacacttcaaaatcctctagtaacccttcttttctctctctctctcgtgttctgagctgctagaagcaatggagaggaaaagaagccatgcttctttcaccatgtttgcnaatggcttgttggattgctcttcagagcttgtcattcngtaatatccaccactgttgcngatcnagaaganctaatacaccccagatccacatgctggaagtcccccnacaggtttctcggattctcgtgcnnacnattngtagtcctccac

SEQ ID NO: 6067 - DNA, 267 bp, Glycine max
  unsure (1)..(267): unsure at all n locations; Clone ID: 701145326H1
ggagtcataatataagagaattcaaggggcaatgaagtcaaaaaacctgcaatgtagatagattaagcacgataaacaaatctccatgataactacatactaagaaaagagagcagcttacttaggtggatctggttcctactaactagttaaatttaccgaagagaaccttctttaagggagaactgaaccgaaanctccctttcaggggagncngcgggancttgattacgccaccnggcttactctncgtttagttactgaagg

SEQ ID NO: 6068 - DNA, 264 bp, Glycine max
  unsure (1)..(264): unsure at all n locations; Clone ID: 701145328H1
ggcatcaattcaaaatatatcatcaattataagcatgggtttgtggaacacaacgaatgcagtgtcttgccgctttcacaagtttggtgatgaccaaaagaatctggtcttccaaggtgatgccacgtctttcttccaggggcatagaaactcaccaagttagacngtgggagggaaacccagtgggtggcantgtggggaaaatgtatactcttcctccagtgccaccttngggaaacnctacaggggtcgcaatcttaaaac

SEQ ID NO: 6069 - DNA, 253 bp, Glycine max
  unsure (1)..(253): unsure at all n locations; Clone ID: 701145329H1
gattcacaacttcaatccctcttttgctttaccaaattccattttccaattcaaaaccctaactccgttcgaagcaccaaatcgtgatggcaccaaaggcagagaagaagccagcagagaagaagcctgtggaggagagaaatcgacggtgggagacaaggctccggcggagaagaagcccaagggcgggaaaagaacttccgaaggagggagngccggcggagaaggttataggaagaagagaaaccagagg

SEQ ID NO: 6070 - DNA, 272 bp, Glycine max
  Clone ID: 701145330H1
ggagagaagttattagggtttttgagtgcggcggtccaaacactcttctctgcagcttttgcctacaactcccttcaccatggctgaacaaaccgagaaagcttttctgaagcaaccaaaagtgtttctcagcacaaagaagactgggaagggaaagagactggaaaaggtgggaaccgctttttgggaagtccattggggctcgggatttaaagactccccagggaagccatcgaaggaaacctatatgacaagaagtgccccttcactgg

SEQ ID NO: 6071 - DNA, 56 bp, Glycine max
  unsure (1)..(56): unsure at all n locations; Clone ID: 701145331H1
ggacgcaaggacgatgagtatagnatgagtaatcagattcagagtgtatagtgatt

SEQ ID NO: 6072 - DNA, 270 bp, Glycine max
  unsure (1)..(270): unsure at all n locations; Clone ID: 701145332H1
ggcgagatagaagagaaagccgtcgctatcctagtctcttcttcccctctacccatttcagttttcaggatggaatctcaggtgaagcacgcccttgttgtcaaagttatgggtcgtactgggtctagggggcaagtgacttcanggtagagtgaagtttttggngatcaaaacgacaacatcatgaggaacgtgaaagggacccgtgagaaaaggagacatctcnaccctattgggtctgaaagaggagccagaaggtgcntagaggat

SEQ ID NO: 6073 - DNA, 270 bp, Glycine max
  unsure (1)..(270): unsure at all n locations; Clone ID: 701145333H1
gcggattttcgtggctacgcaaacttctgcttcaagacctttggagacagagtcaaatattgggtcactttgaatgaacccttatcatttagtctcaatggctacaatggtggcacctttggcaccaggtagatgttcaaatacgttgccaattgtagtgctggcgattcatccactgaaccctatatcgttggacactacttattacttgcncatgaatctgctgccacattatacaagacaaatatcaggctcgtcaaaaaggacaat

SEQ ID NO: 6074 - DNA, 254 bp, Glycine max
  unsure (1)..(254): unsure at all n locations; Clone ID: 701145334H1
gattccggagagggagcctgagaaacggctaccacatccaaggaaggcagcaggcactatcttcatatgtattcatagcagctaatgtcattctcaactcatctaaagatgttcaatctagtcatttgaacgaattgtttcctcctctagttccattattaacatcacatcatcatagcttacgtggttttaccagttactggcatatcaaattctacataaactgtttccatggnggattatggatctctggg

SEQ ID NO: 6075 - DNA, 254 bp, Glycine max
  unsure (1)..(254): unsure at all n locations; Clone ID: 701145336H1
gatgcttggaaaggtgaagacctttttacttatattatgttttcatgcatgcaaggaaaaaatgacacttcttgaagttgatcttgatgagctatttgcatttgatattgatgaaatgtggaaataatagatttacttgcatagttctcaactgatgtactgcattcaatagcaaattcanatccaatatatttatgcttcaatttgcagagagaatcaggaactgaacaatttggcnactagccaatatattg

SEQ ID NO: 6076 - DNA, 256 bp, Glycine max
  unsure (1)..(256): unsure at all n locations; Clone ID: 701145337H1
cgggactgcatactgtggcagatattttntgttgttgctgtggtcaaatagttggctggaaatatgagtctgcacatgagagaaaccaaaagtataaagaggggaagtttgttcttgaaagagggaggnttgttgatgaaatggatttctccactgaattccgtattgagagttgtgtcagcatgagtgatgctgaaaatgcttaaactttttaanaatctgcngtncttatccagntcaggtgaaagaatcgact

SEQ ID NO: 6077 - DNA, 255 bp, Glycine max
  unsure (1)..(255): unsure at all n locations; Clone ID: 701145338H1
catcgattagctttaatgcccgtataaaaatatagaatatagggaagtcactgganactcagaggaagaaaccaaggtagatccaaaaccaaggctgagtcattaatatatataggcatgtttcggcctccaatgttgtaatctttncaatagaaaatctgacatttagtctcctatnaaattaccattgtgctgctcttatttnnacnggattgcatatggtaaatanttttattaacccattgttcnatttga

SEQ ID NO: 6078 - DNA, 262 bp, Glycine max
  unsure (1)..(262): unsure at all n locations; Clone ID: 701145340H1
gatacacgctacttttaagtttgattgaatacaagacacttgtcatgcgtggtgatttggaaagggccaatgaaattctaccatcaattcctaaagagcatcataacagtgtggctcatttctggaattcacgagggatgatagaggatgctcttgaagtagcgaccgacccctgactataggtttgatctagccatnccggcttggaaagattagnggtnnctnanggtattgcccactggaattgcntagtgntntccnc

SEQ ID NO: 6079 - DNA, 272 bp, Glycine max
  unsure (1)..(272): unsure at all n locations; Clone ID: 701145341H1
aaagagacctggaaaaggtgggaaccgcttttggaagtccattgggcttggatttaagactcccagggaagccatcgaaggaacctatattgacaagaagtgccccttcactgggcaatgtttccatccgtggcgtatcttgggctggaacatgtcacagtgctaaagatgaaccaggactattattgttagaagggattatcctccattttatcaggaagtacccagaggtacgagaggaggcactcaaatattcnggntcatatatcacc

SEQ ID NO: 6080 - DNA, 260 bp, Glycine max
  unsure (1)..(260): unsure at all n locations; Clone ID: 701145342H1
ggcatcaattcaaaatatatcatcaattataagcatgggtttgtggaacacaacgaatgcagtgtcttgccgctttcacaagtttggtgatgaccaaaagaatctggtcttccaaggtgatgccagtcttcttccaggggcatagaaactcacangttagaacggtggaggaaaaccagtgggtggcnatgtggggagagtttaatactcttctcccagtgcccttggggaaacctccaanngtgggncgcaattttnna

SEQ ID NO: 6081 - DNA, 266 bp, Glycine max
  unsure (1)..(266): unsure at all n locations; Clone ID: 701145343H1
gacagaaaagaccgttgaatttcaaacctcagccatgcccgctctcagaaagcgaaatcgattgtcggagttcgatgccatatccaaccacgacacacctcatgaaacagaagaagaatatgtctgagtacgagctgtcgagaggagcaagagaatnccgcgaaaanccggcgangagattgggaaagcnggggaatcttggacntttcctcaatctcaggctnnacancaaaaccaaaggttcttattcctctcacaanccccaa

SEQ ID NO: 6082 - DNA, 199 bp, Glycine max
  unsure (1)..(199): unsure at all n locations; Clone ID: 701145344H1
tgagttgcatgcatttggtggaaacgctaattatatataattttcttaaaataaaacttgaacttaaaagtacgtaacaacgccgatttttcatcaggcccttagataaagagaaagaggaggtaatacatgtataanggatgagaagtaggatgaaatagngaaacagatgaaatatggggaatgtgctacgatacct

SEQ ID NO: 6083 - DNA, 262 bp, Glycine max
  unsure (1)..(262): unsure at all n locations; Clone ID: 701145345H1
gaaaaagggagatcggagagacagagagatcagtagtatcagagatggggagagggcaagttctgagcgcgtaccgcgcgcttctgaaagcgacacggaaaacattttccggcgacaccatgatgctgaaggaatctgcggtggaagtaaggaagaagttcgaggaaaacaagaacgtgagctccgangcggagatcccagaagcttctcctagaggctggaagaagcctctatttcatcaccaacatgctcgtccaggcac

SEQ ID NO: 6084 - DNA, 267 bp, Glycine max
  Clone ID: 701145346H1
ggtctccaatggcaggagctactgcaacaacaacagcattaatcaatctcacgcgcccttcacactcctccaagcatcgccacttctcttcaaacaatgctcccttttctatccaaccctttcattccggattctaccacaaccgtcgtttaaagccaataattcacccattgccatggcaagctgaattagctcggtggggggatacgcgatggatgaagcgggttttgatgagtacgatggagtggagacgaaatggtgacgagg

SEQ ID NO: 6085 - DNA, 255 bp, Glycine max
  unsure (1)..(255): unsure at all n locations; Clone ID: 701145347H1
gatgcaaaacacanccatgatacattaattgagaggatgagaaactctcttagcaagattttggttcactactatccaatagccgggtcgattgagaagggtaganggtagtgggtcgantgggaattgggattggcaatgccaaagggggtggtgttgcttgnaagctgaattccnccaaaaccntgggatgattatgggagacttttaccgtgagtccatccagggcttgggttccaacggttgattacnacc

SEQ ID NO: 6086 - DNA, 259 bp, Glycine max
  Clone ID: 701145349H1
ggatactactggcttagggcttgttatctacattgtagtcactgtttgtattggaaccatttatttgaatgtgggaacaggctacaactctattctggctagaggttcttgtgcatcttttgtctttggttttgtcaccttcatgtcaattggtggattcccttcatttgttgaagacatgaaggttttccaaagggagaggcttaatggccactatggtgtcacttccattgtcaatcagcaacacattatctgcaat

SEQ ID NO: 6087 - DNA, 253 bp, Glycine max
  Clone ID: 701145350H1
ggaggcaagaagttgtattttggcatccccgtggcttcaagaagagaatctcaatggaggcccaggagctgaagcgcgtgttccagatgttcgaccgcaacggcgacgggagaataacgaaaaggagctgaacgactcgctggagaacctgggcatcctcatctctgacaaggactgagccaaatgatccagaggatcgacgtcaacggcgacggttgcgtggacatggacgagtttggggagctgtatcaga

SEQ ID NO: 6088 - DNA, 255 bp, Glycine max
  Clone ID: 701145351H1
gcacaaagcaaagctcatccttgagttaaaaaatggcagcagcttcttccatggctctctcatccccatccttggctggcaaggccgtgaagctgggcccatcagccccagaagtgggaagggtgagcatgaggaagaccgtcaccaagcaggtctcctcaggaagcccatggtacggcccagaccgagtcaagtacttgggcccattctctggcgagcccccgtcctactaacggtgagttcccagggactacg

SEQ ID NO: 6089 - DNA, 255 bp, Glycine max
  unsure (1)..(255): unsure at all n locations; Clone ID: 701145352H1
gtggctcatatggggtttctagtcgggaaaatttaagtgaaagtagattgatggatctccttcatggttcagaatatgttcttacctatgaagacaaggatggagattggatgctagttggtgtgttccncgggagatgttcactgagtcttgcaagaggctgaggataatgaagagttctgaagcaattgggctagcacctagagccatggaaaagtgcaaaaagtcgctactagctagtgcatgctgtatgct

SEQ ID NO: 6090 - DNA, 230 bp, Glycine max
  Clone ID: 701145353H1
gggcatcaattcaaaatatatcatcaattataagcatgggtttgtggaacacaacgaatgcagtgtcttgccgctttcacaagtttggtgatgaccaaaaaatctggtcttccaaggtgatgccacgtcttcttccaggggcatagaactcacaaagttagacggtggaggaaaaccagtgggtggcagtgtggggagagtgttatactcttctccagtgcaccttggga

SEQ ID NO: 6091 - DNA, 252 bp, Glycine max
  unsure (1)..(252): unsure at all n locations; Clone ID: 701145354H1
tgtattatttaagcatgcaatggtgtaattttgctctttcaagttttttttagtcaatcaaatttctcattttcaaaattgaggatattttaccgctttcggttttcttctacaaaaaagttcgaatttttattttctactctaaatcttcactcattaaatcacattttatttaaattaacaaaaatatcaantttacccaaactaatatcgtcttaaattttctcttcaaattctaacctcattctatng

SEQ ID NO: 6092 - DNA, 257 bp, Glycine max
  unsure (1)..(257): unsure at all n locations; Clone ID: 701145356H1
gacgcaactgaaaaagaaaagccttccactattccatatatagcagccanaaaagaatgaagaatactgcgttgttcactatctttctactccttgctttcacctcatacctaccttcagccaccgctgctagtgtgtacgatacggatggtaatattcttcaanagggtcgcacatattttgtgttggcgnnacaagaggnaaccggcggtgggaatagatttngccgcanctggaaacgncncttgtccactanc

SEQ ID NO: 6093 - DNA, 260 bp, Glycine max
  unsure (1)..(260): unsure at all n locations; Clone ID: 701145357H1
ggcacaagtgagtttgttgatcgagataactagaaacagtgtgatgaaaatgaaggtccttgttttcttcgttgctacaattttggtagcatggcaatgccatgcgtacgatatgttcccctccccgaatgaacactggntatggtgccccgtnactccggaggtgaaaatgcgnaagttggaggcttnctgtggaagcacacaacntctgtggcntttgannaccnntcttgaagagtgntgaagcaanaaggnatncc

SEQ ID NO: 6094 - DNA, 143 bp, Glycine max
  unsure (1)..(143): unsure at all n locations; Clone ID: 701145358H1
ttgctgagttaaagagaaccaagaccatgatcattctcgtgnaaaactgaaaaggaagatacaggggccagtcaaacttctccacnagaatgatgaattagggaatcccgnccctggatgatatntcnatggtccaggnggcg

SEQ ID NO: 6095 - DNA, 251 bp, Glycine max
  unsure (1)..(251): unsure at all n locations; Clone ID: 701145361H1
gagtgtcaatagaacatattagcacaaaccttataataattgatccttgacaaagggattacccccaagacatttatagaacatgttgaaagtatagacattattgttattgatgatcataggtaattaacttatggatttaactaacactctgagtttatttatggtatgtcctaattatccggtcctttatgtttgtatgcttattggtatgagngtaatgttacagatttgttttgataaggacatta

SEQ ID NO: 6096 - DNA, 267 bp, Glycine max
  unsure (1)..(267): unsure at all n locations; Clone ID: 701145363H1
gggtgctgtgagtgagattacccatagatagagagcgcggcataacctaaacttacccttcttctctctgtgtgtgtgcgcatcaaacgcaaccagaagcagccatggccactgcnaagaactgtgaaggacgttctcctcatgagttcgtcaaaactttactctttctcacctccaggcgatctggcaagatgggagctgccagagtgggactgatatgtgnaactgcaagattaaggggtggctccttatgatccgactggtact

SEQ ID NO: 6097 - DNA, 269 bp, Glycine max
  unsure (1)..(269): unsure at all n locations; Clone ID: 701145364H1
gaatgacagagaggccaacgaggaagagaaaaatgggagacacaaaggagagagctacgaagaaacccgcggcaaaatggcctctcatcaaacccaaaaagaatcttcagattagccgcctccgagatttcgatctcttcaggtccagaatttttctctccgctgaatcaaaggcattcgttaaaatgctggagaaattggtttactcatcagggagtctaggtccacttatggcgaanattccagagatatgatcgatgttggtggnt

SEQ ID NO: 6098 - DNA, 257 bp, Glycine max
  Clone ID: 701145365H1
gacaacatatccattttatttacaacaacaatggcttctgtgcctcaaccaaaaatctcccttctaaccttattcttcttctcgtccttcaccatcattgcgcatgcaattgttcctcaaaacgaaaccttcaaatttgagaactcaggtgaacttggaccctacatcgttgagtacggtgcagattacagaatgataagcatcttccaactctccattccagttggttctaacaacacaaccccaaatgctttcat

SEQ ID NO: 6099 - DNA, 263 bp, Glycine max
  Clone ID: 701145366H1
ggagttcacagagagaatggctgcggaaaacgttgttgagttcacagacttacccgtcaagaggccaagagaagaagaagaaggaaccaatggcgtctccaacgacgccgtttcagcgctccccaatgaccctcaataccctggcatctctgcggttattcccggttggttctccgaaatcagcccaatgtggcccggggaggcacattccttgaagatggaaaagattttgtttcaagggaagtctgactatcagaatgtcc

SEQ ID NO: 6100 - DNA, 253 bp, Glycine max
  Clone ID: 701145368H1
ggcgcaagcaaagatgaatgaagcggaggagcaactttgcgaggcggccagaaaaggtgacacggagaaagtgaggtctctcatagactccggcgctgacgtcagccacttcgacggcgaggcctcaatcctctgatgcacgccgcaaagcacggccatgcacccgtcctcaccctcctcctctccgccggcgctccctggaacgctctttccccctccaacctctccgccggcgactacgccatgcaagaag

SEQ ID NO: 6101 - DNA, 234 bp, Glycine max
  Clone ID: 701145370H1
ggagaggagtgttcccaaaatcgcaataccttcaactctatctgcaacagccaactttctcgttcgtcgatcacaaaaatggcggcgaaacttcaaatatttacgggattgccccccgcgccatttcaatcttcctcctccactctctgcgtactcaagaagcctctcactacctccttcttcggcatggcacgagtggaattctgaaacttcgagtgatgaggttgcgaacct

SEQ ID NO: 6102 - DNA, 230 bp, Glycine max
  Clone ID: 701145371H1
gggcatcaattcaaaatatatcatcaattataagcatgggtttgtggaacacaacgaatgcagtgtcttgccgctttcacaagtttggtgatgaccaaagaatctggtcttccaaggtgatgccacgtcttcttccaggggcatagaactcacaaagttagacggtggaggaaaaccagtgggtggcagtgtggggagagtgttatactcttctccagtgcaccttgggg

SEQ ID NO: 6103 - DNA, 237 bp, Glycine max
  unsure (1)..(237): unsure at all n locations; Clone ID: 701145372H1
ggatcaaatcaacattcgtaataatttcttccatcagatatattttcctcaaaaacnatggcangcgaggtggtgaagaaggaagactctctcaacctgaaagtcactaacaagagtcatgttcaacctgaggagaaaattggaaggaaagagtaccagctggtcacttttggatccttcctanntggccttctatacaaccagnagcnggctgttttacaaggntgaagtntttnc

SEQ ID NO: 6104 - DNA, 266 bp, Glycine max
  unsure (1)..(266): unsure at all n locations; Clone ID: 701145373H1
ggtgtgcaagcattccaatcgctcccaaaatcttttctaatttgttcataactcaataattctcatcatgggctccttgattgttccaggtgaacatgatcacaaactaaagcttgtttctcttccctttgtatcaaccagtcaccttcatcccgtagntagacanagctaggctctntggcnnctnagggtgttnganggtcnacataattcaccaaccacaggccactgcggcaattttcccaaaggntcnancggatcgcggc

SEQ ID NO: 6105 - DNA, 190 bp, Glycine max
  unsure (1)..(190): unsure at all n locations; Clone ID: 701145375H1
gactnagcctaattaataaaangggaagtttttgcatagtnttgagttttgtcgcagcattccatacgaggccgaaggaagagtttgttggttgggagctagtaggttgcgtgagaagagaggtggaggaaagagcacaagtnctccatgacactgtactcatcatcatccgnatctcaaccgaattgca

SEQ ID NO: 6106 - DNA, 261 bp, Glycine max
  unsure (1)..(261): unsure at all n locations; Clone ID: 701145376H1
acctttaccaatatatcaacatcatctctgattatcacacttccttcagggcctaagaatcctatccatctccaacaaaatgtcttccaattcacatctacaaagcaaaagtagattacttagattcgaagaatgagaatatttcaatcacatctnagatttcattaattggctgctggcactttcnnaggtcatgggtaaggattgntttaataccttggaatttanggattanaattccggttgctaacaatccccatg

SEQ ID NO: 6107 - DNA, 252 bp, Glycine max
  unsure (1)..(252): unsure at all n locations; Clone ID: 701145377H1
gactggattagttttaaagaagcttcacaactacaatactacatcgcattgttggtcttgactcatgagctaatctttagtcgtggatgtatttgtttgctccacaaaacaatgacttgaaatttaatagggaaagtatatttatttgntgtaacttgtaacattctactgggcaggaaatgaaatgcattgtgggtgctttatgctttcgatgtccttgaacacatagccagctctaaaaagggatactca

SEQ ID NO: 6108 - DNA, 235 bp, Glycine max
  unsure (1)..(235): unsure at all n locations; Clone ID: 701145378H1
ccggccgaaaagcaagctanctgagagaagcgaacaagantccacttttgagtttcaaagccaagccaaatttcctttgggttttggattncataacgagtaccgttgttagaggccgaagaanattgagaagcnaggaagagaagaacaagaggaggaggtttggtgatagaagggatganttggagtgataattagttaagttgaggtcatatgatgtgatgnagnnaatttg

SEQ ID NO: 6109 - DNA, 145 bp, Glycine max
  Clone ID: 701145379H1
ggatacaattaatctcattctaggtttcaaaattgggattcggatgtatgggccttactggagcgtacaatgaccctctccaagaacaggatggcatatctgtttatcaagtatgcgttcagtaagggaatccacattttttggt

SEQ ID NO: 6110 - DNA, 119 bp, Glycine max
  Clone ID: 701145380H1
gaatcagagatttcatcaagagccgtgagcatgtaatattatatattatatttaccacaatcaaggtgtataatatatcattgttggttatctgtaaaaatcacattcataatctgctg

SEQ ID NO: 6111 - DNA, 238 bp, Glycine max
  unsure (1)..(238): unsure at all n locations; Clone ID: 701145381H1
tacggctgcggagaagacgacagaagggtacggctgcgagaagacgacagaagggtacggctgcgagaagacgacagaaggggggaatggataatatgaatgaagaggccgaactgtggcagaagcagaatgtgcattcactcggggaactgaaaaatgtgggtatatattcatgatcttgatgagctcttccaattgttttatgngacaacttaaatcctcttnantcagaaggctg

SEQ ID NO: 6112 - DNA, 254 bp, Glycine max
  Clone ID: 701145382H1
ggaacctttgcattctattcattcaagattcagcaagtgcgttttggaagcagagaccgaaatacttcgagatggcccgtacaaagcaaactgctcgtaagtcaactggaggaaaagctcccaggaagcagcttgcaaccaaggctgcacgtaagtctgcaccaacaactggtggtgtgaagaagccttcatcgttatcgccctggaactgttgctcttcgtgagattaggaaataccagaagagcactgagct

SEQ ID NO: 6113 - DNA, 252 bp, Glycine max
  Clone ID: 701145383H1
gacgcaccgtttgttctattcttaactcaacttctgctacccactctcttcttccaagtccaaccacgcttttctctacagtcatgggcaaggtcaagatcggaatcaacggatttggaagaattggccgtttggttgccagagtcgctctgcaaagagacgatgtggagctcgttgccgttaacgaccctttcattaccaccgattacatgacatacatgtttaaatacgacagtgtttcacggacatggg

SEQ ID NO: 6114 - DNA, 212 bp, Glycine max
  unsure (1)..(212): unsure at all n locations; Clone ID: 701145385H1
agggtggttttgatttggagtgcagctatgcgattgtacagagagccaagcagcagttattgtataagcttcgtagatttgagaaactggcggagttggatccagtggaacttgagaaaagaatgcaggatcaagaagaggacnaggatgacactttatggaagaggaagatggtcatgatgaganaaaccaagcatcntgcaaagaaaatg

SEQ ID NO: 6115 - DNA, 157 bp, Glycine max
  unsure (1)..(157): unsure at all n locations; Clone ID: 701145387H1
gtataaaatcaaatctggcaaatctcgtggggttgagggctcggtcttcgtcgaagcaagcttcccctgatttgcaggacgccgaggaggtgtgcnngccttggcgtcgaaggttaataatgtctttctcctggtcctccaccctaggatcaccatc

SEQ ID NO: 6116 - DNA, 237 bp, Glycine max
  unsure (1)..(237): unsure at all n locations; Clone ID: 701145388H1
ggacaaaaggaaaggnagaaatgcaagaaccaagcttgggattgatgggtgaggtctccggcgatcaccaccgtcagctgaaggcggagataacgactctccggctgttacgatcagcttctggnagcacacgtggcatgcctccgtgtggncaccccgatcgacaagcttccanncatccatgctcantnatcttcagttctcaccaccttctaagcttcttattctcaaaaaacc

SEQ ID NO: 6117 - DNA, 106 bp, Glycine max
  unsure (1)..(106): unsure at all n locations; Clone ID: 701145389H1
ggatcgaangcnagaaaatgaaaaaccccaaagtggctttctctccctctgtnttttatctctcngcntggctatccttttnngntagtnngcactggctggcang

SEQ ID NO: 6118 - DNA, 229 bp, Glycine max
  unsure (1)..(229): unsure at all n locations; Clone ID: 701145390H1
gaacaacacgtagtnntatttcattgatttctccatcttcggtctctctcagtgaccagagacagatgatgatggagatggcgaangaaacgctgtcgttgcngnactcgcggnttggtnnnactcgcggcgatttggccgttgangctcaagagagctcggncngaaaaacgctggttaagtacnggnncggnanaagtannngaacaangatggggatgtaanggct

SEQ ID NO: 6119 - DNA, 261 bp, Glycine max
  unsure (1)..(261): unsure at all n locations; Clone ID: 701145391H1
ggtggtgatgggtgggtgagtccgaattgtgaaagtaagcaaagatggctttcacggaatcgtctctcctccttccttcggtttcaggaaccaacaagaacaagaacaaggttccagaagacaaatggtatttaggcctacattggtgtaatttaaccctgggtcntcggnttacnttctccccatggaacgctttcatccacggcggttgatatttcnccttttctctancctgacgncaggtgaccgnatctttcggcg

SEQ ID NO: 6120 - DNA, 270 bp, Glycine max
  unsure (1)..(270): unsure at all n locations; Clone ID: 701145393H1
ggaatcttaaataagagaacagcncaaaacctttcaaaatacacatggctggcaaattgctcacccaatcaccagccatgggagaggttgacgcagcattcatccaagacccaccacacaggccaaagctcttccaccatccaagccgaaggatttccataattggatctctctccaataaaccaacccacagagtttcagaccccttctgctattggaanggttagtggaggagataggtagtgcngcaacgagtggggtttcttccca

SEQ ID NO: 6121 - DNA, 172 bp, Glycine max
  unsure (1)..(172): unsure at all n locations; Clone ID: 701145394H1
gatcgaagcaaaaaatgaaaacccaaagtgttctctcctctgtctttctctctctgtatctttggtanngatgtgaatgactcaagagcgatgcagcacngtcacatcacgagctttctcatttcctgatgnttgtncagaagnnnanngtgnggcanntggcctnngcgta

SEQ ID NO: 6122 - DNA, 207 bp, Glycine max
  unsure (1)..(207): unsure at all n locations; Clone ID: 701145395H1
ggaactcaaaatcagcctctaatatttttctcactgtctctccagagaacttgatagagagtggcagctgcaacatctggtgctgtgttaatggtgggatcttctctgagtgagaacagagcaacctctggctctgtatggagcaagtgtgtntgtangtatccagagccattgaactgtgngcncaagagcngnncctgttanggg

SEQ ID NO: 6123 - DNA, 262 bp, Glycine max
  unsure (1)..(262): unsure at all n locations; Clone ID: 701145396H1
ggaaggcaaatcgcgaagactagatctggatctgagagaatggctcctcggtctagcagcaaggacgcccaagaccttttccgcgctcttggtctgctatgctgcaacccccactaatctcaagatcatgatctctatgtcatcnatgccgtatcaccgtttcatncagggtgtttacagggcttggttggatcattccatttaaattccttcctntccaggagtacttcttgtgtaggaangctgttcttgctgttgtctc

SEQ ID NO: 6124 - DNA, 240 bp, Glycine max
  Clone ID: 701145401H1
cgaccacattccaaaacacaaacacatacattgtagtatcacttttgtctcggaatttgttcttttgagttatggcaagcttaaaggttgcatgtgtggtttcgatgtgcatggctgtgatgagtgcaccaatgatggtgcaagccgtgtcatgcaatgatgtttctgtgaacctagcaccgtgcctatcttacctgatgcagggtggagatgttccagaatcgtgctgtagcggagtga

SEQ ID NO: 6125 - DNA, 254 bp, Glycine max
  Clone ID: 701145403H1
gatcgaagcaaaaaatgaaaacccaaagtgcttctctcctctgtctttttcactctcttgctatccttttggctagtggcactgctgcaagtgcaactccaagaagcgcagtgccaagccaccatgtttcaacattcaacagaagcctttttccttccacttttctctttggaattggttcttctgctcaccaggcagaaggagcagcaagtgtagatgggagaggaccaagcatatgggacacctacactaga

SEQ ID NO: 6126 - DNA, 264 bp, Glycine max
  unsure (1)..(264): unsure at all n locations; Clone ID: 701145404H1
ggtcgtggtgagttgcatctgcgtgtgactgcaagatatggctcttgttctcaacgtctnattgtgttccacttgtaaaccccatcttcctctctcaacctccaatcccaacaaagcttcttctacttttcctcttcctcttcctcttctgggactcaacataaagaaaagtctccaaccatctcagaaactcacattttcattgggtgaatccgtgtctggtgccaccctcgttgctctcctctctgcttctttcatctttgt

SEQ ID NO: 6127 - DNA, 253 bp, Glycine max
  Clone ID: 701145405H1
gggagggcgtgggcgagggaatcaaacaaaccttgtactactatttatcttcatcctcatttttgtcgtcgtcgttcttcctttttccgtttttcatctggttcttctctcagaaaaagctcgccaatcgatcttgctctcttctacgcttttcgaattgctttcattccattatggacgcagattagattcgcactcacattcccttctcctcgatttgttcaaactctctgctctgagatctgatcgcatt

SEQ ID NO: 6128 - DNA, 253 bp, Glycine max
  unsure (1)..(253): unsure at all n locations; Clone ID: 701145407H1
atagccacagtgatagttatttgtactcaaatatgggaaaataacaaacacgagtattgatatttttagcaacaaatgttgctatcaaaaacactcacaacgactatgtggttctattcgtggaagcatacaaatctgttagttctggagcagcagctcaccgatngaataactaattaacagttatagagttggttttcggctttcttgtgtgattctataattgtttttaaaatggatcaagtcacatggg

SEQ ID NO: 6129 - DNA, 230 bp, Glycine max
  unsure (1)..(230): unsure at all n locations; Clone ID: 701145409H1
gaagggaaaaatngtgtcgctgaaactgcagaagcgcctctccgcaagcgtgctcaagtgcggcagaggaaaggtttggcttgaccccaatgaagtcaacgaaatctccatggccaattctcggcaaaacatcaggaagttggttaaggatgggtttatcatcaggaagccaaccaagattcactcccgctcacgtgctcgtaggatgaaggaggcaaagaggaagggcc

SEQ ID NO: 6130 - DNA, 248 bp, Glycine max
  Clone ID: 701145410H1
ggcccttctagctttttcccagtccaagcagcctccaattcgtgccactctcttcaaaatggccgttaccttctcaaatctccacacagaatcaggtctcaagtccctcgacgacttcctctctgggaaggtctacgtttctggggatcagttcacaaaggacgacatcaaagtgtatggtgctgttttggagaagccaggtgactcttttcccaatgctgccaagtggtacgaggttgtctcatctc

SEQ ID NO: 6131 - DNA, 247 bp, Glycine max
  Clone ID: 701145411H1
ggagagagaattacagagcgttttccaacacgattacacgaccgaatcaaacccctctttctctccgaagctgcttttaatatcgtactggccttcgattgttctcctctttaatacatactgttctctcttcgatttgagggaacagtacaagagtctgagcatcggttaacccaactgcacaggtagtctccaaataatggagcctcatgatgaggctggatgccaggctcctgaacgccccatt

SEQ ID NO: 6132 - DNA, 241 bp, Glycine max
  Clone ID: 701145412H1
ataagatgaaaatgaaagtgcttgttttgtttgttgctacagttttggtagcatatgaatgccatggctcagactaccagaagttccctctccaaatgaaaactgggtttggtgggcaatacagcaatgaggtggcatgtgccagttggaggctcggcgtggaagcaaacaacgtagtcaagtggcaaactgttcctgcagcttgcggagagtacatagctgactacgttctaggagacca

SEQ ID NO: 6133 - DNA, 259 bp, Glycine max
  unsure (1)..(259): unsure at all n locations; Clone ID: 701145413H1
gtagaagaggtatggaatgcctcttgtttgtgtttttggtttctataattgcaattagaattttgtagtttagtttgtttagggttttgtgtttgaagngttttagttaggctctgtttagataaactcttgcatgataagaaaataagaaactaaatgcattggcgtttttcataagctgaaatgcgctttaaacttgagaagataaatgaaaatacaagaatctcaatttctttgctatctttttaacttacataga

SEQ ID NO: 6134 - DNA, 245 bp, Glycine max
  Clone ID: 701145414H1
ggatcacagtttgatgctcgtcaatatgataccaagatgaatgagttgctacatctgatggacaggattttttcacatcttatgatgaagtttatgacagttttgatgctatgggcttgcaggagaatctcctgagaggcatttatgcatatggttttgagaagccatcagctattcagcagagaggaatagttcctttctgcaagggacttgatgttatacaacaggcccagtctggaactggg

SEQ ID NO: 6135 - DNA, 247 bp, Glycine max
  Clone ID: 701145415H1
cggaaaggaactttgcaagagtattaacccagatgaagctgttgcttatggtgctgcagtgcaggctgcgattctcagtggcgagggtaatgagaaagtgcaggatcttcttttgttggatgttactcctctatccactggtttggagactgcaggaggagtcatgactgtgttgattcccagaaacacaaccattcccaccaagaaggagcaggtgttctcaacctactctgacaaccagcccggt

SEQ ID NO: 6136 - DNA, 250 bp, Glycine max
  unsure (1)..(250): unsure at all n locations; Clone ID: 701145416H1
ggccttataatgcggcactatcctctcctcctagaatttttattattnaaaaagganaaaaaacattaggaaattgggaaagatactaaaactttccctggaactgagttggagtataatttattcttgttttgcgcacttctcagatgaatccctagtttccttacaaggtcctctgtaccatttacaatggaacatgcagataaaggaaaagaatcatcaaatagtataaatgaagtagaagtcacta

SEQ ID NO: 6137 - DNA, 256 bp, Glycine max
  Clone ID: 701145417H1
gaagaagaaggttggttgattggtcccattgattccgaagagaaaagaaaagatgtttgagccacaacagctatacactcgcgcgaagaccgaggaattcgacctcgaatcaggagaaaccctctacccagggctgagcgtcggcgagaaccagctccgatggggtttcatccgcaaggtctacggcatcctctccgcgcagatcgttcctcaccaccctcgtctccgtcaccaccgttttctatactccaatcaa

SEQ ID NO: 6138 - DNA, 242 bp, Glycine max
  Clone ID: 701145418H1
ggggtcaaagtaatttaccattttcttttgccacttatattgaatggatgctgtagctctgatgccataggaaagggtaagtttagggaagggatgaagaagaactccaagcttgtggcttatgctaaaaagcatggccatggaaactggcgcacagttcctgccaaagctcttcttcgaaacaagtgagctttcttttgcctctgagatttttcttttgttaaaatggttaataatataaa

SEQ ID NO: 6139 - DNA, 252 bp, Glycine max
  unsure (1)..(252): unsure at all n locations; Clone ID: 701145419H1
gagcctctttgatcctttctttcatagccctcttanccttgancacgttacaagcccaataaagcccatgtggatcgaggaatgactaattttgcttttaagttgggattctggaatggaacccgcacacggttatgattgttgaaaaggaaaaaaaaaagaatccttgaggtttcgcacttgcacatttangaaganaactcatttgaccaagagctcgtgggaaatgctcagtgncaattgngatantng

SEQ ID NO: 6140 - DNA, 250 bp, Glycine max
  unsure (1)..(250): unsure at all n locations; Clone ID: 701145420H1
ggaagnnncctgaggagaagacctnnagtagttttggaacacacngcgatgtncagaagatacaccattnaggaaatggaagaggcaacaaacatgttctcggngtctctcaagatcgnggnanganggtatgggccagtatacaggtncgaactagattncacccaggttgcnataaaggtgttaaanccagatgcagcncangggannnagcagttccagcagnnggtggaagtgctgagttgcataa

SEQ ID NO: 6141 - DNA, 250 bp, Glycine max
  unsure (1)..(250): unsure at all n locations; Clone ID: 701145422H1
ggatggcctatgagttccatcaggacaaatccatggtggcatgctctttcaattctcaattgaaattcccccaaagccaccttcttttgattcaataaatcaacacccaattttcaaaattccaacttgtaatcaatttttctttccatttgacacaccatancaatcaaccaaccttgttgcttcttgtgatcactcctgaaccacactaatggatattgatgagtgggagtttccctctgatgatggc

SEQ ID NO: 6142 - DNA, 256 bp, Glycine max
  Clone ID: 701145423H1
ggaacataaagtgaggaaaacgagtcaattcatcatttgctctctgctctgcttgttcaaattttaggagcggagaatccagagaaagagagatgtctggtatcgcccgtggacgtcttgccgaggagcgaaagtcatggcgcaaaaaccaccctcatggtttcgttgccaagcccgagactctccctgatgccaccgttaatttgatggtctggcattgcactattcctggcaaggctgggactgattgggaggg

SEQ ID NO: 6143 - DNA, 249 bp, Glycine max
  unsure (1)..(249): unsure at all n locations; Clone ID: 701145424H1
gaggaaaattcaattattaaaactgaaaacaaggatctaaaatgtggtcgaccctctcaaattattatnnnnnnnnnnnnnnnnnnnnnnnnatggccagaggaagattctgatatagggggatatggtggagaactcatcccatggtgaatgaagatgacatatctttcagtgatcttgaggatgatgattatggcattaaacccgttagttccagtacaggttcaaaggtgatatgaaacttcaaac

SEQ ID NO: 6144 - DNA, 245 bp, Glycine max
  Clone ID: 701145425H1
gacacacagagcggttctcatattttggagaatccgaaaaacacgttaaagaaagtcccattcccactaccgaagcaaattaagaagatgaagcagcagagagtggagtttatgggcatgggcatgggcatgggcatgggcctgggccttttggtggtgatgatggcatgtgggtcggcgagtggtgcggatgatttggcaaccaagtgttcagcggtgattcagaaggtaataccgtgtttgga

SEQ ID NO: 6145 - DNA, 245 bp, Glycine max
  Clone ID: 701145426H1
gggagatagtgattctggttctgttctgttcttctttctactcacaacaacatcagaatcagaaacaacaatggccaacactaacttggaagatgttccctctctggatctcatgactgagctccttcgtcgtctcaagtgctcttccaaacctgacaagcgtcttattctcattggcccacctggatctggaaaaggcacccagtcaccaatcataaaagatgagtactgcttatgccacttag

SEQ ID NO: 6146 - DNA, 244 bp, Glycine max
  Clone ID: 701145427H1
ggagctggtgttcaaggaggacgggcaggagtacgcgcaggtgctccggatgctggggaacgggcggtgcgaggcgatgtgcatcgacgggacgaagaggctctgccacatccgcgggaagatgcacaagaaggtgtggatcgccgccggagacatcatcctggttggactcagggactaccaggacgacaaggctgacgtcatcctcaagtacatgcccgacgaggccaggctcctcaaggcc

SEQ ID NO: 6147 - DNA, 243 bp, Glycine max
  Clone ID: 701145429H1
ggcagcgcttgatttgaggccaggcaagccccactcaaccaccacacctctcctcgttcacgctacccctttctgctcttcttctacctttcaagttttaaaagtataaagatggcagagacattcctatttacctcagagtcggtgaacgagggacaccctgacaagctctgcgaccaaatctccgatgctgtcctcgacgcttgcctcgagcaggacccagacagcaaagttgcctgcgaa

SEQ ID NO: 6148 - DNA, 244 bp, Glycine max
  Clone ID: 701145430H1
acgcccctcacgatccatatactcatggcacgtctttattctctaatgtacccacattaaggaaacacaatgttagtgatcttcataaattttctcttcctgaatatgataataattcaaacttcaataatatcaacaaggggtagtgttcaaagccacagttgcagatgcaaagttctgcatagaattgaaaggggcatggtattttaatagagcaccaaacagccacacaaataccagggta

SEQ ID NO: 6149 - DNA, 246 bp, Glycine max
  Clone ID: 701145431H1
ggttgttcactttcttccaacctctcaagtccaacctacccctttttcttctcccaccaacttcaccgtcttcttcctcgatcatgtctcacttcaagggcaagtaccatgatgagcttattgccaatgctgcttacattggcactcctggaaagggtattcttgctgctgatgagtcaacagggacaattggcaagcgtttggccagcatcagtgtagagaatgttgaatccaacaggcgtgctc

SEQ ID NO: 6150 - DNA, 249 bp, Glycine max
  Clone ID: 701145432H1
gggtgctgtgagtgagattacccatagatagagagcgcggcataacctaaacttacccttcttctctctgtgtgtgtgcgcatcaaacgcaaccagaagcagccatggccactgcaagaactgtgaaggacgtttctcctcatgagttcgtcaaagcttactcttctcacctcaagcgatctggcaagatggagctgccagagtggactgatattgtgaaaactgcaagatttagggagttggctccta

SEQ ID NO: 6151 - DNA, 255 bp, Glycine max
  Clone ID: 701145434H1
gggtatcgccaatggtgtaataaactgtggaatgcagtacgatttgctatgagcaagcttggggatgattatatccctcctgctaatttgattccagaggttctcccatttagctgccagtggatactctcagtgttaaataaaaccatatccaagacagtgaattcacttgaatcatttgatttctcacaagctaccactgctgtgtattcttggtggcagtatcaattgtgtgatgcattatcgaagtgatta

SEQ ID NO: 6152 - DNA, 255 bp, Glycine max
  unsure (1)..(255): unsure at all n locations; Clone ID: 701145435H1
ggaaccaacgagtacccacttggactagaagctgccacttttgccaatncttttcccactccaaagctttctttttcatctctttacccttttcaccatccatcaactccctcacaaggctctctattttgcccctctcaatatcctcaatctccaacccaatcccccactccttgcaacagaaccgacaattggtatgttgctctgcaaaaaaaggccaacatatcattggaacacctccacacacactttcca

SEQ ID NO: 6153 - DNA, 75 bp, Glycine max
  unsure (1)..(75): unsure at all n locations; Clone ID: 701145436H1
acaaataaacnaatcccttgcggttggcanaananganctggcagattcaatnagnatccnagatattnatggct

SEQ ID NO: 6154 - DNA, 227 bp, Glycine max
  unsure (1)..(227): unsure at all n locations; Clone ID: 701145437H1
gnagaanaagattacctgagcangtcacgaatnnnttgttcgagaagcntcngaagcagttcggaatcggaggggcgttgcctccgannagagacttnactaggttcgttannnggccanagattgttcatattcagaggaanaagaggattctgnagtagaggtngaangttctcccagctttgaaccagtttancaaaactcttgncaaaaacctngnaacannt

SEQ ID NO: 6155 - DNA, 247 bp, Glycine max
  Clone ID: 701145438H1
ggacactggcagagtggaatttccgccgccattcgaagctacagcgatggccataaccgccaccatttccgttcccttcacatcccccagtcgccgcactctcgcctccgtcaatagcctctctccgcgttctacccgatccactttgcccacaccgcaacgcactttcaaataccctaattcgcgcctcgtcgtgtcttccatgagcaccgaaacagccgtcaaaacttcatccgcctccttcctc

SEQ ID NO: 6156 - DNA, 244 bp, Glycine max
  unsure (1)..(244): unsure at all n locations; Clone ID: 701145439H1
aaagagacccggaaagggtgggaaccgcttttggaaatccattgggcttggatttaagactcccagggaagccatcgaaggaacctacattgacaagaagtgccccttcactggcaatgtttccatccgtggccgtatcttggctggnacatgtcacagtgctaagatgaacaggactattattgttaggaggaattatctccattttatcaagaagtaccagaggtacgagaaaaggcactcc

SEQ ID NO: 6157 - DNA, 245 bp, Glycine max
  unsure (1)..(245): unsure at all n locations; Clone ID: 701145440H1
ggaacaaaacaagtgtttcgaatagattatcctaagtctttgggaatagtgctgcaatggcttcaagtcaggaggaggtgacccttttgggagctactggaagcccatttgtgtgcagggttcatattgccctcaagttgaagggagttcaatacaaatatgtcgaagaaaatttgaggaacaagagtgaactgcttctcaaatccaacccagttcacanngaaggttccagtgtttattcacaa

SEQ ID NO: 6158 - DNA, 243 bp, Glycine max
  Clone ID: 701145441H1
gacacacagagcggttctcatattttggagaatccgaaaaacacgttaaagaaagtcccattcccactaccgaagcaaattaagaagatgaagcagcagagagtggagtttatgggcatgggcatgggcatgggcatgggcctgggccttttggtggtgatgatggcatgtgggtcggcgagtggtgcggatgatttggcaaccaagtgttcagcggtgattcagaaggtaataccgtgtttg

SEQ ID NO: 6159 - DNA, 242 bp, Glycine max
  Clone ID: 701145442H1
gatccaaaggaacaaaaatattattaagatgatcaacattattggagcacttgttctactctttgcatttctcttcctcagttgtgtgtatgcacaagacacaacaacccttgtgcctgcaatcataacttttggtgattctgctgtggatgtagggaacaatgactatcttcccacccttttcaaggctgattaccctccttatgggagggactttgttaaccaccaacctactgggaggt

SEQ ID NO: 6160 - DNA, 242 bp, Glycine max
  Clone ID: 701145443H1
gaaccaataaaacacccaagtctgaatggataaaaaatatattcaatccataaaaggtaaaatacatacttctctgacagttctgtagtcatttataggattctcagtggcagcatcaacaacatggaccaatagccgggtcctcctgaggtgcctcaaaaaattacgaccaagaccctgaatgcgaaagacaaaaagccttcatatttagcatctcaatggtttaaaatggggacatttga

SEQ ID NO: 6161 - DNA, 223 bp, Glycine max
  unsure (1)..(223): unsure at all n locations; Clone ID: 701145444H1
ggactatccaaaggaacaanaatattattaagatgatcaacattattggagcacttgttctactctttgcatttctcttcctcagttgtgtgtatgcacaagacacaacaacccttgtgcctgcaatcataacttttggggattctgctgtggatgtagggaacaatgactatcttcccacccttttcaaggctgattaccctccttatgggagggactttgt

SEQ ID NO: 6162 - DNA, 239 bp, Glycine max
  Clone ID: 701145445H1
ggagggagtgctgaggttgaagcgggaaacaatggcaattcccatgttgagggctgcaatgatttctcattctcaatctcaaccactcattcattccatatctgctatttatgaaaccgctaagaggaggaagagagtggtgttctcttcttcttcttcagaacttaaccctgtaattcggtcagaggtatcattttgtgttgggacttgcctcattccacatccaaaaaaggttaaca

SEQ ID NO: 6163 - DNA, 216 bp, Glycine max
  unsure (1)..(216): unsure at all n locations; Clone ID: 701145446H1
ggtagtggttgnntctgaggatgagtttcagggcaagagagtggcgatgcgagggatcttcagaaaccgttcctccacacggggagttggtacaagatgggttccaggcagtccagcatcatgggatcctccactcatgtcatccgcgacggcgccgtctccgtcctcttctgcgtcctcatcgtcgcattggatcccatccattcggttcagtgt

SEQ ID NO: 6164 - DNA, 242 bp, Glycine max
  Clone ID: 701145447H1
ggagacaggtagggtttcgagttacagccgcaccttgattcagagcagagcgaccttgaagagctatggctgtcggaaagaataagaggatttccaagggaaagaagggtggcaagaagaaagccgctgatccctttgccaagaaggactggtacgatatcaaggccccttccgtctttcaggtcaagaatgttggcaaaaccctcgtctctcgtacccagggaaccaagattgcttctgaa

SEQ ID NO: 6165 - DNA, 245 bp, Glycine max
  Clone ID: 701145448H1
ggcacaagtttgttgagatagctagaagcaataagatgaaaatgaaagtgcttgttttgtttgttgctacagttttggtagcatatgaatgccatggctcagactaccagaagttccctctccaaatgaaaactgggtttggtgggcaatacagcaatgaggtggcatgtgccagttggaggcttggcgtggaagcaaacaacgtagttcaagtggcaaactgttcctgcagcttgcggagagta

SEQ ID NO: 6166 - DNA, 254 bp, Glycine max
  Clone ID: 701145449H1
ggaggaaacaggaacacaagcacagtctaaagataataaagatgaggagggagaggcacgtgtgaatcaggttcatgatagggaagaaactgagacagaaccagaagggaataaagaaaaggagggaaaggttcgggataatgaagaactcgtggaagaaagagaaagaaaaacagtgacagaagcacaatctcaagagaataaagctgaggaggataagtttcaagatgatagtgaagaactcgtggtggaaa

SEQ ID NO: 6167 - DNA, 241 bp, Glycine max
  Clone ID: 701145450H1
caacaagtacttcttcaccagaaaccactccaccatcgtcgccttcgccatcggcaaaaagtatgtttctggaaatggattccacataatcggggctcaccacggatagtccttgtctcaaactcaagcctgtcaccaaggttgttaaggctgggattttggaggttggtgtccaaacctatggaggaggcttgtggcacacatggtttgatcgagacttgaccgtggcggggagggtcat

SEQ ID NO: 6168 - DNA, 223 bp, Glycine max
  unsure (1)..(223): unsure at all n locations; Clone ID: 701145451H1
tagtgcattgggaattgttgattttgngcattgnntctcctttncattctatttattttttcaatttttcaaatgttattttatatttttacattgaaaaaaaaaatcaacaacattttatcacatcgctaaattaaactagtagtctacataacaagtttganggctatcacatctatatcataactaggaatgaagagactaaattatctagaacatcaca

SEQ ID NO: 6169 - DNA, 223 bp, Glycine max
  unsure (1)..(223): unsure at all n locations; Clone ID: 701145453H1
agcatcatcaacaatggctnctacgccttttaaaatattcactttcaaatggatctgagggacagagaacaactcaaacaattgtttctttttctttgttgtgtatacgttggttatgttacaatattcccttggcccctaattgaaatgttcttgggtttaaaaagtgagagagaaaagaaaagtcaattattttgttggggattatgtcattatacttgac

SEQ ID NO: 6170 - DNA, 245 bp, Glycine max
  Clone ID: 701145455H1
ggcgggaagcatagcaagtgatacgcaatatcacgttcttcgctctatcgcttcctgctaaaaattcaaagctggttaatcattcaaggaagtaattgttttactttttgcatgccttcacacattataaacaggagaagctttgataggacaaatatggagcaaaagcctccaaggatgaagttaattagtaagctccctgggtcggaagtggaaaccataaagaagaattcacatatgcttgt

SEQ ID NO: 6171 - DNA, 248 bp, Glycine max
  Clone ID: 701145457H1
ttccttagttaaactaatttaatttttaagttatacgtaattaataaaaagtgaaaactctaatcctctcaggggcattaatcttccaaattttcttccaatttccagactcattcaaagtatgaaattgattgattctttgaataggttttgttttatttaagctagtataagaacttcgccgaaaaaattggggtaaaataattgactcagaaatgaagagaatcacgatgcattttccacactga

SEQ ID NO: 6172 - DNA, 242 bp, Glycine max
  Clone ID: 701145458H1
gttcctcttcaatttcgcatcttctccttctcattccaacttccaaaatacacacacacgatggaaaccttcctcttcacctcagaatctgtaaacgagggccaccccgacaagatctgtgaccaggtttctgatgccatcctcgatgcttgcttggagcaagacccagagagcaaggttgcctgcgagacctgtacaaaaaccaacatggtcatggtctttggggagatcacaaccaaggc

SEQ ID NO: 6173 - DNA, 238 bp, Glycine max
  Clone ID: 701145459H1
gacacaccatccgttctagtctcaacttctgctcttccaactcctacaacgcttttctctgcactcatgggcaaggtcaagatcggaatcaacggatttggaagaattggccgtttggttgccagagtcgctctgcaaagagacgatgttgaactcgttgccgttaacgaccctttcattaccaccgattacatgacatacatgtttaaatacgacagtgttcacggacactggaagc

SEQ ID NO: 6174 - DNA, 237 bp, Glycine max
  Clone ID: 701145460H1
gatcagagcaccctgccatggagaacactagcaacgacgctggcgtcgaagccctacggctgctgaaagcgacggaaccgccttcatttctcactccgaacccagcgctgtcggaagcggctcgtaccgcatcgcaatacttgttctcttccctaaaaccgttttccccaaaatcgccactggaccaactccttgtggacggtttcgacgcagaacagatatggcagcaaatagacc

SEQ ID NO: 6175 - DNA, 236 bp, Glycine max
  Clone ID: 701145461H1
gaagataaagaaaagagaaatggcaacagaaacaaaagtggcagtattaggtggcatcaccgaagtgcagggagctgccaacagcgtcgagatcaacaatctcgctcgctttgctgtagaggaacaaaacaaaagagagaattcagttctggagtttgtgagggtgattagtgcaaagcagcaagtggttgctggagtgattactacataacttggaagcaaaagatggtgagtta

SEQ ID NO: 6176 - DNA, 249 bp, Glycine max
  Clone ID: 701145462H1
ggcacaagtgagtttgttgatcgagataactagaaacagtgtgatgaaaatgaaggtccttgttttcttcgttgctacaattttggtagcatggcaatgccatgcgtacgatatgttccctctccgaatgaacactggctatggtgcccgtactccggaggtgaaatgcgcaagttggaggcttgctgtggaagcacacaacatctttggctttgagaccattcctgaagagtgcgttgaagcaacaaa

SEQ ID NO: 6177 - DNA, 252 bp, Glycine max
  unsure (1)..(252): unsure at all n locations; Clone ID: 701145463H1
ttgtgcataattttatatcaaacaactacattaacatatgcagtgtgagccggaaaggtcaataggcattgggagctccgaaaactatgatttattaaaattaagggtataaaaaaaattagaggaaattaagggtatcaattaaaaagtgaatatatatttaataaaagttacatttttaanaattcacgggaacaagattgaacttagcattttccttaactaatctttgattttgtataaaaaaatgtg

SEQ ID NO: 6178 - DNA, 252 bp, Glycine max
  unsure (1)..(252): unsure at all n locations; Clone ID: 701145464H1
ggagctgttgggcattctcagcaatcggtgcagtagaangnataaatannatagtnncanncgnactgnttctcgttatcagaacaagaattggtggattgtgatactggatataaccaaggatgcaatggaggacttntggactatgcatttgagttcataatcaacaatggcggcattgattctgatgaggattacccataccgtggtgttgatggtagatgcnacacatataggaaaaatgctaaagtc

SEQ ID NO: 6179 - DNA, 248 bp, Glycine max
  unsure (1)..(248): unsure at all n locations; Clone ID: 701145465H1
gggttgagaaaatgatgtgccgtaggacggagttgtatagagagttgaagcagcgtatcacacatcttcgacatttctgcgacacgcaacaaaaacatcttcaagatctcgaattgctcaagtgcttcaaatctgagattcaattcgagcttgcctctaatcactttcagaatgctcgaagtgattcctccnnnngggactttgtggtggacccgaactcacccagttccaaagatgtggttttgcga

SEQ ID NO: 6180 - DNA, 226 bp, Glycine max
  unsure (1)..(226): unsure at all n locations; Clone ID: 701145466H1
gccgagattcatgcagagaaagccagagttantatcagctgagttgatgcgattgaaggccttactggattcaaaactggaaacagaggccagtgaaaatcaggttatatttaaactgaaaacagagatagaagctctcaaggaagaacttgaaaaggcaaaggattacgatgataagttgtcagagaaagaaacttttattgaacagcttaatgtggagcttgaa

SEQ ID NO: 6181 - DNA, 239 bp, Glycine max
  Clone ID: 701145467H1
ggagaagagtaattttggatgcttgagagttgaatctagaggaagagataaaattttatcttgtgtctgtttgtaaatatgttcagttaatcggccagtgcatgtaaatgtcaatagtgtgtcttgtgtagagaaatattgtctagcctccaaataatgatagagggttgatttgggtgttaattagatttcgcccgtgccctatgttagtagtgtctaaggaaaaataccatctcttt

SEQ ID NO: 6182 - DNA, 252 bp, Glycine max
  Clone ID: 701145468H1
tacttctgataaataattcagcataaccatatacaaggtctgggtgagaacgcattaagtaatattgatactgccagtatcactgagctgaagagtcaatgtgttaggaaatgtgcctcaaaatgggacaagccctttaaggtgtatagtcgtaggcccaagaccaagttaatgagctgatgctttgttattatcatttacttagttattctagaagggggtagaatgggcattgctgagttggttagagaa

SEQ ID NO: 6183 - DNA, 239 bp, Glycine max
  Clone ID: 701145471H1
aaagagacccggaaagggtgggaaccgcttttggaaatccattgggcttggatttaagactcccagggaagccatcgaaggaacctacattgacaagaagtgccccttcactggcaatgtttccatccgtggccgtatcttggctggaacatgtcacagtgctaagatgaacaggactattattgttaggaggaattatctccattttatcaagaagtaccagaggtacgagaaaaggc

SEQ ID NO: 6184 - DNA, 196 bp, Glycine max
  Clone ID: 701145472H1
agacaggagtgttatcggcgaaggaggcattcgagaagcttgaaaaggtgggagaagggacatatgggaaggtgtacagagcaagagagaaggcaactgggaagatcgtggctctgaagaagactcgtctccacgaggacgaagaaggtgtccctcccaccactctccgtgaggtttccattctgcgaatgctctc

SEQ ID NO: 6185 - DNA, 205 bp, Glycine max
  unsure (1)..(205): unsure at all n locations; Clone ID: 701145474H1
tgattaaactgctgcatcacctatatatttaaaaggtttatgggaccatagnagcgagggctgtgccttaannnnnnnnnnnnnnnnnnnnnnnnnnnnnnnnnnnnnnnnnnnnctttttccctatcttgtgatctatttatgagtgagaaaaacaaaagtgagaaattgtgcgtgtatctggttgctaattcgagtgctatta

SEQ ID NO: 6186 - DNA, 236 bp, Glycine max
  Clone ID: 701145475H1
ggaaaaagataggtggccttattgccatgttggcatccttatacctgttatcagaaggatgggctactgcaacacattctccattctcatgggaagatagagatgattctgaggttaaaactgaaccagttttgggtctgaggaaaatgttagtccctattattgctggtattctatctgcactcaggagagtgattgctaggcgtgtttcaatcaagaatcaacttaaaaggcga

SEQ ID NO: 6187 - DNA, 235 bp, Glycine max
  unsure (1)..(235): unsure at all n locations; Clone ID: 701145476H1
ggggtgccattgttgctgtcatcatccgcagctgctgttattcgcaccgcaaacaaacagtgagccatggccgtcggaaagaacaagcgcatctccaaagggaaaaagggtggcaancagaaggcagctgatccctttgccaagaaggattggtatgacattaaggccccttctctttttcaagtgaaaaatgttggcaaaaccctcgtctctcgtacgcagggtaccaagattg

SEQ ID NO: 6188 - DNA, 234 bp, Glycine max
  unsure (1)..(234): unsure at all n locations; Clone ID: 701145477H1
gatgaaaaagggagtgcccgataacccataaccgaccgcaccaccgttttcctttgctttgcgttctacaatgtcgaaaacctcagagattattacatgcaaagctgctatttgctggggaatatnaaaacctgtgactgtggaagagatacaagtagaccctcccaaagccaccgaagttcgagttaagatgctttgtgccagtatatgctccacagacatctctagcacaaa

SEQ ID NO: 6189 - DNA, 233 bp, Glycine max
  unsure (1)..(233): unsure at all n locations; Clone ID: 701145478H1
gaatggtccggtgaagtgttcggattgcggcgacgtgagcggttcgctgnccgcgacgttgtgagaagtccactgaaccttatcatttagagggaaggaggagaagacaaattaaccaccaacaacagcagaagaaaataaaggagcaaactaaaatggcagcaaataaatacgttgcattgttgttggtggtgttcctatcgctggaagtgctaatgctagaccaaaagaag

SEQ ID NO: 6190 - DNA, 243 bp, Glycine max
  Clone ID: 701145479H1
ggtccttctttgcgagattgaatcgtaagcagcggctaccctaatcctctcctcttcctctctactaatttcagctatggccgacgaagctgtggttgttccagatcccacccagatcgatgtcaagctctttaaccgctggagcttcgacgatattgagattactgacatttctctggctgattatatcggagtggcgacatccaagcacgccacgtatgtgcctcacaccgccggcaggta

SEQ ID NO: 6191 - DNA, 237 bp, Glycine max
  Clone ID: 701145480H1
ggcgtttacatacacaaatatcggaatcattcattcaagactgagactcactcctccctccgtcaccatcgttttgtgcgtgagcgtttctccatttctttccccatcagcgaaaagacagaacaagctctgttgactttttccattttccaattttctcggtgattctatcagcctccgacacaatcgcgcgccaaacgttgaatcggtgccaccactcagggagagtctctaaca

SEQ ID NO: 6192 - DNA, 242 bp, Glycine max
  unsure (1)..(242): unsure at all n locations; Clone ID: 701145481H1
ggcgcaagtttgttnagatanctagaaggaataagatgnnaatganagtcgcttgttttgtttgttggcnacagttttggtagcatatgaatgccatggctcagactaccaggagttccctctccaaatganaactgggtttggtgggcaatacagcaatgaggtggcatgtgccagttgnaggcttggcgtggaagcaaacaacgtagttcaagtggcaaactgttcctgcagcttgcgga

SEQ ID NO: 6193 - DNA, 241 bp, Glycine max
  unsure (1)..(241): unsure at all n locations; Clone ID: 701145482H1
gaagatgggtgtagaagtgtatcacaatttgaagtctgtnattaagaagaaatatggtcaagatgcaataaatgttggtgacgaaggtggctttgcccctaacatccaggaaaacaaggaaggcttggaattgctgaaaactgccatcgccaaagctggttacacaggcaaagttgtcattggaatggatgttgcagcttctgaattctacaaggaagacaaaacatacgatttgaacttc

SEQ ID NO: 6194 - DNA, 170 bp, Glycine max
  Clone ID: 701145484H1
gccctcttaggaacaaagaggatagccttaaactccaactgtccctcaactgagaagtgcttgacagccaaatgctcttcccagtcattggtgagactcttgtagaaagcagaatactcctcctttgtgatctcctcaggctttcccatccaaatgggcttctgcttgtt

SEQ ID NO: 6195 - DNA, 190 bp, Glycine max
  unsure (1)..(190): unsure at all n locations; Clone ID: 701145485H1
ctgagagaaattcgcaaaccctaatttcggaaagatcggcgatggctgcctccaaggatcgcgagancttcgtctacatcgccaagctcgccgaacaggccgagcgatacgaagagatggtggaatcaatgaagaacgttgcgaatctcgacgttgaactgactgtggaggagcggaatttactttctgt

SEQ ID NO: 6196 - DNA, 237 bp, Glycine max
  unsure (1)..(237): unsure at all n locations; Clone ID: 701145486H1
gtccccacagaagttagtcaaaatgaagcacatgcttggggtactgtacaaaactggtaaagccaaaacattggggcaaacaaaccacaaccaagccattgtgttgagttgtgcattaaataatgcgtatttactattctnnttctaacnncttctacgcatcaaaagggctttagttaacagataattacaaggttaagcagctacttttttggcacgtaaaaaggaaattaatca

SEQ ID NO: 6197 - DNA, 247 bp, Glycine max
  Clone ID: 701145487H1
cttctttatttattttccctcttctcttttatcctttgttttgtccatatttgtgtataaactttgctatgttattgtgtttggtgtgtgtctgtctatctatttcattcgtagttagaaatatttttgttctatgcacacatgacacctacacctttgcacacacattgagatattaggcactatacccaggtctatgtgagccataaggagtgaaggtcgatctgtggttatgctgggtctctga

SEQ ID NO: 6198 - DNA, 227 bp, Glycine max
  unsure (1)..(227): unsure at all n locations; Clone ID: 701145488H1
gatcaattcaaaatatatcatcaattataagcatgggtntgtggaacacaacgaatgcagtgtcttgccgctttcacaagtttggtgatgaccaaaagaatctggtcttccgangtgatgccacgtcttcttccaggggcatagaactcacaaagttagacggtggaggaaaaccagtgggtggcagtgtggggagagtgttatactcttctccagtgcactttggg

SEQ ID NO: 6199 - DNA, 237 bp, Glycine max
  Clone ID: 701145489H1
gggtgatgggtgggtgagtccgaattgtgaaagtaagcaaagatggctttcacggaatcgtctctcctccttccttcggtttcaggaaccaacaagaacaagaacaaggttccagaagacaaatggtatttagcctacattgtgtattttaccctgggtctcggttaccttctcctatggaacgctttcatcaccgccgttgattacttctcctttctctaccctgacgccagcgtt

SEQ ID NO: 6200 - DNA, 237 bp, Glycine max
  Clone ID: 701145490H1
ggatagcacgtggattgattacaagatgccaacgtctaaacctcttttccccaaagagaagaaaacataatagatatctcattctcatcttcatctgcatctgcccatgtttcttgtttctgtctgcaattttcaattccaactctctctcacatgcaattctccatccaacaaaagtttctcatcatttctgtttcccataagcaattaattaaaatactgaatttggtataattt

SEQ ID NO: 6201 - DNA, 235 bp, Glycine max
  unsure (1)..(235): unsure at all n locations; Clone ID: 701145491H1
tcttctatcagttctaaattcaatctttgcagtttcaacaaatcagnaactggcaatttgcccttggcatatctattaaacaaaactcaaagcctcagactaaaacgagaaaactcacagaaccacttgaatcagagatatattagagtaagtaagcctttggaagttgtgatgatatacagagatggagcaaaataagaacaaaaatgctttcctccaagggtgaacatgtcaa

SEQ ID NO: 6202 - DNA, 232 bp, Glycine max
  Clone ID: 701145492H1
ggagatcttcattccatttctcattttaaataaaatcgcgtcttctcctctgtattgagacatggccgaagaagaggaagaatcagagctcagcgataagcagaaagtggagatcgcgaaatggttcctcctcaactctcctcccggagaaatccaatacgttgccaaagatgtgaaatcgattctcaacaacgacgatttgtacaaggaagccgcttccgaggcttttccc

SEQ ID NO: 6203 - DNA, 267 bp, Glycine max
  unsure (1)..(267): unsure at all n locations; Clone ID: 701145493H1
agctaacttccgtacccctgttgagccctactaaagttttcaagtggaaaaaacctggagatccccacgagtttgagcaatgagatttggatgcgcggttttagttgtgatcaataagtcgatagttagaacaatagtcttggtataaggaccttgccaataattttttagttctgattcacagagctaagacagttccgtcttagactttaaaagttttgatatttagccttaatacttgaagtttacttccaattttatggggna

SEQ ID NO: 6204 - DNA, 233 bp, Glycine max
  unsure (1)..(233): unsure at all n locations; Clone ID: 701145494H1
tggccaggttatctggtgtcttgctcatacgatttggatcggaaattccgtgngctgttgcagcttcaattggcttaattgcacatcatctatttggtgtctggaatggagacaggcgactggctataagatatggggaggattttgaattagtcaagagtcgaacaagtgttgtcccttttgcagcaatccttgatggccgacaaaagctacctaaagatttctacaaggag

SEQ ID NO: 6205 - DNA, 235 bp, Glycine max
  Clone ID: 701145495H1
ggggcgaggaagccacatagagacacaatacagagtgagttgttgctccttcgccacaactctctgccaacatgggtatctccagagattctatgcacaagaggcgtgccactggtggcaagaagaaggcctggaggaaaaagagaaagtatgagcttggtcgccagcctgctaacactaagctgtcaagcaacaagacagtcaggaggatccgtgttagaggtggaaatgtgaa

SEQ ID NO: 6206 - DNA, 246 bp, Glycine max
  Clone ID: 701145496H1
gaacgcagccaagaaaagaaaatcctcacccattttcttcgtagccaaacactctgaaattctcagttatgtcgtggcaagcgtatgtggatgatcaccgactgtgtgaaatcgaaggtaaccacctcactcacgccgctatcatcggccaagacggaagcgtttgggctcagagcaccaacttccctcagttcaaacctgaggaaataactgccatcaataatgactttaatgagcctggatcac

SEQ ID NO: 6207 - DNA, 121 bp, Glycine max
  unsure (1)..(121): unsure at all n locations; Clone ID: 701145501H1
cgctgacgatgccgctccgataaactccggcaagaaccgcgaccgcaagcgagggattccatggacggaggaaggagcacaagctattcttggtggggttgcagaaagtggggaaangtga

SEQ ID NO: 6208 - DNA, 94 bp, Glycine max
  Clone ID: 701145502H1
tgggtacctgtgggcgatgatgttggtataatcaatggtgatccacatcaattgatcacgagagtaggtggtgaaagggttgtatacatatcgc

SEQ ID NO: 6209 - DNA, 195 bp, Glycine max
  unsure (1)..(195): unsure at all n locations; Clone ID: 701145503H1
gcaacaggtcatcagagtggagctgtcaaggtgtggcagatgattcactgctccaacccagatagctcccttagcaaatcaggttttggtgggtcgggaggtttaaatcttggtggattagaaccagaatacaagttggtcctacgnaaagtgctaaagtttcataagcattcggctactgcccttcacctcaaa

SEQ ID NO: 6210 - DNA, 157 bp, Glycine max
  unsure (1)..(157): unsure at all n locations; Clone ID: 701145504H1
ggggaacagacctgcccncaataatgaagtgtttctcngtgtccttagcctctttatgggttctccttnctctcttttctctnagtgtgtcatctcaaaatatatctgagagtnggcaacancacatannctcccaccaagaggttggaattcctat

SEQ ID NO: 6211 - DNA, 141 bp, Glycine max
  unsure (1)..(141): unsure at all n locations; Clone ID: 701145505H1
tgtgtgaagaaatcatggccnggggcattcagaactctgtatggtgatcatgaaagatatgaaacaacatatttcaagccattttccggatactatttcagtggtgatggttgcagcagggataaagatggataccttggc

SEQ ID NO: 6212 - DNA, 206 bp, Glycine max
  Clone ID: 701145511H1
gatggcagtgtagtgccatcaccgggaaccaacgacacactcacatggaatgaattatagaacccaaacctaccattcatagatctcaaggatctcacagtttccttttttcctcaataaagttttactcctttttggtcttctgagtgctcactcctcttgcttggattcaaattctctattttccaacttggttttgtggtggc

SEQ ID NO: 6213 - DNA, 199 bp, Glycine max
  Clone ID: 701145513H1
ggcacaagtgagtttgttgatcgagataactagaaacagtgtgatgaaaatgaaggtccttgttttcttcgttgctacaattttggtagcatgccaatgccatgcgtacgatatgttccctctccgaatgaacactggctatggtgcccgtactccggaggtgaaatgcgcaattggaggcttgctgtggaagcacaca

SEQ ID NO: 6214 - DNA, 257 bp, Glycine max
  unsure (1)..(257): unsure at all n locations; Clone ID: 701145514H1
ggnacaagtgagtttgttgatcgagataactagaaacagtgtgatgaaaatgaaggtcctgttttcttcnttgctacaattttggtagcatggcaatgccatgngtaagatatgttccctctncgaatgaacactggctatggtgcccntantccggaggtgaaatgcgcagttggaggctnntgtggtagcacacaacatctttggcttgagaccttcctgaagagtgngttgaagcaaccaaggattactcctgg

SEQ ID NO: 6215 - DNA, 208 bp, Glycine max
  Clone ID: 701145515H1
gaattatgatagattttaaagccaatgaagaaaaccaagtttctccttattttgaagtcatatgatattctaagataacataagagatacagaaatttttaaattataggtatatctaaagagcaaaacacttgtatataaatatgattgggaggaactatttcatagtgcatatgcaacttttgttagtatgaaaatgacaatttcc

SEQ ID NO: 6216 - DNA, 82 bp, Glycine max
  unsure (1)..(82): unsure at all n locations; Clone ID: 701145516H1
ggattacacagagtanagnnggaggggagggcaaagcccaaaaggggtttccgttgtattgtgttactcccgccagccggta

SEQ ID NO: 6217 - DNA, 104 bp, Glycine max
  unsure (1)..(104): unsure at all n locations; Clone ID: 701145517H1
taatttgggaattattgctcccatcgccattgntttcattgtcggngctaacattttgttgggtggggcctctctggagnggccatgaaccccgctgtgacatt

SEQ ID NO: 6218 - DNA, 189 bp, Glycine max
  unsure (1)..(189): unsure at all n locations; Clone ID: 701145519H1
gcatcaattcaaaatatatcatcaattataagcatgggtttgtggaacacaacgaatgcagtgtcttgccgctttcacaagtttggtgatgaccaaaagaatctggtctccaaggtgatgccactcttcttccaggggcatagaactcacaaagttagacggtggaggaanaccatgggtggcatgtgg

SEQ ID NO: 6219 - DNA, 152 bp, Glycine max
  unsure (1)..(152): unsure at all n locations; Clone ID: 701145521H1
ggaatcacagtggtgccttacttcgntgtagttatnatacttcttcttcctctttcttagatctcttctttctctaagnngcacgccgaaaccatggncggaaaaggagagggtcctgcatnggatcgatctcggaaccaactactnttnag

SEQ ID NO: 6220 - DNA, 124 bp, Glycine max
  unsure (1)..(124): unsure at all n locations; Clone ID: 701145523H1
atatccttccaggccttgcatctttatagaggcatgaagtaacagaagatctccaaacatttggaggacctcatgaaagcaacaggtcatacatggaattcaggattaaacaggagaantnnnt

SEQ ID NO: 6221 - DNA, 104 bp, Glycine max
  unsure (1)..(104): unsure at all n locations; Clone ID: 701145524H1
gatggctccatcaatngaaaccagtaacggtgangccatncaccttaaacaggttgaagaagagcangatggtatacttttcnccatgnncatgatgtctccca

SEQ ID NO: 6222 - DNA, 199 bp, Glycine max
  unsure (1)..(199): unsure at all n locations; Clone ID: 701145525H1
gcctcttctctcgngtcgctcccgcaccagtttcaccgnangaatatcttgttgtttggagcgatccgagaaaaactangtnaacatgttggtttaccaggacctccttacaggtgatgagcttctctctgactccttccgttacaaggaaattgagaatggaatgctgtgggaagttgaggggaatgggttgtnaaac

SEQ ID NO: 6223 - DNA, 251 bp, Glycine max
  unsure (1)..(251): unsure at all n locations; Clone ID: 701145527H1
tgtgtgtgctatctcagactgtcaatgacagcagggtgttgcttggaggtgggtggcctgagatggtgatggcaaaagaagttgatgcattggctaagaaaactcctggaaagaagtctcttgctattgaggcatctcccgtgcactcttggctattccaacaatcattgctgataatgctggtttggacatgctgagttgatttctcanctccgtgcagagcatcagaaggaggctgcatgctggattga

SEQ ID NO: 6224 - DNA, 142 bp, Glycine max
  unsure (1)..(142): unsure at all n locations; Clone ID: 701145528H1
accgatgatganaacacataaagaaaagatgaaagcaattcatagtcatagtcatagtcacaggaataggcatgcaaattgataccacatacacaaacgatattgcacggatcaaaattgattgaataaacaacaaactgaa

SEQ ID NO: 6225 - DNA, 243 bp, Glycine max
  unsure (1)..(243): unsure at all n locations; Clone ID: 701145529H1
anttntatgntatttcangctgagtaccctgaattcagcnacaagggtaagacactagtctttcaattttctgttaagcangaacagaagcttgactgtggtggtggctacatgaagttgctcagtggggatgttgatcagaagaaatttggnggggatactcctanagtattatgtttggcccagatatctgcggnnncagtaccaagaaagttcangctattcttacctacattaacacaa

SEQ ID NO: 6226 - DNA, 214 bp, Glycine max
  unsure (1)..(214): unsure at all n locations; Clone ID: 701145531H1
ggcacacagttatacagctctagagaattatcataccctttaagatgaaaccgtacctangtccaatattcctattattccttatccttctcgaccattccacttcggngagngcttctagtagtaggtttatagattcttttcaaaattaaagaattctttaatcctaagtctgaagaactaaattcaaaangntataaggaagcnccggngg

SEQ ID NO: 6227 - DNA, 157 bp, Glycine max
  unsure (1)..(157): unsure at all n locations; Clone ID: 701145532H1
gggcctcagcagaagcagaacgaggagaagcaganggngcaanaagcaatggcgccgaagaanccgagaaccacgacaaggaaccctgatttggttagggggttggcaatattcgaggtcgnaaatgtaccaaagaggggcatctgggccatnaagg

SEQ ID NO: 6228 - DNA, 186 bp, Glycine max
  unsure (1)..(186): unsure at all n locations; Clone ID: 701145533H1
gaagcagttaacaaacatgagatatgataatgttagggtgtaaaggaattcattatgaagatggttcacatccaaaccaagcttaaatcccacaaattgaccttaatgagaaattcattgttgaacatgcctaaaattgcctacccaccgatttcacacaattaaaacngnccatancncntnggg

SEQ ID NO: 6229 - DNA, 110 bp, Glycine max
  unsure (1)..(110): unsure at all n locations; Clone ID: 701145534H1
tgttccgtcgtggacgncgtggtggaacttcattacacagtgggtggcttgcgttttggaaaaacggtgttcgtgcggaaacagaggctacgtttacgactctcatcata

SEQ ID NO: 6230 - DNA, 155 bp, Glycine max
  unsure (1)..(155): unsure at all n locations; Clone ID: 701145537H1
ggaagatcggtgaaggagtgaggtagcaacagcactgccactgccactaccaatagcagaatgggaaccttgggcagagctttctacgccgtcggattttggatccgcganaccggccaagccatcgatcgcctcggctctcgtctccatggcaa

SEQ ID NO: 6231 - DNA, 124 bp, Glycine max
  unsure (1)..(124): unsure at all n locations; Clone ID: 701145539H1
tcaggnaacattgaaccaactgaattactggctgacatggacaatcagatagcaacagcaaaagaagaagctttaagccgaaaagatatattggacaaggttgagaaatggatgtcagcatgtg

SEQ ID NO: 6232 - DNA, 113 bp, Glycine max
  Clone ID: 701145540H1
gcaaaagaagacatagaaaataaaaaattctacggatggttcgcagtcaaggagatttgtttgaagagaattttaaagaactgaagaaatgggttaatgtgaagtcacactga

SEQ ID NO: 6233 - DNA, 116 bp, Glycine max
  unsure (1)..(116): unsure at all n locations; Clone ID: 701145541H1
ggcagccnagaaaaganaatcctcacccattttcttacntagccaaacactctgaaattctcagttatgtcgtggcaancntatgtggatgatcacctactgtgtgaaatcgaagg

SEQ ID NO: 6234 - DNA, 250 bp, Glycine max
  unsure (1)..(250): unsure at all n locations; Clone ID: 701145542H1
ggcacaagtgagtttgttgatngagataantagaaacagtgtgntgaaaatgaaggtccttgttttcttcnttgctacaattttngtagcatggcaatgccatgngtangatatgttccctctccgaatgaacactggctatggtgcccgtantccggaggtgtaatgcgcaagttggnggcttgntgtggaagcacanaacttctttngctttnanaccattcctaanagtgnnttgangcaacaagga

SEQ ID NO: 6235 - DNA, 254 bp, Glycine max
  unsure (1)..(254): unsure at all n locations; Clone ID: 701145543H1
gatnactgattagacanntctctnccanncaccatggccaatttcaaaactttattcatttcncaaaccctaaccctaaccctccttttctccaacctagtgactgccacttancaccacaacatctctccaagtcttgtacgttctcgtgagangttgacncaccttacacttctacttgcatgaaatttttactagcgaaaaaccctcgaactngtaatcgacccccccaaggtggtagccagctctccatt

SEQ ID NO: 6236 - DNA, 263 bp, Glycine max
  unsure (1)..(263): unsure at all n locations; Clone ID: 701145544H1
ggangcccaaagtgcaacgttactttgcaaaaaccctaaaccctctcctttctctctaccgcgactactgtactcatcaatggcgacgcaatcgttagacgaagaaacaactaagaaagtcatacgacaggtacgagtntantttcggcgacagtaccttctcaccgatggtttcatgaggtagagtatcactgaaagcgaagatggcagtatccttgttcttcagtattacctgtttttatttatnttttgttttcaatgta

SEQ ID NO: 6237 - DNA, 198 bp, Glycine max
  unsure (1)..(198): unsure at all n locations; Clone ID: 701145545H1
gtagtatgaacacttanngagtttggtgatatattantagttagtatatangattaanttttatttgatcaaatttttggccataagcaacctcanatatcaatgancaaaagcagcataaagaggtaggnaaatgagtccagcacaggataatagaatgcnataggngggttacaaatnanangtgtgaannagtaa

SEQ ID NO: 6238 - DNA, 199 bp, Glycine max
  unsure (1)..(199): unsure at all n locations; Clone ID: 701145546H1
tccatcaaaattcttagtaaactataaactacaattgtagatgactgatgttcttttgggaagcaagcagatactaataagatcaacaagcatgaagttacctgaaggcttttacagcatttttaagttcaggatcctccaaaatgtttctagcactaataggaacnatctgcaagaccnttatataangangntggcc

SEQ ID NO: 6239 - DNA, 131 bp, Glycine max
  Clone ID: 701145547H1
aatgggtctagcttgcaagctcatggaggtgttgtccgaagcaatggggttagagaaagagggtttaagcaaagcatgtgttgacatggaccagaaggtggtggttaattactaccccaaatgccctcaac

SEQ ID NO: 6240 - DNA, 103 bp, Glycine max
  unsure (1)..(103): unsure at all n locations; Clone ID: 701145548H1
gaccctagtttctgttctcnctctttcanngcagtgttagggtttctgtagcctccaaccagaaagagagggaaatggctccnaaacatcctagtacgggttt

SEQ ID NO: 6241 - DNA, 101 bp, Glycine max
  Clone ID: 701145549H1
ggaacttgaaaagttacatgattcaatcaatttgatactgtcacttcagagtaaaaatggaggtatgactgcgtgggagcccgcaggaagcttataaatgg

SEQ ID NO: 6242 - DNA, 115 bp, Glycine max
  unsure (1)..(115): unsure at all n locations; Clone ID: 701145550H1
ttgcacccaactagcctctaaagaatcaganaaagaattttcaaaattttccgttgctaaaganttcattgtctcagaacntgacctggtcccatcatataantccactcgagga

SEQ ID NO: 6243 - DNA, 245 bp, Glycine max
  unsure (1)..(245): unsure at all n locations; Clone ID: 701145551H1
ggcacaantgagtttgttgatngagataantagnnacagtgtgatgaaaatgaaggtccntgttttcttcgttgntacaattttggtagcatggnaatgccatgcgtaangantgttcccactccaatgaaacactggcaatggtgnccntntcccggaggtgnaatgcgcaagttggagncttgatgtngaagcacanaanncttnggcttnaaaaccancccnaaagantnntaaaacnaaca

SEQ ID NO: 6244 - DNA, 183 bp, Glycine max
  unsure (1)..(183): unsure at all n locations; Clone ID: 701145553H1
ggaagaacaagtcttgcattgggtggagcatacttagaaacagcaactatgtctctcatgcagcttactagctcccctgttggctcactggtccgtttcattgtaatatttgctttatggtacagaaccatggcttggccaagttgccaccnnacgctcatcattccagcattttagcgtttg

SEQ ID NO: 6245 - DNA, 162 bp, Glycine max
  unsure (1)..(162): unsure at all n locations; Clone ID: 701145554H1
ggattcagaaactcttaggcatagcgaaaatgacaaccancttcgcgaccgtcgcaggactcggtggtgcatcactgtcatccacctcatctcgtctcacctcagggtttgtgaaatcgccagtgagtgctaggaatcccttgaggcaagctgtggcaatgg

SEQ ID NO: 6246 - DNA, 98 bp, Glycine max
  unsure (1)..(98): unsure at all n locations; Clone ID: 701145556H1
ggtgacagtcaaaagaaaagacgttacagcatagcatgggattgatangcaccagtgttcccacgaacatcgttcctcaattcgggtctctccgaaac

SEQ ID NO: 6247 - DNA, 248 bp, Glycine max
  unsure (1)..(248): unsure at all n locations; Clone ID: 701145557H1
gacagagtgcaaaganaagaaagagaaataagagagaganagttncagaagaggcatcaattgctagctccaatatattacaccactgcaaaattttctgaagcngagatcattgttcattatcacagaaatgggtgnagagaacaaggaagaagaaaggaaagaagagaccacagaggaaaagaaggagaagagaaaaaggntgaagagcccccagagatatactcaggttgatntgcntgtgaact

SEQ ID NO: 6248 - DNA, 229 bp, Glycine max
  unsure (1)..(229): unsure at all n locations; Clone ID: 701145558H1
ggatctcaaacacactaatcaaatgcacaatatacgcaccattgggtccgaacccaattgtgcatttgtgcattccattccatcacagtaaaattgaattgacacccccattccctngctctctctctgctaccaanttgtctcactacataaaggtgctaaccactnacgcgtaactaccactgtttttgacaaaactagcntccaaanttaaangganangnnntat

SEQ ID NO: 6249 - DNA, 249 bp, Glycine max
  unsure (1)..(249): unsure at all n locations; Clone ID: 701145559H1
ggaagccaaggagaagataatctcataaaaaacagaaaaaggagtgaaaaagagagacccttttgaatggagtctgttctaagccacgttggtgcaggtttctcaatggcatgatcccaaggggagtttnaggtacccatttcaaggctagttccttgttggtgttgatggtgggaggccaaggcgtgtagtgttggtgaaagctgaggctgtgagcataaacccagatataaggaagatgaagagaaa

SEQ ID NO: 6250 - DNA, 170 bp, Glycine max
  unsure (1)..(170): unsure at all n locations; Clone ID: 701145562H1
gggacggaattcggggatacaatacaaatgtaacgtagtagttgaaaattttgttgcatcagatganagctatggagttggtgggagagaaatggatagaaattgtgacgtgtttggtaatttcaacaacattaatgcggagtgtaagtggaagtgaaagcgnntgcatt

SEQ ID NO: 6251 - DNA, 100 bp, Glycine max
  unsure (1)..(100): unsure at all n locations; Clone ID: 701145566H1
gggggtgaaggagataactttttggaggagtttnagaagagaatgaaggtcagtaacaaaggatatttaatatggggttggnccccacagttgttganac

SEQ ID NO: 6252 - DNA, 109 bp, Glycine max
  unsure (1)..(109): unsure at all n locations; Clone ID: 701145568H1
ggattcatgggatttagagagagagagaactttcaactganggtgagagtgacacaaatctagggagcactactctaaaagttctattagattcttccaaaacatgncc

SEQ ID NO: 6253 - DNA, 136 bp, Glycine max
  unsure (1)..(136): unsure at all n locations; Clone ID: 701145569H1
atgggagctgatttttatcatcgatacaagggtgacataaaaatagcgaaagaaattgggctggactctttcagattctctatctcatggtcaagaatattcccaaagggcaanggagcagttaaacccccttggg

SEQ ID NO: 6254 - DNA, 146 bp, Glycine max
  unsure (1)..(146): unsure at all n locations; Clone ID: 701145570H1
ggagaantgaggaggcaaatacatgnngaacgagggtgtaaacacggtggtggtggagcnacaacctgtggcatccacgtccaagtttccgttgagcttttgggaaaccacggtaaaacnncnaaaaaagngctggttttcgcggt

SEQ ID NO: 6255 - DNA, 137 bp, Glycine max
  Clone ID: 701145571H1
gtaaaattttattatgacgataacaacaattcccttacctgtttcactcttccctaatcccttaaaaggcactatctggctttgctaagctctacaacaattatcacaaataaatctccaatccactagctagtgtc

SEQ ID NO: 6256 - DNA, 150 bp, Glycine max
  unsure (1)..(150): unsure at all n locations; Clone ID: 701145572H1
ggggttattggtcacattcttcagngactgcgtttttggatcggaacctcttctgnggngtagcaatgggacactccaacgtttggaactctcacccaaaaanctanggtcctggttctcgcacttgccgtgtgtgtgggatcnaatggc

SEQ ID NO: 6257 - DNA, 148 bp, Glycine max
  Clone ID: 701145573H1
cttgggactcatgagtggtaagttgagatctaagtggattggtccttttgttgttactaatgtttttccttatggtacagttgagattcaaaagcgactccacaaacaagagcttcaaggtcaacggacatcgacttaagccatcctc

SEQ ID NO: 6258 - DNA, 137 bp, Glycine max
  unsure (1)..(137): unsure at all n locations; Clone ID: 701145574H1
ggactttgcatacagtttctttgaganacaggttcctattgatgcagtgttccagaaggatgagatgattgacatcattggtgtgaccaagggtaaaggttatgagggtgttgtcactcgttggggtgttacccgcc

SEQ ID NO: 6259 - DNA, 253 bp, Glycine max
  unsure (1)..(253): unsure at all n locations; Clone ID: 701145575H1
tcatatgcatggacacggccagcaaaaaccaagtncaacgcgtgcctncataaagcaactncctccatggcttgtctcatggattcaccttcaccttggtgtgcctcattagtattataccaaggtgcatgcagcaacacaatcacccaaggtgtcttgaccctatcaatgttggcgaggtcagattgaagccacgtgtactgaagtgattgggagtcaaaatcagtgtaggaacctagcatgatgacgtggg

SEQ ID NO: 6260 - DNA, 247 bp, Glycine max
  unsure (1)..(247): unsure at all n locations; Clone ID: 701145576H1
cactagtctttcaagtagagctttcttttcttgcaatcctagtttctctacatacaatttcattggtttcttttggagttcaattctttttgcaaaataatatcattaaaccttaaaaaagaaaaagataaaaaaaactgatgtcaagaaataaagtgtattatatatgtaagtngaggntatatatagaaccatgtccaacagggcgatgtatcccatatgctgtttttaccntattcccnttttc

SEQ ID NO: 6261 - DNA, 245 bp, Glycine max
  Clone ID: 701145577H1
ggaagaaatctgcttctgggaaaagtgtatccatcatcaaccccactaccagaaagactcaatacaaagttcaagcttgttcacaagaggaggttaataaggtcatggacttagcaaaatctgcacaaaagttatgggcaaagaccccactatggaaacgtgctgaacttcttcacaaggcagctgctatccttaaagagcacaaaactccattgcagagtgcctggtgaaagaaatagcaagcc

SEQ ID NO: 6262 - DNA, 247 bp, Glycine max
  unsure (1)..(247): unsure at all n locations; Clone ID: 701145578H1
gacagttagtttatctctacattatttgttttggtgcattcaaatggctgggactgtagtgatatttgactttgactcaacaatcattgagtgtgatagtgataattgggtgctgatganaccggtttaactgaaanttctatcagcttctccaagcatggctggaaccccctaatggataanatgagaatgaacttcattcncaagggaaanccnttcaagacttgnaaaatnccgnaaaggcncc

SEQ ID NO: 6263 - DNA, 74 bp, Glycine max
  unsure (1)..(74): unsure at all n locations; Clone ID: 701145581H1
anacaaggtgctacantaaggtgagtcctccagtgatggaggtcagggtgaaatatctgcagaanaagntgctg

SEQ ID NO: 6264 - DNA, 81 bp, Glycine max
  unsure (1)..(81): unsure at all n locations; Clone ID: 701145582H1
ggtagcaagcncttgcatcgcatattctttcccttggnaanatgcaatccaaggaaganaaagaaacntganttctttggg

SEQ ID NO: 6265 - DNA, 149 bp, Glycine max
  unsure (1)..(149): unsure at all n locations; Clone ID: 701145583H1
cacttggtcccctgtatatgtgcgtgatgcntattagattaancccccctttatctatatcntctttntcgtgtggtcaacagtgtngtggccattatatatgtgatcagagacagatcacaggtaggccangnttcaaaatcngaacc

SEQ ID NO: 6266 - DNA, 83 bp, Glycine max
  unsure (1)..(83): unsure at all n locations; Clone ID: 701145585H1
tgnacaggcattctcattccgtgaattggcaactgcaactnagaaacttcaaagccgantgtcctcnttgggtgagggaggcc

SEQ ID NO: 6267 - DNA, 176 bp, Glycine max
  unsure (1)..(176): unsure at all n locations; Clone ID: 701145586H1
ggatccttctacactaactaaagccgagcagcgagagagagaaaccctagcaaaaatgccggctggtcacggtttgagatcccgcaccagagattccttctctcgtcccttcaggaagaagggtancattcgccctcaccacatacctctncaacctaccangtcggcgattatgt

SEQ ID NO: 6268 - DNA, 96 bp, Glycine max
  unsure (1)..(96): unsure at all n locations; Clone ID: 701145587H1
caggcantttatttctgcagtggggtcttagccctccanaagatcatcattatgggcttgcancnccttgtatancccatttcacatacacnaaaa

SEQ ID NO: 6269 - DNA, 126 bp, Glycine max
  unsure (1)..(126): unsure at all n locations; Clone ID: 701145588H1
aagaaagtgcaacctcctctgttttgctcccctgtttaagccttatcgtaagcttagaatggcacacaaggaattttccattgccctagtgactctcatngttctctttgtcaacacgaacctcna

SEQ ID NO: 6270 - DNA, 125 bp, Glycine max
  Clone ID: 701145593H1
gaattctctgtggttctattttaattttagttatttaaaagttttggttaatgtttttgttcaattagtgttatgactgtttgggctttgattaaacctttatgaatactgtttcgctttggatt

SEQ ID NO: 6271 - DNA, 130 bp, Glycine max
  unsure (1)..(130): unsure at all n locations; Clone ID: 701145594H1
gattattcatatctcattctctaacctttcantctgccttactcactactctaactttgctcatacatcgtagatgaaccaacacttctagtctctctnactttataaccatgtaaaaatgagtcacctc

SEQ ID NO: 6272 - DNA, 136 bp, Glycine max
  unsure (1)..(136): unsure at all n locations; Clone ID: 701145596H1
gaaaaagggagtgcctgataacccataaccgaccgcaccaccgttttcctttgctttncgttctacaatgtcgaaaacctcagagattattacatgcaaagctgctatttgctggggaataggaaanccgtgactg

SEQ ID NO: 6273 - DNA, 237 bp, Glycine max
  unsure (1)..(237): unsure at all n locations; Clone ID: 701145601H1
ggggtggaaaccgatgaaaaccgcaacacccttccctctcctctcccacataaaacccacaagccccttcttcccattgggtaccgcagaggcatggccaagaagagaaaatccatatccacaagcctcgacgaggtggatcgaaccatctactctttcttctccagtgccgaaaattccctctctcactctacactctctccnngaaccaccagaaactctcnttcnagcnggnga

SEQ ID NO: 6274 - DNA, 286 bp, Glycine max
  unsure (1)..(286): unsure at all n locations; Clone ID: 701145604H1
gatctgttgattgtcttaaagttgttcatagcttgcatgtctattttcttcttgtgggggattttaacatacccattatatatcaagttaagcgtctccgtgatgggaagagttttgctactaggnaagtggangcaattcaaaagggaaatgtcatattcactttgctggcttcatttcacaaggaagaagtagggtttcaccaccaggaagtgtctatcccatcagtccctgctccagatacgcttttatcgttggaagagcttcgggaacaacgtcttactgc

SEQ ID NO: 6275 - DNA, 238 bp, Glycine max
  unsure (1)..(238): unsure at all n locations; Clone ID: 701145605H1
gagtcagnatttgaattgctactantggcgagttttacgtaagaaaagccttgaccatatgttctagtacaatatatatttgaataatatagatggactccaaaccaatacacacacaaataacaaataccagacgcgcatcatcataggtacttttgaactatttggcgaggaccatcctttgcacttgcatgcagattgcaacgaaagatcaaattatattaggagctagtgaaca

SEQ ID NO: 6276 - DNA, 275 bp, Glycine max
  Clone ID: 701145606H1
gaccacgattactaccaagtgaaaaagcaattaactaagcatatatagcgtgtaagacagtgagaaaaaaagtgttgtgtagagagaaatggctaggtggtgcatcttggtggttcttgcccttgtcgtggttgcaagtgccagaaacatgcccaatgacgcaggtttggaggaccagaagaacttcctcgggtatgggttctctggagttggcaacaatgggcttccctttggaggagtgggttctgggtttgatggtaatatgggtgggcctt

SEQ ID NO: 6277 - DNA, 164 bp, Glycine max
  Clone ID: 701145607H1
gggacgaaaaaatatgataaagtagaagtctccgtctccaacacactcgttctctgccgctcgctggttccgccgccaatttccgggtttgatttgaattggggggaaagaaatggagtttgttaatcgaatagtggacatagctaccagagctgtaaacagca

SEQ ID NO: 6278 - DNA, 235 bp, Glycine max
  unsure (1)..(235): unsure at all n locations; Clone ID: 701145608H1
ggaggttgtgatttgcattatatgatacttggaatttaagtttttatcagtgtcacctagcataggccactataatattctttgcatagtttatatgaggattttgttgttaaaaatactgtttctcacattcacacagtatctatctctttccatacaggtccatagtgctgttattaaatcatgatgctttgaataaaggaaggaaccaatatctggtngtcattaacnccac

SEQ ID NO: 6279 - DNA, 200 bp, Glycine max
  Clone ID: 701145609H1
gggagaaggaaagaatatctatctctcattctctcgtgcctcaacgcttttttaactcctttcgcttttccattccaacctctttcacacttcagatctgtttcttcatcggttgttcaagtaaatggcctttgtcaccactgctgaagtgtgtgatgcgaacccacagttaattttgagtggggagcttcgggccttca

SEQ ID NO: 6280 - DNA, 284 bp, Glycine max
  Clone ID: 701145610H1
ggctgagagttttgctgcaaggacttgacacaaattgtgtaaatgtctgtggcttttaccaacctctcttggtggttgtggagtggaaagcatcaagagccaagaatcccaaatgggccttctataaattcttcggccgattcaaatttgtgggaatcggatgttttgaggtttcctttggttcaggcgaatgtggggtcctcatctagaaggtgaagcgcaaatggcatagtaggggggagaggaaggtggatagggaatatgatgttgtctggttccatctg

SEQ ID NO: 6281 - DNA, 224 bp, Glycine max
  unsure (1)..(224): unsure at all n locations; Clone ID: 701145611H1
atggaaattcaggttaatggtggtagtattgcacaaaaggtggactttgcatacagtttctttgagaaacaggttcctattgatgcagtgttccagaaggatgagatgattgacatcattggtgtgaccaagggtaaaggttatgagggtgttgncactcgttggggtgttacccgccttccccgtaagactcacagaggtttgagaaggttgcttgtattggt

SEQ ID NO: 6282 - DNA, 297 bp, Glycine max
  unsure (1)..(297): unsure at all n locations; Clone ID: 701145612H1
gagagaaagagagagaaagatgtcgaagcgtggtcgtggtggttcggcggggaacaagttccgcatgtcgctgggtcttccagtggcggcgacggtgaactgcgccgacaacacgggggcgaagaacctctacatcatttcggtgaaagggatcaaaggccgtttgaaccgtcttccctcggcctgcgttggcgacatggtgatggccaccgtgaagaagggaaaacccgatctgaggaagaaggntttccagctgtnatcgttcgccagcgcaancnntggcgccgaaagacggnt

SEQ ID NO: 6283 - DNA, 284 bp, Glycine max
  unsure (1)..(284): unsure at all n locations; Clone ID: 701145613H1
ggttccgttttggtacgaattgaacttgcgttgctgaagaataacatagtgagttgtgcactctgcagaagctccacgtacttccgcacgaccttttcatgcaagaatgaagcttgacgtagatgtcttgagatatctctccaaagatgattttagggttctcactgctgttgaattgggcatgcggaatcatgaaatcgtacccactgaactcatagaccgaattgcgcgtctcaagcatggangcacgcacaaggtttgaaaaacttgctcaagcataagtt

SEQ ID NO: 6284 - DNA, 297 bp, Glycine max
  unsure (1)..(297): unsure at all n locations; Clone ID: 701145614H1
gggcttagagaaaatctgttccaatcctcgcttcgttttcgtgtcgagaacaatcttctccccatcaaaccctaaccctaactcacagatttgagttttgatcacaccannnnnnnnnnnnnnnncgagaaaatgcttcaatctccagggcactcgccgctccacatctcgtcgccgtccccttcaatttcccaggtatcggcgcaaaaccctaacgatccaccatcatcatcgtgtgcgaanaccccagcggtgttggacgaggacacgtacgttgaggcgttggagaagatcatc

SEQ ID NO: 6285 - DNA, 272 bp, Glycine max
  unsure (1)..(272): unsure at all n locations; Clone ID: 701145615H1
gggcgctaactatggtcatgattatgaaactgnntgatcacttgtttttgcactgtccatttgggcaccaaatttggaattggatctcctctatgttctattgttgttttgatctttcccccatccagaacgtccttgctacaattaccttttcgttcttctttatttagaagctgagaaatcttgtaaaattttaaaatctgtcataagttataattcagccagtgttcagctttttggttctatctcttttggttttatgactaattcat

SEQ ID NO: 6286 - DNA, 254 bp, Glycine max
  Clone ID: 701145616H1
ggcatatccaaaggaacaaaaatattattaagatgatcaacattattggagcacttgttctactctttgcatttctcttcctcagttgtgtgtatgcacaagacacaacaacccttgtgcctgcaatcataacttttggtgattctgctgtggatgtagggaacaatgactatcttcccacccttttcaaggctgattaccctccttatgggagggactttgttaaccaccaacctatgggaggtttgcaatgg

SEQ ID NO: 6287 - DNA, 274 bp, Glycine max
  unsure (1)..(274): unsure at all n locations; Clone ID: 701145617H1
ttgtnataatatggtttacggataatttatttaggtcgggtagttaaatggttctgggtcccaagtgtaagttacacatgcncgnacttgtcgatnnagatgactcttanattggtgattaagagctcttcggtatgtaatntatgttcattacggtacctgctacgtgtcttttatgaaatttatgattattataaattatttttctacagtttatatgtntttctcactcttttaaacaagcagagggaaatttcatttcagtctnctattc

SEQ ID NO: 6288 - DNA, 101 bp, Glycine max
  unsure (1)..(101): unsure at all n locations; Clone ID: 701145618H1
ggatgcacaagtttnttgagatagctagaagcaataagatgaaaatgaaagtgcttgttttgtttgttgcnacagttttggtagcatatgnatnccaggcc

SEQ ID NO: 6289 - DNA, 275 bp, Glycine max
  Clone ID: 701145619H1
ggggagaaagatgagcgaggggatgagctccatgagtttcaagctcaaggagttcttccagcctgggcccaatcaggccgacaagcttgtggaggacgctacttccgaggccctggacgagcccgaatgggccctcaatctcgatctctgcgacctcgtcaacaccgacaagctcaactgcgtcgaactcgtccgcggaatcaagaagcggatcattctcaagagccctagggttcagtacctcgcccttgtcctcctcgaaaccctagtcaaga

SEQ ID NO: 6290 - DNA, 273 bp, Glycine max
  unsure (1)..(273): unsure at all n locations; Clone ID: 701145620H1
tacggccgcgagaagacgacagaagggggtacaaagtcctttaactttttgggttttattttccggtttggtcaggcccgagacactcctctgtagcattttcttgaagaaaggaaaggaaacggcatcagaantncananatcagagatgtgtgggagagcacgttgtactctgagagcggatgatgtcccaagggcttgtcaccgcagcacttcccctactcgcatcttcatatcgaccggtataggccagcgtataatgtgtcaccggga

SEQ ID NO: 6291 - DNA, 272 bp, Glycine max
  Clone ID: 701145621H1
gttgagaatggggagttagctttaccaatatctggagaggaaagtggaacaagccaagaaatatcttcacatttgaatgaagataccggagacagtcagatccaagaaaattcaacattgctggagcagagattgcatgttgtacagtcaaccattgattctcttgtatgtccttcccctgatgaacactctccacaggtcatgtcagaaaataataagaatcttagattaactagaagctggagttgtacggaacatcacatggctggttc

SEQ ID NO: 6292 - DNA, 278 bp, Glycine max
  unsure (1)..(278): unsure at all n locations; Clone ID: 701145622H1
ggaaaaccaaaaataaaatggtctcacagacagttgaactcttaaagaatgagattcctctggagcaggaatcagtggttttagctgaagatgctgtaaatggtctcgttcttgtggacatcataaatggcttttgcacagttggtgctggaaatctggctccaagagaatcnaatacgcagatttcgggaatgatcagtgaatcagcaaggctggctagagtgttctgtgagaagaatttgccggttatggctttcctggattctcaccatcctaac

SEQ ID NO: 6293 - DNA, 272 bp, Glycine max
  Clone ID: 701145623H1
ggggtgtgatgtcagagaactacacactggaatcgttcaccgtccgaaggcagcgacggagtgaagctccgtacaagggtgttcaagccagatgctggaacagaagcggatgggaagttggggatcgttctggtgcacccgtattctattttgggtggctgccagggtctcctcaaaggaatcgcttctggcttggctctcaatggttacaccgctgtcacctttgacatgagaggcgttggcaagtccaccggcagggcttctctcaccgg

SEQ ID NO: 6294 - DNA, 275 bp, Glycine max
  Clone ID: 701145625H1
cagaaaggtgaatggtaatagacaacaacaacacagtgacagaatcactgggcactgttgtggatgccccaagtgggttttctcaaagaggggactcaaattcaaagctttcaaactcaaattccctcattgatttgaagctgggtcgatttgctgaccatggagatttcactgatcggggcgttttccaaagttttgtcttcttctgagtcatcaacgcctcctaagagagtgagagcttcaggttgcactctcagactgcatattgccaagtc

SEQ ID NO: 6295 - DNA, 278 bp, Glycine max
  Clone ID: 701145626H1
gataccaaaaacaaaacacaagccaagtgaaagtgagaaaaaataaaaatcaaagagcataatgtcagggatcattcacaagattggggagacccttcatgtgggagggcacaagaaggaggaggagcataagggtgagcaccatgctggagaatacaaaggggagcaccatggtgaacacagtagtgagtacaaaggagagcatcatggtgaacacaaagctggagagtaccatggtgagcacaagccagagcacaaagaggggttcctagacaaag

SEQ ID NO: 6296 - DNA, 236 bp, Glycine max
  unsure (1)..(236): unsure at all n locations; Clone ID: 701145627H1
ggcaattgaaagagagatttgatagcctcaactcaagtaagggttttctctttgagaaaatcgtatcttacaccttttggtgaccactttgagtgagagaagagaaattaagagagatactcaaattagattcaagagagatggccatcaaccatgaaacttgggctttcattttcggtcttctaggcaacgtgatctccttaggtgttccncgccccattacnantttntacnaa

SEQ ID NO: 6297 - DNA, 216 bp, Glycine max
  Clone ID: 701145628H1
gatattcctaacacaggcaaagatatgagattggaatattccaggacaaagtgaagaagtataagcaagtcaggaaataaagtagtaaactgtaaaggtaaatatcaagtataaatggaaggcattagttattatagataatctcctcatttcttatcccttcaaattaggagttatcttttataggacatttgaattgtagtacttaatctaaat

SEQ ID NO: 6298 - DNA, 128 bp, Glycine max
  Clone ID: 701145629H1
ataaatgacgaatatgatattaatattatttcagataattcagccattagaaataaaacaataggtcaaataactactcatctagatcagataccgataggaaatgaaggtgccactgaatttgaaca

SEQ ID NO: 6299 - DNA, 241 bp, Glycine max
  unsure (1)..(241): unsure at all n locations; Clone ID: 701145630H1
ggagactgttacttgcaaatagttaggaaaagaggagatagttggagtgtgtggtttgctaatagaaatgaacctgttgacgcggaatccgcagttctgttgctagatcactctggtgtactgaaaatagaatcanaacacagggaattacccatcattctttacttttcacctcaaccagccaacaacactatggccacactcttagatacaggcaacttgtgtgnanagcttcacccaa

SEQ ID NO: 6300 - DNA, 152 bp, Glycine max
  Clone ID: 701145631H1
ggggggcattgaattgaatagattagattatactaaaattcgttacactgtcacaacaacattctgaatcgtgatagacaaagaagcctgcttgttagactttgaggctctctgcccattgcaaccccacataccaacatcattctgtaatg

SEQ ID NO: 6301 - DNA, 289 bp, Glycine max
  unsure (1)..(289): unsure at all n locations; Clone ID: 701145632H1
gattgcacctaatatagaaattaataatgcatacacatcccttttcttctttcccacaacgacataccaaagtaaaancttccaatatttgcaggaaccaatttgtactcttcancatggnctcatttncatgcnattnancgtcacatggcttttgttaacaatgganacacaaacaggagagattcagagcacaagttcattgggattcctagaatctcttcagttgctagagactcagatctcatgaaatctacatacacgagctgaaggccntatatgtacaccc

SEQ ID NO: 6302 - DNA, 243 bp, Glycine max
  unsure (1)..(243): unsure at all n locations; Clone ID: 701145633H1
accttttgagttgttctgccggatcggtcgctcaagacctttggtctctacccggacctgatgaaaaaaatgggatcacatcttatggactcgttgagaataattctgatctagttcatggcctattagaagtagaaggcgctctggtgggatcctcacgtacagaaaaagattgcagtcagtttgataaggatcgagtgacattgcttctgcggtccgaaccaggaatccctnaaatatgat

SEQ ID NO: 6303 - DNA, 199 bp, Glycine max
  unsure (1)..(199): unsure at all n locations; Clone ID: 701145634H1
ggcacaagtgagtttgttgatcgagataactagaaacagtgtgatgaaaatgaaggtccttgttttcttcgttgctacaattttggtagcatggcaatgccatgcgtacgatatgttccctctccgaatgaacactggctatggtgcccgtactccggagntgaaatgcgcaatttggaggttgctgtgaaacannaaa

SEQ ID NO: 6304 - DNA, 247 bp, Glycine max
  unsure (1)..(247): unsure at all n locations; Clone ID: 701145635H1
gggtttgtganccatgtcatccgttgaggaagactgaagcggctgctaagcagttcaatggctatgaacttgatggaagatcattgagagtgaattctggaccacctcctgctcggaatgagagtgctcctcggtttagaggtggttcttctttcggttccagaggtggtggtccttcagatagtgaaaacggttcatgtaagtaatcttgcttggggtgttgacgatgtagcacttgagtctttgt

SEQ ID NO: 6305 - DNA, 269 bp, Glycine max
  unsure (1)..(269): unsure at all n locations; Clone ID: 701145636H1
gaccaaaaaaactactagtgagggatcgcaagggagtgttttggtgcgggttaaaatgcaacgataactgttgaaatagaaaaaagaaaaacagtgttttggtgtagctgagagaacaggtttaaatcacccncgaatttctgctatggcttcaaccagatcagtctttcttcttcttttcattcaattgtgcttctcacttctacccttgtcattcgntcaatcccccgccaccgggtctaccgaagttacaccatttatggtcgagt

SEQ ID NO: 6306 - DNA, 250 bp, Glycine max
  unsure (1)..(250): unsure at all n locations; Clone ID: 701145637H1
ggtgcaattgaaagaacgatttgatagcctcaactnaagtaagggttttctctttgagaaaatcgtatcttacaccttttggtgaccactttgagtgagagaagagaaattaagagagatactcaaattagattcaagagagatggccatcaaccatgaaacttgggctttcattttcggtcttctaggcaacgtgatctcctttatggtgttcctcgctccattaccaactttttaccaaatctacaag

SEQ ID NO: 6307 - DNA, 273 bp, Glycine max
  unsure (1)..(273): unsure at all n locations; Clone ID: 701145638H1
ggaacaaaacaagtgtttcgaatagattatcctaagtctttgggaatagtgctgcaatggcttcaagtcaggaggaggtgacccttttggganctactggaagcccatttgtgtgcagggttcatattgccctcaagttgaagggagttcaatacaaatatgtcgaagaaaatttgaggaacaagagtgaactgcttctcaaatccaacccagttcacaagaagattccagtgtttattcacaatgagaagtccatagcagagtctcttgtgt

SEQ ID NO: 6308 - DNA, 139 bp, Glycine max
  unsure (1)..(139): unsure at all n locations; Clone ID: 701145639H1
gagtgtggaagtatntgcagaactttgtttcccancctccattgcctccgcttctacctcgctaccatgatcattcctgagaagaaccgcaaggagatctgcaaatacctcttccaagagggagtttgctttgcgaaga

SEQ ID NO: 6309 - DNA, 72 bp, Glycine max
  unsure (1)..(72): unsure at all n locations; Clone ID: 701145640H1
gacnanatcangctctaattanantttctatctcatttccaatctcatnttacgttcgggctcaaacacttc

SEQ ID NO: 6310 - DNA, 231 bp, Glycine max
  unsure (1)..(231): unsure at all n locations; Clone ID: 701145641H1
gggaaagagaaatggcaaaaaatattctctcaacctcaaaccccatcctactacctagttcatcaccatcctcatcctcatcatcatttgtaaaaccaatacatgtttgctccaatccgataatcaaaagcactttgaagagggaattaactctttgcaaagcaacaccacactctccaattgttgtgacaaagagaggttgtccatcagttcatcaccagcttgggnttt

SEQ ID NO: 6311 - DNA, 206 bp, Glycine max
  unsure (1)..(206): unsure at all n locations; Clone ID: 701145643H1
ggaagtgagggctgggaaacaaaacatgtctagggcattgtttcatttgttgggtgttttgtggctgtgttggtgcttgacatcaattggagaagctcaaatagagtacctaagatacaaagatccaaagcaatcggttcaaactcgggttagggacttgntgagtcgaatgactttagacgagaagattggtcaatggtccaatt

SEQ ID NO: 6312 - DNA, 277 bp, Glycine max
  unsure (1)..(277): unsure at all n locations; Clone ID: 701145644H1
gatatacatatacatcaaaacacgcagaagaagaagaaccttacaaagggcttttgaattttcgtgttttgatcagaatcagaggaaaaaatcacataatttcgaattcaaaatttgaattttcgtgtataaaacgaagagaagagaatggaatcggaggatttggtgaagcaggaattggcggaattgcagaaacaattggggaagaagctaanntnncaagcctctatttcgtctctaaaatctcttctccaacgcacttanccancangttncc

SEQ ID NO: 6313 - DNA, 260 bp, Glycine max
  Clone ID: 701145645H1
ggaaaaagggagtgcctgataacccataaccgaccgcaccaccgttttcctttgctttgcgttctacaatgtcgaaaacctcagagattattacatgcaaagctgctatttgctggggaataggaaaacctgtgactgtggaagagatacaagtagaccctcccaaagccaccgaagttcgagttaagatgctttgtgccagtatatgctccacaggcatctctagcacaaaaggattcccacataccaattttcctatt

SEQ ID NO: 6314 - DNA, 281 bp, Glycine max
  unsure (1)..(281): unsure at all n locations; Clone ID: 701145646H1
aaaganacccggaaagggtgggaaccgcttttggaaatccattgggcttggatttaagactcccagggaagccatcgaaggaacctacattgacaagaagtgccccttcactggcaatgtttccatccgtggccgtatcttggctggaacatgtcacagtgctaagatgaacaggactattattgttaggaggaattatctccattttatcaagangtaccagaggtacgagaaaaggcactccaacattcctgctcatatatcacctgctttccgtgtga

SEQ ID NO: 6315 - DNA, 288 bp, Glycine max
  Clone ID: 701145647H1
ggggaggggagaagagaaagaaggaaggagacatttataaaaagctctttcccttcccctaaatccctcacactcattccatttttacctttctctctcgctcgcaaacgcaaataataaaaaacaaggttttagccatggcatcgaagcggatcttgaaggaactcaaggatctccaaaaggatcctcctacctcatgcagcgccggtcctgttgctgaagacatgtttcactgggcaagcaacaattatgggtcctccagacagtccttatgctggaggtgttttc

SEQ ID NO: 6316 - DNA, 240 bp, Glycine max
  unsure (1)..(240): unsure at all n locations; Clone ID: 701145649H1
atggttcagcgcactagtctaagatcaagtccaagattttctactaagtgtgcttagatgtcatgagacatgtaaagcatgaaggatatgcacaaagtggtctcacctccccattaggatggtccaaaatgtaattggattgaacttctcccaattcaattaaatttctctcccaacacacacattgcacttaatgcaagtaaaattataaaattacccctaatataaaaactaatcnag

SEQ ID NO: 6317 - DNA, 172 bp, Glycine max
  Clone ID: 701145650H1
cagaaattgtttctcactcttcataatgatggtaaactagccagcttcaaggattcgtcaggtaaagtatatgattttgtaagctattctgctcaggagccagacgaaacagtttttgtttcctctacagaaccaaaaataggaaagatttcaaggcgagtttccactgtcc

SEQ ID NO: 6318 - DNA, 270 bp, Glycine max
  Clone ID: 701145651H1
gaagtctcatctaatctataccccgtctaaatctccgagtggttgacaccgatcgaagtagcagcacacagaaaatgggcactcgagaggtgtacgaagagaaactaaggaccggaaatctccaccacgatcccaccatcaaccctggcctcggttccgctcgatgccctcgctgtctctctctcctcaaccctaatttcgaaagaggcgagtggaccatcactcccgtcttgcacgacgccactgccgtcgctgggtcggggattggtg

SEQ ID NO: 6319 - DNA, 269 bp, Glycine max
  Clone ID: 701145653H1
ggaggaagagagaaaagaaaaccggtgctgttgaggcagagattcaagagaatggaaggtgtgagccctgagcccttgagatcagaattggattccaaatccaaacaagacacagcgaaagaagaagatgacgacacattcaaagaaagcactgacgccgaggtcactaaaattcgtctcatgagagcctttgttgaaagccgagatccctcttccaaggaagtagatgatttgatgattagaagattcttgcgggctcgtagtttaga

SEQ ID NO: 6320 - DNA, 159 bp, Glycine max
  Clone ID: 701145654H1
gggagagagagatgggaaggtccccttgctgtgagaaagcacacacaaacaaaggtgcatggaccaaagaagaagatcatcgcctcatttcttacattagagctcacggtgaaggctgctggcgctctctccccaaagccgccggccttctccgttgcg

SEQ ID NO: 6321 - DNA, 264 bp, Glycine max
  Clone ID: 701145655H1
ggaaaaggatctaattagacaatgactttatcttggactgtagatgagtgaacagcataaaagcacaacttgactgacatacgcaaccaaactaaagataaacaaaatttagaaacaaaaacatgttggtgaaggtgtacggtccaacctatggagcccccaagagggtgctggtgtgtctgattgagaaggaaattgagtttgaaacagtacatattgatctcttcaagggagagaataaggaacctgagttcctaaagctgc

SEQ ID NO: 6322 - DNA, 264 bp, Glycine max
  Clone ID: 701145657H1
atcttgctaacgctttttttcaagtcgcatgttaataaattaaaaaaatgtatttgtttttacatttaataatttattgttttcttaacttgatccctaaatatactgttattaaaattcccgttttaaataaaagttcataacctatttttttaatattgaattgataacctatttcagtagcatgcgtgtagtaaattaataagtaacaaatacccgcactaattaatttatgtactatgtcagttttaataatggtcatga

SEQ ID NO: 6323 - DNA, 193 bp, Glycine max
  Clone ID: 701145660H1
ggagagagtttgggttgtgggctgctccagcctctgtctgtggttggtcttatcttttgctgaaacttgaaattgaatctctctcaagcttcctttcttaaaaggttaggaatttgaagcagaagtaagaactaggaagagatgggagtggatttgagacaagtggtggcaggtgtctcaccctcacaatgtt

SEQ ID NO: 6324 - DNA, 278 bp, Glycine max
  Clone ID: 701145661H1
ggaacgctgtccgtgaaaaccctaagcaaacccgtggcgagcagactgaagcagcaggccgctcttcaccccagattccgcgaactcatcgttagaatggctcagtctaatcatcaaatcacggctaagatgcaaaggcgcatttacggccacgccacagacgttgagattcgccccttgaacgaggaaaaggccgttcaagccgccgttgaccttatcggagaactcttcgtcttctcggttgcaggagttctcttgatctttgaggtacaaagaag

SEQ ID NO: 6325 - DNA, 285 bp, Glycine max
  Clone ID: 701145662H1
tatgctacgaaacattcctggaattggagagtacacttctggagccattgcttctattgcattcaaagaggtgggcagtttctgtgttttggttccggaaaagtaactattggcttttgctcatgcattaaattatcaggttgtacctgttgttgacggaaatgtggtaagggtgattgctagactgagggctatttctgcaaatccaaaagactcagccactattaagaaattttgattaaggaaattagcagctcagttggttgatcctgttcgtcctgggga

SEQ ID NO: 6326 - DNA, 167 bp, Glycine max
  Clone ID: 701145663H1
gaaaaagggagatcggagagacagagagatcagtagtatcagagatggggagagggcaagttctgagcgcgtaccgcgcgcttctgaaagcgacacggaaaacattttccggcgacaccatgatgctgaaggaatctgcggtggaagtaaggaagaagttcgaggaa

SEQ ID NO: 6327 - DNA, 212 bp, Glycine max
  unsure (1)..(212): unsure at all n locations; Clone ID: 701145665H1
aggccacggcgggaagttcacgtggatcggccacggctacgagcaagttgagatgccgcacggtgctatggacgccaaggacccgaacttcgaggatcctgtggagatcgccaccgtgtgatcgcggtggtttccggtggccaggtctgtaaatagtagtaattggcgaaacgtgttttttcgtgttnaataatgtgaagntaatcggagaa

SEQ ID NO: 6328 - DNA, 101 bp, Glycine max
  unsure (1)..(101): unsure at all n locations; Clone ID: 701145666H1
ggatgcacaagtttantgagatagctagaagcaataagatgaaaatgaaagtgcttgttttgtttgttgctacagttttggtagcatatgaatgccatggc

SEQ ID NO: 6329 - DNA, 274 bp, Glycine max
  unsure (1)..(274): unsure at all n locations; Clone ID: 701145667H1
ganagaagggtggtcccctggtggtatctttgaaacctctttgcttgcggaggcaggagtgcgtctgagagagcgcttcgtgaaagaatcgtgtggcgcggtgaaaggtttcccgttggggtttccggccccctggtcttcacctaattgtggaagaggggaggtgcattgagtataaactctctctcgcgcctttagcttgttcctgttcgtctattcgggacggggcaggcagcccacatacatgaagagaagaagagaggagagggggtcc

SEQ ID NO: 6330 - DNA, 261 bp, Glycine max
  Clone ID: 701145669H1
gaatctttttgtaagaacgtgaaacatgacaccctaactcgcgttgcttgcttgagtgatttgactcgtgtcgagtgtattgtatttagtttaagcgtggctgatcgagtgagtatcagaatcaattcaattttgagctagtcatgaagatccactgcgacgtgtgtaacaagcaccaggcctctttcttctgcaccgccgacgaagctgccctatgcgacggctgcgaccaccgcgtccaccacgccaacaagctcgcct

SEQ ID NO: 6331 - DNA, 198 bp, Glycine max
  unsure (1)..(198): unsure at all n locations; Clone ID: 701145670H1
ggagttgagcgatctcttctcttttcttgtcttgtcttttgcaatggctaatgcaattataatgccgggttttctgcttcgacccactacccagacgacgccgtttcggttgcccaatcacactcactccttccattcccctcgctgctccctttccctcacaccccaatcggctaangctttgcagttccaggagga

SEQ ID NO: 6332 - DNA, 262 bp, Glycine max
  unsure (1)..(262): unsure at all n locations; Clone ID: 701145671H1
gaattcaatacggatttgttgtgcgcgctagatatttggagtttggacgcagaaattttcttaaattattgtagggaatgaaattgaaagggaaaaaaaaaatcaaaattatcttgagcggtaacacagagcagagcacggaaaggaaaaacctcggtaganttgagggtttagcggcagcatagagaatagagatagancgaattgaaactctctaatggcactctacacccatctcatctcttacncttcttcttctttc

SEQ ID NO: 6333 - DNA, 118 bp, Glycine max
  unsure (1)..(118): unsure at all n locations; Clone ID: 701145672H1
gggttgtgttttgtgttttgtcatttgcgagacacaaacatcgtcgtcgtctccgccgtatgccctancttgggttgctccaatggaggatacccaagaaattgaggagcaaggncat

SEQ ID NO: 6334 - DNA, 70 bp, Glycine max
  unsure (1)..(70): unsure at all n locations; Clone ID: 701145673H1
catgaacaaaataanatcgnatacatancagtgagaaatttatccttttaaacacgttcattccaantct

SEQ ID NO: 6335 - DNA, 275 bp, Glycine max
  unsure (1)..(275): unsure at all n locations; Clone ID: 701145674H1
gtatcaccccatcgtgggttgctttcgccgacagtgagagactcattggggangctgccaagaatcaggcagctgtcaacccagaaaggaccatctttgatgtcaagagacttatcggaaganagttcgaagataaggaggttcaaaaagacatgaagcttgttccttataagattgtcaacaaggatggaaaaccttacattcaggtgaaaattaaggatggtgagaccaaggtgttcagccctgaggaatcagtgccaggttctgatcaagat

SEQ ID NO: 6336 - DNA, 160 bp, Glycine max
  Clone ID: 701145675H1
gaccaagtgaaaaagcaattaactaagcatatatagcgtgtaagacagtgagaaaaaaagtgttgtgtagagagaaatggctaggtggtgcatcttggtggttcttgcccttgtcgtggttgcaagtgccagaaacatgcccaatgacgcaggtttggag

SEQ ID NO: 6337 - DNA, 277 bp, Glycine max
  unsure (1)..(277): unsure at all n locations; Clone ID: 701145677H1
gatacctatatatttatgcncacaattattacttacactttcctcaggtaaacaaatcaataaaaaatatcaattaanaattattataagtaaatttagaattcattcttaaatcatttaaatataaaccataacattaaaagcaacaaagcataaccttcggtcattcaaacacatgtcataactaaacaacgttataaacgtaaccatctaacattaaataataaaaactacatattcacttacttataccaattnaggaggaattttcaataaa

SEQ ID NO: 6338 - DNA, 176 bp, Glycine max
  unsure (1)..(176): unsure at all n locations; Clone ID: 701145678H1
ggatctgaactgaagcacactccgttatgtacgaggcatcataatagcattgaagcaacggcggcggaaaccaccgttcgacgccgganacacgagctgtttctacctctgatttcttctcttcagtgtaggtatgggaatcagtaaaacagaagtaaacttnaggaggttgcttg

SEQ ID NO: 6339 - DNA, 155 bp, Glycine max
  unsure (1)..(155): unsure at all n locations; Clone ID: 701145679H1
gaaaccaaactcttganaaaacgctgattagtgatncttcctctgaatgattcaaaatgaagaaccgttgttatggttagttgtgtgacctaacatggagaacgaggaagccaaagancacaaacggatctgccaagggaatagatgataatgtt

SEQ ID NO: 6340 - DNA, 246 bp, Glycine max
  unsure (1)..(246): unsure at all n locations; Clone ID: 701145681H1
ggttcttagcccgggcatttctccaacttgggaganaacatcctttctcttaggaagtaaaagttnttaatanaaagaaaaaataattantatgaaatttaanagttaaaacaatcaaaagcagcaatatacttnctaacaggagtggattgnggagaagtgagcctgtggagtgttttcttctgatttcatctggatctgcgagagatgacggtctttcattcttcaattgcgcgattctcacct

SEQ ID NO: 6341 - DNA, 75 bp, Glycine max
  unsure (1)..(75): unsure at all n locations; Clone ID: 701145682H1
attgaactggggttcaaagcangccgttnttcnctgtctctcccatcctttcncantctcaataccctttnnatt

SEQ ID NO: 6342 - DNA, 263 bp, Glycine max
  unsure (1)..(263): unsure at all n locations; Clone ID: 701145683H1
gnggngcggcnggatcagnanaagattgcaaaatgaagttcaacattgcaaatnccaccactgggtgccagaagaagctggaaatcgatgacgacctgaagcttcgagcattttgggacaagaggatctcccaggaggttcttggtgatgctctgggtgaggagtttaaaggatatgttttcaaaatcaccggtgggtgtgacaaacaaggattccctatgaagcagggagtgctgacccctggtcgtgttcgacttttgctc

SEQ ID NO: 6343 - DNA, 158 bp, Glycine max
  Clone ID: 701145684H1
ggcatcttcaaaactaaatttcttctctttttttttcctttttgttttccctctttttccttggagttttctcagcaaggatatctgactctctgttgattgcttggactatgcgtgattctttgcattctcccaagcttgcagtggctttgctttgg

SEQ ID NO: 6344 - DNA, 261 bp, Glycine max
  unsure (1)..(261): unsure at all n locations; Clone ID: 701145685H1
gagagtcgaaaganaatagcaaaaagcacagaacaatccgaaaatngcggaacgcgaaacctccgaatccgaggacccctcgagttcaggttcagagtacgaggatgcacaaacggtagagggcaatggtgtgaagaagaagaagggtttgtcggagtacgagaaacagaggatgtcgagaattgccgagaacagagccaggttggaggctctgggtttgccccaaatcgcttcctcgttaaagggttcttcgcagcctca

SEQ ID NO: 6345 - DNA, 120 bp, Glycine max
  unsure (1)..(120): unsure at all n locations; Clone ID: 701145688H1
gagagtggtggggngtgcagaagagcgtcgcagttgtaaccctaatcagaagaagcgcanttcaagcgagtgacagccaccagccatgggtcgtatgcacagccgcggtaagggtatatc

SEQ ID NO: 6346 - DNA, 278 bp, Glycine max
  unsure (1)..(278): unsure at all n locations; Clone ID: 701145689H1
gtgattccccttaggtgcgctcaggcaatgtgtgagtggagtgcttgtcaccctggggacgtctgacacaagcttccagctgatcatggtcagcctttagctttctcaactcctattcatgtcgtcgctctatctccgtgatgcgattttggagttgttaaagagtatttgtgtctgcatagttgtcggatgaggatggaagcttttgaaagaggtctcacttttgaggctagaccgagtgctaaccatggatgancagagagantnacaaagaanct

SEQ ID NO: 6347 - DNA, 226 bp, Glycine max
  unsure (1)..(226): unsure at all n locations; Clone ID: 701145690H1
gtgttctgagctgctagaagcaatggagaggaaaagaagccatgcttctttcaccatgtttgcaatgcttgttggattgctctctcagagccttgtcattcctgtaatatccaccactgttgcagatcagaagaactactacacccnagatccacatgctggaagtccccccacaggtttctccgactctctgtgctcacacantngnngtcctcnatctcgnggc

SEQ ID NO: 6348 - DNA, 188 bp, Glycine max
  unsure (1)..(188): unsure at all n locations; Clone ID: 701145691H1
ggcacaagtgagtttgttgatcgagataactagaaacagtgtgatgaaaatgaaggtccttgttttcttcgttgctacaattttggtagcatggcaatgccatgcgtacgatatgttccctctccgaatgaacactggctatggtgcccgtactccggaggtgaaatgcgcaanttggaggnttntgt

SEQ ID NO: 6349 - DNA, 265 bp, Glycine max
  unsure (1)..(265): unsure at all n locations; Clone ID: 701145692H1
atcagtggtgccccccaggataacaacataatgctgtggaatgctgtcatatttggtcctgatgatactccatgggatggaggcacgtccaagttgacactccaatttactgaggactatccaaataaaccaccgactgtacgatttgtgtctcgcatgtttcatccaaatatttatgctgatggaagtattgtttggatatattacaaaatcagtggagtcctatttatgagtggctgctatgctcananctancnagtcatgg

SEQ ID NO: 6350 - DNA, 281 bp, Glycine max
  Clone ID: 701145693H1
gacggcactcgttttcgttctcgttctggtttatagatctttgcgaaggaggtttacagcgctcaaccaaagatgcagaacgaggaaggacagatcactgagctttacattcctaggaagtgctccgccacaaacagattgattaccgctaaggaccatgcttcggttcagatcaacattgggcatgtggatgagaatggcgtctacaatggccatttctccacttttgccctctgcggattcatccgtgctcagggtggtgctgacagtgctctagaccg

SEQ ID NO: 6351 - DNA, 256 bp, Glycine max
  unsure (1)..(256): unsure at all n locations; Clone ID: 701145694H1
gggttagtagcatgatggtactagtggccaaaagcaagaagcagactcaggattctgaatccactcctccaataatcacatccaacgtcaaacaaaacctccgcttcctaaagctatggaaggtaatactaatanttatcatacttactcatccttatgctatttcaaatcaaacagagcttccagaattgaaattctagcaccgcaagaagaaggtcgagaagganataacttaattaaatcctttgggtcagtt

SEQ ID NO: 6352 - DNA, 280 bp, Glycine max
  unsure (1)..(280): unsure at all n locations; Clone ID: 701145695H1
ggcgataaaacggagaaaagaaaaaagaaaaatgtaagtggaagaagagaaagtggcatcgcttaggtacagatacagacacaacctggtaaaaatcccgaccccagtgccgcacaattttccttcactcgcagcggaggtttacttttgatctagtacctgctatccctatgtataagcatggacttctagcatactattgtttgattaaccaagttcttccatattggttgaggaagcctcgagtnaatatttagtttttgctgccatcggtgggttt

SEQ ID NO: 6353 - DNA, 240 bp, Glycine max
  unsure (1)..(240): unsure at all n locations; Clone ID: 701145696H1
gagatctctgtaataaaacatgtttgtgtttatttcaataacatttagtattgtgtcgtataccattcaacacttcanctctctccccacaacctaaagaccccttttttatggntttatcgagatgtaaaatgttaatccgatttcttctataacgattttcaacattatggatcgtttcttacccatgagcgacttaatatttcgtgcagtaatggggaaacggtaatgagngtgntt

SEQ ID NO: 6354 - DNA, 226 bp, Glycine max
  unsure (1)..(226): unsure at all n locations; Clone ID: 701145701H1
cctacaaaaattttccagccttctttgtctggtgcctttgattttttaaaggtaacaacttttttttctttctttggtttaatactccccctttttctttgtccatgtcataagtcttatagccgaccttcttattattctgattttttttaaaaataacagtatggcaaaataagggatcatcaaatcctcctagcaccaatccnggatggaaatattgtactcg

SEQ ID NO: 6355 - DNA, 226 bp, Glycine max
  unsure (1)..(226): unsure at all n locations; Clone ID: 701145702H1
cttatgtcttgattatgtacaaaccttttgagtatattaaaatctataattagtaaatattaccaaatattgttcaaatattnattctcaaaactagctagtcaccgcaataagagatttctattctctataattactagtgaaactacgtgaatttcattccttcaatttctttaattacattcaaatnncattaatttcagcggttggattaattngcttattc

SEQ ID NO: 6356 - DNA, 227 bp, Glycine max
  Clone ID: 701145703H1
ggcagcgcttgatttgaggccaggcaagccccacttcaaccaccacacctctcctcgttcacgctacccctttctgctcttcttctacctttcaagttttaaaagtataaagatggcagagacattcctatttacctcagagtcggtgaacgagggacaccctgacaagctctgcgaccaaatctccgatgctgtcctcgacgcttgcctcgagcaggacccagaca

SEQ ID NO: 6357 - DNA, 221 bp, Glycine max
  Clone ID: 701145704H1
ggatggccaatggccaatactcgttttgtcgcatgcccagcgatgggttggcggcatgcaagccgagtgtgagtggggactatcctgctgatccctccactgcttgttgctcagccattgccaaggctgatcttaaatgcttctgccgcttcaaggattcgggccttctctctatgtatggtgttgatcccaacaagtgcatggaactccctgttaagtgc

SEQ ID NO: 6358 - DNA, 223 bp, Glycine max
  Clone ID: 701145705H1
ggcagcagttgagaggaggcactgtggcagaagtcctaggagtgtaaaacagagacgcaaaatgaagacgatcttgtcgtctgagaccatgaatattcccgacggcgtgagcatcaaggttcacgctaaggttatcgaggttgagggccctcgtggaaaactcgtgcgagacttccaccatctgaacttggacttccaacttattaccgacgatggcggtaaa

SEQ ID NO: 6359 - DNA, 226 bp, Glycine max
  Clone ID: 701145706H1
atgatggtttgaggggtgctaattattaatgttgagcacacaagatccactacttcaactcgaagagaaagagtgacacacacaattttaattatcaccagaaacagctcatgatctcaggctgatgataatgtccctccataatatatgtatgttttttttaactagcttgaaattttttaccgactaagtttattaaataccctttcaggacacccattaggcc

SEQ ID NO: 6360 - DNA, 230 bp, Glycine max
  unsure (1)..(230): unsure at all n locations; Clone ID: 701145707H1
cattgttttaattttttccgaagacatcacatcattgcgagcaaagcaaaataagaaaataagagcaaaaatttatcatggatgtaaagcctttaagtcattctttatagctgtttgaaataatgaatgagccttggatgatacttagatgagagaattttgtctcatctttcntatctgatgctataaacatatgcggtataggtatcactactatcctggggcctaaa

SEQ ID NO: 6361 - DNA, 225 bp, Glycine max
  unsure (1)..(225): unsure at all n locations; Clone ID: 701145708H1
ggtggactttgcatacagtttctttgagaaacaggttcctattgatgcagtgttccagaaggatgagatgattgacatcattggtgtgaccaagggtaaaggttatgagggtgttgtcactcgttggggtgttacccgccttccccgtaagactcacagaggtttgaggaaggttgcttgtattggtncntggcacctgnaaggtttccatcnattttgnnnggg

SEQ ID NO: 6362 - DNA, 203 bp, Glycine max
  unsure (1)..(203): unsure at all n locations; Clone ID: 701145710H1
gacggttgggttgnngagaaaatgcgtccctgntgaaaacaccaaaccctanaacgcgaaaagggttctaagaatttgcgaaggaaagagctagcggagatggagattcactacagtaacagctatttcgagagnngccccatcctcaagtccaaggctgcccgctgtcaatgggtcaaanattgggtnccnaaattttttgt

SEQ ID NO: 6363 - DNA, 227 bp, Glycine max
  unsure (1)..(227): unsure at all n locations; Clone ID: 701145711H1
ggcggaccacctgttaagaagcaaagtgctggagagttgcgtcttcacaaagatataagtgagctgaatctaccaaaatcatgtaccatgcaattccccaatggcaaagatgatctgatgaactttgaagtttcaattcgacctgatgatggatattacttaggtggcacatttttgttttccttcaagtgtctcccatctatccacacgangcaccaagggtttag

SEQ ID NO: 6364 - DNA, 224 bp, Glycine max
  unsure (1)..(224): unsure at all n locations; Clone ID: 701145712H1
gagagtggtggagtgtgcaaaagagcgtcgtagtcgcaaccctaatcagaagaagcgcanttcaagcgagtgacagccaccagccatgggtcgcatgcacagccgcggtaagggtatatcctcttctgctttgccctacaaaaggacacctcctagctggctcaagatctcttcgcaagatgtcgaagaaantatctgcattttgcgaanaagggtncnccccc

SEQ ID NO: 6365 - DNA, 215 bp, Glycine max
  unsure (1)..(215): unsure at all n locations; Clone ID: 701145713H1
ggcggtggtttgtggtgaaaatttgcataataatcttttgcagaaagcaagcaagaaagaaaaagggccatggaggccctgcacttgcaccgcgtgcttctcatgcctgtttcccaaaaaacctcaatctttttgcgcgcnagtggcaccccattatccacacttgcanggcnccattgngttggnatccccaantttncagtgccagagcaggg

SEQ ID NO: 6366 - DNA, 222 bp, Glycine max
  unsure (1)..(222): unsure at all n locations; Clone ID: 701145714H1
gatgcatataagcaaatagctgtagctggaggcaccaacattcgtttttcgatacttgcttatttaggagttgagtttcccttggaattagacccgtggaaactattacagaagcatattttgattgattacattagtcatgagggacatgagntgacattgcgtgtcctctacagattatttggtgaggctgaagaggagcctgacttcttttcttccaca

SEQ ID NO: 6367 - DNA, 221 bp, Glycine max
  unsure (1)..(221): unsure at all n locations; Clone ID: 701145715H1
aatgcaggtggtgaatgtttgagcaactgggcattgtcccaaccggcctcactgcagtgtagtaagcttttagtttgtttttgttattattatatgcttaataatttgcaatgatgggactcaatgattaattaattaacaaacganttttgttggagtctttttatttaacatttttttgttgcctgttttcttcattagcacggggatgtggaagagac

SEQ ID NO: 6368 - DNA, 228 bp, Glycine max
  unsure (1)..(228): unsure at all n locations; Clone ID: 701145716H1
ggagacagcgtagggtaactgaaagagacgaaggaaatgaagaagtcttcgggaagcgcantgancaaaaaganggtgcgacgctcatccgcaccagatcccacctccgacgctcctcctaggaaacaagttgtcaagaaagatgtgttcnaggtttttnctganaaggttagagntcatagggattggtttcaanggngggtttttcaaagggaaccnntttttant

SEQ ID NO: 6369 - DNA, 212 bp, Glycine max
  Clone ID: 701145717H1
ggaactgaactgaaccggatccagagagtgctcctaaacgacgccgtttcgcaagcatcagtagtgtagtcgcagagaatcaaatcaatggagaagggaaagggagtgatgggatcgggaggacgaagatggggcgttgacttctccgacaattccacttctcgcgatattcccgatcctcccggtttctgtcgcacttctctcgatcagga

SEQ ID NO: 6370 - DNA, 216 bp, Glycine max
  unsure (1)..(216): unsure at all n locations; Clone ID: 701145719H1
ggcctacgacnagagaaattgagttanctgagataaccacttttctactttgattcatcaatggcaaccgcgaggaccgtgaaggatgtttcgcctcacgatttcgtgaaggcttacgcctcccatctcaagcgttccggcaagatggagcttcctgagtggactgatattgtaaaaacagcaaaatttaaggaattggctccatatgatcctgac

SEQ ID NO: 6371 - DNA, 219 bp, Glycine max
  Clone ID: 701145720H1
gggttttgttttagatgtgttgttgatgaagtttctaaaggaacatccaattcagtagagaggacaaccgtggaatgtaatgcagataatcataatagtaatagtgactgtcatgctgaggattccttttcaggaaaagtttctgtgtctgttgctgatacaggagagacggctgttgttgtttcgatggttgaccaaacaaaatgggttccatcaaca

SEQ ID NO: 6372 - DNA, 200 bp, Glycine max
  unsure (1)..(200): unsure at all n locations; Clone ID: 701145721H1
gggagtagggtttttttgcgtttgagagaagcatgagcaggagtttgggaattccggtgaagctgctccacgaggcttcggggcacgtggtgacggtggagctcantagcggagaactctacagaggcagcatgatcgagtgcgaggacanctggaactgccaactcgggagcatccctncantgccaagggtggcnnaa

SEQ ID NO: 6373 - DNA, 181 bp, Glycine max
  unsure (1)..(181): unsure at all n locations; Clone ID: 701145722H1
ctgattttgatctgccacctcctctttcttcttcttccttcaatttcaaccttcgctcgttgtagataactgttcaccaaaagaagaaaaaaatagttacaacattattagcaccaaaatttgaaaacgatgaagatgcaaatgcgcgtgcccagggtccngtngtacctgncnaaccatc

SEQ ID NO: 6374 - DNA, 229 bp, Glycine max
  unsure (1)..(229): unsure at all n locations; Clone ID: 701145723H1
cttgactcacttggcaggccaagcaatgctgagtaacttgttgcccccatcatttatttgtgggtgctgtgatgaaaatagaaactgagatgatatcatagcctaattatgcttccatagaaatggaagactacgaaatgaagaagcaaacaatcaatggagataataagtgggaagnatgacaaagggctagtnnttggaaattgaagnggntgccnnccncgtgagg

SEQ ID NO: 6375 - DNA, 77 bp, Glycine max
  unsure (1)..(77): unsure at all n locations; Clone ID: 701145724H1
gaatgaatcacacggtgagaaatcaacggctctgattactcgggacttgccttggggggtccncctnaattgaancc

SEQ ID NO: 6376 - DNA, 221 bp, Glycine max
  unsure (1)..(221): unsure at all n locations; Clone ID: 701145725H1
ggaaaaaagaaaggcagcgatggaagaagacttcgacatccccggcggcgaggaaatggatctcggcgaagacaaggtcggcgaggagcgggagatcggcccccgcggcctcaagaagaagctcctcaaagaaggtcaaggctgggaaacccccgangtcggcgacganntccannttcnttacacggggatttgctcganggaactantttttttcgnnc

SEQ ID NO: 6377 - DNA, 186 bp, Glycine max
  unsure (1)..(186): unsure at all n locations; Clone ID: 701145726H1
gcacaaaaatactntacaaaacaaaacagagcaaagagagagtgtgtgaaaagtgaaacaaaaaacagaacaacaatggcgacacttaaggttcctcagcctcttccccccgttgcagatgatgtgagcagctccgnnaagccttctcaggttgggganctaacgnggagcntntnttncgtcctg

SEQ ID NO: 6378 - DNA, 219 bp, Glycine max
  unsure (1)..(219): unsure at all n locations; Clone ID: 701145727H1
attagagatggacccaatcttgtgaagaacatggaccgtttggaggcctacaataaaggattaaccacttgggctaattgggttgaccagaatgttgatccctccaaaactaaagtcttctttcaaggcatttctcctacacactatcagggcaaggattggaatcaaccaaaaagaagctgtagtggagagcttcaaccattgtcnggatcaactanc

SEQ ID NO: 6379 - DNA, 222 bp, Glycine max
  unsure (1)..(222): unsure at all n locations; Clone ID: 701145728H1
ggaggaaaaccagtgggtggcagtgtggggagagtgttatactcttctccagtgcacctttgggaaagctctacagtggtcgcaagctttgaaaccgacttcaccttttccatctcatcagactctactactccaggtgatggccttgccttcttnattgcaccatttgacactaaaatccctcnaaactctggngggagcaaccttggnctctcncncaaa

SEQ ID NO: 6380 - DNA, 220 bp, Glycine max
  unsure (1)..(220): unsure at all n locations; Clone ID: 701145729H1
gattgagaatagtagagatggcatcgaggattctgttgcaaatccattaccacaacagaaatcaaaatgttctgaatctgggaaggttgatgagatgaaaacatctgatgttgtcagggttgatccaggactgaagtccaaaatcgcagattttccttcttccttagtgatggagcaagataaagctgctgcatcatatgatagcccatggctgctgnaa

SEQ ID NO: 6381 - DNA, 229 bp, Glycine max
  unsure (1)..(229): unsure at all n locations; Clone ID: 701145730H1
caattgtatgactgcaaattggtcactggaaaactaagagcaatgctacagacagctgatgatcaagttaggagtttgaagaaacagagcacattcctcagtcagttggctgccaagaccataccaaatggaattcattgtttatctatgcgccttaccatagattactatctccttcctcctgaaaagagaaagttccctgggagtgagaatttggngcataacagtc

SEQ ID NO: 6382 - DNA, 222 bp, Glycine max
  unsure (1)..(222): unsure at all n locations; Clone ID: 701145731H1
gggtggacacaggtctaagttttctgaatttgtttaaagcggcggtgccgccgtgccggctctcactgtgaactgcacgtatctcttctctctcaggcctgcaccttcgtctccgccaacagttgttcaccaccacgcaaccaaagatggcagattcgatttgcagaacactgagggatggacgttggagggaaanntggccctattccnaaaataagggcc

SEQ ID NO: 6383 - DNA, 201 bp, Glycine max
  unsure (1)..(201): unsure at all n locations; Clone ID: 701145733H1
gtagggaccaactactaagctttcttgtgttaagaagccgtttgggtcattgttaagtgactcgactcttgtcttttctaataagattcgaacaaaacagaaatgtagtagtcgtgtgtcttgtaatttctttggctagttgggtgtgttttgtgattgttagcttganaaaatancaaaaaaaatgtattttaagttggg

SEQ ID NO: 6384 - DNA, 227 bp, Glycine max
  Clone ID: 701145734H1
gctagacggttggttttcttctgggtattgtggtcaacggtcaatgtcatcgccgtgaagaggccgcggaggaggcacacggttgttcaagcattaaaagtaagaccattcaaattggctgttatacgcgatagttgctctatgatctagactagaggcttagttagggttttctgttaccgccatggatttcgagagtaggaggcttcatttgctcatctccgtgg

SEQ ID NO: 6385 - DNA, 220 bp, Glycine max
  unsure (1)..(220): unsure at all n locations; Clone ID: 701145735H1
gaggtttttagggtttacaccgaggagacacacctttcagcagcagcagccatggttctcaaaaccgaactatgccgattcagcggtgccaagatctacccagggaaaggcatcagatttgttcgtggtgattctcaggttttcctgtttgcnnactcgaaatgtaagaggtatttccacaacaggttgaagccatcaaagctcacctggactgcaatgt

SEQ ID NO: 6386 - DNA, 221 bp, Glycine max
  unsure (1)..(221): unsure at all n locations; Clone ID: 701145736H1
gaacgaaacaacgattgagtaatcctcacttgatgatactactagtcctgagatgataacatcaaacttcgcaataacaacgaaacttccttataattnnnnnnnnnnnnnnnnnnnnnnnnnnnnnnnnnnctcttctattctcttcttgtctttacatcanaccctctttccnctttgcaaagctccggatcttttccctctccaatncccggntttcc

SEQ ID NO: 6387 - DNA, 197 bp, Glycine max
  unsure (1)..(197): unsure at all n locations; Clone ID: 701145738H1
tgcaacttcctctgttttgctcccctgtttaagccttatcataagcttagaatggcacacaaggaattttccattgccctagtgactctcattgttctctttgtcaacacgaacctccaaggtgccacggctgactatggtggtggttggcagagtgctcatgccatttctatggtggggtnanccntcncggcaca

SEQ ID NO: 6388 - DNA, 216 bp, Glycine max
  unsure (1)..(216): unsure at all n locations; Clone ID: 701145739H1
ggaggtcgttggcgagaatgggaagaaagaaggggtatgttgagttcgaggagtcgccgccggacgattttgatccggcgaatccgtacaaggacccggtggcgatgctggagatgagggagcacatcgtgagagagaagtggatccaatcgagaaggccaagatcattagggagaagctccctggtgctaccgnntcaaggcgtcaaccctcnaa

SEQ ID NO: 6389 - DNA, 228 bp, Glycine max
  unsure (1)..(228): unsure at all n locations; Clone ID: 701145740H1
gaggtttgaggaaggttgcttgtattggtgcctggcatcctgcaagagtttcattcactgttgccagggctggtcagaatggataccaccaccgaactgagttgaacaagaaggtttacaagcttggcaaagctggagatgaatctcactctgctcttactgagtttgataggaccgagaaagacttaccccantgggnggttncccncactanggcgtnntnaggga

SEQ ID NO: 6390 - DNA, 202 bp, Glycine max
  unsure (1)..(202): unsure at all n locations; Clone ID: 701145741H1
gatagttgaatttanaacttgtctgttcttatcantcatcctacgccaatagcccaaaaccttgttctctttttgtggttcatttctctcttccagatgcnacttgccgttcttnaccctcacgattttctcaggaaaaacccatctaacnagtaccagaccntatccctnantttcccaaantgatcccnannaggtcccg

SEQ ID NO: 6391 - DNA, 228 bp, Glycine max
  unsure (1)..(228): unsure at all n locations; Clone ID: 701145742H1
atcatgcataacaatgtatttatatctaatacctacctcaattttatttggctctctccaacttctcatatttgcttctatccctttccattaaaaatgtttgacaagtaaaaataaaaaaaagcnggtattgtttgttgtaatccatgattgccatttcataatccttcagacatngaatcctcctctttttccttcnnagtnnnctctncgagttgaaganggctg

SEQ ID NO: 6392 - DNA, 218 bp, Glycine max
  Clone ID: 701145743H1
gtggcatgagtcaaaataatgcatttgaagagttgaggaaggctgagaccatgattactgcagaacaaccaagccctgtgtctgttcttgatgctgcattctataaggatgacccaccatctccagtgaaaaataaatcagacatctcaaaaaatttaggtgaagctctaagcactgatgaggatagtgaagagagctcagtggatcttcttcaagaa

SEQ ID NO: 6393 - DNA, 211 bp, Glycine max
  unsure (1)..(211): unsure at all n locations; Clone ID: 701145744H1
gacggaaaagatattgtaaaaagagcatctgcaaaagataaggagacactcactgccattcctactcttacaaaccttcttcagaacttcaactcttcgatctcctccactttgcgcatcgtannnnnnnnnnnnnnnnnnnnnnnnnnnnnnnnnnnaactcaacatcaaaacaatatcaattctaataataactcatngcacacgtcaa

SEQ ID NO: 6394 - DNA, 224 bp, Glycine max
  unsure (1)..(224): unsure at all n locations; Clone ID: 701145746H1
gtggacattgaattattgcacgatgccacaagaagagaagcccggggcggttagtgtcttcattttgtgatgtatcttatttatgagaattcggtgggcttacataaggtggatgttaaccttcctacctcagaaggaaactcttttcagatgttaaaggttatgtanctgtatnggctttntccttttagttcttttggaagctnngtnnnagttgttcatgt

SEQ ID NO: 6395 - DNA, 227 bp, Glycine max
  Clone ID: 701145747H1
ggcgaaacactccccttgctgcggttgctccatcacctaatcacttccccacttcccctgtaaatcacgtttagttcgcacaaggttttaaaaaatggctgatgctgaggacattcaacctcttgttgttgataatggaactggaatggtcaaggcgggttttgcaggtgatgacgctcctagggccgtgttccccagtattattgggctaccacgccataccggtg

SEQ ID NO: 6396 - DNA, 238 bp, Glycine max
  unsure (1)..(238): unsure at all n locations; Clone ID: 701145748H1
gacctcaaaaaacaaaaatcaataccttagagaaaacaaaagcacagaatcgaaagaagagttcttttttgagagagattgggatggcttcgacgaagaagatcacactgaagagttcggacggcgaggcctttcgaggtggaggaggcggtggcggtggagttcccagaacgattcaagcacatgattcgaggacaactggcggccgacagcggaattncctcttccccaatgttaa

SEQ ID NO: 6397 - DNA, 205 bp, Glycine max
  unsure (1)..(205): unsure at all n locations; Clone ID: 701145749H1
gggggcagcaaatnccaaagcataaaaatataatntaccccacgcgctttaatcccccgacgaaatttacgagcaagaataaaaaaaaataaaaattatgaggtgacattcaaaatatcgttgagcaaaggaccaaccaaaaccananccagnagataacatttaaaccgttcttcttcgattcaagttcgaagaagangcgatg

SEQ ID NO: 6398 - DNA, 238 bp, Glycine max
  unsure (1)..(238): unsure at all n locations; Clone ID: 701145750H1
gatgttagatgtattcacaatgtccgtgtaattgtggcattatttatggcttgatcattatgccgtatctttaaaacattcttcatgcttagaatcaacccaactgtttgatctgtcaaaaanaaaaaanaaaaaaaanagannaaaanaaggntngagaangnnangagcaatgagacaatcgctctgnaagnagatcgcctcgagcaggaggccgnnggcgttcccagnacccgcc

SEQ ID NO: 6399 - DNA, 218 bp, Glycine max
  Clone ID: 701145751H1
gacagttaatttatcataacatttgtttttggtgcattcaaaaaatggctgggattgtagtgatttttgactttgactcaacaatcattgagtgtgatagtgataattgggtgcttgatgagaccggtttaactgaaaagttctatcagcttcttcctagcacgcattggaaccctctaatggataagatgatgaatgaacttcattcacaagggaaa

SEQ ID NO: 6400 - DNA, 215 bp, Glycine max
  Clone ID: 701145752H1
gaggtttttagggtttacaccgaggagacacaccttcagcagcagcagccatggttctcaaaaccgaactatgccgattcagcggtgccaagatctacccagggaaaggcatcagatttgttcgtggtgattctcaggttttcctgtttgctaactcgaaatgtaagaggtatttccacaacaggttgaagccatcaaagctcacctggactgca

SEQ ID NO: 6401 - DNA, 218 bp, Glycine max
  unsure (1)..(218): unsure at all n locations; Clone ID: 701145754H1
ggccgtggaagagagaaaccctagggtttggaagaagctgatcggagaagatggtgcagcgtctcacctaccgcaagcgccacagctatgccaccaaatccaaccagcacagagtcgtcaagactcccggtggcaagcttgtttatcagaccacgaagaagagggccagcggaccccaagtgcctgtcactggaaagagtttaaggggttncccnttt

SEQ ID NO: 6402 - DNA, 225 bp, Glycine max
  unsure (1)..(225): unsure at all n locations; Clone ID: 701145755H1
gacaatagagactagagaagagagaggtgttggtgccctaatcgtgagaagaaaggaaagggaaaagaggaaaatggtgtgcataaggaaggcgacggtgaaggaccttctggcgatgcaggcgtgcaacctgttctgcctccctgagaactaccagntgcagtacntacctctatncaatccttctcctgggccnngctccttagttgccgaannatnnnaggg

SEQ ID NO: 6403 - DNA, 221 bp, Glycine max
  unsure (1)..(221): unsure at all n locations; Clone ID: 701145756H1
ggagagaatagagatccagtcaaaacaatatctttctctctctgtttggtttggcctcttgctgtaagaagccagccacagtactgttgcgctcctgtggaaccatcgatggtgtgtttctcattctttcatgttcctttcgnngtttcaatctgtttggtgaataacccacnttccttttgtttcttccncngggtttnanagggtnnccntgggnaaac

SEQ ID NO: 6404 - DNA, 193 bp, Glycine max
  unsure (1)..(193): unsure at all n locations; Clone ID: 701145757H1
gggtgcaaaatctgataatggcaganacagaagacaaaacccttcaagcctcgcccatgaacgaaaccangaagatgaagaagaataagaataagaagaagagcgacaaaaaaagacctcgggagattgctaccgaggagcgtccagaggaagaggagaatgagantaatacagatagcggtggagattcctc

SEQ ID NO: 6405 - DNA, 238 bp, Glycine max
  unsure (1)..(238): unsure at all n locations; Clone ID: 701145758H1
agttcgtttactatctaaacttcagcaccgaaatttagttaggctacttggtttctgtgtggaaggaaaagaaagactacttgtcctatgaatttgttataaataaaagccttgattacttcatatttgatcaaactaagagagcacaattagattgggaaaaacgctacaaaaccttactggtattgcnccgaggcttctctacctccatcaggattcncgntngcgtattanccac

SEQ ID NO: 6406 - DNA, 194 bp, Glycine max
  unsure (1)..(194): unsure at all n locations; Clone ID: 701145759H1
ggacgatacaagngtagggtattaagccgtatggcttgagcctttcccataaacacaaacacaagcactgaattgagttcactgtccacaagtttcgccccaacactcaactcggctcnnnnnnnnnnnnnnnnnnnnnnnnctccaaatcaaacaaagtatagataaattatcttgcngcttctttncanccc

SEQ ID NO: 6407 - DNA, 219 bp, Glycine max
  Clone ID: 701145760H1
aatggacatttggatactgcacaatagttctttttttgccctgaaattagtgctagctacagaaattgtgatattgtccgagccactcatttgtggatattgtctagtggtatatccgacaaaggaactattattacggtacgcaacacgctcagaatacattaatttaacacatgtttttttaatatattttttagtgttaggtaaatttatggatta

SEQ ID NO: 6408 - DNA, 159 bp, Glycine max
  Clone ID: 701145762H1
ggaaagaaaaatacatttatgaaaatagtcaaaggtcaacattatcggtgggcaaggtgctgtcgttttattcaaagaccttccgcgtggaaacagaaacatacaaacttttatccaattctcaaggttgttggcacagtcagcataatcattaatggc

SEQ ID NO: 6409 - DNA, 220 bp, Glycine max
  unsure (1)..(220): unsure at all n locations; Clone ID: 701145763H1
acactcaaaacacatttaaattgaaaaatgttatatgatacatacaattaattttaattcacaaaactcacattacatgcaattccataaatacttttggtattgcgtttcagtcagaattagagttacacctcgctaattttgaatctcaaattctgattgaagaattggaaaccaccctaaaaattgnggccaagttttancatattaaaagttgggg

SEQ ID NO: 6410 - DNA, 215 bp, Glycine max
  unsure (1)..(215): unsure at all n locations; Clone ID: 701145764H1
gggatgatggaagaaacaaagagaaggganatatcaggaggtgcgattaccggagccaaacnnnnnnnnnnnnnnnnnnnnnnnnnnnananatgcagttccattcagaaactccaaactaaacatccctggcgacaaccttaggaatctcgatcgctgnnaaaacctntgcngccccgngcacactctctgnattccaacttgtttangtcatg

SEQ ID NO: 6411 - DNA, 224 bp, Glycine max
  Clone ID: 701145765H1
ggacgacagtgccttcagctgtcattaagttctcgcacggcacagagagaaagagatggattcttctccttcaccagacatatacatcccagagcaatggtcagaggctgcagagtccattgcacacagttcaatgcctcctattgctcttatatgtggtgccaagaattgtgggaagacaaccttctcccgctatctcctaaatgtcctcttgcacaaataca

SEQ ID NO: 6412 - DNA, 225 bp, Glycine max
  unsure (1)..(225): unsure at all n locations; Clone ID: 701145766H1
gacacacaaaaaagcagagtctgcagcactcaaacgaaacgacagtnaccaaaacagaaaaacgacattacccagagagcgacgatgccggaagaaacgacgtcgatcgactacgtgatggaggctgcatctgggccccacttctccggcctgagactcgacggccgggtcccgtcctccgccaccgccgcgtcctccactcccgattcaaccctaaccctcgat

SEQ ID NO: 6413 - DNA, 219 bp, Glycine max
  Clone ID: 701145767H1
gggatgttaaagcagcagcaggtgatgacaatcctgtcccagacaagcaaagagggccagtacctgggtcctatgactcacctggcagtccaggtgatgtatcacatgttgcgagaatagcttcaggtgataataaatccgagccttctctggctctggctcggtttgttgatattggttctccagaatttggtcattgcaatgcaggtcaatatgttg

SEQ ID NO: 6414 - DNA, 217 bp, Glycine max
  Clone ID: 701145768H1
gcttcacatttcgggtatgtggagcaaccttcccttggacattttagccaacatcttctcatttctctccccagactcgttggctagagcaagatcagtttgcaagaattggcacaaatgttccaaggcttatcctatagccacaacaacctcttcatggttcttggctcttccaattcgcaaccatagaccatattgctacgctcataatccagtg

SEQ ID NO: 6415 - DNA, 220 bp, Glycine max
  unsure (1)..(220): unsure at all n locations; Clone ID: 701145769H1
ggccctgtgttggcaggacttccacaacacgagggaaaatttagccttgaacctgagctgccggtgatttcaactgaggatctgccatggcttgtgggaacagacgctgcaaggaaagcaagatttaaattttggaaaagaatttggagagatcaagtgctctgaaatggccccnggtgnanttcctttcccgttgaanccaantgggntttggcaaaaa

SEQ ID NO: 6416 - DNA, 222 bp, Glycine max
  unsure (1)..(222): unsure at all n locations; Clone ID: 701145771H1
gagaaacagcagcagcaatttgagtagtgaganacaaagagacagacaaatccatgtaattgaatagacaaagcactttcggtttcttattattttgattttcattacatcacgtaacaataataatacagccaagcacgcangcacgcacccacangacacaagtctctccaantcaanttcttccannctcataatggcttctncaccatgctttcctgg

SEQ ID NO: 6417 - DNA, 223 bp, Glycine max
  Clone ID: 701145772H1
ttggccactgaggatgaaacctgaagccaaagggtaccataatatattaaaggagaatgtgcttccctcctttgacatgaaaggaatatgggaagctatggaagagtgttacagattgggcttagccaagtccattggtgttagcaacttcggcatcaaaaagctcacccagctcgtggaaaatgcaaccatcctcctgcagtcatccaggtatgaagctttc

SEQ ID NO: 6418 - DNA, 215 bp, Glycine max
  unsure (1)..(215): unsure at all n locations; Clone ID: 701145773H1
ggtaactaaaggagagtgcaattacgtagtgtgtgggagacaaagagagatggctaagtggtgtatgttggtgttggttcttgctctagctctggctgtggccacaagtgccagagatgcacccgaagatgttggtctcaaggaccagaagacttcatcagctatgctggattggtggctattcagganttggaancatggacncctttnggggg

SEQ ID NO: 6419 - DNA, 215 bp, Glycine max
  unsure (1)..(215): unsure at all n locations; Clone ID: 701145776H1
gacagctattcctcttaagcttgctactgagtttccacactgcataccttaggtcttccgaattcgaagttaatttgcaagatggctaaggaaaaggctcagatcaacattgtggtggttggtcatgtggaccctgaggaggcaaccaccattaacgagctgaagaagcctgttgtggagaaagaagctcnagggntgcntatgagggntgcacg

SEQ ID NO: 6420 - DNA, 213 bp, Glycine max
  unsure (1)..(213): unsure at all n locations; Clone ID: 701145777H1
tattaagaacttaaaaaaggtaatataattatgttctaatgtcagggcttcaaactaaggaaacctaatctctggcataggagagaagagataactgttatgacaagaatttcaaaaagaattatcttcgctcgtacgatctcccagattcgaatggatgcttggaagattctagataattctaccngccagcatctgtatgtttcncnnccc

SEQ ID NO: 6421 - DNA, 229 bp, Glycine max
  unsure (1)..(229): unsure at all n locations; Clone ID: 701145779H1
ggcacaagtgagtttgttgatcgagataactagaaacagtgtgatgaaaatgaaggtccttgttttcttcgttgctacaattttggtagcatggcaatgccatgcgtacgatatgttccctctccgaatgaacactggctatggtgcccgtactccggaggtgaaatgcgcaattggaggcttgctgtggangcacacaaatcttnggctttgagacatncnggaggng

SEQ ID NO: 6422 - DNA, 222 bp, Glycine max
  Clone ID: 701145780H1
gataggagtagtcttcaatcttcttcatctacatctgtactagctataccgttccttctgccacaaattaactggaaaggatggtgctgcccaagttctctccgttctcacggcttctcctttcttcccttgtgattctcttaataagctatccagttaaatgtgacgatgatgaggaagacaatctttatcagggtatcaacaagtatcgagcatcgttaa

SEQ ID NO: 6423 - DNA, 206 bp, Glycine max
  unsure (1)..(206): unsure at all n locations; Clone ID: 701145781H1
gaggannggcgggatcagcacaagattgcaaaatgaagttcaacattgcaaatcccaccactgggtgccagaagaagctggaaatcgatgacgacctgaagcttcgagcattttgggacaagaggatctcccaggaggttcttggtgatgctctgggtgaggagtttaaaggatatgttttcaaaatcaccggtgggtgtgacaaa

SEQ ID NO: 6424 - DNA, 220 bp, Glycine max
  Clone ID: 701145782H1
ggagaagacaagtgacaagagtgtgaactgcaaagggcttctccagcctagtttgttctcagatcttcttcttccatggaccagtacgagaaggtggagaagataggcgagggaacatacggcgtcgtttacaaggctcgcgaccgcgccaccaatgagacaatcgctctgaagaagattcgcctcgagcaggaggacgaaggcgttcccagcaccgcca

SEQ ID NO: 6425 - DNA, 217 bp, Glycine max
  Clone ID: 701145783H1
ggtggcaagaagttcataactctcttggacttgaagcgtccatttaaaccaatgaaggatttggacatggacaaggtcatctcggacatcattgaggaaatatcaaagactagttgatttcagctgttttgcaagagcctttttatggcttgacttacagtgaagctagatatattttgttcacatggtagaaatcctacaatggaaacttgttcaa

SEQ ID NO: 6426 - DNA, 213 bp, Glycine max
  unsure (1)..(213): unsure at all n locations; Clone ID: 701145784H1
taggtttttaagttttaaaaagaataaatacatgaaaaatattgaacagtttgaaaatcttgcaaaggttcaaacaccaaagttcatggttattgcttgtgcagattctagagtatgccctnnctaatgttttgggatttcaaccaggagaagcattcatgattcgcaatgttgctaatttggttcctacctttgagagtggaccctcagaaa

SEQ ID NO: 6427 - DNA, 221 bp, Glycine max
  unsure (1)..(221): unsure at all n locations; Clone ID: 701145785H1
ggaggaagagagaaaagaaaaccggtgctgttgaggcagagattcaagagaatggaaggtgtgagccctgagcccttgagatcagaattggattccaaatccaaacaagacacagcgaaagaagaagncngacgacacattcaaagaaagcactgacgccgaggtcactaaaattcgtctctgagagctttgttgaaagccgagntcctcttccanggagg

SEQ ID NO: 6428 - DNA, 215 bp, Glycine max
  unsure (1)..(215): unsure at all n locations; Clone ID: 701145786H1
gggaaaaagaaaagacgaacggagactctcctctttgttcacagcaatgcagacgctacttctgccggcaacatgcgccggcagcttcacggcggttcngctctcagcctctgccgtcgccgcccctcgtctcccgcaaccatttctccgcccgaattccttgccctcattccctctcaatttgactctttcttcttcctcatttagtaactcta

SEQ ID NO: 6429 - DNA, 240 bp, Glycine max
  unsure (1)..(240): unsure at all n locations; Clone ID: 701145790H1
gagcctgtggagtgttttcttctgatttcatctggatctgcgagagatgacggtctttcatttcttcaattgcgcgattctcaccttcggcccccacgccgtctactattctgccacgcccttatctgagtatgatacactcggcacctctatcaaagccgctgttgtttatcttgcaacggcattagtgaagcttatttgtntagctacttttctcaaggtatcagagagcgatagttt

SEQ ID NO: 6430 - DNA, 190 bp, Glycine max
  unsure (1)..(190): unsure at all n locations; Clone ID: 701145791H1
ggaangcaaaaaatgaaaacccaaantgcttctctcctctgtctttttctctctcttgctatccttttggctagtggcactgctgcaagtgcaatcccaagaagcgcagtgccaagccaccatgtttcaacattcaacagangcntttttccnccanatttncctctngggatatgggttctncnncnca

SEQ ID NO: 6431 - DNA, 219 bp, Glycine max
  unsure (1)..(219): unsure at all n locations; Clone ID: 701145792H1
gataatggcttcgttatcgctttgcatagccatgacagcacccactccctcagcttctctcattctcactgccccaaaaccatcttcgctctctttgaaccttaccngnacttgctcnacngctngntctcggnttctnnattgcccctncctctnttctcntcccttnnttcncccctttcccnatttangggttggccacnnggnttggnttanncc

SEQ ID NO: 6432 - DNA, 219 bp, Glycine max
  Clone ID: 701145794H1
ggatgattggcaaaagtggataagtattcgaggtggtattggtgttccttcaaacaagagttgggagtcatggtggaatgaggaacaggagcatctgcagcacactggatttctggggcggatatgtgagattatacttgacctgcgtttctttgtctatcagtatggtattgtgtatcatctcaatgtagccagaggtgacaagagcatcttggttta

SEQ ID NO: 6433 - DNA, 215 bp, Glycine max
  unsure (1)..(215): unsure at all n locations; Clone ID: 701145795H1
ggaagcacccaccatacacacccattggaaaccgttcaaaagagataccttacaatcgttttacaatgcagcataagaacaactaacagtagcacgctactctctttttctctcgtgtgtatcntgnangtaattggnaggnnntttgnanncccttcnnngggtnccnnttgggtccncntnaagggnanccttttnaaaaannattttttccc

SEQ ID NO: 6434 - DNA, 247 bp, Glycine max
  unsure (1)..(247): unsure at all n locations; Clone ID: 701145801H1
gaggaagcagcagcggcgggnancagggagagaagatgaaattcaatcccacgtgtgtcgagcagccgncgcaagagccgaaaggctcatttcacggcgccatcgagcgtgcggcgggtgcttatgancgcccctctgtcggcgganctgcggtctaagtacaacgtgaggtcgatcccagtacggaaggaggacgaggtncaggtgatgcgaggaacatacaagggtcgcgaggggaangtnactc

SEQ ID NO: 6435 - DNA, 244 bp, Glycine max
  unsure (1)..(244): unsure at all n locations; Clone ID: 701145802H1
ggactgtcagcagcgcattatagcacaccacacaaaaaagcaaancagagagaacaatgttactcacacacgccatgggtaaatgaatggtttttgagcaacagcagttaaaagagaaaagggattcagcgaagatgacatcggttggtgtggcaccaacgccgggtttgagagaagccagtgggcatggagcagcagctgcggatagattgccagaggagatgaacgatatgaaaattaggga

SEQ ID NO: 6436 - DNA, 238 bp, Glycine max
  unsure (1)..(238): unsure at all n locations; Clone ID: 701145803H1
gaatttaaaagttatcttgggtggcatgaacagggcgatggcaagtttttttatggtcttcatgttgataatggtcgtattggtggaaagatgaaaaagacattgagggaggttattgagaaatataatttgaatgcaagaatcactccaaatcagaatatcatcttgactgatgttcgtgctgcatggaagcgtccattacaaccactctngctcaagctggtttgctgcaacctag

SEQ ID NO: 6437 - DNA, 247 bp, Glycine max
  unsure (1)..(247): unsure at all n locations; Clone ID: 701145804H1
gacacagagacatttttctttcttagaagcgtccaccacacggaaccttcgcaattccttcacacccaccataataataatatcttcattgttcttttcttctttgttaccattnnnnnnnnnnnnnnnnnnnnnnnnnnnnnntgaaactaacaacaacaataaaagaccatgtcggtgaaggagtgcgagcaccacaaggggaagaagaggaagatcttccggcaagtgttctggtgcntagtgg

SEQ ID NO: 6438 - DNA, 245 bp, Glycine max
  unsure (1)..(245): unsure at all n locations; Clone ID: 701145806H1
gatgatagagataaacttctttttttaagaggaaaccaataaacttattccatcttactttgtctatatgaaaaaggttctctcctcttagttttccactcccccacatacaaataaacacaatctgagtgaccaaaactgatctaaaaaatagttgaggcagtatctctaaacctcccaacttcttcgccttgtatcttctcatttgcttcggcttaattaacctntgcctctcgtcctagcgt

SEQ ID NO: 6439 - DNA, 240 bp, Glycine max
  Clone ID: 701145807H1
ggcatcaattcaaaatatatcatcaattataagcatgggtttgtggaacacaacgaatgcagtgtcttgccgctttcacaagtttggtgatgaccaaaagaatctggtcttccaaggtgatgccacgtcttcttccaggggcatagaactcacaaagttagacggtggaggaaaaccagtgggtggcagtgtggggagagtgctatactcttctccagtgcacctttgggaaagctctac

SEQ ID NO: 6440 - DNA, 240 bp, Glycine max
  unsure (1)..(240): unsure at all n locations; Clone ID: 701145808H1
ggaggatgaaangcctaggcattgaaactactctgctctcacnccctttcattgcaacagtggaactcaacttctcagtntctttaaataattgatatctggaactgtacgagcagaggacatggcaaatctgccaaaaganaaccagcaagtaacaagttccacaccatccatccagaaaagtgaggaggatcaagcagccagcactgctatgggctttaaagattcattggaaaaaca

SEQ ID NO: 6441 - DNA, 230 bp, Glycine max
  unsure (1)..(230): unsure at all n locations; Clone ID: 701145809H1
tacggctgngagaagacgacagaagggggatcagtgagtgctcaagaagtttcaccaaatgaattatacagccagtctgcaatatacattgctgctgcccatgcattgaaaccaaattattcagtttatagcagtgccttgcggttggtgcgttctatgctaccattaccacaccttaaagttggatatttaaccgcacctcctgtgggggcatctattgcacctcataa

SEQ ID NO: 6442 - DNA, 246 bp, Glycine max
  unsure (1)..(246): unsure at all n locations; Clone ID: 701145810H1
ggacatggagggtctcattcaacggcttcatcaacgttgctctcggagctgatggtggcgatcgggaagaacaacaacacgggagagacgaccgtagtagaagctcctgggctgaagtcgtctcccaggatcaanaagatcaccctcttcctcatcaccaacacaaggaacaatatcgtcctcagtacgaggagccccaatctcaaagttcctacaaaccccagaaggtggatgaaggtgaagatg

SEQ ID NO: 6443 - DNA, 158 bp, Glycine max
  Clone ID: 701145811H1
caaaataaaatcttttacccttcacacccccacccctttgggtttctctcctcaattttgcatctggcggcttctcagttctcaccaccatcatggtttcacttggagctacctgtgctctgtgctgttctatgttcatggtgtttgtcactttgagt

SEQ ID NO: 6444 - DNA, 234 bp, Glycine max
  unsure (1)..(234): unsure at all n locations; Clone ID: 701145813H1
ggaattaagactagatatgctatttactatttagggggtattttgaagagttaatttatagcttatttgaacttatgcttatgtataagcatttgtgtaagtgtttgggagggctcatgaaatagtntatgatctgtccatantaagctaggcccccnaggatagctnacgtncaacttatcaaaccaatttaaacttgtttctcttggattgtataaacacttatncnatagt

SEQ ID NO: 6445 - DNA, 239 bp, Glycine max
  Clone ID: 701145814H1
ggaagcagaatcatcagagaagatcaacatagtcaaacttttaagaacttcagctgtgagaagaggtttatatgctggtgtgggcctcttaatcttccagcagtttgtgggaatcaacactgtgatgtattatagtcccaccattgttcagttggctggttttgcatctaacagggcagcattgcttctgtcactcatcacagctggcctcaatgcatttggttcaattctgagcatta

SEQ ID NO: 6446 - DNA, 238 bp, Glycine max
  unsure (1)..(238): unsure at all n locations; Clone ID: 701145816H1
ggtagagctgagctgcgaaaacccccaactccaacctctgttcatcgtctaccgcgctttcttttcaaccagaactatgattaagctttttaaagtaaaggaaaagcagagagaacttgcagaaaatgcaagtggcggaccacctgttaagaagcaaagtgctggagagttgcgtcttcacaaagatataagtgagctgatncaccaaaatcatgtacctgcattccccatggcaaga

SEQ ID NO: 6447 - DNA, 241 bp, Glycine max
  unsure (1)..(241): unsure at all n locations; Clone ID: 701145817H1
ttcccttggtgtaacattgagttgcctattatcaatagttggcatcgtatgtaaagagatgtatgacgcgatgtaaatcaattgtcatctaatgacttgagcctatggtgctgtgagatagaaatttaagatggtagattggaatgagaattgagtctattgattttattattgttgtacgtgtaaatggtttaagttagcaaatatnncctgactaaagtcancgtaatagtgcaaaatt

SEQ ID NO: 6448 - DNA, 243 bp, Glycine max
  Clone ID: 701145818H1
ggaggaaagtgagtgagagaaagagatcgcagacacagagcagaatggcttctacccaatgtttcttgcaccaccatgctcttaccacccctgccagtgccagatccccatcactacgcatcttggttagcaccaagcctaaccagcttgtttgcaaggcacagagacaacaaacaccacaagaggatattgatgtcagcccaatctctcgccgtttagctctaactgtgctcattggtgctg

SEQ ID NO: 6449 - DNA, 119 bp, Glycine max
  unsure (1)..(119): unsure at all n locations; Clone ID: 701145819H1
agcattgatagttaagttgtttaaaagaaattaattagaacgctaccacagtgttttatatttttattatttattcgtcaaacgcaaaataacacaaaatatctatattaactcnnctt

SEQ ID NO: 6450 - DNA, 219 bp, Glycine max
  unsure (1)..(219): unsure at all n locations; Clone ID: 701145821H1
gaccacatttttcattaccgccgtgataacacactaacaccaccacttcatcaactttacttgacaacaatattgtaaaactcaaaatctagtttcatacttttnttcttcttcttgaaatggctctccaggctgcttcattgttcctgcttctttctcggttcttaaagagggaaagagtggtgtgtctctcaaggactccaccttgttcggtctttc

SEQ ID NO: 6451 - DNA, 240 bp, Glycine max
  Clone ID: 701145822H1
ggcgtgaggagtgaggtgctccgggtgagtttatcatatgccgttgataagaggagagagagagattgaccgtttgttaatcttatcttttcttatcccaaacaaactgaaactcaactcctgaaaggcaagagtgagagagaaatggagaatgcggaggagatgatgcagcaaaacgacgaggttttgtcggttgaacttccagctccttccggttggaataaactgtttttccctaag

SEQ ID NO: 6452 - DNA, 208 bp, Glycine max
  unsure (1)..(208): unsure at all n locations; Clone ID: 701145823H1
gttttgacgcaacacactttcactgagaaaggatctctatctaccaaggagcagaataaaacccttctctctggtaagtgaataagagaatggcttcagatcggaaacttcacactttcgaggaggtggcaangcangccggncccanggtttnnggngcncnnnatntctcgcaaggtgtatgatgtcacccctttcatggnggatc

SEQ ID NO: 6453 - DNA, 240 bp, Glycine max
  Clone ID: 701145824H1
ctcactaaggaacctacctatgaaattccagataacattagggcacgtcgtaaaggggcatgtgaagtgaaagcatttgagataaccattgcatttgtataatactaaatttgcattgtatgattatggagattgttgaagtaaaacttcaatgtgattaaaagaaacataaacaatacttaaaaaactatatcaaggttttctttatgctattatttatagcaactttaaacaattaga

SEQ ID NO: 6454 - DNA, 237 bp, Glycine max
  Clone ID: 701145825H1
ggcataagaacaagcacaaggtctgattcgtgtttccttacatcaacttgtggtctaaaaatgggaaggatgccatgctgtgagaaggtagggttgaacaaaggaccatggaaaaccgaagaagatgagaagctcgtggcttatgttgaaaggcatggccctggaaactggcgttcagtgcctgccaaagcgggtcttcaaagatgtggcaagagttgtagactgaggtggatcaac

SEQ ID NO: 6455 - DNA, 240 bp, Glycine max
  unsure (1)..(240): unsure at all n locations; Clone ID: 701145826H1
gacacattagtagttaaaagttctcacttgagttctgaaactcctctgcnattccttagtgaggctaatggaactacagttaatattggtgaaaatgatactagcactagcannnnnnnnnnnnnnnnnnnnnccatgttattcagttgctgtggacattaatcaacaagtgaggcaagtggcngcaaagcataacgnggccttgccncctggtttttggagactcaagtgttgattctg

SEQ ID NO: 6456 - DNA, 235 bp, Glycine max
  unsure (1)..(235): unsure at all n locations; Clone ID: 701145828H1
ctacctncttaattactcattatactctttttacttaagggagtaaacccttgaagcccctcttcctttctgaaaatgtccttttggaaataacatgtacatattcccaaaatatatacatgaagantgttgacattgtaaagactattacatcctcatatttgtnagtntatnntgtncctaacanagtgtncccccaaancnaagtnaatnnnngcnngccaatcttcnatnc

SEQ ID NO: 6457 - DNA, 236 bp, Glycine max
  Clone ID: 701145829H1
ggaagatcggtgaaggagtgaggtagcaacagcactgccactgccactaccaatagcagaatgggaaccttgggcagagctttctacgccgtcggattttggatccgcgagaccggccaagccatcgatcgcctcggctctcgtctccaaggcaactacctcttcaagaacagctatctaggcatcgacctctgatgaatctgttcgacaaagctccctcggttcacagggatgca

SEQ ID NO: 6458 - DNA, 248 bp, Glycine max
  unsure (1)..(248): unsure at all n locations; Clone ID: 701145830H1
ggggaaacattgtgattttcaaggtaggcttttctccagaagatagaagatgtttggccaacttgagcatgagctagagctgcacgtgccggcgagtgaggcatgggatctgtttggtgcccttgaaataggaaaacttgttgcccaagagctgccggaattgtntcaaaaggtggagctaacagaaggagatggaggggttgggactgtctcaaactaacttttgctccagtgtacctgggccagct

SEQ ID NO: 6459 - DNA, 237 bp, Glycine max
  unsure (1)..(237): unsure at all n locations; Clone ID: 701145831H1
gacacccaaatccttcttcaccttcacaattagaanaaaaaaaaanaacaaaaaatgggggtttcncgttctcaaangccncatgtngttngtnnnccattcccagcacaaggccangggancccttttangnancnaggnaaactccttctttgcacnggtttccnacaaacctttgtgaacnccgggtnnaccnanaagggttggnnaagtctctggaaaaaaatttgtcnangg

SEQ ID NO: 6460 - DNA, 249 bp, Glycine max
  unsure (1)..(249): unsure at all n locations; Clone ID: 701145832H1
ggatgcacaagtttgttgagatagctagaagcaataagatgaaaatgaaagtgcttgttttgtttgttgctacagttttggtagcatatgaatgccatggctcagactaccagaagttccctctccaaatgaaaactgggtttggtgggcaatacagcatgaggtggcatgtgccagttggaggctnggctggnagcaaacacgtatcaagtggcaaactgntccnncacttgnggaaaaaacanaacc

SEQ ID NO: 6461 - DNA, 243 bp, Glycine max
  unsure (1)..(243): unsure at all n locations; Clone ID: 701145833H1
ggttctctctttttctctctccttctttctttgtttctgtgtgttcgagattgaagaagatgatgcaggctggacccggcggcatggcccaacaagcgaaccaacaatacgcacagcaacagcaacaaccctacatgatgatgccgccgcagcctcagccccctcagatgtgggccacatcggcccagcctccntncccagtcggtggctcctccgcaacccaccagcgccgatgaggtccgt

SEQ ID NO: 6462 - DNA, 243 bp, Glycine max
  unsure (1)..(243): unsure at all n locations; Clone ID: 701145835H1
actactaaattatataagatttttttgcatattagaacattttttcaacactcatttttngcncacacaataagaaatcnaaccctnaacaacaactcaataaattttagaaaagtgtatttaatattttctttgtctaattataattattgtcctatgatattttacatatatcaagaaaaattaataaacgaaacagatattaattttataaaattaacctttatcatcgtnaatttattt

SEQ ID NO: 6463 - DNA, 216 bp, Glycine max
  unsure (1)..(216): unsure at all n locations; Clone ID: 701145836H1
gaataatagaaaganaggcgcaattttatggaaanatgatcaacaagatgacaaagattggttcctgatagcaataaaccagctacgaagtaccaacggtattgaatccggggttgacaactaaatctagatgtcatccaatatggaacacgaatctgtttagtccccgtttttctggggtttgatcttcctgtatggtttgtgcactaggaaaat

SEQ ID NO: 6464 - DNA, 235 bp, Glycine max
  Clone ID: 701145837H1
ggatgagaaagttcccatcccaattcggtggtttatcgcgttaagcaaaaaacccaatcaaaattcaaagtctctttgtttaccttgtttccctcattgctttgctcacattcaatttcgaaggcgtagagtgagatccgaacgatgaagagagtattcggcgtcaagaagaacaaggatccacccccttccatcaggatgcttccgaaaggattacaaaacgaggtgacacggt

SEQ ID NO: 6465 - DNA, 236 bp, Glycine max
  unsure (1)..(236): unsure at all n locations; Clone ID: 701145839H1
gaccgaaaatgangtcgtggtgaatgaattattgcgaaacctttcatcttccataatcccgcaaggtaaacgacggtgacgattggtgggtggcgccgtacgcctcatcccatccatcgccatcggcaccttcctaaacgacatcgcgtccatcaccccttttctcttcctcacagtcacagcagtggtagcttcccaaaaaagagtgccaatggcatcttcttcagactcatggg

SEQ ID NO: 6466 - DNA, 234 bp, Glycine max
  Clone ID: 701145840H1
ggatgacaacagagaaggtggaagttctgttgaaccaaatgacaaccaagatcaacatgataatgggactcaagattcctctggagggatcactatcccatctgcaattcccacagtatcggttgtttcagttgaagagccctatgttggtcaggagtttgggtcagaagcagcagcacatgcattttataatgcttatgccacagaagttggatttatcgtacgtgtgagtaa

SEQ ID NO: 6467 - DNA, 236 bp, Glycine max
  Clone ID: 701145841H1
ggaagaatctctctttatttctttcactctctcagaaccaaaattttccaaactcctcaactctcatcagatatcaaccttctctctctccaaactctcgcacctttctgctctgcccttcaatttattcacctctgacaccctcttaattctgcttccagttcctctgagtggttcaaaatccgtggttgattttgagaatgttaatgggagcagggtgacggataggccctttt

SEQ ID NO: 6468 - DNA, 233 bp, Glycine max
  Clone ID: 701145843H1
ggctacaattacaaaccctaatcagctcacagacctctctttctcgcgtctttggagttatggaggagcaattcatacttagagttccacctaatgtggcagagcggatagagcgtcttctgaatgaaaacaatgcttcttcatctgaagacaagtcactagatttgtcatttagagaggatggaagaagtggtacgtttatgattgggaatgaacaattcccagcttctcta

SEQ ID NO: 6469 - DNA, 213 bp, Glycine max
  unsure (1)..(213): unsure at all n locations; Clone ID: 701145844H1
ggaagcaaggacgatgagtatagtatgagtaatcagattcagagtgtatagtgattctgattctttcattttccatagattagcaagcaatcnnnnnnnnnnnnnnnnnnnnnnnnnnnnnnnnnnnnantgtccnggaatgtcccagagtttcccctagaccttttgaccgngaaatggtggcgtgctattgcaaccgattctacgcaaacc

SEQ ID NO: 6470 - DNA, 234 bp, Glycine max
  Clone ID: 701145845H1
gcaaactaatgtggaagattcaccaggaagaattcctgatgctgaaaatgaagcagagttgtcatttgctgttgtaaatgattcttttgatgctcggagggtacaatctggcaatgatatcatagaggttgaagctgaccatgatccttcagttgaaaacctgaacaatgttgacagtaaggcaccagaagatttgcaggctcctgattcaaaggtgggcaccagaaatcccgc

SEQ ID NO: 6471 - DNA, 220 bp, Glycine max
  unsure (1)..(220): unsure at all n locations; Clone ID: 701145846H1
gggggtttttatttcantgcgaaaccagcaggggcannaattcctactcttagccgcagatctctcagggcntgcatcttctcagttgtgaagatgtacacatcaaggaagannatccacaaggataaggatgctgaaccaactgagtttgaagagtcagttggncaaggcattgtttgatctggnaaatancnaaccaggagcttaaaagtgatctgac

SEQ ID NO: 6472 - DNA, 225 bp, Glycine max
  unsure (1)..(225): unsure at all n locations; Clone ID: 701145847H1
atgcagactatcagaacatgctaaaaaacatgaagacttgaaaagtttgggggtgttcaaatccacatttagggatcctgtttcttcaatcaatgcattaatacgaaagggtggctaaatggttgagtcatatgataattcatgactggaatncacttctggttgtacctatcaaaacatgaaacagtaatagtcaagggctcaaaagtacaacatgctaatgca

SEQ ID NO: 6473 - DNA, 242 bp, Glycine max
  unsure (1)..(242): unsure at all n locations; Clone ID: 701145848H1
ggtaagaaagagggtgtgaaganagtggggagaagatttggtgttgtggccatggcggagtctaagagtactgtgcttgttacgggagcgggtggtcgcacaggacaaatagtttacaaaaaattaagagagangccaaaccaatatgtgggctagangtctggttagaacagatgaaancaaacagacccntggtncntnccaantnacctnttnttngggattcacacatgccnaangtt

SEQ ID NO: 6474 - DNA, 249 bp, Glycine max
  unsure (1)..(249): unsure at all n locations; Clone ID: 701145850H1
gatagcgtttttcattgtgcattattcaatggccaccacagcagctnctatccggaancatggtgagcacctccttcatgaggaagcaacctatgacgaccaagagcctaaagacattccccaacgctctttttggtctgaaaggtggacgaggtggtcgtgtaacttgcatggcctcgtacaaggtgaagctcataaccccagaaggagaagtggagtttgaatgcccagatgatgttttcatgttga

SEQ ID NO: 6475 - DNA, 248 bp, Glycine max
  Clone ID: 701145851H1
gcttccttcccagaactaaataaacctccttcgactctgcagggcacatttctccatatcagaccacacctctcttttctcttcggttgtagccacggattcatgacagagattatcaactcatgcttagttcgaagactattttaactgttttagttttgagttcagaataaagcacgcagcagagaaatctcgaagtgcaaccaagaaattgcttgaagatttcacaaagaaacgaagactagaat

SEQ ID NO: 6476 - DNA, 238 bp, Glycine max
  unsure (1)..(238): unsure at all n locations; Clone ID: 701145852H1
gacacttcaaaatcctctggtaacccttattttatctattctctctctttcttttgtgttctaagcagctagaagcaatggagaggaaaagaagccatgcctctttcaccatgtttgcaatgcttgttggagtgatctctcagagccttgtcattcctgtagtatccaccactgttgaagatcagaagaactactacannnnngatccacatgctggaagtcccccctcaggtttctc

SEQ ID NO: 6477 - DNA, 238 bp, Glycine max
  unsure (1)..(238): unsure at all n locations; Clone ID: 701145853H1
gaggaaaataaatgcaactaccacaaagacttatgctaccagaaccatatttttcttgaaaagtgatggaactttgacgccattggccattgagttaagtaagccgcatcctcaaggtgaagaatatggtcctgttagcgaagtctacgtgccttcgagcgaaggagttgaagcttatatttggttattggcaaaggcttatgttgttgtaaatgactcntgctaccatcaactcgtt

SEQ ID NO: 6478 - DNA, 236 bp, Glycine max
  unsure (1)..(236): unsure at all n locations; Clone ID: 701145854H1
gagcgctgagtcgagggcgttcagtgttcaccacagtttacacacgagtacccattttctcttctcaatttctcagagtgtgcagagaaaatcatggtggacgcagcagaacgtaggtacttggaggatgacgattcatcactcatgaaaactattancggggcaacaactggtttagttgctggcactatctgggggaccgtagttgccacctggtatgatgtccctcgtgtaga

SEQ ID NO: 6479 - DNA, 231 bp, Glycine max
  unsure (1)..(231): unsure at all n locations; Clone ID: 701145856H1
tggnctcagtcacacgtgcagggttcacagttagagcacagcaacaacaagtgaatggtggtgaggtacaaagtagccgtagggcagtgcttccacttgttgctgctggtttgaccactggctntttgttcaagctgtgcttgctgatgccaacctatcaaagttggaccacctcccccaccttctggcggattacctggaacattgaactcagatgaaccaagagacctt

SEQ ID NO: 6480 - DNA, 230 bp, Glycine max
  Clone ID: 701145857H1
gaagggggtttgataaaggttgacattgaaatttgaagccatggttcttgactccattctgacatctccccgtctcaagtctccatcttccaggagacagtttaaaaaggatgaactgggtagttggtccacacttttccagaggcatcgcttcctcttatctgctcttgttctgctaactctcctctgcactgtttatctttactttgctgtcactttaggggctagtg

SEQ ID NO: 6481 - DNA, 231 bp, Glycine max
  unsure (1)..(231): unsure at all n locations; Clone ID: 701145859H1
gggataaggaatgcacctatggtgctaccacgaaggaagaaggaatgtgaaagggaagtagtcaactagtgcacgcaacgcaacacaagtctaacaaatggccatcatcatctttctgttcgcccaatctcaaacacccaaacatcgtcaaacgcaaantctgcaacaaagctttcctccccacgctaaacaaatccacaaggngtaatatggggntttggggtnaangga

SEQ ID NO: 6482 - DNA, 254 bp, Glycine max
  unsure (1)..(254): unsure at all n locations; Clone ID: 701145860H1
cacattaccaagtcatatgatccaatgataaaaacttattaagcagcttttttttaattttgatcaactcatgaaaccccatgccagagatgctctaagtgcttgatggctctgaaatttaaataagacgagacatttttattactccctccgtccgaaagtaattgtcaccctatattattttatnaaacccattagaaatagntangnganaaanatgatttntgaaaaananccntnnaacacatnattnc

SEQ ID NO: 6483 - DNA, 235 bp, Glycine max
  Clone ID: 701145861H1
gattcaagatcgtgtgaaagagttgcgggaaattgtgccaaatggagcaaaatgtagcatagatgcacttctggaaaagaccatcaagcatatgcttttcctgcaaagtgtaacaaagcatgctgacaagctgaaacagacaggggaatctaagattgtcagtaaagaaggtggattgctattaaaagataactttgagggaggggctacatgggcatatgaggttggtgcacaa

SEQ ID NO: 6484 - DNA, 214 bp, Glycine max
  unsure (1)..(214): unsure at all n locations; Clone ID: 701145862H1
ttcattgatcactacataaattcattatttaatctttatttttataatacttaatcttattgaattttatatgtcaaattttnntantattgaatttnagggatatgatttcattcatatatgtactcccaaccactccaaaatagggcacacattatttatactagctagagaatatgtagnccatgagtggaaaaagaaaatgctgaggtgg

SEQ ID NO: 6485 - DNA, 245 bp, Glycine max
  unsure (1)..(245): unsure at all n locations; Clone ID: 701145864H1
gctggcttcttgattctggaatgttacaagaggggtaataaacaaacacttattcctcgtcatttcatctattgacaagtatttcatagggccaatgtagtcatttcatgtccccttgttggaaggggggagtgtatgacagtntggantcnnactactncncnntaggganctcccatgtaaaaggtgntagaacattccatgccagtnaatcngnaatccnaatcaaaacacnnngcctctgt

SEQ ID NO: 6486 - DNA, 238 bp, Glycine max
  Clone ID: 701145865H1
ggacacaaactttattacagttgttgtaactaagcaagaatattattaggcaatgaagtcttctggaccttcaacaactcttgctctttttttaaccatcaatttgcttgtctttgtcatggcaagtggctgctacacttgcacacagcctaagccaaaccctagccctaacccattcccttaccctaaccccagccctaccgcaaagagctgccccagggacgcattaagctgggtg

SEQ ID NO: 6487 - DNA, 236 bp, Glycine max
  Clone ID: 701145866H1
ggaagtgtgaagcactgagcagttgaggaaatgggaacccttgggagagcgatctacagcgttggtaactggattcgagaaactggacaggccattgatcgtctcggttcccgtcttcagggcggttactacttccaagagcagctctctaggcatcgaactctgatgaacatatttgataaggctcctgttgttgataaggatgtattgttgcgccaagcgcctccgtcattgga

SEQ ID NO: 6488 - DNA, 242 bp, Glycine max
  unsure (1)..(242): unsure at all n locations; Clone ID: 701145867H1
ggcgtgtgagcaaacacacaacactgaagaaacaagcttcanttccaccccttaatggcccnaggcaaggcgaagaagaaggaagaaggtgaagacaccgatgtcgcaaacccagaaacgttagagcggaagaggctgaaatccttggccatttccaacaagattctctcggagacccctgcacggagctccgttcacctcaacccttcctccgttgtggccaagcaccacggcaaagatat

SEQ ID NO: 6489 - DNA, 239 bp, Glycine max
  unsure (1)..(239): unsure at all n locations; Clone ID: 701145868H1
ggtgttgtgttaatctcattcacacattcacagttatactctctctctctttgtcgctggatcactgatctcatctcaattnncagatatgtcgacatctgataagccagaagtggtggaaaggggtancaaggatgnaaaacacaaggaagatgatcaagnggaggggaanggtggatccattgagaaggtgaaggnnnntcattcatgacattggtgagnngattgaggaagctatt

SEQ ID NO: 6490 - DNA, 232 bp, Glycine max
  unsure (1)..(232): unsure at all n locations; Clone ID: 701145869H1
gtctgcatcaatttcttctatctcaacattactgtggccatcttcgtctgtgatctgtccacgacttctggcattctttcgtgacgagcccacatctccattagcagccccagttggtgtcctaantgaattaattggaactgcagtagatattggacccgcagccacgcgttgactggtcggggtttgcgcatctgttcagagagcctctgggattctggggagatgaaga

SEQ ID NO: 6491 - DNA, 212 bp, Glycine max
  unsure (1)..(212): unsure at all n locations; Clone ID: 701145870H1
ggacacgacacaacannacacaagctttattcttattcttcgcttcttctgtacagcacccaagattgaagatgatagaccttgcgcgcgtgcagaaggagcttgtggaatgcagcaaggacgcggagggatcgggcatcaaagtcagccccaaaaacgacaaccttgttctcttgatcggcaccattcctggccccgtcggaactccatat

SEQ ID NO: 6492 - DNA, 213 bp, Glycine max
  unsure (1)..(213): unsure at all n locations; Clone ID: 701145872H1
gaccacaaactccacnaccaacaccttcaccacaanctcagcctccaacttcgtctccacagcagctaagaacaacaaatttgaatgaggaatcagtgcaagtgtccactgaagctaagcaacagaagcccatcaaaccagtcacttcatccactaaggttggatccacggattggatagccacttccttgaccagaaggtttgggataggag

SEQ ID NO: 6493 - DNA, 234 bp, Glycine max
  Clone ID: 701145873H1
gatcgtgtcagaaatataaaagtttatttcctctgatcgtgtggtttctgagttctaagcactcacctctttcatacacgtttgttcgcttgttgagaagccatgggcgaggatttcgagttcccaagtgctggcaacatggaaatgcctgaggaggaagagtttgagagtccgatcctgaaggttagggaggagaaggagattgggaaaatggggctgaagaagaaattgctc

SEQ ID NO: 6494 - DNA, 233 bp, Glycine max
  unsure (1)..(233): unsure at all n locations; Clone ID: 701145874H1
ggcacaagcgagtttgttgatcgagataactagaaacagtgtgatgaaaatgaaggtccttgttttcttcgttgctacaattttggtagcatggcaatgccatgcgtacgatatgttccctctnngaatgaacactggctatggtgcccgtactccggaggtgaaatgcgcaagttggaggcttgctgtggaagcacacaacatctttggcttgagaccattcctgaagagtg

SEQ ID NO: 6495 - DNA, 232 bp, Glycine max
  unsure (1)..(232): unsure at all n locations; Clone ID: 701145875H1
ggattccggacagaaaaaaacttgggacggtgaaattggagggttttccgggatcccaaggccgaatcttgattcaatttacgaaaagagaacaccatccgttgctgaatcttgaagccgaatcaaatcgtnnnnnnnnnnnnnnnnnnnnnnntanccgaatagcgtttagagagagaaaggtgaagtggggttgtctaaagtttgggtcttgtgtttgttgtgtgtggtg

SEQ ID NO: 6496 - DNA, 69 bp, Glycine max
  unsure (1)..(69): unsure at all n locations; Clone ID: 701145876H1
actgtagttttttttttntgttgncattgaaggggcaaaaaanccgagggaaaagcaaananaaannaa

SEQ ID NO: 6497 - DNA, 237 bp, Glycine max
  unsure (1)..(237): unsure at all n locations; Clone ID: 701145877H1
ggcacaagtgagtttgttgatcgagataactagaaacagtgtgatgaaaatgaaggtccttgttttcttcgttgctacaattttggtagcatgngcaatgccatgcgtacgatatgttccctctccgaatgaacactggctatggtgcccgtactccggaggtgaaatgcgcaagttggaggcttgctgtggaagcacacaacatctttgggctttgagaccattcctgaagagtgc

SEQ ID NO: 6498 - DNA, 150 bp, Glycine max
  unsure (1)..(150): unsure at all n locations; Clone ID: 701145878H1
gcgaacccaatcaagcttatcaggagcagcacccaataacgtgccaccacctgtcacccaaacggcacggcactagtcgttttttcactttaacactcctccanaaatcaaatctaaaccaaaaaccgttggttaattatcacttaaact

SEQ ID NO: 6499 - DNA, 236 bp, Glycine max
  unsure (1)..(236): unsure at all n locations; Clone ID: 701145879H1
ggaggatgccccagaggtacagggtactgagagcaaagatgaatgtttaaatgaattgcatggacaggccatctgtgaatctagtggtctgtttgtttccttaaggcggatgaaaacctaagtcccaaattttcttcagcaaaatgggtgggaagacaaggttccattacaagttcaaggttcagaagtgctgttacttccatacaaagaagaaagntcctctgctgctgagatca

SEQ ID NO: 6500 - DNA, 238 bp, Glycine max
  unsure (1)..(238): unsure at all n locations; Clone ID: 701145880H1
ggttcacaagtttcgtttccaggtttcggcgcaatcggcttctgcttcaaggaaggagagcttgttattctctatcaacaagtaaaatgtcaggtgaagagggtgtcattgcagttgagcnnnnnnnnnnnnnnnnnnncatcccaggcgagccatggatatcatgatggccttaacaatttgtgnccagaaaatcctctgggcttatggtggttgtcgcgtgggcttcagaaggnna

SEQ ID NO: 6501 - DNA, 247 bp, Glycine max
  Clone ID: 701145882H1
ggtgagagaaagggagaaagggtgtgagaatggagagcaaagaggaagatgtaagggttggagcaactaagttctcagaaaggcaaccaattggtacagcagctcagggtgacaaggactacaaagaaccacccccagcacctttgtttgagcctggtgagctaaagtcatggtccttctacagagctggaattgctgagtttgtggccactttcttgttcctctacactaccatcttaactgtcag

SEQ ID NO: 6502 - DNA, 233 bp, Glycine max
  unsure (1)..(233): unsure at all n locations; Clone ID: 701145883H1
gttgataacatctttctagattttgtaatttattatatcttttttttcaatttggattctgtaattctgatgctgattatttgtggtagtaagttttaatcaaagctgaatgtggctacacatggaaagttttcaccttctgttactggaacattcttttatttatnntttattttttttatgtttatttgcatttcaaattcctgaatcaactcaataccggttgagggaga

SEQ ID NO: 6503 - DNA, 212 bp, Glycine max
  Clone ID: 701145888H1
gagtgaattacattacattgggttctagcagcgtatttcactcaccatgcaggctagtgataggtttaacatcaattctcagctcgagcatctccaagccaaatatgttggaactggccatgctgatttgaacagatttgagtgggcagtgaacattcaacgtgatagctatgcatcatatattgggcactaccctttactgggattctttg

SEQ ID NO: 6504 - DNA, 232 bp, Glycine max
  Clone ID: 701145889H1
caccatattcttttgagtacttatcaaacaacacacaacataatttttgtgttgtgctccatgactagcaaaaagtgaatagaacaaaaaactgaaccatgactcatttacttgtctgtgttatatcacttgtactatcgttccatgcgcaccgaacccaccgtacatttttattcacgaatttaacaaatctcaaatgggccatgatgttaattacgttttgcttttatga

SEQ ID NO: 6505 - DNA, 247 bp, Glycine max
  unsure (1)..(247): unsure at all n locations; Clone ID: 701145890H1
tgagactcaaaaaaaaatttaaaaaaatcttcttttctcttgatttgatgtcaaccaaggcaatctcttttgtgattttagattaaaaaaatgattataataattaaaaaattaattttagaagaaaaaaaacagctaaaatcacaaattaatcatgataggnagataaagaacaaccataaaacctaattggtaaccattattaattactaactatgcaacattaattaanaaaaaatgtgggcaa

SEQ ID NO: 6506 - DNA, 208 bp, Glycine max
  unsure (1)..(208): unsure at all n locations; Clone ID: 701145891H1
ggcaaactgttcctgacagcttgcggagagtacatanctgactacgttctaggagaccaatatagatcagattccaaaacagttaaccaacaagcttatttctatgctaaatccctcaaactcaccaacaaagatgtctttgtcttggacgtgacggacanantnnccnnaaatcccagnntttgnctaaccatggntgggtggganc

SEQ ID NO: 6507 - DNA, 229 bp, Glycine max
  unsure (1)..(229): unsure at all n locations; Clone ID: 701145892H1
gggaagaagaaaaagaggaacaagaagagcgtggagacgtacaagatatacatattcaaggtactgaagcaggtccaccctgacattggtatctcaagcaaggccatgggaatcatgaacagcttcatcaacgacatcttcgagangctgcctcaggaatcttccagacttgcccgctacaacaagaagcccaccatcntncaaggnaantccagaccgggtnaggtnt

SEQ ID NO: 6508 - DNA, 232 bp, Glycine max
  unsure (1)..(232): unsure at all n locations; Clone ID: 701145893H1
ggaaggggaaaataaaagagtagagtggataatggcttcgttatcgctttgcatagccatgagagcacccactccctcagcttctctcattctcactaccccaaaaccatcttcactctctttgaaccttacccgcacttgctccagcgctcgctctccgctcctccattgctcttcctctcttctccttcccatctctcatccccttctccgtttcaggcttgtnattgga

SEQ ID NO: 6509 - DNA, 233 bp, Glycine max
  unsure (1)..(233): unsure at all n locations; Clone ID: 701145894H1
ggcacaagtgagtttgttgatcgagataactagaaacagtgtgatgaaaatgaaggtccttgttttcttcgttgctacaattttggtagcatggcaatgccatgcgtacgatatgttccctctccgaatgaacactggctatggtgcccgtactccggaggtgaaatgcgcaagttggaggttgctgtggaagcacacaacatcttnggctttgagaccattcctgaagagtg

SEQ ID NO: 6510 - DNA, 274 bp, Glycine max
  Clone ID: 701145901H1
gggggcgaggtagccagagagtgatacaatacagagtgcgttgttgctccttcgccacaactccctgccaacatgggtatctccagagattctatgcacaagaggcgtgccactggtggcaagaagaaggcatggaggaagaagagaaagtatgagcttggtcgccagcctgctaacactaagctgtcaagcaacaagacagtcaggaggatccgggttagaggtggaaatgtgaagtggagggcactgagtggatactggaaattactcctgg

SEQ ID NO: 6511 - DNA, 264 bp, Glycine max
  unsure (1)..(264): unsure at all n locations; Clone ID: 701145903H1
gacagcacagcactctttgcaacacaacaaaaaaanacaacacagagagaagcgtcttaataaacgctcttctctgaaaaacctgatttcttctcttcttctcttctctttcgtttcgatcttcgatctctgaaaatgagagagtgcatttcaatccacatcggtcaggccggtattcaggtcggaaacgcctgctgggagctctatgctcgaacacggattcagctgatgggaagatgccagtgtaaactgttggnggggtga

SEQ ID NO: 6512 - DNA, 246 bp, Glycine max
  Clone ID: 701145904H1
agatgttctaaatacgttgccaattgtagtgctggcgattcatccactgaaccctatatcgttggacactacttattacttgctcatgaatctgctgccacattatacaagacaaaatatcaggctcgtcaaaaaggacaaattgggatcactaatccaacacactactttttgccaaaatctcaaagtgctgcagattacaaggcagcaagtagagctctgggctcttctttggttggtattctg

SEQ ID NO: 6513 - DNA, 255 bp, Glycine max
  unsure (1)..(255): unsure at all n locations; Clone ID: 701145905H1
gactgagagcaattgcatcaacaacaaattgaaaggatgtcgatcttcgagtacaacggaagcgccgtggtggctatggtcggcaagaactgcttcgccattgccagcgaccgaaggctcggcgttcagctccaaaccatagccacggatttccaacgcatttccaagattcacgacaagctcttcatcgctctctctggctngccaccgatgctcaaacattgtatcagcgtntgttttccggcacaaatgtat

SEQ ID NO: 6514 - DNA, 255 bp, Glycine max
  unsure (1)..(255): unsure at all n locations; Clone ID: 701145906H1
gggcactcgaagaacaacaacgatctcgcgttcttcacgtacgacgagaagcggaaactaggttatggtacccagaaggagaggttgggaaaggactccattaagcccttcgatgcttgctctctctgcctnnaatccctaatcgaccctatgagctgcnagaagggccatctcttttgcaaagagtgcattctccagtacctcttgtctcagaagaaagacattcaaaggaactgcagcccatgctgctcagca

SEQ ID NO: 6515 - DNA, 257 bp, Glycine max
  unsure (1)..(257): unsure at all n locations; Clone ID: 701145907H1
ggtcgttcaaaatcccttccaatncacagatcaacattttttttttggtgggtagcagtgaggataaaaaatggctatggccacagctgtcgtgtgtcctcagaacatcaccggagccatcgtgagctcacctagcaagaccaagaagagagtggtacacgtgagaggcataaattcatttgggggactgaaggctagcaatggtgttgtctctttggggattcctatgagcactggagtgctttgctaaggttgtg

SEQ ID NO: 6516 - DNA, 250 bp, Glycine max
  unsure (1)..(250): unsure at all n locations; Clone ID: 701145908H1
ttggaggagatgactttaagagtggtcagaccaaaatgaaatctgtgttggtggatttccttgtgggggccggcatcaagccaacatctatagtgagttacaaccatctgggcaacaatgatggcatgaatctctcagcccctcaaaccttncgctctaaggaaatctccaagagcaatgttgttgacgatatggtcaacagcaacgccatcctctatgagcccggtgacatccagaccatgtggttgtc

SEQ ID NO: 6517 - DNA, 254 bp, Glycine max
  Clone ID: 701145909H1
ggggacccaaatatggcctctaaaaactgtaaattccaagcatcatctttttgaaagggaccccattggagagggaagacaagattcatgtagctgccgagtacaaggttctgttgagtgtgtccggttccacattgctaagaaaagggctaaagttaagttggaattgggtgaggcatttcaccaatggaatttacataaggtaggtgaagaaattgggggttcatggacaggaagaagagaagaagttcaaa

SEQ ID NO: 6518 - DNA, 99 bp, Glycine max
  Clone ID: 701145910H1
ataaatgacgaatatgatattaatattatttcagataattcagccattagaaataaaacaataggtcaaataactactcctagatcagataccgatagg

SEQ ID NO: 6519 - DNA, 254 bp, Glycine max
  Clone ID: 701145911H1
aacatgcagcaggtaacgtgtcaaaacattatttcaaattaaataaaatatagatgaaaaactacttggccgttttctattgttgctgaaggaacctggctagcaggttcagtcattgccaacgcgtacaacagaccgtgtttgaaaaattgaaacacgtgcggacccaactttaaatatctccttcgaactttccattttacaatgttaaatttggacaaataaaaaagatagaaaataaattattccacaat

SEQ ID NO: 6520 - DNA, 253 bp, Glycine max
  Clone ID: 701145913H1
gcactgaataaagttctgccatatatggactacgtttttggtaatgagactgaagcaagaacactttctaaagctcaaggctgggagactgataatgttgaggaaatagctttgaagatttctcagttgccaaaggcatcggaaacacataaaaggattacggttatcacccaaggtgcagatcctgtttgcgttgccgaggatggaaaagtgaaatttaccccgtgatacgtacctaaagagaaattagttg

SEQ ID NO: 6521 - DNA, 242 bp, Glycine max
  Clone ID: 701145914H1
ccttgagctcttctttgaaattgcagagaacaaggaggattacaacaagttctatgaggctttctctaagaacttaaagcttggtatccatgaggattcccagaacaagggaaagattgctgaattgctcaggtaccactccaccaagagtggtgatgagctgacaagcctcaaggattatgtgaccaggatgaaggaaggtcagagtgacatctactacacaccggtgaaagcaagaaggc

SEQ ID NO: 6522 - DNA, 254 bp, Glycine max
  Clone ID: 701145915H1
gaggaaaataaatgcaaataccacaaagacttatgctacaagaaccatatttttcttgaaagatgatggaactttgacaccattggccattgggttaagtaagccacatcctcagggtgaagaatatggtcctgttagcgaagtctacgtgcctgccagcgaaggagtggaagcttatatttggttactggcaaaggcttatgttgttgtgaatgatgcatgctaccatcaaacatagccattggctaagcact

SEQ ID NO: 6523 - DNA, 206 bp, Glycine max
  Clone ID: 701145916H1
agacttagattttgtgaatggctgaagtggaagagggacaggtcatcggcgtccacaccgttgatgagtggaagctgcaactccagaatgcaaaagactccaaaaaactgattgtggtggattttactgcttcctggtgtggtccatgccgttttatggccccagttcttgcagagattgcaaagaaactcctgaattgatcttcc

SEQ ID NO: 6524 - DNA, 265 bp, Glycine max
  unsure (1)..(265): unsure at all n locations; Clone ID: 701145917H1
ggtagagacacaatacagagtgagttgttgctccttcgccacaactctctgccaacatgggtatctccagagattctatgcacaagaggcgtgccactggtggcaagaagaaggcctggaggaaaaagagaaagtatgagcttggtcgccancctgctaacactaagctgtcaagcaacaagacagtcaggaggatccgtgttagaggtggaaatgtgaaatggagggcttgagattggatactgaattactcctggggaagtga

SEQ ID NO: 6525 - DNA, 262 bp, Glycine max
  unsure (1)..(262): unsure at all n locations; Clone ID: 701145918H1
gttgtcataggaaacaaaatagatattgatggtggaaacagcagagtggtgtcagaaaagaaggctcgggcttggtgtgcatcaaaaggaaatatnncatattttgagacatctgccaaagaaggtattaatgttgnagaagcattccaatgcatagcaaagaatgccctgaaaagtggagaagaagaagaattatacctgccagacacaattgatgttggaaacagcagtcagccacggcacaggatgtgagtgctgaata

SEQ ID NO: 6526 - DNA, 259 bp, Glycine max
  unsure (1)..(259): unsure at all n locations; Clone ID: 701145919H1
gtattattactagtatttgtatagtttttgctaaatgcaccccacttattcttttttttacagtcgcactcattaattttaattttcagaaaagaagtcaaganggcgcccccctcagtaatatgtcggtccgcccctgtatgtatcccatatatttccacatttacattcatgnataacaatgataatgttaatctgtagctaaaaataatttaaaaacaagcttcaaatcagctacagtaaactccaactgatttcg

SEQ ID NO: 6527 - DNA, 272 bp, Glycine max
  Clone ID: 701145920H1
caaggcagcaagtagagctctggacttcttctttggttggtattctgatccggttttctatggtgactatccggagagtatgaaatcttcagtaggttctaggctcccaaaattcacaaaagctgaatctgaaggtctaaaaaattccatagattttcttggtgtgaattactacaccacttattatgcggaacatgctgaacctgtcagtgccaaccgaaccttctacacagacatactagccagtctcatacggaaaggaatggtctaca

SEQ ID NO: 6528 - DNA, 252 bp, Glycine max
  Clone ID: 701145921H1
ctaggccaagattattcaaattatgcttattgagagaacaaaatgccatcaaatttttgtagttaaacttaagatgaaactcttatgtcataagttcgtattgaatactacttaatgaagttgtctgccaacaaaatatgtcttgtggagatacaattactggcaagtaatacaagttatgagagaataaattaattaatttattagggtagttgctgacagaagtactgcagtttatatttacgtacacaa

SEQ ID NO: 6529 - DNA, 250 bp, Glycine max
  unsure (1)..(250): unsure at all n locations; Clone ID: 701145922H1
agtagcggcattaaaaatgcagatcttcgtgaaaactctgacagggaagactataaccctcgaggtcgagagcagcgacaccatcgacaatgtcaaggccaagattcaagacaaggaaggcattcctccggatcagcagcgtttgattttcgccgnaaagcagcttgaagatggaaggaccctggccgattacaacatccagaaggaatcaacccttcatctcgtcctcagttcgtggtggcatcattga

SEQ ID NO: 6530 - DNA, 250 bp, Glycine max
  Clone ID: 701145923H1
gatagcaatgagtggactggcaacctgtacttctttctttgacaggcattgctggtcctaggtctggttgggtaaaaaagctggggcatagcttctattgctggcttgtctgccctgtctcacttataattgaggacttttgcggcgatatgtcgatcaaaaagtcactccattttgacatgcctatctttgaaaaacgagtggagagcttttcccctatacggagatagcatcctgattagattaggat

SEQ ID NO: 6531 - DNA, 251 bp, Glycine max
  Clone ID: 701145926H1
ggcaactgtttacaacaataataagttaataactcgcgtaggcaaggaacagcataaacgacgctgcgctgaacaacgccggtgtcagacaaacggtgccggttggtggggccgccacgctattacgcctaatcgtatccatcaccctcatcaaaatccctcctttctcttaatttagaaaccctaattcagaagataaaagttactttctccagaattagcgcgtaaggtatggcatcttcagactcatg

SEQ ID NO: 6532 - DNA, 257 bp, Glycine max
  unsure (1)..(257): unsure at all n locations; Clone ID: 701145927H1
gacagatatcttgctagggttttaggaaaagacactgtctcgcgagtnaacacaggttacagcaatggctttctttggtagaattgggaatttattaagacagacagcaagcaggcaggttagttcagaattgcgatcatccccttcgttttttcaggctatacgcagtatgtcatctgctccaagcacaaagctgtttatcggaggtgtttcatattctactgacgagcaaagttgagggaagctttttcaaaata

SEQ ID NO: 6533 - DNA, 257 bp, Glycine max
  unsure (1)..(257): unsure at all n locations; Clone ID: 701145928H1
gaaagatataaaattttgagagangcttggggatggttcttgcggtcatgtgtataaagcccgtgatatgagaacatatgagattgtcgcggtcaaaaggttgaaaagaaagttttgtttctgggaagaatacacaaatttaagagaagttatgatcctccgtaaaatgaatcacccaaatatcataaagttgaaagaggttgttagagaaaataatgaactatttttcatttttgatcatggattgtatctttatc

SEQ ID NO: 6534 - DNA, 260 bp, Glycine max
  unsure (1)..(260): unsure at all n locations; Clone ID: 701145930H1
gggaagctgcagaacgaaggcatttcattagcagcgttaaagaagagagaagaaaaatgcgaaagttcgatccatggcccgttttcttcaagcgcgagtggaaacgnnaactggcccttcctcgttggattcgcagtcaccggagctctaatcaccaaactttcccttggccttaccgaggaagatgctaagaattccaaattcgttaaggcgcacaaaaggtgatttctgaatcgtgctctgcctggctttgcacttta

SEQ ID NO: 6535 - DNA, 219 bp, Glycine max
  unsure (1)..(219): unsure at all n locations; Clone ID: 701145932H1
taccagtactggaattcaaatctgaagaagcctagcttgtttcattgttgtccaacacaaactattgctttgtactttgcatagaaaacaagtatcaanagatttggtggtggaggattctgataatctggtcacaggggaagatggaaagcagagtggtatttgagaatgatttgatctcaggcaacagagctaagatgggttgccagggacggagga

SEQ ID NO: 6536 - DNA, 52 bp, Glycine max
  Clone ID: 701145933H1
aaccggcgataaaaggaacggttaatgtgtgaaggcggcgaaggaagcaggg

SEQ ID NO: 6537 - DNA, 192 bp, Glycine max
  unsure (1)..(192): unsure at all n locations; Clone ID: 701145935H1
gatacacacacagaaagaagaaccaccaagaaagaagcataggggaaaatacatcgatagagagaagttgaagggtgctacgtccttctattgtattaatgattgannattcgtgtgggaattgtcttgttggtgtggtagagataataagagaggatcatagtagtgctggaaattgaagtgtgtaataga

SEQ ID NO: 6538 - DNA, 256 bp, Glycine max
  unsure (1)..(256): unsure at all n locations; Clone ID: 701145936H1
ggaggaggaaacacacaaaccttcttccaagtgttcttcccattattctacattgtcccctctttggttctctattatttattaattgtgcactccttttggttctctaatatttatttccaccgttttcttaaaacaaaagcctcttcaaattcnccaacaactaataaccaaaatggccactgaaaagcttagaagttgtgcaaattccttgagaactctaaaccctactttgcntgattgctatacaatttgg

SEQ ID NO: 6539 - DNA, 193 bp, Glycine max
  Clone ID: 701145937H1
attgatgtgcgttactggcagtgaatctcccgttgttgttgttctttctggaagcatggaacccggattcaagcggggagacatcttgttcttgcacatgagtaaagatcctattcgggcaggggagattgttgtgtttaatgttgatggacgtgagattccaattgttcactgtaattaaggtacatgaaag

SEQ ID NO: 6540 - DNA, 250 bp, Glycine max
  Clone ID: 701145938H1
gatcagcatcttaatatgattcttggtgatgttgaagaaattgttactacagtggaaatcgatgatgagacatacgaagaaattgtgaggactacaaagcggacagttcctttcctgtttgtcaggggagatggggtgatattggtttccccgatattgaggactgcatgactggactgatgaactatgtgatcattttaataacaagtgtcactgttatgaaattgttaacttaagtagtgatcccatt

SEQ ID NO: 6541 - DNA, 140 bp, Glycine max
  Clone ID: 701145939H1
gtctgggagtttgttattattgttatttttcattctacatatgtatttgttgcgagtaatgggtcatgttggttggagggtgcagtccagaaagtcaaaaattataaacgaaggttttggtaccgacttgtttgagttcc

SEQ ID NO: 6542 - DNA, 259 bp, Glycine max
  unsure (1)..(259): unsure at all n locations; Clone ID: 701145940H1
ggggggggagtataaacagaagtaggcaagagaaaaatataaagagacaaaacaaggaaatataatatctattgattatattcagagatttttctataaaaatattagtcgagctcaatcccagattattaagtttatgtactttgagaacatagaagtgtttttaccatgtgcaaccaaaacagaaatttgcattagataatgtaaaacacaacagttcacaattaaaacaaacaaatcacctttttaattngctaat

SEQ ID NO: 6543 - DNA, 56 bp, Glycine max
  Clone ID: 701145941H1
tcccaaattgaggaatacgtaggagcaaagggaaacacccttgttcgaccacaaaa

SEQ ID NO: 6544 - DNA, 251 bp, Glycine max
  Clone ID: 701145942H1
gtaccacaacttttaaaaaccatcttttgatcaaaacttcgcctttcgtcgttaatattgttttatttaataatttaatttattgctcaaagtatttcttttgaattattttttttccaaagaacaaattactttaccaatttttagtttagaaatttcgtgatgttgatgcccacaaagaagcacagcaagttaaagtactttatattaaactgtaaaattaaagccgataccatgaatatataactttg

SEQ ID NO: 6545 - DNA, 251 bp, Glycine max
  Clone ID: 701145943H1
ggcgcattgaacgaaaattagggtttgtagtgtagcaggaagaagcagcaatggcgccgaagataacacgtaaggttagcagaaaccctgaattgataaggggaatcggaaagtactcgaggtcgcagatgtaccacaagaggggcatttgggctatcaaggccaaaaacggtggcgttttacctcgccacgaccctaaacccaagcctgaagctcctgctgaaaaaccaccaaattttaccctgctgatg

SEQ ID NO: 6546 - DNA, 250 bp, Glycine max
  Clone ID: 701145944H1
ggttttatgggaaagacaatagaaagttggctacttcccttgtgaaaattgttttagcaaatagtcaggcacaatattagggatttattggtttagaatttgatgaaagcagcattttgcaacattatgtggcaattacaactgattctgggtggtattatgcagaaggagaaattgggtgctatgttggacgaagacccggcccttatggaaaggagaaatcaaatagtaaaaggcttgaattatacaa

SEQ ID NO: 6547 - DNA, 249 bp, Glycine max
  Clone ID: 701145945H1
ggaagagagatggatccagacgcgttggcaaaggcattcgtggagcactactacagcaccttcgacaccaaccggaacggtttagctaatctgtatcaggagggttccatgctgaccttcgaagggcagaagatccagggcgcttccagcatcgtcgctaagctcacttccctccctttccagcagtgccaccactccatctccaccgtcgatgccagccctccggtgtacgctggcatgcttgtcttt

SEQ ID NO: 6548 - DNA, 62 bp, Glycine max
  unsure (1)..(62): unsure at all n locations; Clone ID: 701145946H1
tagtatatttgtcangtcattatttttgtaataaagactaatgacaacctaaacaaacataa

SEQ ID NO: 6549 - DNA, 265 bp, Glycine max
  Clone ID: 701145947H1
ggaacacaaacagcgcgagacagaggcacagagagaaaatggcttcggggtcagggatctgtgccaagagggtaattgtggacgcacgacaccacatgctggggaggctggcatcgatcgtggcgaaagaacttctgaatgggcagaaggtggtggtggtacactgcgaggagatttgcatctccggtgggctcgtcaggcagaagatgaagtacttgcgtttcctccgcaagcgcatgaacactgccctctcacggccccatcc

SEQ ID NO: 6550 - DNA, 189 bp, Glycine max
  Clone ID: 701145949H1
atctgtgacgagcatcatggcctcgagagcagtgctattgttggctatgtgtgtgcttccggccatggttgtggccattcgcccagcaaagaaccctttttgcgtgaagggtcgcgtctactgtgacccttgccgtgctggttttgagacctcagcaaccacctacatccggtgctgagattatgttgc

SEQ ID NO: 6551 - DNA, 256 bp, Glycine max
  Clone ID: 701145951H1
gggggaggaggtgtggtggtagttttggacttcgatcgaacaataatcgacgatgacagtgacagatggattgtggctgaactgggtctgactgagctattcaaggagcttcgtcacagcatgccttggatctctctcatggacaggatcatggcccaactccactccaacggcgtcaccgtcgaccacattgctgactgcctcaaaaggctccccttccctcctcccatcgttcagccatcaaatccgcccacgc

SEQ ID NO: 6552 - DNA, 260 bp, Glycine max
  Clone ID: 701145952H1
gagaactgataatgttataaagaaacaataattatgtatcaacaagaattacccattaaaacaaagaaaagaaaatttacttggttgagttggtctcaatgattatattagcattgaaatttcgcagcgaccaaatctgttatgaaccaattatatctctaaaagatttgattttttttggagaatcgattgtcttgggtgttatatatactccaacggtagcattaagaaacaaccaccttctttcctcgatcactttc

SEQ ID NO: 6553 - DNA, 251 bp, Glycine max
  unsure (1)..(251): unsure at all n locations; Clone ID: 701145953H1
acgccactctggatatggtaagcgtaagggtacaagagaggctaggctccccaccaaaatcctttggatgaggaggatgcgtgtcctcagacgattgcttcgcaagtacagggaagcaaagaagatncnacaagcatatgtaccatgatatgtacatgaaggtaaagggtaatgtcttcaagaacaagagagtcttgatggagagcatacacaagtcaaagctgagaaggaagagagaagaccttacctga

SEQ ID NO: 6554 - DNA, 213 bp, Glycine max
  unsure (1)..(213): unsure at all n locations; Clone ID: 701145954H1
ggtcaggggaattggcaaatattcgaggtcgcagatgtaccacaagangggcatctgggccatcaaggccaaaaacggcggtgttttgcccctccacgatcccaagcccaaacccgaggccccggcccagaagccgcccaagttctacccggccgatgacgtgaagaagcccctcgtcaacaagcacaagccaagcccgcnanactcagggct

SEQ ID NO: 6555 - DNA, 251 bp, Glycine max
  Clone ID: 701145955H1
ggaatgggaggaagaataattgtgaggcgagggtaaggtcgcgttgtgttgcgtcgtgtcgtgcgctgttcctctgtttctcgtttttgtgttcagaccgaaccctagctccgcatcgcaaccatgtcgaccaagcaaggtggaaaagctaagcctttgaagaaacccaagtctgataagaaggattacgacgagattgatgtggctaacattcagaagaaaaaggaagaggaaggcgctaaaggagttga

SEQ ID NO: 6556 - DNA, 251 bp, Glycine max
  Clone ID: 701145956H1
ggagagagcgtagggtagcagagaaagagaaaatgaagaagtcttcgggaagcgcactgacaagaagagggtgcgacggtcctccgccctagatcccacctccgacgcccctccaaggaaacaagctgtcaagaaagatgtgttccgggtgtttgctgagaaggttagagaccataaagaattggtttcaagatgggctgttctacaggagacgcgtgttgagtattttaagggaaggatttcgtgagctt

SEQ ID NO: 6557 - DNA, 253 bp, Glycine max
  Clone ID: 701145957H1
gaaactaaagataaacaaaatttagaaacaaaaacatgttggtgaaggtgtacggtccaacctatggagcccccaagagggtgctggtgtgtctgattgagaaggaaattgagtttgaaacagtacatattgatctcttcaagggagagaataaggaacctgagttcctaaagctgcagccatttggatcacttcctgttattcaagatggtgattatactctctatgaatccggcaataatcagatactttg

SEQ ID NO: 6558 - DNA, 257 bp, Glycine max
  Clone ID: 701145959H1
ggcgtacgcagcttcatccctaacgcgtgcatagcagagtcagagacagagacgcagccatggggcggagacctgcgaggtgttataggcaaattaagaacaagccataccccaagtcacgtttctgccgtggtgttcctgatcccaagatcaggatttatgatgttggtatgaagaagaagggtgttgatgagtttcctttctgtgtccatctggttagttgggagaaggaaaatgttcaagtgaggccctggaag

SEQ ID NO: 6559 - DNA, 239 bp, Glycine max
  Clone ID: 701145960H1
ggagcaggaaccgcaacaggatcaggatcaccaccaggtagcagttatgttcctggtggtgatgacacttttgtcccaaaccctggttatgaggttcccattcccggcagtggtggaagtgttccagcaccagctgcaccatgagttaactcatgcatgattaatgtgatgcatggtagttaataaggtggttatgcttaagtttgtcttttcttctgtttctagccataataataact

SEQ ID NO: 6560 - DNA, 237 bp, Glycine max
  unsure (1)..(237): unsure at all n locations; Clone ID: 701145961H1
ggacatttgttttggcctatactcaaaagctgaggtcggagttctctgtttcttttccatctcacaagaaatgggaaggtgaaaaaaaaggttcctatcattaacttgacacataaagatatcacatttcgggtttgccaaactatagatagaaacgccaaaggagggcgttttagctcaatagcttattacactnntngtatttgattcattgtgtagcaaaaaaagcaacagaga

SEQ ID NO: 6561 - DNA, 250 bp, Glycine max
  Clone ID: 701145963H1
agggttcctgatgaagaggcatctgttaaaaccattgtattgatggttgtgggggcagggcgtgggcctcttgtgcgggcttcattacaggctgctgaagaaactgggcggaagctcaaagtttatgctgttgaaaagaatccgaatgctgttgttaccctacatgcattagtcaagttagaaggatgggagtatactgtgaccatagtctcaagtgacatgcgtcattgatgcccctgaaaaagctgac

SEQ ID NO: 6562 - DNA, 251 bp, Glycine max
  unsure (1)..(251): unsure at all n locations; Clone ID: 701145964H1
gcagcatcgtagagaaataagggaaaaatggtgtcgctgaaactgcagaagcgcctctccgcaagcgtgctcaagtgcggcagaggaaaggtttggctgaccccaatgaagtcaacgaaatctccatggccaattctcggcaaaacatcaggaanttggttaaggatgggtttatcatcaggaagccaaccaagattcactcccgtcacgtgctcgtaggatgaaggagcaaagaggaagggccgccactc

SEQ ID NO: 6563 - DNA, 204 bp, Glycine max
  Clone ID: 701145965H1
acatctcataattgttgtgggccaataaaacccagcagtatatcctcaagtactaagagatagagcttcggccatagcttgtaagaaacgggctacttttactgaattatgtttttttttctttttctaaccaccgaattatgttatgtagccaatggaaataaagcagcagaacccttttaattactgcgtcactgaattagc

SEQ ID NO: 6564 - DNA, 261 bp, Glycine max
  unsure (1)..(261): unsure at all n locations; Clone ID: 701145966H1
gtatgacaaaaatacatgggatttgatgaaaaaaaaaggcccactagttcaagggtggtagttgtaaatggattttcaaaaagaaagaaggtataaaaggtgtgaacatgacagatttaaagcgagaattgtttcccgaggcttactcaaaaggagggaattgacttcaatgaggtattctcacttattgtcaaactaaatttgatgttcaacttgaagaaatggatgtaaatacaanatcttgtatggagagttagatga

SEQ ID NO: 6565 - DNA, 260 bp, Glycine max
  Clone ID: 701145967H1
gagaagaaaagatgcaatttgtcatcaattatgcttgagatggatcgaatactaaggcctggtggacgggcatacatccgtgatactcttgccatcatggatgagcttatggagattggcaaggctatgggctggcaaatgtcactgcaagatacagctgagggtcctcgtgcaagttatagggtcttggtttgtgataagcgccttcgttaatgcaaactcgctcacttgttttttaccttcaatggggaaatcaacag

SEQ ID NO: 6566 - DNA, 251 bp, Glycine max
  unsure (1)..(251): unsure at all n locations; Clone ID: 701145968H1
ggcagcgcttgagaccaagccccactcaaccaccacaccactctctctgctcttcttctacctttcaagtttttaaagtattaagatggcagagacattcctatttacctcagagtcagtgaacgagggacaccctgacaagctctgcgaccaaatctccgatgctgtcctcgacgcttgccttgaacaggacccagacagnagggttgcctgngaaaatgcnccaggncaatggganaggtnttnggaga

SEQ ID NO: 6567 - DNA, 261 bp, Glycine max
  Clone ID: 701145969H1
gactttgagttgcgttacatcacaacaacaacatggctgccactgctgctgcaggcatagcttccttgttttcttcttctattaacagtgtcaaatgtcttcgttcctccaagaactgctccataatagaccctctcataacaacagtgccctcaaaccgtggcatgtttgggtcacacttagtggaacctttgtccattaattcgcacaagttgtggggacctagaatttctgctgctgtgcacaagaagaggctgttgt

SEQ ID NO: 6568 - DNA, 247 bp, Glycine max
  unsure (1)..(247): unsure at all n locations; Clone ID: 701145970H1
atcagtggtgccccccaggataacaacataatgctgtggaatgctgtcatatttggtcctgatgatactccatgggatggaggcacgttcaagttgacactccaatttactgaggactatccaaataaaccaccgactgtacgatttgtgtntcgcatgtttcatccaaatatttatgctgatggaagtatttgtttggatatattacaaaatcagtggagtcctattatgatgtggctgctatact

SEQ ID NO: 6569 - DNA, 248 bp, Glycine max
  Clone ID: 701145971H1
gtgttaagattcatgcatgcttcagacctaaaagagaggataggattgggagataaaatagaactgaaaataggatatgtatccatagtgagaaaaggtgtgtgcaaagtgattgtttcaatcttctatataggctaacaaactagcttagcttctacccatcttttaacaaatttctaatcaattagatctctaataggtcccccaaacgggaaggggaacaatacaggtataggaaatcaaggtga

SEQ ID NO: 6570 - DNA, 251 bp, Glycine max
  unsure (1)..(251): unsure at all n locations; Clone ID: 701145973H1
gatcgaagcaaaaaatgaaaacccaaagtgcttctctcctctgtctttttctctctcttgctatccttttggctagtngcactgctgcaagtgcaactccaagaagcgcagtgccaagccaccatgtttcaacattcaacagaagcctttttccttccacttttctctttgganttggttcttctgcttaccaggcagaaggagcagcaagtgtagatgggagaggaccagcatatgggacacctacacta

SEQ ID NO: 6571 - DNA, 249 bp, Glycine max
  Clone ID: 701145974H1
gaccacattccaaaacacaaacacatacattgtagtatcacttttgtctcggaatttgttcttttgagttatggcaagcttaaaggttgcatgtgtggttttgatgtgcatggctgtgatgagtgcaccaatgatggtgcaagccgtgtcatgcaatgatgtttctgtgaacctagcaccgtgcctatcttacctgatgcagggtggagatgttccagaatcgtgctgagcggagtgaggaacattctg

SEQ ID NO: 6572 - DNA, 246 bp, Glycine max
  unsure (1)..(246): unsure at all n locations; Clone ID: 701145975H1
ggaggtagccagagagtgatacaatacagagtgcgttgttgctccttcgccacaactccctgccaacatgggtatctccagagattctatgcacaagaggcgtgccactggtggcaagaagaaggcatggaggaagaagagaaagtatgagcttggtcnnngcctgctaacactaagctgtcaagcaacaagacagtcaggaggatccgggttagaggtggaatgtagtggagggcactgagattg

SEQ ID NO: 6573 - DNA, 249 bp, Glycine max
  unsure (1)..(249): unsure at all n locations; Clone ID: 701145976H1
gatatagttgaagggtgagtgtcaccttggaaatccatccatggctcccactcttacatccaattcatcttttataactagcactcctcattcaagggtgaccctccggaatccaaggctgagagtctttgccaagaagtctggatcattcccatcttttgggctaggcaagcccaaagatgattcttcttcttcaactgaagaaaaagatggctcatccaattccanccctttcgtttggacttcgga

SEQ ID NO: 6574 - DNA, 230 bp, Glycine max
  Clone ID: 701145977H1
agcgtggagacatacaagatctacatcttcaaggttctgaagcaggttcaccctgacattggtatctcaagcaaggccatgggaatcatgaacagcttcatcaacgacatcttcgagaagcttgcccaggaatcttctagacttgcccgctacaacaagaagcccaccatcactccaagggaaattcagaccgcggtcaggcttgtgctgcggtgattggccaagcacgc

SEQ ID NO: 6575 - DNA, 251 bp, Glycine max
  unsure (1)..(251): unsure at all n locations; Clone ID: 701145978H1
ggaaccggggggtaagaaattaataaagttaaaggttcaggaacgaacgaaaagaaaatccaaagatggcacattcctcgatcgtcgttactctgagccagaacttgtttaaaaggaacctcacctgtgtaaaaattcacgnnnnnnnnnnnnnnnnnnnnntcggatctcgttctctttctcttccttccttctccttctctcagagaacaacacctctctctctcacngctccttctcctctcacaccg

SEQ ID NO: 6576 - DNA, 188 bp, Glycine max
  unsure (1)..(188): unsure at all n locations; Clone ID: 701145979H1
gaccgtcgcatatttctgtgccaacaaaagaagatggcctcacaggtttgcaaagctgcttccagagccgcgaggtcccttctctccgcttccagagcctcccatggacgtgcggttggggctgctacggctgtttcattgagctgcaaagtgcctnttttctacggaaagaacggttctggaatggt

SEQ ID NO: 6577 - DNA, 262 bp, Glycine max
  unsure (1)..(262): unsure at all n locations; Clone ID: 701145980H1
ggcagttcaaagcgaagaaagattcgagacgaagaaagaaagcgttgtgaagaatggcggaagagggacaagtgatcggtgtccacagcgtagaggnntggaaggaacatctcaagaagggagaagnctccaagaaattgattgtggtggattttactgcttcttggtgcggtccatgccgtttcattgccccaattcttgcagaatttgctaaaaagttgccgaatgtcaccttcctcaaggtgtgtggatgattggagac

SEQ ID NO: 6578 - DNA, 259 bp, Glycine max
  unsure (1)..(259): unsure at all n locations; Clone ID: 701145981H1
gaatctaaagataaataaaattcaggaaaaaaaaaaaaacatggtggtgaaggtgtatggtccaacctatggntcccccaagagggncctggtgtgtctgattgagaaggaaattgagtttgaaacagtgcatgttgatctcttcaagggagagantanggancctganttccttaagctgcagcnatttggatccctncctgtnattcaagacggngattatacncctangatcnnngcaataancnggtacttggcg

SEQ ID NO: 6579 - DNA, 252 bp, Glycine max
  unsure (1)..(252): unsure at all n locations; Clone ID: 701145982H1
gggttatactcgacagtaaaacaattgttgcagaatatgaaagaggaagaggtgaatcgatgccagattcaggaatggtatctaaagttcanntctgtatccatcaagaccttaattcgtcaacttccggaatcatttattcagtaccttttagatgactcggggcccttcttgttgcatgtttctgtcttaaatgaagatgcattacccatagattcataacccagatgagtaatgatttcaggtgtnaga

SEQ ID NO: 6580 - DNA, 254 bp, Glycine max
  unsure (1)..(254): unsure at all n locations; Clone ID: 701145983H1
caacgaatccaagaaactcattgttgtggattttactgcttcttggtgtggaccatgccgtttcattgcaccattcttggctgagctggctaagaagttcacaagtgtcatattcctaaaggtggatgtggacgaattaaagagtgtttctcaagattgggctattgaggctatgcccacttttgtgtttgtgaaagagggaacgcttctggacaaagtggtgggagcaaanagatgagctgcagcagaaaata

SEQ ID NO: 6581 - DNA, 251 bp, Glycine max
  unsure (1)..(251): unsure at all n locations; Clone ID: 701145984H1
ttctgctggaaggaagacaaaattgaagactcctgaggaagcaatggaactgattgagaacatggcagtcattgaccatgctatcttgcatgatagaacacacattcccacaaagagaagtttattggagctcacatcataggatgctttgctggtgtagaataagctattagctaaacaacttgaatcattcacagagattttaagcaaattgccaacacagttgccacnctcaacctattcattcagcg

SEQ ID NO: 6582 - DNA, 254 bp, Glycine max
  Clone ID: 701145986H1
acccctacagttttcttgtttgttgccggagcagttgcatatggagtgtttaagtatttgcagaatgaaaaaatcacagagcagaaataatgtcacaggtataatataaaaaaacctgatgctctacgtacaagtggcagtgactgcaatcatactctggcttcagtttcattctattcccccttgatatcggaatgaaagatgacaagaaagctatgtgaactctggaaaaccctttaagaaccatttctatt

SEQ ID NO: 6583 - DNA, 245 bp, Glycine max
  unsure (1)..(245): unsure at all n locations; Clone ID: 701145987H1
gattgggaaangaaatanaaaatgatagctcttacntttactgggcntacaagaacaacattccagttttctgtcngggcttaactgatggctcattgggggacatgctgtacttccattccttccgcaatcctggtctgattgtggacatagtgcaagatataagggcaatgaacggngaagcagtacatgcaagtcccaggaagaccggaatgntaattttagagtggccttccaaaacatca

SEQ ID NO: 6584 - DNA, 240 bp, Glycine max
  Clone ID: 701145988H1
ggagtgagcgtcaacaatggcttcttcgtcttcagcgtcgggttcgggttcagcttcggcggtgacggagcgaagaggaataccaggggctcagttcgtggaggatgtccaaacttaccttactcaatcgggtctcgatgttggttcagccctcgcttttctccaagaaagacttcagcaatacaaggtagtagaaatgaagcttcttgctcagcaaaggatcttcaggcaaagatacca

SEQ ID NO: 6585 - DNA, 249 bp, Glycine max
  unsure (1)..(249): unsure at all n locations; Clone ID: 701145989H1
ggcatcaattcaaaatatatcatcaattataagcatgggtttgtggaacacaacgaatgcagtgtcttgccgctttcacaagtttggtgatgaccaaaagaatctggtcttccaaggtgatgccacgtcttcttccaggggcatagaactcacaaagttagacggtggaggaaaaccagtgggtggcagtgtggggagagtgttatactcttctccagtgcacctttngaaagctctacagtggtcgca

SEQ ID NO: 6586 - DNA, 251 bp, Glycine max
  unsure (1)..(251): unsure at all n locations; Clone ID: 701145990H1
ggatgttgtaggtgtgtgtgttgttgcacactctccacacttacacagagagaaaagagagagaaagaaaaggatcaaatagttaaaacctttggttctttccctccatagttccatttttccattcaacaacacaacacctcagacagacaccatgnaggcaggttacaatcctcgtaccgtcgaagaggtctttagggatttcaagggtcgcagagctgctttgattaaccctcaccaccgatgttgaa

SEQ ID NO: 6587 - DNA, 249 bp, Glycine max
  unsure (1)..(249): unsure at all n locations; Clone ID: 701145991H1
ggactcacagtagagagagtgttggtacgaaaaatgtcgaagctgatcttcgtgttcctttcgcttattcctcttctctgcacctccttctccccagagagaccctcagatcgacgcgtcctcgttttgctcgatgacttcgccatcaaatcctctcattctctcttcttcaactccctcaaatctcgcggcttcgatctccaattccacctcgcagacgaccnacaatgcgctccagagatacggcca

SEQ ID NO: 6588 - DNA, 272 bp, Glycine max
  Clone ID: 701145992H1
tccacaacaaaaaactacttctcaattcagttaacacaccaaccccacatccaaagcttcagttcaatatggcaaccttgtcaagttttgctcctttggccattctaagtttagttctagtaattagtgccattgtctttgaggctgaagctaggccaaggacattctttgtatttggagattcacttgttgataatggaaacaacaattacttggctaccacggcacgtgccgatgctcccccttatgggagattaccctccaagtcatag

SEQ ID NO: 6589 - DNA, 226 bp, Glycine max
  unsure (1)..(226): unsure at all n locations; Clone ID: 701145993H1
gagccttatctttataagaatcatagggtaaaatgaaatgctgtgaaatttatactgactttagatgctcttcaatcattgttatttctatcagcagcagcatctgttagtgggttgaaaacgttagagaggaactttgcaacaagcatggagacagcctcagactatggagcattcacagagaaattcactttaccaccaaattngcaccagctcttcctctcaa

SEQ ID NO: 6590 - DNA, 259 bp, Glycine max
  unsure (1)..(259): unsure at all n locations; Clone ID: 701145994H1
gggtgagtggcgacataaataagcatttgcctacgttgttcgtgttggatgcttcccacctctcattgattggattaagcgccaaagtttccgaatttgcataatngtattgctagttgggcttacattgcttttgggtctcttcctcgctgttcttctattcaacccacgacaccgcaaatctgggcataaggcaaaagctccaagccagtttaaacgttgataaggcatcaaaatccacagtaaaacagaagttcgt

SEQ ID NO: 6591 - DNA, 252 bp, Glycine max
  unsure (1)..(252): unsure at all n locations; Clone ID: 701145995H1
gggatttcatttcgcaatgggattctgggggatcgaagtgaaacctggcaggccatgtccttatcacgctgacaatgtgcgaggnangcttcatgttactcaggctactctaggcattggctcatcatcggagaaaagcattcttcagtgctcttctggacacaaaagtccagttttcttgtgttcattgctaccagataaggttgagtcatgccctttgaacctgagtttgngcagatgacttagtggcat

SEQ ID NO: 6592 - DNA, 250 bp, Glycine max
  unsure (1)..(250): unsure at all n locations; Clone ID: 701145996H1
atcgatgggttgtgttgtgctgcagctgcagcgatgacgacggggtcttgacatttccgaaacaaaacacataagaaaagctttaaaataaaattgtagtatactctactaataaagcccgaaaagtgagtacaactgtaataataacatcacacgcacatgctaatgctatatgcctggactcaaggcatgaggagattatgtgtctttgtctatatgtgaacacggcntttctagaaactgtaaaaca

SEQ ID NO: 6593 - DNA, 252 bp, Glycine max
  unsure (1)..(252): unsure at all n locations; Clone ID: 701146001H1
gggagaagagggtagcaatattacaggaatggcttgaccgcgttgactcggagaaaagtggaagcataacagcggtgcagctaaagacagctcttgctgtgggcaacctggaatttccgctctcagtggttcagcaaatgatcaggatgtacgatttcgaccggaatggtactatgagctttcaagaatttgtttcatcaacaattccttcttaaggttccacatgcntttctgatcaggaggggtcgtggt

SEQ ID NO: 6594 - DNA, 252 bp, Glycine max
  Clone ID: 701146003H1
ggagagaagttattagggtttttgagtgcggcggtccaaacactcttctctgcagcttttgcctacaactcacttcaccatggctgaacaaaccgagaaagcttttctgaagcaaccaaaagtgtttctcagcacaaagaagactgggaagggaaagagacctggaaaaggtgggaaccgcttttggaagtccattgggcttggatttaagactcccagggaagccatcgaaggaacctgttgacaagaagt

SEQ ID NO: 6595 - DNA, 248 bp, Glycine max
  unsure (1)..(248): unsure at all n locations; Clone ID: 701146004H1
gggtgatcactgatcagtggtttggtgttgttgatagagaaaatgcattccagccctttgcttcttgaggaacccattaggatggcatccatccttgagccatccaagcctactttttttccggctatgacgaaaattgttggcacacttggtccaaagtcacgatcagttgatataatttcccatgccttgatgcaggaatgtctgtggcaaggtttgacttttcaggggtttcnagaataccatca

SEQ ID NO: 6596 - DNA, 239 bp, Glycine max
  unsure (1)..(239): unsure at all n locations; Clone ID: 701146005H1
gggaagaaggaagcatnataaccggccaaagcatctactctcttccatttatcccccataaataaaactaggtgaaaaaaatatattctgtgcttctcatgatgatagtgtagctgaagctgcttctgctgcagcattggtgatttggacnccaaaaaaagtttcaaacttttcagttctctgagcttctggtttatcaattttgaaggagttcatactttacccattagttggttccc

SEQ ID NO: 6597 - DNA, 247 bp, Glycine max
  unsure (1)..(247): unsure at all n locations; Clone ID: 701146006H1
gaagaagaagaaggagcatggccatgagcatggccatgaacagcagctgcagcagtgacagtgattaaactgctgcatcacctatatatttaaaaggtttatgggaccatagtagcgagggctgtganttaannnnnnnnnnnnnnnnnnnnnnnnnnnnnnnnnnnnnnnnnnnnnctttctcccnntcgtgagntctatntatgagtgagaaacacaagagtgaganattgcnagtntctggncg

SEQ ID NO: 6598 - DNA, 247 bp, Glycine max
  unsure (1)..(247): unsure at all n locations; Clone ID: 701146009H1
gaagaagctcaaaagcaagaagttgaaccagcagagaaagttgccgaagaagctgctaatactgcggagactgaaaaatccctactgactgaattagaaaaagaaaagantgaggagaaaacagatactgcgactctagaggctaatgggggaggcgagaaagagaatcctaatgctgcacaaatgtatatggttatttggagctgtgcacagtgaaacacttcaactttgtcgacgttgtgtaagc

SEQ ID NO: 6599 - DNA, 221 bp, Glycine max
  Clone ID: 701146010H1
gaaagtgaaggtgaagaaatgcttcttcaaacgaggcaatttggcacagcgtgtccatgggtcagactcacacccgcaagcaaaagaaatagctcagtctcattgagaaggagcaattgtggcccaaaatgttcggtgtcccaattggaattgaagagtgagagtgagagcaaaacgaagccgtatccagcagaggcatcgaggaccaatggagttggcta

SEQ ID NO: 6600 - DNA, 112 bp, Glycine max
  Clone ID: 701146012H1
ggatacacgaggactaaattttgtgttaattctctacagtttgtatgctgaaaaatattagtggatgcatttttgaattacaagttttattaagttttgaattactggtttc

SEQ ID NO: 6601 - DNA, 243 bp, Glycine max
  Clone ID: 701146013H1
ggcgttacaagttgcgttccgagcttgccaacgcaaacgtatcgagccagcctcacaagctagggttcttcaccgcgctccacccttcttccctctcccttcgtcccctccaattggagtgtgtttgtgacttcatatgctggtagttgacattttgaaattgtaactgtggtgggagcaataatatattttgacatcatcacggagatacagacttgtggcaggccgattactccttgctag

SEQ ID NO: 6602 - DNA, 242 bp, Glycine max
  unsure (1)..(242): unsure at all n locations; Clone ID: 701146014H1
gattgcgcggaattcagatctagcgtttgcactttgcacaatgcgagttctataggatcgtttggttataccgattagtgttactaaaacaacgtttttgtgntatcgagaaaaaagaaaaataaaaagtgatgtcgaggagaccggggaatccttatngnaggttcggtgncagtggcggtggactgttctcgaaatctaggtcgccaccggttttgtctattgcgctctagttgtgggag

SEQ ID NO: 6603 - DNA, 242 bp, Glycine max
  unsure (1)..(242): unsure at all n locations; Clone ID: 701146015H1
gtccctaatcaagagatcctagcaattggtcaatncaaataccacagcagcaaaatgggtttcccataatgtgatagcacattaccctgccactaatataacaactatttgtgttggttctgaggtcttaactaccctcccctatgcagcgaaagtgcttgtcagtgcccttaagttccttcactcagcacttgttgcttccaatcttgatcaccagatcaaagtctcaccccctttcctcc

SEQ ID NO: 6604 - DNA, 247 bp, Glycine max
  unsure (1)..(247): unsure at all n locations; Clone ID: 701146016H1
gcagtggcaangtgngagtcagagatggtagctattngctttggagcccctccttctccacttccgtttcatcttcgcctggcttcctctccttctcctttggccttcccaataatncacaaattccaaaacgcaggtaggtcagtgataacaatctgttcaaagaaaaatgcaaaatcaagggtggtcactctctgctctgcacctgtgcaagagcaggaggttagtgatattntntgagngagag

SEQ ID NO: 6605 - DNA, 252 bp, Glycine max
  unsure (1)..(252): unsure at all n locations; Clone ID: 701146017H1
gggagcatcacaagagtgtctcanttgcagaacctcacatttgggtgaacaagaggttgaccataaggncttcaaattctgtactgaactgaattgangacagaaaaatcaagatggttgaggcagttgtgtcctttgcagttgaaaggcttcacgacctacttacggaagaggccagattgttaattggggtgagtggcaaagtcaaaaggatgccaaatgcnctatagaggctgcaagttcctaagagat

SEQ ID NO: 6606 - DNA, 246 bp, Glycine max
  unsure (1)..(246): unsure at all n locations; Clone ID: 701146018H1
ggacgcaccattgacaattcgcagtttgttacctcactttgttttttttctctgcagtaatagaaaaaaaagacagannnnnnnnnnnnnnnnnnnnnnnnnnnnnnnnnnnnnnngttgcagctagaaggctctcttctctctcctcctcctctccgtggcggcccaaccacgccgcttccgcttatgtctctcgaaacgcatcgttgatgacgcagatccgatccttctcccanctttttcctt

SEQ ID NO: 6607 - DNA, 255 bp, Glycine max
  Clone ID: 701146019H1
gaagattgggatggtggaaatggaatcggcagctgaaaaccctaattacccggcggtggactacaagcgaccttccatcttgtcatttcctcggaggcccgccctcagagttacatccgagttcgatagtgaaagcgcagtcttcttccataagatttcctgcaagttgttggacagccttgccaagttcaagttttcgttcaaccacagcggtaagggcggcgacatctccgaacctcattcattgtctccagc

SEQ ID NO: 6608 - DNA, 213 bp, Glycine max
  unsure (1)..(213): unsure at all n locations; Clone ID: 701146022H1
gancnaagacgcgtttgttgatcgagataactagaanncagtgtgatgaaaatgaaggtccttgttttcttcgttgctacaattttggtagcatggcaatgccatgcgtacgatatgttccctctccgaatgaacactggctatggtgcccgtactccggagtgaatgcgcaattggaggcttgctgtggaagcacacaacncntggcttgag

SEQ ID NO: 6609 - DNA, 245 bp, Glycine max
  unsure (1)..(245): unsure at all n locations; Clone ID: 701146023H1
ggggcttatccaagtaacctagcccttaccttaccctaattttctttcttcaaatctcgcgcgctcctcacttcgagtgttcgactttcctcctccgaccacctcgccgggaattcccgcggcggcgctccttgtctccgcagcttccctctctactgaagccctagagngagaaaatcataaaccctaattcccntgtcaagctcgtagcacgtcacagccatgtatggtgtcngaatatcagc

SEQ ID NO: 6610 - DNA, 248 bp, Glycine max
  unsure (1)..(248): unsure at all n locations; Clone ID: 701146024H1
gagagaaagagagagaaagatgtcgaagcgtggtcgtggtggttcggcggggaacaagttccgcatgtcgctgggtcttccagtggcggcgacggtgaactgcgccgacaacacgggggcgaagaacctctacatcattccggtgaaagggatcaaaggcntttgaaccgtcttccctcggcctgcgttggcgacatggtgatgnccaccgtgaagangggaaaacccgatctgagaagaaggtcttg

SEQ ID NO: 6611 - DNA, 245 bp, Glycine max
  unsure (1)..(245): unsure at all n locations; Clone ID: 701146025H1
ttaccattgtaagcntgtaattattctgggcaaattatgtcttcctttgggccgaacacaatttgcatgaataattccatgcaacatccatatncattcnntcaaatcaacttacacaacagaggttattttggcaacatgttgtttcaatcaatttaaccaaaaagtncaagacaatttaatataatantgagatcttaaaattaccnnnnnttcacnnnncatttagttaataaaaatatata

SEQ ID NO: 6612 - DNA, 239 bp, Glycine max
  unsure (1)..(239): unsure at all n locations; Clone ID: 701146026H1
gacagctattcctcttaagcttgctactgagtttccacactgcataccttaggtcttccgaattcgaagttaatttgcaagatggctaaggaaaaggctcannncaacattgtggtggttggtcatgtggaccctgaggaggcaaccaccattaacgagctgaannagcctgttgtggagaaagaagctccagggcatgccatatgagggcatgcacgtacggctggggggaaccagaa

SEQ ID NO: 6613 - DNA, 249 bp, Glycine max
  unsure (1)..(249): unsure at all n locations; Clone ID: 701146027H1
ggagaagaagaatctgattctgaagggcatcatgataacagcgatgctggcagtaatcctagagaaatggagaaatcacatctagagccatcaaaaagtccccatgatgatgacaacaaaacaatccctgagatttctgatgacgtgcctctgagtaaatggaagtncaggacggggaagaaaagctcagggaaagaacaatgagcagtttagctattgttatttgtctgtcaagangcagcggggttg

SEQ ID NO: 6614 - DNA, 238 bp, Glycine max
  unsure (1)..(238): unsure at all n locations; Clone ID: 701146028H1
gagcgcccaccggaattgaatagaaatagaatcgtcgattttctctttctctgactctagggtttcattattttcttctgtagatccatctatctagcttcggagctgcaaatggacgtcgcagtcactgccttccggtcaccgctgatcatcctccgaagaccggtcaacgagtctgcctcagctcggttcggttccacttttgggttttccagaaagcaacggtngttcagtatgt

SEQ ID NO: 6615 - DNA, 239 bp, Glycine max
  Clone ID: 701146029H1
ggcgaaagaacttgatgaaactagcccaaagaatgataaaaacgtttagccttaatatgagtacctctggtggtcaatcatggacagccatatcagattcccctgaagacactgttagaatcacaactaggaaaatcacagagcctggccaacctaatggcgtgattctaagtgcagtttcaaccacttggttgccctattctcacaccaaggtctttgatctcctcaggatgaacgcc

SEQ ID NO: 6616 - DNA, 238 bp, Glycine max
  Clone ID: 701146030H1
ggcacaagtgagtttgttgatcgagataactagaaacagtgtgatgaaaatgaaggtccttgttttcttcgttgctacaattttggtagcatggcaatgccatgcgtacgatatgttccctctccgaatgaacactggctatggtgcccgtactccggaggtgaaatgcgcaagttggaggcttgctgtggaagcacacaacatctttggctttgagaccattctgagagtgcgttga

SEQ ID NO: 6617 - DNA, 252 bp, Glycine max
  unsure (1)..(252): unsure at all n locations; Clone ID: 701146033H1
gatagaaagagaaaatgaagtcggtgggtagggttggcggaggagaatcagagcaacgtggacattttcagatgccactgcactatccaaggtacacacaggctgactatgaaacaatgcctgagtggaggcttgattctttgctcaaagagtacggcttaccaatcattggagatcttcatcaaaagagaaactttgccatcggagcctttctttggcctcatgnaactccttgttgtatcatcatccata

SEQ ID NO: 6618 - DNA, 84 bp, Glycine max
  unsure (1)..(84): unsure at all n locations; Clone ID: 701146034H1
gnggcgtccgttaacaaattcccatcctaccccaggcaaggcatnctgggggaagaaaaagaaaaggaanaggaggagnaacag

SEQ ID NO: 6619 - DNA, 246 bp, Glycine max
  Clone ID: 701146035H1
ggtatgtgttagtttgttgacttctttcaacctaacccatcgttcgcacggagccgtggtggttctggctctgtccttttttcctttctctcgttaccagaaccagaagaaccatttgtggccaacatggatttggaccagtggatctccaaggtcaaagagggccagcatcttcttgaagacgagcttcaattctctgcgaatatgtaaaagagatcctatcgaggagtccatggcagcctgtca

SEQ ID NO: 6620 - DNA, 218 bp, Glycine max
  unsure (1)..(218): unsure at all n locations; Clone ID: 701146036H1
ggagcgtaactctttgtttcggacttgacccctaaattcgcgcccattcccaccacatcacatccctcttttctataaattcccaatccctttcccagtttccaccaaaacctaaacctaaacctaaacctaaacctaaacataaactgaatttnccaaatcccccttcccaattttncaccaaanctaatactcccaancnaatngggatcatggcg

SEQ ID NO: 6621 - DNA, 243 bp, Glycine max
  unsure (1)..(243): unsure at all n locations; Clone ID: 701146037H1
ggcagccaagaaaagaaaatcctcacccattttcttcgtagccaaacactactgaaattctcagttatgtcgtggcaagcgtatgtggatgatcacctactgtgtgaaatcgaaggtaaccacctcactcacgccgctatcatcggccaagacggaagnnnttgggctcagagcaccaacttccctcagttcaaacctgaggaaataatgccatcaataatgactttaatggnggatcattgc

SEQ ID NO: 6622 - DNA, 252 bp, Glycine max
  unsure (1)..(252): unsure at all n locations; Clone ID: 701146038H1
gctcgagaattcgagcggccactttctttctctattttagnttcttcannttcttcntacttatctcctattatccctcaaaaaaccaaaaaaaaaatctcacaaatgancttaatttagcaaaaagaaaangnaactaatatcatgcaaataaaagtgaaggntctaaatctaacatcatatgataaggtggttcttttgatcaaagatacantanaaaaaanantcanagaaaaaaaanggggggnggng

SEQ ID NO: 6623 - DNA, 245 bp, Glycine max
  Clone ID: 701146039H1
ggagattgaccgtttgttaatcttatcttttcttatcccaaacaaactgaaactcaactcctgaaaggcaagagtgagagagaaatggagaatgcggaggagatgatgcagcaaaacgacgaggttttgtcggttgaacttccagctccttccggttggaataaactgtttttccctaagaaactgggaacaccaagaaaaagtgagattgtattcttgctccaactggagaggatcagtaccaa

SEQ ID NO: 6624 - DNA, 238 bp, Glycine max
  unsure (1)..(238): unsure at all n locations; Clone ID: 701146040H1
ggctcgacgttgctattagtcagaagccagaaattcgtgtaggtgagtgaggaagagagaaaagaaaaccggtgctgttgaggcagagattcaagagaatggaaggtgtgagccctgagcccttgagatcagaattggattccaaatccaaacaagacacagcgaaagaagaagatgacgacacattcaaagaaagcatgacgccgaggtcataaattcgtctcatnnagcttgttga

SEQ ID NO: 6625 - DNA, 239 bp, Glycine max
  unsure (1)..(239): unsure at all n locations; Clone ID: 701146041H1
gggcntcaattccaaatatatcctcaattataagcatgggttgtggaacacaacgaatgcagtgtcttgccgctttcacaagtttggtgatgaccaaaagaatctggtcttccaaggtgatgccacgtcttcttccaggggcatagaatcacaaagttagacggtggaggaaaaccagtgggtggcatgtggggagagtgttatnncntctccantgcactttgggaagctctacagtg

SEQ ID NO: 6626 - DNA, 109 bp, Glycine max
  Clone ID: 701146042H1
agggagatggggtgtttgatttgtaaaatttccggaagtgtattatggggttgttaattatgtgggctaaaaagggattctgcttgtaggtctgtgtacccaccctttt

SEQ ID NO: 6627 - DNA, 232 bp, Glycine max
  unsure (1)..(232): unsure at all n locations; Clone ID: 701146043H1
agcccacaacacttggagaatgcaatttgtgtgtttgaacaatacggtggtatcagttggcgtcacactgaaacaggccttgatgagatatttacagaagtcagaacagatgtgagtctaattgttagatcaattgttaccgtcggcnntacgacaatatagtagattgggagttcaagacaagtggttcaatcaagccctcgatatcactatcaggcnttggaagttaagc

SEQ ID NO: 6628 - DNA, 236 bp, Glycine max
  unsure (1)..(236): unsure at all n locations; Clone ID: 701146044H1
gggnagaagaactacattttcccgataacgagccactttattgtgagagacgggaacagaaggctaatgcaagacatagattgtggtgggttgtgcaagacgaggtgcatgcacattcgagancccaacttgtgcactagggcgtgtggcacgtgctgtgtgangtgtaatgtgtcccactggcacatctggaaatagggaactatgtggaattgctacatgangactacccatgg

SEQ ID NO: 6629 - DNA, 239 bp, Glycine max
  Clone ID: 701146045H1
gggttgaatatcaaactaaaccaggtggtactggtgtttcttcatttaaacatcttttagcgaaactaccccctagggttcactcagtatactacagggatggaataggaaatatttcctcttcacatctacgtacagattcttggaagtcagaacttgaaattgaacctcggtatcctctatttggaggctggaaatcaaccttcgtcattggttatgggctacctgcaagacttcct

SEQ ID NO: 6630 - DNA, 238 bp, Glycine max
  unsure (1)..(238): unsure at all n locations; Clone ID: 701146046H1
ggaacaagtcttgcattgggtggagcatacttagaaacagcaactatgtctctcatgcagcttactagctcccctgttggctcactggtccgtttcattgtaatatttgctttatggtacagaaccatggctttggccaagttgccaccaaacgcttcatcagttccagcagttttagcgtttggagattccatcgtggacccaggcaacaacaacaacataaaacntgatcaagtgc

SEQ ID NO: 6631 - DNA, 237 bp, Glycine max
  Clone ID: 701146048H1
gaccatagccactacttgcttccacttctgattcagaaactcttaggcattccacattctcaaccccgaaccctaagagcagagcgaaaatgacaaccaccttcgcgaccgtcgcaggactcggtggcgcattactgtcatccacctcatctcgtctcacctcagggtttgtgaaatccccagtgattgctaggaatcccttgaggcaagctgtggcaatggggaagggaggattac

SEQ ID NO: 6632 - DNA, 245 bp, Glycine max
  unsure (1)..(245): unsure at all n locations; Clone ID: 701146049H1
ggaagaacaagtcttgcattgggtggagcatacttagaaacagcaactatgtctctcatgcagcttactagctcccctgttggctcactggtccgtttcattgtaatatttgctttatggtacagaaccatggctttggccaagttgccaccaaacgcttcatcagttccagcagttttagcgtttggagattccatcgtggacccaggctacaacaacancataaaaacattacagtgcacttc

SEQ ID NO: 6633 - DNA, 245 bp, Glycine max
  Clone ID: 701146050H1
gaatggcatggttgcagttgcagagaatcatcaccaataccaagggaggtgctaatttgatctcaccgctcccacgattcttctcgaaatgttccccctatgttttgaaagttggaataccagagtttctaaacgggattgggaagggggttgagtcccacgttcctaagcttgaatctgaaatcggtgatttccagaaacttctcgtcattcgaacccttaaactcaagaagtggtattcctgc

SEQ ID NO: 6634 - DNA, 243 bp, Glycine max
  unsure (1)..(243): unsure at all n locations; Clone ID: 701146051H1
ggtacacataatcgtttttctttgaacaaatagtcattatgtcgaaagaacccattttgagtagtgtcagaccctaatttcatccggggactattattcattgatgttttgattctcactggctgaattgcattgttcgacaccagttaccacacaaaacgaagacttgttcaatgttttgatcaagaatacgaaagataccaaaaaggaggggccaaagggtttttcattntttccggaccc

SEQ ID NO: 6635 - DNA, 242 bp, Glycine max
  unsure (1)..(242): unsure at all n locations; Clone ID: 701146052H1
ggaagaaganctacattttcccgataacgagccacttattgtgagagacgggnacaganggctaatgcaagacatagattgtggtgggntgtgcaanacgangtgcagtgcacattcgagacccaacttgtgcactagggcgtgtggcacgtgctgtgtgangtgtaagtgtgtcccacctgggcacatctggnnattnggaatatgtggaattgctacatgatatgncacnctggcgacna

SEQ ID NO: 6636 - DNA, 242 bp, Glycine max
  unsure (1)..(242): unsure at all n locations; Clone ID: 701146053H1
ggatgaccaatagatatagactgtgtcgttgtgtgcacccttccctctcacaagatttttctctttctctctcacttttttttttctctttctctttctttccctctcacaacaccacttcacttaacaccaaactcaacttcaagcttcggntttanctccgtcctcaaacgtatctttccattttttgacatgttcctactttccctggtcctccaccaccctctttggttcaaaaataa

SEQ ID NO: 6637 - DNA, 243 bp, Glycine max
  unsure (1)..(243): unsure at all n locations; Clone ID: 701146054H1
gaacatgaatatgaggactcagcagctgaggctggtgggaaagaccaattgcctgaagcagaaaaaagtgacattgctactgaatttggggatgatgagcaaaaattgtctttcattgatgaagatgagaaagagaagcatgatgaacttcttgcccttccacctcatggttctgaagtctttattggtggacttcctcgggatgtatgtgaagatgatttaagggaangtgcgagcctatgg

SEQ ID NO: 6638 - DNA, 245 bp, Glycine max
  Clone ID: 701146055H1
gaccgccgttctcatctctacttcccagccctacacctacaacgctgcatcttcacgtcgtctcacgaggtgcatatagtagagagggaaaatgagttgaggaggcgcagtagcagcagcgaagggaaagaagaagggtgctacattcaccattgactgtgcaaagccagtggaagataagatcatggacttgcttctctcgaaaagtttcttcaagagaggatccaggttggggccaagctggt

SEQ ID NO: 6639 - DNA, 244 bp, Glycine max
  unsure (1)..(244): unsure at all n locations; Clone ID: 701146056H1
gacaacacaaacaattaacacacacaaacagaggctacgtacgatcaaattaattaagatggcggaagtgaggnacaaacaagtggttctgagggactatgtgagtggttttcctaaggaatccgacatgaacatagttgaaggaaccacaatatnnnaagcttctacaaggttccaatgatgtgcttctaaaaaatctctacctttcctgtgacccttacatgagaatgcctgacccaggtgg

SEQ ID NO: 6640 - DNA, 232 bp, Glycine max
  Clone ID: 701146057H1
gctgtttcgcatatgggaatcatacctatttcaacaagtctggacactgttggttggtttgcaaaggatcccaatatattgcgtcgtgttggccatatacttttacaagcaccatttgtaatgcaacgcagtcctcggcaaatagttatagctgatgattgttttcagcatataaatgttcctcttgacaggagttctcaagtggtggtcaaagccactgaaagctttttgg

SEQ ID NO: 6641 - DNA, 241 bp, Glycine max
  unsure (1)..(241): unsure at all n locations; Clone ID: 701146060H1
ggaacaagcaaaattaagcacaaaagcccaaccctctctctcgctgttggtctctcctatttggcattcgcagatcgattacgaagtaatttcactgaatcttattgaagatgtttctcacaaggactgagtatgaccgaggagtcaacaccttttctcctgaaggccgtttatttcaggttgaatatgcaatcgaagccatcaagctgggatcaactgcaattgggtnagacgaaagagg

SEQ ID NO: 6642 - DNA, 237 bp, Glycine max
  unsure (1)..(237): unsure at all n locations; Clone ID: 701146061H1
cttgactcacttggcaggccaagcaatgctgagtaacttgttgcccccatcatttatttgtgggtgctgtgatgaaaatagaaactgagatgatatcatagcctaattatgcttccatagaaatggaagactacgaaatgaagaagcaaacaatcnctggagataataagtggaagaatgacaaaggctagtgatttgaaatgaagatgatgccaccacgtgagtgtaaggtggagg

SEQ ID NO: 6643 - DNA, 236 bp, Glycine max
  Clone ID: 701146062H1
gaacagccacaacactttccacttgtctccgaattagttatcttgagaaacattattcccattgctatatattatggctagcatgaaggttacatgggtggttgtgatcatgtgcatggccgtggtgggtgcaccgatgatggcgcaagccatgaacatgcaatgatgtgacggtgaacacggcacagtgcctatcctacctgatgcagggaggaacaccttcacactttgctgca

SEQ ID NO: 6644 - DNA, 233 bp, Glycine max
  Clone ID: 701146063H1
ggcactgcaactttgctctctgtgaggcttcaatttctaattagggtttcgcttagagtaaccaataaccatgggagtcttcacctttgtcgtccgcaaatccggcagcgaatggagcgccaagcaacattccggcgacatcgaggctccgccgattccaccttcgatctccaacggaagctcgtgcaagctgctctcgccgttgattcctccggtggagtatcctctttctc

SEQ ID NO: 6645 - DNA, 220 bp, Glycine max
  unsure (1)..(220): unsure at all n locations; Clone ID: 701146065H1
ggnnncacagaaatgaaacacagggtggaaggtgatgccanaggcaatcaatatcctgagagggaatctctaccatttaaggaaaactcacatgaagctcaagacgtggtgaaatctcgatctgatantggtgaaaaagagcacganagcaatgctggnggggatgaaacaanagaactgactgaattgaaagaccaacatnatagcgacccctagatcc

SEQ ID NO: 6646 - DNA, 251 bp, Glycine max
  unsure (1)..(251): unsure at all n locations; Clone ID: 701146066H1
gaaaganaagagaaatggcanacaganacaaaagtggcagtattaggtggcatcaccgaagtgcagggagctgccaacagcgtcgagatcaacaatctcgctcgctttgctgtagaggaacaaaacaaaagagagaattcagttctggagtttgtgagggtgattagtgcaaagcagcaagtggttgctggagtgaattactacataacttggaagcaaaagatggtgagattaacatgagtnttttgcgg

SEQ ID NO: 6647 - DNA, 245 bp, Glycine max
  unsure (1)..(245): unsure at all n locations; Clone ID: 701146067H1
gagagagtcctcgatcagaaaaaccaagaagggttctttcttccctgcgaagattcagagtgctaagtgtgagaganagaaaatgccaaagtctcaatttcgaaccccatttcttgtttctttttctcttttgttattcatcttcaacctcaccccttcatacgcactctatggagcatccacacccgtgcttccaatcactccctctaattcaagtccaaggttctgncananatgggagttgt

SEQ ID NO: 6648 - DNA, 238 bp, Glycine max
  unsure (1)..(238): unsure at all n locations; Clone ID: 701146071H1
ggggaatgagggtagtggcgagacagtgagagggtgganatggcggctgtggcagcgagaagcacaggcagcgttggtgttggtgctgtcatcttcatctcagtcgctctcaccacttatttcatctcnnnnnnnnnnnnnnnnnnnnnnnnnnnatccaggaagaagaagaagggatggtggacgccataggcaacactctttgattcggatcaacagcctcgcacgcccactggtt

SEQ ID NO: 6649 - DNA, 240 bp, Glycine max
  unsure (1)..(240): unsure at all n locations; Clone ID: 701146072H1
gggattcgaatttgttcgaaagcccattggtcggacatcgtcttcactctctcaatcactattccatcgaggcatctacccatcgttctttgctttctcaatncctcccaatcaattgctgaaagtttgaattgctcaaatcatagttgcaaatctctaaggaatcgtactttctcaattgctctcatctcaatcggtagcgttgaggttggtgaaagaccagcgtctttgttggttgcg

SEQ ID NO: 6650 - DNA, 230 bp, Glycine max
  unsure (1)..(230): unsure at all n locations; Clone ID: 701146075H1
aacaaaaaacagaaaaagctaccaagaaacaacgaaaganatcaagctcttcaactaaatcggcaaaaccttccaagggtcaagttgctactaatgagaaggaaactgagaaaatgctcgactgtgaaagcaactgcaagatagttcacagttcccctcacgaggaccattctgttgaagctgcaggaccttcagagatgacaaagagattgatgctatttatgtcgcca

SEQ ID NO: 6651 - DNA, 237 bp, Glycine max
  unsure (1)..(237): unsure at all n locations; Clone ID: 701146076H1
ggcacaagtgagtttgttgatcgagataactagaaacagtgtgatgaaaatgaaggtccttgttttcttcgttgctacaattttggtagcatggcaatgccatgcgtacgatatgttccctctccgaatgaacactggctatggtgcccgtactccggaggtgaaatgcgcaagttggaggcttgctgtggaagcacacaacatctttggctttgagaccattccnaagagtgcgtt

SEQ ID NO: 6652 - DNA, 235 bp, Glycine max
  unsure (1)..(235): unsure at all n locations; Clone ID: 701146077H1
ggatgtgctcaaactcaaacttatatatctacttgccactttaaccccaccagaggcacaggtgcaagttgagattttgattggtgtttggctcccaaattcccaaaacagtgatggtctcaagtaaaaganatgtttttggcaccaagggggaaatgggtatagatttcatggttttggtgttatcagtgtcatggttttgtttgactagtatatgtgtctngctacaaaacca

SEQ ID NO: 6653 - DNA, 230 bp, Glycine max
  unsure (1)..(230): unsure at all n locations; Clone ID: 701146078H1
cattttacaagggtacagtgcgaaatagatatgtgcaattatatgataaattagttagttttgtatataaaatattaaccaacatatttttcacatatccaatatatactcgacatgattaaaagtgtcttaaaatgttcaaaaaggtcaaggtggctggtttcagtaatgtacatacaacagttgcatttaanagtggtgttcttagtgtttatgtcatacatttagaa

SEQ ID NO: 6654 - DNA, 251 bp, Glycine max
  unsure (1)..(251): unsure at all n locations; Clone ID: 701146079H1
gggagaatatgaactattgtgttggtttcacaagtgatgtaatctccattaactaagccatgaattgtgagccccttttacacggttaaaattatttagcaaggaaaattaaaagaagaatactataaaatatataaatgaaacaaaaaaaaagtannnnnnnnnnnnnnnnnntaanagtttcacaagtcattggtatttaagccaataattgtgacctgattttagacacttaaattattccaaaggaa

SEQ ID NO: 6655 - DNA, 231 bp, Glycine max
  unsure (1)..(231): unsure at all n locations; Clone ID: 701146080H1
tggaacttaatgcaactctgtcagggtaacacagtcgctacatcctcagtttgattatttgcttgctaaaaacatcatnataattgatttcaggaaaatgtttctaaaacgtaaagtcttcaacatacacaggcgttcatggtatagattgaagaccataagcagctaaacataacacaaaagcaaanaagccgannngnaaaaangggngccgggcatnggncncnngcc

SEQ ID NO: 6656 - DNA, 256 bp, Glycine max
  unsure (1)..(256): unsure at all n locations; Clone ID: 701146082H1
gattgaagaaccaatagtaaaccctccttatcagctatcactttgaaaacccgcattcggncaacactatacaatacnataaccttatctatcgcaaccanctcccaaatcactctcatccaacttcatctctctcttcccccagttgccagatctgaatcacaccttcactcttgcgatttaattactgagtagttgaggatggctcttttgcttttgcaacatgccctcttctnacatcggtgcctcccaaagc

SEQ ID NO: 6657 - DNA, 255 bp, Glycine max
  Clone ID: 701146083H1
gaggtatatcaaagcatatatttatggacaaagggaaaagagactattgaatttccagttgatcaatgagtgctaaagaagaaaacaaacctctgctgcctttccttgaaaaatattgctaggaagaacaccggtgcggttgtacaaattaatatattgatttatctgaaacccaaaaaacacgtgtagacatgtcatccccagttaggcttccatataattttagatgttcagaaatgaatgaagcccatattg

SEQ ID NO: 6658 - DNA, 238 bp, Glycine max
  unsure (1)..(238): unsure at all n locations; Clone ID: 701146084H1
gnggntcanagngantggctcaagcantggcatcantggctggcttgcgtggttcctctcaggctgtgttggaaggtagccttcaggtgngtggctccacncgcttgaatgtggggngtggnagcagggtggcctcngtcacacgtgcagggttcacagttagagcacaacaacaacaagtgagtggtgaggtacaaagcagccgtagggcagtgctttcattgtgtgnggtttcgcc

SEQ ID NO: 6659 - DNA, 248 bp, Glycine max
  unsure (1)..(248): unsure at all n locations; Clone ID: 701146085H1
gggcatccaaggactcctttttaccaggcttttcttaaactgaccaagtcaatttggcttttacacaggttggcttattcttttgagccgaatgttaaggtatttcaggttaaaggagggagtgagttctctgatgtttatatggaaagtgtggtcaagaatctgataatggatgacaatgatganaaacccaaaattggtttgatggttatgcctggattttggattgggggnnttgattcagagta

SEQ ID NO: 6660 - DNA, 242 bp, Glycine max
  unsure (1)..(242): unsure at all n locations; Clone ID: 701146086H1
gacacgataacaagagaaaagagaaggcaatggctatcaggttgatggatttggactctccattcttcaacactctgcacagaatcatggatctgacggaggacgccgagaagaacttgaacgctccgactcggacatacgtgcgcgacgccaaggcgnnggctgcgactcctgctgacgtgaaggagtaccctaacttcgtacgttttcgtgatcgacatgctggcctgaatctggggaca

SEQ ID NO: 6661 - DNA, 239 bp, Glycine max
  unsure (1)..(239): unsure at all n locations; Clone ID: 701146088H1
gactacatgcttggccaaagctcctgtgctctgtatctcagtcttcggtatcatcttctgcatccagactacttgttttatagaataaggaagttgcagaagaatttcaagcttcgtgtggttttatgccatgttggaagatgtaataaagcntcttcttgaagttacaaaaacagctttgcttcatgactgtacactcctatatggatggagcctggaggaatgtgcgttacttggaa

SEQ ID NO: 6662 - DNA, 213 bp, Glycine max
  unsure (1)..(213): unsure at all n locations; Clone ID: 701146089H1
ttattnttnngnncaggcctacgttccnttgnanatgnctacattagtatgcatgcgcgcngacgcntntgcntgcttagggggaatcaggagaggtatcgattnctctgaatgnaatggncgataaaacncattaggttggatattgggtccagtgaaatgggttagttcntaagcaacgtgatacattattaattacatctggttgngnga

SEQ ID NO: 6663 - DNA, 242 bp, Glycine max
  unsure (1)..(242): unsure at all n locations; Clone ID: 701146090H1
caagatatggtaatgttaggtcttcagggccatctgcttatgatcaatcaagtgctccagagcgtaatgtaaaccatgataacagagactggaggagtgcngatcggaatcttgaacctcctgctcatttgcaagggtcaatggtctctcagaangcttcttcagagaagatttgggccagaagaacgactgagggacatgtccttgtcagccattaagagaatactacntgctggagatga

SEQ ID NO: 6664 - DNA, 119 bp, Glycine max
  unsure (1)..(119): unsure at all n locations; Clone ID: 701146091H1
ttgagttgagcaatggttctgtggggtggggcgaggncccaattttgccttttgttactgcagaggaccagaccactgccatggccaaggcttctgaggcatgtgctcttgaggagatg

SEQ ID NO: 6665 - DNA, 219 bp, Glycine max
  unsure (1)..(219): unsure at all n locations; Clone ID: 701146092H1
tnatttgggaattattagctcccatcgccattggtttcattgtcggcgctaacattttgttgggtggggccttctctggagcggccatgaaccccgctgtgacatttgggcctgctgtcgtgagctggacctggaccaaccactggatctactgggccggcctctcatcggtggtggaatcgctggccttgtttacgaggttgtcttatcagccacacc

SEQ ID NO: 6666 - DNA, 233 bp, Glycine max
  unsure (1)..(233): unsure at all n locations; Clone ID: 701146093H1
gactctatctgtcatcgaccatatcactttcgtcaccttcacagatacattcgttgcaatcatccatctcacttccacaaattcgtccaaattctaaccaaacccttcactactccaaattccaaaacttcttcacactccttctntnccctcttctgttgcccgatcttctgcctccaagattttggtatttgggattgatcacctggagttggaantggnaaaagttatgg

SEQ ID NO: 6667 - DNA, 232 bp, Glycine max
  unsure (1)..(232): unsure at all n locations; Clone ID: 701146094H1
ggattgtctcaagttccaggtttcagcgatttcgatctcgcatagcattctacaatggccactattccagttaaccccaancctttcttgaacaatttgactgggaagcccgtaattgtgaaactcaagtggggaatggagtacaagggctatctcgtttccgttgattcctacatgaacttgcagctggccaacactgaagagtacttgagggacagttctggaaatttgg

SEQ ID NO: 6668 - DNA, 243 bp, Glycine max
  unsure (1)..(243): unsure at all n locations; Clone ID: 701146095H1
gtgccccacatgcatttgtcaacgttttgacnaanataatactgaattgaaattgggcatttatncttcacgnccttaccaagaacaatattttttngatagtgctttccgccgtaaatattttaatcatgcgnataaaagnttattatgatcaggcaagagnaaantatttttaaccatnaatntattttagaacattaatttgtantgnatagagataatgtnttttcactntgcaagtaa

SEQ ID NO: 6669 - DNA, 297 bp, Glycine max
  Clone ID: 701146106H1
ggagaatggaaggagggaaacgaggcacgattctggtcaccaacgacgacggtatcgatgctcctgggcttaagagcattggttcactccctcgtcaacgccaaccttttcaacgttctagtgtgcgctcctgatagcgagaaatcagctgttagccacagcatcacttggtccatccagtagctgttaagaagtacagatcgagggaaccaccgcatttgctgtttctgggactcccgctgattgtgcttctctagggattccaaagctctctttcccacagtactgatctggtgg

SEQ ID NO: 6670 - DNA, 291 bp, Glycine max
  unsure (1)..(291): unsure at all n locations; Clone ID: 701146108H1
ggtctttcttttgncgtctcgggcccaaaccaatccgangtattattcctctctctctctcttcncttgtagctttcactttcatttgtctggttccgatttagggctcccgnactcggnctttgactcagaacnagctctgatctgcttctcaggttgttatttggtacaagganaacactctcagantgttctgangactttgagtacaaggaggancatttcagcaagggatgattttgggntgancttttgnaattcagtgatgtcnngggtantaattcttcctgg

SEQ ID NO: 6671 - DNA, 291 bp, Glycine max
  unsure (1)..(291): unsure at all n locations; Clone ID: 701146109H1
tccaatgtaaatataaatgcaaagcttttaaatttagtaaaatatacaaaaattgctgaaattccgaaacattgatgtacagttcaacatacctccacaattatcctcccatctaagttccttgaaccaccaggaatttctntctccaactttggcttcaaaggtttgacttcccctgtcaagtgctcgatggtaattgtggcactggcttggaatacttcacaatctactgggcacagactaatcacaacaccatccccattacttcaataatctgctgtataanacttg

SEQ ID NO: 6672 - DNA, 283 bp, Glycine max
  unsure (1)..(283): unsure at all n locations; Clone ID: 701146110H1
ggcatcaattcaaaatatatcatcaattataagcatgggtttgtggaacacaacgaatgcagtgtcttgccgctttcacaagtttggtgatgaccaaaagaatctggtcttccaaggtgatgccacgtcttcttccaggggcatagaactcacaaagtnacggtggaggaaaaccagtggtggcantgtggggagagtgttatactcttctccagtgcactttgggaaagctctacagtggtcgcaagtttgaaaccgattcacttttccatctcatcagact

SEQ ID NO: 6673 - DNA, 182 bp, Glycine max
  unsure (1)..(182): unsure at all n locations; Clone ID: 701146111H1
aaaagatttcaggttctactttgattttgagcattaaaggaggcggcgtctgtatggacaaggagcagntttgggcagattggaaccaatggcaacaaaaagatgggatgagtcttcatcttgtggaggatttcaggtcacgcccatgaagcttatggatgtgaaggatgccttgatcatga

SEQ ID NO: 6674 - DNA, 283 bp, Glycine max
  unsure (1)..(283): unsure at all n locations; Clone ID: 701146112H1
ggcatatccaaaggaacaaaaatattattaagatgatcaacattattggagcacttgttctactctttgcatttctcttcctcagttgtgtgtatgcacaagacacaacaacccttgtgcctgcaatcataacttttggtgattctgctgtggatgtangaacaatgactatcttcccaccttttcaaggtgattaccctccttatggggaggggcttgttaaccaccaacctactngggagtttgccatgggcaattagctatggatttcatgtggcacatg

SEQ ID NO: 6675 - DNA, 279 bp, Glycine max
  unsure (1)..(279): unsure at all n locations; Clone ID: 701146113H1
gaaggtgcaagagtttgttgtgagctataaagctagtttatcgtgaggagaatatgaagttgtttgttttctttgttgctgcagtagttttggtagcatgggccatgccatggcgcaggctaccaaaggttccctctccgatgaaaactgggctatggtcccgtccttcggaggtaaaatcgnagtttaggcttgngtggaagcacacaacatccgngcttaaaaccatcctgnttttgcgttgaaccaacaaaggactacattatggcgaacatttag

SEQ ID NO: 6676 - DNA, 254 bp, Glycine max
  unsure (1)..(254): unsure at all n locations; Clone ID: 701146114H1
aaccgcttttgggaaatccattggggcttggatntaagactcccagggaaaccatcgaatgaacctacattgacaagaagtggccccttcatggcatngttccatccgtggcgtatcttggctggaactgtccagtgctaaatgaccagactatcattgtagaggatnatctccatttcagaagtnccangtngagnaaggcatcnaacattcctgctctatatcaccgnttccggtgaaggnaggagatccgt

SEQ ID NO: 6677 - DNA, 266 bp, Glycine max
  unsure (1)..(266): unsure at all n locations; Clone ID: 701146115H1
gatggaaggttgctttagtctccgcaattttctgcttgcttcttcacttntttttttcctctgtctcctcctcaatcttcattgtcctgnctttcccttggngacaaaccaagactaancacnccccgaacntagctgatgtggtgaggtnnagnananaaagatggcattgcagacaacacagagtgtaggccgtgacaaacgtttatcggttgaaattgaccggggtaccggtttcccnaaagtgctcagtgccacatgaaggg

SEQ ID NO: 6678 - DNA, 300 bp, Glycine max
  unsure (1)..(300): unsure at all n locations; Clone ID: 701146116H1
gaatgacaggagagacagtgaacccccaagcttacccctttggccggtggccccacntcctcattnaccctncntanatccttgttcaacaagtggccaattgnaagnagttcnaaanaaggtgnaatggaggccattnaaaccctgaaaagagggntntcgggattgtnntnaaggtgctgatactggacccttggaattttcttccaattcctcnnatcggcgggggttanaangtgcccnncgngttntccctcannaanaagnacttggggtgcatgttggggnaccagnccangt

SEQ ID NO: 6679 - DNA, 292 bp, Glycine max
  unsure (1)..(292): unsure at all n locations; Clone ID: 701146117H1
gaagcaagacgatgggtatagtatgactaatgagattgagagtgtatagtgatattcctgaatcctgattctttcattttccatagattagcgagcgaganagagagagaatggttcgggaagtatcaganagttgcgttgatagcttgttgaccggacnggtggcntgctattgcnatcgttctatgccaacaagcctgaactcgccgcacgaaggatcggaggccattgggatatcaggtcggtcaccagctctctgaaangtataccatggagcggcctcggttcanga

SEQ ID NO: 6680 - DNA, 271 bp, Glycine max
  unsure (1)..(271): unsure at all n locations; Clone ID: 701146118H1
ggggaaaagagataagaaacacagaagttgtgcttgttcgcaaaaccatcaatggcatcagcattatcttctctctgcctccactcttcttcactgttacagcacagtttcacgggaaactcgaangctcctcccactatccantccccnacanatgtacgctttcnggcttggtcnaaagaaggnaangaatccggaaggnttnttngaagganattnggtatgttgggaaccagggcaatttnaatgtaaggccnggtttcnagaatac

SEQ ID NO: 6681 - DNA, 277 bp, Glycine max
  unsure (1)..(277): unsure at all n locations; Clone ID: 701146119H1
ggactgacatacgcaaccaaactaaagataaacaaaatttagaaacaaaaacatgttggtgaaggtgtacggtccaacctatggagcccccaagagggtgcggtgtgtctgattgagaaggaaattgagttganacagtacaatactgatntcttccaggagnncattagggacctagtcctaagctgcagccattggntccacttcnggtatccaganngnggtttactccccnggatctcgngcaataatcagtacttgcngggagtntaagncc

SEQ ID NO: 6682 - DNA, 278 bp, Glycine max
  unsure (1)..(278): unsure at all n locations; Clone ID: 701146121H1
gacagttcaattccaatatattccattctctctgtgtatttccctacctctcccttcaagatgcagatcttcgtcaagaccctcaccggcaagaccatcacccttgaggtggaaagctctgacactatcgacaacgtcaaggccaagatccaggacaaggaaggatcccccggaccagcaacgtctcattttcgncggaagcaacntgatgacgccgtaccctggtgatacaccatcagaggagatatcttcacttgtcntcgttcgtgtgnannana

SEQ ID NO: 6683 - DNA, 282 bp, Glycine max
  unsure (1)..(282): unsure at all n locations; Clone ID: 701146122H1
gcagcgtcggtgtcttngnttcatgttntgactagcttgaaggctgactttcccaaggcgaagaagaagtaaggaganaaagagatggcagacgatctntntgaangattnctccctcgttcntgaaacacncttctgcctcatcaacancnaaactncaatcncaaccaattgtgtngcnaccaacatcaacgacactgaatcctctgcagttccggctcnaaagccantcntcaanagtgncctcaagcgccccaaccctagtcaacctgatagccaagc

SEQ ID NO: 6684 - DNA, 288 bp, Glycine max
  unsure (1)..(288): unsure at all n locations; Clone ID: 701146123H1
ccggctgtacttgaaggatacaacgatgcagattggaacactctttcagatgattccaaagcaaccaacggctatatatttagcatagctggtgggggctgtttcttggaagtcnaaggaaccagnctatctttagctcagtnncactatgggntctagatgataggcactangcaactgcttagtgagggaagcatgttgggctgagaagcttacttgcagagnttccttatnggaaagaccgatactagtgtgntgatccatgtgatagcaccgcggctattgcaa

SEQ ID NO: 6685 - DNA, 286 bp, Glycine max
  unsure (1)..(286): unsure at all n locations; Clone ID: 701146124H1
gagaganaganagagacngatgtcgaancgtggtcgtggtggttcggcggggaacaagttccgcatgtcgctgggtcttncagtggcggcnanggtgaactgcgccgacaacacgggggcgaagnanctctacatcattccggtgaaanggatnanagccgttgaaccgtcttcctnggntgcngttgcgacatngtgattggccaccttgaaanaagggaaaacccgatctnaagnaaaangttttgccaactgtcaatcggttcgccaggncaancatngnggc

SEQ ID NO: 6686 - DNA, 253 bp, Glycine max
  unsure (1)..(253): unsure at all n locations; Clone ID: 701146126H1
ganancatctagctcaaatagcatggcttccaatctgattagagtgancncaagcttggttctagtagttttagtagctctcacagttcaaattttctacattttancnatagatccagttttnctaatctaaaacctgctccttcaccaaagacaatcaattacagaatatcataagcttggagaaggacttttgaaggaaccagaagatgttgttgtagataaagaagggactctctatacagctatcgag

SEQ ID NO: 6687 - DNA, 279 bp, Glycine max
  unsure (1)..(279): unsure at all n locations; Clone ID: 701146127H1
gatggcggttgactaaagtaagcagcgttgcaacgctgtttcctttctgtttcttttcttcttccttccgacgagatctacaacgttgttgttgtntagatcttgaatagtgtttggtgttcggtgagatggaaganaggaagcaatcacgtatgtnaattgactaaagttcganctctcgaagacatacccctggcggactcaaccagccaattcagggtcctcattggacgtcgcaagtgccctgaatgtagacagccgtacctgaaagctatgctc

SEQ ID NO: 6688 - DNA, 290 bp, Glycine max
  unsure (1)..(290): unsure at all n locations; Clone ID: 701146130H1
ggtantgagaganagaaggcaagatgtccnaganaggacgcggtggttcggcggggaacaagttncggatgtcgctgggtctgccggtgggcggcnacggtgnaatgcggccgacaatacggggncgaagaancctctanatcatatcggtgaaagggnnaaagggcgtttgaaccgtcncccctcggcttgcgttggngacatggtgatnggccaccgtgaagaagggcnaacccgatctgaggaagaagttttgccanctgtcatgttcgccagcgcaagccatggng

SEQ ID NO: 6689 - DNA, 148 bp, Glycine max
  unsure (1)..(148): unsure at all n locations; Clone ID: 701146131H1
ggacacttatgatgtaccatttaaagcgtgcgtgttggaagggcaagtggcaagtgtgatgtgctcctacaatcaggtgaatggcaagcccacgtgtgcngaacctggncttccttcggnacatattctgggcaatggggctcaatgg

SEQ ID NO: 6690 - DNA, 306 bp, Glycine max
  unsure (1)..(306): unsure at all n locations; Clone ID: 701146132H1
gcaactgtttacaacaataataagttaataactcgcgtaggcaaaggnacaggcataaaacnnacgttgcgctgaacaaagccggtgtcagacnaaacngtgnccggttggtggggccgccacgtatttcggcnaaatcgggattccatcanncctcatcaaaancctncnttctcttnatttgaaacccnaattaggagggtaaagntgcttctccagaatagnggngtaatggcncttcggactcangggtgaagggatntatgagcggggaattgnganggnatcatggcnggnttctgaacg

SEQ ID NO: 6691 - DNA, 269 bp, Glycine max
  unsure (1)..(269): unsure at all n locations; Clone ID: 701146133H1
ggaagtgaagaaggagatggctgcaacctcttccttgtgctcatcgacctccaatcccagatcaatggattcttccttcacaaacctctctttcccatattcttcctcactttctccaggaggaaatttcaaccacatgaaggctacatctcgtggacaagttttcaaaaaaggnnatcatggnnctccgnccattctttcggnaacttttcaaattgggnnncngtgaagcatggattggcggtttgatggattccgtgatgaatgga

SEQ ID NO: 6692 - DNA, 280 bp, Glycine max
  unsure (1)..(280): unsure at all n locations; Clone ID: 701146134H1
ggggcatagtgctgatgttctaantgatgaatgctttcttagaatcagtagcaaaggtctttcgacccggaggactgttctctgctccagcagacagcctgtgggcataagaactttgtggttgcagacaccatagccaattgcaagaagataatccnagnntgcgtaactatggcttaaccacgggtcctacattgcaattgggtgatggattcaagcttgctctacggagggtccaccatggaattcaaacatccaataaataattgatccagngaaa

SEQ ID NO: 6693 - DNA, 200 bp, Glycine max
  unsure (1)..(200): unsure at all n locations; Clone ID: 701146135H1
taggcctcgatcagtcatcattcctgaccgacgtcgactgtcatttttntcgattcaatatcggtcaataatatntttttgccgaggtgggcaatgttttccagggccaattaacatgccagtttcggcggaacaaaacctcggtnaagttgaccaaaaaacctagccgnctacaatgtaaattttatgcatancaatac

SEQ ID NO: 6694 - DNA, 275 bp, Glycine max
  unsure (1)..(275): unsure at all n locations; Clone ID: 701146136H1
ggcgagatagaagagaaagccgtcgctatcctagtctcttcttcccctctacccatttcagtttcaggatggaatctcaggtgaagcacgcccttgttgtcaaagttatgggtcgtactgggtctanggggcaggtgactcaggttaaataaagtttttggatgtcaaaccgacacatcatgaggacgtgaagggacccntcagagaaggaganattctcaccctacttgagtctgaaagagaancaagaaggttncgctagaggnctcttcatg

SEQ ID NO: 6695 - DNA, 283 bp, Glycine max
  unsure (1)..(283): unsure at all n locations; Clone ID: 701146137H1
ggagagtgaaagagaacaatggaaggcataacagagggtgtgaacaacatcaacattaacatctccgattcgtataagaagaatcgcattcaggtctctaacaccaagaagcccctcttcttctacgttaatctcgccaagagatatatgcaacgcatgatgaggtcgagcttctcagtctagggaatggctattgccacagtagtaactggtgctgaaattttgaaaaaccacgggacttgctggtgaaaaggaaatcacgacatcaatgntgacatnaang

SEQ ID NO: 6696 - DNA, 267 bp, Glycine max
  unsure (1)..(267): unsure at all n locations; Clone ID: 701146138H1
ggtggcactcaaacattgtttnntgtaggaagaggaatcttgagaaatggcangggacagcaagancangattctgttcatcgganggactggttacatcggaaaattcatcgtggaagccagcaccanagctggncacccaactttccttggtgagggagtccactctgccaacccgcaaatcaccctcatcgacaattcaaagggctcggtgtcaatctgtttaggagtctatacgatcaccaaagttggngatgtataaagcag

SEQ ID NO: 6697 - DNA, 279 bp, Glycine max
  unsure (1)..(279): unsure at all n locations; Clone ID: 701146139H1
ggcatcaattcaaaatatatcatcaattataagcatgggtttgtggaacacaacgaatgcagtgtcttgccgctttcacaagtttggtgatgaccaaaagaatctggtcttccaaggtgatgccacgtcttcttccaggggcatagaactanggagttagacggtggaggaaaaccagtgggtggcatgtggggagatgttatactcttctccagtgcacctttgggaaagctctacagtggtcgcaagcnttgaaaccgacttcacttttccatctcc

SEQ ID NO: 6698 - DNA, 197 bp, Glycine max
  unsure (1)..(197): unsure at all n locations; Clone ID: 701146141H1
ggaccttgggttgcagaaaagttccagcgtcaganaaagagaaattagcaaaatggcggatgtgagagggagggacacgtggacggaggagctgcccagtctgatagangattcgggagtgctctacggtggagatncgacgacgacaacaacaacacnncaacgacgtcgtttgagtgtacgcgccgcatagcgag

SEQ ID NO: 6699 - DNA, 277 bp, Glycine max
  Clone ID: 701146142H1
gatattgtgggagaaaaaatggaacttgaaaagttacatgattcaatcaatttgatactgtcacttcagagtaaaaatggaggtatgactgcgtgggagcccgcaggagcttataaatggttggaactactcaatcctacggaattttttgcgcatagtagttgagcacgaatatcttgaatgcactgcatcagcaattcaggtttagtggtgtcaaaaagcttaccctgagcatagaaggaagagatagagaacttcatgctaaagcagtaacatt

SEQ ID NO: 6700 - DNA, 158 bp, Glycine max
  unsure (1)..(158): unsure at all n locations; Clone ID: 701146143H1
gccacagcgtctttgccgccgaagccgccgcccacgtagggcgaggtgacgtgcacctgcttctcgtcgaggccgaatatttccgtcatcgaccaaggacatgtgcgccacgccctgcgangcgttcgtggatggtcagctcgtcccccttcacacaa

SEQ ID NO: 6701 - DNA, 292 bp, Glycine max
  unsure (1)..(292): unsure at all n locations; Clone ID: 701146144H1
ggcacaagtttgttgagatagctagaagcaataagatgaaaatgaaagtgcttgttttgtttgttgctacagttttggtagcatatgaatgccatggctcagactaccagaagttccctctccaaatgaaaactgggtttggtgggcaatacagcnnnngtggcatgtgccagttgaggctggcgtggaagcaaacaacgtagtcnagtnggcnaactggtccctgcaagcttgccggagagtaccatagcttgacttacgttctaggagaccaatattngatcaggnttcc

SEQ ID NO: 6702 - DNA, 277 bp, Glycine max
  unsure (1)..(277): unsure at all n locations; Clone ID: 701146145H1
gactgtcctccatttgacacattatgggccacacccagcatcccatcaccaatgtcactgtggagttccttcaattccccgcggtggtgacactcctgcctctaccaaatcctatttccnggtggcgcagggtgaagangggttaatatggagacaattgtaaagttcacgggataggtgttatttgaagncaaggccgtgtcatcatcggtgccaatggaagggcaaattgcagctgaattgctggactcacttgacttctacagagatatcatca

SEQ ID NO: 6703 - DNA, 280 bp, Glycine max
  unsure (1)..(280): unsure at all n locations; Clone ID: 701146146H1
gttcgaaaggggaagaagaaaggttcancggaagacattctggaaaccctaggagacttcaccgngcaaagagaactgggacaagttttcaaccctcgggggtgattccntngagntgtaacgcccgattggcccaacctcaggggcccattgtnttcctccttcaaaaccggtctcntccggtttcaagttcctcgtncccggntgcggaaattccggctnttccgngcactntagganggcggcaaaacggcatcacnanancgattttcaagtngtc

SEQ ID NO: 6704 - DNA, 143 bp, Glycine max
  unsure (1)..(143): unsure at all n locations; Clone ID: 701146148H1
gaacacacagttattncctnnttaaanntncctattgangttttccanactgnannaccttangggcctttccgaattcgnagtttaatttgcnaanatgggcttnagggaaaaggctccgatccaanattttggggggttgg

SEQ ID NO: 6705 - DNA, 217 bp, Glycine max
  unsure (1)..(217): unsure at all n locations; Clone ID: 701146149H1
aaatggctgcanctgcgaaggcctctgttcgntctcttcggatcctccattgtccaactcagtttcagccatggtggttggggttctcatctnctgacatctactctcgtaaggccgacatattgttgcgaggatatatggatggaactcgcgagtgccctccaagtcctaatcaagtttttccaaaggatgctgcnatacagcttctctgtgatag

SEQ ID NO: 6706 - DNA, 255 bp, Glycine max
  unsure (1)..(255): unsure at all n locations; Clone ID: 701146150H1
ggagcattgaacttctattttcctcctttggtcatcattgcattggtgctgagtttgggctggactactgaggtcatgaaggaatgttgttaacatcactgttagtaggggtattgcctgtatacctcagaggatgcatctagcaccatttgcttctagagcctnatncgaacctggaatgcctggttgggncctcttgtgnngcnatgaagccngagnattcgnccggggccaattgctgaggaganatgantc

SEQ ID NO: 6707 - DNA, 265 bp, Glycine max
  unsure (1)..(265): unsure at all n locations; Clone ID: 701146151H1
ggcacaagtgagtttgttgatcgagataactagaaacagtgtgatgaaaatgaaggtcctgttttcttcgttgctacaattttggtagcatggcaatgccatgcgtacgatatgttccctctccgaatgaacactggctaatggtgcnntactccggaggtgaattgcgcatttggaggctnctgtggaagnncacacatctttggtttgngaccatcctgaagattcnttgaggcacaaaggatncatccnggcgacatatngt

SEQ ID NO: 6708 - DNA, 286 bp, Glycine max
  unsure (1)..(286): unsure at all n locations; Clone ID: 701146152H1
gacagcatatatatcaataatctattttatactatacctacattttgataattttctttgtagttgatagccatggctacccgtggaaagcttgaggttgacattgatctcaagtccaacgcagacaagtactgggnaaaccctagggannctactgaaatattccctaaggccttcccacatgattaccaaagcattgaggntaaagagggtggagggcaagtcctccnggttcctatccggccacataaggttagggtggaaggttcaccacttggtgnaaatc

SEQ ID NO: 6709 - DNA, 258 bp, Glycine max
  unsure (1)..(258): unsure at all n locations; Clone ID: 701146153H1
gggactccctcttacttaagttgttccttcaccattcttatattcaggaaagtaagatcatctgcatcgccgacgcttccaacaataacaatggccgataatgcaatnacgcaaggaagcaacacctatttctccttacaagatggccaaattcaacctctctcatagggtggtgttgggtncctatgacaagatgcagagcgttgaactngattccacaggcagcgttgctgaatactaggttcaaagatcaacaca

SEQ ID NO: 6710 - DNA, 281 bp, Glycine max
  unsure (1)..(281): unsure at all n locations; Clone ID: 701146154H1
gactgcaaatcacttttctactttgagtcttcttgatccttctttttctccttgaactcaaacatggcagatgaggtggttctgctagatttctggccaagtccatttgggatgagggtcaggattgcacttgctgaaaagggtatcaaatatgagncaaagaagaggacttgaggacaagagtcctcttctcctccaaatgaacccggttcacaagaagatccggttctcatccacaatggcaaacccattgtgaatccctcatgctgttcagtacatga

SEQ ID NO: 6711 - DNA, 278 bp, Glycine max
  unsure (1)..(278): unsure at all n locations; Clone ID: 701146155H1
ggcacaagtgagtttgttgatcgagataactagaaacagtgtgatgaaaatgaaggtccttgttttcttcgttgctacaattttggtagcatgggcaatgccatgcgtacgatatgttccctctccgaatgaacactgggctatggtgcccgtatccggangtgnaatgcgcaattggaggctgctgtggaagcacacaacatctttgggtttgagaccattcctgaagagtgcgtgnagcaacaaangaatacatccatggcggacaatataggtca

SEQ ID NO: 6712 - DNA, 277 bp, Glycine max
  unsure (1)..(277): unsure at all n locations; Clone ID: 701146156H1
gaccacttctctctttcaatccctttatctgttggatagagcttcttgccttgtgttctacgttctgcattcttctcagcccgtaatctagctcctgtttgcagaaacaaggacctgtcatcaagatngtcaagttcacaactcacaggcttggcacataatgggactgcaaacacaatattcgtaacatgtctggtattgcacacgtcaatcatggaaagtctaccctcatgattctttgtggtgttctggtaatatcatagcacaagagggtgta

SEQ ID NO: 6713 - DNA, 278 bp, Glycine max
  unsure (1)..(278): unsure at all n locations; Clone ID: 701146157H1
ggaggaagagcgaagagtgaagagaatggctcccaagggtttaacctttctggctgtgttaatatgcgtttcagcactgtcactgagtccttctgttgcgggggaagggcaaaataatngcctgtatgaacttctacaaggaatcatgcctcaggctgaagacntcatcacagaacaagtcaagcttctctacaagcgccacaagaacactgctttctcctggctcaggaacatcttccatgactgtgctgttcanagttgtgatgctcatgntgctg

SEQ ID NO: 6714 - DNA, 269 bp, Glycine max
  unsure (1)..(269): unsure at all n locations; Clone ID: 701146159H1
ggcacctttccattttaatactataaaatatattctctggccatcttcctctccaaccaacaaccattcatttccttgacactctcagctttatatatcctttaaattgtcatnagcattatactgatcaaagaaactcaaatggtgtggccttaantggggtcagaaccaaggctggttaaatcaggtatggattgcagnaacttaanagccangggttcatggggtgatcttcatccaaccatgcatcaacttccccttcctaatat

SEQ ID NO: 6715 - DNA, 272 bp, Glycine max
  unsure (1)..(272): unsure at all n locations; Clone ID: 701146160H1
gacagcatatatatcaataatctattttatactatacctacattttgataattttctttgtagttgatagccatggctacccgtggaaagcttgaggttgacattgatctcaagtccaacgcagacaagtactgggcaaacccttaggaattcnctgnaatattccctaaaggcttccacatggattacaaaagcattgaggtcttgaggtgatggcagtctcctggtcttntgccacataagtatggtgaaggtcacatgtgaaatcacct

SEQ ID NO: 6716 - DNA, 141 bp, Glycine max
  unsure (1)..(141): unsure at all n locations; Clone ID: 701146161H1
gaaccgaacaaactagaacttagggtncntatctcattttcctctgtttcatctcagtttcgcctcgtcgtatcgagaagagacgatggngaacaatntgccgtgaatnagtgatctgcgtctccctttccagcgagataa

SEQ ID NO: 6717 - DNA, 270 bp, Glycine max
  unsure (1)..(270): unsure at all n locations; Clone ID: 701146162H1
gttcattaaataaagacgaaaaatgacaaaaaagaaaacattcattccccttctatatcttacatctatagtctttttgccctggtgtatctctttcacatttaggaaagtctcgatctggttaatngattggtggatactaggcatccgatttcttgatgatattaagaaaggagtattctaaaaaaattcatngatttgaagaactgtttttcttagtgacagttaaaggatgtccggaaacacatctacaaactgcgtactggaatc

SEQ ID NO: 6718 - DNA, 280 bp, Glycine max
  unsure (1)..(280): unsure at all n locations; Clone ID: 701146166H1
gccacaacacaagaganaaagcgcactgctcgctcgtgttctgtttctctctgtttctccgttctctgtttttttcagatctcgaaaaatgcagagcgcggtttcactttctctccctctctccctctncggaaccctttccctaaantcaggaggggacctcttcttttattcggcttccaggcaaacaccagantcagcacnaccancagttaacngnaccggaggggtaantccatggggtttnttccaattccttaatcggggatcttggactctt

SEQ ID NO: 6719 - DNA, 272 bp, Glycine max
  unsure (1)..(272): unsure at all n locations; Clone ID: 701146167H1
catggaaggatgagtgaaaatgaagcacgtagatatttccagcagcttataaatgctgttgattattgccatagcagggatgtctaccacagagactgaagccaganaatttgctatagatacttatngggaacnttaaggttcnggtttgggttgagtgncctcttcccacaagttanggnngattgncttcctcatacnacanggntnccctccaattaangtgcncctgagncctaacgtagangcttgangggggaactncagncntg

SEQ ID NO: 6720 - DNA, 185 bp, Glycine max
  unsure (1)..(185): unsure at all n locations; Clone ID: 701146168H1
aaagagacccggaaagggtgggaaccgcttttggaaatccattgggcttggatttaagactcccagggaagccatcgaaggaacctacattgacaagaagtgccccttcatggcatgtttccatccgtggccgtatcttggngtacatgtcacagtgctaagatgaacagganattattgttagg

SEQ ID NO: 6721 - DNA, 288 bp, Glycine max
  unsure (1)..(288): unsure at all n locations; Clone ID: 701146169H1
gtaccaaagttccctgggcccgcaaatgtgattgaattgaaggttttgaaaaacaaggacattgggaaatgggtggattcaactaccccaactgcagcaatagattaattttaagttgttggaataacgctagtagtatagacacattgacctaaatgataataatacttatggatgancccacccagagtagtcctccttcaattccccgntcctcacntgtncntatatgcantatttctaagggcactaanggntaaaaggnatgaggtgcttnatggtatancc

SEQ ID NO: 6722 - DNA, 250 bp, Glycine max
  unsure (1)..(250): unsure at all n locations; Clone ID: 701146170H1
agatgaaaantaaaggaaggaatgttgtntggtcaattgcgatggatgagtgtctaattgaagccctgggcagctcagggcaaaacgtggaaacaaaattgacaaatgtttcaatgaaaatgcaacacggctgcctgtgtagcagtaaaacacttgcttcagcttgaatttgaatatcagaaagttatcaaccgttgnnaaccattaagaagaggttagagtaataaaagatatcctaagtcaggngggt

SEQ ID NO: 6723 - DNA, 279 bp, Glycine max
  unsure (1)..(279): unsure at all n locations; Clone ID: 701146174H1
ggggtctagttagagtgaatccatgaccgtgaccatggcggctgcgtttacaagtacaagtgcaacactgagactgtcaaatgttggagagagcagaggtttgcagctgcgtaagtgtaaccctaatcctaataagctgaaggttatggggantcttggaggttgttctggagtggcagtgggtgtgaganaaanntaangaattggaagggttagggttcgggttcgggcgagttcttcgtcggacgaagcagtgagtgcgcatcaaaagtgactcac

SEQ ID NO: 6724 - DNA, 286 bp, Glycine max
  unsure (1)..(286): unsure at all n locations; Clone ID: 701146176H1
gatcactttatgngtctttgaaacaaagctagcatagcatttttcttttacaaagcaagacacccttttccttttcattccatcatctctttagctttgtccaaagaccatgtctgtggtggctgataatttctgcaaaacaatggaagccacccanggtttaaatgtaaaacgggatggcccccaagaagtgtgatgactcagccaaccaagactgtgtacctcttctgcagaagttggtagcaaagtngtgggggacgtacttcttgatatttgcagggtgtgc

SEQ ID NO: 6725 - DNA, 258 bp, Glycine max
  unsure (1)..(258): unsure at all n locations; Clone ID: 701146177H1
gcacttcaattgcaatcaaattagttcattctctttgcgcagttcnctacctctnctttcaagatgcagatcttcgtcaagaccctcaccggaaagaccatcacccttgangtggaaaggtctgacaccatcgacaacgtcanggccagatccggcaaggaaggaattccccggtnagaacgtctaanatcgccggaagcagccgagacggcgtacctcgcgatacactcagagggtaaccttcactgtcttcgctcg

SEQ ID NO: 6726 - DNA, 319 bp, Glycine max
  unsure (1)..(319): unsure at all n locations; Clone ID: 701146178H1
ggtctcgtggaagtgtaagcaagcaaaaccctagcggcgcctgctttctttgttcgtgntttgcatcaggatggagtctcaggtgaagcacgcacttgttgtcnaagttatgggtcgtactggattcnagaagggacaagtgaacccanggttagagttgaaagttattgggatgatccagaaacccgtcacatccatggagggaatgtgaaaaaggaccctgtgagaaganggagttcattctccacccctactcgagttctgaaaaagggaagccaagaagattgcgctagatgggncncctttttnttgggcttgc

SEQ ID NO: 6727 - DNA, 96 bp, Glycine max
  unsure (1)..(96): unsure at all n locations; Clone ID: 701146180H1
atcaanttcaanatttattcatcaatntttaagccatggngcttgtttgacaccaacggattggcgtgtttnagggnctttcaaangnntngttaa

SEQ ID NO: 6728 - DNA, 146 bp, Glycine max
  unsure (1)..(146): unsure at all n locations; Clone ID: 701146181H1
gaccacactcttattgtnttcttcatatcttccttgtcacttgcccgtgtgtcgccgccatggccacantcaccanccaagcctccggcgcaattttccggccatgtacctcgaaatcgaaggttttgaccgggctcttcggtaaa

SEQ ID NO: 6729 - DNA, 188 bp, Glycine max
  unsure (1)..(188): unsure at all n locations; Clone ID: 701146182H1
gaagagggtgatgaggatttatttgacatggtgggttttgtggcattagccggtccgtgagtnagttggttgaatggcgagtaagccggagaagaacgtttggcaacatgangtcattcctaagccattcgatgggaagtctcagggcggagcaacttgcttcntggtctcgcgggaccctacctact

SEQ ID NO: 6730 - DNA, 136 bp, Glycine max
  unsure (1)..(136): unsure at all n locations; Clone ID: 701146183H1
gtacctcaaaaacacgtatnnttatatggaaattacaacatgatgctcnntaggggtgnggttcaagtanaaaggaccttcttctcctggagttagtgtagctagcgatgtatngtcnctaatctnngctatgnng

SEQ ID NO: 6731 - DNA, 267 bp, Glycine max
  unsure (1)..(267): unsure at all n locations; Clone ID: 701146185H1
ggctctaaataatagaaaagtactgtggnatcatcgaggagcgagggaacccaaggccaaatgcctcaactcaaccctctcantctcacgctctcatactcattcgtcactcgctcaccctctagggnttttggaatcagaaaagaaataggtttagcggacgatcatggcaccagctagggtttcggggcaatcgccggcagancgttcatggcggcggctgcgaagatcgcggctaagnagtaacccgctccgtccagcggagcg

SEQ ID NO: 6732 - DNA, 270 bp, Glycine max
  unsure (1)..(270): unsure at all n locations; Clone ID: 701146186H1
ggagtgagggggcattctgaacaaagttggggctgaaaaacagagtctccgacccagtaaggagaaatggactggtgggtgtcaatgccaaagatagaactgcatgctcacctcaatggatccattagagactctacacttctatntcgctagagctttgggtgcaaaggtgtcatagatttctcccaagtcgaacatgttatccttaaaaatgatcgttcattaagtgaggtattcaagtgtttgacttaatccacgttgttactactg

SEQ ID NO: 6733 - DNA, 272 bp, Glycine max
  unsure (1)..(272): unsure at all n locations; Clone ID: 701146187H1
aaggaagtgagaagatagatgagattttagggacagacccgcttactncaaaagaggagtatgctggtggtgtctgagtttattggctgctccccttcattaagtggggcaattcgagtgaatccatggaacattgattctgtcgctgngctatggattctgcatgaggtcccagaggctgaaaagcagatgcggcatgagaagcntatagatatgtcagtacacatgatgttgctattgggcacgtagcttcttgcaggatctggaaaggg

SEQ ID NO: 6734 - DNA, 285 bp, Glycine max
  unsure (1)..(285): unsure at all n locations; Clone ID: 701146189H1
gncactaacacattacacactcgggatgatgtttgtgttgggtgtttcttcctccggtngcagnccgnttcctgcnngctgnccacctcctccacttcaccaccttctcagtgngaagnccntcactctctgctaccctcttaacttnccatctatttccacaacttcggngnncacatcatcatgnacttcaggtgcgttccattcaaagccatggctgaagttgatactatagcagtgtcaaaaatggttnntctnctgatccgggcaacaagcnagcttgat

SEQ ID NO: 6735 - DNA, 279 bp, Glycine max
  unsure (1)..(279): unsure at all n locations; Clone ID: 701146190H1
gtacctttaggcatctttgaaggggatcacatagatactcagtaattttatcgacacgaatacagcccattgtccgtacagctaagggcacgaattaaaggatttggatcttgtgaatcctgtgcatcattatataaaatgaaattaanaaaaancgcaacaaacaaattcagttcgctccatcaaagagagtcaggggacaacactcagtttcatgagtattattatctattcaataaacatctctattggggtgggggaaaccancctganggttaa

SEQ ID NO: 6736 - DNA, 271 bp, Glycine max
  unsure (1)..(271): unsure at all n locations; Clone ID: 701146191H1
ggaggaaagancacgcagcaacagctcgtgggcggttccgattatttattaagatcaatgttgcatgcagtatctgcccctagcttttgtttaagctatcccgggaaccttcattatcctccttcttcagtttcaaaaaacatgttttctntcgttgttcggtttcacagacaaaaaatggagcnaaagtgggatatactccntggcncataattggctggggaatcnngtaaccaataccatggcaaangcacaatgtggattgaataat

SEQ ID NO: 6737 - DNA, 50 bp, Glycine max
  unsure (1)..(50): unsure at all n locations; Clone ID: 701146192H1
tataaganacaaggaattnttgaaaaattgangaaacacacncgcnnatg

SEQ ID NO: 6738 - DNA, 271 bp, Glycine max
  Clone ID: 701146193H1
ggcatatccaaaggaacaaaaatattattaagatgatcaacattattggagcattgttctactctttgcatttctcttcctcagtgtgtgtatgcacaagacacaacaaccccttggtgctggcaatcataacttttggtgattctgctgggatgtagggaacaatgacatcttcccaccctttcaaggctgattaccctccttatgggagggatttgttaaccaccaacctactgggaggtttgcatggcaattagctactgatttcatg

SEQ ID NO: 6739 - DNA, 274 bp, Glycine max
  unsure (1)..(274): unsure at all n locations; Clone ID: 701146194H1
gaagaacaaaacctgcaaganaggctagtggcctgcagggatctagtttctccattgagaagctcattaaaaaagaagaggaattactggaagatcaccaagataatcctgtcgctgacacttcaaacaagtctgtaagaatggtggnagagtttgtcaccttgtaaaatagccaatccatatgcaatagagaaccacagaatggtgctgagccacacgaagcaaatgggatctttggaaaactttgaatatttagcagaggtgcagtaggagt

SEQ ID NO: 6740 - DNA, 155 bp, Glycine max
  unsure (1)..(155): unsure at all n locations; Clone ID: 701146195H1
gaagnaagcaattgatgtcatcgggcgccgtggagatgcnaagganagtgangaatnccttccaaagaggganaacttgaaaattgaccantgcagggtgatggcacttcnacccnggcagtccctgcctccanttcncaggcntcatnacnatg

SEQ ID NO: 6741 - DNA, 219 bp, Glycine max
  unsure (1)..(219): unsure at all n locations; Clone ID: 701146196H1
gacgaagtggtacccttgttcgtttcacacctctcgatagngaantcgaggcatgggttnacaaagtacttcttagacggtccgtaattatcnntatnaccatgcaaagaggatgtgtctgtcctccnatntaatcanncacatnaaacnanccattgctcacttcagaagcctctnnaatcnaagatgtaaatnccagncnagggttgntnggnaana

SEQ ID NO: 6742 - DNA, 216 bp, Glycine max
  unsure (1)..(216): unsure at all n locations; Clone ID: 701146201H1
atttgggatcatagcaccggtgacatgggagctgatttttatcatcgatacaagggtgacataaaaatagcgaaagaanttgggctggactctttcanattctctatctcatggncaagantattcccaanggcaaggagnagttaaccccctgggnnaanncctacaacaaggnatcgnganacccgagcaaatggnccaaaaantaannnnnat

SEQ ID NO: 6743 - DNA, 226 bp, Glycine max
  unsure (1)..(226): unsure at all n locations; Clone ID: 701146202H1
gggaagaaaactggaagaggncaaaaacgtgatacgcttacaattaagtttcttaaaaaatttatccactatgctaagcataggattcaacctgaactgactgatgaggcatctgagaacattgccacggcctatgctgagctagaaattcaagttcaaatgcagngactggnggaacacttcccanngctgncaganctnnnggaaaccatgatgcntccctnac

SEQ ID NO: 6744 - DNA, 76 bp, Glycine max
  unsure (1)..(76): unsure at all n locations; Clone ID: 701146203H1
ctgtgttccctagcattgtggggcgtcaacgtaacactggggtnatggttggnatgggnaananggtgcctntttt

SEQ ID NO: 6745 - DNA, 231 bp, Glycine max
  unsure (1)..(231): unsure at all n locations; Clone ID: 701146204H1
gagggttttagagtggtggagtgtgcagaagagcgtcgcagttcgcaaccctaattcagaagaagcgcagttcaagcgagtgacagccaccagccatgggtcgtatgcacagccgcggtaagggtatatcctcttctgctttgccctacaaaggacacctcctagctggctcaagatctcttcgcaagatgtcgaagaaaatatctncaacttgcgaagaaaggtttcacc

SEQ ID NO: 6746 - DNA, 71 bp, Glycine max
  Clone ID: 701146206H1
tgattaaactgctgcatcacctatatatttaaaaggtttatgggaccatagtagcgagggctgtgccttaa

SEQ ID NO: 6747 - DNA, 220 bp, Glycine max
  unsure (1)..(220): unsure at all n locations; Clone ID: 701146207H1
ggcatcaattcaaaatatatcatcaattataagcatgggtttgtggaacacaacgaatgcagtgtcttgccgctttcacaagtttggtgatgaccaaaagaatctggtcttccaaggtgatgccacgtcttcttcnaggggattagaactcacaaagttagacggtggaggaanacnagtgggtgnagntccgggaaanccnnaaaccccncnangggcc

SEQ ID NO: 6748 - DNA, 225 bp, Glycine max
  unsure (1)..(225): unsure at all n locations; Clone ID: 701146208H1
ggcacctttntctttctccgatggctaatccctgcactcttgttcttcagtntcctcctattatccgccaccgtagccgcngccgaacggatcgacgatgaagacgaccttctgatccgtcaagtggtgccggatgcggangcnaccacctgntaaacgcggagcaccacttctccggcttcaangacaaagttcggcangacnnacgnctannngggggagcac

SEQ ID NO: 6749 - DNA, 220 bp, Glycine max
  unsure (1)..(220): unsure at all n locations; Clone ID: 701146210H1
ggatggaaggagacacataatttccactcctcaacttgctatctacactttctctctttctttttcttcaataataatttnagtcacaatattagtatttaaggagctaaatagcaatggctgcaataaccacaaaagacaacaagtagtagtaaactatatgagtgaagagttgcaaacgatttttctgtccaacttggacgaggcacccgctagacgg

SEQ ID NO: 6750 - DNA, 220 bp, Glycine max
  Clone ID: 701146211H1
gacactaaacaagttaaaagaagagcatcactgaactaacaaagcaaccctatgtcgaaggtggtttgtgtcaccggagccagcggcgccattcggatcatgggtggtcctactcctcctccagcgtggttacaccgtcatgccaccgtcccaagatatcaaggatgaaaatgagacgaaacatttggaggaaatggaaggagcaaagagtcatctccat

SEQ ID NO: 6751 - DNA, 218 bp, Glycine max
  unsure (1)..(218): unsure at all n locations; Clone ID: 701146212H1
ggcatccntacttcagtgcatagtccttcaggtactgaggcttgttcatttccctttttgacctctgcatgctctatttttgctgcctcttctacatctttcgattttgtattttgttttgttgctgcataatgttcctgttctactccccttccataacaattgcaaacgtgattttcacataagaaccaaagttactggttgtagtgtgtgtttag

SEQ ID NO: 6752 - DNA, 219 bp, Glycine max
  unsure (1)..(219): unsure at all n locations; Clone ID: 701146213H1
ggaccttaaagatacatttacccttatcgagttttgcctatgtcttatgacttacgcacacaacaataaaaggttgaattttcaacgaaggcgtccaaaccccaaacctacgcattttttcttttccccaaccaacagctcactctttatgttnctngtaaatttcgngggnnanagttcngcttcnggattgaaaanaaannggncanggngttcttt

SEQ ID NO: 6753 - DNA, 219 bp, Glycine max
  unsure (1)..(219): unsure at all n locations; Clone ID: 701146214H1
ggcacaagtttgttgagatagctagaagcaataagatgaaaatgaaagtgcttgttttgtttgttgctacagttttggtagcatatgaatgccatggctcagactaccagaagttccctctccaaatgaaaactgggtttgtggggcaatacagcaatgaggtggcatgtnccagtgggnggntnggcgtggannnancnancttgncaaggncanctt

SEQ ID NO: 6754 - DNA, 222 bp, Glycine max
  Clone ID: 701146215H1
ggaacggaaaagcactggcgcagtagccctgaggcttctcttctcttctcttctctgtcgtgagtcaccatggtgagggttagtgtgctgaacgatgctctgaagagcatgtacaatgctgagaaaaggggaaagcgccagttcatgattaggccatcctccaaagtcattatcaaattccttttggtgatgcaaaagcacggatacatcggagagtttgat

SEQ ID NO: 6755 - DNA, 126 bp, Glycine max
  unsure (1)..(126): unsure at all n locations; Clone ID: 701146218H1
ttcgcaaaccctaatttcggaaagatcggcgatggctgcctccnaggatcgcgagancttcgtctacacgccaaagctcgccggaanaggccggggtnttcnaangannnggggggannnantggg

SEQ ID NO: 6756 - DNA, 224 bp, Glycine max
  unsure (1)..(224): unsure at all n locations; Clone ID: 701146219H1
ggaagttgaagcggggaagagaaaaagaactagctagcttgctagagtgtgagaactctagcatatactagtactactacattccttcatcttcctttttatttttcaccataaaaaaacaagagcacaaagatggtgagagtccttgttgtgaaaagatgggtttgaagaagggtcnttgggctaccgaggaagatcaaattctcacatcttacatccaaaaa

SEQ ID NO: 6757 - DNA, 222 bp, Glycine max
  Clone ID: 701146220H1
gatgatcttaatgactatgatcaggagatgctcctttcctttgctactgaatgtgcaaattctgttattcctgcttatttacctatcatagagaaaaggaaggatttgcccttcaatgatcatcagaaagcatggcaacattggcgaaggggacgatatgttgaattcaatttggtatatgataggggtacaacatttggactgaaaactggagggagaata

SEQ ID NO: 6758 - DNA, 217 bp, Glycine max
  Clone ID: 701146224H1
gatccccaatcagagagaaaagttagggttcacaacttttccttttccttttgcttgcgaatctgaatcaaataatcaatcatccattcattattcatcatgtcgtcggcgaagaaaatcacgctgaagagttcggacgcgaggctttcgaggtggaggaggcggtggcgctggagtcgcagacgataaagcacatgatcgaggacgatgcgccgac

SEQ ID NO: 6759 - DNA, 215 bp, Glycine max
  unsure (1)..(215): unsure at all n locations; Clone ID: 701146226H1
atcatgcttcttcataaatttattttcaagctccttgattcccttggtggctaacataatggactaagtgacttccttgattcttaagcctcgtttctttctgaactaacatactgtgcaattcatgcacattccagtatctttcatggtattatagntcatttagaacgggccaaactcagacggtaatgagtttagaataaactgancaagaa

SEQ ID NO: 6760 - DNA, 198 bp, Glycine max
  unsure (1)..(198): unsure at all n locations; Clone ID: 701146227H1
agtgagcgtgaaagatgccttgggcgaggctttcagggtctccaaggctcgacgttgctattgacatgggcaatccatttctcaatctcactgttgatggtttccttaagatcggagctgngcagccacgcgatcagctgctgnagatacntatcatattatccaaaaggggaatatctcaagtcatgatttcgagta

SEQ ID NO: 6761 - DNA, 218 bp, Glycine max
  unsure (1)..(218): unsure at all n locations; Clone ID: 701146228H1
gggtggtaatgcgcagcgtcactacaagcagcagctactttcatgcaacccaccaagttgagcaggagcaacactttgcagcaaaagtctactcagtccatttccaaggcttttggtttggaacctgttggagctanaaggtcacatgctccctngaggctgatcttaaggactnggctcacaagtgtgttgatgctaccaaaattgcaggatttcgc

SEQ ID NO: 6762 - DNA, 214 bp, Glycine max
  unsure (1)..(214): unsure at all n locations; Clone ID: 701146229H1
ggcacaagtgagtttgttgatcgagataactagaaacagtgtnatganaatgaaggtccttgttttcttcgttgcnacaattttggtagcatggcaatgccatggtacgatatgttccctctccgantgaacgctgntatggtgcccgtactcnggagntgaantgcgcnagttggaggcttnccgtgggagcacacancancttgggnttgag

SEQ ID NO: 6763 - DNA, 225 bp, Glycine max
  unsure (1)..(225): unsure at all n locations; Clone ID: 701146230H1
ggcagagagatcagagagaatcaaaataccactttcttagtntcanactcaacttnttgagggtcttttctgnatnanaaacacangagttagtcttagctaacagtgttcanatgatgaatgcttcaaagntcattaantggtgttaactgtccggagatgganctgttnggaaaacctgcatgctcatnngctacacccagcnaacaagttccccnntgatta

SEQ ID NO: 6764 - DNA, 228 bp, Glycine max
  unsure (1)..(228): unsure at all n locations; Clone ID: 701146231H1
gcttcacctaataggataaggctcagttgctattgttgttgtaagattaatantcccatcttgagaccagnncaacagtaatatggaatcaacaccaataactataaataaaatcattacaactaacgtacttccgggtcttcttctgcccctgatagcgcatgacagcnttgcggggttacagaatgtgagacctctcngggnaaggnggaacangggggncncccc

SEQ ID NO: 6765 - DNA, 156 bp, Glycine max
  unsure (1)..(156): unsure at all n locations; Clone ID: 701146233H1
gagctcgntaanaaaaagtnctgcggagtgagactganatgagacagtcgcggtctngtcgnctcgtgtggcatacggccnctaaggtnnaactaccggncntnttagnatcggataggttncgtgagntganccanccttaatggggaagagcnc

SEQ ID NO: 6766 - DNA, 213 bp, Glycine max
  unsure (1)..(213): unsure at all n locations; Clone ID: 701146235H1
ggaagccagataaggcacaatgactgacaattagttgtcattgtacatcantttcaattaacaaccatgaagccaccatnaatggaagtactaagtaacaacttccccatgatctcctntgcaattctcagctttagatanaaggnnttnattagacaaacttggcattgtantagtagaacctnatcngactcaggttttcatggntgcant

SEQ ID NO: 6767 - DNA, 50 bp, Glycine max
  unsure (1)..(50): unsure at all n locations; Clone ID: 701146239H1
caannggagttcgtaccagcgctctatancagatcacaggcntgananaa

SEQ ID NO: 6768 - DNA, 207 bp, Glycine max
  unsure (1)..(207): unsure at all n locations; Clone ID: 701146240H1
ggaactgtgaagtgtatnggtcactgacctatcttggaagagtttgaagttcataccttcaaacccntttgcctttagatnctgattctnagtctctgctgcnatatatggcgcnacgngtatttctttgctggggatgttactgatggtgtgcnttgttaaggtttcgtctgatccnaannganangngacatactggnagangac

SEQ ID NO: 6769 - DNA, 212 bp, Glycine max
  unsure (1)..(212): unsure at all n locations; Clone ID: 701146241H1
tgcgattgttaacatgggttctggagctgctattgttattccttcggatcctctttatgctgtttatgctgccaccaaagcgtacatcgatcagttttcgagatgnctctatgttgaatacaagnggagtggattcncgttcagtgtcaggntccattatatgnggcaaccaaggnggcatcgtcggnnnntcatcantctgtgcnccanca

SEQ ID NO: 6770 - DNA, 223 bp, Glycine max
  unsure (1)..(223): unsure at all n locations; Clone ID: 701146242H1
ggaaaagattggcgttatgtatacaaggcattagctgttatagaatatctggtagcacatggatctgaacgtgcggttgatgacattatagaacatacttttcagatatctgcactttctagtnttgaatatgtcgnacctagtgtaaggatgtgggactcaatgtaaggaagaaggctgaaaacattgtgtcgcttttgaatgataaagataagatacatga

SEQ ID NO: 6771 - DNA, 213 bp, Glycine max
  unsure (1)..(213): unsure at all n locations; Clone ID: 701146243H1
ttccccccatgtactcaactgtgtttcacacgagtatagtcatggcatttgcactcatgctaaagggaaatttcagcatccttgttatactttcaatttctttgtnttgcttttactcaggttatgattatatctatctatggcttcaactaagttttctttttaaccatttattctatgcactacggatcctaatttatacaattttgtggc

SEQ ID NO: 6772 - DNA, 216 bp, Glycine max
  Clone ID: 701146244H1
ctttgccatcgtgtattactacatgctcgctgttattggacaatggaagcattcaactgcttcccggcaagaagggatgaaaggggaaatgtcaacaatataattgtgattggtgaagctgccaacgttcggccttagttcagcaccaacagaaagtgtgtttcaaaccaatagttttttttattttaattaatctacttagagtctcatgatatg

SEQ ID NO: 6773 - DNA, 216 bp, Glycine max
  unsure (1)..(216): unsure at all n locations; Clone ID: 701146245H1
cccattgtgtgtaacatttgcctaaaagaataattatttagtctcatgagaagcaaccaatttccaatttagtaccatttatcatatatcaagattggaaaatgcataataaaaaatttgttgaatatgcaggaatatttaagntganaaancaacggtngggannnaaataggtgtntagacctngaggggggnctagccctncgncttnggggg

SEQ ID NO: 6774 - DNA, 184 bp, Glycine max
  unsure (1)..(184): unsure at all n locations; Clone ID: 701146246H1
gcannaagagaggtaaatgagcantgtatgccggtttccatcttgtttttgccgggggttttggcagaattgggttcgactcccatagtcccgcggcattcccctggacctcgagataaaatgaaaaaacggacgataaacagtttgattgttaagggtacnattatttcatnngtangggttt

SEQ ID NO: 6775 - DNA, 219 bp, Glycine max
  unsure (1)..(219): unsure at all n locations; Clone ID: 701146248H1
agcagtggtggaagggttgttgagaaggggttttagaagtccacatttttcagatttgattcgcgttcctcttctctcttctcatcatcaatggcgacccccattcctccccctcnnnnnnnnnnnnnnnnnnnnnngttcgaacaccagggncgattacttgaacctncnatgtncgattcccttcgaanacctcaancgggaactatgatgtnttna

SEQ ID NO: 6776 - DNA, 194 bp, Glycine max
  unsure (1)..(194): unsure at all n locations; Clone ID: 701146249H1
ggtgcacaagtgactttgttgatcgagataactagaaacagtgtgatgaaaatgaaggtccttgttttcttcgttgctacaattttggtagcatggcaatgccatgcgtacgatagttccctctccgaatgaacactggctatgntgcccgtactccggggtgaaatgcgcaagttggaggtttgctgtggaaa

SEQ ID NO: 6777 - DNA, 216 bp, Glycine max
  unsure (1)..(216): unsure at all n locations; Clone ID: 701146253H1
ggcacaagtgagtttgttgatcgagataactagaaacagtgtgatgaaaatgaaggtccttgttttcttcgttgctacaattttggtagcatggcaatgccatgcgtacgatatgttccctctccgaatgaacatgggctatggtgcncgtactccggaggtgaaatgcgcaagttggaggcttnctgtggangcncacanattcttggcntttga

SEQ ID NO: 6778 - DNA, 200 bp, Glycine max
  unsure (1)..(200): unsure at all n locations; Clone ID: 701146254H1
gaagaatagtgtgataagtattangaataannagctgccactcatgacgaagcagaaaattcgcaacgctgcttttggtgcacttggtgatncnctnctgctttnctacancggttgttcatgagagtngtgtctctcttgcngnttacgggaacccgattttnagatcaaattttcatccnatttangannttccaggg

SEQ ID NO: 6779 - DNA, 215 bp, Glycine max
  Clone ID: 701146255H1
ggagagtgaaactgcgtcaaaccctctcctcgccgtcatcgccgcagcattgggccaccatcagtttctccggctacgtgttgcagaatggagtcaaatcaggcagcttcttctatggaagttgagactgtcccactgaagccaaacttttgccaccaaagccaaagtttgagcctttgaagcctcatgagatgtctgatggtcaggtacagttc

SEQ ID NO: 6780 - DNA, 214 bp, Glycine max
  unsure (1)..(214): unsure at all n locations; Clone ID: 701146256H1
ggaggcaaagcaaagcacaacacaaaatggggatacttagtccagaacagctccaattcttcaactctcaaggttatcttgtgattgaatctttcgcaagtagcgatgagattgagtccatgatgcagaggatgagcagttggtggatgagtttganccttcttccaccgnctctatttnctccaccaagaaccagcaaaagttgactgatgat

SEQ ID NO: 6781 - DNA, 211 bp, Glycine max
  unsure (1)..(211): unsure at all n locations; Clone ID: 701146257H1
ggttcttaccagatggctgccncagntanactcttatgtttgncctntctctcgntgntcanctctttntccatagctcaaacctangnaagaccaaaggcacttgtncttcctgtaaccaaagatgtttcgcntnagttcctcagtatgtcacacaaatcaaacaaagaaccccacttgtggcagtgaaactaactgtggaaanaggtgg

SEQ ID NO: 6782 - DNA, 210 bp, Glycine max
  unsure (1)..(210): unsure at all n locations; Clone ID: 701146258H1
ggccaaagccaaaacaaaactgagtcatttctttgtttaggagtttggttctgcaaaaagccnnnnnnnnnnnnnnnnnnnnnnnnnnnnnnagacctcaaacggtggtggtattggaggcctttacgtcaagttatgaccgacgaccaaatggaactgctcaggcaacagatttctgtctacgccaccatctgtgaacagctcgttgag

SEQ ID NO: 6783 - DNA, 215 bp, Glycine max
  unsure (1)..(215): unsure at all n locations; Clone ID: 701146259H1
caattgaaattaaaaatatccaacgcggcaaacacggcagtgancactggagtctacgatactgaaggaaggtttgtaccttcaaaatttgaagaaatttttaacaagcatgcacatacacatccaaatgctttgacatatgatgagttaacggagntgataaaggcaaatagagagcctaaagatttctcaggaaggattggtagtgtggttga

SEQ ID NO: 6784 - DNA, 213 bp, Glycine max
  unsure (1)..(213): unsure at all n locations; Clone ID: 701146261H1
acccctaatacaaaaactagtctaggtgcccaaaaatacaagggctgaaaaatcctatatttctagggtaccctacctacaatatggagccctatatacaaggaccaaatataatgacatcctagtctaatatgtacaaagntaattggacccaaccttggcccntgggctcaganatctaccctaaggttnatgagaacccggggcttnttc

SEQ ID NO: 6785 - DNA, 216 bp, Glycine max
  unsure (1)..(216): unsure at all n locations; Clone ID: 701146262H1
gacagcagagcaaaagnaagaangaaactgcaacttcctctgttttgtcccctgtttaggccttttcataagcttagaatgacacacaaggaattttccattgctctagtgactctcattgctgttctctttgnaaacanggaacatnccaggggccactgctgactatggtagttggcagagtnctnatgccatttttaggncgggggttttttt

SEQ ID NO: 6786 - DNA, 216 bp, Glycine max
  unsure (1)..(216): unsure at all n locations; Clone ID: 701146263H1
ggcacaagtgagtttgttgatcgagataactagaaacagtgtgatgaaaatgaaggtccttgttttcttcgttgctacaattttggtagcatggcaatgccatgcgtacgatatgttccctctccgaatgaacatgggctatggtgncccgtactccggaggtgaaanccgcangttggaggttnctgtggaagnananaatatnttnggnttnna

SEQ ID NO: 6787 - DNA, 193 bp, Glycine max
  unsure (1)..(193): unsure at all n locations; Clone ID: 701146265H1
ggtgagttgagaagatcgtgagangggcagtagccgagattccgtgagttgcaaaaatgaagacgattctttccaccgagaccatgaacatcccggacggcgtgagcattcaaattnatgncnaagggtnatcgaagttgagggcccccgnggaaaattggtgcgaggnttcaagcntttgantctantnnta

SEQ ID NO: 6788 - DNA, 204 bp, Glycine max
  unsure (1)..(204): unsure at all n locations; Clone ID: 701146266H1
ggtaacagcgagaggcaggacataggcatgttaggtggaatccaattctcaaaccccaatcgtnactcagtattctncttcttgttcttgtntctgtttcgtcattntntatctatgtgccttgaatccaattgtgangcttagaatttgttgcacttgcacgcgttgacggacaatgangctccctgtgcgttactggntgng

SEQ ID NO: 6789 - DNA, 215 bp, Glycine max
  unsure (1)..(215): unsure at all n locations; Clone ID: 701146268H1
ctataccccatcgagatatgaaggcacggtanaatttgctnaaaattanacanactcttatttatatactttnntanaaaatgcntgatgttagaccttacaacaatatattatacattaattaattncacaacagcttgtagttgnagatnttcgttcattatttcagtgtaacacgattcntagatnnngganatgagattgactantgannc

SEQ ID NO: 6790 - DNA, 195 bp, Glycine max
  unsure (1)..(195): unsure at all n locations; Clone ID: 701146270H1
ttggattcgaaaatcgtagcgtacgctgggtgcgattgaacgatacgatgggaagaggaaaattcaagagcaagcccactggtcgccgccagttctccaccccggaagatatnttgctggaacctctaaccgtcctcgaacttttagacaggttttattcctggatcctttccccctcttcnatttngcanctct

SEQ ID NO: 6791 - DNA, 215 bp, Glycine max
  unsure (1)..(215): unsure at all n locations; Clone ID: 701146273H1
ggatccaaaccannncnanntccctnnaaaaccctagtctcgcaatttcgaaatttatcactcactcagtcactctcatcatccncttggactnattcncagggccagaaaagagaagaagaaatggggttagtgtgagagagataagctgtagcggagagcctgtcctggacagtgataacggggaggagtttgnggcaggtnnaaancggcnt

SEQ ID NO: 6792 - DNA, 210 bp, Glycine max
  Clone ID: 701146274H1
cccctgaatgttcattcaatagctataagttgacatccttcctttcattttcgggcacaaggaagattacccttagcataagtatattgtttttctaagacatggtgttctcgcgaatgatttatttttcttgcaaaaagcatgtttgcctttttaggtggaaaaaacccggtggaccattcggtcctgctacccctttttcggagcccc

SEQ ID NO: 6793 - DNA, 209 bp, Glycine max
  Clone ID: 701146275H1
ggtgcacaagtgagtttgttgatcgagataactagaaacagtgtgatgaaaatgaaggtccttgttttcttcgttgctacaattttggtagcatggcaatgccatgcgtacgatatgttccctctccgatgaacactggctatggtgcccgtactccggaggtgaaatgcgcaagttggaggcttgctgtggaagcacacaacatcttt

SEQ ID NO: 6794 - DNA, 210 bp, Glycine max
  Clone ID: 701146276H1
gactctgttacggtgcaacctagcagcctccaaatccaatggcttcagagaagaaactttcgaacccaatgagggagataaaagtgcagaagctcgtcctcaatatctctgttggcgagagtggagatcgctcaccagagccgccaaggtgttggaacaacttagtggccaaaccccagtgttttccaaagcaaggtacactgttcgttc

SEQ ID NO: 6795 - DNA, 213 bp, Glycine max
  unsure (1)..(213): unsure at all n locations; Clone ID: 701146277H1
gacccacaaaacaaaccatccatcatcaaatctcccattattcttcaaattctctccaacgttataaaccaccttcaatcaacgttatatatatatcggttattattaattttattttcacgtaatgggcacttacgtttgnatgcactttggcgcctcctttgntgangaantcnaaggccacgngggtnatcattcccancggtgaagtgt

SEQ ID NO: 6796 - DNA, 217 bp, Glycine max
  unsure (1)..(217): unsure at all n locations; Clone ID: 701146278H1
tactgtgcttaacaagattaaaaaaaaaaatcttcaaaggacaagtttattaccgatcatattgaaattgagctcagtcacagcagcaagtgcacatccaccaatgattggaattaaagacagatagacaggcacaggaagctctcacccaaaagaaatcttgaaaccagaacactaaangcaggttcaccactcttgataatnngngtaaacgncc

SEQ ID NO: 6797 - DNA, 226 bp, Glycine max
  unsure (1)..(226): unsure at all n locations; Clone ID: 701146279H1
ggcagttcaaagcgaagaaagattcgaaacgaagaaagaaagcgttgtgaagaatggcggaagagggacaagtgatcggtgtccacagcgtagaggagtggaaggaacatctcaagaagggagaagagtccaagaaattgattgtgtggattttactgcttcttggtgcggtcaatgccgtttcattgccncaattcttggaganttnnctaaaaantngcngnnt

SEQ ID NO: 6798 - DNA, 219 bp, Glycine max
  unsure (1)..(219): unsure at all n locations; Clone ID: 701146280H1
gacacgcagttgtattgtanaactgaacaagggtttctctttctctttctctgtctgcttcttcactttctctcgtttcaatcgaaaaaaatcatgggcagaaaattcttcgtcggtggcaactnacaatgcaatgggaccactgaggangtgaagaagantgttactactttaaaatgaagctaaagncccggagaagatgttgtagaagtngnnnnc

SEQ ID NO: 6799 - DNA, 144 bp, Glycine max
  unsure (1)..(144): unsure at all n locations; Clone ID: 701146281H1
ctatntangntgtnganttanaatataaccatgcatgccattaactattttttttntacattaaagcaagcaaacnacttaaatgtcaatttgaatgggtgcattttnataagaggcatncngganttnnagcagagtgttnnt

SEQ ID NO: 6800 - DNA, 210 bp, Glycine max
  unsure (1)..(210): unsure at all n locations; Clone ID: 701146282H1
ggtacaaacaaatgcttctgaccatatgatcaaaatacatgattatgtttttgtagactgtaattaccatgataaatcaagcaatcggagcagctggagttgtaagcaaagaatgcaggtccgttgtcaataatatggacaaacaatcttggaattgctctnggctgaagcaaagccagaaaagatcggcntaaaatggnttggtacctt

SEQ ID NO: 6801 - DNA, 163 bp, Glycine max
  unsure (1)..(163): unsure at all n locations; Clone ID: 701146283H1
gacattatctctctttatatcagttgtcttaggctgagtttctaaagcaaaaganaaagaaagcaaagggttggcattgaccccttgcacaaaggaaaagagggtggtgcgtgttaaaaaaatatgaacttggtggttaaagttnaaacaggttttccnnncc

SEQ ID NO: 6802 - DNA, 170 bp, Glycine max
  unsure (1)..(170): unsure at all n locations; Clone ID: 701146284H1
tacggatgcgagaagacgacagaagnntacggctgcgagaagacgacagaaggggggcatgccttgtaatatgcctatacttgtttttacatattcagcgtgtggttattntgttgagttagtagtgcgttcgtggtaaacgagaatcgaatcattcttgtttttggatc

SEQ ID NO: 6803 - DNA, 211 bp, Glycine max
  unsure (1)..(211): unsure at all n locations; Clone ID: 701146285H1
ggcatcaattcaaaatatatcatcaattataagcatgggtttgtggaacacaacgaatgcagtgtcttgccgctttcacaagtttggtgatgaccaaaagaatctggtcttccaaggtgatgccacgtcttttccaggggcatagaactcacaaagttagacggtggangaaaaccagtgggtggcatgtggggagagtgttatactcttt

SEQ ID NO: 6804 - DNA, 216 bp, Glycine max
  unsure (1)..(216): unsure at all n locations; Clone ID: 701146286H1
ggcagttcaaagcgaagaaagattcgaaacgaagaaagaaagcgttgtgaagaatggcggaagagggacaagtgatcggtgtccacagcgtagaggagtggaaggaacatctcaagaagggagangagtccangaattgatntggtggntttactgnnnntggggnggncnaatgcctttcttgcccaattntggcagagtttgctaaaagttncc

SEQ ID NO: 6805 - DNA, 211 bp, Glycine max
  unsure (1)..(211): unsure at all n locations; Clone ID: 701146288H1
ggacagaccaaactgaaactgatacacacaacacagcgttngcagtaagcaaagcaataaatagcgaataagtnaaaaaaaaaagnnngannnaagaaaagaacgcagaaactgaactcaacaatggcagacccanggttaaatacgntcgccaactcagaatatggggcgaacaaggtcaggcagcccttgggaaatctagtatttgctt

SEQ ID NO: 6806 - DNA, 208 bp, Glycine max
  unsure (1)..(208): unsure at all n locations; Clone ID: 701146291H1
ggaagccagataaggcacaatgactgagaattagttgtcattgtacatcatnttcaattaacaaccatgaagccaccattaatggaagtactaagtaacaacttccccatgatctcctatgcaattctcagcttagatataagtcttaattnaacaaacttggcattgtagtagtagaaccttatttgactcaggttttcatggctgc

SEQ ID NO: 6807 - DNA, 210 bp, Glycine max
  unsure (1)..(210): unsure at all n locations; Clone ID: 701146292H1
gttgtaagctcctatgatggtgaagatgtacttgtatcttttggagggtacaatggacgttacaacaatgaggtctatgttcttaaaccaagccacaaatcaaccttgcaatccaaaataattgaaaattcatacccagacagtgtttcagctatcccaaatgtcacaaatgtggagtctgatttgaagcnggccaggnttctaanccac

SEQ ID NO: 6808 - DNA, 212 bp, Glycine max
  unsure (1)..(212): unsure at all n locations; Clone ID: 701146293H1
gncccaagaacacaacgnagccatgtaaaatttgcaggcaaaagggtaggtcccgccttaaaggtagtctcagacattcaaacaaatccaatcacattcatccttacaaaacttttgtgatggccattatgaacacagacncatggcatgcacccnnacacaccnagngtgttttncncgcccccctttnagcttttngaagnnttctantg

SEQ ID NO: 6809 - DNA, 209 bp, Glycine max
  unsure (1)..(209): unsure at all n locations; Clone ID: 701146294H1
gattgggaaaggaaataaaaaatgaaagctcttacctttactgggcatacaagaacaacattccagttttctgtccgggcttaactgatggctcattgggggacatgctgtacttccattccttccgcatcctggtctgattgtggacatagtncaagatatangggcaatgaacggtgaagcagtattgcaantcccnggaagaccgt

SEQ ID NO: 6810 - DNA, 218 bp, Glycine max
  unsure (1)..(218): unsure at all n locations; Clone ID: 701146295H1
aagaggatttcataccaatctctatgctgttcatggcatttacagtggtgggaaggaangcaaaagtagagttcaatggcttagatcaatggttggaagtcctgaccttatctctataccaggagaaactggcagattgtntgaagcgantgttnatgatgttggntataggctggtggccatctatccnccgaaaagagagnatggnntagancnat

SEQ ID NO: 6811 - DNA, 209 bp, Glycine max
  unsure (1)..(209): unsure at all n locations; Clone ID: 701146296H1
gganctgtnaagtgtacnggtcactnacctancttggnanantttngaagtgngcanccctcngacccttttgccttcagattctgattctgagnctctgctgcnatatatggcgccacgattncaancttgtgntgggatgncgctgnatggtgngncttgttaaggtttcgcctggtccaaagnagagnagaagaaanacnggaaga

SEQ ID NO: 6812 - DNA, 278 bp, Glycine max
  unsure (1)..(278): unsure at all n locations; Clone ID: 701146301H1
ggaacaatgagcaattaatcaatcacattaagaaattaacttgctttcatagttttcacatatttgaagtgacatcatgaatatggaggggcagaagaaaaacaagagggnggctgtnttggtgggttgcaattaccccaacactagcaatgnattgcatggttgcataanntgtgttggcaatgaaggacacgctggagaagcgctttgggtttgatccctctaacattgagcttctcactgatgcacctcactcttctaataaattgcccactggt

SEQ ID NO: 6813 - DNA, 271 bp, Glycine max
  Clone ID: 701146302H1
ggcatcaattcaaaatatatcatcaattataagcatgggtttgtggaacacaacgaatgcagtgtcttgccgcttcacaagtttggtgatgaccaaaagaatctggtcttccaaggtgatgccacgtcttcttccaggggcatagaactcacaaagttagacggtgaggaaaaccagtgggtggcagtgtggggagagtgttatactcttctccagtgcacctttgggaaagctctacagtggtcgcaagctttgaaaccgacttcacctt

SEQ ID NO: 6814 - DNA, 270 bp, Glycine max
  unsure (1)..(270): unsure at all n locations; Clone ID: 701146306H1
gatgacaaacattgcagcaaaacttaagaccttgggaatggttgtgaatgagaacttccatgttgagtttattctgaaatcattactgtccgagtaaggctcgttccaaatgagttataacaccataaaagataaatggaatgtgcatgaattacacagtatgttgtgcaggnngaaatgaggcttaagaatcaaggaagtcacttagtccattatgtaagccaccaagggaatcaaggagctagaaaaaaatttgtgaagaagcatgat

SEQ ID NO: 6815 - DNA, 271 bp, Glycine max
  unsure (1)..(271): unsure at all n locations; Clone ID: 701146307H1
atatccattacacgggcacagattgaaattattatgagaaaatcgataagcctaataatgttattaataatactccagcaaacctttaaattaagaaaaagctcacctcttgtatccaagtattgaacccctgacgtaaagtctggtaaacaacaaaaacaacgatacttaacaaatattcatgaaatgtgcatcacgaatatcatgctaacaacttctaaactttgtgaaagttaaacnnngatanngagccaataaaaccacagatcgg

SEQ ID NO: 6816 - DNA, 262 bp, Glycine max
  Clone ID: 701146308H1
ggaactgatgcttatgctcatgctaagaaggctggtcgatataagcagataaagcgtactgaaggggtttccagcactgatattgttggtcgcatgcttctctgtgtaagagaaaggtctattactgaaaaaaatcataatcattcttctttacaaaacaattcagcaatggccatagtccgaagtttgaagctggtgcatctgctgcaactgcaagtggaactcgtatatctcattttttgcctacatctcgtagaattgt

SEQ ID NO: 6817 - DNA, 275 bp, Glycine max
  Clone ID: 701146309H1
gtgttttttaagacttgtgaatttcaatgcaccatgaaaaagaattttggaacatgggtgactatttttgtgatggttgtagggtttcatcaaaggagaaaattattccgttgtgcttttgttggtttttattattgtgaactagttgagtgttgttttgctcagcgagagcaattttacttatgattataagttaaatttcttttcatatcaaggattagttggtgttttggtttgtcaaatttgttgcgagcaagataattatcatcatgaac

SEQ ID NO: 6818 - DNA, 273 bp, Glycine max
  unsure (1)..(273): unsure at all n locations; Clone ID: 701146310H1
gacagaggagccgagtgatatttgcttggttagcttggagacagcctcagatgcttcttttggatgagccaactaatcatttggatattgagacaattgactcgttggccgaggcattgaatgaatgggacggtggcttggtgcttgtcagccatgattttaggctcnaaatcaggtggcgcatgagatatgggtatgtgctaatcannctgtgaccagatgggagggtgacattatggaattcaaggcgcatctaaagtcgaaggcgggttt

SEQ ID NO: 6819 - DNA, 272 bp, Glycine max
  unsure (1)..(272): unsure at all n locations; Clone ID: 701146311H1
ggaattgaagtgaagaaggagatggctgcaacctcttccttgtgctcatcgaccctccaatcccagatcaatggattcttccttcacaaaacctctctttcccatactccttccctnattttcncnnggggnaaattctaccccagtnganagggtnnatctccgnagtngcaagttttcaaaaagcgatcacngtgtctccggncanttttttcggaaannttncnaatgggggagcggggtaancnctggggattggcggtgttgatgga

SEQ ID NO: 6820 - DNA, 283 bp, Glycine max
  unsure (1)..(283): unsure at all n locations; Clone ID: 701146313H1
ggagtcgaatatccatcactcactcacacattggttttctctctcctgactgtnaccctccatccattaacagtctccatcactctcctctccctcctaattacaatttaataaatccacctcactcattcatcccttcttcactcttccaaaaccattgaatcactccaatgatcctcctctcatcagcggactccacattctcccccgcttactccctcgccgagatttggcctgggaatgccccattttcccgatcactctcacctcaccgccaccgntt

SEQ ID NO: 6821 - DNA, 289 bp, Glycine max
  unsure (1)..(289): unsure at all n locations; Clone ID: 701146314H1
gggattctgtggcgatttggatatgttatgtggttctcttgggggatggggatattgctgtgagacaaactgaaccggatcctgtagttgaggatgactacagtgatgaagaaattgatgtggatgaactcgagaagaggatgttnagggacaaaatgcgtctcaagcgattgaaagaacaaccaagtccaaggaagggacngatgcagcaaagcaaaggcaatcccaagagcaggcaaggaggaaaaagatgtcaagagcccaagatggaatactgaagtacatgctg

SEQ ID NO: 6822 - DNA, 284 bp, Glycine max
  unsure (1)..(284): unsure at all n locations; Clone ID: 701146315H1
ggtggcactcaaacattgtttgntgtaggaagaggaatcttgagaaatggcaggggacagcaagagcaagattctgttcatcggagggactggttacatcggaaaattcatcgtggaagccagcgccaaagctggccacccaactttccttttggtgagggagtccactctctccaccccgcaaaatcacccctcatcgacaatttcaaaggcctcggtgtcaatcttgttttaggagatctatacgatcaccaaagtttggtgagtgctataaagcaggtcga

SEQ ID NO: 6823 - DNA, 271 bp, Glycine max
  unsure (1)..(271): unsure at all n locations; Clone ID: 701146317H1
gacagangagccgagtgatatttgcttggttagcttggagacagcctcagatgcttcttttggatgagccaactaatcatttggatattgagacaattgactcgntnngncgagnccntgaatgaatgggacggtggcttggtgcttgtcagccatgattttaggnctaaatcaggtggcgcatgagatatgggtatgtgctaatcaatctgtgaccagatgggagggtgacattatggaattcaaggcgcatctaaagtcgaaggcgggt

SEQ ID NO: 6824 - DNA, 266 bp, Glycine max
  unsure (1)..(266): unsure at all n locations; Clone ID: 701146318H1
canctccttttgttgatgtngcntattttctataaccaacnaatatnaaaagtntntaataaanataaacntataatatanaatttttatgttagcnaaaggttggtganattgtcatgtatacctgtcntttctcagaacannaataatgtnctanatcacgtttgagaaggatcaacccttggatctgggatatgagcaaccatttcctccttagtnttgccctcatcatatccnntgagtcagtncatantnaaattgcctcc

SEQ ID NO: 6825 - DNA, 119 bp, Glycine max
  unsure (1)..(119): unsure at all n locations; Clone ID: 701146319H1
ggagctttagtattcttttcccctagattcagccacagttggananaaaaaaaaagttgttnganangtcanttncgaagcactntgctangtaanttcanaggaggnaaggcaccnng

SEQ ID NO: 6826 - DNA, 265 bp, Glycine max
  Clone ID: 701146320H1
ggattgaaaaggcgcccaagcaagtttgttctttcgccgccgtcgctcacaactcgcaaaccacaatgcctaagcagatccacgagattaaggatttccttctgacggcacggaggaaggatgcgaggtcggtgaaaatcaagaggagcagggatgtcgtaagtttaaggttcgatgctccaagtatttgtacacgctttgtgtctttgatcctgtttagccgataaattgaagcaatctcttcctcccggtttgagtgttcaag

SEQ ID NO: 6827 - DNA, 267 bp, Glycine max
  Clone ID: 701146321H1
tggagatcggtgactgaggaatacagcgacaaagtaatgggtctagcttgcaagctcatggaggtgttgtccgaagcaatggggttagagaaagagggtttaagcaaagcatgtgttgacatggaccagaaggtggtggttaattactaccccaaatgccctcacctgaccttcactcttggcctgaagcgccacacggatccgggcactatcaccttgctgcttcaggaccaagtgggtggacttcaagccaccagggacaatggc

SEQ ID NO: 6828 - DNA, 266 bp, Glycine max
  unsure (1)..(266): unsure at all n locations; Clone ID: 701146322H1
gaacggagaaggaaaacatgntggatccatcaatggtgtccgatnactttcacgcaaagtcngaaanatcagggtcatttgttcgtgctcacaatctgaaccaagggatttcattgctggaatctcttgaaagtagatataaaagtgaatccacaaaagatgagatgatgatatgtttgtcctttcaacaagcaaccagcgagtatctgttcaccttttgggtaaagatatnnttcntngtaagctaagtcgacttgangagtnnt

SEQ ID NO: 6829 - DNA, 266 bp, Glycine max
  unsure (1)..(266): unsure at all n locations; Clone ID: 701146323H1
gatctgcccttgntntgattcctaatacaaacatggcaatgaagaagctcttgtgggttgtccngtcnctatcttgggttctnggagtggccaatagctttgattttcacgacaaggatttggcgtccgaggaaagcntttgggacttgtacgagagatgggagtcaccacacggtttcgcgaanctcggtgacaagcacaagcggnnnnnacgtgtttaaagcaaatgtgatgcatgnnnnnaacactaacaagatgggagggcc

SEQ ID NO: 6830 - DNA, 271 bp, Glycine max
  Clone ID: 701146324H1
tccctatgacacagatgttatcaaccaattcttagaagagggacaacgatgcgaatacattgagagaaaaatccaatttgcaggttttgatggagagaccataggtaagctactttgctcccctggacatgattttgtacgaagcgtagcagggaagcgggtgcaatcatgcacaatagcatgactactttgactcaaatctggatgactcttctacttagtaacatccttccgaatgaccacaactctgatctcgaactaccaaaatttt

SEQ ID NO: 6831 - DNA, 251 bp, Glycine max
  unsure (1)..(251): unsure at all n locations; Clone ID: 701146325H1
tacacccccacatganttaaaaaatttatttctaacatagcctttcaacgaaaatttgtttctcttatataaaatgagtttaatgtttatgtacttatgctatcattcaatcataaatcaccgtatgaattactttaagataattattaaaagtcaacaaattatcatncataatgagttgtgattggntgattgtgtacaactttgactaaattgcaaatttgatccccctatttattttagaattcaat

SEQ ID NO: 6832 - DNA, 279 bp, Glycine max
  unsure (1)..(279): unsure at all n locations; Clone ID: 701146327H1
ggcagtaaagtgagttaaaagaaccgataatagttgttccttcacttctccgctctctctgccactgagccaagaagatggcctcacaggtttgcaaatctgnttccagagcngcnaggnccctccaacctcccngttnnnnncnaanggacgtgcgcttggggctctgcggntgtttnattaaanngcncntttttncggnaanacggttctgaaatggaaccgtttttttatnantcatncatnnnnnngggtttcangaggtncntgtctctttcc

SEQ ID NO: 6833 - DNA, 280 bp, Glycine max
  Clone ID: 701146328H1
ggatgacaaagaatatattcctgatcctgaggataagaaaccagaggggtatgatgacatcccaaaagagctcccagaccccgaagccaagaagcctgaagattgggatgatgaggaagatggtgagtggacaccccctaccattgccaaccctgagtacaagggcccatggaagagagaaaatcaagaaccccaactataaaggaagatggaaggcaccattgattgataacccagatttcaaggatgaccccgacctctatgttttccccaacttgaa

SEQ ID NO: 6834 - DNA, 283 bp, Glycine max
  unsure (1)..(283): unsure at all n locations; Clone ID: 701146330H1
gacctcttttattcatcccttcctttcactntctccttcaaaccacaatcccanaccaanagcaaacaaaccaaacacgacataaacgcaaatgctaactccgancaccggagtaccgaancnccggccgcgatctggccggacgccgcttcagctcaagaacactcctgccgatccattcatccttccgcgaagcccaagcccaagcccaagccgtatttcgagatttcattgatcgacaaagagaacaatccggttgccgccgtcgcggttctggtggcgc

SEQ ID NO: 6835 - DNA, 294 bp, Glycine max
  unsure (1)..(294): unsure at all n locations; Clone ID: 701146331H1
gagttactgacagtggcagagagagaaagacgtgcagagtgtgagtggaagctctctgttctgttctaatgtncttctcttgcaacctctgaatctgtaggcttcagttgtgcaatttaacagagtgtgcttaagaaatagtaattnngtatatttactgtaaataagntcagcatgggtgaggagaccagcgaatgaagtttctaagattgactcagatgagaagagcttgcaggagaatactttggatgaaatgangnaaaanggcttnnaaccaagggggaaattttcgcc

SEQ ID NO: 6836 - DNA, 243 bp, Glycine max
  unsure (1)..(243): unsure at all n locations; Clone ID: 701146333H1
gaaggatcancagggagaantangtttatagggtttacaccgaggcagncacacctcccgcagcagccatggttctcacaactgnncncatgcngnttcagtggtgccaagatctacccagganagggcatcagattcnncgtggtgattcccaggttttcctgtttgcaaactcaaaatgttagaggtattccacaatcgcctgaagccttcaaagctcacctggactgcaagtacagaaag

SEQ ID NO: 6837 - DNA, 204 bp, Glycine max
  unsure (1)..(204): unsure at all n locations; Clone ID: 701146334H1
gatagaattcattctatacacacacagaaagaagaaccaccaagaaagaagcataggggaaaatacatcgatagagagaaattgaagggtgctacgtccttctattgtattaatgattganattcgtgtgggaattgtcttgttggtgtggtagggataanacagaggatcatagtagtgctagaaattgaagtgtgtaataga

SEQ ID NO: 6838 - DNA, 264 bp, Glycine max
  unsure (1)..(264): unsure at all n locations; Clone ID: 701146335H1
acaagggatatcatcatgcgggaattccgttctgggtcctcccgtgttcntattaccacagatcttttggcccgtggtattgatgtccaacaagtctcacttgttataaattatgatctgccaactcagccagagaactatctccatcgtattggtcgtatggacggtttgggagaaagggtgttgctatcaattttgtgactggggatgatgaaaggatgctgtttgacatccaaaagttttataatgtgcagattgaggagc

SEQ ID NO: 6839 - DNA, 258 bp, Glycine max
  unsure (1)..(258): unsure at all n locations; Clone ID: 701146337H1
ggaacccagttgcaacactaattttctctttccctttttttggacttatccttctttctgcaactccaaaatgggttccaaaggggcaaaaaatctagcactctcttcagccttgttgctccntttggtcggttttgcaacctcagacatcaatcattaaagcagaatgtacggataaacttcttggtctagctggttgtctttcctatgttggtggcgaacaaagtccccaccatggattgttgctctggtatcaaa

SEQ ID NO: 6840 - DNA, 278 bp, Glycine max
  unsure (1)..(278): unsure at all n locations; Clone ID: 701146339H1
gactcctgggcagcatatactcataaatcacatagctagttgtttaaagtaagagagaagaaagaagcaaatgggcaaactttccagttgttgacatggggaagcttaacaccgaagagagacctgcagccatggagattataaaagatgcctgtgagaactggggtttctngnttggtgaaccatgggatatccattgagcttatggacacagtggagaagctcacaaaagagcattacaagaagactaatggcccanaggttcaaagaaatggtgt

SEQ ID NO: 6841 - DNA, 271 bp, Glycine max
  unsure (1)..(271): unsure at all n locations; Clone ID: 701146340H1
ctttccttatgcttaaattcaacttgtgttggttgtgtatctatctcttcatttgtgagatgtgaacctcctttacatcctgtctcaagggtgcctagagtttgctttggtacccttggaagtagctttacttctttgatctttgtttgtcaaagtttgaggcaaaaanaaantatcatggnactatatactagcttaaatcaaaacaggtgctctccttcacttcaactattttttcatgtgatcttgcctatcggtagggccggcccta

SEQ ID NO: 6842 - DNA, 271 bp, Glycine max
  Clone ID: 701146341H1
ggacttcatacatgaaaatgcattgtcgggacgaactacatatgtccattgcaaagctggacgtggtcgcagcacgactattgttatttgttatctggtgcaccacaaaatgatgacacctgatgctgcatatgcttatgtgaaatcaattcgaccaagggtgctcagcttcctctcagtggcaagctgtccaagaatactattaccatcttatggttaggagggctgttggatgtgctcccacagccaatcttattagtaaaggcttctc

SEQ ID NO: 6843 - DNA, 174 bp, Glycine max
  unsure (1)..(174): unsure at all n locations; Clone ID: 701146342H1
ggatccaaagtcgcatctttgcttcaanctacgcagatcgcagcaaccagaagatgactcgagngctccgcgtctcntcgngtgcaatcgcacgcgacggcanngctgttcttagatngatancgcatgnngactgaagtcaactngaantanaangtnaatgacgtatngntt

SEQ ID NO: 6844 - DNA, 173 bp, Glycine max
  unsure (1)..(173): unsure at all n locations; Clone ID: 701146343H1
gtcgtgggcgcgaggctagaactatatgaattaggctttacataggcgctactattcagatcatntaaatcattagattaatntagttcaagtattgnggtnctggtnnattcaagttatttgtctntatttgaaaatattaaaaaacacaaacacatncntaacttgaactc

SEQ ID NO: 6845 - DNA, 273 bp, Glycine max
  Clone ID: 701146344H1
agggccaagtattactacatttctgggcttttcctcactgtatctccctgatttccatacaattggttgctgaacatgcagctgcaaataacaagatcttcatgatgaacctttctgctccctttatatgtgagttctttaagggtgcactggacaaagttctgccaaatggattatgtttttggaaatgaaactgaagcaagaacattttctaaagctcaaggctgggagactgataatgttgaagaaatagctttaaagatttctcaattg

SEQ ID NO: 6846 - DNA, 266 bp, Glycine max
  unsure (1)..(266): unsure at all n locations; Clone ID: 701146345H1
tccctcctgttaaaaatacctctccaagttgacgtgtnaaattcgggatctcacttctagcacgtccactttgacatgttacgattccagattttgataagaataatatgtgtgtgcgtgtgtgtgccacgagcgtaaaatttgtataaagtantgtgaacattctttgttcgataattaaagtttcatgtcgataggaaaaataaaaataagttaaaatgtatacaagcataaaaggttaatttanttantcgttgcatnttnnt

SEQ ID NO: 6847 - DNA, 279 bp, Glycine max
  unsure (1)..(279): unsure at all n locations; Clone ID: 701146347H1
ggacaagganaaggaccgacaatttaaaantcttgagcttattgcttctnagaatttacatctagagcagtgatggangcagttgggtcgtgcctcacaaacaagtactcagaaggnttgccgggtaaaaggtactatggtggcnatgagtacattgatgagcttgaaatcttgtcaacaaagggcactggnctgcatttcatgtagatgaaaacaaatggggtgttaatgttcaaactttatctggttcccctgctaattttgcagtatacactgcag

SEQ ID NO: 6848 - DNA, 269 bp, Glycine max
  unsure (1)..(269): unsure at all n locations; Clone ID: 701146349H1
gatcatngtagatattcattccccttatcttnctctcttctctctccccgcccaaaccctaactccctatcctattccgctttctcttcatccatcatganaggaggaaagtccaagaccgaatctaagagagccgatgccaaacttgctgtgaataagaangcgccgccaccaagactaggaaacccgccggnaaggggaaggcagcgaaagatcctaacaagccaaagaggcctccaagtgctttcttcgttttcatggaggaattc

SEQ ID NO: 6849 - DNA, 265 bp, Glycine max
  unsure (1)..(265): unsure at all n locations; Clone ID: 701146350H1
ggagaaaatagagggtgatcatcatcatcacaaggatgaggacacaagtgtccctgttgagaaagttgaggttgtngaaacagcacatgctgagnaaaagaaggggttcctcgacaagattaaggagaagctaccagggcacaagaanacagaggaggcacagctactactcctcctccaccaccacctgttgcatcattggagcatggtgaaggtgctcatcatgaaggagaggccaaggagaagnaaggtatattaganaaga

SEQ ID NO: 6850 - DNA, 248 bp, Glycine max
  unsure (1)..(248): unsure at all n locations; Clone ID: 701146351H1
tcntcntgcaatttttaagaagatgtctcagctcagngngcgtaccnaatgtnctattcaaggaaacaatggctagcntactcagcctctgcactacactgccagttgcnacacgtctnagccctnacattattntatacctgattctcatatccattcaattctatttgttgtnacacattnttnnatggatgtcaagtcccggatgatnttcctaatcggntaagagttagaacataaaaanganc

SEQ ID NO: 6851 - DNA, 272 bp, Glycine max
  unsure (1)..(272): unsure at all n locations; Clone ID: 701146354H1
ggttttgtttgtttttgtttgggacttgactttgcgctctttttgtctctgattccgagggaaactaactaaccttctcagtctcatagccaccaccatgaggaggatttatgatgaattgaaagagatagtgaagattcagaagttccgaagattggtgtcgtacacggcttctactgcttcgctacgcttataagctacttttacgtcaacaacacgaccaggggctggtttctctnnnanntcctcaattctacgcctcctaccccgct

SEQ ID NO: 6852 - DNA, 62 bp, Glycine max
  unsure (1)..(62): unsure at all n locations; Clone ID: 701146355H1
ggngtagntgtaaaacaggaattgcaaccaaggcatctaaaaggagtgagactggngannag

SEQ ID NO: 6853 - DNA, 265 bp, Glycine max
  unsure (1)..(265): unsure at all n locations; Clone ID: 701146356H1
ggcccgagatggatgagngcnnggttatacagcaacctctttcagccatagcanaggcgtttganaaactgtccaagagggtgaaggagaggaacaacggcaacgatattcgcttggacacgttctgcgaggcagcgtctcccgtctncgttctcttccgnctcntgngcctcgccttcaaatncgctgaattggaatacgtcgccaagcgactggactattgnaagcancanagacatgttccactctanccgatattcttaac

SEQ ID NO: 6854 - DNA, 273 bp, Glycine max
  unsure (1)..(273): unsure at all n locations; Clone ID: 701146357H1
gntggtcatggaggttcacgaccacacctcttncttaatttnacttcattagnnctattantgtcttcgcgttattcaaattagttcaaagatcggattccaaaacctcctctaccngctgcaaattgcccccaggaccaagggncactaccgctcataggtaacatgaccagtttgttggctcactgncggttcatcactgcttaaaaaatttggcagataattatgggccgctaatgcatctnaaactaggagaggtatctancatcatag

SEQ ID NO: 6855 - DNA, 266 bp, Glycine max
  unsure (1)..(266): unsure at all n locations; Clone ID: 701146358H1
gattcatgagaagtgcaaaaacagtgtaacaaaaaggaaaagaaaaccaatatgaagttcactataatcacgatatntttctctttatttctacttgactttggttttgcacaacagggggatcttgacanagnagatgtggaggaaaaccaaanacaattaggccaggctttcttaagtgcctggactcaagcatgtgcnntcaccaactgctgtcaaaattgtggattccagctggcacataccaaatgggtgcagttgatgtc

SEQ ID NO: 6856 - DNA, 266 bp, Glycine max
  unsure (1)..(266): unsure at all n locations; Clone ID: 701146359H1
gagcgagctttgtgatcgattgcgcgaancggtgngaggataaaattatngacttgcttctctggagaagttccttcaggagaggattaaggttggcggcaaggccggtgcactcggcgattccattactgtcactagggacaagagcaagatcaccgtcacccgacagcaacttctctaaacggtatctgaaatatttgaccaagaagtacttgaaaaagcacaatgtgagggattggcttcgcgtgattgcatccaacaaggag

SEQ ID NO: 6857 - DNA, 267 bp, Glycine max
  unsure (1)..(267): unsure at all n locations; Clone ID: 701146360H1
ggatcacaaatctttcgctaacactcattaattgcaanaatggcacttcgttgcttggtgatgtccctgtctgttctcttcactctcggtcttgcgagagaaagccatgccagagacgaagatttttggcatgctgtttggccaaacactcccattccaagtcttgcgagatcttctaaagcctggccctgcaagtgttgaaatcgatgatcaccctatgcaaattgaagaaacacagtacccgaaaaccttcttctataaagaaga

SEQ ID NO: 6858 - DNA, 272 bp, Glycine max
  unsure (1)..(272): unsure at all n locations; Clone ID: 701146361H1
ggaagaagaaaacaccaaaatgnnncganncgagcaggaaaagatccgaaaacgaattngantcgnaaagtnaatcnctgntcgacaatcaaanagtctccagcatgntgggngcngccaaggccgacgcnctctcgtngattccggcanggncgcntcgcaanctgctgacaagctctacgagaagcgcaaaaatgctgctcttganatngagggganagtgaagcagctagctactgctgggggatcaggataaaataacggcnggganc

SEQ ID NO: 6859 - DNA, 274 bp, Glycine max
  unsure (1)..(274): unsure at all n locations; Clone ID: 701146362H1
taatttgggaattattgctcccatcgccattggtttcattgtcggcgctaaacatttgttgggtggggccttctctggagcggccatgaaccccgctgtgacnttgggcctgctgtcgtgagctggaccggaccaaccactggatctactgggccgggcctctcatcggggggnaatgnnngnnanacngtatgttttttacccaacccncgnnnantgtcccngcnnagtcannnnanggggggggatnngantnnataaaananaattttnt

SEQ ID NO: 6860 - DNA, 256 bp, Glycine max
  unsure (1)..(256): unsure at all n locations; Clone ID: 701146366H1
gacaacacnncgcaacacaangcgcactactctctttctctcttnactacagnnaccctatcgttctanncggnatcnccgattctcgccatgcnnnnagccaatccgacgccaaanccgccgatagccggntgaagngcaagggngctggtgcnaangangcnatcgaagatagctgctaaggatcctaacangccaatgngattccaagcgcnntcttcgtgtccatgtcganttcntagagcaggntaagcag

SEQ ID NO: 6861 - DNA, 267 bp, Glycine max
  unsure (1)..(267): unsure at all n locations; Clone ID: 701146367H1
gggagaagannactaanaggatacaacagatacatcccnggttgtgctctnggtnaaangtggnanatngnttgcntgtnctttnggnaagataaggnancaatctgatcgctggaaganagganttagcaatagnaatggncaatnntcgatttccaaggggcaacaaaancaagcactgnggttaccgacaacaattccaatnccaatancaatagcagcagcnccantcagnctgaaactgacaaccagcatctccggggcngg

SEQ ID NO: 6862 - DNA, 256 bp, Glycine max
  unsure (1)..(256): unsure at all n locations; Clone ID: 701146370H1
aagaggttcaagtggnangatggcaacacttctgggaagaaattttcatgggaanaagnccccaagtttgtggnaaaagctgaagancatggntttggngttgtntgganctaatccnacatgtgcttgntgatgatanatgactggtantttcntgagtccacaaaaagntnnattnaaagtgaaatatgtatactttttggcactttataaggtagcagcagtaggttctaggttatttacttactcataagcc

SEQ ID NO: 6863 - DNA, 265 bp, Glycine max
  unsure (1)..(265): unsure at all n locations; Clone ID: 701146373H1
tcccatgatcacntttctggggacccanatgactagggctcggggancctcagatanttctgntccanctccaccagctcccgcaccagcancttccancccctctgntcagagcacagagattttagtgctgatgctgcagagccttcacnatggcttancctggtgatncagagcatccatgacctggatcagcancaanccattangagcatggaggattncatggntcaggtggctagccnagagtncagcnttntccttt

SEQ ID NO: 6864 - DNA, 248 bp, Glycine max
  unsure (1)..(248): unsure at all n locations; Clone ID: 701146375H1
gcctctatcatttactgtcntgggccaaacngtggcggtcttnttgtactgggaatggattttnacttgtncctcaattttctaacnganttagtttcttgatcaaactcnaatgnatntanctngngaaacctttgctaaatgggcantggcncgtgganaaaactcccgggncctgagatttcnncgnnacntttaacccggncaattcatcatggtaaataggcaacttgtccaagtcatctcct

SEQ ID NO: 6865 - DNA, 265 bp, Glycine max
  unsure (1)..(265): unsure at all n locations; Clone ID: 701146376H1
ggcagttcaaagcgaaagaaanattcgaaacgaananagaaagcgttcgtgaagaatggcggaagagggnnaagtnatcggtgtccacagcgtanaggagtggaaggaacatctcaagaagggagaagantccaagaaattgattgtggtggattttactgtcttggtgcggtccatgccgtttcattgccccaattcttgcagagtttgctanaaagntgccgaatgtcancttcctcaangtggatgtgggtgaattngagat

SEQ ID NO: 6866 - DNA, 269 bp, Glycine max
  unsure (1)..(269): unsure at all n locations; Clone ID: 701146377H1
ggcancaatncanaatatatcancaattanaagcatnggnttnnggaacacancgnatgcagtgnctgccgcattcacaagttcggtgatgaccaaaagaatctggncttccaaggtgatgccacgtcttcttccaggggcatagaacacagaaagttagacggtgaggaaaaccagtgggtggcagtgtggggagagtgttatacncttctccagngcacctttngganagctctacagnggtcgcaagnttggaaaccgattcacct

SEQ ID NO: 6867 - DNA, 293 bp, Glycine max
  unsure (1)..(293): unsure at all n locations; Clone ID: 701146378H1
gatcgaataaganaaacaattantaaaanatacttggtgttgaatatatngggtggagtaatggaaaaanagaagtngggggtggtccccatgnatagcattttcggaccaatgcccagcttccantggngtcacgntnnctttacggggggntttttgngccctttaagatgnagctggnaannntggcntccntntaaaacntnttggccatggnataagantttttnctaancntggagtagctttgtgaacacacggtgccnntntccncgggtattnaacgnatccct

SEQ ID NO: 6868 - DNA, 266 bp, Glycine max
  unsure (1)..(266): unsure at all n locations; Clone ID: 701146379H1
gaagaagaacaagctgtgattggattatggagtngcatgcttggntggtagggntgactgtgttcattgctntgttgtctgaatatgtggtggatacaattgaggatgcatcagattcgtggggtttgtctgtgagcttctcagcataatcttgctaccaacnttggaaatncagctgaacatgcaggagcaatcatatttgctttcangaacaagctggacatttcattgggtgtngcatgggtcagcaactcagatgcnatttt

SEQ ID NO: 6869 - DNA, 63 bp, Glycine max
  unsure (1)..(63): unsure at all n locations; Clone ID: 701146380H1
ggatgacaaagantatattcctgntcctgaggnnaagaaaccaggangggtacgnntcatccc

SEQ ID NO: 6870 - DNA, 259 bp, Glycine max
  unsure (1)..(259): unsure at all n locations; Clone ID: 701146381H1
ggaggnagaggatgagtaananaacaagtatgtcagaatcnaangccaattgcnaatggnttngctggngcangtggtggcantatngctctaatcannanttatcctcttcaaacggtaaacacgcgccatcaaactgagagaacactcaagcnacaagcnnagtttgccctccaactcaaccactgctcctggcactcttcttcagatctttcaggtcattggaactganggttggggtggactctatagtggccnc

SEQ ID NO: 6871 - DNA, 79 bp, Glycine max
  unsure (1)..(79): unsure at all n locations; Clone ID: 701146382H1
ggcctaaaattagaaattaagcctcatctttggtcaaagttgggggaaacctgtggggcaacctaacccctcttnttta

SEQ ID NO: 6872 - DNA, 258 bp, Glycine max
  unsure (1)..(258): unsure at all n locations; Clone ID: 701146387H1
ggcattcttcgacgacgaattcggtctggccgtcgatctctactctgaagccatacgattggatccgaacgacgccaatctcttcgcggacagagcccaagcccatatcaaactcaacgctttcactgaagccgtttccgatgccaacaaatcaccaattaaacccttccttgcccaaggcctatcttcgtaaagccaccgnntgtatcaaactccaagaatatcacaccgccaaggtagcgcttcaaaacccggccg

SEQ ID NO: 6873 - DNA, 68 bp, Glycine max
  unsure (1)..(68): unsure at all n locations; Clone ID: 701146389H1
gatttaattattgtaatatatgagatttttagatttaaaaaaaaatacngatntacaanngannnana

SEQ ID NO: 6874 - DNA, 267 bp, Glycine max
  unsure (1)..(267): unsure at all n locations; Clone ID: 701146390H1
tatgctttcttataatctccatcataagtatnttttttctnttagttnttaactaatgttttaaggatatcagttagcaaaatcctataaaaattagtgcgggccatagnatttaaaatcaccttataattttcntngtatcagttagctttgataacatgnagtgtgtgtttagattgatgctgattttacataactgattttgntagangttgaaataactcctatttgtnncnattccaccatgatttnntttnccatcataat

SEQ ID NO: 6875 - DNA, 263 bp, Glycine max
  unsure (1)..(263): unsure at all n locations; Clone ID: 701146391H1
ggagagaagttattagggtttttgagtncggcggtccaaacactcttctctggcagcttttgcctacaactcccttcaccatggctnaacaaaccgagaaagcttttctgaagcaaccaaaagtgtttctcagcacaaagaagactgggaagggaaangacctggaaaaggtgggaaccgcttttggaagtccattgggcttggatttaagactcccagggaagccatcgaaggaacctatattgacaagaagtgccccttca

SEQ ID NO: 6876 - DNA, 258 bp, Glycine max
  unsure (1)..(258): unsure at all n locations; Clone ID: 701146392H1
tcgcaaatctcaatcgaatctcagaaaaattagagnatcatcagcattcacatagggcaggccgggatccaggtcggaaactcctgctgggaactctactgcctcgaacatggcatccancccgacggcatgatgccttctgactccaccttggtgtagcccacgacgccttcaacaccttcttcagcgaaaccggatctggcaancacgtcccccgtgctgtcttcgtcgacctcgaacccaccgtcatcgacgagg

SEQ ID NO: 6877 - DNA, 267 bp, Glycine max
  unsure (1)..(267): unsure at all n locations; Clone ID: 701146394H1
gcctctctaagttgcacctaacttcgaaaccctccctgcaacaatttgcaaagactgttgtaatggtcttgatgatgncttgttgcctctaagcataacttcgaggcccaataagctctgcatggtgcttgacaccatccanaactgatccttggcaaaaaatgtcaattactaactatttttaaagtgacaatttaggggggaaanttancaaaatccattttgatttacctagcaagagtagtctccacctggtacatactctgc

SEQ ID NO: 6878 - DNA, 157 bp, Glycine max
  unsure (1)..(157): unsure at all n locations; Clone ID: 701146395H1
ggacccnaggtcccaccgnaaagcatttctggcatgggttccagcaacctcttcttcgtncacctcnttccccgtcggcaacanaaaggctacgttgcagcaatcnaccacngcanggtttccnagtccaatctnngtncacntntcgccaggggng

SEQ ID NO: 6879 - DNA, 141 bp, Glycine max
  Clone ID: 701146401H1
ggcacaatagagactagagaagagagaggtgttggtgccctaatcgtgagaagaaaggaaagggaaaagaggaaaatggtgtgcataaggaaggcgacggtgaaggaccttctggcgatgcaggcgtgcaacctgttctgc

SEQ ID NO: 6880 - DNA, 116 bp, Glycine max
  unsure (1)..(116): unsure at all n locations; Clone ID: 701146402H1
gtgaccaagcctcaataattgggggagcaatagattttgtgaaggagttggagcagttgcttcagtcccttgaggcacaaaaaaggacgagaaagnatgaagagggtggtggtggt

SEQ ID NO: 6881 - DNA, 219 bp, Glycine max
  unsure (1)..(219): unsure at all n locations; Clone ID: 701146404H1
ggagcaatagcaacacagcaatagctttctggtgatctcgttttctcacattgctctcttccccctttctctctcctctttctctctcttccattgcttctccataagcaacgccacgcgaggtcaantgcgcaatcgccatgactgtgatgactcctgctcccattgaccagcagcaggaggacgaggagatgcttgtcccgcacacggatttagctg

SEQ ID NO: 6882 - DNA, 99 bp, Glycine max
  unsure (1)..(99): unsure at all n locations; Clone ID: 701146405H1
gagaattaggtntttagggtttacacccgagcagcgacacctcccctcccgcagtagccatggttctcaaaactgaactatgccgattcantngtgcca

SEQ ID NO: 6883 - DNA, 225 bp, Glycine max
  unsure (1)..(225): unsure at all n locations; Clone ID: 701146406H1
ggtgccacgacagacctaagatgtatatcaatcatatgggaggattttctccgacaatggtttcttcattttggcaatgtgtttggtgagttgggaagcatggaagacatgatcgcaaaggatcctctctctaacaatgaacgtcttggtggagatcttaatcgtntctaacgaactcttgattttcagttcgagaacttccattgactttgctanggtgnatnt

SEQ ID NO: 6884 - DNA, 225 bp, Glycine max
  unsure (1)..(225): unsure at all n locations; Clone ID: 701146407H1
gagagaaagagagagaaagatgtcgaagcgtggtcgtggtggttcggcggggaacaagttccgcatgtcgctgggtcttccagtggcggcgacggtgaactgcgccgacaacacgggggcgaagaacctctacatcatttcggtgaaagggatcaaaggccgtttgaaccgtcttccctcggcctgcgttggcgacatggtgatngccacgtgaagaagggannc

SEQ ID NO: 6885 - DNA, 225 bp, Glycine max
  unsure (1)..(225): unsure at all n locations; Clone ID: 701146409H1
ggaaacgaacctcaacaacgctgaacgcagaaaggggaaaaaggggattagggtttaggaagcagcgacaacaatggatttcacagcggagaagaaggaatcagagagcaacaccgaaaatgctcatccaacaactttagattcttcttctcaattggcatcggcacttgattccagcaacaaagaaatcgangancgacaagctcgtganctcccccccggtct

SEQ ID NO: 6886 - DNA, 221 bp, Glycine max
  unsure (1)..(221): unsure at all n locations; Clone ID: 701146410H1
gtgtgcaatgtttgccatttgcattccccatctttcagctctcggaatttggctgggattttcgacagtcttcagcctagtatacattgttatagcatttgtactgtcaattaaagatggtataaaatcaccacctcgtgattatagcattccggggacatcaaccagtaaaatatccacaacaatnggggcgtctgctaatcttgtgttcgcatataana

SEQ ID NO: 6887 - DNA, 247 bp, Glycine max
  unsure (1)..(247): unsure at all n locations; Clone ID: 701146413H1
ggaagaaggcaaatcgcgaagactagatctgatctgagagaatggctcctcggtctagcagcaaggacgcccaagaccttttccgcgctctttggtctgcttatgctgcaacccccactaatctcaagatcattgatctctatgtcatctatgccgtattcaccgntttcncccaggttgtttacaggctttggttggatcatttccatntactcctnccnggnaggagtactttcttgtggaggac

SEQ ID NO: 6888 - DNA, 146 bp, Glycine max
  Clone ID: 701146414H1
gacaaggaaaaggaccgacaatttaaaagtcttgagcttattgcttctgagaattttacatctagagcagtgatggaagcagttgggtcgtgcctcacaaacaagtactcagaaggattgccgggtaaaaggtactatggtggcaa

SEQ ID NO: 6889 - DNA, 246 bp, Glycine max
  unsure (1)..(246): unsure at all n locations; Clone ID: 701146415H1
gatcacaaatctttcgctaacactcattaattgcaagaatggcacttcgttgcttggtgatgtccctttctgttctcttcactcttggtcttgcgagagaaagccatgccagagacgaagatttttggcatgctgtttggccaaacactcccattccaagttcattgcgagatcttctaaagcctggccctgnagtgttgaaatcgtggacccctnggnatttgaggaaccnggncccggaccctt

SEQ ID NO: 6890 - DNA, 235 bp, Glycine max
  Clone ID: 701146417H1
gctattactaacattactcccagaaagtatgccattgctattgttctgatggctgccaccagatttagtatcaactacaactctacgaggtataacctcattctgtttcctggaaaccattgaatgagaacgccgtaatgtatccctctccatccttccaggaaagatgttagccaatgggtcagaaccatcacagtcccagtgatctccaaaactggatctatctttctctggg

SEQ ID NO: 6891 - DNA, 240 bp, Glycine max
  unsure (1)..(240): unsure at all n locations; Clone ID: 701146418H1
taagctaggaactgattctgaattgccttataggatggcacttaactctaatggtgatggccttatttgtgcaatggaaacgcccatggtttgcagatggtttgactgggatcaaaacaagagctctgaaattcataagtngagtctgaagttgtcagagantctgcncccacagttggaggntgtgggacaccnttagcntgggaatcnanaatgggggnnccnnacangggggggggg

SEQ ID NO: 6892 - DNA, 249 bp, Glycine max
  unsure (1)..(249): unsure at all n locations; Clone ID: 701146419H1
ggaacaagtggctatataagagatgaagtttcactctctttatagcatttttgtgggatgcgtcagtgagaatggctagcaagcaagtctattagtcacctttgttttagggtccatttctcgtaccccattttgttacacacttgatanntgatttatcttgctcaaaagagtctcactttaataggattttattcatatagcactatgcagtgtgctncangtaattattggagtngncaaatattt

SEQ ID NO: 6893 - DNA, 250 bp, Glycine max
  unsure (1)..(250): unsure at all n locations; Clone ID: 701146420H1
cagatggtgtagtaatacccaaaaaggtattaaaagccattgatattaaaccttttcctgtgctatggcatgaggacaatattggtcaaagacagcaagcaagagaaaggctacaagtacccggagcaatagctggatctcaactgggagaagcagctcatcgacttgtcaaaaataccctcaacattaaatcaaataatacctcccatggattgctggagcaacctcctgtccatcatanaatgaaggg

SEQ ID NO: 6894 - DNA, 225 bp, Glycine max
  unsure (1)..(225): unsure at all n locations; Clone ID: 701146421H1
ggggggaagaagagataggggtggtggcaatgtgttaccaatatcatatcatatattctttcatcttcttgggttagggttctacacttgcaatctcctttcacacccacccacccttcaaccatttcaattcngtccctcacccaaaccgcactatcgttcttcgacacggtcctgtttattaagcggtttggataaaagantagaggcgtaaaatggcctcgt

SEQ ID NO: 6895 - DNA, 249 bp, Glycine max
  unsure (1)..(249): unsure at all n locations; Clone ID: 701146422H1
gggtgcgtgcgggttattatatataggggaagatcaacgggacgtatgtggcaggtgtgggttcttcaattcattctagttctggattccgactagccgcgttgactcggttccgtttttcattctcgcggatctaatattaaggaatagcttaagggcacattacaatgaaggcattgattctggttgggggatttggaacaaggctgaggccactgacactcagttncccnaagcctcttgttaatt

SEQ ID NO: 6896 - DNA, 156 bp, Glycine max
  unsure (1)..(156): unsure at all n locations; Clone ID: 701146423H1
ggatttggagtagaaagagaaagagaaagagaagagaataataatttttccgggaaaattcaagttccaatcggaatcggaatcggaatctgaaatgagtagtagggtttggtttctactattccttctgctgatctcgaaatgccatcaagtgng

SEQ ID NO: 6897 - DNA, 229 bp, Glycine max
  unsure (1)..(229): unsure at all n locations; Clone ID: 701146424H1
accggacngaatcaagaataatnttgtatgctataaatgtggtatcttattgaagtcccccgaagagggcatcgtattgttttcgacgagaccttaattatacactaacaacaaatataattagacattattgtgtcatatgaaaagtattcactttgattaaacgccttatgaagagaancganttgatgtgtggacaaaagtangttatgctggggtngganannna

SEQ ID NO: 6898 - DNA, 248 bp, Glycine max
  unsure (1)..(248): unsure at all n locations; Clone ID: 701146425H1
tcggagagtgctctggataatggcagagctcgctctccattgggctccgatattcaggaggttattgggagtgctattgctattaggattcttagtcatggggttgtgcccctttgggccggggtcgtcattactgctcttgatngtttnatttnccnctttctngaaaatnnggtgtgangacatangaatttttncgggctgtccncannggngtgaangcaatctcatngcatggatgttngnnc

SEQ ID NO: 6899 - DNA, 242 bp, Glycine max
  unsure (1)..(242): unsure at all n locations; Clone ID: 701146426H1
ggcacccaaaggtgcaaaaatattaagatgataaacattggagcacttgttgtactctttgcatttctcttcctcagttgtgcctatgcacaagacacaacaacccttgtgcctgcaatcataacttttggtgactcagccgtggatgtagggaataatgactatcttcccaccttttnanggctgattnccctcttnngggggggttttgnaaaccaccaacctngngggnnttngnaana

SEQ ID NO: 6900 - DNA, 240 bp, Glycine max
  unsure (1)..(240): unsure at all n locations; Clone ID: 701146427H1
ggcacaagtgagtttgttgatcgagataactagaaacagtgtgatgaaaatgaaggtccttgttttcttcgttgctacaattttggtagcatggcaatgccatgcgtacgatatgttccctctccgaatgaacactggctatggtgcccgtacncccggaggtgaatgcgcaattggaggcttgctgtggaagcacanaaatnttgggcttagagnnngncccgagatgnttnacaaaaa

SEQ ID NO: 6901 - DNA, 231 bp, Glycine max
  unsure (1)..(231): unsure at all n locations; Clone ID: 701146428H1
ggtgcacaagtgagtttgttgatcgagataactagaaacagtgtgatgaaaatgaaggtccttgttttcttcgttgctacaattttggtagcatggcaatgccatgcgtacgatatgttccctctccgaatgaacactggctatggtgccgtacnccggggtnaaatgcccantnggngtttgngggnaancacanaannttggggtttnnagacctccgnnnnngtncgt

SEQ ID NO: 6902 - DNA, 227 bp, Glycine max
  unsure (1)..(227): unsure at all n locations; Clone ID: 701146429H1
ggtgatagtattnccttttaaacatatattgcangctcaatcacaaaacaatcttaatatagtcactgaatttatgtatattttgaacttttgtagganatggaaatggggtantnggaaagaagncctatttgganggtattatnacnngcgtccccancattgggagcaggccatctgggtccacaattcctttgaatggggcccnaactgggattcccgggacc

SEQ ID NO: 6903 - DNA, 249 bp, Glycine max
  unsure (1)..(249): unsure at all n locations; Clone ID: 701146431H1
gcaaagtgttcaaagtaatataatgtgatcaagtcttggatcaatgattagtcctgcagtcagtcctttggactgaagctcatgtagataccttgggttccaccagaagtcaaagactctaattaggatgattaaaaaattggactgcacaaacnatttattgttaacaatactaacaactagttataaaagtggtagcttcactgaagctcgtgaaaatatcangggttncctggaaaanaaaaactt

SEQ ID NO: 6904 - DNA, 252 bp, Glycine max
  unsure (1)..(252): unsure at all n locations; Clone ID: 701146432H1
ccccacacctgtttgcttaagtatgtaaaaatcttgacttctcccactcattgttcaacagctccctgattctgcgaaccaaaccttgagagttgagaataatcccataatttggaacttgggacaacacngaaatgaggtatttatgtattttgtcactcatgtgtcgttgccatgatttactatagtttgtgcacttgtctcaatttgaaactgggcttgctattntcatttaatttattcataagttng

SEQ ID NO: 6905 - DNA, 210 bp, Glycine max
  Clone ID: 701146433H1
tcttagatctcttctttctctacgccgcacgccgaaaccatggccggaaaaggagagggtcctgctatcggaatcgatctcggaaccacctactcttgcgtcggtgtgtggcaacatgaccgcgttgaaatcatcgccaacgaccaagggaacagaaccacgccgtcttacgtcggattcatgacacgagcgtctcatcggtgatgcggc

SEQ ID NO: 6906 - DNA, 250 bp, Glycine max
  unsure (1)..(250): unsure at all n locations; Clone ID: 701146434H1
ggagaatagttatactttaatatttcttttnccatatgatgagtgtggtgatnggtgggtnagtccgaattgtgaaagtaagcaaagatggctttcacggaatcgtctctccnccttcctcggtttcaggatccannnagaacaagagannaggtnccnagaagnnaatggtttgcnccnantngnatattnnacccggggtctcggttccnttcnngggggaacttttcaccacgnggnnttttctttc

SEQ ID NO: 6907 - DNA, 251 bp, Glycine max
  Clone ID: 701146436H1
ggagagggagagggcatgggaatccgatcggtattcgatggcggcgagctgagaagggaagtggagaaaagtggaattgacccaaaattcattccaaagatatggaagcatatcctcatctctgccaaagatgaagattgggattgggagaaacaagttccctccttgccctcttcggcctactctctccttcgttccaacttcaaaacccctctctcttcctctattcactccgttttccatctgccgac

SEQ ID NO: 6908 - DNA, 244 bp, Glycine max
  unsure (1)..(244): unsure at all n locations; Clone ID: 701146438H1
ggttgtggtgtagactgtcgagcagtgaataccagttgctcctatagccggcgctcaacaacatggcggacaaggcagtcaccatccgaaccagaaagttcatgacgaacaggcttctctccagaaagcaattcatcgttgatgtccttcatccagggagggctaatgtttccaaggctgaactgaaggagatttgggcaattgtatgacgtgaaanccactancactgttttntctgnngggg

SEQ ID NO: 6909 - DNA, 243 bp, Glycine max
  unsure (1)..(243): unsure at all n locations; Clone ID: 701146439H1
ggtagtctgcaaattgcagttgaaatttggaacgtgcaagatccggtgctgtagtctctacattctgtgatggcaccaaaaccgataacgagtcccgtccccgattcgtggtaccccacactctccgtcttcactctcgccatcggcctcgtcttaaccgcctctttcttcatttatgaagcaacatcttctaggaaaagtcgttcacttgttcaggagctgacaactggancantgtttnnt

SEQ ID NO: 6910 - DNA, 164 bp, Glycine max
  Clone ID: 701146440H1
ggtgggattttgagagagagaaatagagagagaacttcaagtgagggtgagagtgacacaaatctagagagagcactagtactctaaaagtctattatattcttcaaaatatgaccatgcatcgcgagtcttgggcttttgtcttcggcgttatgggcaacatc

SEQ ID NO: 6911 - DNA, 233 bp, Glycine max
  unsure (1)..(233): unsure at all n locations; Clone ID: 701146441H1
aagcacatggattgaatcctaaagagaaagtgcaaagggattgtattgacttctttgcatgcatcctcagataactcaactcacattgaaaacagaacatgaagtcaaaagcaaattgggaagtctaagctacaaatcaattaaaaaaggancttgagnanncccatgaganagaaaagtcatggnncctcaagcccgtggatcaanagcgaaaatgcannatgccttngttt

SEQ ID NO: 6912 - DNA, 251 bp, Glycine max
  unsure (1)..(251): unsure at all n locations; Clone ID: 701146442H1
ggagcatcctttaattataaggaaccaatctggtagtttgcatcttgctaattcaatggagcaagctaatagtctcagtgaggctgggcaanatccaatgcttgnntcagttgcaagtgagcatctgccttccaagttattgnttcctcctgcagttgaacctgatctgtctagtatgcgaccaaagaagcgtaaaacttccaatctaaactcataccatggcataaagagctgantcagggttcggaaag

SEQ ID NO: 6913 - DNA, 199 bp, Glycine max
  unsure (1)..(199): unsure at all n locations; Clone ID: 701146443H1
ggtctccactctcggcttcttcttcgttgcgctttttcccaaaaccaattgcatcactcctcgtccgttaccgccgctgccctagaccaccgcaagcgacgtcgcacaccgccttcatccgttagggcaaaaatgagtcgaggaagtggaggtggatacgatcgtcaatcactattttctccctgaaggaggtctctnt

SEQ ID NO: 6914 - DNA, 132 bp, Glycine max
  Clone ID: 701146444H1
gagaaatggcagatgcagcgaagggtacctacagagcctcaagatggtcccttaacggaatgactgctcttgtgaccggtggaactcgtggaattgggcatgccatagtggaggacttatgtgggtttggtg

SEQ ID NO: 6915 - DNA, 158 bp, Glycine max
  unsure (1)..(158): unsure at all n locations; Clone ID: 701146445H1
gacacacagagcggttctcatattttggagaatccgaaaaacacgttaaagaaagtcccattcccactaccgaagcaaattaagaagangaagcagcagagagtggagtttatgggcatgggntgggcatgggcatgggcctgggcttttggtggtga

SEQ ID NO: 6916 - DNA, 132 bp, Glycine max
  unsure (1)..(132): unsure at all n locations; Clone ID: 701146447H1
gggagcagttatttttcaaagagaccacaactgtctccttcttcctcctttcaaattnagattttagncccactaatttgtcacagtctgcattttttaaaccactctcatctaaattgtggtggttcagtt

SEQ ID NO: 6917 - DNA, 250 bp, Glycine max
  unsure (1)..(250): unsure at all n locations; Clone ID: 701146448H1
gatggaaggttgctttagtctccgcaattttctgcttgcttcttcacttttttttnccctcgggctccncctcaatcttcanngtcctgttctttcccttggtgacagaccaagactancacacanagaacatagctngtgttggtgaggntntnaagataaagaaagaatggcatttgcaggaacaacacagaagtgtatggcctgtgacaaaaccgtttatctggttgataattgaccgcggataacc

SEQ ID NO: 6918 - DNA, 230 bp, Glycine max
  unsure (1)..(230): unsure at all n locations; Clone ID: 701146449H1
atttatctactttcttatgcttcccaagcctaccttgagtaaaatttaaacttggaagtttagtatatgtgctccaaaaacatatcaatagttataattcatatattatttcagttagggatgtcaatggccaggatgagggtggggagtactccctccatcccgtaaccccatctccatcctccattcccatngngggggatttatttnctctntccntgtacncgngg

SEQ ID NO: 6919 - DNA, 262 bp, Glycine max
  unsure (1)..(262): unsure at all n locations; Clone ID: 701146450H1
ggatggtaagaacataccaccaaatgcccacttatgcgaagttgcatttgagtgaaggaacatggggtgcacatgtagataatttttggcatctgcagcccaaaaagtataccaaagagataagaagtccagaatggaaaaaagtctttgtacctactacangcttagcatctagctgtgagatctgaactatacnccccatgaaggtggggctnanaaaattntgnnaacattnggggncnttttaaaaagtggggggggg

SEQ ID NO: 6920 - DNA, 250 bp, Glycine max
  unsure (1)..(250): unsure at all n locations; Clone ID: 701146451H1
gattgaatcataaaaaatttggagcgtgaagtgtaatgaaataaaattctatcgatttttttatttttagaggtggtatccagattattactcgaaattatgaataatttatggttggcttgattgaaccaataaaataaagtacccaggctctgtttagaaaaaaccaattggtaatatatctacgatcaccacttctatcatanccgtatntttacngaaattnttaantaggaanttcggaaagggg

SEQ ID NO: 6921 - DNA, 249 bp, Glycine max
  unsure (1)..(249): unsure at all n locations; Clone ID: 701146452H1
gataccaaaaacaaaacaagccaagtgaaagagagaagaaaagtcaaagacaatgtcagggatcattcacaagattgaggagacccttcatgtgggaggccacaagaaggaggaggagcacaagggtgagcagcaccatggtggagaatacaaaggggagcatcatggtgaacacagtactgaatacaaaggagagcatcatgttggtgagcacaagccggagcaccatggaggagaagagcacaagng

SEQ ID NO: 6922 - DNA, 248 bp, Glycine max
  unsure (1)..(248): unsure at all n locations; Clone ID: 701146453H1
gggtgttagtgttactattctcactacccctgctattgcttcaacattccaaaatgccatagacagtgacttcaattgtggatatcacatcagaacccaagtggttccattcccttcagcccaagttggtctcattgatggacttgaaaacatgaaagatgccactaccctagaaatgttggttaaaatcggttatggactatcaacgctccaagatgaantgagcttcggtttnaagnacttaaaag

SEQ ID NO: 6923 - DNA, 202 bp, Glycine max
  unsure (1)..(202): unsure at all n locations; Clone ID: 701146454H1
gacacaagcaagaactagcacttgttcaccaattaagatttcnagagaaactgtttggnaaatgggttccaagagtttttcccttatcctctcccttaacctccttttcttttccanggttagctccagcagtagctatganccaccatcaccatccccctctatctnagcaangnttnnaccctttanctcannnnnggng

SEQ ID NO: 6924 - DNA, 245 bp, Glycine max
  unsure (1)..(245): unsure at all n locations; Clone ID: 701146456H1
gacacaccatccgttctagtctcaacttctgctcttccaactcctacaacgcttttctctgcactcatgggcaaggtcaagatcggaatcaacggatttggaagaattggccgtttggttgccagagtcgctctgcaaagagacgatgttgaactcgttgcgttaacgaccctttcattaccancgattacatgacatactgtttaaatacgacgtgttcacggacatggaancntcnggtgccc

SEQ ID NO: 6925 - DNA, 259 bp, Glycine max
  unsure (1)..(259): unsure at all n locations; Clone ID: 701146457H1
ccagcatatatgtactatttacctttcattttgaaattacaccggatgggaaacattttatttttttgatttgaatacattgttatggatggtaaaattattaaaattatatctaaaactattttaattagttgataatgtaaaaatctattagtttatttnacaaataaggnttccaaantgggncntngggcnttaaantaagccccgngannctgtttggttccccaaatgtgaaaagggnagggnaacccngatt

SEQ ID NO: 6926 - DNA, 145 bp, Glycine max
  unsure (1)..(145): unsure at all n locations; Clone ID: 701146458H1
ggaacaccaaacanacaacaaagtaactacacacacttcgagcttccaaggaaggaagaagatgggtggcgtgacctcttccaatggcggcgaactggcgttcttccctccgtccccggcgtctacaaggtgctnaaggaggagg

SEQ ID NO: 6927 - DNA, 194 bp, Glycine max
  unsure (1)..(194): unsure at all n locations; Clone ID: 701146459H1
gctttcgaatttcgatactttgatcagatccacaacacttcttcatccatgacgcttggttcttcaggatccagtgtcgtggttccaaggaacttcagattgctggaggagcttgagaaggganaaaaaggaataggagatggcacagttagttatggcctgggatgatggtgatgaaataacangcnccctng

SEQ ID NO: 6928 - DNA, 246 bp, Glycine max
  unsure (1)..(246): unsure at all n locations; Clone ID: 701146460H1
gacactaaacaagttaaaagaagagcatcactgaactaacaaagcaaccctatgtcgaaggtggtttgtgtcaccggagccagcggcgccatcggatcatgggtggtcctactcctcctccagcgtggttacaccgtcccatgccaccgtccaagatatcaaggatgaaaatgagccgaannttttgggggatntgnagggcccagggtctctncncntttttgaaanggggctttnnggaacacc

SEQ ID NO: 6929 - DNA, 259 bp, Glycine max
  unsure (1)..(259): unsure at all n locations; Clone ID: 701146461H1
ggaagaagagtggaagaacattgcacctgcaacttcaacttcacttctccgttctaacactcgccatgttccttatcaagacatggagacagacggctttcggtgtttttgggtacctgaatttcaccaaagctggcttccttgatcattctaagaaattcaacccagaggacatggaattacgantaccagggaagaattgcattgttactggagctaactctggaattggctatgnaacggctgagggnttgcaacg

SEQ ID NO: 6930 - DNA, 240 bp, Glycine max
  unsure (1)..(240): unsure at all n locations; Clone ID: 701146463H1
gatgcacaagtttgttgagatagctagaagcaataagatgaaaatgaaagtgcttgttttgtttgttgctacagttttggtagcatatgaatgccatggctcagactaccagaagttccctctccaaatgaaaactgggtttggtgggcntacagcaatgaggtggcatgtgccagttggaggcttggcgtggaagcaaacaacgtatcaagtggcaactgtcctgcagctggngaaaaa

SEQ ID NO: 6931 - DNA, 234 bp, Glycine max
  unsure (1)..(234): unsure at all n locations; Clone ID: 701146464H1
aagacgacagaaggatacggctgcgagaagacgacagaaggatacggccgcgagnagacgacagaaggatacggctgcgagaagacgacagaaggggcatatggtgacatagggcttagcgagaacaatctcgtcttatatttgggtacaaatcctgctaatgatattttncttttgtgncttaaaactcatgggggcnncttnaaagcgttcaaccanntanncnngtnccct

SEQ ID NO: 6932 - DNA, 258 bp, Glycine max
  unsure (1)..(258): unsure at all n locations; Clone ID: 701146465H1
ggtaacagtgtgaaagagagggggtcccaagtggaatttattgtttctacctatcgcatgcatccgttttgttttctttttattttagatgtggtgttgtgaaatctaatggcatgcttagaaatgtacaacaactcagagcacaacaagaacaacaagggtgnnnnnnnnnnnnnnnnnnnnnnatgcgctccaatgagcccaagaatctctttctcaaatgattttgtggatgtgcaacaagccatgaagctgcaa

SEQ ID NO: 6933 - DNA, 247 bp, Glycine max
  unsure (1)..(247): unsure at all n locations; Clone ID: 701146466H1
cagatggtgtagtaatacccaanaaggtattanaagccattgatattaaaccttttcctgtgctatggcatgaggacaatattggtcanagacagcaagcaagaganaggctacaagtacccggagcantanctggatctcaactgggagangcagctcntcgattgtaaaaatcccctcagcntnatttcaatannccnccccatggtttnnggagaaactctgtccaaccaacgaggggggggcc

SEQ ID NO: 6934 - DNA, 248 bp, Glycine max
  Clone ID: 701146468H1
ggcacaagtgagtttgttgatcgagataactagaaacagtgtgatgaaaatgaaggtccttgttttcttcgttgctacaattttggtagcatggcaatgccatgcgtacgatatgttccctctccgaatgaacactggctatggtgcccgtactccggaggtgaaatgcgcaagttggaggctgctgtggaagcacacaacatctttggcttgagaccatcctgaagagtgcgttgaagcaacaaagg

SEQ ID NO: 6935 - DNA, 249 bp, Glycine max
  unsure (1)..(249): unsure at all n locations; Clone ID: 701146469H1
gcnncaagccgttcccttggtatattgcttgttctatgtcgtgtttgtncctctccgttggatatattacaggttcaagaaatggcattactatctcctggtgaatgatgatatctcaatttctgtattttaagtttattgtgcaactattaaactaganaaatgctagcaagtaacaatgcgtttcngtaattnaaatacactattgattggatttattagaaatcgtgaactttgnggggcnctagc

SEQ ID NO: 6936 - DNA, 190 bp, Glycine max
  Clone ID: 701146470H1
gatcaattcaaaatatatcatcaattataagcatgggtttgtggaacacaacgaatgcagtgtcttgccgctttcacaagtttggtgatgaccaaaagaatctggtcttccaaggtgatgccacgtcttcttccaggggcatagaactcacaaagttagacggtggaggaaaaccagtgggtggcagtgt

SEQ ID NO: 6937 - DNA, 196 bp, Glycine max
  Clone ID: 701146471H1
atggttacgatacaagttatgtccaaccgagagttctactattttgcctctcaatattgcgcagaaaatcactagaaagcaagcgtttggatgcttctccgttgtaactgacagcaatatgattgaagggctgctaaagaggaagtacttccccaaactgaaactggtataggcatgacaggatcatgatgcaaaa

SEQ ID NO: 6938 - DNA, 169 bp, Glycine max
  unsure (1)..(169): unsure at all n locations; Clone ID: 701146472H1
aaaacgatggaacaaagtangagtgacccaccttctganacctcgancattaatcctagttcggagtcgtcggaggaggnccacttgaattacggntgtttcnncaacaacngcgangactgtgtcgtcggaggntccgcngcnncatcgctcttgcaagtggatnnat

SEQ ID NO: 6939 - DNA, 231 bp, Glycine max
  unsure (1)..(231): unsure at all n locations; Clone ID: 701146473H1
tgctacattcaccattgactgtgcaaagccagtggaagataagatcatggacattgcttctctcgaaaagtttcttcaagagaggatcaaggttggtggcaaagctggtgctcttggtgacagtatcactgttacccgcgagaagaccaagatcattgtcacctctgaccagtaattttccaacggtntttgaagtattngacgaaaaanttcttggaaaaaccctngggg

SEQ ID NO: 6940 - DNA, 218 bp, Glycine max
  unsure (1)..(218): unsure at all n locations; Clone ID: 701146476H1
gatttgggctgttnttggctcgcaaggtgtcttgatccgagccatcatgtacatggtggctcagtgcttaggtgctatctgtggagttggtttggttaaggctttccaaaagtcttacttcaacaagtntggtggtggggctaattccctcgctgctgggtacagcacaggtactggatgggggctgaaatatggccccttttttgggccaacncccc

SEQ ID NO: 6941 - DNA, 133 bp, Glycine max
  unsure (1)..(133): unsure at all n locations; Clone ID: 701146478H1
ggctcactcatctcttacaacgaaaccctcttcatcttgttctatctgtgacgagcatcatgggcctcaagagcagtgttattgttggctatgtgtgtgcttccggcgatggttgtggccattcgcccagnaa

SEQ ID NO: 6942 - DNA, 244 bp, Glycine max
  unsure (1)..(244): unsure at all n locations; Clone ID: 701146479H1
gctcagaactcagaaggaattaggaaaaatgagttggatgtcggtggatgagttcctggtgcagtgcaagaagtcaggagacgctgcctacgcctccttgcggtcgctgctggagcgcctagacaatcccgagacccgttctcaggctcggatctttctttcccaccttcagaagcgtttccccaccaaggatctgcgagcgtattgctttaccccattattgtcncgctaatgcattgcnttg

SEQ ID NO: 6943 - DNA, 247 bp, Glycine max
  unsure (1)..(247): unsure at all n locations; Clone ID: 701146480H1
aagctttggaggttctgggctcaagaaaagtggaaagaaataagggctctttatcatgattgtatgcattcaatattgagccctgtaattacagttgctaccatgataacttctcttattattgtggcctactttattgctaatgtgtanngaactgaggtatgtcgtgatgtaagctgcaataagttaattgtctgtagctttattgtatccccttnatggggttctgataattacatccttttag

SEQ ID NO: 6944 - DNA, 131 bp, Glycine max
  unsure (1)..(131): unsure at all n locations; Clone ID: 701146481H1
caccattgatattgctttgtggaagtttgaaacaacaaagtattattgcacagttattgatgcgcctggacatagggatttcattaagaatatgattactgggccancccaagctgactgtgctgttctaa

SEQ ID NO: 6945 - DNA, 123 bp, Glycine max
  unsure (1)..(123): unsure at all n locations; Clone ID: 701146482H1
ggcatcaattcnaaatatatcatcaattataagcatgggtttgtggaacacaangaatgcagtgtcttgccgctttcacaagtttggtgatgaccaaaagaatctggtctccaaggtgatgcc

SEQ ID NO: 6946 - DNA, 250 bp, Glycine max
  unsure (1)..(250): unsure at all n locations; Clone ID: 701146483H1
ggaacaaaatccgtgaacagtacccggtttcgacactcgcgtctcagcctcagtttcggatctctcccttctctcaccaatttccaggatttgaaaaatggcagattccaaaccaggattgaggaagccagtgttcaccaaggtcgatcagcttcgtccagggaccagcgggcacactttaactgtgaaggtggtcgatgctaagatggtgatgcagaaaggtcttctganggncctnaatcccgcnaaa

SEQ ID NO: 6947 - DNA, 239 bp, Glycine max
  unsure (1)..(239): unsure at all n locations; Clone ID: 701146485H1
gtcaaagacaaggtctatcctgaaggaacacactttatgattccgtggtttgagaggcctgttatctatgatgtccgtgcacgaccccatctagttgagagtacatctggtagtcgtgatctacagatggtgaaaattggacttcgagttcttactcgccctttgcccaacnanttacctanggtttatcggncctgggngnattnaaangnaagggttcnccnnnaanaaaanggant

SEQ ID NO: 6948 - DNA, 251 bp, Glycine max
  unsure (1)..(251): unsure at all n locations; Clone ID: 701146486H1
gggtcgtgtgttgttgtatactataatagcagaatcgtgagtaacagcagagcagaacaccgataaatcgctatgactgctcagacccaagaggagcttcttgcggccgaccttgagcaacaaaagatccatgatgatgagcctgtannnnnnnnnnnnnnnnnnnnnnnnnnnnnngacgacgatgaggatgacgacaatgttgaagaaggtgatgcatctggtaggtccaagcagaccagangcgaaat

SEQ ID NO: 6949 - DNA, 140 bp, Glycine max
  Clone ID: 701146487H1
tgccgagatagagtatataagtggtggacaaccctcacccatgaactaacttttgggattgagttaggcccaaacctacattttaagatggtatcacagtctatcctaaatccatcaaaagggtcacccactatattatt

SEQ ID NO: 6950 - DNA, 201 bp, Glycine max
  unsure (1)..(201): unsure at all n locations; Clone ID: 701146488H1
ggaaggtcaaggagcaacatggatctgattggaaatcagtagctgaagcattgggcaaacatcgatttcatgtaaaggatgcatggcgtagaataaaattaaccaacacaaaccaaggacgatggacccaagaggagtatcnaaatttatttgatttagtaaacctggatctacgtgtgagagcttcacaggattatanaa

SEQ ID NO: 6951 - DNA, 138 bp, Glycine max
  unsure (1)..(138): unsure at all n locations; Clone ID: 701146489H1
ggggtgaagcttgtctagcaagtcgcattgaaaattgtaagcttgcactgcagagantgnnatcgaanggntagngtatcagcggntcgnntaagcgccaccatgtncncctnaacctctctcagaancncganttcc

SEQ ID NO: 6952 - DNA, 219 bp, Glycine max
  unsure (1)..(219): unsure at all n locations; Clone ID: 701146490H1
gggcgcattgaacgcnaattagggtttgtagtgtagcaggaacaagcagcaatggcgccgaaggtaacacgcaaggttagcagaaaccccgaattgataaggggattggaaagtactcgaggtcgcagatntaccacaagaggggcatttgggctatcaaggccaaaaatggtggctttaacctcgcaaggnccttaanccnaaccngnaacnccntna

SEQ ID NO: 6953 - DNA, 118 bp, Glycine max
  Clone ID: 701146491H1
ggtaagagggaaagcaaaagaacccaaggtcgacagtggagctcattttatgcatatgcaaaaatagataggctgagtgacattgaggagttcattcttatgcctaatgttgctaatc

SEQ ID NO: 6954 - DNA, 245 bp, Glycine max
  unsure (1)..(245): unsure at all n locations; Clone ID: 701146492H1
gagagcgaaagagatgtcgttggtttcaagcatgttcgggtgtggagtggtgatggcggcgtcgcaagcaatgggaattggaaggagaagcgatggtggattgacgatagtgtgttcgtctaggccgcagaagaaagcgacggcgcatcacatgaagactcggcctcggaagacgcaggcatgggatagaaaccgnaancccaccgtctangatccactccctcctnttccnccatttggncccc

SEQ ID NO: 6955 - DNA, 149 bp, Glycine max
  unsure (1)..(149): unsure at all n locations; Clone ID: 701146493H1
aagcacatggattgantcctaaagaganagtgcaaaggattgtattgacttctttgcatgcatcctcagataactcaacttcacattgaaaacagaacatgaagtcaaaagcaaattgggaagtctaagctacaatcattaaaaaggac

SEQ ID NO: 6956 - DNA, 251 bp, Glycine max
  unsure (1)..(251): unsure at all n locations; Clone ID: 701146494H1
ggagtgcggcaatagtggaatagcggtagagtgtgcgatcgagaaagcagaaagcagaaagatggggttngaatcggtgggagatttagcgattaacgtgattctgaaaaaattaggagcccaagacnttgcgagagtggcgtgtgtgagcaaaaggtncantcnntccgcttccgatgacactctttggatcatcnctgcttcatganctcgnttngananacccctcgatcatcgggaaaccctcttct

SEQ ID NO: 6957 - DNA, 70 bp, Glycine max
  unsure (1)..(70): unsure at all n locations; Clone ID: 701146496H1
gaacaacaagtaaacgcttggaaaannanattagnaanccgtntagtacgancttttatcctatantttt

SEQ ID NO: 6958 - DNA, 276 bp, Glycine max
  Clone ID: 701146501H1
ggcacaagtttgttgagatagctagaagcaataagatgaaaatgaaagtgcttgttttgtttgttgctacagttttggtagcatatgaatgccatggctcagactaccagaagttccctctccaaatgaaaactgggtttggtgggcaatacagcaatgaggtggcatgtgccagttggaggcttggcgtggaagcaaacaacgtagtcaagtggcaaactgttcctgcagcttgcggagagtacatactactacgttctaggagaccaatataga

SEQ ID NO: 6959 - DNA, 268 bp, Glycine max
  unsure (1)..(268): unsure at all n locations; Clone ID: 701146502H1
ggaaaagctaagcctttgaagaaacccaagtctgataagaaggattacgacgaggttgacatggctaacattcagaagaaaaaggaagaggagaaggcgctaaaggagttgaaagccaaggcgcaacagaagggaagctttggaggttctgggctcaagaaaagtggaaagnaataagggctcttatcatgattgtatacatccaatattgagccctgtagtttattacctgataacttctgtctattgtggcctcttattgctctaa

SEQ ID NO: 6960 - DNA, 151 bp, Glycine max
  Clone ID: 701146503H1
gatccaaagcagaacaaagagccattgaactttgactataatattcagagttcagattactcactctaatcttctaagttttcattttggggtttaagtttctgaaggaaaaaaaaatgataaagtttgttctatttttgttctgcttgcc

SEQ ID NO: 6961 - DNA, 263 bp, Glycine max
  unsure (1)..(263): unsure at all n locations; Clone ID: 701146504H1
tattcattagacactagtcactacgaacatctcaaaatgggtcattcaggttaaaagcctaataacaaataattattgttattgacttgtttaattttccaaataacaaattgcagcaagtaacanctactgcctgccacagttcttcaaaactatgttgtcaatcgtggccgtcgcggccgctattgcggcgaagtggagcggcgcgtcccccatccgcgactgggatggacatacgcgcggttcaacgtcgcggttggcgc

SEQ ID NO: 6962 - DNA, 263 bp, Glycine max
  unsure (1)..(263): unsure at all n locations; Clone ID: 701146505H1
ggtgacaggatcattgagctcggcaagaatggaagaacacaggttgagcttgagaatgagcacgcttgtcttcactctttccattatcatcatcgtactctcttacccagcacaaccacttgcgttgaaccattctccgaaattcctaggaaaatttccagcaacagcacgaacccattcaaattccgagccaccgccgcaattccactacgaaaaaagatncttccaacagcgcctgacattcagcttctcggagctaccca

SEQ ID NO: 6963 - DNA, 268 bp, Glycine max
  Clone ID: 701146506H1
agattatcttctttcttgaagaatacactacatgcttccttcaccttctcctgctcctgctccatctccacagttaattgatcactctgagccatcaacttcaccacatcgtgctagtccttacactccaatatcaccagcagctgctgaacaacctccttgtttcgattgtgaagtaccctcacctgcaccttctatggtgcctgcgcatcctccagatccctgtctatatagtggcttctcatcatccaatcccttcgccaaaatc

SEQ ID NO: 6964 - DNA, 269 bp, Glycine max
  unsure (1)..(269): unsure at all n locations; Clone ID: 701146507H1
gacgacaccaaaaacaaataaaacgaacgcttttggacgcagacggtagcaaggaaacccaacttaagcgaaaagcaatagaattcaaagagagagtttcttgttctgtattttttgatttgatcatttcaatcttcaatttttttttatatatccaccaatncgcaaagtgcaaatttctaatctttcacgtattgggttcttctcttttccctcttcgtctccgatcgatccaattctctccatggctacgatcggacacaacaatc

SEQ ID NO: 6965 - DNA, 268 bp, Glycine max
  Clone ID: 701146508H1
gggcagaatgggaatattattttatggaccaagttgggataaaatgtgtccagccagtggtggccaaagttgttctttcacgactgggctattggtgatctagctacacagtattttgcagatcgagatattttctgtgctggtcgtgtagctgaagaagatctgaaaagggttgctgctgcgactggtggaaccgtacaaacatctgtgaataacattattgatgaggtcctggaacttgtgaattttgaggaaaggcagttggaaa

SEQ ID NO: 6966 - DNA, 263 bp, Glycine max
  unsure (1)..(263): unsure at all n locations; Clone ID: 701146509H1
atcgtttgcngcggatctccgctgaggaaagaaaccgatgaggcattcaaagctaagttccccaacgtcctcgtcatgcagggatacggtttaactgagtctgcagttacccgaaccactccagaggaggcaaatcaggtgggagcaacaggtaaactgataccaaatatagaagccaaaattgtgaacccagaaacaggggaagccatgtttcccggtgaacaaggagaatctggtcgaggaccttatgttatgaaagttat

SEQ ID NO: 6967 - DNA, 263 bp, Glycine max
  Clone ID: 701146511H1
ggaaaacaaaaagaatagagcagcatttttgccgactctgataaaaattcaaatcctataagctaaaaggatcgatgatgaatttaaaacccctttcctttcctgttcccattccctcccaaacaaattagggtttgggttttgccaacatgagtggttctcgcagatgcaatggcgattgccatggcgatcagaacccagctactcgcaggtcatacgctcccagttcctccaatcaaatttcatcaatgagaaaagagatg

SEQ ID NO: 6968 - DNA, 265 bp, Glycine max
  Clone ID: 701146512H1
gaggcgcggcgggatcagcacaagattgcaaaatgaagttcaacattgcaaatcccaccactgggtgccagaagaagctggaaatcgatgacgacctgaagcttcgagcattttgggacaagaggatctcccaggaggttcttggtgatgctctgggtgaggagtttaaaggatatgttttcaaaatcaccggtgggtgtgacaaacaaggattccctatgaagcagggagtgctgacccggtcgtgttcgacttttgctccata

SEQ ID NO: 6969 - DNA, 270 bp, Glycine max
  Clone ID: 701146513H1
ggaagctgagagttttgagttttgagatttgactcacgagaggagagtaatgtgtgggaagtagaagtagaagtagaaggagagaagcaccactacgtcagcgattcctttgcctttttcttctttcttagactcgaagacaagtttgatcctattttgagaatcgcattcagatggaaagcgcatcagagcttgtggaattcccgttgttgctgacaccaatcgattccaactacagagctgcacattccttacagattcccctccgat

SEQ ID NO: 6970 - DNA, 269 bp, Glycine max
  Clone ID: 701146514H1
ggcagcagcaactttaaacgccgaagaaagttcatccaatctccgaagccctttcaccgcattgcaaccatgtcgagaagaaaggttagagagccaaaggaagaaaacgtgactctgggcccagctgttagagatggcgaacatgtctttggcgtcgctcgcatctttgcctccttcaatgataccttcatcatgtcactgatctgtccgggagggaaacactgtccgcatcacaggtggaagagttaaggctgacagagatgactctt

SEQ ID NO: 6971 - DNA, 235 bp, Glycine max
  unsure (1)..(235): unsure at all n locations; Clone ID: 701146515H1
gatagtaatcattctacttcttctattcctccaataagcgaattctcagatttgtatgcatggagaaaacaacaacgcacattgtagtaattcccagtgcaggattcagccacttcgttcccattatccacttctcaaaacaactcgttgagcttcacccagaaattcacgtagcatgcatcattcccatactagggtctctcccaagtgccgnaaaacccatctccaaaccctt

SEQ ID NO: 6972 - DNA, 286 bp, Glycine max
  unsure (1)..(286): unsure at all n locations; Clone ID: 701146516H1
ggcatttaactagccctaattcgccattgaaccctatactgtgcttccgccttgatctccgcagcaatggtgaacgttccgaagacaaagaagacctactgtaagagcaaggagtgcaggaagcacacgctccacaaggtcacccaatacaagaagggcaaggacagcatcgccgctcagggaaaacgccgttatgaccgcaaacagtccggttacggtggccagactaagcctgtttaccacanaaaggccaaaaccccagaaattgtgtngaggnnccatgtcc

SEQ ID NO: 6973 - DNA, 275 bp, Glycine max
  unsure (1)..(275): unsure at all n locations; Clone ID: 701146517H1
gggagtggaagtgcgatcccagtgttagtgtgtatttcctctcttctcactccgggatcgatattttcaagaacagatcgaaaagccgttcatcgatttgttggatctgtgagtgagaagatggttactaagacagaggagactcaattgaacaggctcgaaaaccaggtcgataacggcggcggcggcgcgtgggagtacctctgcctcgtgcggaagctcaaagttcggcggtcggagaaagttcngagcaggtctctccatcttgaacgacc

SEQ ID NO: 6974 - DNA, 272 bp, Glycine max
  unsure (1)..(272): unsure at all n locations; Clone ID: 701146518H1
gggagaagaaggaagcatcataaccggccaaagcttctctctcttccatttatcccccataaataaaactaggtgaaaaaaatatactctgtgcttctcatgatgatagtgtagctgaagctgcttctgctgcagcattggtgatttggacacaaaaaaagtttcanccttttcagttctctgagcttctggtttatcaattttgaaggagttcaatactttaccctattagttggttccctgaattgtattggcatgctgtatcagaaatt

SEQ ID NO: 6975 - DNA, 266 bp, Glycine max
  Clone ID: 701146519H1
ggaagaacaagtcttgcattgggtggagcatacttagaaacagcaactatgtctctcacgcagcttactagctcccctgttggctcactggtccgtttcattgtaatatttgctttatggtacagaaccatggctttggccaagttgccaccaaacgcttcatcagttccagcagttttagcgtttggagattccatcgtggacccaggcaacaacaacaacataaaaacattgatcaaggacttcccaccttatggaaaggattt

SEQ ID NO: 6976 - DNA, 261 bp, Glycine max
  Clone ID: 701146521H1
gggttctataacacagttaacagggatggctatggaccagttgcacagatgtttgctcggaactcgtgcaaaattatattacctggcatggacctttcggacgcgaaccaaccaaaggaaaaccattctagccctgagttgctacttgcacaaattatggaagcttgcaaaaagcatgaggttcaggtttcaggtcaaaattcgtctgaatctggtgttccaggggggtttgaacattaagaagaatttatctggagataa

SEQ ID NO: 6977 - DNA, 190 bp, Glycine max
  unsure (1)..(190): unsure at all n locations; Clone ID: 701146523H1
tctctctcctctggcacccctaaagcttcttctgttctgtgcaggcagtttttctttggtttggttgcatcctttgatctgatcagcaaatttgagaattcagtttgggaagggccattcctctttagtgcaaaacagatcgcaggtgcctttgtgctgatggcntaatgaaaatcttccaccaaatgta

SEQ ID NO: 6978 - DNA, 68 bp, Glycine max
  unsure (1)..(68): unsure at all n locations; Clone ID: 701146524H1
gagggaaggaggagaagacaaattaaccaccaacaacaacaaataannnnaaananananaaaaaaaa

SEQ ID NO: 6979 - DNA, 260 bp, Glycine max
  unsure (1)..(260): unsure at all n locations; Clone ID: 701146525H1
gagtgataagatgtctgtccaagaatttagcgcaaactcaacagtattggatttgttgaaaagatctgggagagcatgctctaggttgacaacatataggttcccattgaaggaagagttgaggccnggctgaatcacaaacctgttagtgaccccaatagcaagttgaagatgggagatgtgattgaacttacgccagccatacctgacaagtctcttacagaatacaggaaanccagcgtatgtacgatcgtgggcta

SEQ ID NO: 6980 - DNA, 264 bp, Glycine max
  unsure (1)..(264): unsure at all n locations; Clone ID: 701146526H1
gatgaatctgatgctgacctgtctgatgaagacgaggatggtggaagaccagttgatgagatggacttatcagatgctgacccaaccaagaaaaaatcacaaggtagaaggactcaatcggaactattcaaggcaattgcaaatgctcctgggttgtctgncgattctgctctcaancagtgggttgagcatgggaaagaactaagtcggaaggagatcttgttggctgtgcgtgantcggagacgtaaaatgtatgggagggc

SEQ ID NO: 6981 - DNA, 272 bp, Glycine max
  unsure (1)..(272): unsure at all n locations; Clone ID: 701146530H1
gatagcaaaatcgtttctccaatttaatcaccattgtacaacccaattcccttcgtcgttttcgattaagagagcaatggcacgtaccaagcaaaccgctcgcaagtccaccggaggaaaggctccgaggaagcaattggcaaccaaagccgctcgcaagtcagccccggcgaccggcggagtgaagaagccccnncgcttcaggccaggaacggtngctctgaggnngttcganatacnagaagcncntttttctgatcanaacnnccttt

SEQ ID NO: 6982 - DNA, 271 bp, Glycine max
  unsure (1)..(271): unsure at all n locations; Clone ID: 701146531H1
gaatcgtgaagagtttgttcatcgaagctgccatctccatgaatctttcaccaatcttggaactgagacgattctccacgcaatcttcaatttcatgctcaagagcacgatttcgtgtagcatctgccatgtctggtcacacttggaaggttataggctgataccacttgttaaggtaattctagaaggagactcgaagaattacagagaagagtagggangcnatgaaagnacgncntcntttctttaggaagaaatgngntacaanntt

SEQ ID NO: 6983 - DNA, 189 bp, Glycine max
  unsure (1)..(189): unsure at all n locations; Clone ID: 701146532H1
ggagggcgaggaagccacatagagacacaatacagagtgagttgttgctccttcgccacaactctctgccaacatgggtatcnccagagattctatgcacaagaggcgtgccactggtggcaagaagaaggcctggnggnccannagctgtatgagnttagtcgccagcctgctaacactaagntgtca

SEQ ID NO: 6984 - DNA, 266 bp, Glycine max
  Clone ID: 701146533H1
ggtgcgggttattatatataggggaagatcaacgagacgtatgtggcaggtgtgggttcttcaattcattctagttctggattccgactagccgcgttgactcggttccgtttttcattctcgcggatctaatattaaggaatagcttaagggcacattacaatgaaggcattgattctggttgggggatttggaacaaggctgaggccactgacactcagtttccctaagcctctgtgatttgctaacaagcctatgattttgca

SEQ ID NO: 6985 - DNA, 265 bp, Glycine max
  Clone ID: 701146534H1
ttgtgggaaagatgcatgcaaattggcatgaatggagtcataagaaagccagttttgttgcatgggattgctagtgaactcagaagaatactattgcagggaaatagtgccatgtgaggactcatgctgcaagttaaagcacttcatcatatcaagaaattaagctataaaaaaatttcagtcacattttccataaaatttggtagcacacagctctctttggctcctattttgcagcattttagcttagagatgttgtattata

SEQ ID NO: 6986 - DNA, 262 bp, Glycine max
  Clone ID: 701146535H1
gggcatattgcttgtttatgatgttactgatgaagcatctttcaacaatattaggaattggattcgcaacattgaacaacatgcttctgacaatgtaaacaagatacttgtgggtaacaaggctgatatggatgaaagtaaaagggctgtgcctacctccaaaggtcaagcccttgctgatgagtatggtatcaagttttttgaaaccagtgcgaagacaaacatgaatgtggagagtttcttttcaatagcaagagatatc

SEQ ID NO: 6987 - DNA, 252 bp, Glycine max
  Clone ID: 701146536H1
gatgaaaaaaattgatactgagatacgagcattacttaaaggtgtcatcaacaaacgagagaatgcaatgaaggctggtgaagtcttgaacaatgacttgttgggcatgcttttggaatcaaaccgtatggaaatacaagatcatggaaagaataacattattgcaatgactagcctagaggtaattgaggaatgcaatgcattctacatagcaggacaagaaaccctcggttttactagtttggacatggt

SEQ ID NO: 6988 - DNA, 243 bp, Glycine max
  unsure (1)..(243): unsure at all n locations; Clone ID: 701146537H1
gactcacttttcatccttcgatcatacacttagttgcttccaattaagatggttctgctagagaagctctgggatgatgttgtggctggccctcaacctgagcgtggccttggcaagctcagaaaactcaccaccctcaaaactattgatgaaggagaaagtagcaagctgcagaagacgttgtcgatgccgtcgacaccaacaaccccgatgactcgngatccaacgacacgggatcggccc

SEQ ID NO: 6989 - DNA, 262 bp, Glycine max
  unsure (1)..(262): unsure at all n locations; Clone ID: 701146538H1
gatccccaagcattcatttgccatttttacaatatctacttngctcattcagctggtggtcgaatgattgggaaaaaggttgctgaaaagttacttaacaacaaggcgttggagttctacaaatgggatgatgaccttccgcgattgttgcagaatgtgagagacaagttgaataaagttgctgaaccttggagtcgggaagaaaaggaccgctgtctggaagaaacagaaaaactncaagctctctggagagattctccgt

SEQ ID NO: 6990 - DNA, 259 bp, Glycine max
  Clone ID: 701146539H1
ggcggcagttcatctgtttttctgcatcggcgtgaacaatggcgacgtacgctgcgatgaagcccaataagcctggcttggaggagtcccaagaacagatccacaagataaggatcaccctttcctccaagcacgtcaaaaatctcgagaaggtttgtggggacttggttcgtggtgcaaaggataagaggctcagggttaagggacctgtcaggatgcccactaaggttctccatcactaccaggaagtccccctgtg

SEQ ID NO: 6991 - DNA, 258 bp, Glycine max
  Clone ID: 701146540H1
gggcgaagattcagagtgctaagtgtgagagaaagaaaatgccaaagtctcaatttcgaaccccatttcttgtttctttttctcttttgttattcatcttcaacctcaccccttcatacgcactctatggagcatccacacccgtgcttcaactcactccctctaacttcaagtccaaggttctgaattcaaatggagttgttcttgttgaattctttgctccatggtgtggactgtcaggctctgactcctatatgg

SEQ ID NO: 6992 - DNA, 106 bp, Glycine max
  unsure (1)..(106): unsure at all n locations; Clone ID: 701146541H1
ataaatgacgaatatgatattaatattatttcagataattcagccattagaaataaaacaataggtcaaataactactcncagatcagataccgataggaaatgaa

SEQ ID NO: 6993 - DNA, 259 bp, Glycine max
  unsure (1)..(259): unsure at all n locations; Clone ID: 701146543H1
ttatagattattaatatcattgatgttttaaatatataattatgaatgtgttaaaatttgagtttaatttataggcattttaagtataaaaacattttacattattgatcaattganaataatagttgacattctttttaacatgactattataaatgttcacaaacttattatattatgctgaaatgataattaantttttttttacacaatcaacatatacattgttttctcaaaattaaatgtgtactatttgttg

SEQ ID NO: 6994 - DNA, 272 bp, Glycine max
  unsure (1)..(272): unsure at all n locations; Clone ID: 701146544H1
ggatgcacaagtttgttgagatagctagaagcaataagatgaaaatgaaagtgcttgttttgtttgttgctacagttttggtagcatatgaatgccatggctcagactaccagaagttccctctccaaatgaaaactgggtttggtgggcaatacagcaatgagtggcatgtgccagttggaggcttggcgtggaagcaaacaacgtagtcaagtggcaaactgttcctgcagcttgcggagagtctnctgactacgttctaggagaccata

SEQ ID NO: 6995 - DNA, 237 bp, Glycine max
  unsure (1)..(237): unsure at all n locations; Clone ID: 701146545H1
gatgtcttgtttttaccaattnctggtctaatgggtgcaaacatgaaaacaagagtggataaaagtgtttgtccatggtggaacgggccttgcttatttgaggcacttgacactattgaagttccacagcnagatcccaaaggtcctttcaggatgcctattattgacaaattcaaagactgggaactgttgttatgggcaaagttgatctggcgtgttcgtgagggagttcctgtg

SEQ ID NO: 6996 - DNA, 261 bp, Glycine max
  Clone ID: 701146546H1
caggaaaattggtcccgctgatgagaccgttattaccaacgctttcaaaattggtgaacctggcaagattgtactcaccatagataaccaaacatccaagaagaagaaactcctctacaggtccaagaccaagcccatcccagagtaacttgaagctcaagaataaggattttactgttactgttatatgttcatcattattacaaccacaagaacaagaacttatgctgttcactattctttcatacggggtggggttct

SEQ ID NO: 6997 - DNA, 264 bp, Glycine max
  Clone ID: 701146547H1
tatagaagttaattaataatcttgtctctctctgtgtaacagcaagatgggaccaccaattaattcttttattccaagatacaagtggatcatgcctatgcttttacgttcaaacaatcgatgtgatgccaataaaagagctttgcattgtcttgacacctctatatatattatgtaaataaatatatgtcttaatttgtttgacgtacatgatagacgtaacaacgaacaacagtaaagttctatgccgaaaccgaaagtgga

SEQ ID NO: 6998 - DNA, 246 bp, Glycine max
  unsure (1)..(246): unsure at all n locations; Clone ID: 701146548H1
gacaacaaaaggtaggtgaggaaaactttggacaaaaaatggagtgctacacaaggccaaacaggagtgacatccacctctcagcagaggaagaagccaccatagaagcaaagaccagagagtactttgatggagtcgcaccacaacgccacacaaagcctcaacgagtgactattcagctcatatgtcgatgtttctccatgcncatcancttntnanntanccanantancccntccccccngg

SEQ ID NO: 6999 - DNA, 272 bp, Glycine max
  unsure (1)..(272): unsure at all n locations; Clone ID: 701146550H1
ggcattaagcagaatcataatctttcatcacatgcatcatatggcgcttctacttgtcgctctcttggctcttgttactacattaccatcggttactgttggagaagtgctttcacccattctcgacgttgcttcactgaaccgaaccagttttcccaagggctttangcnggggcaggatccgcatcgtatcagtacgaaggtggggcaaacgaagtggcaaaggaccaagtatatgggatacctaccacaaatatccagataaaattgtg

SEQ ID NO: 7000 - DNA, 274 bp, Glycine max
  Clone ID: 701146551H1
gatctggacagcagaagaacaagtagttgagaactaagaaggagaagcaaatggcttcctacaatgatctcttccccagctgttaccactgtcaaccgtgccggtgccggcatggttgctccattcactggcctcaagtccatggctggcttccccaccaggaagaccaacaatgacattacctccattgctagcaacggtggaagagtgcaatgcatgcaggtgtggccatcagttggcaagaagagtttgagactctttcctacctgccaga

SEQ ID NO: 7001 - DNA, 262 bp, Glycine max
  unsure (1)..(262): unsure at all n locations; Clone ID: 701146552H1
taggcaaaaagcaaaagcccctcaacccaacacacctaagacggttatctccaagcctcactccctcgtttcttccgcccccttcactcaccttctatctgccaattctcttctattaataacacccacctctttggttcctcttcccttcaattcatcacataataacgacnctacaaaacattgtttttagctcttttttgttgcagcgaaaccaaaatgtctttcactgcaataagtttgcaccttctcctctccctct

SEQ ID NO: 7002 - DNA, 260 bp, Glycine max
  Clone ID: 701146553H1
tgttcttaattggtgaaagaaacacaaccccacatgtttgaagacttctgcttgaaggaaatgacaccaatcaaagtacatcatattccttggacagttagattcatgttaccaaagctactctttgtttcttcaactgaaatgttttcttttctctctttttgcaacaagtgttttggagtctcaattttaaaattgtaactaaagaagaatgataagccacccaaggaaaatgttcagaataattaagcctactaacc

SEQ ID NO: 7003 - DNA, 258 bp, Glycine max
  Clone ID: 701146554H1
taccctcatcggtgccaccattgggcttttcatcccaatagcctacattttcgagggtgtttttgagggtgacaaggaagggatcaaggcagcagcaccgcatgtttttctcttggccagccaagttttcatggaaggagtggcatcatcatcatcacaaaggttctcggctccggttcgagcttttgttccagcattctacaatgcaagaaggattttcaccattgtggatgttaggagtgaggtctataagataga

SEQ ID NO: 7004 - DNA, 254 bp, Glycine max
  Clone ID: 701146555H1
gttacattggtcttactatgattttttcccttgaactttgatcactttttttctgctccccatttattatataacgctgactgcaatgcacgatctccaggtgggttccatttgacattgcaaggcctctgcttgacaggaaaccttatgttgtcttatcagattctccattttacaaaatggagagtcatccctacctcaaattactgacgatgtaatgggaagggtttgatgatgttggccaagaagatgca

SEQ ID NO: 7005 - DNA, 256 bp, Glycine max
  unsure (1)..(256): unsure at all n locations; Clone ID: 701146556H1
ggcgaatcttttttctcttgtgttgttattttatttcatctgcatctgcatctgctacgttgtgttgagcagtgagatctgtatcgccaaaattcatgatttcgtgttgaatgcatcgtccgagttaggttaatttttcgacattttttggtgtaaaatggaggtgccaactaggagaaaacccgtgatctactggatttgccttttcgtcattgtcaatgcgtttgtactntagcaatgcattttatcttccggg

SEQ ID NO: 7006 - DNA, 259 bp, Glycine max
  unsure (1)..(259): unsure at all n locations; Clone ID: 701146557H1
gactgaagaagttcttgatggtatttgtggacagttacaggccctagaaacaaagtacgagggaatgactggactctcaagccctgaaaagatagaaaaccgcaggaggagaaaggtcgctgttggttttgggaaacgatgatcttcaaggtcaatattaggcataatactgaatgcacacttgacagacatttcaagtttgaacttcataaaaagatgaagcatagattacggnctgcatatggttggttatgctgga

SEQ ID NO: 7007 - DNA, 237 bp, Glycine max
  unsure (1)..(237): unsure at all n locations; Clone ID: 701146559H1
ggttanagtgtgtgattgtttgttgttgtaactcgttcttcttcttttgttgttctgtgtttgtgtttgttttttctctcacctgaaaatgtcttgctgcggtggtaactgtggttgcggaagctcctgcaagtgcggcaacggctgcggaggctgcaagatgtacccagacttgagctacactgagtcaaccaccaccgagaccttggtcaggagtggcacccgttaangctcatt

SEQ ID NO: 7008 - DNA, 255 bp, Glycine max
  Clone ID: 701146560H1
gacctacttgtatatccttaacctgctcccacaaaacaaaacgctactctagtctctagtagtatcagagaatcatcataaaaaagagaattagaagaaaaagatgttgttagggaagagacctcgtcctccaattatgaagagaacaacaagcatgtccgaaataaccttcgatctgaacacgaccttggacgatgatccgaacaatcccgtgaagggaccaggaggatcagaacagggtttgggccatggttt

SEQ ID NO: 7009 - DNA, 241 bp, Glycine max
  unsure (1)..(241): unsure at all n locations; Clone ID: 701146561H1
gataataaaagaatgtgaatttttttatttaaattgaaaacgagcagcagcgccatccattgcaacgccaccaccactaacacgtgctgtggatttgggccttgagatggatcgggtagttgcaacaacacaaattccttagtctcgattccacgcttctctccatncancaacgtcgctttcncttgtggccaccggttcatcatactctgtgattctatgaaaatttggtaccaagtaa

SEQ ID NO: 7010 - DNA, 182 bp, Glycine max
  Clone ID: 701146563H1
cctcccagcttgtactacaacaatcgtgcaaccctatgcaagagttttaggtatgcatgacaaccacaaacaggaaacagaagctggtgtctcgtgtgtgtatgtataactgtaattcactggagtggcgggacaatagggacggatagatatggttgtgagccatggctaagttaaaggta

SEQ ID NO: 7011 - DNA, 265 bp, Glycine max
  unsure (1)..(265): unsure at all n locations; Clone ID: 701146565H1
gccattgttgttgctattatcatccgcagctgcttttattcgcaccgcaaacagtgagccatggccgtcggaaagaacaagcgcatctccaaggggaagaagggtggcaagaagaaggcagctgatccctttgccaagaaggattggtatgacattaaggctccttctgtttttcaagtgaaaaatgttggcaaaaccctcgtctctcgtactcaggtaccaagattgcttctgaagntcaagcatagagtgtttgaggtctcct

SEQ ID NO: 7012 - DNA, 208 bp, Glycine max
  Clone ID: 701146566H1
gaactgtgtctgaattctgaaaaaactggaacatgtcttcaactactgtggtaggctctatttctacaacagcagctttgacacccttgttgccatcatcacgtacaagtagaagcacatttggcgccaattccacctccacaagcttccccgctactccactctcctccaatctcctctttcagctcaatcacacttcttcttcttc

SEQ ID NO: 7013 - DNA, 263 bp, Glycine max
  unsure (1)..(263): unsure at all n locations; Clone ID: 701146567H1
tggtgttgtgtattgaagagtttttcggaaagcagaaaggaatgttcaaaaggaaaaacaaaggcatagggaaaatatgccagggtggttaacaactttttaaagctaaaggcctcaccttaccacctttttcttccctctcatagtcccatgtactatttatttttttagctccttccacgacagatgctgacttggcaccaacagaagacccagaaaaaatgtgtgaggaaaanatattattgttacaaaagattattcat

SEQ ID NO: 7014 - DNA, 237 bp, Glycine max
  unsure (1)..(237): unsure at all n locations; Clone ID: 701146568H1
ggaaanaaaagagtgaagaaaagaacgcagaaactgaaataaaaaatggcagaacccaaggttaaatacgatcgtcaactcagaatatggggtgaacaaggacaggcagcccttgagaagtctagtatttgcttacttaactgtggtcctactggttctgaaacacttaagaatcttgttcttggtggggttggaagcatcactgtagttgngatctaaagttgaagcgggagacct

SEQ ID NO: 7015 - DNA, 258 bp, Glycine max
  unsure (1)..(258): unsure at all n locations; Clone ID: 701146569H1
accaaccaaccttgtgatggcaaaataatgactttacttgggactttaaggtcacctgacaagctcatataatcaacttagcttgcactgatattggcctttttaagtccactttcatacgttgagtgccccttatacgtgtcacttactacgcatgattctaacgatttgtcgcataagacatgttcatcgtaatcacctaacaacttttcctaacaaaactacattnagggtcttgccccttaggtatgaatacta

SEQ ID NO: 7016 - DNA, 259 bp, Glycine max
  Clone ID: 701146570H1
ttacccaatctctttctcgtcctttaaagaagcatgcaatgtccaaaaatatgtccttactgagaatgatctaagccatcataacttaattttaatactgtatgaatttccatactcgaaatcttttggagttttctcaattcactctcccatgcctctttactttttcgacgaagacttgcacccataacttttaaagccaaaggaatacctttggcaataggaaagtactttctgataggtcttcatacccctcttt

SEQ ID NO: 7017 - DNA, 258 bp, Glycine max
  unsure (1)..(258): unsure at all n locations; Clone ID: 701146571H1
ggaagcaaaaaatgaaaacccaaagtgcttctnctcctctgtactttttctctctcttgctatccttttggctagtggcactgctgcaagtgcaactccaagaagcgcagtgccaagccaccatgtttcaacattcaacagaagcctttttcctccacttttctctttgganttggttcttctgcttaccaggcagaaggagcagcaagtgtagatgggagaggaccaagctngggacacctacactagacagcatat

SEQ ID NO: 7018 - DNA, 257 bp, Glycine max
  unsure (1)..(257): unsure at all n locations; Clone ID: 701146572H1
cccgctccttatccctcctgattctgtccctatcctgatctctgtccaagtcacgatctctgtatctttcacggtctcgatctcgctcccactccctgttcctatctcggtcacagtatctgtccctatcacgttccctatccctgtctctggaccgtgaccggtctcgttccctatccctatcaggatattcacggctctggctgcggcgattacttggagatcttctacntctcactgccatttttttcatgaga

SEQ ID NO: 7019 - DNA, 123 bp, Glycine max
  unsure (1)..(123): unsure at all n locations; Clone ID: 701146573H1
agaagaaaaccttaacaaccttcctnaaaaatttaagttcattntctagttgttgtntttaattgtctttccctttccctgtaattatcatcnntcacttgttgaaaggaagcatcctcttcc

SEQ ID NO: 7020 - DNA, 257 bp, Glycine max
  unsure (1)..(257): unsure at all n locations; Clone ID: 701146574H1
gaatgttaaatctggccttccagccacaacaagtactgagaggttggaacaactggatgatgaggagcacattcttggaataaggatagttggaggtgaccacaggctgaggaactattcttccataatcaccgtccatccggaggtcattgatgggngacccagtacaanggggattgaatcattgtggtggatgtgcctgatgggaacaccagggatgaaacttgttacttgggaggcttgatcagtgtaactaa

SEQ ID NO: 7021 - DNA, 260 bp, Glycine max
  unsure (1)..(260): unsure at all n locations; Clone ID: 701146575H1
ggctcttccgtggttttgccacgctctataattctcttccattgtcttgtgttctcctgcaaggctgctaccacaaaaaggtttttcggtcaaactcaaaggctaacttaacagaatcaagaatggtaaagcngagttaagcaaagcaagaatggtgagagagcatnacattaacagtggatggccaccaataggggccccatgaacgtgcagagagatgagtatgatcagcatgagtaacttcgatagctctgtgaatg

SEQ ID NO: 7022 - DNA, 264 bp, Glycine max
  unsure (1)..(264): unsure at all n locations; Clone ID: 701146576H1
gatagtagtttctcaaaacacatcacaccttcaaacccgaaccctaaccctagaagaaagaaaaaaacccacaacacacaatcantactaccaactagggtttttgtcatggctagtttgcaaactagggttttcttgatggcccttctgtgcctgctggctcttggtgcaaccattattccaatggcacaaggggaagtgtcatgtggccaagttgtgagtaacctgaccccatgcatcctatgtgctatatggtggagccac

SEQ ID NO: 7023 - DNA, 152 bp, Glycine max
  unsure (1)..(152): unsure at all n locations; Clone ID: 701146578H1
gatagcatagctgacataaaaaaggaaacactgctttttaacttttttttgcttccgtcttataggccacacagttgctttgcttctgctctctgatcatatattaatgccattgttactatgactttgagnttcgagaactgtgcnaagat

SEQ ID NO: 7024 - DNA, 267 bp, Glycine max
  unsure (1)..(267): unsure at all n locations; Clone ID: 701146579H1
catcaccacttttggcacctacattgaagctgccagtggtganaactttgccggtggttccccaaaagactacggaatgttctcccccaagattgggcaactctcaacggtgcctccgaagcaaagaactccggaggccctagccaaggcaatagaagtgatggaaactctggaccaagcagcattcagaggtggattcatcctggaaaaaatcatgggtccaatatcaagcgggcatttgntccgaagccgtgatccgaacgacaa

SEQ ID NO: 7025 - DNA, 229 bp, Glycine max
  unsure (1)..(229): unsure at all n locations; Clone ID: 701146580H1
tcgttcttcctgttccagttttccctctcactttctccactgccgatattaaaatttagaatactgatgcaacgacgtcgtattactttcttgttcatatctattttttnttcttnttctttttctattaatccctattcatatctctactnctccattttctgtataagaaatattngngacatttttttcgcacgtttatngtatgtcttgnctagganggggnana

SEQ ID NO: 7026 - DNA, 263 bp, Glycine max
  Clone ID: 701146581H1
taaatttggctcacatcaaacatgtcaagtttagcatgctttcaacaaattccttcacaaataactaccataaggcattaacctagtaaaactacccatcatatctcccaaaaacccaatacccacgaaattcatgtgagaagaagtctacccaaacctgaaattcgaagtcccacaacgtagaggtgcgcttcacgactccaaaaatggcttccttttgcatttggagtagaaatggtgagcaaagtttggagctttatggg

SEQ ID NO: 7027 - DNA, 260 bp, Glycine max
  unsure (1)..(260): unsure at all n locations; Clone ID: 701146583H1
gataccanaaacaaaacacaagccaagtgaaagtgagaaaaaataaaaatcaaagagcataatgtcagggatcattcacaagattggggagacccttcatgtgggagggcacaagaaggaggaggagcataagggtgagcaccatgctggagaatacaaaggggagcaccatggtgaacacatagtgagtacaaaggagagcatcatggtgaacacaaagctggagagtacctgtgagcacaagccagagcacaaagagg

SEQ ID NO: 7028 - DNA, 252 bp, Glycine max
  unsure (1)..(252): unsure at all n locations; Clone ID: 701146584H1
gttgaggggaaggggaacaatagtgttgatgattggnttggggtgtgtaggaagataaggttgttttatgatttgaatggtgggaggagcttagtggaactcgttggagggaacaatggtgttggtgtaggtgtcattttggagcatggggaagaggagttggttcaagcaactgagtatttttgtagttttggtgcgaagaaggaggatgtggcgcggttgattgagnggacgggagttgttggagctgat

SEQ ID NO: 7029 - DNA, 269 bp, Glycine max
  unsure (1)..(269): unsure at all n locations; Clone ID: 701146585H1
gacaagagaagatacgaagctctctcaatcttattttctgattaacactaacaaataacaatgacggatgctgctgaagacgctacacgccgccgtaatgcggtggccgagtaccgcaagaagcttcttcaacacaaggaattggagtccagagtacgatccgtccgagagaatttgcgtgcctcaaagaaagagttcaacaaaactgaagatgatctgaagtctcttcaaagcgtaggacannttggcgaagttcttaggcctctcgt

SEQ ID NO: 7030 - DNA, 261 bp, Glycine max
  Clone ID: 701146586H1
cctagagtctgagatcaaaggagactttgagaaagccgtgtaccgatggatactggaacctgcagatcgtgatgctgttttggccaatgttgccatcaagagtggcaaaaactacaatgtcattgtggaaattgccactatcctctccccggaagagcttttggcggttagacgcgcctatctcaaccgctacaagcactccttggaagaagatgttgcagctcatacctctggcatctacgccagcttttagtggggttg

SEQ ID NO: 7031 - DNA, 235 bp, Glycine max
  unsure (1)..(235): unsure at all n locations; Clone ID: 701146587H1
ggctatcanttttgttaaatgtgggctggcagagtcagaaaatgaagagaatgttagattccaacatagacggtccagttacagggaactccagtacatctgtgatggggatgaccatggagttctgtactttgctggaacatcctatggtgaacacccgtgggttaatcctcttttggcagagccaaggaaaatttaccatcacagctacncccccatcaagatacatgatccc

SEQ ID NO: 7032 - DNA, 254 bp, Glycine max
  unsure (1)..(254): unsure at all n locations; Clone ID: 701146588H1
tactttaataaataatataaccaaacacttattattccatataatagtttttttaacttttagctaccatctctttttcagctttcaattaattgttccagttaattttattaagtattataaaaantagaaacactcatcgttacttaatgttattttggggaatatgttcattatgatacgtttttgtcaggtctgttttttttatataggcaaaagaaaatattatnaaatcaaaaggcacaacagcataa

SEQ ID NO: 7033 - DNA, 234 bp, Glycine max
  unsure (1)..(234): unsure at all n locations; Clone ID: 701146589H1
gaccacattccaaaacacaaacacatacattgtagtatcacttttgtctcggaatttgttcttttgagttatggcaagcttaaaggttgcatgtgtggttttgatgtgcatggctgtgatgagtgcaccaatgatggtgcaagccgnngtcatgcaatgatgtttctgtgaacctagcaccgtgcctatcttacctgatgcagggtggatgttccagaatcgtgcnnncgcgga

SEQ ID NO: 7034 - DNA, 142 bp, Glycine max
  unsure (1)..(142): unsure at all n locations; Clone ID: 701146590H1
gggantngaagtantagcaagtacgtcgtatatgtggttgatcttttnctggttgtttgttttgttccttccaattgtcagatctgaatcaccggactcactcttcacactcactcacactgaatggcttctgaaggcgacc

SEQ ID NO: 7035 - DNA, 102 bp, Glycine max
  unsure (1)..(102): unsure at all n locations; Clone ID: 701146591H1
ataaatgacgaatatgatattaatattatttcagatattcagccattagaaataaaacaataggtcaaataactaccatagatcagataccgatngaaatga

SEQ ID NO: 7036 - DNA, 270 bp, Glycine max
  unsure (1)..(270): unsure at all n locations; Clone ID: 701146593H1
tgttcaattcatatcagttttatagaagggtaaaatggaaaaatcacacaattgcttggtgtaccagcaattttgtagggtagacatagcaacgcccatgcaaaagtcatcattagaggtataaacccaacaagtgtttatattagcccattattctcgtaaaaaaataaaagcccantgaaaggttaccgcacaaataggaaattatatagtgggggttccacgaattgatagaagttgctattccctccaacttaactatcccgccac

SEQ ID NO: 7037 - DNA, 200 bp, Glycine max
  unsure (1)..(200): unsure at all n locations; Clone ID: 701146594H1
gagagaaagagagagaaagatgtcgaagcgtggtcgtggtggttcggcggggaacaagttccgcatgtcgctgggtcttccagtggcggcgacggtgaactgcgccgacaacacgggggcgaagaacctctacatcatttcggtgaaagggatcaaaggccgtttgaaccgtcttccctcggcctgcgttggnnacatgg

SEQ ID NO: 7038 - DNA, 214 bp, Glycine max
  unsure (1)..(214): unsure at all n locations; Clone ID: 701146595H1
gtgatgcgaattatcaatgancctactgcagctgccattgcttatggtcttgataagaaggccacaagtgntggtgagaagaatgtgttgatttttgaccttggtggngggacatttgatgtttctttactaancattgaggngggtatctttgaggtgaaagccacagctggtgacacccatcttggaggtgaggattttgntaacaaatggt

SEQ ID NO: 7039 - DNA, 216 bp, Glycine max
  unsure (1)..(216): unsure at all n locations; Clone ID: 701146596H1
ggtgagttgagaggatcgtgagaggggcagtagccgagattccgtgagttgcaaaaatgaagacgattctttccaccgagaccatgaacatcccggacggcgtgagcatcaaagttcatgccaaggtcatcgaagttgngggcccccgcggaaaattggtgcgagacttcaagcatttgaatctcgattttcagctcattactgacgaaaanggta

SEQ ID NO: 7040 - DNA, 253 bp, Glycine max
  unsure (1)..(253): unsure at all n locations; Clone ID: 701146601H1
gacacattgtgagtatcaacaagaatactccataatataggtagcatatagagctatagttatattgatattgctattggtaagctctatttncctcggccatggctaataatgaacgtgatctcttctcgcggagattgtgaatcgtggaattgaaccgtcgggacccaacgctggcttcgttgacattctctgtganggtgaggaggcgcttaccggattttctgcaatcggtgaaccttaagtncgtgaa

SEQ ID NO: 7041 - DNA, 111 bp, Glycine max
  unsure (1)..(111): unsure at all n locations; Clone ID: 701146604H1
tggttttcctttgaagtgcttgggtcaacaccaccanaaactaatttcgccacttttttcgcattggatccccataagcccaaaaaggggaacaccttctcactgataagt

SEQ ID NO: 7042 - DNA, 247 bp, Glycine max
  unsure (1)..(247): unsure at all n locations; Clone ID: 701146605H1
gtacaagtgaatccaaacttaattagtgcgcatcaaatattgaatactataagagttaacaatctnanncatcntactttaatcatatcttggccaccaaacaagctttcatttaggcatgactattaattcgaacttgtggttttaaggaccttgtataaacttgtttcaattgagantgggtttggattttctnactttgtagatgttgagaagggatagaggatgtgaaacggccttgncccng

SEQ ID NO: 7043 - DNA, 248 bp, Glycine max
  unsure (1)..(248): unsure at all n locations; Clone ID: 701146607H1
gtcacatatcatattatgaagctcacaggtttcctgcaagcggtgactcttgctttggtgttagccaccgtctctgcatcagatcctgatcctctttcaagacntctgtgtcgcagaccttgcttnagcggtaaagtgaatggattcacatgcaaagatgctgccaaggtaaatgcgagtgatttcttctcagacatactagccaaancaggtgccacaaacaacacctntggctccctagtgactgg

SEQ ID NO: 7044 - DNA, 250 bp, Glycine max
  unsure (1)..(250): unsure at all n locations; Clone ID: 701146609H1
ggaaaaattaaaactcacaaagcaatgattgaaattaacaagctactgaactttgcattgcccccattatcactaattgtcatcttcatcttcacgccacctttgctcttagtgaagctgcttatgtgtgttaaaaagtttctatacaccgaaaacgtggcagggaaagtagtattaatcactggagcagcctcagggattggcgagcaagtagcatatgaatatgctaggcgcngagcaaagctgtctc

SEQ ID NO: 7045 - DNA, 249 bp, Glycine max
  unsure (1)..(249): unsure at all n locations; Clone ID: 701146610H1
aaaagagtaaaattaaagccaacggcagcttctggatttatctaacgaaccctccgtagttcagcatcatcgtccgtcatcatatcataatcatcaccgaatcaaaccaaacctatcttttaattcaaaactttattttgggagacgccgtcgtttcggcaacgccggcgggcctcctcctccagccatggccgccgcagacaaagcgagccctcgaagacgatgctctcgntccccgtgagcgtcgtt

SEQ ID NO: 7046 - DNA, 238 bp, Glycine max
  unsure (1)..(238): unsure at all n locations; Clone ID: 701146612H1
atagccactttggctttgggcgcctatatttttctctcctaagaggagacaatcagtgaaagattctttgggattcaggagcttctttttgatgttgtgaccgtcttgntggagtcacggcaaatcagaatgcatacttcaaaggataattttatgcnatcttctantgcagctaccgctatgagtatctggatacggcatnacgttggtaatgcagcaatgcgggtttgagaaantg

SEQ ID NO: 7047 - DNA, 241 bp, Glycine max
  unsure (1)..(241): unsure at all n locations; Clone ID: 701146613H1
gngccgactcgnntgctatcagcgagtgagantnagtnagtngttctcttgcagcaacaaggtttagtgacaccaaacagacgggaaatggggtcntggggtcaattctggtgtngaacagagttcctttggaattatccctttgggnatnggggtnncttgccagcattgcaaatggtgctcgcantcaaaatggcaaatgcnccttnnancaccgggtttatnaaancaanttccnacc

SEQ ID NO: 7048 - DNA, 260 bp, Glycine max
  unsure (1)..(260): unsure at all n locations; Clone ID: 701146614H1
ggtgggtggtgggtaggaacaattcccagtgttctcagattggaatcccattgactctaccatggccacgccctctgatccttccaaccaagaagctgttgtaagaaggagaaacaacgggaccccctattagtttcctccttcctcntcatatatgcccctggttctccctctaatttcgttattgctgggggcataaacccgtcttganagatccgnttggtttnatgntgtgttggctggggcctttgctanatgnt

SEQ ID NO: 7049 - DNA, 268 bp, Glycine max
  unsure (1)..(268): unsure at all n locations; Clone ID: 701146615H1
ggcatcaattcaaaatatatcatcaattataagcatgggtttgtggaacacaacgaatgcagtgtcttgccgctttcacaagtttggtgatgaccaaaagaatctggtcttccaaggtgatgccacgtctcttccagggggataggaactcacaaagttaagaccggtgggagggaaaaccatnggtngccagtgtggggganattttaanacccttctcccagtggcaccttttgggaaagctnctacaagtgggccgccaagcttt

SEQ ID NO: 7050 - DNA, 288 bp, Glycine max
  unsure (1)..(288): unsure at all n locations; Clone ID: 701146616H1
gantcgaaaatgccgtcgcacaagaccattcagaatcaagaagangttgggcgnagnaagattgaggcagaacaaggcccatttcccctactgggatccgcatnaggacccggtaaacaccatcaggtacaacgcgaagncccgtcaatngggttgcancaaagcnttggaattcngaggngtnatgccccgnctanggtcaaatttttcccatttaattaggggttttantnttccttgggggcaaaaaaaatgtttggagtgtntaaaaatttccnatttgtgcng

SEQ ID NO: 7051 - DNA, 247 bp, Glycine max
  Clone ID: 701146618H1
aaagagacccggaaagggtgggaaccgcttttggaaatccattgggcttggatttaagactcccagggaagccatcgaaggaacctacattgacgagaagtgccccttcactgggcaatgtttccatccgtgggccgtatcttgggctggaacatgtcacagtgctaagatgaacaggactattattgttaggaggaattatctccattttatcaagaagtaccagaggtacgagaaaaggcatcca

SEQ ID NO: 7052 - DNA, 279 bp, Glycine max
  unsure (1)..(279): unsure at all n locations; Clone ID: 701146619H1
gatgctggttacacagttcgattcgggctcatatatgtggattacaagaacaacttgaaaagataccccaagttctctgctttttggttgcaaaagttccttctcaagtgatctgaatttagtgttcctttgacatgtctagtgtttttcttgtttatttccctagattcatcgtatatcacttgtgttgggatgtaatcaagagatcattttatcaaataaataatgccaaatgggcatgtcgaagtaaaaaaaaaannannatagnaatgnaggggg

SEQ ID NO: 7053 - DNA, 245 bp, Glycine max
  Clone ID: 701146620H1
atgaggataaagcaatggggcattcaatcgcaatgccttatgcatgtgatatctaacaaggtgtgcccaatcaatttgtaaacctttatgaaaggcccacatgacaatgaaatcttctccaaaaactgagcaaggtttgaagatctagggagtaagatacgaacaataagataatgcagaatgcagctctcaaaagccaatgaaccggcaagaagtcttccggtcatatccgcttggttagtccc

SEQ ID NO: 7054 - DNA, 245 bp, Glycine max
  Clone ID: 701146621H1
gaggaccaagaagaagaaacaacctcaaaatccctttcttgtgtcgattagattactttcacaccagagtcgttcgagtacttcaccttctttctctctaagcgcaaaacctcgtactgtttttggcgttaaggatgtcggggaaaggagcgaaggggttgatcacaggcaaaacctccgccgccaacaaagacaaggacaagaagaaacccatctcgcgttcttctcgtgccggcttcagtttc

SEQ ID NO: 7055 - DNA, 164 bp, Glycine max
  Clone ID: 701146622H1
gatataaagtctgatcattagggttttaggtagttggatgtgttgagatccactgctgcagaatccaatttgtgaccctaaatccaagttactatgactgctcagacccaagaggagcttcttgcgcaacacctcgaacagcaaaagatccatgatggtgaacc

SEQ ID NO: 7056 - DNA, 253 bp, Glycine max
  Clone ID: 701146623H1
gaagaaataaatcagaatttgcttacagcattgcaaattacaccatctcttctcttctcttcgatgagttgtcttcattgccgagacggagaaagaagagacagagtttctagcatatgttcttcatcaaaattctccacctaacaataatctctcaacgttacctttattcctcaattcgatatcttgtttggttttgtcttcgttgttcctgttgaattattcgttttcagctaacttagtttattcatcc

SEQ ID NO: 7057 - DNA, 221 bp, Glycine max
  unsure (1)..(221): unsure at all n locations; Clone ID: 701146624H1
ctgcaacttcctctgttttgctcccctgtttaggccttttcataagcttagaatgacacacaaggaattttccattgctctagtgactctcattgctgttcctttgtcaacatgaacatcccaaggtgccactgctgactatggtagttgggcagagtggntcatgccactttttatgggcgggggtgatgcttctggcacaatgggtggagcatgtgggt

SEQ ID NO: 7058 - DNA, 250 bp, Glycine max
  Clone ID: 701146626H1
ggttgattaaattttgtagagtccattagttacgaaagctgaagcttcttaagcacttcccttggttttcggtgtggttctttccaacatagctacttccatggctgcccactaccacctcttccagtccagctgcggcggcggcagcttcttaagtctccgatcaccaaattccgatgagtccagggtctctccacccaagcctctttcctccggcttgcgggcaagtttgatggggtggcaatgtggt

SEQ ID NO: 7059 - DNA, 223 bp, Glycine max
  unsure (1)..(223): unsure at all n locations; Clone ID: 701146627H1
ggcacacagttatacangctctagagaattatcataccctttaagatgaagccgtacctacgtccaatattcctattatcccttatccttctcgacccaatccacttcggcggtgnttctaatagtaggttatagattctttcaaattataggaatcttttaatcctagtctgaggacttanaatccaaagatataagaagntccgagggcgaattttgaaga

SEQ ID NO: 7060 - DNA, 260 bp, Glycine max
  unsure (1)..(260): unsure at all n locations; Clone ID: 701146628H1
ggacggtgaattgggtagaagaagatgagangggtgaagagagcagtatttgtaggcagagccctaagaagcaattccaacaccgccgtgtacggtgttggtgccacccttcatcgagatcgaatggctccccatggctgcttaaacccaatcaaaatcccaaatccttcnggttcnngttactggggttaagataccttttctggcttntgctggctggcaaggtcttcttgnccaagacggctcagancaagggcttt

SEQ ID NO: 7061 - DNA, 279 bp, Glycine max
  unsure (1)..(279): unsure at all n locations; Clone ID: 701146630H1
ggggcgatgtagccagagagtgatacaatacagagtgcnttnttgctccttcggncacaactccctgccaacatgggtatctccagagattctatgcacaagagggcgtgccactggtggcaagaagaaggcatngaggaagaagagaaagtatgagcttggtcgncagccctggctaacactaagctnttcaagccaacaagacagtcaggagggatccngggttagaggtggaaattgtgaagtgnanggcacngnagattgggatactgggaaatt

SEQ ID NO: 7062 - DNA, 246 bp, Glycine max
  unsure (1)..(246): unsure at all n locations; Clone ID: 701146633H1
ggtttttaacaacagtccagacgagactgcatatttccgcatgttgttagacagggaaaatattagtaatgctgccgttatgattcagccgtcatgatatcgtattcatttaatgcactgcctgcnccgcattgttagatgtngcttccattgctgcagacaagatttgttgctagattcatattttagtgtggttattttcatnggatgacaatagctcaatggcgcaacttgggataccagaac

SEQ ID NO: 7063 - DNA, 245 bp, Glycine max
  unsure (1)..(245): unsure at all n locations; Clone ID: 701146634H1
ggaactgcttttgtctcaaggtctttctgcccttgcaatttgcaaaagtattaactacagtgagagntaaaattcaaggtttcaagaaancttataaaaggagagaacatctgtttttatcaagctcgatgggcaggttaaatttgaagccactatactggacaacatgatattctgnagatatttgcagctgaaggtgtggaattccntttatcttgtgaaggaaagtaccccgtatcagaatg

SEQ ID NO: 7064 - DNA, 256 bp, Glycine max
  unsure (1)..(256): unsure at all n locations; Clone ID: 701146636H1
ggaactccaaaacacaaacaaaaactcccgttttctctctctgtttttccatggccatctgatcaaacttttcttgattctctctctcagtttttgctattctgagtgatgggtatgccctgccgctgttccacacctcccacatcactganatcatcattcaccagcntcttcngccacaagtcttaagatnacaacaatttccctcaaattattcatcaaccaancacctttaatagcctttttccaatggtgc

SEQ ID NO: 7065 - DNA, 247 bp, Glycine max
  unsure (1)..(247): unsure at all n locations; Clone ID: 701146637H1
gttccttgagatggcgaanaagggaatcaagngctgatgttgtggcatataatgccttgattggtgcattttgtaaagtaaataagtttaaaaatgtgcatagggtcttgaaggagatgganagnatggtgtcgctcctaattcaaggacctggcaatgttattatacagcagtatgattggccaaggaccagacgattagagctttccgagtnttctggccgggatgatccaattgtgtgaaccgg

SEQ ID NO: 7066 - DNA, 251 bp, Glycine max
  unsure (1)..(251): unsure at all n locations; Clone ID: 701146638H1
ggcacattgaaatctgaaccttccggatttcgttttgctttgttcaggtagccagccagtcatggtgctcttcaatgtttcacgcgtagagaccactcccttcgatggccagaagccnggaacctctggtctccgcaaagaaggtgaaagtgttcgtgcaacctcattacctccataactttgttcagtcaacattccaatggcattaactgtggganaaagttagaggtgcaacgctagttgtatctngt

SEQ ID NO: 7067 - DNA, 220 bp, Glycine max
  unsure (1)..(220): unsure at all n locations; Clone ID: 701146640H1
gggttttggttgngattcaaaccaaccatccganctgtgcatccctttcttccttcttcgtcttattattctccaaaacttccttcttactcttctnctntcgtntcgcaccctccaaacgacgttgtntctcgtcgttcagccatgtcgtacgactacctcttcaagtacatcatcatcggtgacacaggtgtagggaaatcgtgcctgctcctgcagt

SEQ ID NO: 7068 - DNA, 244 bp, Glycine max
  unsure (1)..(244): unsure at all n locations; Clone ID: 701146641H1
gaangaaactaggcattggtttctctgctctagcttggacgagtgaattagattcatcatcaagatgtcgtctctgatagcagaagatgtgaagagcagatcagaggtgtaccacggggacgaaagtgccaagtgaagtccaagggagcttctcaaggaaatcgccctccccaacggccttcttccccctcaaggacatggagnagtgcggtacgacagacaanccggcttcgtctggttnaaa

SEQ ID NO: 7069 - DNA, 253 bp, Glycine max
  unsure (1)..(253): unsure at all n locations; Clone ID: 701146642H1
ggtaccgatcaattaacaaccatatctatctattgagaaacatgaagaaggtttcacccttggcattttccattctctttttggccttcacccatagaaccctttattgggcattgctgcagcagcaccngangcagtgcttgacacctcaggccagaagctgagnacaggtgtcaagtactaacattctggccagtgttcagaggcaaaaggtggaggcctaacagtttcaagcagtggcaacaacacatgt

SEQ ID NO: 7070 - DNA, 249 bp, Glycine max
  unsure (1)..(249): unsure at all n locations; Clone ID: 701146643H1
anaattttgcatgccaacctcagatttgtctaaggagcaatgtaaatcatgtgatatttgcagacgatcagagtttatnttaaaccctatccnagtgtgctccggttgcnaggtttcggtgcantggatngttatcgtagtgtgaaagaaacancaggtcngnggtacccgngagtaangtgaagatttgtcctctagaagctctggggcagntgctantcaatttctgggagaagtctgtggtagaac

SEQ ID NO: 7071 - DNA, 228 bp, Glycine max
  unsure (1)..(228): unsure at all n locations; Clone ID: 701146644H1
gggagagaaatgnagagcagcaccgtctacngaancattcgaccaagttacccgatctgcccctctcgacgttcttcctcttcttctctctcaccaatctccctcnctattcgagcctctctttcctcttcaaagtttcgcaagcnagtttccntctcatttcgcagaattntctggaagtngctnctcctctaangccttntgncanttngtntcngattcctacgg

SEQ ID NO: 7072 - DNA, 260 bp, Glycine max
  unsure (1)..(260): unsure at all n locations; Clone ID: 701146647H1
ggagtttaagaattgagaaaaaatatcaatcctcttggagtagcagtggcggggttagctacagtgaatccatggccatggcggctgcatttgcaactacaactgcaacactgagaccgccaaatgttggaganagcaaaagttgcagctccgtaagtgtaacccgatcccaataagcttaaaggttattgcgggggtttggcngttgtctggantggcatnagtntcaanaattngaatttngaangggttcggccant

SEQ ID NO: 7073 - DNA, 231 bp, Glycine max
  unsure (1)..(231): unsure at all n locations; Clone ID: 701146649H1
gaagggcatgtgagatanaacatactaatcaaatttaacagcgaagaagagtttcnnatttattgcttcgaatctccagcttcgtcaggngaaggaatncancctacgtgtggtctcgggggaacccaaaaactgtganattctggaagccactaggcccttttaanaaccaaactnagggaagacggtttagacagagggttatttcangctaaganaatggnaagtggg

SEQ ID NO: 7074 - DNA, 240 bp, Glycine max
  unsure (1)..(240): unsure at all n locations; Clone ID: 701146650H1
attaatggctctcatgatgagtggaggagatctcggggtgtcggcttttcctgatggagagagtattttacatggattggcacaattgaaggtggaaaanggactcagtatgagggtttatcttataaactctccttacgttttcccctagactatccttttaagcccccccaagtgaagtttggagacaagtgctttnntccaaatgttgaccagtttggcaacatttntctggacatt

SEQ ID NO: 7075 - DNA, 238 bp, Glycine max
  Clone ID: 701146651H1
ggaacaatgattatctgcctacccttttcaaggctaactaccctccttatggaagggactttagcaaccatcaacccactgggaggttctgcaatgggaaactagctaccgatattactgctaaacactgggttttaagagttttgcacctgcatatcttagccctcaggcatcagggaagaatcttcttattggaggaaacttgcttcagcggcctctggtaatgatgaaaaggcgc

SEQ ID NO: 7076 - DNA, 238 bp, Glycine max
  unsure (1)..(238): unsure at all n locations; Clone ID: 701146652H1
gatcnaagcaaaaaatgaaaacccaaagtgcttctctcctctgtcctttttctctctcttgctatccttntggctagtggcgctgctgcaagtgcaactccaagaagcgnagtgccaagccacatgtttcaacattcaacagaagccttttccttccacttttctcttggaattggttcttctgcttaccaggcagaaggagcagcaantgtagatgggagaggaccaagcatatggg

SEQ ID NO: 7077 - DNA, 241 bp, Glycine max
  unsure (1)..(241): unsure at all n locations; Clone ID: 701146653H1
ggagggaaaaaagtagagtggtatgtgggttgctgcggcaacaaaaccattcatcaaattccaattccacagacacactacttctcttccgcttcttctgatggcaaaccaagcttcactctcttntcttcttccgtgtctcctgttcacgcgcctctcaagcgcgtgggcacgcacaacggnagctttcattgcgacgaggnccctcggctgcttcatgattcgcctcacgaacaaattc

SEQ ID NO: 7078 - DNA, 244 bp, Glycine max
  unsure (1)..(244): unsure at all n locations; Clone ID: 701146654H1
gagatcacaacctccaaaacacaacaccanaaggaaacaaaacaacccattgagagcttggcacaactctcatggtagtagtagcactactacttcacacactctctctctgagtgcctcacaccaagattctgtgatatatataccaatggaggccctcaatgctgctgggcttgacncctctatctgtgctctctgatacaaaaacaacaagaactaaacacccttctgtttctgtangcaa

SEQ ID NO: 7079 - DNA, 205 bp, Glycine max
  Clone ID: 701146655H1
gatggcgacgcgggagcagccaaacagaccctgaagcaaccccacgttgccatatttgccctcacaacaaccacaaattacaaatactttgcattcattcacccttcttcgtcccctcaactcgatctacgccgacatccatgatcgaccaccgataacttcgccatccctcgccttgcgcagtgttgacgtcgttgttgcgttt

SEQ ID NO: 7080 - DNA, 246 bp, Glycine max
  unsure (1)..(246): unsure at all n locations; Clone ID: 701146656H1
ggctgctagtaatatcagaactgaacttcatcaagaaaccaaaaacgagacaacattttatatagaccanaataatttcagtttcaggctgttggtaatattcttatggtagttttctggggttcccactccacactccaggatgttggggtggntgcacttttaacccccaacanctcaaagnctcaaggnaaccaggaacattgcaatggcttatccaactcnatagattatgggccttaagaa

SEQ ID NO: 7081 - DNA, 237 bp, Glycine max
  unsure (1)..(237): unsure at all n locations; Clone ID: 701146658H1
ggaagcactgagcagttgaggaaatgggaacccttgggagagcgatctacagcgttggtaactggattcgagaaactggacaggccattgatcgtctcggttcccgtcttcagggcggtatacttccaagagcagctctctaggcatcgaactctgatgaanatatttgataaggctcctgttgttgataaggatgtatttgttgcgccaagcgcctccgtcattggagacgttcac

SEQ ID NO: 7082 - DNA, 248 bp, Glycine max
  unsure (1)..(248): unsure at all n locations; Clone ID: 701146659H1
ggagaacaaaacaagtgtttcgaatagattatcctaagtctttgggaatagtgctgcaatggcttcaagtcaggaggaggtgacccttttgggagctactggaagccccatttgtgtgcagggttcatattgccctcaagttgaagggagttcaataccaatatgtcgaagaaaatttgangaacagagtgaaactgcttcctcaaatccaacccagttccacaagaaggtccagtggttantccaca

SEQ ID NO: 7083 - DNA, 236 bp, Glycine max
  unsure (1)..(236): unsure at all n locations; Clone ID: 701146660H1
agctangctacctagcacccgcgcccaagtcacttcctccaaccctttctttnnctcagtatctgtggtccaaccccacttgnttctctgcatttttttntcatccttctnngtcctcnggtattctaatnccaaggcttgcataatcacgttgtgcanttccatngttcctacgctacctggagtttgggaccttgccatagantcttctcanaattnngtgcttccgggtaant

SEQ ID NO: 7084 - DNA, 257 bp, Glycine max
  unsure (1)..(257): unsure at all n locations; Clone ID: 701146661H1
ggcatcaattcaaaatatatcatcaattataagcatggggttgtngaacacaacgaatgcagtgtcttgccgctttcacaagtttggtgatgaccaaaagaatctggtcttcccanggtgatgtccacgtctcttcnaggggcatagaactcnncaaagttagacggtgggaggaaaaaccagtgggntgnnatttggggaaatnttaanccttctcccatngcncctttggaaaancnnnanngtngnncgnnagt

SEQ ID NO: 7085 - DNA, 268 bp, Glycine max
  unsure (1)..(268): unsure at all n locations; Clone ID: 701146662H1
gaagggggtttgataaaggttgacattgaaatttgaagccatggttcttgactccattctgacatctcctcgtctcaagtctccanctttcaggagacagtttaaaaagggtgggangggggaagttgtccanacnttttccnagagggcatcgcttcctccttatctncncttggttcctggngaacctnctcctcngcaattgtntnantcnttactttgccntncacctttaagggggctaattggccncctgtttctgggtttg

SEQ ID NO: 7086 - DNA, 252 bp, Glycine max
  unsure (1)..(252): unsure at all n locations; Clone ID: 701146663H1
ggtttgattagggtttgtcattagcacttcttcttttcacactgccgctgcaaacaatgggcttcagagaagaaactttcgaacccaatgagggagataaaagtgcagaagctcgttctcaatatctcgttggcganagtggagatcgtctcatcagagccgccaaggtgttgggaacaacttagtgggccaaaccccagtgttttnccaangcaaggtacactgttcgntccttngggattagaanaaatg

SEQ ID NO: 7087 - DNA, 247 bp, Glycine max
  unsure (1)..(247): unsure at all n locations; Clone ID: 701146664H1
ggcacaagtttgttgagatagctagaagcaataagatganaatgaaagtgctgtttgtttgttgctacagttttggtagcttggaatgccatgggctcngactaccagaagttcccctctccanatgaaaactggggttggtgggcatncagcatgaggnngcnnntngccatttggaggctngncgttgnagcaaacaacgtagtcaagtggcaactgttcctgcacntgcggagagtacnatact

SEQ ID NO: 7088 - DNA, 248 bp, Glycine max
  unsure (1)..(248): unsure at all n locations; Clone ID: 701146665H1
ggaagaaaatgaaagtcattgttttcttcgttgctataataattttaggtgcagaatggcaatgcaatgggtcagagncatgagcatgagcatggccacagctaccaaattttcccttgcgatagaaaaccggccccggtggccactacattccggaggtatcgtgcaaaagttgggaggcttggtgtggaagcacacaacgtcattgactggagaaccattcctcaagatgcgaggggatatatagg

SEQ ID NO: 7089 - DNA, 245 bp, Glycine max
  unsure (1)..(245): unsure at all n locations; Clone ID: 701146666H1
gaatggctgaaatactggtacaaagggcaggttctccagatgaatttactaggttatcagctatcacatggataaatgagtttgtcaaacttggtggagatcagcttgttccatattatgctgcattcttggagctgtntggcctggcatatctgataaagaagagaaaattgagtgggttgctcgtggaaaccaatggaagagttacntgcaatcaaggncgatccagccgaagcatttgatgt

SEQ ID NO: 7090 - DNA, 242 bp, Glycine max
  unsure (1)..(242): unsure at all n locations; Clone ID: 701146667H1
ggccattgttgttgctattatcatccgcagctgcttttattcgcaccgcaaacagtgagccatggccgtcggaaagaacaagcgcatctccaaggggaagaagggtggcaagangaaggcagcgatccctttgccaagaaggattggtatgacattaaggctccttctgtntttcaagtgaaaaatgttggcaaaaccctcgtctctcgtactcagggtacnaagattgcttctgaaggact

SEQ ID NO: 7091 - DNA, 215 bp, Glycine max
  unsure (1)..(215): unsure at all n locations; Clone ID: 701146668H1
ggcatcaattcaaaatatatcatcaattataagcatgggtttgtggaacacaacgaatgcagtgtcttgccgctttcacaagtttggtgatgaccaaagaatctggtcttccaaggtgatgccacgtcttcttccaggggcatagaactcacaaagttagacggtggaggaanaccagtgggtggcagtgtggggagagtgttatactcttctcc

SEQ ID NO: 7092 - DNA, 236 bp, Glycine max
  unsure (1)..(236): unsure at all n locations; Clone ID: 701146669H1
gaactgcaattacgacaaccacattggggttaaggcatagtcatttcaacctgtgtttgacaactccatattttgccgtaattgtcccaacctgttttgaaatgaaactgcgatttaaatacacttagggtntctaatacgtgcattcacaacacaaaattgaaaatggcttcttcacgttttagttccattttccttctttcnatcatcttgaccataagcaaattggcattggg

SEQ ID NO: 7093 - DNA, 215 bp, Glycine max
  unsure (1)..(215): unsure at all n locations; Clone ID: 701146670H1
ggatttggaagaatnggccgtttggttgccagantcgcttctgcaaagagacgatgtggagctcgttgccgttaacgaccctttcattaccaccgattcatgacatacatgtttaaatacgacagtgttcacggacactggangcntcacgatgtcaccgttaaggacgagaagacccttctcttcggtgacaagccagtcactgtttttggaca

SEQ ID NO: 7094 - DNA, 239 bp, Glycine max
  unsure (1)..(239): unsure at all n locations; Clone ID: 701146671H1
gggatccagaaacgttgaaaacgcaagaaggganagcacagtttgttttcattgggtgctgatcggaacaaacagggaatagaagagangagaagatgggtctcataatgnaatttgcggagaactnggtattaaagttgatggaagatccgaaggaaagggatcggaggttcagggagcacgtttatagagtgaagggacaggtgcgagaagacgaaggagatgtgganctaccctat

SEQ ID NO: 7095 - DNA, 242 bp, Glycine max
  unsure (1)..(242): unsure at all n locations; Clone ID: 701146672H1
ggcggcgtttgctaattgcttcgaccgagtgattcagaggaggagaagtaatggctgcgatcgcgggagcgcacgtgtttggtgttgtgagttttcagctcaagcaagctgaaatgcccttcgcatgttnccagttttaatccgcaagcatattggagattctcctcagcggcaatgtgggctctaagacgcagagcaaatggaacaattctnccccaaatcagagcccagaaacgttcttc

SEQ ID NO: 7096 - DNA, 206 bp, Glycine max
  unsure (1)..(206): unsure at all n locations; Clone ID: 701146673H1
aagacgacagaaggggagactacagcagattcaaggaacatgcttagaaaactgccangccccacccatattnctctcaaaactttcaccatgaactgnnnnnnnnnnnnnnnnnnnnnngggccacccgtacagacccacctccaaagangntntttttattaccaattttccgattcacagagaaaattctttgtgggcatctc

SEQ ID NO: 7097 - DNA, 236 bp, Glycine max
  unsure (1)..(236): unsure at all n locations; Clone ID: 701146674H1
gactgcaaagtttngtgagttgtgtaattttgtttgttcatcttgtgttntgcactgttctttcccagacccacctcnaagttganagcagccatgggttttntcttgaaatgggtcaactgttgtcgttgtcagttccttggctgcaacanncatcttctcagattcntcntccagctcanatgcanncgccaccaccanttccttgattagccaangatcctcgggtttngatg

SEQ ID NO: 7098 - DNA, 252 bp, Glycine max
  unsure (1)..(252): unsure at all n locations; Clone ID: 701146677H1
ggaangagtcacatnttcacatcgtccacttgtctgattccagtggcttccttagatcttgattaaggaagcnnaaagtatggtgacagcntagtggttgagactggtcctcattaacttagctttnaggtcttgaagagatnnccaanngggngtactcnggtntaagggttncccnacccntcgggangnntananccnaggncaattttgggnaggctgtattagngggnnncattgnccttttaagtt

SEQ ID NO: 7099 - DNA, 248 bp, Glycine max
  unsure (1)..(248): unsure at all n locations; Clone ID: 701146678H1
ggagttttcaccgataaggacaaggctgccggcacattttgaagggtggtgccaagaaaggttattatttctggccccccagtaaggatgnccccatgtttngtnggttggtgttaatgaagcacgagncaagccagagcttgatattatttccaacggtagntgaaaaaccaaactgccttggtccantnncnaagggtattcatganagntttggccntttttagggtttaagacantnttcattc

SEQ ID NO: 7100 - DNA, 242 bp, Glycine max
  unsure (1)..(242): unsure at all n locations; Clone ID: 701146679H1
gaactttggaaggaaaaacacaaccccatgatgcaacgcgtggttgatcatgntcttggtgttgctaangantcatgaaggcaattactatgagtccttaaacaatattgtnaggctaacaatggagtnntcagccctttgtgggcaantantacctggggaaaccantatncttgaagggcatccatggttgggnnctncnagccaactttcaggggaccgcggnttccactttggatggt

SEQ ID NO: 7101 - DNA, 239 bp, Glycine max
  unsure (1)..(239): unsure at all n locations; Clone ID: 701146681H1
gagagtggtggagtgtgcagaagagcgtcgcagtcgcaaccctaatcagaagaagcgcagttcaagcgagtgacagccaccagccatgggtcgtatgcacagccgcggtaagggnaatcctcttctgctttgccctacaaaaaggacacctcctagctggctccaagatctctttcggnagatgtcgaagaaaatatctgcaagtttgccgaagaaaggtttgacccgtctcagattgg

SEQ ID NO: 7102 - DNA, 235 bp, Glycine max
  Clone ID: 701146682H1
ggcacaagtgagtttgttgatcgagataactagaaacagtgtgatgaaaatgaaggtccttgttttcttcgttgctacaattttggtagcatggcaatgccatgcgtacgatatgtcccctctccgaatgaacactggctttggtgcccgtactccggaggtgaaatgcgcaagttggaggcttgctgtggaagcacacaacatctttgggctttgagaccattcctgaagagtg

SEQ ID NO: 7103 - DNA, 196 bp, Glycine max
  unsure (1)..(196): unsure at all n locations; Clone ID: 701146683H1
ctattagangtaganataggtactggtcaaatcacccaacaagggtgtatggcctatagactatattaggtcaggctaaatacttnttttttnaaaataaatcagtcattgncctaagtaantaangatttnnnttcacattgcttataattggttttacataaantatgtctctattggcctattagttcatang

SEQ ID NO: 7104 - DNA, 169 bp, Glycine max
  unsure (1)..(169): unsure at all n locations; Clone ID: 701146684H1
gggtgcagaagcagaaaacgacatatatgcagcgtcggtgtttttgtttcatgttttgactagcttgaaggctgactttcccaaggcgangaagaagtaaggagaganagagatggcagacgatctgtttgaaggattgccccctccttcctcaaacactcttcttcct

SEQ ID NO: 7105 - DNA, 237 bp, Glycine max
  Clone ID: 701146685H1
gatatttcaaattactatatgatacgggaattttctgcaccaatctaacacgtacaaactcacgtgtttacatattatttgattgaaatgttaaattttaaaaaatagaaaagtaaatcttgacggaattcaaaagttttgcagtattatatagcttttgatatacatatatacaaattcttaacaacaagcattccctttcaaaacatggtttagcatctctaatctctaatgcat

SEQ ID NO: 7106 - DNA, 232 bp, Glycine max
  Clone ID: 701146686H1
gagagcagagaagagaagagagtttcaagaatggggagcgaagaggagaagggtgaattctacttgcgatactacgtgggccacaagggcaagttcgggcacgagtttctggagttcgagttcagacccgatggcaagctccgctacgcgaacaactccaactacaaaaacgacaccatcatccgcaaggaggttacctcaaccctgccgttttgcgtgagtgccgccgtat

SEQ ID NO: 7107 - DNA, 239 bp, Glycine max
  unsure (1)..(239): unsure at all n locations; Clone ID: 701146688H1
gagaggagaggtgcggcgatggcttttgcagttacgcccaagataataacggtgtcattcgataagcaaaaccaaaggaggagtttcgaaggattgtttgggaaaaaggtatcgggtaagggtgaacgaagtcaagntcttcagtgaagtgtggtattgagcgaancagccagcgatggnaagaaaagnggcgaggaggaggctgtnaaattccaactacgtggtgccgcggacaacat

SEQ ID NO: 7108 - DNA, 241 bp, Glycine max
  unsure (1)..(241): unsure at all n locations; Clone ID: 701146689H1
tggtgagaatttgagccatcatcatctattttattcgtgtgttttgccccattgattgcttgcacaatagccttgggcttgactcttgttgatacttcttggcttcacatgcatgttgggagatgatttagggcattttattcttataagccnctagccaaatgagcctaccttgaaattaattccctttgatagcncctttgagcctatgtttcccnttctgtgttttgaaactcattac

SEQ ID NO: 7109 - DNA, 239 bp, Glycine max
  unsure (1)..(239): unsure at all n locations; Clone ID: 701146690H1
gatantgacacgtaaacatcgcaggaaccaaaagcagaacgcaacatcatcaacatcacagaggtagagagtaagacgccggcaatgtccgctgtgagagttcaagtttcggcgtgtgcggtttccgccaccgtcaaccaccttcggcnccggcnaaaacgccgtcgtttccttcaggaagaagaagcctctcactctcagantggtctcaatgtcttccgttcctcctttcccaaccc

SEQ ID NO: 7110 - DNA, 239 bp, Glycine max
  unsure (1)..(239): unsure at all n locations; Clone ID: 701146691H1
ggcacacaacacacatattcgtgtgtgtttgaagtggaagaaagagaacgcataacacagaacacagtgcagacaacaagtgatgacgtcgaaacagacatacagcgtgtgcttctgcngcggcggcggttcaagctgggcgctggcggaggcgccgtcggaaatcaagaccctattcaatgagtactccgagaatgagctcatgacaccttcgcatctaagagattcctgggtcgntg

SEQ ID NO: 7111 - DNA, 247 bp, Glycine max
  unsure (1)..(247): unsure at all n locations; Clone ID: 701146692H1
gggaactggtagagcaagggcatggttcattgcgtgggcctcagttcaggggtggtgccaccatgcatggccctaagccccgaagccatgctttcaaagtcaataagaaggttcgacgttagggctgaaaatttgtttatcaagctcgtgnaagcannanggaaagctttcttgtttttgnaggatctggcggtttcccacacataaaacccaagaatattgtgaattatttacaatcaaanngggg

SEQ ID NO: 7112 - DNA, 175 bp, Glycine max
  unsure (1)..(175): unsure at all n locations; Clone ID: 701146694H1
ttgaagtggtttgagttagctgagaagagggtgctcccattaagggccactctcnataaacactttgatcntnaattccattaagtgattggttgnatctgccaaaaccggnctccntcgtggatgcttggttgggtgcgggnctcttttgggccgacatngaaccgtcnnctcc

SEQ ID NO: 7113 - DNA, 251 bp, Glycine max
  Clone ID: 701146696H1
ggcacaagtgagtttgttgatcgagataactagaaacagtgtgatgaaaatgaaggtccttgttttcttcgttgctacaattttggtagcatggcaatgccatgcgtaacgatatgtttccctctccgaatgaaacactgggctatggtggcccgtactccggaggtgaaatgcgcaagttggaggcttgctgtggaagcacacaacatctttggcttgagaccattcctgaagagtgcgttgaagcaaca

SEQ ID NO: 7114 - DNA, 237 bp, Glycine max
  unsure (1)..(237): unsure at all n locations; Clone ID: 701146703H1
aagctttggaggttctgggctcaagaaaagtggaaagaaataagggctctttatcatgattgtatacatccaatattgagccctgtagtttattaccatgataacttctgtcttattgtggccttctttattgctctaatgttagtactgaactgaggtattcgtgatgtaagctgcaacangtnacttgtttggnctttattgtgtggcccttcatggggttctgataattacatc

SEQ ID NO: 7115 - DNA, 221 bp, Glycine max
  unsure (1)..(221): unsure at all n locations; Clone ID: 701146705H1
ggagacacaaaantcacacactttgtactctcangtccttccttcttcgatccagatctctctccttctccctcaaatggcttcccttctgcaatgttccatgcccctcgtctctctttccaatcgagctctggtacccgtacaganntncaacccaagttcagtttccctttcaattaaggggagaagtttccnatccgtaanattgcagcccagagggg

SEQ ID NO: 7116 - DNA, 237 bp, Glycine max
  unsure (1)..(237): unsure at all n locations; Clone ID: 701146708H1
ggggtcttcgttttcaccttgtctgtctacttcatgtcgaggccacgtcccatttacctcattgattttgcatgttataaacccgatgatgaactcaaggtgtcaagggagcagttgatggaggtagcaagaaaatcaggcaagttcgangancnnannngattccaaaagaggatgctgatgtcctccggaatnggggannagcnnnaancccgagggggtnttggnctcnacnga

SEQ ID NO: 7117 - DNA, 215 bp, Glycine max
  unsure (1)..(215): unsure at all n locations; Clone ID: 701146710H1
gggagaagaaanaagcactcggttgcagaacagaacaaacttctttcactctttcgcttctgaatcttcaacaatggtgctcgaggcgacgatgatctgtatcgacaattctgaatggatgcgtaacggagattctctccttctcgatttcaagctcaagcagacgctgtcaatctcatatgcggtgctaaaacgcatccaatccggaaatacna

SEQ ID NO: 7118 - DNA, 235 bp, Glycine max
  Clone ID: 701146711H1
gactcctggcagcatatactcataaatcacatagctagttgtttaaagtaagagagaagaaagaagcaaatggcaaactttccagttgttgacatggggaagcttaacaccgaagagagacctgcagccatggagattataaaagatgcctgtggaactggggtttctttgagttggtgaaccatgggatatccattgagcttatggacacagtggagaagctcacaaaagagca

SEQ ID NO: 7119 - DNA, 183 bp, Glycine max
  Clone ID: 701146713H1
gaatgggatttcaagtggaggagaccactatttgacaatgagatagatcaggcggttgcatttattcaagaggtggaggggatcagaattcagaatgacattgatgaccaatgggtgtgggaggctgatcttagtggaaggtactcggttaagagtgcttacagtgtgcttagacaggatgta

SEQ ID NO: 7120 - DNA, 237 bp, Glycine max
  unsure (1)..(237): unsure at all n locations; Clone ID: 701146714H1
cagaacaatactgcaatagagaaagaggcagatagaaaaaaagagcgacttttgagttcaaaagatgactaacttcccattgatcaacttggagaagctcagtggtgaggaaagaaacgataccatggaaaaaattaaagatgcttgtgaaaactggggnttctttgagctggtgaatcatggcattcctcatgacatattggacactgtggagaggttgaccaangnnccntncng

SEQ ID NO: 7121 - DNA, 67 bp, Glycine max
  unsure (1)..(67): unsure at all n locations; Clone ID: 701146715H1
aaagttgtgcacaagaagagctttatgcaaaaccagtcntgccggggtaagtttttgnctgnccggc

SEQ ID NO: 7122 - DNA, 215 bp, Glycine max
  unsure (1)..(215): unsure at all n locations; Clone ID: 701146716H1
ggcacaagtgantttgttgatcgagataactagaaacagtgtgatgaaaatgaaggtccttgttttcttcgttgctacaattttggtagcatggcaatgccatgcgtacgatatgttccctctccgaatgaacactggctaggtgcccgtactccggagtgaatgcgcaattggaggcttgctgtggaagcacacaacatctttggctttgagac

SEQ ID NO: 7123 - DNA, 237 bp, Glycine max
  unsure (1)..(237): unsure at all n locations; Clone ID: 701146717H1
gcagtagaagagtcctgattccaaacgaaaaaattcaaacttgattgaaaaggatcttctgattattgaagaatgggacaaaaggattgatcgcgaaaaagatttcttgttctattagaagatcgtgattggatccacatatgtttggtaaaaagncgaaaatattcttctttgagaataataaaaaaggaaagtgttcattggaacatgaaaacgtgacagattggtcctagttac

SEQ ID NO: 7124 - DNA, 237 bp, Glycine max
  unsure (1)..(237): unsure at all n locations; Clone ID: 701146719H1
gtgtccaatttgtttggagtatcccatgtgtccgcagataaccacatgtggacatattttctgtttcccatgtattctacagtacttattgatgggtgaagaggatcacaaaggtgatagctggaaaaggtgtccctttgtgctttgtggatgatatcgcnngggtttntataccttgcacatcacaaatgtaaaaanngtatcagtnggananatgttggtncnncttttgngggg

SEQ ID NO: 7125 - DNA, 251 bp, Glycine max
  unsure (1)..(251): unsure at all n locations; Clone ID: 701146720H1
gacacatacatcatcaaaaaacacacacgacacactcccatacacacacgttgtctcgcacacattccttcattccgcagcaaacatctttaccttaaacgacaacaatggccgatgccgaggatattcaacccctcgtttgcgataatggaaccggaatggtcaaggcggtttgcgganantgatgcgccgagggcggtgttcccnaanattgtggggcgtccacgtnacacacgggagtgatggttggg

SEQ ID NO: 7126 - DNA, 242 bp, Glycine max
  unsure (1)..(242): unsure at all n locations; Clone ID: 701146721H1
cagaacaatactgcaatagagaaagaggcagatagaaaaaaagagcgacttttgagttcaaaagatgactaacttcccattgatcaacttggagaagctcagtggtgaggaaagaaacgataccatggaaaaanttaangttncttgtnaacncngggtcttctncnggtgnaacntcggggttncccccnngaccatattggnccctngggagaggttganccaaaggagcactacaggaa

SEQ ID NO: 7127 - DNA, 242 bp, Glycine max
  unsure (1)..(242): unsure at all n locations; Clone ID: 701146722H1
atcagcggtgccccccaggatnacaacataatgctgtggaatgctgtcatatttggtcctgatgatactccatgggatggaggcacgttcaagttgactctccagtttactgaggnttatccaaataacccncnanctgtgcgatttgtgtctcgcatgttcatccaaatatttatgctgatggaagtatttgtttggatatactacaaaatcagtgggagcccaatatgagtgggccnccc

SEQ ID NO: 7128 - DNA, 247 bp, Glycine max
  unsure (1)..(247): unsure at all n locations; Clone ID: 701146723H1
gcgcattgaacgaaaattagggtttgtagtgtagcaggaagaagcagcaatggcgccgaagataacacgtaaggttagcagaaaccctgaattgataaggggaatcggaaagtactcgaggtcgcagatgtaccacaagaggggcatttgggctatcaaggccaaaacngtggcgttttacctcgccacgaccctaaacccaagcctgaagctcctgctgaaaaaccacccaaattttaccctgctg

SEQ ID NO: 7129 - DNA, 237 bp, Glycine max
  Clone ID: 701146724H1
gactcactcaacaaaaactatcagtgaggtcagtggcactgggagaaaaccttggaatcaaaagggaactggtagagcaaggcatggttcattgcgtgggcctcagttcaggggtggtgccaccatgcatggccctaagccccgaagccatgctttcaaagtcaataagaaggttcgacgtctagggctgaagattgctttatcagctcgtgcagcagaaggaaagcttcttgtttt

SEQ ID NO: 7130 - DNA, 95 bp, Glycine max
  Clone ID: 701146727H1
tggttttatcaaaccccttctctctcagcactggctgctgccacgtgtcttcccgatcctgactcttccgtttctgtgctcttggccggttcggg

SEQ ID NO: 7131 - DNA, 219 bp, Glycine max
  unsure (1)..(219): unsure at all n locations; Clone ID: 701146728H1
gacacaccgtttgttctattcttaactgcaacttctgctacccactctcttcttccaagtccaaccacgcttttctctacagtcatgggnaaggtcaagntcngattcannggtttnggaannttngccnnnttgggtncncantcgcgctntgaanagacncnatgtgganctcgttgccgttaacgaccctttcattaccacgattacagacataca

SEQ ID NO: 7132 - DNA, 212 bp, Glycine max
  unsure (1)..(212): unsure at all n locations; Clone ID: 701146729H1
gacctcaaaaancaaaaatcaataccttagagaaaacaaaagcacagaatcgaaagaagagttcttttttgagagagattgggatggcttcgacgaagaagatcacactgaagagttcggacggcgaggcctcgagtggaggaggcggtggcggtggagtcccagacgatcaagcacatnatcgacnanancnncgacgacggtntttcttc

SEQ ID NO: 7133 - DNA, 233 bp, Glycine max
  Clone ID: 701146730H1
ggcatcaattcaaaatatatcatcaattataagcatgggtttgtggaacacaacgaatgcagtgtcttgccgctttcacaagtttggtgatgaccaaaagaatctggtcttccaaggtgatgccacgtcttcttccaggggcatagaactcaaaagtagacggtggaggaaaaccagtgggtggcagtgtggggagagtgttatactcttcctccagtgcacctttgggaaag

SEQ ID NO: 7134 - DNA, 215 bp, Glycine max
  unsure (1)..(215): unsure at all n locations; Clone ID: 701146731H1
gacagcatatanntcaataatctattttatactatacctacattttgataattttctttgtagttgatagccatggctacccgtggaaagcttgnggttnnntgntncnaagntccanggcngacaattactggnaaccccttaggaattctactgaaatattccctaaggccttcccacatgattacaaaagcattgaggttcttgagggtgat

SEQ ID NO: 7135 - DNA, 133 bp, Glycine max
  unsure (1)..(133): unsure at all n locations; Clone ID: 701146734H1
gggagagaagttantagggtttttgagtgcncncggtccaaacactcttctctgcagctcttgcctacaactcccttcaccatggctgaacaaaccgagaaagcttttctgaagcaaccaaaatgtttctcag

SEQ ID NO: 7136 - DNA, 226 bp, Glycine max
  unsure (1)..(226): unsure at all n locations; Clone ID: 701146735H1
gatgcataagaacaagcacaaggtctgattcgtgtttccttacatcaacttgtggtctaaaaatgggaaggatgccatgctgtgagaaggtagggttgaacaaaggaccatggaaaaccgaagaagatgagaagctcgtggcttagttnnaggcatggccctggaaactggcgttcagtgcctgccaaagcgggtcttcaaagatgtggcaagagttgtagactga

SEQ ID NO: 7137 - DNA, 234 bp, Glycine max
  unsure (1)..(234): unsure at all n locations; Clone ID: 701146736H1
ggatttggaagaattggccgtttggttgccagantcgctctgcaaagagacgatgtggagctcgttgccgttaacgaccctttcattaccaccgattacatgacatacatgtttaaatacgacagtgtncacggncactggaagcatcacgatgtcacgttanggacgagaagacccttctcttcggtgacaagccagtcacnnttttggnccgnaccctnaagagatcccatg

SEQ ID NO: 7138 - DNA, 238 bp, Glycine max
  unsure (1)..(238): unsure at all n locations; Clone ID: 701146737H1
tgagagtgataataatgcatttagtttaatttatccaccacgtaaggagctatagttggaaggaaggtgacttcatacatttgctttcgagttttgaccttttatgatcttttggttccttgcaaaaagtcagctaagctgaatttcaacatgcctagctgaaaanatttttatnccncggcangccgnanaggcgtggttgccttactggttgaatngatncctgggtaatccccat

SEQ ID NO: 7139 - DNA, 231 bp, Glycine max
  unsure (1)..(231): unsure at all n locations; Clone ID: 701146738H1
gctgcctatggggattatggacagtatgggaataattggggtgacgtgtcagcggcgacaccggtgccggaagcgtctgggattagtgacagtgtgatgaggattcctgggaagagagggaggcatgagattccaactgaagtgattgaggtaagcngaagagttgattaagaaccgncnaagaggntcaggccaagctaactggggtttcntttnggccccttttatccc

SEQ ID NO: 7140 - DNA, 244 bp, Glycine max
  Clone ID: 701146739H1
ggcacaagtttgttgagatagctagaagcaataagatgaaaatgaaagtgcttgttttgtttgttgctacagttttggtagcatatgaatgccatggctcagactaccagaagttccctctccaaatgaaaactgggtttggtgggcaatacagcaatgaggtggcatcgccagttggaggcttggcgtggaagcaaacaacgtagtcaagtggcaaactgttcctgcagcttgcggagagtac

SEQ ID NO: 7141 - DNA, 217 bp, Glycine max
  unsure (1)..(217): unsure at all n locations; Clone ID: 701146740H1
gggcagccaagaangagaaaatcctcacccattntcttcgtagccaaacactctgaaattctcagttatgtcgtggcaagcgtatgtggatgatcacctactgtgtgaaatcgaaggtacccacctcncncgcgcnatatngncnagacggaagcgttggggtcagagcaccaacttcncnccagttcnaanccgngggaataaactgccnntcaaa

SEQ ID NO: 7142 - DNA, 223 bp, Glycine max
  unsure (1)..(223): unsure at all n locations; Clone ID: 701146742H1
catatgcatttttttgccttttggtgtnataattaatatatgcattctttataataatatcacattttcgttttttttaggaaatatatatattgatacgataggngcatgtatatctaaatgggttcagctttgctttcttagaaggaatgtgccattaatgtgtgattgaaatttgaatatcattttcttgaccgttcttaagaccctgtcacacttctat

SEQ ID NO: 7143 - DNA, 232 bp, Glycine max
  unsure (1)..(232): unsure at all n locations; Clone ID: 701146743H1
ggcanccaaagacnanaaaatcctcaattttctgancagccncacactctctctctgtctctcgnnaattctcagtttgcagagnnnatctgantcatgtcgtggcaagcgtatgtcgacgatcancttctgtgtgacatcgaangtaaccactcactcnngctgctatcatcggccaagacgncancgtttgggctcagagtaccgattccctgtncaaaanacgggntnt

SEQ ID NO: 7144 - DNA, 234 bp, Glycine max
  unsure (1)..(234): unsure at all n locations; Clone ID: 701146747H1
ggcgcacagagatcgtgatcgaaaatggcgacgttgaaggttcctgctcaacttccttctccagtggaagacagtgagcaattgcgaaaagcttttcaagggtggggaacgaatganggattgataatatcaatcctgggtcatagaaatgcactcacgtaagttgattcgtgaagcttatagtgcaactcatggagaagatctttttaaagatttagacaaagaactttcagt

SEQ ID NO: 7145 - DNA, 238 bp, Glycine max
  unsure (1)..(238): unsure at all n locations; Clone ID: 701146752H1
gtcagacaacagaaggtatcanttctgaaggtcttctagttgtcactaactcttgcatcatcaccaatgcatcactgacttttgcatgagcaccactaagtccgggtctgtcaagaggaagaaggtagcaatgaatttgccaatgggggtgtaggtctcatgnaattgattgaatgaccaaggggatgcaactgattcctgattgagaaattaagctactcttangtgggattggatg

SEQ ID NO: 7146 - DNA, 234 bp, Glycine max
  unsure (1)..(234): unsure at all n locations; Clone ID: 701146753H1
gagtgttagtgttcctcaagccaccgtaccgtgttgcctctctgcaatctacagccaaaatgcctttcaagaggtacgttgagatcgggagggttgcccaaatcaactacggcaaggaatatggcaggcncgtcgtcattgtcgacgtcattatcagaacagagctcttgttcgatgcccctgatatggtgaggtcccaagtcaatttcaaaaggctttccctaaccgatatta

SEQ ID NO: 7147 - DNA, 234 bp, Glycine max
  unsure (1)..(234): unsure at all n locations; Clone ID: 701146754H1
gatgttaattattagttagttaacattaatctttcanaaggagccantcgtgtctatatgagccgccttgatcctgtatataacgttgggagagaaatcaagatctgagaagtttcacctttcttcaacccctcttgctctattataatttaatatcnccagagattcttctcgtgcaaaccnnttagnttttcctcgcaggtttcatgtcaattctgttggggtccgngtttg

SEQ ID NO: 7148 - DNA, 250 bp, Glycine max
  unsure (1)..(250): unsure at all n locations; Clone ID: 701146755H1
gataccaaaaacaaaacacaagccaagtgaaagtggaganaaaataaaaatcaaagagcataatgttcagggatcattcacaagattggggagacccttcatgtgggagggcacaagaaggaggaggagcataagggtgagcaccatgctggagaatacaaaggggagcccatggtgaacacagtagtgagtacaaaggagagcatcatggtgaacacaaagctggagagtaccatggtgagcacaagcc

SEQ ID NO: 7149 - DNA, 213 bp, Glycine max
  unsure (1)..(213): unsure at all n locations; Clone ID: 701146756H1
gatccatcacacntcaaacccntttccttgatntcttagttatctaattacctcnattaatcccttaattgcaagcatcatggctgaggagannnnnnnnnnnnnnnnnnnnnnnnnnaanggcgatgatgtgcctggcgaggttgattatangaaggaggagaagcaccacaagcatcttgagcaccttggggaacttgntgctgnggctgg

SEQ ID NO: 7150 - DNA, 131 bp, Glycine max
  unsure (1)..(131): unsure at all n locations; Clone ID: 701146757H1
gaagaagaagaaggagcatggccatgagcatggccatgacagcagcngcagcagtgacagtgattaaactgctgcatcacctatatatttaaaaggtttatgggaccatagtagcgagggctgtgccanaa

SEQ ID NO: 7151 - DNA, 234 bp, Glycine max
  unsure (1)..(234): unsure at all n locations; Clone ID: 701146758H1
ggagagaaagtgagagagaattacagagcattttccaacacgattacacganncgaatcaaacccctctttctctccgaagctgcttttaatatcgtactggccttcgattgttctcctctttaatacatactgttctctcttcgatttgagggacatacaagagtctgagcatcggttaacccaactgcacaggtagtctccaaataatggagcctcatgatgagactggatg

SEQ ID NO: 7152 - DNA, 239 bp, Glycine max
  Clone ID: 701146760H1
tggttactcatgcaatggatgactataaatatgaattaacacaacatagatggaatacaaagatgtcagttaatttattccactaattgtgcttcaaatgagaattataattttaaatatgtactattaaatttacatttttttcattcattcacctagtttgtttttaatatttttttataagatgttaaattaattatcttcataaaaatgactataatagaataatgcatgagtta

SEQ ID NO: 7153 - DNA, 228 bp, Glycine max
  unsure (1)..(228): unsure at all n locations; Clone ID: 701146761H1
ggaggacgcatgtttgccccgaccaagatctggcgccgctggcacaggaaaatcaatgtgaaccagaagcgctacgccgttgtctccgccatcgctgcctccgccatcccctccctcgtcctcgcccgcggccaccgcntcnagtccntgnggagcncccactcttngtnagccactcngaggntcgngtaaacnaaannaagcnatcaaagtcctccaagcngatcg

SEQ ID NO: 7154 - DNA, 229 bp, Glycine max
  Clone ID: 701146762H1
gaccacaatttcaacattaatttgccttcatctttctctatcttaaccttcaccttgcaaagtgtaccaaacctcaaatggatcatcaaaacaaacacgtagcagtctttgctttcccctttgggcagccaccttatgcctctcttaaacttgtcctcaaactagctcattcccttccaaattgttcattctcattcattggcacagacaaatccatgcatcttttccc

SEQ ID NO: 7155 - DNA, 232 bp, Glycine max
  Clone ID: 701146763H1
ggttgttgttaaggttgtagtagagaaatccagtgcgtgtgtgttgtagcagcgagagaaggaaggaggaaagatgaacacagacatcactgcatcgacgaagccagagtaccctgtcattgatcgtaaccctcccttcaccaaagtcgtcgcaattcaacaccctcgactatctccgattcgtcaccatcaccggcgtttctgtcaccgtcggctatctctccgggattaa

SEQ ID NO: 7156 - DNA, 234 bp, Glycine max
  Clone ID: 701146764H1
atactagtgcgttaactatttattctttgaattaataatgtatactagcagagtgtcatgtaattataagcggtcacatataaggagtttattaacatttataatagtaactattttaacaatgatgattccattgattgagagtaaaaacttcacacatatttttttggtacagtatgatactatatgtgtattaaacctcctttgcttttattgttgcattgtgttggagta

SEQ ID NO: 7157 - DNA, 228 bp, Glycine max
  unsure (1)..(228): unsure at all n locations; Clone ID: 701146767H1
gaacaagaatagtgtaggcaaaagtaactgcagcagcgctgagtcgggggcgttcagtgttcaccacagtttacacacgagtacccattttctcttctcaatttctcagagtgtgcagagaaatcatggtggacgcagcagaacgtaggtcttncaggatgacgattcatcactcatgaaaactattaagggggcaacaactggtttagttgctggcatncnggggcc

SEQ ID NO: 7158 - DNA, 228 bp, Glycine max
  unsure (1)..(228): unsure at all n locations; Clone ID: 701146768H1
ggctcagatcgaagaagcaaaacaaagccaaaactacagttctctcaatgaagctcccagcacattgttttctggcttcaacttttaagtcacttatccgtttgacagtactattactagttgtttccagcaacaaancaangggtccctgaacttccccnaantnntcagttccagcagtgttggtacttggagattcgntcatggncnctggcaacaacaacaaca

SEQ ID NO: 7159 - DNA, 213 bp, Glycine max
  unsure (1)..(213): unsure at all n locations; Clone ID: 701146769H1
gggagagagagactncacagaccaaagtgcagagnacaacaaagttcacaactttaaggaaaattgaaatggcccaagtgagcagagtgcacaatcttgctcaaagcactcaaatttttggccattcttccaactccaacaaactccaatcgggtnaatcggggtttcattgagggccacgcctttggggggcctcaaatctcgcatcccgat

SEQ ID NO: 7160 - DNA, 240 bp, Glycine max
  unsure (1)..(240): unsure at all n locations; Clone ID: 701146770H1
ggcagcaaaccagactaaactccgacgatgcctcccgtcgctcctcgatccggtgatgccatattcgccaacgtcgaacgcgtcaatgcggagtgtttactttgacgtatggcgcaattgtgcgtcaattgctcacggatctggaagaggctgaggaggtaacaagcantttcannaagggngccanaatntgggacccccttatgatgagttttttagccaagtctaatgtctccagat

SEQ ID NO: 7161 - DNA, 222 bp, Glycine max
  Clone ID: 701146771H1
actttgggtagaagctataatgtgcctgatgacattgacgaggatgatcttatgggtgaacttgacgcattggaattagacatgggaaatgagactgaagctgatggggtcccatcctatctccaacctgataaagaacctgtttggatgcagaacttaacttacctccagctccaacaggacaaacggcagtgccacctggcagattcaatgcccagactg

SEQ ID NO: 7162 - DNA, 231 bp, Glycine max
  unsure (1)..(231): unsure at all n locations; Clone ID: 701146772H1
gtatttgggatgatgggtagtggtctttttaccgtacttttcgggttagggtattggttggatgttcatgtgttggggttttttgttggtgttcagattgtttgtggagtttttcagtcaattgggtgccnttgtgnggtcaccatttggggaanttggcncaagggtnnanaaaggggcctcataatgggggtatggaaactccacataacctcggtggggaaaatatct

SEQ ID NO: 7163 - DNA, 240 bp, Glycine max
  unsure (1)..(240): unsure at all n locations; Clone ID: 701146773H1
gattgcaaggttatttgaagaatctgaaaggtactagctagctagctagtacttctacactgtgaggtagcatcatgaggaagcgccaagtagttgtgagaagagaggagcctcaaaggagcgctaggacggtgaaatncggcgagtgccagaaccnntcccgccggtntgtcggantgnntnntgatgnnggcngggggtctttcgnngngnnccnncgccgnnnngnnngnacactnc

SEQ ID NO: 7164 - DNA, 229 bp, Glycine max
  unsure (1)..(229): unsure at all n locations; Clone ID: 701146776H1
catttataattaaaanaattgtgccaaattaaatccatgaatgttataactactttacttggagtgacacaattaagaataataggcttgctaacaaaaaangggaaaataattannggcattgtacttattctggctatttnagtcnactngcgcntaattntanntnncggntgnggatnttgccntatatttgcngccattgaggtcccnntnanccttggggggg

SEQ ID NO: 7165 - DNA, 223 bp, Glycine max
  unsure (1)..(223): unsure at all n locations; Clone ID: 701146777H1
gaaaaagaacttcaggctctaattgatacagcaatgtcagagattgactgtgatggattaaaggatggacaactaacaaatggaagtcttgatggtagattgtaatatatctttcggaggttcagattgtgtcattgatgctaaatgtgtttagcacagaataccctaatgttatatggagaagaaaaaaaggctggntataatcccctttaaatacccnccc

SEQ ID NO: 7166 - DNA, 238 bp, Glycine max
  unsure (1)..(238): unsure at all n locations; Clone ID: 701146778H1
gagagaaagagagagaaagatgtcgaagcgtggtcgtggtggttcggcggggaacaagttccgcatgttcgctgggtcttccagtggcggcgacggtgaactgcgccgacaacacgggggcgaagaacctctacatcatttcggtgaaagggatcaaagccnttgaaccgtcttccctcggcctgcgttggcgacatggtgatnnccaccgtgaagaaggnaanacccgatctgagga

SEQ ID NO: 7167 - DNA, 229 bp, Glycine max
  Clone ID: 701146780H1
ggcacaagtgagtttgttgatcgagataactagaaacagtgtgatgaaaatgaaggtccttgttttcttcgttgctacaattttggtagcatggcaatgccatgcgtacgatatgttccctctccgaatgaacactggctatggtgccgtactcggaggtgaaatgcgcaagttggaggcttgctgtggaagcacacaacatctttggctttgagaccattcctgaaga

SEQ ID NO: 7168 - DNA, 251 bp, Glycine max
  unsure (1)..(251): unsure at all n locations; Clone ID: 701146782H1
ggcagcgcttgagaccaagccccactcaaccaccacaccactctctctgctcttcttctacctttcaagtttttaaagtattaagatgggcagagaccattcctatttaccctcagagtncagtggaacgagggacaccctgaacaagcttctgcgaccaaatntccgatgctgtccctcgaggcttgcccttgnaaccaggaccccagaaccagcnaaggttgcctgcgnaaaccatgcaccaagaacca

SEQ ID NO: 7169 - DNA, 227 bp, Glycine max
  unsure (1)..(227): unsure at all n locations; Clone ID: 701146786H1
ggggggaagaagagataggggtggtggcaatgtgttnccantntcntntnntntnttctttcatcttcttgggttagggttctacacttgcaatctcctttcacacccacccacccttcanccatttcaattccttccctcacccaaccgcctatcgttnttngacacggtcctgtttnttaagcggtttggatnanagantagaagcgtaanatggccttngtagc

SEQ ID NO: 7170 - DNA, 140 bp, Glycine max
  unsure (1)..(140): unsure at all n locations; Clone ID: 701146787H1
ttaccttcattaaggactccccaaaaccaccaccagagagaataactttcaccttaccagtgttatacttctgcttacgcagcgcttgtggtnacgggnaanngtnnggttcactcgtgttaaggcagttcccnaaaatt

SEQ ID NO: 7171 - DNA, 230 bp, Glycine max
  unsure (1)..(230): unsure at all n locations; Clone ID: 701146788H1
ggaaggaaggatgggggatgctgntaatatgataaaagaaatgcgagaaaaagggatgatgcctgatgctgttactcataacatattgattaatgggtattgcagatgtggggatgcaaagagagcctttgggcttcttgatgaaatggtggaaaaggattcagccaacactggtcacatatacatcacttatatatgttctgggtaaaaggaatagaatgaangggnca

SEQ ID NO: 7172 - DNA, 225 bp, Glycine max
  Clone ID: 701146790H1
gggagaaagacacgatgcaggaagcgacgaaggtgataataatcggtgccggaacttctggtatcgccaccgccggttgcttaacgaagcaatcaataccttacataatgctcgagagagaagactgtttcgcttcgctgtggcgaaatacacctacgatcgtctccaccttcatttgaggaagcaagtttgcgagttaccgcacttaccgtttcccaagtctta

SEQ ID NO: 7173 - DNA, 229 bp, Glycine max
  unsure (1)..(229): unsure at all n locations; Clone ID: 701146791H1
ggtgatgcgtatgtgtttttgcctaattcaattcctctttcaatctccctctaaaacttcaccaacccaacaaccacatcattttcttttctccaaacaaattaaaattaaaataatcaaagccttcatctataaatatagccatcacacactctccccattcgttccactcgttctttngaggaancaattnatgngtctntcncacaccnttntccanctangggga

SEQ ID NO: 7174 - DNA, 226 bp, Glycine max
  Clone ID: 701146792H1
ggagggtgacttgagcaagattgtcaagttgtatgagagatgtgtcattgcatgtgccaattatcctgagtattggatacgctatgttttgtgtatggaagccagtggaagcatggatcttgcaaataatgttcttgctcgggcacccaagtctttgttaagagacaaccagagatacatattttttgtgctcggttcaaggagcagactggagatatagatggtg

SEQ ID NO: 7175 - DNA, 234 bp, Glycine max
  unsure (1)..(234): unsure at all n locations; Clone ID: 701146794H1
cgagaaggagatttctgacgatgaggatgaggaagagaagaaggatgaggagggtaaggtggaggatgttgatgaggagaaggagaaggaaganaannagaaaaagaagatncaaggaagtgtcacatgaatggtccttggtgancaagcnaacctttttnggatgaggaancctgaggggnnccacaaangaggagtattnggctttntacaagtcnttccacnaatcagggg

SEQ ID NO: 7176 - DNA, 244 bp, Glycine max
  unsure (1)..(244): unsure at all n locations; Clone ID: 701146802H1
ggtgacactgatgacaagaatcatccgtttgatagaaatcaagcccttactgctgtttccgactctagtgacagatcgaaagataaatcagatcagaagactctccgcaggcttgctcagaaccgtgaagancgagaaaaagccgcttgcgaaagaaagcgtatgtccaacagttggaaagtagtcgtttgaagctgacccaactagagcaagagcttcagcgagtaggcagcaggggattttc

SEQ ID NO: 7177 - DNA, 239 bp, Glycine max
  Clone ID: 701146803H1
gacaccaacaccaaaacaaacccactaagatggcttcctttgtatccttcctagtgctgcttcttgcagcccttatcctcatgcctcaagggcttgctacttactacaaaccaattaagaagccaccagtgtacaagcctccagtgtacaagccaccagtgggggaaccaccggtttataagccaaaaccaccggtttacaagccgaaaccaccggtttacaagccaccatataagaag

SEQ ID NO: 7178 - DNA, 219 bp, Glycine max
  unsure (1)..(219): unsure at all n locations; Clone ID: 701146804H1
atcataacttgtgctaaggtagcctttcaataaatnaaatttttgcttataaaaaaaaggttaggaaactttatcatttcgagttgacccaatgaccaaatcaatccaaactaaattaaaagagaaattttaagttggtttcaaaccatcggtttagtntgcagtccatgtgcagcaagtatagtgttgcttatttaanaaatatcattttgcctttaa

SEQ ID NO: 7179 - DNA, 251 bp, Glycine max
  unsure (1)..(251): unsure at all n locations; Clone ID: 701146805H1
gaccggcggtggaagagagatagaccaataatctgaatctgaaacctcccgtgttggtgttgcatatccaaaccctaatttgganattnnattgttgnagggaagnagntcaagatggttctggcggagttangtgggagcatttcgcgtgctctccngctgatgagcaatncnncagtaancgacnagaangngcncaacgattgcctcaacgacatcactcgcgctcttcttcaatccgatcnncaatg

SEQ ID NO: 7180 - DNA, 89 bp, Glycine max
  Clone ID: 701146806H1
ggatttcactcatttaagttgttaatggcttggtgtataaaaaacaaagagttgggaaattatgttgatcattcgctagatttcataaa

SEQ ID NO: 7181 - DNA, 242 bp, Glycine max
  unsure (1)..(242): unsure at all n locations; Clone ID: 701146807H1
ggatgcattggggcatgcttttaatttcctagatctcccaaacaaattgtagcataagtcccatggccaaagagactagtgttgtttatctatatcccagcaaatcacaagtttggggtgagaattttgatcataaaaaacttgtaataacaacactagctgnanatggaaagaaggaggagagtaatggagcacctaatgacacatatcctgcgtttcccgggtggtatgctgatgtttcc

SEQ ID NO: 7182 - DNA, 238 bp, Glycine max
  unsure (1)..(238): unsure at all n locations; Clone ID: 701146808H1
tggtagggagttccaatcgatgttggacggactcgancgaggaagggtgtgttgaagaaccggggtatcaatctgagaagaagcgtcgtctaagtgtggatcaagtgaaggctttggagaagaactttggggttgaaaacaagcttgaacctgagaggaaggtgaagctgcccaagaacttgggttgcaacctagacaggtagccgtatggttccaaaaccgtcgagccagatggaaa

SEQ ID NO: 7183 - DNA, 238 bp, Glycine max
  Clone ID: 701146809H1
ggcacaagtgagtttgttgatcgagataactagaaacagtgtgatgaaaatgaaggtccttgttttcttcgttgctacaattttggtagcatggcaatgccatgcgtacgatatgttccctctccgaatgaacactggctatggtgcccgtactccggaggtgaaatgcgcaagttggaggcttgctgtgggagcacacaacatctttggctttgagaccattcctgaagagtgcgtt

SEQ ID NO: 7184 - DNA, 223 bp, Glycine max
  Clone ID: 701146810H1
cacctaagaaattagagattagaatatcacttttaaacaatgctcaaatctttggattgctattccataggtaacaaactactaatctatggcctgtggagcaaccatagctgctggcctgtagtatagtactagttttttttcccccaagtccttatgggaatcttatattgctatccgagagaaggagcatgtaagatatacatgatccttatccaaacaa

SEQ ID NO: 7185 - DNA, 261 bp, Glycine max
  unsure (1)..(261): unsure at all n locations; Clone ID: 701146811H1
tcatggtaattatttacttaattcaattattctaacatgtcaaaacattttgnatttttcaacagaatctaancatcttaggaacnnaacanaaacaattcaagcattaatcaattcagacaaaantcaatnaatcatacatatncaaaattnanactaaatatagttatntanacnttgtaaacacnntcaaaaaatttcnacaatnatnttcnattagcnacnaanntaaatnaactganaatantactcataccntaa

SEQ ID NO: 7186 - DNA, 247 bp, Glycine max
  Clone ID: 701146812H1
gggggaaaaggaagaaagggcaagagagtcgagaaacggcgcactccgtctgttcctcaccgtcaccggcgcgcgcaccctctgttccagcgactcctaattaagttgggaaataaaaaagacttcaaatttcccagatggctgcagcctttgcttccagatgctctcgtgtgggccgttctctgtctggtggattaagcaacagttcccctggtttatttacctcatcacatggcatgacatgcaa

SEQ ID NO: 7187 - DNA, 240 bp, Glycine max
  Clone ID: 701146814H1
cgagaaggagatttctgacgatgaggatgaggaagagaagaaggatgaggagggtaaggtggaggatgttgatgaggagaaggagaaggaagaaaaaaagaaaaagaagatcaaggaagtgtcacatgaatggtccttggtgaacaagcagaagcctatttggatgaggaagcctgaggagatcacaaaagaggagtattctgctttctacaagagtcttaccaatgactgggaagagca

SEQ ID NO: 7188 - DNA, 240 bp, Glycine max
  unsure (1)..(240): unsure at all n locations; Clone ID: 701146815H1
gtngngnagaaaagtttgacctttggtngtccttctgagngcnanttactantgtntgagatgctcggcaccacagatgaaaatgagcctcttcaggcgatgatgaaagatcaatttgcaaattacgttgtacaaaaggtgctggaaacttgtgatgatcaacaacgcgagctgnttctttaccgnattaaggttcatttgnatgcantgaaaaagtacacctatggaaagcacattgtc

SEQ ID NO: 7189 - DNA, 235 bp, Glycine max
  Clone ID: 701146819H1
gaatcgcactgttactaatatctctatagtttgttactgacgctgcactcaccgctaaactaaatttcctcaaccaccatgggagattctaatcggatttcggttcaccgtgttctcggcgaaggcttagttgctgatgtggtgttgtggaagaattggcgtggagcggttgcggtgctcgtatctgccaccacattgtggtacctcttcgagcgtgccggttacaattcttgtc

SEQ ID NO: 7190 - DNA, 237 bp, Glycine max
  Clone ID: 701146820H1
tggcaaaagaagtttttgatgcttctgaagcgagtggggagaaactatggaggttgccgttagaagaaagttactgggagtcaatgaaatcaggagtagctgatatggtgaacactggtggtcgaccaggtagtgctattactgcggctcttttcttaaagcagtttgttgacgagaaggttcaatggatgcatattgacatggctggtccggtgtggaatgaaaagcagcgctgtg

SEQ ID NO: 7191 - DNA, 248 bp, Glycine max
  Clone ID: 701146821H1
gatgccaaagctattttataagccaaattgccgaaactggactacctcctagaataaatttcatttttattttttttgttcaaggccaagaattcaatggcaggtattgcatctggaatcagcacccttgccattggctcaggtgatgctcgacggcgtccagcacaagcccaatccactcccaacactaacactaacacaaacactaacagcaacacttcttcttctacgccatcatctgaagggtt

SEQ ID NO: 7192 - DNA, 241 bp, Glycine max
  Clone ID: 701146822H1
gggactcaacagagagaacgatctttgcgtttccgtgtctccaagtcctctgttttacactgctgcgcgatacttcattttctgaatataaatacgcaactcaattacccaacccaactttcttttctttgacaaaaaaaataaaaatcccacttcctttttcttctttttttgttctttgttttttgtttgataagaaactgcgagaagaaagtaaaaggttcaatttttaccctttttt

SEQ ID NO: 7193 - DNA, 237 bp, Glycine max
  Clone ID: 701146823H1
gctctttcttctgcatcactttccattctcttcaacctaacgcagcatcgctatactcttcattccatggctttgcccaatcagcaaaccgtggattaccctagtttcaaactcgttatcgtcggtgatggtggcacaggaaagacaacctttgtgaaaaggcatctcaccggagaattcgagaagaaatatgagccaaccatcggtgtggaggttcacccattggattttttcaca

SEQ ID NO: 7194 - DNA, 240 bp, Glycine max
  Clone ID: 701146824H1
gactgtcctccatttgacacattatggccacaccagcatccatcaccaatgtcactgtggagttccttcaattccccgcggtggtgacacctcctgcctctaccaaatcctatttccttggtggcgcaggggtgagagggttgaatattgaagaagaatttgtaaagttcacgggaataggtgtttatttggaagacaaggccgtgtcatcactcggtgccaaatggaagggcaaaagtg

SEQ ID NO: 7195 - DNA, 233 bp, Glycine max
  Clone ID: 701146826H1
ggacgcggagggggagaaggtgttcaaggggagcgaggtgttcggtgacacgtcaccaaattacttgaagaccattttggccctggcgttgtggctcggaaccattcatttcaacgtcgcgttggcttttcggtctgcttttcgtgctcatggtaattcctgttgatgaaaagagcaaattcggtcgaaaattatccaggtacatatgcaagcacgtttgcgcttactttccc

SEQ ID NO: 7196 - DNA, 239 bp, Glycine max
  Clone ID: 701146827H1
ggaaaaccaagtgaaatcaatagccatgaagatcgtttcggagagacctagtacctaatggacctggcagcgttaagatggtggcagtggattcggatgatctctggtttgcgtataacttgatagctcccggagactctgtcatggccgttactgtcaggaaggttctaagagaagctgctaatggcggacgggaagcagaacgcgtcaagctcaaattggaaattaaagtcgaagag

SEQ ID NO: 7197 - DNA, 234 bp, Glycine max
  Clone ID: 701146828H1
gcggctagaggatattggccatcatttgaaatgtgagtgtattgtaactgatgtgtttggaaggtcaggtgaggcggtatgcattgagacaaaacctgtattgccagggatccctagaatacataagctggagattgagggaagaggatttcataccaatctctatgctgttcatggcatttacagtggtgggaaggaaggcaaaagtagagttcaatggcttagatcaatggt

SEQ ID NO: 7198 - DNA, 226 bp, Glycine max
  unsure (1)..(226): unsure at all n locations; Clone ID: 701146829H1
gacacacatttattcatgaactgcctttgcagaaaacttttgtaaagacaaccattttagcaaagaaaattggtgtaattaaattctcaatcttctttncattttcactgtcagaactgtagcgcgtgactctttagtgaaaccttcactccatggtttcctcattgccctttgaagcttggactcggataaagatcgtgactttggctgattctggaaatgggtt

SEQ ID NO: 7199 - DNA, 236 bp, Glycine max
  unsure (1)..(236): unsure at all n locations; Clone ID: 701146830H1
tcctgcattaattttcctttaagtttaaaaacattacaataataacacttttatatatttaaaaatataacactaacatttcctcaaatcttatattaatatctcttataaganaagaaaaaataaaatttataaaagtaatgattacttatgtaattacacganatttcagaaaatattattgtaagttgctcaattaaataattaataanataaaaatacannacatataanaa

SEQ ID NO: 7200 - DNA, 231 bp, Glycine max
  unsure (1)..(231): unsure at all n locations; Clone ID: 701146831H1
ggagataagtaagaagaaaaagaagaaaaaaaatagagaaagaaagtggtaaatgtgacaagtgatgtaatagaagagagactacgagaganataaganaaaaaaatgtcaggtgaaaatgaactagggtgctaaactgccaatttttatttttttttgcttttgaaaatggaaatttgacgatcatagggtaccccatcaactattgtttgatggggtttctgcctctct

SEQ ID NO: 7201 - DNA, 218 bp, Glycine max
  Clone ID: 701146833H1
gggaagagtgacgggacggtgatgatagtattgttacgcgtgtatggaattcgatgccgcgattcccgtttctcgagagcacctccctcaagatgcaatgtggcaaattaacttgaggtcaagtgaaacaatggaatcagaaccttatcctgagcatccaggagaaccagattgttcatactacattaggactggccttgtagatttggagcaacatg

SEQ ID NO: 7202 - DNA, 242 bp, Glycine max
  Clone ID: 701146835H1
ggggcaaccgtggacaagtgaaaaaggctaagacatggtagagcttcttctacgagcatcacctcctccacttcacccttcttcttatccgagacaatgcaggacagtgtcaggaaggacattggtgaagtgctcattggaagtcccaagtaaggttctgacaaagcatgtcttatccgggcttgctgcttccttgatatttatttctccagcaaatcagactattgcagcagatctatctc

SEQ ID NO: 7203 - DNA, 245 bp, Glycine max
  Clone ID: 701146836H1
gaatccaaaccaagtatgtggacaagtggcaggaaatatgatgagaacctcaggctttttagtgaaccaaggatggccattgtttattagtgagtttggtggagacttgagaggtaccaacgtgaatgacaaccgctaccttaactgcttcttggcagtggcagctgagcttgacttggattgggccttgtggacacttgttggtagctactactttagacaaggagttataggaatggaagagt

SEQ ID NO: 7204 - DNA, 245 bp, Glycine max
  unsure (1)..(245): unsure at all n locations; Clone ID: 701146837H1
gaattatggatttatacagaccctcatcctccgccttgactcgaccaatttcctaacccttgacctttcccctttcgcttaaccaccatctcatttgcagctgcaatagcgaaataatgaaggaggaggaatcaatagtggttctagttgaggncgaagatgatccttcatcgacgcttctggatctcacgagttactagctccacgaccttgacttggtcaaagtgccatcgcgttcngcgtat

SEQ ID NO: 7205 - DNA, 252 bp, Glycine max
  Clone ID: 701146838H1
gttgtggttcggaggaccagtgttcggaagagcggcttggtgaagaagcttggggatgattttgacagggttgccctggaaaacgatgagtccaatacggtgtcgtcgttgaagacgactcgtggtcggaaattggttaagaatggtgaacttgggaacaaaacggtggttgaagtagctgaaaaatcaaacaccaaaggaaagaagagtgcaagtgaagccgagaagagccctggggttagaacttcttcc

SEQ ID NO: 7206 - DNA, 216 bp, Glycine max
  unsure (1)..(216): unsure at all n locations; Clone ID: 701146840H1
ggcatcaattcaaaanatatcatcaattataagcangggtttgtggaacacaacgaatgcagtgtcttgccgctttcacaagtttggtgatgaccaaaagaatctggtcttccaaggtgatgccacgtcttcttccaggggcatagaactcacaaagttagacggtggaggaaaaccagtgggtggcagtgtggggagagtgttatactcttctcc

SEQ ID NO: 7207 - DNA, 212 bp, Glycine max
  unsure (1)..(212): unsure at all n locations; Clone ID: 701146841H1
aagctttggaggttntgggctcaagaaaagtggaaagaaataagggctctttatcatgattgtatgcattcaatattgagccctgtaattacagttgctaccatgataacttctcttattattgtggcctactttattgctaatgtgtactgaactgaggtatgtcgtgatgtaagctgcaataagttaattgtctgtagcttattgtatcc

SEQ ID NO: 7208 - DNA, 234 bp, Glycine max
  Clone ID: 701146843H1
gagagtggtggagtgtgcaaaagagcgtcgtagtcgcaaccctaatcagaagaagcgcagttcaagcgagtgacagccaccagccatgggtcgtatgcacagccgcggtaagggtatatcctcttctgctttgccctacaaaaggacacctcctagctggctcaagatctcttcgcaagatgtcgaagaaaatatctgcaagtttgcgaagaaaggtttgaccccgtctcagat

SEQ ID NO: 7209 - DNA, 232 bp, Glycine max
  Clone ID: 701146844H1
ccgcgccgatggaggagtgaagacgttgtttgtgatgagaactgaaccatattggtggctcggcgagccgcgacagtccacgccgccatgcttcggtgctgaagctgaactaaacggattaatggagattgcagttgccagacgaatagaaaatgcgacaaagttgctatttttatgtaccagaaggatcggttcccttccggcagtaaaaattatttttagtacaatacaa

SEQ ID NO: 7210 - DNA, 234 bp, Glycine max
  Clone ID: 701146846H1
ggcttcgcctgatattctttttggctgagatcaagcaaaaatgagcgtggttggatttgattttggtaatgagagctgcattgttgctgtcgcaagacaaagggggattgacgttgtgctcaacgatgagtcaaagcgtgaaacacctgcaattgtatgctttggtgacaaacagcggttccttgggacagccggggctgcttctactatgatgaacccaaagaattccatctc

SEQ ID NO: 7211 - DNA, 244 bp, Glycine max
  unsure (1)..(244): unsure at all n locations; Clone ID: 701146847H1
gtgtttaggaacttcaaagcaatagctgagaaaaagaagagagttaccgatgttaatctcaaagcatggtatcagatcaagcttctnatgctgagcctatttggaagcntggtggtttgcaggtgacttgtggaactatgggttcttcaacagcaactatcaaacttgttactagtgatggtagcacacatgttgctgtactgttggtgtaggaccagtagattcagctacaaggctattaatc

SEQ ID NO: 7212 - DNA, 246 bp, Glycine max
  unsure (1)..(246): unsure at all n locations; Clone ID: 701146848H1
ggaggagagggagagggagagagaaagaaaggtgaattggattgcatctctctctgtgtgttggaagaggggaatcgtagatctgannnnnnnnnnnnnnnnnaataattttgtgatcagaattattgagctgaacaaaagacaatgggattgtgggaagcaantctcaattggcttcgcagccttttttttcaagcaggaaatggagttatctctaataggacttcagaatgctgggaagacttc

SEQ ID NO: 7213 - DNA, 236 bp, Glycine max
  unsure (1)..(236): unsure at all n locations; Clone ID: 701146849H1
ggagtccatntngcanngctactgatnatggctggaggaactcttagtgctactgggagnttcagaggtcacagtcantgtgccccaggggctgaatttngttgtaggtnatgttcnggntncttttggcnttcgctcctcgcnaaccgatgctntaatacaganatttctgtcaacaaattntcccntngatcantatcagngtngngaggtttcacagttccacaccgnnntnt

SEQ ID NO: 7214 - DNA, 233 bp, Glycine max
  unsure (1)..(233): unsure at all n locations; Clone ID: 701146850H1
ggcacaagtgagtttgttgatcgagataactagaaacagtgtgatgaaaatgaaggtccttgttttcttcgttgctacaattttggtagcatggcaatgccatgcgtacgatatgttccctctccgaatgaacactggctatggtgcccgtactnntaggtgaaatgcgcaagttggaggcttgctgtggaagcacacaacatctttggctttgagaccattcctgaagagtg

SEQ ID NO: 7215 - DNA, 234 bp, Glycine max
  unsure (1)..(234): unsure at all n locations; Clone ID: 701146851H1
attcatccactctgcgtgtgaaacttagttcttctcgaatcccagtgttttgaacagtttggagcttaatctcgtcataagtatctttaggtatgcaggaacatgctaacccaaattctgcacatctcccgacttcatccanagcacaatctactgcatnctgaaatgcatctgaattgcnctgctttacaacattagagaaatgagtcctaaagagctttagctgagatgact

SEQ ID NO: 7216 - DNA, 239 bp, Glycine max
  unsure (1)..(239): unsure at all n locations; Clone ID: 701146852H1
gacagcacagcactctttgcaacacaacanaaaaagacaacacagagagaagcgtcttaataaacgctcttctctgaaaaacctgatttcttctcttcttctcttctctttcgtttcgatcttcgatctctgaaaatgagagagtgcatttcaatccacatcggtcaggccggtattcaggtcggaaacgcctgctgggagctctactgcctcgaacacggcattcagcctgatgggca

SEQ ID NO: 7217 - DNA, 249 bp, Glycine max
  unsure (1)..(249): unsure at all n locations; Clone ID: 701146853H1
ggagttcttgagagaaaacggcgacaacganagccgttccgtctcgcggagtgacttccctcccaacttcatcttcggagttgccacttctgcatatcagatagaaggtgcttgtaaggagggtggtagaggtcctagcatatgggatgcctttacacacacggnaggaaaaattcttgacaaaagcaatggtgatgttgcagttaatcattatcatcggtacatggnagatattgatctnatagccna

SEQ ID NO: 7218 - DNA, 237 bp, Glycine max
  Clone ID: 701146854H1
aagatgaacttgagatggatggaagcggtgctgccgctgggaatcatagcgggaatgctctgcgtcatgggaaacgctcagtattacattcacaaatccgcgcatggcagacctaagcacatcgggaacgatatgtgggacgtggccatggaacgaagggacaagaagcttgtcgagcaagcctctccctccaattaacatcgttgttttgccaatgacattgtgaagaaaataaac

SEQ ID NO: 7219 - DNA, 234 bp, Glycine max
  unsure (1)..(234): unsure at all n locations; Clone ID: 701146855H1
gaaaatgaagtaggcatatggcagtggttatttggcaaaactataactagcattgtactttgcaattctggaccaagcgatggatttgttggaattgctgcaccttattttgcaagaattcttccaattgatttggcaatgttcaatggggagattttgtgtcagccagatgcttttctttgctctgtcaatgatgtgaaggtcagcaacatagtngatcaaaggggacgaaat

SEQ ID NO: 7220 - DNA, 240 bp, Glycine max
  unsure (1)..(240): unsure at all n locations; Clone ID: 701146856H1
ggcaccaacaacatgttgatgattcaaaacagaaaaaaaatgaggttttttacagtgaaagtagctctgtgctgtgtggtggttatgctactaaccctctcagatgcacagctagataactctttttacaaggacacgtgtccaagagtgcattctattgntaangaagttgtcagaaatgtttccaaatctgatccccgcattcttgccagtctcataaggccccactttcatgattgt

SEQ ID NO: 7221 - DNA, 233 bp, Glycine max
  Clone ID: 701146859H1
ggaagggacccaaattttaagaacttggctttgcttccttcaaagtgaggtctctaagtttcactttctttgcatagggcaacctcctttctctgtgactctgagtatcgtatcgttttattattatttctaattctctcttatcaggtccattgaatatgtctccgtcgttggatcttcctcccaagggtggcttcagttttgatctatgccgaagaaacgcaatgcttcaa

SEQ ID NO: 7222 - DNA, 231 bp, Glycine max
  Clone ID: 701146860H1
ggcacaagtgagtttgttgatcgagataactagaaacagtgtgatgaaaatgaaggtccttgttttcttcgttgctacaattttggtagcatggcaatgccatgcgtacgatatgttccctctccgaatgaacactggctatggtgcccgtactccggaggtgaaatgcgcaagttggaggcttgctgtggaagcacacaacatctttggctttgagaccattcctgaaga

SEQ ID NO: 7223 - DNA, 245 bp, Glycine max
  unsure (1)..(245): unsure at all n locations; Clone ID: 701146861H1
gggtatgccgtgacaggttaatataacagtctacaaatgaacaaagactcaaacacatgaaaatgtaattttgcagtaattaatccagcaccataattccacatcattcatntngncgttacaaccataggctagcacagggtaacagctaatctcacttgaaacttgtgagtcatccacagcaagtagagtantaataggccatagcatnacagacaacagacactaaatganaaactaacctg

SEQ ID NO: 7224 - DNA, 71 bp, Glycine max; identical to SEQ ID NO: 6746
  Clone ID: 701146862H1

SEQ ID NO: 7225 - DNA, 243 bp, Glycine max
  Clone ID: 701146863H1
ggggtggggtgtgcagaagagcgtcgcagttgtaaccctaatcagaagaagcgcagttcaagcgagtgacagccaccagccatgggtcgtatgcacagccgcggtaagggtatatcctcttctgctttgccctacaaaaggacacctcctagctggctcaagatctcttcgcaagatgtcgaagaaaatatctgcaagtttgcgaagaaaggtttgaccccgtctcagattggtgtcattctc

SEQ ID NO: 7226 - DNA, 237 bp, Glycine max
  Clone ID: 701146864H1
gaacgcagccaagaaaagaaaatcctcacccattttcttcgtagccaaacactctgaaattctcagttatgtcgtggcaagcgtatgtggatgatcacctactgtgtgaaatcgaaggtaaccacctcactcacgccgctatcatcggccaagacggaagcgtttgggctcagagcaccaacttccctcagttcaaacctgaggaaataactgccatcaataatgactttaatgagc

SEQ ID NO: 7227 - DNA, 236 bp, Glycine max
  unsure (1)..(236): unsure at all n locations; Clone ID: 701146865H1
gattatcgtaaagaatattaaaaagcggaagatngcagancagagcatagcagagcagagagggaggtggaaaaaganaaaaaggtgaggaagaaatcgagganaaggaagagaagaagaaggaatgagtgccacagtgactctaactctaaacctatgtcgctcttccatcgttgcttctgtccacattataaccacaaaccaaacccnaatttcctgcttgttagcttctcttt

SEQ ID NO: 7228 - DNA, 237 bp, Glycine max
  Clone ID: 701146867H1
ggttcaaatctcttaccagtaaattttaacggactatcaaaggctgtgaagaagggtgatactatttttatcggaaaatacctgtttactggaagtgaaacagcttccttatggctggaggtcagtgaggtgaaaggtgaggatgtcacctgtctggtaaaaaacactgctacactgtctggatcattgtttactgcacatgtctctcagatccacatcgatcttcctactcttgct

SEQ ID NO: 7229 - DNA, 229 bp, Glycine max
  unsure (1)..(229): unsure at all n locations; Clone ID: 701146868H1
ttacaattttccagaggagctctttgctgatgcaggaatattggctattgagcatgctgatttangatggtattgagcgtctggctttggtaactggtggtgaaattgcatcaacctttgacaatcctgagtctgttaagcttgggcattgcgaccttattgaggagattatgattggcgaggataaactgattcattttctggtgttgctatggggcaggcatgtaca

SEQ ID NO: 7230 - DNA, 237 bp, Glycine max
  Clone ID: 701146869H1
cacactagaaaagataagaatcaaaaccccatgacttaaaaattacgttaatgagtaggttaggataaacttataagattattatatcttgttggcccaataaatttatcttggtgagttattctatactatacttgttggaattttctattccgataattaatgtgggctaatattataagacaattgtattagctatttatcatagtgggttttattttaagttatcaaattaag

SEQ ID NO: 7231 - DNA, 238 bp, Glycine max
  Clone ID: 701146870H1
ggcatacaaaacaaactttttcccgcgagtgtttggagtcccaagtccttgaaaaaactgctcatgatgattaccggaaacttgcctctgcaatctatcttcaagtgagcactattagtcaggctcttatatttgtaactcgatctcgaggttggtcttatgttgagcgtcctggtttattgctggtgtttgcttttgttgttgctcaactgattgccactttgattgcagtatatgc

SEQ ID NO: 7232 - DNA, 236 bp, Glycine max
  unsure (1)..(236): unsure at all n locations; Clone ID: 701146871H1
ggttgtgtgtaagtgtgaagagaagagaatggtagtaggattgaatgtgcctcagccatttctgtcaccagtttgcaagacggcaccttacccacttgatctcatcgccaccgccgcgtccctccacttcggccaccttctccgccgccgnggnaacccaccatctccgccttggggttcttcttcactcctgtttcaaggtcccttttcaattttcatttgtctattccacttaa

SEQ ID NO: 7233 - DNA, 234 bp, Glycine max
  unsure (1)..(234): unsure at all n locations; Clone ID: 701146872H1
gaaggaggagagggagagggagagagaaagaaaggtgaattggattgcatctctctctgtgtgttggaagaggggaatcgtagatctgannnnnnnnnnnnnnnnnaataattttgtgatcagaattattgagctgaacaaaagacaatgggattgtgggaagcttttctcaattggcttcgcagcctttttttcaagcaggaaatggagttatctctaataggacttcagaat

SEQ ID NO: 7234 - DNA, 244 bp, Glycine max
  Clone ID: 701146874H1
ggagcgcagtagcaagcagcgaggagaggaatcagaatcgcgttagggagaagaagagaaaatcgcaggtgaaaatgagcggaacggtgaagaaagtaaccgatgtagcattcaaggtgggaaggaacatcgattgggatggaatggcgaacttctcgtctccgatgaggctcgcagggagttctccaatctccgtcgcgctttcgacgaggttaactcccaactcgaaaccaagttcagccag

SEQ ID NO: 7235 - DNA, 233 bp, Glycine max
  Clone ID: 701146876H1
ccccatattaccaactatgcagcgtgagtacatggttcatgtaggcatgctgttcatcaatttttacattataatgagaagactttctttaaagagaaaccaatacagtgagagaattctgcaactatggacaatcctataaaactttttatgctatagtaaacaatagtgtatcaaattcactaatggtgtaaaagcttggtcactgaaaccaaattaaatccagataaaaa

SEQ ID NO: 7236 - DNA, 232 bp, Glycine max
  Clone ID: 701146878H1
gggaggtgattgaacataatgaacgaaaatcgagagtaaaaggcgaaggagcggtgggagcgatgcgcatggttgttaacgacgcattcctcccattaactaaatggctatgtctttacctcttcgttttcattcctcatctttctctctcacttctcttggggttgtgagaaaagtgctagggagtcttataacagatattgttcaaccaaggagtggacattcgcactta

SEQ ID NO: 7237 - DNA, 232 bp, Glycine max
  Clone ID: 701146879H1
gactacaaatcagttttttacttgaattttcttcatccttctctgttctcctagaacttgattacttgaacattccctatgacagatgaggtggttcttctggatttctggccaagtccatttgggataagggtcaggattgcacttgctgaaaagggtatcgaatatgagtacaaagaagaggacttgaggaacaagagtcctcttctcttacaaatgaacccggttcaca

SEQ ID NO: 7238 - DNA, 234 bp, Glycine max
  Clone ID: 701146880H1
ggagtaactaaaggagagtgcaattacgtagtgtgtgggagacaaagagagatggctaagtggtgtatgttggtgttggttcttgctctagctctggctgtggccacaagtgccagagatgcacccgaagatgttggtctcaaggaccagaagaacttcatcagctatgctggagttggtggctattcaggaattggaagcaatggactaccttttggaggtgccggaataggt

SEQ ID NO: 7239 - DNA, 190 bp, Glycine max
  Clone ID: 701146881H1
gattgcacaaaaaatggagttctacacaaggccaaataggagtgacatccacctctcagcagaggaagaagccaccatagaggcaaagaccagagactactttgatggggttgcaccacaacgccacacaaagcctcaacgaagtgagtattcagctcaatatgtggatgctttctccaatgcccatcac

SEQ ID NO: 7240 - DNA, 232 bp, Glycine max
  Clone ID: 701146883H1
ggtcattggctggtcaatgtggttttctgagtatctttttctggagagaagttgggccaaggatgaaagcacattaaagtcaggcatccagcgactgagtgacttccctcttcccttttggctagctctctttgtagaaggaacgcgttttacacaggccaaactattagctgctcaggaatatgccacttccactggattgcctgttcctagaaatgttttgattccaaga

SEQ ID NO: 7241 - DNA, 232 bp, Glycine max
  Clone ID: 701146884H1
ggcacaagtgagtttgttgatcgagataactagaaacagtgtgatgaaaatgaaggtccttgttttcttcgttgctacaattttggtagcatggcaatgccatgcgtacgatatgttccctctccgaatgaacactggctatggtgcccgtactccggaggtgaaatgcgcaagttggaggcttgctgtggaagcacacaacatctttggctttgagaccattccagaagag

SEQ ID NO: 7242 - DNA, 232 bp, Glycine max
  Clone ID: 701146885H1
agggtaatagaatcaaagtatggcgggtggaggaatttgagtgaagcaaggtcagccaataatgaatctacatggtggagggacttgaagattgtagatcagcatcctcaacagggtcaattgctaaataattcgatagcgtggaaggttggacgtggggataaatttaaattttgggaggacacttggataggggaagataacagattactagagaaataccctaggctct

SEQ ID NO: 7243 - DNA, 232 bp, Glycine max
  Clone ID: 701146887H1
ttacctgtgtgagattgatacactttgagtgattttctcctatctttgttggacccagtgtttcctctaaatggtcgtttagaaacgaaatgctaacatccaaaatctcatttacggttatgagaagatttcatcagcatactctccttccccgatagacactttgtttttcatccaaaagcatatgttgctctgatcagttggaagttttgtctctttactaaagcatgtt

SEQ ID NO: 7244 - DNA, 232 bp, Glycine max
  unsure (1)..(232): unsure at all n locations; Clone ID: 701146889H1
gacagcacagcactctttgcaacacaacaanaaaagacaacacagagagaagcgtcttaataaacgctcttctctgaaaaacctgatttcttctcttcttctcttctctttcgtttcgatcttcgatctctgaaaatgagagagtgcatttcaatccacatcggcacaggccggtattcaggtcggaaacgcctgctgggagctctactgcctcgaacacggcattcagcct

SEQ ID NO: 7245 - DNA, 233 bp, Glycine max
  Clone ID: 701146890H1
ggatcgggtgataggtattccaaagtaatctactttgttggattagaatgaataaaagggtgtagatctgaagtaactcttttatagttactcttgaagtaagtgaatcctctctctatatatacgcacttaaaatttatacagccgtggtattttccatggtaaataaggatgaaaacatagtattgttttaacttttaaccgcttagtttcctaaagtactcatggtttaa

SEQ ID NO: 7246 - DNA, 229 bp, Glycine max
  Clone ID: 701146891H1
atatccaaaggaacaaaaatattattaagatgatcaacattattggagcacttgttctactctttgcatttctcttcctcagttgtgtgtatgcacaagacacaacaacccttgtgcctgcaatcataacttttggtgattctgctgtggatgtagggaacaatgactatcttcccacccttttcaaggctgattaccctccttatgggagggactttgttaaccacca

SEQ ID NO: 7247 - DNA, 232 bp, Glycine max
  Clone ID: 701146892H1
ggaggtttgtgaagtgttaagtaattaatggcagcttcaagtagcatcatctccatctcctctgcttcactcttcactccaaaaatccaatgcctccccaaacacaacaaggaccatgatcatgttccaattccatcatcatcatccttcacaacacatgcttctctcaagatatcaagaccaacaacaacgtttggaatcaccacaacaaccacaaggcttaattttcctc

SEQ ID NO: 7248 - DNA, 241 bp, Glycine max
  unsure (1)..(241): unsure at all n locations; Clone ID: 701146893H1
ggaggggatgagattttctcttttaggttgctttcaataggaatgagatttaactttagccagctgttaagagctttgatgtaatgtttctgttgagttacaagcttctcaaanngtaaatgccattcctggatgactttctcaagttgcacagtgcgatcgtaatgatgcttggttgtttccttaggagcttgagaaatatcaagagatttgaggtctgttactattttcagctggctgt

SEQ ID NO: 7249 - DNA, 234 bp, Glycine max
  unsure (1)..(234): unsure at all n locations; Clone ID: 701146894H1
ggtcacataaacaaaaaaaataaactggggagaagcatgttgttgatgttgggactatgcttcctattgttctctgcatttccacttgcgttctctgagagatgccacccacaaganaagaaagcgttgctccaactccggaaggacctcggcaacccttatcacatcatatcctggaacgcaaaggaggattgctgcgagtggttctgctgcgttaagtgtgacgagagaaca

SEQ ID NO: 7250 - DNA, 240 bp, Glycine max
  Clone ID: 701146895H1
ggtagcgacgaacctcaagggatgcagtaaagtcggagaagccagtaaggtgagaggatgaactaacatcccacttggcattctccatttatttgaagcagaagcagaagcaggggatgaggaagtgaagtctacgctccttttcaatggcaaactttaagctgaatatcattctcattcacattctcttcctctctttctcctccttcgaagcattagattcccagcttaagcaacaaa

SEQ ID NO: 7251 - DNA, 233 bp, Glycine max
  Clone ID: 701146896H1
tgctgagcaatataaacaacagggtgtcagctttttggtgggagatgttgagtctagtcaaggtgctttccagtattttggactgaaagaagagcaagtacctctaattatcattcaacataatgatgggaaaaagttttttaaacccaatttggaagctgatcacattccaacctggttgaaggcatacaaggatggtcatgttgcaccatttgttaagtctgaacccattc

SEQ ID NO: 7252 - DNA, 281 bp, Glycine max
  unsure (1)..(281): unsure at all n locations; Clone ID: 701146901H1
ggcagcgcttgatttgaggccaggcaagccccactncaaccaccaacacctctcctcgttcacgctaccccttttctggtcttcttctaacctttcaagttttaaaaatattaagatgggcnagagganattctaattaacntcagantcggtgaagaggnanacccggacaagntcgnnaccaattctccgaggcngtcttngangntgcttngagnaggacccagacngcaagttgctgcgaaantgnaccaaaaccaattggtaaggtcttggagaat

SEQ ID NO: 7253 - DNA, 272 bp, Glycine max
  unsure (1)..(272): unsure at all n locations; Clone ID: 701146903H1
agatacaacagttacaggaaagaaaactttaaactaaaaattacagtcacaatgatatccaaccttttcaagcttatatgtaattctaacttctggatttggggaaatcatctttttcttgggcttcaaacgatagaacctaaggnccntcnngttnagntttccagacatttaaaccttttgttcagcnggntcttctttccataattaatatcatcngacttgtctagagagaacggtncgacataatggtcagcttcagctcaanggat

SEQ ID NO: 7254 - DNA, 271 bp, Glycine max
  unsure (1)..(271): unsure at all n locations; Clone ID: 701146904H1
ggtgtgagtggatagcgatagcaatagcatcgacatctatncctcccggtacctgnatagnatcagaaggaacgtganatgatgattatgtagagagagagactcagtanagaaagaaagatatgaganaatncctcttatcttnttncaagcagtgaggaaaaactgngaaagcatgggcgtggactatacaagatctccaggagatagaagtgccaangtgaggntctcnncaagcaatcgaggctaagccatgangggcacctgatag

SEQ ID NO: 7255 - DNA, 262 bp, Glycine max
  unsure (1)..(262): unsure at all n locations; Clone ID: 701146905H1
ggagtgagggaataatgttgcggattgctcccaaattcttcaccacggttcctcttcggaccatttcacccttcgcatgtcgcttctcagtccgttccatcgctgactcttctcctttcaacaaaatccgcattcaaagggatgatactgttagtcataatcacnacccattcaaagggntgctttgtttggcgcnttttggcgtnaatttncgtttctttgttgcaaatagaattttctaattttntgtagnaagggttct

SEQ ID NO: 7256 - DNA, 276 bp, Glycine max
  unsure (1)..(276): unsure at all n locations; Clone ID: 701146906H1
ggtgttgttgaagcgcaacgccatgggatccagatcaggggcacttcaaaagcccggaagcccaagttcaaacccaggaatctcaaagcagtccgagctcccaaaaccgaagcggatgataagcgaaacgaagatagcgaagtgcctcgagctctctcgcgtcgacgacatcgaatcctgcaaaacgcgagcctaaagtcgaaagaaaatctagcgtggaagttgcatttagtcttggaagttctcatcacntcccctcaggacatatggcacaag

SEQ ID NO: 7257 - DNA, 270 bp, Glycine max
  Clone ID: 701146907H1
ttcctcaccacaattttgtggcagagtttgatcttttggttgccagcacaagtttctagaggggagatttctattgtccacatacaaaggggggatgggagagctctttgagctaattaatgtttcatatatcttggttgctgtaggggaattcctcatcctcctattctgtctttctatcatctaatgaacttttttgttggatatgtatctatggcctttgcaatgggcatatttaggatctacataattatggtaatagacaattag

SEQ ID NO: 7258 - DNA, 270 bp, Glycine max
  unsure (1)..(270): unsure at all n locations; Clone ID: 701146908H1
ggcacaagtgagtttgttgatcgagataactagaaacagtgtgatgaaaatgaaggtccttgttttcttcgttgctacaattttggtagcatggcaatgccatgcgtacgatatgttccctctccgaatgaacactgggctatggtgcccgtactccggaggtgaaatgcgcagttggaaggcttgctgtggaagcacacaacatcttggctttgagaccatcctgaagagtgcgttgaagcaacnaaggatacatccaggcgaacaata

SEQ ID NO: 7259 - DNA, 88 bp, Glycine max
  unsure (1)..(88): unsure at all n locations; Clone ID: 701146909H1
gnnngcatcatatntnaagaatctctagccttcantaanagtngagtgngactgttganggctgtaagcttatgggtgatacggagta

SEQ ID NO: 7260 - DNA, 270 bp, Glycine max
  unsure (1)..(270): unsure at all n locations; Clone ID: 701146910H1
tagggtgtttctctacctgcaaacagcaaacctgctacgaaataggattatggggggtgttcaaataatgactgcttcaagggagacccaattntaattttacaaagnttgggcagcatcatgcattnantntccccttcattttagggtgngatntgcctnancngttggaggatgcctnccttgtagatgttctnncccccnnctntctaatgaatttntttttagaaatcaatatnanaaataatgctacgaagcctaatcataatc

SEQ ID NO: 7261 - DNA, 142 bp, Glycine max
  unsure (1)..(142): unsure at all n locations; Clone ID: 701146914H1
atccnaaacgttagctcacaaattctcaaaataaagnatagatagacttgcgtccaaatacatttccctgcttagttaagctagcctaatttccagcagagttgntnagctaattcatctagttttcagaattatcagaccc

SEQ ID NO: 7262 - DNA, 276 bp, Glycine max
  unsure (1)..(276): unsure at all n locations; Clone ID: 701146915H1
gttgtggagaaatgtttgacctttggtggtccttctgagcgccaattactagtgtgtgagatgctcggcaccacagatgaaaatgagcctcttcaggcgatgatgaaagatcaatttgcaaattacgttgtacaaaaggtgctggaaacttgtgatgaacnaaacgcgagctgattctttaccgaattaaggttcatttgaatgcattgaaaaagtacacctatggaaagcacattgtcgcccgtgtggagaaattgttgctgtgganaaaggaga

SEQ ID NO: 7263 - DNA, 266 bp, Glycine max
  unsure (1)..(266): unsure at all n locations; Clone ID: 701146916H1
aaaatataattcataatgggcaaaaatagattgctcagtattgtttttgtnttttcctgcttcatcctgagttctacttgtttgtngatcatggtgntttaaacagataaggatggttggggaaagggattccaatactggtcnagggnataaagggnggnttcnttggtttcctccggtaaannccaagaacnacccctcnaatccncccctaagacnaatggcatttttttaatccgtgggattgcnggngcaaccacaacatc

SEQ ID NO: 7264 - DNA, 294 bp, Glycine max
  unsure (1)..(294): unsure at all n locations; Clone ID: 701146917H1
gcctagggtgagtgtaagaggactttgtgcatgttctntttatnggtatttgactattagttggacatttttnncatgatattnagctttttcaaacaggagaaaagcaagttgcaatatttcagtaaatggttcaggagatggtcctcagaatngaaaattnaangtacattcaggagattagtctgttgattgcccgggngtggggaataaaaacataatnaggtnattaantntangaaaatagatnttggctttaaattaaggtttacgtatncattgttttcctaaaga

SEQ ID NO: 7265 - DNA, 263 bp, Glycine max
  unsure (1)..(263): unsure at all n locations; Clone ID: 701146918H1
gatcgaagcaaaaaatganaacccaaagtgcttctctcctactgtctttttctctctcttgtatcctttnggntagnngcatgctggnagngcaactccaagaaccgcagtgccaagccaccatgttcaanantcaanaagaagctttntcctnnnattttccncntggaagtagtntcngcttacaaggcagaaggagnagcaagggagatgggagaggtccaggntatggacactacatagncgcatatgnaanattgggg

SEQ ID NO: 7266 - DNA, 251 bp, Glycine max
  unsure (1)..(251): unsure at all n locations; Clone ID: 701146919H1
gatataccatgcggcagaaagaagcttatttgcangtgattgcaaaggaaaaacgtgaaactgaggcaatgaggttgtccgaagacgagcagaagcagaggactgcgatggaattgttgaacagtacatgcaattccaacnagagggcggaaaagatgggcaaaannanaaaananaanaaaaaaaaaanggggcccccggctttgaancccntncccccgggntttntttccgggccggtccctcngggg

SEQ ID NO: 7267 - DNA, 268 bp, Glycine max
  unsure (1)..(268): unsure at all n locations; Clone ID: 701146920H1
ggcacaagtgagtttgttgatcgagataactagaaacagtgtgatgaaaatgaaggtccttgttttcttcgttgctacaattttggtagcatggcaatgccatgcgtacgatatgttccctctccgaatgaacactggctatggtgcccgtactccggaggtgaaatgcgcaagttggaggctgctgtggaagcacacaacatctttggcttganacccatcctgaagatgcgttgaagccacaaagggatacatcctggcgaacaat

SEQ ID NO: 7268 - DNA, 270 bp, Glycine max
  unsure (1)..(270): unsure at all n locations; Clone ID: 701146921H1
ggcacaagtgagtttgttgatcgagataactagaaacagtgtgatgaaaatgaaggtccttgttttcttcgttgctacaattttggtagcatggcaatgccatgcgtaacgatatgttncctctccgaatgaacactggctatggtgcccgtactccggaagtgaaatgcgcaagtggaggntgctgtgggaagcacacaacatctttgggttgaggacaattctgaagaatgcgttgaagcaacaaaggatacatncatggcgaacaat

SEQ ID NO: 7269 - DNA, 270 bp, Glycine max
  unsure (1)..(270): unsure at all n locations; Clone ID: 701146922H1
gggacacagtttacataatgatctacgtgtgctgaagcttgatcatgttagagtgattgacacttcttatatcttccnatccttggatggatctattcacaagagaccttctttgaatagctatgtcaggctgtgttgcaccatgaagttaggggaaagggtgctccacataattgtctagatgatgccaaagcagctatgggaccttgtcttgcgaagatcaaacatggagttgataaggaatttccaattgcattagttcaagagcat

SEQ ID NO: 7270 - DNA, 269 bp, Glycine max
  unsure (1)..(269): unsure at all n locations; Clone ID: 701146923H1
gatccaactctctaaacaacacattaacctttctcattccccatctcctcaccttattcagccactgctaatttctagggttccgaaatggacgctggcggaaagatcaagaagggcgccggaggaagaaagggcggcgggcctaagaagaagccggttttcaggtcgtcaagggcggtctccaattccccgtcngaagaattggccgttatttgaagaaaggaaggtacgcccagcgtgtcggtaccggtgctcccgtttattggccg

SEQ ID NO: 7271 - DNA, 263 bp, Glycine max
  unsure (1)..(263): unsure at all n locations; Clone ID: 701146924H1
gaggttcaacatcttcttcatctatgggcgacgccggattctgacgctaccactcagcctcaagattccgacactgctcccaattccagtcctcccaacgccctcgtccccgccgctcccgccgtttgcctcttcgcttcgncaccgactcggcggcggcgctctcatgggctcgtcttggatacgtgctggattgttaagaagaaggtttaaaggatctttgtagaagcaggtctatgcaagacattgcagtttgtctggag

SEQ ID NO: 7272 - DNA, 273 bp, Glycine max
  Clone ID: 701146927H1
agagaaggtggataccatgattgtccaggctattggtttactagatgatcttgataaagagttgaatacctatgccatgagggttcgagaatggtatggttggcattttcccgagcttactaaaataatacaggacaacatcctatatgccagggcagtcaagttgatgggtgatcgtgttaatgcagctaacctggatttctctgagatttgccagaggaagttgaggcagagctgaaggaggctctgtaatatctatgggaactgaaattg

SEQ ID NO: 7273 - DNA, 164 bp, Glycine max
  unsure (1)..(164): unsure at all n locations; Clone ID: 701146928H1
aaagctgccaccatacctcgcagttcagaaatcaatggaagtgttgatacagcagcttcagagagggaacgtcttctgctgctcaaaattttagagcttcagactcggataatcatttgactgatgagctgactgctgagaagttaaaatacatgcagtngcac

SEQ ID NO: 7274 - DNA, 271 bp, Glycine max
  unsure (1)..(271): unsure at all n locations; Clone ID: 701146929H1
tatacacgtataaatcataattttcaaactatacatacagtccaacatcgtttttttctttttttgtcaaaagttgtagtttaacctttgagaagggtattagtgtagtactacgagctgaacattaacgcagggcacagtcaaccatgaacttgtnctgattgaagctgaaaatcacgttctgccccaaataaatgcatgagcggttcaatagnatttatgatgttgactactttctaatcaaattacnggtatggttggnggatttttt

SEQ ID NO: 7275 - DNA, 278 bp, Glycine max
  unsure (1)..(278): unsure at all n locations; Clone ID: 701146930H1
ggccgctctctgagaaaaacagattagtgtgggagagagaagagcggaagagaaaatgangaccaggtttcaagaagaacaggaagaagagangtcacgtcagcnccggacacggccgtatcggaaagcaccgcaagcatcccggaggtcgcggtaacgccggtggcatgcatcaccaccgtatcctcttcgacaagtaccatcctggtttcttcgggaaggtaggcatgcgctacttccacaaacttcgcaacaaatnctacaatncgatcatcaac

SEQ ID NO: 7276 - DNA, 273 bp, Glycine max
  unsure (1)..(273): unsure at all n locations; Clone ID: 701146931H1
gaccacacatttttcattaccgccgtgataacacactaacaccaccacctcatcaactttacttgacaacaatattgtaaaactcaaaatctagtttcatactttttttcttcttcttgaaatggctctccaggctgcttctcttgttcctgcttctttctcggttcttaaagagggaaagagtggtgtgtctctcaaggatccaccttgttcggtctttcatttcagaactatcaaagctaattcagctctnctgcatgaggtgcagaggga

SEQ ID NO: 7277 - DNA, 262 bp, Glycine max
  unsure (1)..(262): unsure at all n locations; Clone ID: 701146932H1
ggncatcagatgnngnagacgatggcgaagcgaanacgctnncgttnccgccaatcgcggcgttgtncatngtggtgctaatcgcggngnntgtagnngtggaagctcnggaaaactcggacgtggagangctggtgaagnacctgcacgggaaggagtacttgcgacccaaggatgggatgttaagggctnggcaattactggtggtaacntcaccntnactgattantccaaaacctaccagttcgagaanctctttnca

SEQ ID NO: 7278 - DNA, 279 bp, Glycine max
  unsure (1)..(279): unsure at all n locations; Clone ID: 701146933H1
attcccaattgtcgtcagtagatcaaatgcgaggtatgaacatgccaaactttgctgcnatggagcagactcgtatgcttgcaaacncgttgggccaaaatggtgacccnaaatttcagaactccaaattccntncnatttggantcaaaagtgagncngngggaantgntaatggntgccatccangtnaaggggatggcntaaccggnncntggagattggncaccagattccatccagcatantatncanggncagcntggnngggagatttttaa

SEQ ID NO: 7279 - DNA, 273 bp, Glycine max
  unsure (1)..(273): unsure at all n locations; Clone ID: 701146934H1
ggattctgtggttgctggattccagtggggcatcaaaagaaggtgctttggccgaagaaaacatgagagccatttgctttgaagtatgtgatgttgttctgcacgctgatgtatcccacagagggagtgggtcaaatcatccctactggcaaggagagtcttctatgcttcccagattactgcaaaacccaggcttcttgagcttgtcctacntggttgaaatccgggctnctgagcaagntcttggtggatctacatgttcttaaccagaaa

SEQ ID NO: 7280 - DNA, 246 bp, Glycine max
  unsure (1)..(246): unsure at all n locations; Clone ID: 701146935H1
gaccacacatgggccaancatgtcattaggacgccaccacagtttgacatattccttcctccgtttccaaagctgagatgatcctgctatgccaaaaacaatatgtttaagtgacaaggcttcctcttcaacaataatggtaccantatgaagtggtcctttcatgggtctncaatttgagagctggtgaggtttacttcgccaagcgatgagagatgacttttccatttgaaaagtggggtactt

SEQ ID NO: 7281 - DNA, 275 bp, Glycine max
  unsure (1)..(275): unsure at all n locations; Clone ID: 701146936H1
ggaataaggattttctggttttgttgttggtgggtttcagcgttccgcttcaacttcaaatcctcagtgaaaccaattcagttcagtccaaatcccaaatccgaagtgagatttgcgatggagaggcttcagcgaatgttcgcaggtgcaggtggagctctaagggcacctccccaagattccccaattntcgattcctcggagcaggtctaanatctctnantcgntctcctcaagatgctgaagcacggaagggctggggttcccatggaatg

SEQ ID NO: 7282 - DNA, 282 bp, Glycine max
  unsure (1)..(282): unsure at all n locations; Clone ID: 701146937H1
gataataaaaatacacagtgagctctcgcttctagccctagggcgctgctcccgattttctctctttcggattgagtgaattgtgaaatgggttggaaagctgctgagaaactcattaggcactggaaagttgtcagacgggataatgttatgataataagggggcaagattagggcgagactgggactatnaagcgtgtcattccgctctcagatcgtgtcatgttgagggtaaaatctngtggaaaagcacntcaaaccagngcaaggtcttgaaggggg

SEQ ID NO: 7283 - DNA, 186 bp, Glycine max
  unsure (1)..(186): unsure at all n locations; Clone ID: 701146939H1
gaagacctgnatactaaggctnttggcntcaatttggcccgnaatgatttctcntnnaaggtggataattctgggattcnntnagataagttcgantctgaaattctgaatatcaaantgtaagcccagtntggcagattcnngtagnactatggcgatcaangnactnagncntgaacctgnggc

SEQ ID NO: 7284 - DNA, 246 bp, Glycine max
  unsure (1)..(246): unsure at all n locations; Clone ID: 701146940H1
gcatcttggtcatttcccactttgacaaacctgcttcntgacaaaatgcaacaaactgcaaaagccactggaatagagggcaggatcataaatctgtcatcaattgcccataactanactttagaaaggggttngntntataagtcaatgaacgaaaangtatngnaancagacggcgtatgggcagtccaagttagcaaanatatacnttcaaatgagctttctcgtcgcctgcaggagagggtg

SEQ ID NO: 7285 - DNA, 267 bp, Glycine max
  unsure (1)..(267): unsure at all n locations; Clone ID: 701146941H1
taaaattgtctatgctaacaaagataatgtatgtaatatccacttcccttcgtattatgtaacatattttatcggtgatttttaactttctgatatagtagtaggttagtagtttgaggatttagaggttcttactntttgtagccacccagttgtgtagatatatatgtgacaattgcaactgggtcatcagggaagtcatcacggctttctttcaacttgattcaatgtattgctgacctgggatctgggaagtgggtttcagag

SEQ ID NO: 7286 - DNA, 257 bp, Glycine max
  Clone ID: 701146942H1
atcagattccaaaacagttaaccaacaagcttatttctatgctaaatccctcaaactcaccaacaaagatgtctttgtcttggacgttgacgacactactctctctaatctccagtatttgctaaccatgggattggtgtggaaccacacaatacgacggcgtttaaagaatgggttcttgatggcgaggcattcgcactgccagagactctaaaatgtacaacaaactgttggctctcggcatcaagattgtattc

SEQ ID NO: 7287 - DNA, 123 bp, Glycine max
  unsure (1)..(123): unsure at all n locations; Clone ID: 701146944H1
agncgccaccaaggctanntaacccgncggcaaggggaaggcagcgaaagacctaacaagccaagaggctccagtgttncttcgtttcatggaggantcaggaggtatcacaagactcctgaa

SEQ ID NO: 7288 - DNA, 264 bp, Glycine max
  unsure (1)..(264): unsure at all n locations; Clone ID: 701146945H1
ggcacttggtgagcgaganacagtttnagcgtcatgtggagacagagagctttattggtgttcctgttatnactagtccaccaaatttgtgctaccagtgagcaagagcatgttgccccccatcttcctgtggcaaaatcanccacataattcatccanntcgattaaaaagcgagccaaaaggttgcggcaacaggtatgagctagcttgtgaaaacnatgtaggtgttatattgnacctggaaatatcctgtggangtanca

SEQ ID NO: 7289 - DNA, 258 bp, Glycine max
  unsure (1)..(258): unsure at all n locations; Clone ID: 701146948H1
gggtgttgataagatnagatacacgaatgtgtgncactgccactatggctcaatgattatatatgaacacaggaagaagcagtgaaaaaactttcccttgggtgatgaacaccctttaaagggactcttaacattgaaggtttggttttgttgctccattggctgttttagtacaatnctttaagagaatgaattgaaaagtgacattcaccacaagttgggtgcccnnaaaatcttccangccagaancagagatta

SEQ ID NO: 7290 - DNA, 288 bp, Glycine max
  unsure (1)..(288): unsure at all n locations; Clone ID: 701146949H1
ggaaaaaaaaagagtagagtggataatggcttcgttatcgctttgcatagccatgagagcacccactccctcagcttctctcattctcactaccccaaaaccatcttcactcttctttgaaccttacccgnaattgctccaagggtcggtntccggtcctgcaatgcttcntaacnccactnttccttcccatcnnntctncccntacttcggtttnaggttgtcaactnggatgggattgancatctaangtngggaccagaggaggaaaaggttctggctaanttg

SEQ ID NO: 7291 - DNA, 263 bp, Glycine max
  unsure (1)..(263): unsure at all n locations; Clone ID: 701146950H1
gaatttgtgcaagctttgaaccaaagaaaaatgatcttagctccttggtgtgacgaggaggaagttgaggctgatgtcaaagcgangacaaagggtgagatgggagcagctaagactcttgcngtcccttcgattcagccagaatccccagaagggcaccagtgccttgcaatcaggaaanctgcaacaaagtggacatactggggagaagtactagctactggctgttgattgtggtatntcnggnattaattgnatttatg

SEQ ID NO: 7292 - DNA, 85 bp, Glycine max
  unsure (1)..(85): unsure at all n locations; Clone ID: 701146951H1
gacactcactctntnantcttcttcgtntcagacctcttcgtnccttncgattcagtccatttnnnccaanatggccaaagaccc

SEQ ID NO: 7293 - DNA, 264 bp, Glycine max
  unsure (1)..(264): unsure at all n locations; Clone ID: 701146952H1
gngtgataaacatctttngtnttataccttcccttttgcaccanaatggacaaaatgacgtcaatgattagcaaggagtaacatattgnaattccnaacagctaaatcactctccattanatactgatatgataatctggtaacaccancggctagntaaccatactaatncanccanagtttcngntatgaccnnntttagggacaatnntcntatcaaggtctttncnttttaataacaaaactcaagggtnattgggtnat

SEQ ID NO: 7294 - DNA, 276 bp, Glycine max
  unsure (1)..(276): unsure at all n locations; Clone ID: 701146953H1
gtggaattgttataaatgcataaggtagtggcctgttagtgctgttatttctatcaggatcgctatcaatacccaccgctccaaaancaaccttgttctcaaggttggacaataaaaacaagcaaaaacaaggatgagtttaggaaacaaaaggtactaagtgcaagtgggcttgtttgtnggctagtatggntcctaagantgataaagtcacggctccagggtaccatcagcttgcnatgctccatgaactccttggtcctggaacgcgcaatg

SEQ ID NO: 7295 - DNA, 267 bp, Glycine max
  unsure (1)..(267): unsure at all n locations; Clone ID: 701146955H1
gggttttggttgggattcaaaccaaccatccgcactgtgcatccctttcttccttcttcgtcttattattctccaaaacttccttctnactcttcttctttctgtttcgcancctccanacgacttgtttctcgtcgttcagccatgtcgtacgactanntcttcangtanatcatcatcggtgncacaggtgtagggaaatcgtgcctgctcctgcagttcagcgataagaggttccaaccggttcatgatctcancattggtgtc

SEQ ID NO: 7296 - DNA, 248 bp, Glycine max
  unsure (1)..(248): unsure at all n locations; Clone ID: 701146956H1
gcatcttggtcatttccacttgacaaacctgcttcatgacaaaatgcaacaaactgcaaaagccactggaatagaggggcaggatcataaatctgtcatcaattgcccataactacacttatagaaggggttagattaattaagatcaatgaacggaaaggtatggtaacaagaangcgtatggggcagtcccagttagcaaacatattacatacaaatgagcttctcgtcgcctgcaggaagagggt

SEQ ID NO: 7297 - DNA, 82 bp, Glycine max
  unsure (1)..(82): unsure at all n locations; Clone ID: 701146957H1
cgggtgataggtattccaangtaatctactttggtggattagaatgantnaaagggtgtagatctgaagtaactcntttata

SEQ ID NO: 7298 - DNA, 253 bp, Glycine max
  unsure (1)..(253): unsure at all n locations; Clone ID: 701146958H1
gacgatatgaaggatcttgacggcattgtacgaataagaaatcatttagggagatgcaaaaatctaaaactggtgaggagcttttgggacctaattcancgaccaactgcaaagggagactgctgtagctgctaagttcaaaacncangtggttctcaggtgaggcaatactgtgacttactgacaaaagaggttgtcgacgtcaatctggttcctttatagcatgtgaaaaggtcatttannnnttcccctg

SEQ ID NO: 7299 - DNA, 263 bp, Glycine max
  unsure (1)..(263): unsure at all n locations; Clone ID: 701146959H1
gacttcaaagtggagnaaaacacacacggttggttcattctctctcttttctttttcctcaaaaagttgaaaaagaatanagggggaacaatcgagtgaagttgttgctcttcaatagtaaacttacctatggnaganggaagggtgtgngtgagtacacaaaagatggaactgtggatcttaaagggaaacccatctcaaatccaaaagtggtngttggaaagctgctccttgttgttgtgnacgagtatngaaagaatggc

SEQ ID NO: 7300 - DNA, 269 bp, Glycine max
  unsure (1)..(269): unsure at all n locations; Clone ID: 701146960H1
gggttttcgttgtttacagtgttntgttgctgctggtccagttttgggcttggtgaggctgagacattctcggtggatggaaagggttttggttttggacgaatccaacttcgatttccgccatagcctccttcgatcacatcttggttgacttttacgctccctggtgtggccactgcaagcgtctctctcccgagttagatgcagccgcccctgtattgcaaccttgaaggaacccataatcatagcaaaagtagatgcagacangc

SEQ ID NO: 7301 - DNA, 264 bp, Glycine max
  unsure (1)..(264): unsure at all n locations; Clone ID: 701146961H1
gatggcctgtgtctgtgaaacaacaaggagagcgggaacgcgttgcgtacacctcanatcctcctcctctacanaagcggcctcgcatcccattctttgcagactcaacaagcattccatnacacctcatcgtntctctctctagatctctgtttcttctttttctccaacttcggttcaccancacactacatatttgtcggaanggnttccaccaattgagacccaaacaagnttccagctatcaacagncccaaancctng

SEQ ID NO: 7302 - DNA, 271 bp, Glycine max
  unsure (1)..(271): unsure at all n locations; Clone ID: 701146962H1
ggataataacagtaacagggatgagtgatatcatttcatttcagagggattaattattgttttatttttaagtgtggagtgctgtgcaggtcaaggcccttttacttgttcgtccggttgttcccatcttctctctcgtaccaatcaaatcacacttttgtgttgtgttgggaaaccctaaaccccgttttcggtgagatcgagatcgatcgaacatggatgaggagtacgatgtgatcgtgntgggcacgggtctcaaggagtgcattct

SEQ ID NO: 7303 - DNA, 279 bp, Glycine max
  unsure (1)..(279): unsure at all n locations; Clone ID: 701146963H1
gacatcaaaccaacattcagttcataatttcttccaacaaattatatttttcttacaaaaaaaatggcaggtgaggtggtgaaggaggaagagtctctcaacctgaaagtcactaacaagagncatgttcatcagaggagaaaattggaagaaaagagtaccaattggtcactttgatcttccctacttggccttttactacaaccagaagctcttgttttacaagggtgaagatttcgagggcatggtccaaaaactcanagttggncttggagtggt

SEQ ID NO: 7304 - DNA, 273 bp, Glycine max
  unsure (1)..(273): unsure at all n locations; Clone ID: 701146964H1
gggaagtgttgtggtatggttnagtgtcaaatggccgncgaatagaagcactttnnctctgatganatanttgagagtgcgcgtngacgntcttccccccaacantcccttaaccctcactcccaactntttgattcgccccttctgngaaaggttaagggttgtntctccncaagncngaagtcacaagannggtncatncctgcggcnaaaagttccaaaangttannttcnaagttaancctaatgtcattccanatganctnggattng

SEQ ID NO: 7305 - DNA, 270 bp, Glycine max
  unsure (1)..(270): unsure at all n locations; Clone ID: 701146965H1
ggcgccaaaccatttgatttcaaagcgggagagttgagttgattctggtttcttctcccacaatcacaacagttttattatcgnataattattctgataaaatcttgaacatcttttcccnccatccaagaattgggagactttccaaaagttaaggganggcaaatcccctgcttctctacacatggagccggtgtcgcgtgctattcctttccatnccaagattttggctaccgttcnagggacagggaggnnnaaggcagcanttga

SEQ ID NO: 7306 - DNA, 266 bp, Glycine max
  unsure (1)..(266): unsure at all n locations; Clone ID: 701146966H1
gaactaaaccctactcattctccatacctcaacgaagaggttaaagagacggcaacactttgctgtccgccttgaccgagcagagttcgtcttgggcctcgattttgccctaaagnactcttcagtcacaaacagacacnnnnnnnnnnnnnnnnnnnaatggcaccgaagcagaccaaggctgagaagaagatcgcttacgatgcgaactgtgcgacctaatggaggatacggccagatctcgttgtgaactcngataacgtggg

SEQ ID NO: 7307 - DNA, 271 bp, Glycine max
  unsure (1)..(271): unsure at all n locations; Clone ID: 701146967H1
gaccaaaaagaaaggngaaaaaaaaactaagacntaagantgcattcaacgcgttgagttgttgttctggaagagcttatgctgtttgttcgcaattcgcatggaaccatcagtttcagctccaccaaaaccttgggngaaagcagcatcatcatctgggccagcaccttttnaaacccccntngccaggtagcccnagtgntgaattngaggnttcngggctgnaaancntggcgaattagttcnagnttcggnnagantggcactntca

SEQ ID NO: 7308 - DNA, 237 bp, Glycine max
  unsure (1)..(237): unsure at all n locations; Clone ID: 701146968H1
gaggttgggaccttcactggtgggacttcactagtcagccaatnnatgagatttnctcatattatggggcaaagattgcaatctattttgcttttcttggaatgttcacacggtggatgcncttcccggtgcattggggcttactttgcaatngaatagattttgggtcattgaagttagtngtgcttcctaattttcctncatcatgatgatacttggggnataatgtttcccagt

SEQ ID NO: 7309 - DNA, 258 bp, Glycine max
  unsure (1)..(258): unsure at all n locations; Clone ID: 701146969H1
gggttttccttattccaatagcgaggcgagacatcgattccaaaggtgcgtttctgctgtgctagggtttctgcatcttccacctccgtcgcgatgnaaccaggctcatctgattccgaattcccttcgctccttctcctccttaacatcatctcttcgttcctctacnaattaagatnntaatanggangaatccatctcgnctcggaaaaacttcgggtcttgggtccggttgaatccctcgcacttattgcatcg

SEQ ID NO: 7310 - DNA, 255 bp, Glycine max
  unsure (1)..(255): unsure at all n locations; Clone ID: 701146970H1
ggagagaaagagtgaggagagaattacagancattttccaacacgattacacgaccgaatcaaaccctctctntctctccgaagctgcgtttaatancttactcgcttagattgttcttctcntcatatatgttctcttttcgatttgaancgaaagtacagagtgtgaggatnggttaacccaatgccacgggtagtcactaaaataatggagtctcacgatgagactggatgccaggctcctgaacgccccat

SEQ ID NO: 7311 - DNA, 250 bp, Glycine max
  unsure (1)..(250): unsure at all n locations; Clone ID: 701146971H1
gagatagatctgcttcttgttgttggaaagaaaccctagcaagcggaacaatggcagacgttgaggtcgatgtgnnnnnnnnnnnnnnnnnnnggcagccgaagaagagaacgttcaagaagttcagtttcaggggcgtggatctcgatgcgcttctggacatgtccaccgatgaactcgtgaagatgtcagtgctcgcgcacgtagaaggttccagagaggctcaccagaaagcccatggccttgatca

SEQ ID NO: 7312 - DNA, 264 bp, Glycine max
  unsure (1)..(264): unsure at all n locations; Clone ID: 701146972H1
ggagagaaattgcaagacataaccattggaagagaataatggagttactgggtttacttgtgttgttattgggtagtagcatcatggcaaatggtgcagtttctgaagtttcttggagagaaatcagcaatatcaatagtgaagggccttaccttggtatagtggtgccaaattccttgagctggtcctcttcttcgttcatctagcttgtgcctcataacaagttccttactttgattttgccggaaaacnntttcgcatngg

SEQ ID NO: 7313 - DNA, 266 bp, Glycine max
  unsure (1)..(266): unsure at all n locations; Clone ID: 701146973H1
gggttttcctnattccaatagcgaggcgagacatcgattccaaaggtgcgtttctgctgtgctagggtttctgcatcttccacctccgtcgcgatgaaaccagggttcatctgattccgatgccccttcgctcctttctcctccntaaacatncatctncttcgattcctctacaaattatgatatnatnatgagaatccanctncggctcgcataacttcgcgtctcggtcccgggttgaatcccttcgnaacttattgcatcgc

SEQ ID NO: 7314 - DNA, 262 bp, Glycine max
  unsure (1)..(262): unsure at all n locations; Clone ID: 701146974H1
gacacaccatccgttctagtctcaacttctgctcttccaactcctacaacgcttttctctgcactcatgggcgaggtcaagatcggaatcaacggatttggaagaattggncgnttggttgccagagtcgtctgcaaagagacgatgttgaatcggtgccgtaacgaccctttcatancaccgattacatgacatacatgntaaatacgacagtgttcacggacactggaagcatcacgatgncaccgttaaagagagaaga

SEQ ID NO: 7315 - DNA, 256 bp, Glycine max
  unsure (1)..(256): unsure at all n locations; Clone ID: 701146975H1
gaagctattaaggccaacttcaatgacaagtacgatgaatacagaaagaagtggggtggtggaatcatgggttcgaagtcccaagccaagaccagggccaaggagaagctccttgccaaggaagcagcccaaagaatgaactaganaantagctntacatanaagggtgtcattttctatatctatatgggagcatatacaagttaaaatgtgaggtttacttcaaaaaaaaaaaanaaannnnnangnanangna

SEQ ID NO: 7316 - DNA, 270 bp, Glycine max
  unsure (1)..(270): unsure at all n locations; Clone ID: 701146976H1
gcccttcatataactcaaggggctgcatcaactctaaattttaaaagattttgtgtcctttagtcactgttccgtccacatgcaccttcccactaaggattccacttgcaaagccattaaggccgtttcatgtgggattgggctgtatgctgatatgntatgatnatataaaccctttttggaattaatgcacacacataaactatgatttgtgggatgagtgatgacctactatttcttttggttgctagtgaagacngtgccctaacc

SEQ ID NO: 7317 - DNA, 270 bp, Glycine max
  unsure (1)..(270): unsure at all n locations; Clone ID: 701146977H1
ggcacaagtttgttgagatagctagaagcaataagatgaaaatgaaagtgcttgttttgtttgttgctacagttttggtagcatatgaatgccatggctcagactaccagaagttccctctccaaatgaaaactgggtttggtgggcaatacagcaatgaggtggcatgtgccagttggaggcttggcgtggaagcaaacaacgtagtcaagtggcaaactgttcctgccagttgcggagagtaccatagcngannangtctaggagacc

SEQ ID NO: 7318 - DNA, 267 bp, Glycine max
  unsure (1)..(267): unsure at all n locations; Clone ID: 701146978H1
gggggggggaaggaggtttcaaaggtagtcatcgttactgacatgctggnantcgggtnccaaccatgacaagggaggtgataagggttttaggttaattggataacaatcanccctttatacaaacnttnggcctagcttgaccccaaaagggtaaaantngggcaccanttcagctanttnccgaaaggggtacncttttnccancctcgggtggcnaancttgtgagcnttgaattccttnccnttnacaggggatcaggaant

SEQ ID NO: 7319 - DNA, 279 bp, Glycine max
  Clone ID: 701146979H1
ggcacaagtgagtttgttgatcgagataactagaaacagtgtgatgaaaatgaaggtccttgttttcttcgttgctacaattttggtagcatggcaatgccatgcgtacgatatgttccctctccgaatgaacactggctatggtgcccgtactccggaaaagaaatgcgcaagttggaggcttgctgtggaagcacacaacatctttggctttgagaccatcctgaagagtgcgttgaagcaacaaaggatacatccatggcgaacaatatagatcag

SEQ ID NO: 7320 - DNA, 262 bp, Glycine max
  unsure (1)..(262): unsure at all n locations; Clone ID: 701146980H1
caatgagatctatgctaaatacttcccttcacctttccctgctcgttcaacttatcaagtagctgcattgccattggatgccaagattgaaattgagtgctagcaaactatataagcaccaagagtaatagtatatccgggctccttcagcaaacttggttaataacacgggaagggacatatcttagaattttggagtttacttgtttgtcctttggntatgtggcctttgatacnttaccatctaggagtcctaatctcg

SEQ ID NO: 7321 - DNA, 206 bp, Glycine max
  unsure (1)..(206): unsure at all n locations; Clone ID: 701146981H1
gatccaaatccaccccaanacaaatcttagccgccattgatttttcctcttccatttctcttactttctcagcctttttcgattacccattgggtatttcggccctaatgggtcttgttcatccaaagtttcaacnttttctggtttttctccaaaacccagtgttgggggggtcagaaaaacccaantgctctgttctctgagnt

SEQ ID NO: 7322 - DNA, 265 bp, Glycine max
  unsure (1)..(265): unsure at all n locations; Clone ID: 701146982H1
ggagggtgtcatgttgaagtactataagagctacaaggttatcgttcatgttttaccaaaaggtgatgagcacagccttgtgaagtgggactttcttgtatgagaangtggatcacactgcccctgagccnacccagtacnaagatttggtggttaaactcaccaggaacgtggaggntcatctggttgaggcccgttaaatgatcctaantnggtcccgnaaattaagtgtgatgtntnttgntggttgnngtgggcccttggt

SEQ ID NO: 7323 - DNA, 263 bp, Glycine max
  unsure (1)..(263): unsure at all n locations; Clone ID: 701146984H1
gggaactgaactgaactgaactgaaccggatccagagagtgctcctaaacgacgccgtttcgcaagcatcagtagtgtagttgcagagaatcaaatcaatggagaagggaaagggagtgatggggatcnggaggacgaagatggggcgttgacttctccgacaattccatttcncgcgatatcccgntctnccgggttctgtcgcattctctcgatcaggacgatcaacgctcatcgccagaagaaggagctgatccaactgg

SEQ ID NO: 7324 - DNA, 264 bp, Glycine max
  unsure (1)..(264): unsure at all n locations; Clone ID: 701146985H1
aatgttaaattaaaattntctaatacatggacatcatgtaaattganattttgttttcttgtattgtgtagattgacttcaagttagtataactggctgtccagttgtaatggcattggtctctggaagaagttctgcactgaacccaaatgcaacctctaatcntaactgctggctcttccggcaggtggaaggattttccactccatggtgggatctgtgaaatcttcaacaggttcggattatggtgagccaacataagga

SEQ ID NO: 7325 - DNA, 276 bp, Glycine max
  unsure (1)..(276): unsure at all n locations; Clone ID: 701146986H1
ggagctccacgttggttgtttgatatcgattattgaacaagcggaagaaagaaacgcagtgtgggaagatgccgacacgttgtgaantatgctgcgagataatgatcgcgatcttgatccctcctctcggagtttgctttcgccacggttgttggcagcgtcgattcatcatctgctgctcctcacaatctagggtatattcctggtataatctatgctctctatgctatatctcgtcgatcgtgaccagtactttgatgaatacaggcgtcctct

SEQ ID NO: 7326 - DNA, 258 bp, Glycine max
  unsure (1)..(258): unsure at all n locations; Clone ID: 701146987H1
caaggaccaagctgaagcaaacagaggtggattgcgagttcctgaagaaatgttgtgagaaactgaccgatgagaatctaaggctgaagaaggagttgcaagagctgcgtgcacaaaagcttggatcaacaccactgtacattcaatctccaaggcnacaacttgaccattgttcatcgtgcgaganactgttgaagcccaatgaagggaacaaaggagccttaacaattgcagaacatatagagttagggggtatct

SEQ ID NO: 7327 - DNA, 267 bp, Glycine max
  unsure (1)..(267): unsure at all n locations; Clone ID: 701146988H1
ggaagccgaacgaaacataaataaaaccttgcccttttttcacgccctagctcattttcttctccgttctcttctctctgttcctcactcactcgcatttattcaccatgactaagcaacaagcnaattggtctccatacgataacaacggaggatcatgtgttgcaattgctggangcagattatgcgtcatcgccgcggatacgaggatgtccaccggttacaatatcctcactcgcgattatccaaatctcccaatggcggaga

SEQ ID NO: 7328 - DNA, 263 bp, Glycine max
  unsure (1)..(263): unsure at all n locations; Clone ID: 701146989H1
gggtggagagaggggcactgactcacacccanaatagtcgggggcagcttcaaagtacctccacattgtctcctactcttactgttctcttctcttctcatcattnttattttttccaatcaaancaaacaaaacataagcaccgctctttctctccgaaatccccanctcccttcacttctgagctctggacgagatcccagatctcaccatctttcacgcntcttccatcagatcacccttcgtttaacgnaaatcataat

SEQ ID NO: 7329 - DNA, 264 bp, Glycine max
  unsure (1)..(264): unsure at all n locations; Clone ID: 701146991H1
ggagcaaaaccctaatccctatttttcttcctcagtagtgtcatttacgcttctcttctctgcagcaactatgcctaaccctaaggtcttcttcgacatgaccatcggcggtcaatctgctggccgcatcgtgatggagcttctacgcttacgtcactccccgcancgccgagaaattccggcgtttgcaacggcgagaagggcgtagggcggaacggcaaagccctccactacaaaggntcgtcttccaacgcgtgattccga

SEQ ID NO: 7330 - DNA, 281 bp, Glycine max
  unsure (1)..(281): unsure at all n locations; Clone ID: 701146992H1
gttcactgagtcttgcaagaggctgaggataatgaagagttctgaagcaattggggctagcacctagagccatggaaaagtgcaaaagtcgctactagctagtgcaatgctgtatgcttttgtcttctaatcctgaaagatggaagaccacatttaagcatatggttacctgagtatttcttacgtataatccatatacgagaatggggtgtccaaaacttttaagggggcatatatatggatgacagcntattaggttggtgtagtagccgtctatatca

SEQ ID NO: 7331 - DNA, 279 bp, Glycine max
  unsure (1)..(279): unsure at all n locations; Clone ID: 701146993H1
ggatgcattggggcatgcttttaatttcctagatctcccaaacaaattgtagcataagtcccatggccaaagagactagtgttgtntatctatatcccagcaaatcacaagtttggggtgagaattttgatcataaaaaacttgtaataacaacactagctgctaatggaaagaaggaggagagtaatggagcacctaatgacacatatcctgcgtttcccgggtggtatgctgatgtttcctggccaggagaagcacacacatattaaatagaaaaga

SEQ ID NO: 7332 - DNA, 264 bp, Glycine max
  unsure (1)..(264): unsure at all n locations; Clone ID: 701146994H1
gctgagcaaaaccctaatccctatttttcttcctcagtagtgtcatttacgcttctctttctctgcagcaactatgcctaaccctaaggtcttcttcgacatgaccatcggcggtcaatctgctggccgcatcgtgatggagctctacgccnaagtcactccccgcaccggcgagaattccgcgcgtttgcaccggcgagaaggcgnanggcgancggcaagccctccatanaagggctctncttncancgggtgatcccgatt

SEQ ID NO: 7333 - DNA, 271 bp, Glycine max
  unsure (1)..(271): unsure at all n locations; Clone ID: 701146995H1
gactcacgcagtggctcactactcaccatggaggttgccacaacagcttctagcatcgcactcaacaagcccatgctggcattgccctcttcgtctcgaaccggcaacccctatcagagccatgaactcctccacctcctccgtcangacctctctctcctccaacttcgtcgctccttacactggaatcaacagcgcctatagcctcttctccggccacaagctccgatctcctccctcaatccggggtcgtttcgtggtccaatccaaa

SEQ ID NO: 7334 - DNA, 285 bp, Glycine max
  unsure (1)..(285): unsure at all n locations; Clone ID: 701146996H1
gactccagaaagaaaaatggaagctctgctctcccaattcaccttcctctcagaccaggccctacaagacaagaacttcgatccttcgacaatcgaagatctaatgaagctgttcgagatcgagtcctacaaggcatgggcagcagctgagcttgagcaagagaaagangtggaagaagcagaggctggcatggaagaagctgaggagtaccttgactcagtgatggagagtgccatggatgagttnagacgctttgaagaggagctagagaggtgtcaaagaat

SEQ ID NO: 7335 - DNA, 241 bp, Glycine max
  unsure (1)..(241): unsure at all n locations; Clone ID: 701147001H1
ggcatatccaaaggntcaaaaatattattaagatgatcaacattattggagcacttgttctactctttgcatttctcttcctcagttgtgtgtatgcacaagacacaacaacccttgtgcctgcatctaacttttggtgattctgntgtggatgtagggaacaatgactatcttccnacccttttcaaggntgtttancctcctttgggagggatttgttaacnanaacctactggggggt

SEQ ID NO: 7336 - DNA, 275 bp, Glycine max
  unsure (1)..(275): unsure at all n locations; Clone ID: 701147004H1
gattgaacttgtagtttccatcgacncattaattttncttgttcngtggtggcanacaccatantctnatggaaaaggnnaacatgntcaatacgcctccnatagttccaattcaagatcgaacacccgaacctgaatgcnngcaccaactccagttcaacgacaagaccccantgatcataactcctcgnatgaattgngcaagcctgttacnccagatcgtnttagagtccccaggnattcagntacccagaaagatatacaagcccagcaga

SEQ ID NO: 7337 - DNA, 257 bp, Glycine max
  unsure (1)..(257): unsure at all n locations; Clone ID: 701147006H1
gggacgcaaaaatggcacctgcaacactgtctctgtctctcctcctcctgttctcactcagcatcgcngtaaccgttagatcgagcgactacgactacgattgtgtgtacactgcatacgttagaaccggttcggtgttgaagggcggaacggactctaagatcgggctgaagctgtacgacaagtacggctactacatctacattaaaaacctcgaagcatggggnggcttgatgggcaagggctacgactacttc

SEQ ID NO: 7338 - DNA, 259 bp, Glycine max
  Clone ID: 701147007H1
gaagttactagcacaggacattcacccagtacaatgaccacacacgatgataaccaggaagaaccggataggggaaccgccaaagaagttgctagctccgttggagaaacaaagaagcgaaaactatgggacggtgcttatgacgacggcgatatgcagttcatggacactgctaattctctgaatgggaaaagactctccgaagttggagatgatgccgaatcaaaatgctccagtggtggcaacggtagtagagggt

SEQ ID NO: 7339 - DNA, 253 bp, Glycine max
  unsure (1)..(253): unsure at all n locations; Clone ID: 701147008H1
ggcacaagtgagtttgttgatcgagatnantagacanagtgtggtgaaaatgaaggtcctgttttcttcgttgctacnattttggtngnatggcantgcntgcgtacgatatgttccctctccgaatgnacactggctatggtgcccgtactccggaggtgaaatgcgcangttggaggnttgctgtggnngcacacaacatctttggntttgagaccttcctgaagagtgcgttgaagcaacnaggantaca

SEQ ID NO: 7340 - DNA, 195 bp, Glycine max
  Clone ID: 701147009H1
gaagggaggtagttggtgttgttagttaatagatgatagcaggagatttgaagcaaaaattgagcataaaatgtttataattgtttccacaacttccacttgcttgcttttgaataactcagcttcttcacccttgcttctgtcttgttgtatcgattcagttaaatatggctcgtttgctcttcccaagtttga

SEQ ID NO: 7341 - DNA, 237 bp, Glycine max
  unsure (1)..(237): unsure at all n locations; Clone ID: 701147012H1
gggccattgttgttnctattatcatccgcagctgattttattcgcaccgcaaacagtgagccatggccgtcggaaagaacaagcgcatctccaaggggaagaagggtggcaagaagaaggcagctgatccctttgccaagnaggattggtatgacattaaggctccttctgtttttcaagtgaaaaatgttggcaaaaccctcgtctctcgtactcagggtaccaagattgcttctg

SEQ ID NO: 7342 - DNA, 250 bp, Glycine max
  unsure (1)..(250): unsure at all n locations; Clone ID: 701147013H1
ggagggtgancagtgaananaatanangggnagcatngnnatgggattgagtattctgagaagcacttccatttccactcctatctcttcctccagatccaggcccattttntcaactcttgttcgttnatcnttcgnntccatttncnccacaaagtgtgttantccnaccactcttttngtttcngcnaccccnttcttcncngcctcaccnaagcgnggctttngnggtgggttgtggcnaggcngc

SEQ ID NO: 7343 - DNA, 258 bp, Glycine max
  unsure (1)..(258): unsure at all n locations; Clone ID: 701147014H1
gggttggaaagaaaggtatcttcgtttgctttatatctcctgaagcagaacattcacctttcctatttactcactgtgtgatctaatcttcttctatgggttggcttagtcggttcataactgccgtggctttcttagccatcggagtgatattctcaccggagacactggggtnaaaatcaaccacactttccacctacctcaaactcgctcacctcctctgnttctccaccgccttcggngccgctctgtgggtaa

SEQ ID NO: 7344 - DNA, 265 bp, Glycine max
  Clone ID: 701147015H1
gaccacattccaaaacacaaacacatacattgtagtatcacttttgtctcggaatttgttcttttgagttatggcaagcttaaaggttgcatgtgtggttttgatgtgcatggctgtgatgagtgcaccaatgatggtgcaagccgtgtcatgcaatgatgtttctgtgaacctagcaccgtgcctatcttacctgatgcagggtggagatgttccagaatcgtgctgtagcggagtgaggaacatctgggttctgccagcacca

SEQ ID NO: 7345 - DNA, 260 bp, Glycine max
  unsure (1)..(260): unsure at all n locations; Clone ID: 701147016H1
gaatgttaactatgttcttctttttttgttctcatctccacaccatgtcctaatctttctgcaccatcgttctccatttttggctttacaaaaccactgtgtctgattaagggttctttaatatttccaatatttcttgtagtgaaaaagttgttagctaaaagaagaccaagtttttggtgttgtagaaggnagagaagattaacatgaaaattcgtgtgacgtgtgtgagagagctccagcaacagtggtttgttgcg

SEQ ID NO: 7346 - DNA, 165 bp, Glycine max
  unsure (1)..(165): unsure at all n locations; Clone ID: 701147017H1
gncatcacnangtcacagtcatantgaacaantggaaaaagaaaagtgtgtacaantccatgttcttccgctcctcntgntttatcaagtaattnccatgatgatccaaacaattaattggacgatgaaggtggattatatagttacgtttgtttgttgcatcag

SEQ ID NO: 7347 - DNA, 261 bp, Glycine max
  unsure (1)..(261): unsure at all n locations; Clone ID: 701147018H1
gcaggnatcatatttgaagaatctctanccttcaataaaagtggagtgggantgttgatggctgtaagnttatgggtgntacggagtattggggntcnatcanctgatatagctgtttcanagctttcacatgcatctgcagaagtcagtgaaatagtgngtttnctgcttggtgnaangaccattgttgagatcttgatgntcatcaaggatttnagctggtactganatnttacaanccgtaanccangcnttntcctt

SEQ ID NO: 7348 - DNA, 266 bp, Glycine max
  unsure (1)..(266): unsure at all n locations; Clone ID: 701147019H1
cttggttggatgaaaaaaggatacaaacatagacaagcatcacgtttagccgatttattagccttcagaaaggtcaaagctaggcttgggggtcgtgttcgactaataatatctggtggggcagccttgagccnannngtggaagaattcttgcgtgtcactacttgtgcctttgtatgccaaggctatggtctgacagaaacatgtggaccaactactcttggcttcccgacgaaatgtgcatgcttggtaccgttggtgctgta

SEQ ID NO: 7349 - DNA, 228 bp, Glycine max
  unsure (1)..(228): unsure at all n locations; Clone ID: 701147020H1
ggatggaaaataggngtattgtagngagtggtgaganatannttgcnatttantatntttttgtgaacgacgccntnttcnatcgtagnttgattcacttcaatgggntcagtaatgntcagtggaantgaaaagctcactctcaganccctnanngggaacggnttaggtttcantggttcggatttgnacggtnagatcttccnaagagtgagtttngntgntacc

SEQ ID NO: 7350 - DNA, 260 bp, Glycine max
  unsure (1)..(260): unsure at all n locations; Clone ID: 701147022H1
ggatacacacatacatcaccaactgatatataatactagatttcttgcagtctattattagagagaagaattgagttggaagaacccagaaaaaganacaaaaaataaataaaacgatgtggtggccattcagcagaataggatcttctgggttttcatcatattctactgcngaggaagttactcatggaatcgatggaagtggtctcactgctattgttacaggagcatctagtggtcttggtgctgagactgctcgt

SEQ ID NO: 7351 - DNA, 255 bp, Glycine max
  unsure (1)..(255): unsure at all n locations; Clone ID: 701147023H1
gantgccgcgaaaacagaacagggactcactctggcagcggcactctcggtggctataatctttctgtggtgagttgtcaagatgtacacatcaaggaagaaaatccacaaggataaggatgctgagccaactgaatttgaggaatcagtcggacaggcattgtttgatctggaaaataccaacaatgagctgaaaagtgatctgaaagatttatacataaactcagctgtccaattgatgtttctgggaaccgc

SEQ ID NO: 7352 - DNA, 235 bp, Glycine max
  unsure (1)..(235): unsure at all n locations; Clone ID: 701147024H1
tcaccttcttcatgggggtagacttcctcactagantcttcntcccttacttcatcttcacttccactagaggnagggcnncgnngtagtctcctcttgattactatcnatgtcttgncccctcntgatcatggatttctttgtggggcattgagaggtaatgtgacctttcccaagacatttgangcntttnatgttgctagtccttcttgggatctngtcttagaggtgtntt

SEQ ID NO: 7353 - DNA, 258 bp, Glycine max
  unsure (1)..(258): unsure at all n locations; Clone ID: 701147026H1
agattgaggaggccaatgaggagcaagtacttgctgaactagctaggatcgaggnttcgaaagaacttgcagatattgaggcccagagagaaaaggaagcaaatcaattttcattcaatttggaaattgcgaggagaaagttgaaggaggccattgaagagattgatgagtcaaaggagcttgaaatgaaattggctgtgacaatatcagatgttgatttcttgcagaacgagttaaagtcattaaggatatgaataa

SEQ ID NO: 7354 - DNA, 250 bp, Glycine max
  unsure (1)..(250): unsure at all n locations; Clone ID: 701147030H1
gatggacagatcaactatgaggagttcgtncaaagtcatgatggccaagtgaggaccattcaaccataacctaaatttgaaaagcatataaagagaagagggacagtgcagataagttttgatgagaattctatttccattaggtccatcttgatttggggttattagctttgttagttgagtgtcgtttttcttgtttgctttaactggtactacttctgctcnctagttatcctacttgtttgcttgt

SEQ ID NO: 7355 - DNA, 270 bp, Glycine max
  unsure (1)..(270): unsure at all n locations; Clone ID: 701147031H1
ggggactcgnagtgtnagcnctaagtggttgaggaaatgggaacccttgggagagcgatctacagcgttggtaaactggattcgagggactggacaggccttgatcgtctcggttccctcctccagggcggttactacgtccngagcagctgtctaggcatcgaactctgatggactntttgataaggctcngttgttgatgaggntgtatttgttgcgcctatgcntcngtcattggaggcgttcaacttggaagaggntcatccattt

SEQ ID NO: 7356 - DNA, 85 bp, Glycine max
  unsure (1)..(85): unsure at all n locations; Clone ID: 701147032H1
gagacacatgtgacttactaataaataaaagataactccatgagaatagtaaannaanncgnaaaaaaancaannaaaaggggnc

SEQ ID NO: 7357 - DNA, 263 bp, Glycine max
  unsure (1)..(263): unsure at all n locations; Clone ID: 701147033H1
gggttttttctccctcatttttaattgctgtaacagtagtatttattttgagctttccatttttntctctttttcaactttcaattcaagcagctttggaaaaaccaaccagccaacgggnttntnnttncttcacntcctgnggttggtaattaggttncnantgnttntnccngcacatgtaccctgnttngaaganctttactgggaagcatnagganggntttagttnccnttggggaccnagngatcananggnaggg

SEQ ID NO: 7358 - DNA, 262 bp, Glycine max
  unsure (1)..(262): unsure at all n locations; Clone ID: 701147034H1
cgaatcgaaagggttcgtggaagagatgaggttcgtggcgatgaggctgcacacgagggaccaggccaggganggcgagaaggaggtcaagcagcccgaggagaaagccgttaccaagtgggacccatccgttcgaagggtgcccgaaatttcttgtggacagtaagctcgtttatgacacgctggagaaaatcgttcaagaggctcctcatccttcttatgctgaattcagaaacactggattggaaaggtctgcaagttt

SEQ ID NO: 7359 - DNA, 136 bp, Glycine max
  unsure (1)..(136): unsure at all n locations; Clone ID: 701147035H1
atccacatnagcatcancatcgnntaggttgttanttttncnctcaatggttcttccctnnggttttgtttccatgttgatnctttntggcatggttttggtagttggggtgaatnttgtcccaggggtatttcca

SEQ ID NO: 7360 - DNA, 259 bp, Glycine max
  unsure (1)..(259): unsure at all n locations; Clone ID: 701147036H1
gagagtagaagtcgagatggccaaccttccaaattcaaagctttatgggaaagagaagatgaaaggagagcaagaattagaagatgaagaaagcttctcgcgtgctatgctgctttgcagctccgttgtggtttccatggcgctgcaatcggcaacggagntgggcgtatttgacgtgttgcaagaagcgggggctaagctctctgcgaaagagatagcatccaagctttcctgngacaacaaccctgaagcagactca

SEQ ID NO: 7361 - DNA, 255 bp, Glycine max
  unsure (1)..(255): unsure at all n locations; Clone ID: 701147037H1
gtaaannggtngcatccatacccttgaccgtttccattattgctgaggttgatatctacnagttagatccatgggacttaccagctaaggccacnnttggggaganagantggtatttcttcagtcctagagaccgnaagtncccaaatggtgcaaggccaaacagggcagctgcttcagggtgttggnaggccactggcactgatacgtnnctagtgccatcattgcnaggnggagcacaagagngcgttggtg

SEQ ID NO: 7362 - DNA, 253 bp, Glycine max
  Clone ID: 701147040H1
ggcgaggaagccacatagagacacaatacagagtgagttgttgctccttcgccacaactctctgccaacatgggtatctccagagattctatgcacaagaggcgtgccactggtggcaagaagaaggcctggaggaaaaagagaaagtatgagcttggtcgccagcctgctaacactaagctgtcaagcaacaagacagtcaggaggatccgtgttagaggtggaaatgtgaaatggagggcttgagattgga

SEQ ID NO: 7363 - DNA, 251 bp, Glycine max
  Clone ID: 701147041H1
gcagaaggtgtatgggctgtagttgatgtttccattgagataggtcacgatgctgctaatgcacagccatccattagctgtagaaggcttccttctggctgtattgtgcaggatatgccgaatggttactccaaggttacttggcttgagcattgggagtacgatgagaatgttgtccaccaactttatcgcccgttgctaagttctggtgttggattcggtgctcatagatggattgccaccctccaaag

SEQ ID NO: 7364 - DNA, 260 bp, Glycine max
  unsure (1)..(260): unsure at all n locations; Clone ID: 701147045H1
gacatccactgangcctagtgggtctgatccaatccgaaaacccacttcgcctttgttgcccgaaaaacctttctttctgcttctcccatccatccatggcttctggaatctcctcatagttctttcagctgcctataccctcgctctttgcctctcacacactaaaagaaaccatgaaggttcggtcatctgtgaagaagatgtgtgaattttgtcagatagttaagcgccgggggacgaatctatgtgatttgctctg

SEQ ID NO: 7365 - DNA, 253 bp, Glycine max
  Clone ID: 701147046H1
ccctacaacaaacaaactaaacatggaaaagttcttatgagaactaggacttagagaatccttgatttattcgtcagcttaaaattctggatcgtcatgcactttcaaaatagcaatatgcttcgacaagaaagggttgttcactcagttgcatatatgtcttacaatgccagaaaggaagaaggggtgtcattatccaacattcaacgtttctgttatatttggcaacgggatgaggtatgcttgacctatg

SEQ ID NO: 7366 - DNA, 263 bp, Glycine max
  unsure (1)..(263): unsure at all n locations; Clone ID: 701147047H1
caccttagtttaaatcccaccttcaacaaaaaatcttaggaatttgagagaaatcctagaatttaatgcaacataactaggaattagtatttctattataaagagacgctttgaatgaggcagagaacgagtcatcccattgaacgagaggggcatagcttcactgaaatcaagctacccatttaatgtaaaataagtataaacacaaatcacaanagaaaaattctatgctatcctcagaatttaattaggtggtttaatcc

SEQ ID NO: 7367 - DNA, 267 bp, Glycine max
  unsure (1)..(267): unsure at all n locations; Clone ID: 701147048H1
gaggcaaaaggaaaggaaagggctcagggctgagaatgaagcacttgaccgaatcaggcaactgtacaagaaagaagatgcaaganaacagagtaggcaagtaaggacatgcactaaagttccaccttcaagtaaaagaagattttggggagataatggacctggatacaatgtatcaaatgtgaagagtaacataatgaaganggcaaagatagnatttctgaagagtcatgaggtaaaaatcttgccgccatgaagattaaatct

SEQ ID NO: 7368 - DNA, 260 bp, Glycine max
  unsure (1)..(260): unsure at all n locations; Clone ID: 701147050H1
gaagccttcagatatttcccttctgagctttgattagtgtggcctagttgntgttttctcgatgagaaaggnttcttccantatgcattgngcacttctgcgnntttgggttcccttgttgctggttgctagcttcagctatgctccttctgtttcggccacaactnaaatttcagggaatgaagtgaacacagatgganggtgataaatgaagagttagcannancaagtctnnaaggacatgatgaagaagcaaagtt

SEQ ID NO: 7369 - DNA, 224 bp, Glycine max
  unsure (1)..(224): unsure at all n locations; Clone ID: 701147051H1
ggaagtnagccgatntaatanactagaactnggatcnnctttatgntgnttatttngatttggagtggttncntngggagtttggatggcnannttgattgttccccctcttcntccttcaccggtngacgatgncatncagctttacgctgctttcaaaggatttggatgnggtantagngttgtgatnactatacttgctcatngngatgctacncagcgtg

SEQ ID NO: 7370 - DNA, 247 bp, Glycine max
  unsure (1)..(247): unsure at all n locations; Clone ID: 701147052H1
gaaccattncanataagaacanaagnnnacanagtcactatganatgtctcttattagccgannaccaaataggaatcaagaaatgagctgagaaaattaatgaacctgatatcacttacttgggctaatgcaggaagtgtttgtcttccagtactttcaacagatccnntgcagtctcctatagagancacatcttgtaccgaagaaacanggagccactcatcnacaccaatcctntgaaacaaa

SEQ ID NO: 7371 - DNA, 256 bp, Glycine max
  unsure (1)..(256): unsure at all n locations; Clone ID: 701147053H1
gataggatagagatcaccaacaaaatatntgcttnttgttttattncattgcaaccatgtttggntatgcagcagcaataattgcagcaatcctcttcttccantacttcttccataggagacgatgttgcaaacaccccattttgacagantaccctatcattggcatgctaccacaattactcttcaatttatggcgtgcccatgattatttaaatcaggtgttgcaacganatggtggcactggtgagttcat

SEQ ID NO: 7372 - DNA, 253 bp, Glycine max
  unsure (1)..(253): unsure at all n locations; Clone ID: 701147054H1
gttgtatacagttatatatattgtttttcaacaaattaattanaacaaataaaccccattatatgatgangccatngtaacctacagtagatatatatcatggtagttatagtatgttaggggacagctatgttagctttggaaggtcaccaaatctgaaattacttctattttnagtgaaggaatccaaggtcaccaatctctaaattaagtggaacagggnactaagactttgtattnctttgcccgttac

SEQ ID NO: 7373 - DNA, 252 bp, Glycine max
  Clone ID: 701147055H1
ggagaagcagctgataacttcagccgtgctctcgaaatcagagtggcacattatggtgaacttgctcctgagtgtgtgcacacatattacaaatatgggtgtgcacttttatacaaggctcaggaggaagctgatcctttagctgatgtgcccaagaaggaggatggatctcaacatggctctaacaaagatggttctgtgaagggttctttgaatgctgaatcttccacagcttctatttcaaacaatgcc

SEQ ID NO: 7374 - DNA, 252 bp, Glycine max
  unsure (1)..(252): unsure at all n locations; Clone ID: 701147056H1
ggggcataggcagtaatgggcgtagagtggttattggtgtgncatggcttggtcactgcggtggtcgttgtctctttcctctgcggtcgatggccaatntttgaaggcactttcattcaacgcattcactacttcctcactttcngcgcctncgattacttcctgcgtttcgttggcgntgttttcggncctaagtgtacggattnggttctctccgtcgaatatnactgctgcgatcgtcccaatcctctt

SEQ ID NO: 7375 - DNA, 249 bp, Glycine max
  unsure (1)..(249): unsure at all n locations; Clone ID: 701147057H1
tttggcctcacagttttgaatttcgtcttagggtagctcttggatctggaggagatctgatgatgacatctcggatcaggaacactaacattgatgggaagccattttcattcacatttgctaatcatacatatttctctgtgtcagatataagtgaagtgcgggttgaaggattagagacattggattatcttgacaacttgcagaaaaggnnncgctttactgaacagggggatgctttaacatttg

SEQ ID NO: 7376 - DNA, 269 bp, Glycine max
  unsure (1)..(269): unsure at all n locations; Clone ID: 701147061H1
ggtacngatcaattaacaaccatatctatctattgagaaacatgaagaaggtttcacccttggcattttccattctctttttggccttcaccatagaaccctttattggnattgntgcagcagcaccagaagcagtgnttgacacctcaggccagaagctgagaacaggtgtcaagtactacattctgcnagtgttcagaggcaaaggtggaggcctaacagtttcaagcagtggnaacaacacatgcnccntctttgtggtgcaagag

SEQ ID NO: 7377 - DNA, 97 bp, Glycine max
  unsure (1)..(97): unsure at all n locations; Clone ID: 701147063H1
ataaatgacgaatntgatattatnttntttcagatantcagncatagnataaaacaataggtcaantantntcatctggatcggtaccganaggaaa

SEQ ID NO: 7378 - DNA, 256 bp, Glycine max
  unsure (1)..(256): unsure at all n locations; Clone ID: 701147064H1
ggggaaaatttgtcaaataaattcatctaaccccaaacaaaaccctagcacacttttatcgcttagtggcagcagcagtggcgacaagcaactccatccgcaatgggaatcgatttgaaggcaggaggtaagtccaagaagaccaagcgaaccgcccccaaatccgatgatatctacctcaagttctcgtcaagctgtaccgttttcttgttcggaggactgggagtaacttcaatgctgttgtctcagngctttt

SEQ ID NO: 7379 - DNA, 258 bp, Glycine max
  unsure (1)..(258): unsure at all n locations; Clone ID: 701147065H1
gactgtgaagtgtacttggtcactgacctatcttggtaganatttgaagtttaaaccttcaaattaatcaaaccattttaatttgcctatagattctgagtcactgctgctatggcgctacgcgtacttcttgtgttggggatgttgctgatgttnngtcttgttaaggtttcatctgatccaaagatagaagaagaaatactggnagcagaagaagaactgcagtttcccgataacgagccacttatcgtgagagag

SEQ ID NO: 7380 - DNA, 267 bp, Glycine max
  Clone ID: 701147068H1
atagcgatgatcgctacttgggctgagccagcactggacaccgtgaagagaatgaagttatatgcagagtctcttgcacgctttcaaggagggtcaccttacatatatcctttgtatggtttaggagagcttccccaggcatttgcacggcttagtgctgtttatggtggaacatatatgttgaataagcctgagtgcaaggtagaatttgatgaggaaggaaaggttgttggtgttacatctgaaggggaaactgcaaagtgtaaa

SEQ ID NO: 7381 - DNA, 256 bp, Glycine max
  Clone ID: 701147070H1
gacagcacagatattttctcaaagggaaatagcaccatttggcattttacaatttccaagctatggccaaatcaactgggtcacttgtctttctctctattttcactttgctcctttcttgcaacttaggagggcacttaaagtttgctaatggaatgctagaccaggaaagttggtgcgtagaaaaccttcaacaagtgatgttgcactgaatgataacattcaatatggttgcatgccttgggtgattgcaaaa

SEQ ID NO: 7382 - DNA, 266 bp, Glycine max
  Clone ID: 701147071H1
gggatttgggattgggaaggcgagggattgcgctgcgtctcttcctcttctctttcgattcatccctcattcataatcttccaatccaacaacctcagcctcacactcacacatacacacatctgaacgcgtatcgtccctcccatggcttcaaagcgcatcctcaaggagctcaaggacttgcagaaagacccaccaacttcttgcagcgctggtccagtagctgaggacatgttccattggcaagcaacgattatgggtcctgc

SEQ ID NO: 7383 - DNA, 252 bp, Glycine max
  unsure (1)..(252): unsure at all n locations; Clone ID: 701147072H1
gtctatctaagancaactcaactaaattcaaaagtttcaatgcttacataaagaattgagctaataagataattgattatgtataanaaaacacaagggtgctcttagggtcaattttagcaactcattatttgttgcattgtatantcgtgggcagctacaactttcacttccttttatcttattttggagtggaagttggaaggcatgagacctacacttttttcaaaactttcatctatctttgacttc

SEQ ID NO: 7384 - DNA, 238 bp, Glycine max
  unsure (1)..(238): unsure at all n locations; Clone ID: 701147073H1
ggagagaaantagattgtttgttgcantgttgtgtgcatagagggggagagagagtgtggaggctgctatggggaacagagctatgttaacgctgctactcttcttcttctcgaccaaattgtttccttccgctctggctatctggctgtcgttacccaccactggcaccaagtgcgtctctgaagaaatccancacnnncnaaccgttttggccgattacgtcgttatccccagtga

SEQ ID NO: 7385 - DNA, 251 bp, Glycine max
  unsure (1)..(251): unsure at all n locations; Clone ID: 701147074H1
ggagacattttcataatcgaaattggaagcgaggaaggaaaacccaaatcgaaaatggcagtgatggagaggttgaagatgttcgtcgttcaagagccagttgttgcngcttcctgtctcatcgctggcttcggtctttttcttccagcttttgtgaggcccatgttggattcatatcaggcaaccaagcaaccttccccagcctgctttnngtgacgtggttgcaggaatgactggtaaaaagtaaaggt

SEQ ID NO: 7386 - DNA, 260 bp, Glycine max
  unsure (1)..(260): unsure at all n locations; Clone ID: 701147076H1
taccatgaaatgttgatngcatgcatacttctatttgatccataatgtagattccagtggatcacatatgcagatacctcttaaaaattggtttcagtgccatgatctaaattgcatgnaatttttgcaccttcaaactcctaattgtggntagtaatancaaaaatcacgcaaggaacatttcttaatgtgttgttattggtgggaaactttttctatgggaaattgggaggcccccattgcaatgtatggttactgtt

SEQ ID NO: 7387 - DNA, 107 bp, Glycine max
  Clone ID: 701147077H1
aaagaaggaagaagagaagaaggaggagccaccaccggagatagtgctcaaagttgatatgcattgtgaggcctgtgcaaggaaagttgcaaaagcttgaaaggatt

SEQ ID NO: 7388 - DNA, 251 bp, Glycine max
  unsure (1)..(251): unsure at all n locations; Clone ID: 701147078H1
gantgcgaaccagtagggactcccattccgactcttagccgccgatctctcagggcttgcatcttctcaggtaagctgtgaagatgtacacatcaaggaagaaaatccacaaggataaggatgctgaancaactgaatttgaagagtcagttggacaggcattgtttgatctggaaataccaatcaggagcttaaaagtgatctgaaggattatacataanctcagngtgcaagtttgatgtttctggaaa

SEQ ID NO: 7389 - DNA, 255 bp, Glycine max
  unsure (1)..(255): unsure at all n locations; Clone ID: 701147079H1
gangaagctggaacatagtacaaactcacctccaagtccatgctttttgttcttgcaagagtaacagagaggaggtggacaaacaaagctataatttttagaggggttaccaccctcaccttctgccaaaccaaacccacccttttctctctttaagctactattgtgctgagagctgaagaggagatggggggtggaaatcaagaggcagtgaagcagtgcagaccctgatggaaaatgtggatgatgagcanc

SEQ ID NO: 7390 - DNA, 262 bp, Glycine max
  unsure (1)..(262): unsure at all n locations; Clone ID: 701147080H1
actattccttagaacctaagaagtctgcaagggccttcagtgccttcacttccatgtccatacttgcagcaatatttgggaatggcatattgcccgagatacaagtacccactgttcctctttctgtataagacacaaataatttactttatttgtatgttacattgaccatgtatgtcattatgaataacacaggcaactctagcaccccctggcnatgggaagatggtaaaaggccttngtatgnnccattccgttattt

SEQ ID NO: 7391 - DNA, 252 bp, Glycine max
  unsure (1)..(252): unsure at all n locations; Clone ID: 701147082H1
ggttacggttggagagaaatgaaggcgctaggcgttgttggtggtagtggtgccccagtgccagtggtatgttctagtgttaggaaccaccggtttcgcgtttccttctcttcttctccgtctccgggacncaaaacggtggaacaagtgggaattgctgctccgaaatctgaatacaagcccggtgtgtttgatgacttgtttcnaatttgttccgcaacaattggtacaggaggtgggttgggactcgga

SEQ ID NO: 7392 - DNA, 136 bp, Glycine max
  Clone ID: 701147083H1
atgtttgctcatacatgatccttgtattttcctctacaaaacaaaaacaaaaaaagggaagcatgaaaattcatgatgcattcttagttgcatgtgttaggtaccgtgagccaaccatgttgggatcataaaccca

SEQ ID NO: 7393 - DNA, 253 bp, Glycine max
  Clone ID: 701147084H1
ggtgaaagaaaatctaacacttttccaaagggacaaaggaacaacataacgttaacaataacatggtttggttttcttccattcctcacatttcgagactttcatgctctctcttggtgtctggatttccttgccaaagtttgaacctttttcctagaatttgacacccagataagattttcttcattaccaaattctgggtctttctctctctttctacaaccctttttgtgataaaaccaaagggaaattt

SEQ ID NO: 7394 - DNA, 252 bp, Glycine max
  unsure (1)..(252): unsure at all n locations; Clone ID: 701147085H1
ggggacccaaattttaagaacttggctttgcttccttcaaagtgaggtctctaagtttcactttctttgnatagggcaacctcctttctctgtgactctgagtatcgtatngttttattattatttctaattctctcttatcaggtccactgaatatgtctccgtcgttggatcttcctcccaagggtggcttnagttttgatctatgccgaagaaacgcaatgnttcaaaacaagggcctcaaagccccaa

SEQ ID NO: 7395 - DNA, 250 bp, Glycine max
  Clone ID: 701147086H1
gagcacgcgttccagatcctatggcgttaccagatcctggaccccgacagcgacatcgtggcctattggaaccgggtgttccttgttacgagcctcctcgccctcttcatcgaccctctctacttcttcctccccaccgttggcggccccgcctgcctccaggctgatcccaaactcagcatcctcgttaccatcctccgctccttcgccgacctcttctacgtcctccacatgatcatgaagtttcgca

SEQ ID NO: 7396 - DNA, 251 bp, Glycine max
  Clone ID: 701147087H1
ctatatataataagagttaaaaaggctcaaacgcaaaaagaaagaggcaagactagcaagtatttggtttaagtcattgtttaattacttcaagacaaaagacacatcaatcttgatctttacatgatttcaaggaaatatccattagtttttttttaaaagatctttgatgatcgaaggaaatgaccatgtttttatttgtttttctttaatttagatttgaagactattgacggacattgccatgtcta

SEQ ID NO: 7397 - DNA, 100 bp, Glycine max
  unsure (1)..(100): unsure at all n locations; Clone ID: 701147090H1
anattggaggttgaggggaatgggttnaanaagntgggtattnagatttnanttaaaattagtgaagagaagaagaaaggagaaaatnaaggnngaggng

SEQ ID NO: 7398 - DNA, 251 bp, Glycine max
  unsure (1)..(251): unsure at all n locations; Clone ID: 701147091H1
gacagcacagcactctttgcaacacaacaaaaaaagacaacacagagagaagcgtcttaataaacgctcttctctgaaaaacctgatttcttctcttcttctcttctctttcgtttcgatcttcgatctctgaaaatgagagagtgcatttcaatccacatcggtcagggccggtattcaggtcggaaacgcctgctgggagctctactgcntcgaacacggcattcagcctgatgggcagatgccaagtg

SEQ ID NO: 7399 - DNA, 249 bp, Glycine max
  Clone ID: 701147092H1
ggaaccaaacaacaaatattcatggctttctttattctctccttcctcttccttcttcttgtttcatctgccactgcttgtgatcgctgcttgtatcaatccaaggcttcctatttctccaaagcttctgctctttcatctggggcatgtgggtatggctctttggcactagacataagtggtggacaccttgcagctggtgtggatctctcttcaaaaatggagcaggttgtggtgcctgctttcaga

SEQ ID NO: 7400 - DNA, 253 bp, Glycine max
  unsure (1)..(253): unsure at all n locations; Clone ID: 701147093H1
gaggganaggatggagaagaaggtgaaggaagtgagagtggagtagatctgagtgtgaagcaanaattcttccaaagttttcatctttcaatcaaagggtcctaagaancatgctctganccttcgttttcttcatctttntctttttctagtccccaatccctataacacaatgcctcgcccttgtttccacaagnttgttctcnccactaattctccaatccaganaactgagggatncnagntattttct

SEQ ID NO: 7401 - DNA, 228 bp, Glycine max
  unsure (1)..(228): unsure at all n locations; Clone ID: 701147094H1
aaggtaaagcaaggtttagggggtagagtacgtctnattttgtctggagccgcacctttatctgcacatgtggaaggttacttacgggtggttacttgtgctcatgtcctacaaggatatggtctgactgaaacctgtgcgggaacctttgtctcattaccaatgaaatagaatgcttggaacagtgggccctcctgtaccaaatggtgacgtgtgctggaatctgtt

SEQ ID NO: 7402 - DNA, 269 bp, Glycine max
  Clone ID: 701147095H1
gcacagtggtgtattttaagcacaatgacatggattctttaagagaaactttagagaacattactgccaaatataagaaggccaagaatttgaggcgttatattgttattgaagctgtctaccagaattctggggaaatagcacccttggacgaggtcattaaattgaaggaaaaatatcgctttcgtgttttgctagatgagagcaactcattgggtgtgcttggaagttctggaagaggtctcactgaatactgtggagttccattg

SEQ ID NO: 7403 - DNA, 256 bp, Glycine max
  unsure (1)..(256): unsure at all n locations; Clone ID: 701147096H1
gggtgtagcgcagagaaagaactagaactagggtttcatctttgccatcagtaaacgacaatgatttacgacgttaactctcctcttttccgatccttcctcagccagaagggaggctcctctgataagaggaaatcggacgaacagaagccaaaagagcagaaacccaaagccagcgagaacaaacctataatgactgagtgataacagctgagctgcttcattgtagaatgaaaataggtggtaggtntgtatt

SEQ ID NO: 7404 - DNA, 246 bp, Glycine max
  unsure (1)..(246): unsure at all n locations; Clone ID: 701147101H1
gtctaactaactgaaatgacagtgaatgttcaaaaacctccaatcttctttctaatttattatcacttatcagggctgattttctaacatgattttacaaaaacctccaatcttctttctaagctcacagaaattttggttgtgcctnttgtatcacattactaaagttcctctttcttcacaaacttaaagtgaaatgtatttatgagtgataccatacttccaatanattttaaaacacaaatt

SEQ ID NO: 7405 - DNA, 255 bp, Glycine max
  Clone ID: 701147102H1
gacgattactaccaagtgaaaaagcaattaactaagcatatatagcgtgtaagacagtgagaaaaaaagtgttgtgtagagagaaatggctaggtggtgcatcttggtggttcttgcccttgtcgtggttgcaagtgccagaaatatgcccaatgacgcaggtttggaggaccagaagaacttcctcgggtatgggttctctggagttggcaacaatgggctccctttggaggagtgggttctgggtttgatggt

SEQ ID NO: 7406 - DNA, 252 bp, Glycine max
  unsure (1)..(252): unsure at all n locations; Clone ID: 701147103H1
ctcatctataccatatgatttttttattaacaaatattaattattaaattttgtttaccaaaaaaatcgaatccataatttnnnnnnnnnnnnnnnnnnnnnnaaccattcaattaatcttatatttccacgntataaaattattgacacacatgatttaaaatttcaatacaaangnacaccattacagtgaataaaagtnnccaactgcaatttgaaattttatttgtatcgaaagtaattttttattga

SEQ ID NO: 7407 - DNA, 251 bp, Glycine max
  unsure (1)..(251): unsure at all n locations; Clone ID: 701147104H1
ggtgaccaaatgcnaagacggcattgaaattgaacacaatccatgnctaacacaagcgcagacgacaacataacactgctccaaacatatnaatttcaataatgntttcttctgcaatttctccgaagcccntcctncggtccctcgtcattgatcgttacgctcngagcanaactactgcaaccaggtggnagtgcttggggtctaacaagtcagaaaattncagtaccacgaganagnngngtgntgag

SEQ ID NO: 7408 - DNA, 253 bp, Glycine max
  unsure (1)..(253): unsure at all n locations; Clone ID: 701147105H1
gncgcnnntgnttanccatggcttcttctacntcacntccntccttttngtccctccctgaacctgtctgcatccattcccatttcttcttccgtatgcatgttcccaccgtctaaaaaacctagcaangnaacaaaacggcgtcatgcntgggaagtagcatgcaatggtaaccctagaaatnggagggacattctgatcggccttggaggactctatggtgctacnacaagtctcncaagtaacaacactg

SEQ ID NO: 7409 - DNA, 252 bp, Glycine max
  unsure (1)..(252): unsure at all n locations; Clone ID: 701147106H1
gaggaatcatgtgactgcgaacttacnacgngccgtccgatcagatcggatgcgtcattggaaaaggcggccagatcgtgcagaatatacggagcgaaaccggcgcgcagattcggatccttaaggatgatcgcttgcctccttgcgcgttaagcaccgatgaacttgttcagatatctggtgaggctgcggttgtnaagaaagctctgtttcaaattgctgctcagattcgtgataatccatcgcggtctc

SEQ ID NO: 7410 - DNA, 253 bp, Glycine max
  unsure (1)..(253): unsure at all n locations; Clone ID: 701147107H1
gatcgaagcaaaaaatgaaaacccaaagtgcttctctcctactgtctttttctctctcttgctatccttttggctagtngcactgctgcaagtgcaactccaagaagcgcagtgccaagccaccatgtttcaacattcaacagaagcctttttccttccacttttctctttgganttggttcttctgcttaccaggcagaaggagcagcaagtgtagatgggagaggaccaagcatatgggacacctacacta

SEQ ID NO: 7411 - DNA, 246 bp, Glycine max
  unsure (1)..(246): unsure at all n locations; Clone ID: 701147108H1
gtttgttgatcgngntaactagaaacagtgtgatgaaaatgaaggtcctngttttcttcgttgctacaattttngtagcatggcaatgccatgcgtacgatatgttccctctccgaatgaacactggctatggtgcncgtactccggaggtgaaatgcgcaagttggaggcttgctgtggaagcacacaacatctttggctttgagaccattcctgaagagtgcgttgaagcaacaaaggaataca

SEQ ID NO: 7412 - DNA, 252 bp, Glycine max
  Clone ID: 701147109H1
gggatccaatcgcgttagggtttttgagagttgcagtgtgcagacttcttaggatcatctcttagcagtgatcgattgagatggcagacgaagctaacagaactgctttccttgaaattcaaagtcgcatgatcgatactactggaaaaataaaacaggtgcaaacccagatgcgttccaaagaagcagaaaagaagcgtgcttttctgaccatggaggagctgaagcaattcctgatgatactaatgttta

SEQ ID NO: 7413 - DNA, 236 bp, Glycine max
  unsure (1)..(236): unsure at all n locations; Clone ID: 701147110H1
gaaggaaggaagaaataaaccgtatgagaacattaacctcttacttcttccactttcattccaaagcgttatnnnnnnnnnnnnnnnnnnnnnnntctcttcgctcttcgatcctcgtccgggggctnctccgantaccaccaccaccangcgccgatggcnacgataggaggnttacgcgantcccaaggctctcagaacagcgnccanaccgtggcnctcgctcngttcgncgt

SEQ ID NO: 7414 - DNA, 251 bp, Glycine max
  unsure (1)..(251): unsure at all n locations; Clone ID: 701147111H1
gagccatggtaacaacacttctaattgacttgtttaatatagacttctgcagataanaaaaaaatgttaactttatcgttatcaatagcangtacaacaaatacttacatctaatacttttttcatgcaggnttctactgggtttgtattcaggaactatttctatttggaactatcagacaaaggtaaagaattatatctgcacttaaatactttcnccgnaactggaataattgatattaatgaaaaag

SEQ ID NO: 7415 - DNA, 53 bp, Glycine max
  unsure (1)..(53): unsure at all n locations; Clone ID: 701147112H1
gaaccaagttctcnanntccnctccatccttcctatnaccacttactnatctg

SEQ ID NO: 7416 - DNA, 225 bp, Glycine max
  unsure (1)..(225): unsure at all n locations; Clone ID: 701147114H1
cagtttcagacacagagagaggggtttgggattggagggattgacgctgcgtctcttcctcttctctttcgatccatccctcattcctaatcctccaatccnnncacctacagcctcacactcacatatacacatatctgaacgcgtatcgtccctcctatggcttcaaagcgcatcctcaaggagctcgaggattgcagaaagacccaccaattcttgcagcgc

SEQ ID NO: 7417 - DNA, 262 bp, Glycine max
  Clone ID: 701147115H1
ggactgaaagaaggagacaaaaatagaggaggaaaaattagaattgtaagcacacagtttccacctaactccaccgctcaattagttggttacaatatctgccaccaacctaaatgagtcgctcattgaaagctttcaacaggcaccttactctcctccctcttcatcaacgcacagcttcttcttcttctcatgccttcatagcttcctctcctctccctctttttccacatcttgtttcctaccccagcttctctttctc

SEQ ID NO: 7418 - DNA, 254 bp, Glycine max
  Clone ID: 701147117H1
ggtggggagagagagcgagtggatgtggtgttccggagaagttggaatggcagcggttagcgttagtgttactgtgagagtgaggtggtgcactcgaaaaccacccactccaactccaaccagattcagcgttaatgctctgtttggtgattggggatttgggaatagaacaaggaactcccttacagcagcaattcacgttcatcttgctgatagtaaagtgataagcgtgtcggttgtttcttcgatctcag

SEQ ID NO: 7419 - DNA, 249 bp, Glycine max
  unsure (1)..(249): unsure at all n locations; Clone ID: 701147119H1
gggttttctgaatttcggatggttgactctaattttaggagctggaaaaggtactaaatctaaagttggacgaaatgtggatccaaggattcagtttttggatcaaaggtttctctttgctggccttaatatctgtaatttccgctctggaacccgaactgggatcgacccgcgtcgtctttcagacaaagtatggagnnnntgaattggtttctatccaactgttgcacctaaaactgtggaccacat

SEQ ID NO: 7420 - DNA, 227 bp, Glycine max
  unsure (1)..(227): unsure at all n locations; Clone ID: 701147120H1
ggtggaagagctgattncatttaacatcattcctagcagcactggagctgccaaggctgttgggaaagtccttcctgctttgaatggaaaattgactggtatggcattccgtgttcccaccgtggatgtctctgttgttgacctcacggtgaggctggagaaggaagcctacatatgatgaaattaaaaatgctatcaaggaggaatcagagggcaattgaagggat

SEQ ID NO: 7421 - DNA, 249 bp, Glycine max
  unsure (1)..(249): unsure at all n locations; Clone ID: 701147121H1
gggattgtggagagtgttggagaaggtgttactaatgttcagcctggggatcatgtcattccctgttaccaggctgagtgtggggagtgcaagacttgcaaatcggggaagacaaacctctgtggcaaggttcgttccgccactggagttggggtcgtgctcaatgatggaaagagccggttctccattaatgggnagcccatttatcatttcatgggaacatccacttttagtcaatacactgttgtt

SEQ ID NO: 7422 - DNA, 247 bp, Glycine max
  unsure (1)..(247): unsure at all n locations; Clone ID: 701147122H1
gtaatgatagaattcatgtcatttaaagttatatctgttgcttgaattaggaagttgaaacttggatacctgtacatatcaatttagacttccatctaaagtagtagggactgcttgttttggctgggngtgtgaaaacctatattgaacaagttgaaattttggaagaaaaaatcatctaatgcttgataaaataaaattgagaaatggttgaaaatggtatatatcccntttttcatttccaccc

SEQ ID NO: 7423 - DNA, 182 bp, Glycine max
  unsure (1)..(182): unsure at all n locations; Clone ID: 701147123H1
aagccaagcacaacaatggcactcaaaagggcatcgtggttgctgctgctgccactgttatnnnnnnnnnnnnnnnnnnncaccaacaccaacagtgtgtaccatccttgttctgatgccaggattcagagatctgatggcttcacttttggcattgccttcagttccagggatctttcttc

SEQ ID NO: 7424 - DNA, 260 bp, Glycine max
  unsure (1)..(260): unsure at all n locations; Clone ID: 701147124H1
gggagaggacatttctgatacgggagatactgatattacttaacagactagtatctaatccttcctattctgccactgtcttgcgcggtttaatgaccactagggatatggctggtttgaccattgatgttgcnagcagattatctcggaaagaaaagaaaaccgagcagcaggacagcatggtgaagcatataagagaaaccgaaattgttgaccttgctcgcctattcaagaaaagggtgttcgcatatttgggcgat

SEQ ID NO: 7425 - DNA, 261 bp, Glycine max
  Clone ID: 701147125H1
ttcccaaatcttgtgcaactgcatactgtacaactccaggttgactaatgatgtattgaaatcactaaacaatatgccaaggttgttgttcctcgatttaagtagcaatgcttatgaaggtgaaactttgcattttcaatgtggagggtttcagaaactaaagcaactgtacctcggatctttggatcaattgaagtgaatccgtatcgacagaggagcactgtgttctgtggaaaaaattcttttacaaaacctctccta

SEQ ID NO: 7426 - DNA, 252 bp, Glycine max
  unsure (1)..(252): unsure at all n locations; Clone ID: 701147126H1
gactgcagaggtgtattttctcacttctcagcactcagcagcgatatcagttgaagaaacagaaacaaacaaaagaggcagaagatgttgtgggtggacaaatatcgtcccaaaaccctcgaccaggttatggtccacaccgacatcgctcgcaatctcaaganattggtaacggaacaggattgcccccatttactcttctatggcccatctggctnnggcaagaaaaccctaatcatggctcttctccgc

SEQ ID NO: 7427 - DNA, 249 bp, Glycine max
  Clone ID: 701147127H1
tgcgattgttaacatgggttctggagctgctattgttattccttcggatcctctttatgctgtttatgctgccaccaaagcgtacatcgatcagttttcgagatgtctctatgttgaatacaagaggagtggaattgacgttcagtgtcaggttccattatatgtggcaaccaagatggcatcaatcaggaaatcttcattctttgttccatcaacagatggctatgccaaagcaggtgtgaaatggat

SEQ ID NO: 7428 - DNA, 265 bp, Glycine max
  Clone ID: 701147128H1
ggagaaagataaatgtggcatattcatgtcttcccctacaccattctttctttggagtcaaggactggggggttaggtttgtacttaattacgcttcttaatttcttctttatcgatcacccatgatctacctggctagctagctagggttgcttctgctgcattctcgaccgccaatcaaggattcttctgcgcttccatcttaacaagaaaatggtgagaaggaagataccgatcaagaagatcgacaacgtaactgcgaggc

SEQ ID NO: 7429 - DNA, 257 bp, Glycine max
  unsure (1)..(257): unsure at all n locations; Clone ID: 701147129H1
tggataatgcaagtgttcatgacacacttgactttggaacatttttgtttgttttttgtgaattgactttggaacatatgattgtgctatgtggtggcatggtggttaggtggtgttgtgttatttgtacgtgggacagaactcgaaaattttagtatttgatagngaaagcatgcattgaatttcttggtgacnagctagatagcttgcctttttagattagaagtcattctttcatgtcaatttctatttgaaaa

SEQ ID NO: 7430 - DNA, 254 bp, Glycine max
  Clone ID: 701147130H1
ggcacaagtgagtttgttgatcgagataactagaaacagtgtgatgaaaatgaaggtccttgttttcttcgttgctacaattttggtagcatggcaatgccatgcgtacgatatgttccctctccgaatgaacactggctatggtgcccgtactccggaggtgaaatgcgcaagttggaggcttgctgtggaagcacacaacatctttggctttgagaccatcctgaagagtgcgttgaagcaacaaaggaata

SEQ ID NO: 7431 - DNA, 101 bp, Glycine max
  unsure (1)..(101): unsure at all n locations; Clone ID: 701147131H1
gaanttaattnccacnatctaataatgaccacttcttccattggcagtgnaggttcnagngngaacttctccacattgnnttcnatttaataatgnntcta

SEQ ID NO: 7432 - DNA, 246 bp, Glycine max
  unsure (1)..(246): unsure at all n locations; Clone ID: 701147132H1
aagacgacaganggggacaaaaatccattctcaattgagaaagcgaaacgcatagaatcgaaagaggggaaaagaaaaagaaaagttagggttagggattttgagagatggcatcgactaagaagatcaccctgaagagttcggacggtgaggccttcgaggtggaggaggcggtggcgctggagtcgcagagatncaagcacatgatcgaggacgactgcgccgacatggatccctctccccaat

SEQ ID NO: 7433 - DNA, 252 bp, Glycine max
  unsure (1)..(252): unsure at all n locations; Clone ID: 701147133H1
gatggagaggnagtagaactgtagaggaaatgaagcatgcggtgccagctaagctggatgtcggttcctcgtcaataatcgtctttccctgcctcatgccatcatccagtggttagggtcggngagcttgccctcacttttctcttccatcttcantctcagtctcactcactcaccattcaccattgccctttgcgtcgctctaagcaacacgtccttttcgatccacatattccagtgtgtatataagtc

SEQ ID NO: 7434 - DNA, 255 bp, Glycine max
  Clone ID: 701147134H1
cagaatgaattgaaaatgaaagagcttttgaaccaaatagattctaaagccgaaacaatagaacagatgtcacaagaactagaagttaagtcgaaacaacttgaggatgcacagaggcaaaaggatgaaaaggatgcttcattttcaaagcaaattcaaatgctgagatctcaaattaagatgttgatggcagagggtgcattgtctgaaacaaacctaacaaagaacacgactgagacccagaaaggagaacga

SEQ ID NO: 7435 - DNA, 229 bp, Glycine max
  unsure (1)..(229): unsure at all n locations; Clone ID: 701147135H1
ggaaatgtcttgttnnnagctagtaaatatgcaanngcttccaaaagatatgaaaaggccgtgaagtacatagaatatgattcctcctttggtgaggaggagaaaaagcaggccaagaccttgaaggttgcctgcaatctgaacaatgctgcttgcaagttgaagttaaaagactatcgnncgcagagaaattgtgtactaaggtgttggaccttgagagtacaaatgt

SEQ ID NO: 7436 - DNA, 250 bp, Glycine max
  unsure (1)..(250): unsure at all n locations; Clone ID: 701147136H1
ggatatgtataggtctagttttcnagggaatcctgggctgtgtggggatttgaaggggttgtgtgatgggaggggtgaggagaagagtgtgggttatgtttggctgcttcgaacgatttttgttgttgccactttggttttccttgttggtgtggtttggttttactttaggtacaagaatttccaggactcgaagaggctatcgataagtcgaaatggacgttgatgtcgtttcataagctgggtttta

SEQ ID NO: 7437 - DNA, 247 bp, Glycine max
  Clone ID: 701147138H1
ggcatcaattcaaaatatatcatcaattataagcatgggtttgtggaacacaacgaatgcggtgtcttgccgctttcacaagtttggtgatgaccaaaagaatctggtcttccaaggtgatgccacgtcttcttccaggggcatagaactcacaaagttagacggtggaggaaaaccagtgggtggcagtgtggggagagtgttatactcttctccagtgcacctttgggaaagctctacagtggtc

SEQ ID NO: 7438 - DNA, 228 bp, Glycine max
  unsure (1)..(228): unsure at all n locations; Clone ID: 701147139H1
ggtatggtaattgacanntagtcatgcatgtccttccngaatggttagnttcttaagtcggtatacatggaatancatctattcagagaattagtaagtctcttgaatgaatattaatagtttgagagcttactctttaaatcttgagaaaaaatatcttcattttaaccanaataaaanataatnatattttttagantattattttctttttcatattctanttga

SEQ ID NO: 7439 - DNA, 251 bp, Glycine max
  unsure (1)..(251): unsure at all n locations; Clone ID: 701147140H1
aacacaacaatagttattattatcattattaatctttaaacttttgtgattccctaagttgttggttgcttttgcttcttgtttctancttatttgttgattcactttctttgtatatttgtagctnttctttcttccattnttctgcttcttcagcaattgtaacatatttattatcttggcttctgcaattgtaacatatttatcatctatctcatatttgttactatgaaagngtatacatacttctg

SEQ ID NO: 7440 - DNA, 260 bp, Glycine max
  Clone ID: 701147141H1
ggcatatccaaaggaacaaaaatattattaagatgatcaacattattggagcacttgttctactctttgcatttctcttcctcagttgtgtgtatgcacaagacacaacaacccttgtgcctgcaatcataacttttggtgattctgctgtggatgtagggaacaatgactatcttcccacccttttcaaggctgattaccctccttatgggagggactttgttaaccaccaacctactgggaggttttgcaatggcaaa

SEQ ID NO: 7441 - DNA, 173 bp, Glycine max
  unsure (1)..(173): unsure at all n locations; Clone ID: 701147142H1
gacaacgcaactnttgacaatctctctttnttctattcactccctccatttcttcaaactaaatttcctgagaatggcgaaggctgcggagaaaaagcctgcggccgagaaggctccggcggagaaaaagccaaaggcggagaagaaggttccaaaggaaggcagcggcggag

SEQ ID NO: 7442 - DNA, 250 bp, Glycine max
  unsure (1)..(250): unsure at all n locations; Clone ID: 701147143H1
gagaaatcagagggtatcacttctcctgaagaagaggtttacaacccctaattgggttaagcataaggnaccaagagaagttcatatgcttgttgatctatttcttcaagagcttgaaattntagttaacgaagtgaagcagattttgcctcaaggtagacgtaagcaccacaggactgatagtaatggnagtagtgcttcatcaaggagcaatcccttgcgggaggagaaactggttaggtcaaatact

SEQ ID NO: 7443 - DNA, 246 bp, Glycine max
  Clone ID: 701147144H1
gacctcactcttattgttttcttaaaatttcttccttgccactgccagtgtgtcaccaccatggccaccgtcacaacccaagcctccgccgcgattttccggccatgtgcctcgaaatcgaggtttctgaccggctcttccggtaaactcaaccgggaagtgactatgaggccaatggggtgcctccttctgcctcttcaagttgaagccaagaagggagagtggttactggcttggctccccaac

SEQ ID NO: 7444 - DNA, 256 bp, Glycine max
  unsure (1)..(256): unsure at all n locations; Clone ID: 701147145H1
gggtttagtttcatcagaaagctgagggaacgattggtgtcttctgtttcggcattcgacgttgacactttgaagatcacagtccattcagacaacgaggagcttcaatttggagtggatgaaagnnanaccttgctggttcccaaagccaaggaatcttcccaagtcacgattgaggcaaatacagtttatggtgcattgcgcggattagagacattcagccagttgtgttctttcgattatacaactaaaacag

SEQ ID NO: 7445 - DNA, 253 bp, Glycine max
  unsure (1)..(253): unsure at all n locations; Clone ID: 701147146H1
gggagaagatggaggnaattgaagcgaagatcaaagctctgagagaggagcaaacagctgcattggatagaattgaagcagaatatagggagcagttggcagggttgagaagagatgcagaaagcaaggagcagaagttggctgaacaatgggcnncaaaacacttgcgccttactaagtttctagaacaggtagggtgcagatcaaggctcactgaaccaaatggaagatagagtgacaccattcacaattg

SEQ ID NO: 7446 - DNA, 261 bp, Glycine max
  unsure (1)..(261): unsure at all n locations; Clone ID: 701147147H1
ggagataagatgaaccttgatatttcccctatatataaaaagccttagaatagagtatagaagatnaagaacaagagaaatggcaacagaaacaaaagtggcagtattaggtggcatcaccgaagtgcagggagctgccaacagcgtcgagatcaacaatctcgctcgctttgctgtagaggaacaaaacaaaagagagaattcagttctggagtttgtgagggtgattagtgcnaagcagcaagtggttgctggagtgaa

SEQ ID NO: 7447 - DNA, 249 bp, Glycine max
  unsure (1)..(249): unsure at all n locations; Clone ID: 701147149H1
ggtaatagattccattttactttttttctcaatccagactttctggaatgctcaaacatttcttcatcaaggtgattcaaagtcatgaattcaattattgcaactcagaacaatgcaacagcaaaaaggtttcccactgaggaaactgttgttgatggggaagacataattagcaagttgcatgaaagcattcttggtcacattctgtctntccttccaacaatggaatcagtccacactagtgtgtta

SEQ ID NO: 7448 - DNA, 247 bp, Glycine max
  unsure (1)..(247): unsure at all n locations; Clone ID: 701147150H1
ggagtagaagaaggatatagtcatagagtcacagaagaggcggcgagtgttgggttgagaatcctatcttgttcgtctttctcgtcttctttcttttcttttgtttttcttgtggatgtgaaacagaatctatgacgagtcaatcggcgaannncctattggttttgttggggctgggtttagctggaatagttctaatcaccagaaagctcaagaagtctgtcagaaaggatttgggggcttcatt

SEQ ID NO: 7449 - DNA, 258 bp, Glycine max
  Clone ID: 701147151H1
aaacaaccaaaccaaacacttgcacgtagggatagcatgttatactttggatgcatcagcagaagaaagatatatataaactgagaaacgatttgattgggtctctttgttcacaaaatttgcagttaggacctttctaaaaattgacaaatgcagatttcattgaagttatagactttgagagaggcactgaatgcaaatattacggagacaagtcaaattacatacattatgttctaacctcggatggctatggaa

SEQ ID NO: 7450 - DNA, 250 bp, Glycine max
  unsure (1)..(250): unsure at all n locations; Clone ID: 701147155H1
ggcacaagtgagtttgttgatcgagataactagaaacagtgtgatgaaaatgaaggtccttgttttcttcgttgctacaattttngtagcatggcaatgccatgcgtacgatatgttccctctccgaatgaacactggctatggtgcccgtactccggaggtgaaatgcgcaagttggaggcttgctgtggaagcacacaacatctttggctttgagaccatcctgaagagtgcgttgaagcaacaaagg

SEQ ID NO: 7451 - DNA, 257 bp, Glycine max
  unsure (1)..(257): unsure at all n locations; Clone ID: 701147156H1
ggatgcgacagtgaacttgatgaatgaaattggttttgtatttttattttattcttctttattcagaatattattatattatgcatacacttgtgcgccgaacatttcttntncttttaccttaatttattgttgcgaatcttngntntgggtcatcgtttgttggttgcagagcagcgaggtgtttagtgtgcaattgtngacaaattaatggcggaaattgtagggcctcgcttgnactgctgttgtaangtaga

SEQ ID NO: 7452 - DNA, 256 bp, Glycine max
  unsure (1)..(256): unsure at all n locations; Clone ID: 701147158H1
ggggagaaagaaaaggtaaggtaaactgaataatttgatgcccctcttgtctcgtaactaacgatggcagcgttccgacggaagagctttgaggagaacgaggatcaccctgaactgttctttcactttctttgaagttaatgctggaaaaagtctatttgtatcatttggaaagangtaagcttaagctgcctaggatattatttttaatgttgtnatnnnntccatgggtatgcatgagtgcctcatccacgaa

SEQ ID NO: 7453 - DNA, 253 bp, Glycine max
  unsure (1)..(253): unsure at all n locations; Clone ID: 701147161H1
ggagcgaggtagtgtccattgcagttttctaatgaaaacaacaaaatagacacctgttaagaaggaggacaacgatggtgctgccgctatttactgctttcattctctttgcttttattccgaatggattnctagcagttccttccaccgtcccggcattcctttggtcatcacattatgaactggcctctgaaaatatattgaaggaatctgtaaattaccaagtcattctccgaaggatctagcaaaatct

SEQ ID NO: 7454 - DNA, 253 bp, Glycine max
  Clone ID: 701147162H1
tggattcttttgtacatttagtgtattttaaaaatagaataaaaattgacacaaggttaaaaacattacagctttgattccactaaaaatgtaaattatggaggacaacattatcattgcatcaatgcttgacatcatcataaataaacagaaatttcatgtaaaaacaaaaggcaacaaaacaagaaaatgtttttgacgaaattaaagaattataataaacctgatttgtagttaatgtaggttgcccttc

SEQ ID NO: 7455 - DNA, 252 bp, Glycine max
  unsure (1)..(252): unsure at all n locations; Clone ID: 701147163H1
ganctcaaaaaacaaaaatcaataccttagagaaaacaaaagcacagaatcgaaagaagagttcttttttgagagagattgggatggcttcgacgaagaagatcacactgaagagttcggacggcgaggccttcgaggtggangnggcggtggcggtggagtcccagacgatcaagcacatgatcgaggacaatgcgccgacagcggaattcctctccccaatgttaccagcaagattctggccaggtnatc

SEQ ID NO: 7456 - DNA, 67 bp, Glycine max
  unsure (1)..(67): unsure at all n locations; Clone ID: 701147165H1
ggatcttcacccccaacttttgcgcaagnntactttagatgcngacaanngtncatganccccattt

SEQ ID NO: 7457 - DNA, 249 bp, Glycine max
  unsure (1)..(249): unsure at all n locations; Clone ID: 701147166H1
gagtgttagaagctgaacccgtttcgccttcgatcaaagggaagaacaaacattcaattcatggcggctgcaaagcttcaagctttatggaatcacccagctgggcctaaaaccattcacttctgggcacctacctttaagtggggcatcaggnttgccgacattgctgatttctcaaaaccacctgagaaactttcctatcctcagcaaatagcggtcacagctactggaattatctggtctcgttac

SEQ ID NO: 7458 - DNA, 244 bp, Glycine max
  unsure (1)..(244): unsure at all n locations; Clone ID: 701147168H1
ggagagagagttggaagaagaagaagggangatgaacttgagatggatggaagcggtgctgccgctgggaatcatagcgggaatgctctgcgtcatgggaaacgctcagtattacattcacaaatccgcgcatggcagacctaagcacatcgggaacgatatgtgggacgtggccatggaacgangggacaagangcttgtcgagcaagcctctccctccaattaacatcgttgttttgccaat

SEQ ID NO: 7459 - DNA, 239 bp, Glycine max
  Clone ID: 701147169H1
cagttacgaaaaatgcttgatcttcttgtgcatgcatactacaatgtcgttctgcccactgccaatatccaaattgtacgcaaggtgaaggggcttttccgtcatgggatgcattgcaaaatccgtgcctctggaggttgtgttctatgcaagaaaatgtggtatttgcttcaactccatgctacgtgcttgcaaggaatctgaatgccatgtaccacgttgcagagatttaaaagaac

SEQ ID NO: 7460 - DNA, 251 bp, Glycine max
  unsure (1)..(251): unsure at all n locations; Clone ID: 701147171H1
ggaggcaagatgtgagccgttccagaagatgaaagatgagctagagtcttatgtgcaacgacatcagcttgctgaacttggagaagtgnaagngctgcnncaaacctatgncattnntgaaaatatagagcagccacaagtgtctgagagcatttcacnggtgccanangagggaactcgatccnctgntggtgangaagttcactgcngttctgcatccnccatggngactgtnaaacngaaacccgnac

SEQ ID NO: 7461 - DNA, 248 bp, Glycine max
  unsure (1)..(248): unsure at all n locations; Clone ID: 701147172H1
ggatcttcacccccaacttttcgcaagantactttagangcagaaaaaagtgcatganccccatttccccttacgcaagantganatgtgaaaatgtgtactatgataggntagcnaagtnngttancnagnnggtanagnnctccaattttganacttccacctcccgagttctgccacctactatataaccacctacaaactcnttacacatttcgctacactctcttaataatganagctatggt

SEQ ID NO: 7462 - DNA, 247 bp, Glycine max
  Clone ID: 701147175H1
ggagagagggagtcagagaaaccctaggtaagaagaaaagatgccggctggtcatggtttgagatcccgcaccagagattccttctctcgtcctttcaggaagaagggaaccatcgccctcaccacatacctgagaacctaccacgtcggcgactatgttgacgtcaaggttaacggtgccgttcacaagggaatgccccacaaattctaccatggccgcaccggacgcgtctggaatgtcaccaaa

SEQ ID NO: 7463 - DNA, 247 bp, Glycine max
  unsure (1)..(247): unsure at all n locations; Clone ID: 701147176H1
cacacacaaaatctgtcataaacaaaagacttgatggggtttgtgtgtgtattacctatggccgctgcagaactcatacagcttgccacggttggagaagataataagggcaacctcagcatcacagnggncagagagttcataagcctntttgagcaaaccattcntcctcnnngcnaatgtcacttgacggtttnncnggttctcantcctctncagntccncctttccnctacncatgtttnna

SEQ ID NO: 7464 - DNA, 248 bp, Glycine max
  unsure (1)..(248): unsure at all n locations; Clone ID: 701147177H1
ctgntaattgaaganacccatgaaccagaaatcgaaattatccacagttnctatttctatgtacttttgtganggcttctccacattctgacttttgttgacagactttaattttgtanggngncttgngacctgnnatggcatagaaattgangtacatntcagcaaaagtatgaagaaagattaaggcgatanctcggaagcacttgcatgatagacactatataaacnaattacaacgaaagtca

SEQ ID NO: 7465 - DNA, 258 bp, Glycine max
  unsure (1)..(258): unsure at all n locations; Clone ID: 701147178H1
gatccacaacaaaaaactacttctncaattcagttaacacaccaaccccacatccaaancttcagttcaatatggcaaccttgtcaanttttgctccttggccattctaagtttagttctagtaattagtgccattgtctttgaggctgaagctaggncaaggncattctttgtatttggagattcacttgttgataatggnaacnacnattacttggntaccacggnacgtgccgatgctcccccntangggattga

SEQ ID NO: 7466 - DNA, 253 bp, Glycine max
  Clone ID: 701147179H1
gaagtcacactcatagcaaattaatcaaacatggctagggttagtgctttgtttcactactttgctcttgatttcttcccttgtattggcttctcaaatccatgtttcctctgggaaactagtccctggactatcatggaattactatttgttgacatgtcccaagcttgagaggattataaggaagcatcttgaggatgtcttcgagaaggacagtggagtagctcctggcatacttcgactcttcttccat

SEQ ID NO: 7467 - DNA, 261 bp, Glycine max
  unsure (1)..(261): unsure at all n locations; Clone ID: 701147180H1
aaaganacccggaaagggtgggaaccgcttttggaaatccattgggcttggatttaanactcccagggaagccatcgaaggaacctacattgacaagaantgccccttcactggcaatgtttccatccntggccgtatcttggctggnacatgtcacagtgctaagatgcctcaggactattattgttaggaggaattatctcccttttatcnagaagtaccataggtacgngataaggcnctccaanttctnctctatat

SEQ ID NO: 7468 - DNA, 92 bp, Glycine max
  unsure (1)..(92): unsure at all n locations; Clone ID: 701147181H1
gnagntaccgagttacgactncggcctcccactncantggtanacgngtcgctacaaatacncacttgacnagctgtngtgtangagggttt

SEQ ID NO: 7469 - DNA, 252 bp, Glycine max
  unsure (1)..(252): unsure at all n locations; Clone ID: 701147182H1
gattgaaagaaactgttgaatcgcgtcgattaaggttttgagatttctaggctttcatctcagacagtgaaaaaatgatagatataagtacacttaatgctgcacagattactgtgctgggatctgcctttncatgctatgctttccatgcatttcacgtcgcagttactgtctcagcatctcttttattggaagaatccgnnagagcaaaaggctattatcatatncatcctcatggctccaatctatgca

SEQ ID NO: 7470 - DNA, 253 bp, Glycine max
  unsure (1)..(253): unsure at all n locations; Clone ID: 701147183H1
gggggctgtgattacaaagagagaggcttgagtgggaaacctacattgcgattgaaggtgccgccatctcctttggtttggtatctcattctctgaaattgaattcggtttttttcccacagtgacggtgttttcaaaatttacacttgatatgagccctccacattccttattttcttttanttaatttcatcaatttctgtccgatcttgtgtagtntntattttanttttttgcactgtttgtgttctgt

SEQ ID NO: 7471 - DNA, 235 bp, Glycine max
  Clone ID: 701147184H1
gagatgaagaagcaagaaggcaaaaggctctaaatgggaaagctagtgcagttgatggtgcaaaaaaagtcagagtacgtgagcgtgaacgtggtcgggctgttccagcccctgaagccaacgcagagatccaaacaaacttagataggtggagagttgtgacccatgcaaatgcaaaaagcaagagtgagaatttccacctcctacatcaagatggagctgttggatacccaca

SEQ ID NO: 7472 - DNA, 250 bp, Glycine max
  Clone ID: 701147185H1
ctacatattcacggtgatgtttgtaacacgttttcattgcgtctttaacattttaatccttcctcttttctttcatatttatgtttaacttttgacatttgtttcatcagacatccttacaatgatgatactttattttacactttgttcttcatttcatggttattatatctatattatatgcttatgttgattatagactacatattcacggtgatgtttgtaattctgtcgactagggtattcatca

SEQ ID NO: 7473 - DNA, 243 bp, Glycine max
  unsure (1)..(243): unsure at all n locations; Clone ID: 701147186H1
gactctcattataatagctgtttcatacctttccctgtttttgttttttcagttgcaacaaccctagtaactctctaaaagatcnnnnnnnnnnnnnnnnnnnatgttgggtgttataaggncnaagagtattcgccatgccttctccgcaataagacacttgtcttctgcagctaaagagattactgtcagggaggctctgaactccgcactcgatgaggaaatgtcagctgatcctaaagt

SEQ ID NO: 7474 - DNA, 245 bp, Glycine max
  Clone ID: 701147187H1
ggtggtagtggggtaacgatacgtaataagttctatcattgaggaagtttcctgtgcatcgtctccgaaaatgaacgacgcagatgtctcaaagcaaatccagcagatggtgcagttcatccgccaggaagctgaggaaaaggccaacgagatctctgtctccgccgaagaggaattcaatatcgagaagctgcagttggtcgaagccgacaagaagaagatcaggcaagaatacgaacgcaaag

SEQ ID NO: 7475 - DNA, 250 bp, Glycine max
  unsure (1)..(250): unsure at all n locations; Clone ID: 701147188H1
ggagacagaggtagtttccacgacggtgcaggtcgcgacacgaaggggcttcttgcggcgtgagatcgtgcgattataccgatcctaacagagtgagatttcagggttacataatgaccaagaagaaganacaaaatggggttgttgttggagagggtgatggtgttggtggtgttgtanatttggagtctgtcatacacaaccacgctctttttttcgacaagttgattgaatgattcccgccaagttc

SEQ ID NO: 7476 - DNA, 244 bp, Glycine max
  Clone ID: 701147189H1
ggtttgccgtggaagagagaaaccctagggtttggaagaagctgatcggagaagatggtgcagcgtctcacctaccgcaagcgccacagctatgccaccaaatccaaccagcacagagtcgtcaagactcccggtggcaagcttgtttatcagaccacgaagaagagggccagcggacccaagtgccctgtcactggaaagaggattcaagggattccacatttaaggccaacagaatataaga

SEQ ID NO: 7477 - DNA, 248 bp, Glycine max
  unsure (1)..(248): unsure at all n locations; Clone ID: 701147191H1
ggatggngtgagggttttacgccaaagaagcaccgcgacgctgtctctcccactcttctccgccgccgcatgtgaattagaagaagaggaggcgaatttgttaatttgttgtgagtgtgttcgaaatgggtgaaatctggtggtcccttttgggggcggcgatccccgtggtggtggcagggcaagcgtttcgcgtgaagaagcggcgtgcagaggagcagagactgcagagtgctcgcgggagggaa

SEQ ID NO: 7478 - DNA, 227 bp, Glycine max
  unsure (1)..(227): unsure at all n locations; Clone ID: 701147194H1
attatgctgtgattannatgctatttaaattaggctaagttcaacaagagggatctgcaaacgaagtttagtttaaattagtctaaactcgcgagacatcggggtttagtacatgagtcttcggcatagaacacaggaacatctttaattagagaaatatctttaattgcatcaacttgtttagtaggaggacccaacgcctttaaataatctatttttcacactta

SEQ ID NO: 7479 - DNA, 250 bp, Glycine max
  Clone ID: 701147195H1
ttcccctatgcataggtgtggaacgaggcaatttataatttatttgactgggatgctttttaatcaatcagctcatgaaaatagtgaatagggggttccttcggattaggaaaacatgtttttgaaatataatttgaagcactataaattaatataaatgacataataaccttggagatgagatttgtaatttttttaaaatcttgtaatttattccgtcttgtaaatgagtacttgattttgaggataa

SEQ ID NO: 7480 - DNA, 250 bp, Glycine max
  Clone ID: 701147196H1
gatgcacaagtttgttgagatagctagaagcaataagatgaaaatgaaagtgcttgttttgtttgttgctacagttttggtagcatatgaatgccatggctcagactaccagaagttccctctccaaatgaaaactgggtttggtgggcaatacagcaatgaggtggcatgtgccagttggaggcttggcgtggaagcaaacaacgtagtcaagtggcaaactgttcctgcagcttgcggagagtacata

SEQ ID NO: 7481 - DNA, 263 bp, Glycine max
  unsure (1)..(263): unsure at all n locations; Clone ID: 701147201H1
gtcataggataatgttatacatagtaaaattgataacttttgcatttaaatcatatttaagatgtttttttagttaattgataatgcatcaaagttaaattattgctatcattttgatcaatgagagatttagtggaaattatcctaattagtcatgaaattttatggagttatataaactcttcttgtttttttaatcatgacactaacttcccttatatgagaggntgatgtaacgttttcaaataattagtaaaattatt

SEQ ID NO: 7482 - DNA, 267 bp, Glycine max
  unsure (1)..(267): unsure at all n locations; Clone ID: 701147202H1
gtgcctcctatgagatgcaaagaaaaatgtggaggagaataagaggtggaggagaaatgcacaacacatagcatcactgcgagatgcaaatagaaacgcagaggatacaacaagacacgacggcgacgagggagaannnctnacctatcaccactgcagagcatgatgctttttgcaccacccagaggagacacacaaaggaaacttaacatcattacaataggggatactaatgtaatgattttaaaaggagaagagacatgtata

SEQ ID NO: 7483 - DNA, 265 bp, Glycine max
  unsure (1)..(265): unsure at all n locations; Clone ID: 701147204H1
ggcacaagtgagtttgttgatccgagataactagaaacagtgtgatgaaaatnaaggtcccttgttttcttcgttgctacaattttggtagcatggcaatgccatgcgncncgatatgttcccctctnccgaatgaacactggctatggtgnccgtaccccggaggtgaaatgccgcaagttggaggcttgctgtggaagcacacaacatctttgggtttgagaccattcctgaagagtgcttgaagcaacaaaggaanacatcc

SEQ ID NO: 7484 - DNA, 236 bp, Glycine max
  unsure (1)..(236): unsure at all n locations; Clone ID: 701147205H1
aatttgnnaataattgctccccatngccattgagtttcattgtaggngctaacattttgttgggtggggcnttctntggagcggccatgaaccccgctgtgacatttgggcntgctgtngtgagctgnacctgnaccaaccatggatctantgggcngggcctntcatcggtggtggaatngctggcnttgtnnacgaggttgtttnatcacccacaccacgancanttcccacca

SEQ ID NO: 7485 - DNA, 269 bp, Glycine max
  unsure (1)..(269): unsure at all n locations; Clone ID: 701147206H1
ggatcgtgagagggacggtagcagagattccgtgagttgcaaaaatgaaaacaattctttctgcagagaccatgaacatcccggacggcgtgagcgtcaaggttaatgccaaggtcatcgaagttgagggcccccgcggaaaattggtgcgagacttcaagcacttgaatctcgattttcagctcatcactgacganaacggtaaaaggnagctgaaggtggaggcctggttcggttctcggaaaacatccgccgccattcgcaccgcc

SEQ ID NO: 7486 - DNA, 263 bp, Glycine max
  unsure (1)..(263): unsure at all n locations; Clone ID: 701147207H1
atcantggtgccccccaggataacaacataatgctgtggaatgctgtcatatttggtactgatgatactccatgggatggaggcacattcaagttgacactcccaatttactgaggactatccaaataaaccacccgactgtacgatttgtgtgtcgcatgttctcatcccaaatatttangctgatggaagtanttgttcgganatattacaaaatcagtggagtcctatttatgatgtggtgctatatcacatctanccac

SEQ ID NO: 7487 - DNA, 266 bp, Glycine max
  unsure (1)..(266): unsure at all n locations; Clone ID: 701147208H1
ggactttgttgatgatggcttgaatgggagcttggagtctattgatggtggttgggttcaggcaaaccaaaatcaaatcaagcttggtactggtactagtactagtactagtatttcacaataatcctctatttctatttctggtttttgcagcataaggcatctctcagtggacaaaaatcagatggcagttcttncaggtgtttttggtgttgttctcattcaattgaagttttaccttgatgatcgcacaataatatgtttta

SEQ ID NO: 7488 - DNA, 239 bp, Glycine max
  unsure (1)..(239): unsure at all n locations; Clone ID: 701147209H1
ggagagtttgcngacctctacatcttcaagtggacatccttgttgatccctcccttgaccctactaatcataaacatcatcggagtcattgtcggtgtctcggatgctataaacaatggatatgattcatggggtcctttgtttgggaggctattttttgccctttgggtcattgtacacctttaccctttcctcaagggtgtcagggaaaacaagaaggtgttcctaccatcatttgg

SEQ ID NO: 7489 - DNA, 271 bp, Glycine max
  unsure (1)..(271): unsure at all n locations; Clone ID: 701147210H1
ggcacaagtgagtttgttgatcgagataactagaaacagtgtgatgaaaatgaaggtcctgttttcttcgttgctacaattttngtagcatggcaatgccatgcgtacgatatgttccctctccgaatgaacactggctatggtgcccgtactccggaggtgaaatgcgcaagttggaggcttgctgtggaagcacacaacatctttggctttgagaccatcctgaagagtgcgttgaagcaacaaaggaatacatccaggcgaacaatat

SEQ ID NO: 7490 - DNA, 266 bp, Glycine max
  Clone ID: 701147211H1
aatccccccatatgggcctttcaattggcacccatctattccaagccaaggcctgcatatcccttgacaaatcccttcttttgagcatcaaggcaaaaaaaaagccttttaaattgagtgttcatattagggttaggtactagttccacatttagcttaacaatgcttcctttattttcattctctactgcaacaatccatggtggcaagtcattgtaagagacaacatgtacaccctttgtggtttgttggacctttctcttagc

SEQ ID NO: 7491 - DNA, 262 bp, Glycine max
  Clone ID: 701147212H1
gaccgtcgcacccattattcattgcatcatcgttcactcgcatcagaatcacaggtttttatttctttttctcctcttaaatataataatattaataatttagaataaatttgtcattctcgtttcttgggattggattttgctgattatatccacctaacccttttgtgattgttttctggtttgtgatcagaacaatcttggatccgattgtgcgttatttgattgtctctgtcaattaatttcatctattgtgatcatg

SEQ ID NO: 7492 - DNA, 280 bp, Glycine max
  Clone ID: 701147213H1
acctagtagcttacacaaccctgcctggggcctatcttcttggctggtcagattcactggtgattggaacattaaatctgcaccaaatacttctataaaacactggattagtgcaattccagccggctacaacagtcagttcccaagctgatttgacaaactcaacctcagcctgggaactgtttcggctcatggcaaggacagatgatattggtaaatcagtgatgttagaacatcctctatgatcatccataagggatagaacatcctctaacagttg

SEQ ID NO: 7493 - DNA, 264 bp, Glycine max
  Clone ID: 701147214H1
gaccacattccaaaacacaaacacatacattgtagtatcacttttgtctcggaatttgttcttttgagttatggcaagcttaaaggttgcatgtgtggttttgatgtgcatggctgtgatgagtgcaccaatgatggtgcaagccgtgtcatgcaatgatgtttctgtgaacctagcaccgtgcctatcttacctgatgcaggtggagatgttccagaatcgtgctgtagcggagtgaggaacatctgggttctgccagcacca

SEQ ID NO: 7494 - DNA, 268 bp, Glycine max
  unsure (1)..(268): unsure at all n locations; Clone ID: 701147215H1
ggaaggaaaagagggaatggcgagagtacgagacaganagcgaaagtgacggtgtgattagcaagtaaagacatggatggtgttaggaactgataaagctaccactctggcttagttagctaagtttggttttggttttggatgagaagaaaagtggaggaatcgacacgagtgagtgagaacaagacagtgcacttgtcatcagtcaacatacacgcatgcattcatcagttatgaggactgaataaaagntcantttctatgacgt

SEQ ID NO: 7495 - DNA, 169 bp, Glycine max
  unsure (1)..(169): unsure at all n locations; Clone ID: 701147216H1
gccttgtagtcgctgccggggttgangcgaggaggccctacgccgttgtccgagntgaatgcttcggttattgctggcatggttgcatattcccctcatcatactgcaattggtngtgtgataaagtgtgcaaatacccaatagacttcggtgacgatggcctgaatca

SEQ ID NO: 7496 - DNA, 268 bp, Glycine max
  unsure (1)..(268): unsure at all n locations; Clone ID: 701147217H1
ggaggtgacatgttcgtgtccattcctagtgctgatgctatttacatgaagtggattctgcatgactggagcgacgagcgctgcatcaagatcttgaagaactgcaggaaggcaataccagagaagacaggaaaagtcatanccgtggatcacgttcttcgacccgaaggcaacgaactcttcacagacgttggcatcgcattcgacatgatgctctcgctcacaacgccggtggcaaagagaggaccgaagagaatggaatggctgt

SEQ ID NO: 7497 - DNA, 267 bp, Glycine max
  Clone ID: 701147218H1
ggcatcaattcaaaatatatcatcaattataagcatgggtttgtggaacacaacgaatgcagtgtcttgccgctttcacaagtttggtgatgaccaaaagaatctggtcttccaaggtgatgccacgtcttcttccaggggcatagaactcacaaagttagacggtggaggaaaaccagtgggtggcagtgtggggagagtgttatactcttctccagtgcacctttgggaaagctctacagtggtcgcaagctttgaaaccgactt

SEQ ID NO: 7498 - DNA, 258 bp, Glycine max
  unsure (1)..(258): unsure at all n locations; Clone ID: 701147219H1
gatattaactgtttttgtcatccaaaacagatcgaataatgagcgtacgntaagtgaacagcttcaccataacagagttcgtaaatgacaaggctaagtttgatggtttcgtgaatgaatggtttgcgaggatagatgagaatggcgatgggaagctttcgcgtgacaaaatccgagggaggttagggatgctcttgcctttcggttcggagttgccgccacagcaagagaacgaagagatattcaaaaggttcgatg

SEQ ID NO: 7499 - DNA, 267 bp, Glycine max
  Clone ID: 701147220H1
ggatacaatacagagtgcgttgttgctccttcgccacaactccctgccaacatgggtatctccagagattctatgcacaagaggcgtgccactggtggcaagaagaaggcctggaggaggaagagaaagtatgagcttggtcgccagcctgctaacactaagctgtcaagcaacaagacagtccaggaggatccgggttagaggtggaaatgtgaagtggagggcactgagattggatactggaaattactcctggggaagtgaagc

SEQ ID NO: 7500 - DNA, 260 bp, Glycine max
  Clone ID: 701147221H1
ggaagcagcggaaacaaacatgtcgtggtgttactgcgctaagcctatgactttgcagttgccgttgcaatcaagagcagcatcatcgttccattcccacgttggaggagtaacagtaacattctcaacactgtctcttcgaccctcttctcctcttgttctgacccacaacctccacttccaacccaaactcaaacgcgcttccacaaccattcgctgctcctctgcgttgactcctcaattgaagtctaccttggatc

SEQ ID NO: 7501 - DNA, 256 bp, Glycine max
  Clone ID: 701147222H1
atcagcggtgccccccaggataacaacataatgctgtggaatgctgtcatatttggtcctgatgatactccatgggatggaggcacgttcaagttgactctccagtttactgaggattatccaaataaaccaccaactgtgcgatttgtgtctcgcatgtttcatccaaatatttatgctgatggaagtatttgtttggatatactacaaaatcagtggagtcctatatatgatgtggctgctatactcacatcta

SEQ ID NO: 7502 - DNA, 259 bp, Glycine max
  unsure (1)..(259): unsure at all n locations; Clone ID: 701147223H1
gggagcattctttcagtcttcttcttctcctcatatattcaaaggtggagccgttgaagacacttgtggggagggagctagcaatagcaatggcaactcgaaggatgcagcgttcaaaggtggagcggttgaagatgctgttgcagcattctttgagtctcttttctctcatnccagttttaatttcgcccatcccgttccctcattcactcccgcccattagtctctctctctcaaccaagttggcaggttttgtggc

SEQ ID NO: 7503 - DNA, 260 bp, Glycine max
  unsure (1)..(260): unsure at all n locations; Clone ID: 701147224H1
aatccccccatatgggcctttcaattggcacccatctattccaagccaaggcctgcatatcccttgacaaatcccttcttttgagcatcaaggcaaaaaaaaagccttttaaattgagtgttcatattagggttaggtaccnattccacatttagcttaacaatgcttcctttattttcattctctactgcaacaatccatggtggcaagtcattgtaagagacaacatgtacacctttgtggtttgttggacctttctc

SEQ ID NO: 7504 - DNA, 262 bp, Glycine max
  unsure (1)..(262): unsure at all n locations; Clone ID: 701147225H1
caagttaaaaaccagcaaaaagcattagaggcaaacgaacgtgctagatctcatatgcagaccttcattgacaagttccgttataatgcgaagagggcatcacttgttcaatctagaatcaaggctttggatcgaatgggccatgtggatgaaattgttaatgatcctgactacaaatttgacttccccactccagatgatagacctggtgcaccaataataagtttcagtgatgcatcatttggttatcctgggggcncca

SEQ ID NO: 7505 - DNA, 266 bp, Glycine max
  Clone ID: 701147228H1
gatagctattcgcagttcccaaattcattttaatcctaattctgcacttcttgatcattcgatttttctcctcaagatgcagatattcgtaaaaactttgaccggcaagaccatcacccttgaggtggaatcctccgacaccattgacaacgtaaaagctaagattcaagacaaggaagggatcccacctgaccagcagagacttatctttgcgggtaaacaacttgaggatggtcgcacccttgccgattacaacatccaaaagg

SEQ ID NO: 7506 - DNA, 278 bp, Glycine max
  unsure (1)..(278): unsure at all n locations; Clone ID: 701147229H1
gaaaaggctttagatatagggaaactttttaattatttttggtatggtgagaagtgcaagaagaggaagaagttgagttgagttgaggttggagctgaaagaaaattgagtgagaattcaatgacacagaatctgaagcataccgtggatttggaatgcagtgataatagcaggccgtcaaagatatcaaaaatcgagtatccgagtgacagtgacattgacgaagaagaagaaggaatgagccaaaaccctaggaatgggaancagnnatnttggtt

SEQ ID NO: 7507 - DNA, 271 bp, Glycine max
  unsure (1)..(271): unsure at all n locations; Clone ID: 701147230H1
ggatgcagagcagaagaagcagcgcaagcacgcacgcattctgtgtgttgtggtttctctgagttccgagtggactcagttacggagcaataatgagtcaggaatcgtttatatatagcttcgtggctcgtgggacgatggtgttggctgagtacacggagttcactggaaacttccctgccattgcagctcagtgtcttcagaagcttccatcttccaacaacaagttcacttacaactgtnntcaccacaccttcaatttcctagttga

SEQ ID NO: 7508 - DNA, 251 bp, Glycine max
  unsure (1)..(251): unsure at all n locations; Clone ID: 701147231H1
gggagcaagtaggaagaagaaagcgagtnacgagggaaacgtttaaaccatatatgttttgttgtttctagctccattctatagcaatggccacgtctgttcttagtcctcctttctttcatcctctgcatcaacttcaattctcgaaatgcccccgcctttcttctaaatcccactttcgccctcgcctcctccgctccatatcccaaagaaccattcgcgctatctccgcagttgccgcagaatcagag

SEQ ID NO: 7509 - DNA, 270 bp, Glycine max
  Clone ID: 701147232H1
gacagcagagcaaattaactacacattcctctgttttgggctcccctgttaaaccaagaaacttccaatggcaccccatgcatcttcttttgctcttgttcttgtcatttttctctttgttgaaatgcacttccacggtgccactgctgactatggcggctggcagggtggtcatgctaccttctatggtggtggtgatgcttctggcacaatgggaggtgcatgtggctatgggaatttgtacagtcagggatatggaaccaacactgc

SEQ ID NO: 7510 - DNA, 237 bp, Glycine max
  unsure (1)..(237): unsure at all n locations; Clone ID: 701147233H1
ggcacaagtgagtatnttgatcgagataactaganaacagtgtgatgaaaatgaaggtccttgttttcttcgttgctacaattttggtagcatggcaatgccatgcgtacgatatgttccctctccgaatgaacactggctatggtgcccgtactccggaggtgaaatgcgcaagttggaggctgctgtggaagcacacaacatctttggcttgagaccatcctgaagagtgcgttg

SEQ ID NO: 7511 - DNA, 261 bp, Glycine max
  unsure (1)..(261): unsure at all n locations; Clone ID: 701147234H1
gacaatgagttgaagacaacattttttcaactctcccttatctctctctgacacacaccagcacgcaaacactgaaccacacacagtgtnnnnnnnnnnnnnnnnnnnnnnnnngagaagatggctttgcaactatgggagacactgaaggaggccatagaagcgtacacggggctctctcccgaacacttcttcancctgctgggncctccatcctgggcctctactacgtcgtttcggggcctcttccctcctcctccg

SEQ ID NO: 7512 - DNA, 257 bp, Glycine max
  Clone ID: 701147235H1
ggattccggcgagaaaaaaacttggacggtgaaattggaaggttttccgggatcccaaggccgaatcttggttcaatttacgaaaagagaagagagaggaacaacaacacccgttgttgaatcttcaagctgaatcaaatcatatagagagagaaagagagagacccggataggaaaatagcgtttagagagagaaaggtgaagtgaggttgtttaaagtttgggtcttggtgggtgaaagggaaagatgacggatg

SEQ ID NO: 7513 - DNA, 262 bp, Glycine max
  unsure (1)..(262): unsure at all n locations; Clone ID: 701147236H1
gaganatcagngggtatcanttctcctgaagaagaggtttacaacccctaattgggttaagcataaggnancaagagangttcatatgcttgttgatctaatngnaatcaagagcttgaaattatagttaacgaagtgatagcagattttgcctcaaggtagacgtnagcaccacaggactgatagtaatggaagtagtgcttcatcaaggagcaatcccttncgggaggagaaantngtttaggtcaaatactcanagggc

SEQ ID NO: 7514 - DNA, 257 bp, Glycine max
  Clone ID: 701147237H1
gacaacacaacagagaaagaaaagagtaagagtatgggaggctcatggtcatggcagctcacatgtgccctcttgctactcttctccgccgtagtcaccgccactgaccacattgtgggtgcgaatcgtggctggaaccctggctttaactacactctttgggccaacaaccacactttctatgttggcgatcttatctcattcaggtaccaaaagaaccaatacaatgtgtttgaggtgaaccaaactgggtatga

SEQ ID NO: 7515 - DNA, 256 bp, Glycine max
  Clone ID: 701147238H1
ggcagcacagcagtgagtgaacccaccgtgcaccacaccacaccacaccacaccaacaaagtagaaatacttgtaacatttgctgcaattacaactccatttgtggacaatttgatttgggtggtgcctttgcgaatagttggttgaacgagctcctttgcaaccatgagttttgtcttccgagggagtaggggagatattgaaagtggcttttcagaatatgttcctgaaagaacctgatgcgggttcatccagc

SEQ ID NO: 7516 - DNA, 223 bp, Glycine max
  Clone ID: 701147240H1
gggatcaaatttcttgtgaattgtttcatcgcgcagtccatgtcccaattgccctagccgcgctaccacacaatactcaatacctttgttaacaacggcgatagttattcttccctccctcgtcgcttgcaacttatctctcattatttctcaaatctaaaaggttgagttttcgttacgatgaaagtgatgaagaaggggaaaagaccctcacatagtgggg

SEQ ID NO: 7517 - DNA, 249 bp, Glycine max
  Clone ID: 701147241H1
ggaaaatgtaactgaaagattacacaatagagccattccttttatgcgtgaaaagtttcacaaggtatccttaattggagatgtcaatcttacaaatcaaaatatagaggaatcatttttagtcagatggttgaaggaaacttctttggagaataaattggacatatgcttggtggtattgaagaagggtgcagaaacttcccaaagtaatgactatttcaaaactggggttgaactgttgattgtgct

SEQ ID NO: 7518 - DNA, 261 bp, Glycine max
  Clone ID: 701147242H1
gattgtaaagcattcttcgcctttctctctcttctttttactctctctctgtctctctctacgctttctcgttcgagatccctcaagggatccactaactgaaggagaaatggggttgacattcaccaagcttttcagccggcttttcgccaagaaggaaatgcgaattctgatggtgggtctcgatgcagctggtaagaccaccatcctgtacaagctcaaacttggagagatcgttaccacaattcccaccattgggtt

SEQ ID NO: 7519 - DNA, 258 bp, Glycine max
  Clone ID: 701147243H1
ggcacaagtgagtttgttgatcgagataactagaaacagtgtgatgaaaatgaaggtccttgttttcttcgttgctacaattttggtagcatggcaatgccatgcgtacgatatgttccctctccgaatgaacactggctatggtgcccgtactccggaggtgaaatgcgcaagttggaggctgctgtggaagcacacaacatctttggcttgagaccatcctgaagagtgcgttgaagcaacaaaggaatacatcca

SEQ ID NO: 7520 - DNA, 197 bp, Glycine max
  unsure (1)..(197): unsure at all n locations; Clone ID: 701147244H1
agggtggttttgatttggagtgcagctatgcgattgtacagagagccaagcagcagttattgtataagcttcgtagatttgagaaactggcggagttggatccagtggaacttgagaaaagaatgccagatcaagaagaggacgaggatgacagtttatggaagaggaagatggtcngatgagaaanaccaagcatc

SEQ ID NO: 7521 - DNA, 277 bp, Glycine max
  unsure (1)..(277): unsure at all n locations; Clone ID: 701147247H1
gatgacgaagaagatgagggaggtgaagaagaggatgaagatggtgctgaggacgaggagaatgaagaggnnnnnnnnnnnnnnnnnnnnnnnncattgcagcccccaaagaaaagaaagaagtgaatttagtttagccaagcctcccgtttgtattgttatgtacgaatttggctctaacttggcatgtttttacttttttgggtactaaacttccatgttctatttagtttataaggaggcttatgtaggacagttttaatgatatctatgttta

SEQ ID NO: 7522 - DNA, 248 bp, Glycine max
  unsure (1)..(248): unsure at all n locations; Clone ID: 701147248H1
ggggttgcgtagttangtggtttgaagtttgaaattgaaccttgaacgaaccccaaaatcgatcgaggcagatcagaattgagggcttagaaatcaggattcagaatgggtcagactgaaagcgcagaagctgtgacggnnactcaaaccacaaccaacgacacttccaatcccatttccctggaatccgtcctccgcagaagctgnagaatatggaagccaacacactgagtctgtggaggaatggg

SEQ ID NO: 7523 - DNA, 257 bp, Glycine max
  unsure (1)..(257): unsure at all n locations; Clone ID: 701147249H1
gaggaaaggggaacccaaaccgaaaccctaaccctaacggagagatggcggagcacttggcatcgatattcgggacggagaaggacagggtgaactgtccgttctacttcaagatcggcgcgtgcannngangcgaccggtgctcccggcttcacaccaagccgacaattagcccaacattggttctgtcgancatgtaccagaggcccgacatgaacatgagcattatcaccaaccccgatcatncacaaccccaa

SEQ ID NO: 7524 - DNA, 237 bp, Glycine max
  unsure (1)..(237): unsure at all n locations; Clone ID: 701147250H1
aaagagacccggaaagggtgggaaccgcntttggaaatccattgggcttggatttaagactcccagggaagccatcgaaggaacctacattgacaagaagtgccccttcactggcaatgtttccatccgtggccgtatcttggctggaacatgtcacagtgctaagatgaacaggactattattgttaggaggaattatctccatttatcaagaagtaccagaggtacgagaaaagg

SEQ ID NO: 7525 - DNA, 253 bp, Glycine max
  unsure (1)..(253): unsure at all n locations; Clone ID: 701147251H1
ggatgaccatgtgatgaatttcacacctttgtattactgggtgacttcatttgtattcaaaattggatattacataaaaaccagagggtggttgccatagaagtttttttttttttnggtttnaatttntnaacaagntgcaatcangggttttgncccttgaagagggaaaggagagantcanccantctaataancctttgagnccagtgnggtnacttgtgttgtttttngcccnangngtcctgtcccc

SEQ ID NO: 7526 - DNA, 255 bp, Glycine max
  Clone ID: 701147252H1
ggtgtgaagaaagaactaaaatggcctaaacaaccacttgaccattacattacatgtttggataatcaatctccttcaaagaacgaccaccgaatttttccccttcaaccttgtacttctacacacgcaatctcgtcccattttttctttttcttctcccgatatcgcgtatccttccattagaatattcctcccttcaactatttttggaatcctagggtttcacatccggatcccaatccgcggttctagctg

SEQ ID NO: 7527 - DNA, 263 bp, Glycine max
  unsure (1)..(263): unsure at all n locations; Clone ID: 701147253H1
gataccaaaaacaaaacacaagccaagtgaaagtgaganaaaataaaaatcaaagagcataatgtcagggatcattcacaagattggggagacccttcatgtgggagggcacaagaaggaggaggagcataagggtgagcaccatgctggagaatacaaaggggagcaccatggtgaacacagtagtgagtacaaaggagagctcatggtgaacacaaagctggagagtaccatggtgagcacaagccagagcacaaagaggg

SEQ ID NO: 7528 - DNA, 235 bp, Glycine max
  unsure (1)..(235): unsure at all n locations; Clone ID: 701147254H1
gacactaaacaagttaaaagaagagcatcactgaactaacaaagcaaccctatgtcgaaggtggtttgtgtcaccggagccagcggcgccatcggatcatgggtggtcctactcctcctccagcgtggttacaccgtccatgccaccgtccaagatatcaaggatgaaaatgagacgaaacatttgggaaggaatggaaggagcaaaganncancnncnttttttngaaatgntc

SEQ ID NO: 7529 - DNA, 254 bp, Glycine max
  unsure (1)..(254): unsure at all n locations; Clone ID: 701147257H1
gatatnttggttggtgaatttttgcaatacacaaatgggaacaaagaggagcttcaattctccggttaatgttttgattgaaaggttgaggaaggttccantgaaagtgaagattttttgtggggtattgtttgctgtttttgctttggtggcctaaagctcaccatnacaaatcactactatttcttcatagcttctgaaacggtccatgttgctgggataatgccctcatatacaagctttttgccctgaag

SEQ ID NO: 7530 - DNA, 263 bp, Glycine max
  Clone ID: 701147258H1
gggcttcaatgggcttgtaagaacccaggctaggtggtgagttgatgatttcgcatcatccaccgaaaccatgccaagggcggcccctccatatagaaataagcaattgtaagcctgtcggactcaagtgttgcgtggtactcaaaaaattgtgtgattttgaacatccatcctgaggggtctgatccatcaaatcttggaacatcaagtttcatcgggaaagataattgtttgtggggttggtgtaggaatggctgaggatg

SEQ ID NO: 7531 - DNA, 268 bp, Glycine max
  unsure (1)..(268): unsure at all n locations; Clone ID: 701147259H1
gactacaacaacatagactagtgcggtgcattccctcgtttaccatgctttcctaagagaaagagaaaagtaaaacccctcactactgatagattttcattcctccgaggaaaaaaaaaacatgtcggnngctttgatcaatggattggccggagctggaggagggatcattgctcagctcatcacatacccacttcaaactgtaaacactcgccaacaaaccgagcgtgatccgaagaaagacacgaggagtcaaggggccctcgaa

SEQ ID NO: 7532 - DNA, 261 bp, Glycine max
  Clone ID: 701147260H1
ggaacaatgagcaattaatcaatcacattaagaaattaacttgctttcatagttttcacatatttgaagtgacatcatgaatatggaggggcagaagaaaaacaagagggtgactgttttggtgggttgcaattaccccaacactagcaatgaattgcatggttgcataaacgatgtgttggcaatgaaggacacgctggagaagcgctttgggtttgatccctctaacatgagcttctcactgatgcacctcactcttct

SEQ ID NO: 7533 - DNA, 262 bp, Glycine max
  Clone ID: 701147261H1
gatgaatggtcagaatgcaaagaccaatttccccacctcaaagaaccaagctgaagctgatgacaacaacaacactgacactttcttatctccaaaagctctttcagaacttctcagcacaaagctgagaaagtactgcaaagaccctgctccttccctcacttgtctgaggctagatgctgataattcccacattggagtgtggcagaaaggggcaggaccacattctggctccaatgggtcatgaggttagagcttggaa

SEQ ID NO: 7534 - DNA, 263 bp, Glycine max
  Clone ID: 701147263H1
agaattgaaggagaaatttgagggtctctgccatgtgatccaaggatgtgttgggtgacaaggtggagaaagttgtggtgtctgatcgtgttgtggattctccttgctgtctcgtgactggtgaatatgggtggacagccaacatggaaaggattatgaaagcacaggcattgagggacagcagcatggctggatacatgtcgagcaagaagaccatggagattaaccctgagaaccccatcatggatgaaccgaggaagcga

SEQ ID NO: 7535 - DNA, 264 bp, Glycine max
  unsure (1)..(264): unsure at all n locations; Clone ID: 701147264H1
catcaattcaaaatatatcatcattataagcatgggtttgtggaacacaacgaatgcagtgtcttgccgctttcacaagtttggtgatgaccaaaagaatctggtcttccaaggtgatgccacgtctngnnccaggggcatagaactcacaaagttagacggtggaggaaaaccagtgggtggcatgtggggagatgttatactcttctccagtgcactttggggaaagctctacagtggtcgnaagtttgaaaccgattcact

SEQ ID NO: 7536 - DNA, 257 bp, Glycine max
  unsure (1)..(257): unsure at all n locations; Clone ID: 701147265H1
gagcagcagaagcaganaaagatagagtgaggtgaagaaagatgtcgaatttgcagttacagcttnactctcctccaccatcatccctcttatcatcttcatcatcaccatcatcactatactcttcttcttctcttaagctattcccaaaccaccctttttccacaaagtcccttcctttcaacaatcagaaacatttntccctaagatgccgccacactgacctcttcgaccagaacaccatagcctccanacca

SEQ ID NO: 7537 - DNA, 240 bp, Glycine max
  Clone ID: 701147266H1
ggcgttgttgcagggcaatgtgattgaggcagatagtgaaatcctaagattgtttagttggaagatggaggcagtggaatcaatagcggttccggaaccggacgaagacgatccttcatcgacgcttctggatctctcgagttaccagctccacgaccttgactcggtcgagttgccacccagcctcaccgagttggacctcaccgcgaatcgcttgtccacgctggacccgcgcatagg

SEQ ID NO: 7538 - DNA, 232 bp, Glycine max
  Clone ID: 701147267H1
gtccatcgttattaataaaatagtctacgtgacacggagggacaaatttatcattaaaatgattgccaacgattgccagcatatagagacatatttgtcataatatttttttaattttttgtcttctcatcccgctgacaaatatgttcctgaaagataaaaatacaaaatttagttttcgaaagtataaaaatgtgacaaatatattcagatgttaataatagattgtgac

SEQ ID NO: 7539 - DNA, 253 bp, Glycine max
  Clone ID: 701147269H1
gggaagacgcgtacgcagatgagttggaaacgactggaaaagcgaaaaaaaagcaccgaaaaacgttgcgccaccttgattactctctcgcggaagacaaaggctcggtaggataggttggtccttgagctgcttgtgtcagcacaaaggagagttgtattgatccctcaaggaacgattcagacatgggtgactcagacaaatgcgggttgtatatcgaaaaaatccttcctgcctagttgtcttaggaaaa

SEQ ID NO: 7540 - DNA, 254 bp, Glycine max
  Clone ID: 701147270H1
gaggaagtcgatgagatgattcgcgaggctgacgttgatggtgatggtcagatcaactatgaggagtttgtcaaagtcatgatggccaagtgaggaccaatcaaccataacaaaaaaaaattgaaaaacacctgaacagaaaaaagacagggcagataagttttgatgagaattatattttcattaggacaatcttcatttggggtcattagtttttgttggtcggcttgtttgcttttatttattggtattgc

SEQ ID NO: 7541 - DNA, 257 bp, Glycine max
  Clone ID: 701147271H1
gatactggggccatcgaaaagagtgcaaaggttggtcttgctgtggccttgaaaccatagaccaagtcgttttgtgagtgatatatgggatgcttctcgtggtggaggataataagttgttgtagactttcactttcccaatgaacatctagtgcttcattttggagctatatcaatttcttcatatcttggtggacttgagtgtaaaatcaataagcacaaaaagaatttgaatttgtactattcaacagatccac

SEQ ID NO: 7542 - DNA, 253 bp, Glycine max
  unsure (1)..(253): unsure at all n locations; Clone ID: 701147272H1
gaccaaaaacaaaacacaagccaagtgaaagtgaganaaaataaaaatcaaagagcataatgtcagggatcattcacaagattggggagacccttcatgtgggagggcacaagaaggaggaggagcataagggtgagcaccatgctggagaatacaaaggggagcaccatggtgaacacagtagtgagtacaaaggagagctcatggtgaacacaaagctggagagtacctggtgagcacaagccagagcaca

SEQ ID NO: 7543 - DNA, 258 bp, Glycine max
  Clone ID: 701147273H1
ggtcctccatttgacacattatgggccacaccagcatccatcaccaatgtcactgtggagttccttcaattccccgcggtggtgacacctcctgcctctaccaaatcctatttccttggtggcgcagggtgagagggttgaatattgaagaagaatttgtaaagttcacgggaataggtgtttatttggaagacaaggccgtgtcatcactcggtgccaaatggaagggcaaaagtgcagctgaattgctggactcat

SEQ ID NO: 7544 - DNA, 232 bp, Glycine max
  Clone ID: 701147274H1
ggcagacacgttacttgattcaaaagtagtacaagattcttgggctcatagggttgacactccaacctccctagtcggttttcgaaataaccgcatccacggcgaccgaaccaaaagcagccaccgatgacgtcaagatcgatctcttcgaagacgatgatgagtttgaagagtttgaaatcaatgaagagtgggatgacaaggaggaaggaaaagaagtgactcagcatgg

SEQ ID NO: 7545 - DNA, 258 bp, Glycine max
  unsure (1)..(258): unsure at all n locations; Clone ID: 701147276H1
catggtaacaatattcaacattattgctcgtatgagtaatcatccaatggtcacatgaccttgttttcattaagttatatcttgcgtccaatgcgttgttataaacaagtgtccaatcatttgtgaaaaccagtgtgtacacactatgttcttctataacgtccaaaggacttattcacttgcacatctttttatattatgcataagtgnatgtctaatcttgtactggattcagttagctaaaaagagaagtgccgt

SEQ ID NO: 7546 - DNA, 260 bp, Glycine max
  Clone ID: 701147278H1
tgcgattgttaacatgggttctggagctgctattgttattccttcggatcctctttatgctgtttatgctgccaccaaagcgtacatcgatcagttttcgagatgtctctatgttgaatacaagaggagtggaattgacgttcagtgtcaggttccattatatgtggcaaccaagatggcatcaatcaggaaatcttcattctttgttccatcaacagatggctatgccaaagcaggtgtgaaatggataggctatgagc

SEQ ID NO: 7547 - DNA, 266 bp, Glycine max
  unsure (1)..(266): unsure at all n locations; Clone ID: 701147279H1
gggacgtgggggttcttcacttntcttcttcaattcattctagttctggattccgactcgccgcattgactcggtccgggttggggtcgactcagttcggtttttcattctctcgcgaatctaatctataggaaaagctaagggcacatcacaatgaaggcattgattctggttggggggtttggaacaaggctgaggccactgacactcagttttcctaagcctcttgttgatttgctaacaaacctatgattctgcatcagata

SEQ ID NO: 7548 - DNA, 264 bp, Glycine max
  Clone ID: 701147280H1
ggaagagaagttgatgtcaacagcagaagctcctcctccgttccaagaagcagcgcgatgcgttgtgtgcaattgcagtttcaacaccttcagaagaaggcatcactgtcgatcctgtgggagaacattgtgcaatgaacattcatcagatcaaatggctttaccacaatttggcatttactcaaatgtccgagtatgtgctgattgtttcaacaactcacggtctgggaaggatgaaccacagacttcttcagatggagtaaa

SEQ ID NO: 7549 - DNA, 251 bp, Glycine max
  Clone ID: 701147283H1
gaggcctaaacctctatttggaccatttggcccttgaagcatttgatttcgttgcatattggttaagacatcatttgaattctaatttctattaaccaaagcaggatttgattgttctctatcattcattattcgagctaggatattaacattttttttcaggattattattattaataggttcctcttgtataggtacttcctgaattacatgtctattcccaagttggtttctaggaatgaccaaagta

SEQ ID NO: 7550 - DNA, 253 bp, Glycine max
  unsure (1)..(253): unsure at all n locations; Clone ID: 701147284H1
ggtgtcgtgtcgtgtcttcttctctaaaataaaaaaccctaacttctgaacctttcaccgcatcgccaccgattccctatctccactaatcaaagaaaagaaaatgagtagacgctcgagcagaactgtctacgctgggaatctacccggtgatatccgtgaaagagaagttgaagatttgtttctgaagtacggacacataacacacatcgacctaagagccccccngnaaaccacctggttatgcattgta

SEQ ID NO: 7551 - DNA, 245 bp, Glycine max
  Clone ID: 701147285H1
gaagtgaagcagattttgcctcaaggtagacgtaagcaccacaggactgatagtaatggaagtagtgcttcatcaaggagcaatcccttgcgggaggagaaactggttaggtcaaatactcaaagggcaaggagccagcttttggaaacgcatcttgcaaaattgtttaagcagaaagttgaaattttcacaaaagtagaatatacacaggagtctgttgttacaactttagttaaattgggccc

SEQ ID NO: 7552 - DNA, 255 bp, Glycine max
  Clone ID: 701147287H1
atcagcggtgccccccaggataacaacataatgctgtggaatgctgtcatatttggtcctgatgatactccatgggatggaggcacgttcaagttgactctccagtttactgaggattatccaaataaaccaccaactgtgcgatttgtgtctcgcatgtttcatccaaatatttatgctgatggaagtatttgtttggatatactacaaaatcagtggagtcctatatatgatgtggctgctatactcacatct

SEQ ID NO: 7553 - DNA, 218 bp, Glycine max
  unsure (1)..(218): unsure at all n locations; Clone ID: 701147288H1
agggtggttttgatttggagtgcagctatgcgattgtacagagagccaagcagcagttattgtataagcttcgtagatttgagaaactggcggagttngatccagtggaacttgagaagngaatgcaggatcaagaagaggacgaggatgacacatttatggaagaggaagatggtcatgatgagaaaaaccaagcatcatgcaaagaaaatgacttt

SEQ ID NO: 7554 - DNA, 262 bp, Glycine max
  Clone ID: 701147290H1
ggagcaatagcaagacagcaatagttctggtgatctcgtttcttacagcgtctcttcccccctttctctctcctctttatctctctctttccattgcttccttcccacaaagcaaacgccgcgcgaggtccaattttcggcatcggccatgactgtgatgactctgctcccattgaccagcagcaggaggacgaggagatgcttgtcccgcacaggatttggctgagaataatcaccaacctatggaagttgtggctcaacc

SEQ ID NO: 7555 - DNA, 257 bp, Glycine max
  Clone ID: 701147291H1
gacccacagggaggcgaacagagaaactcagagacccgaaggcagatttcaagatgaagttcaacattgcgaatcccaccaccggttgtcagaagaagctggagatcgatgatgacctgaagctgcgagcattttgggacaagaggatctcacaagaggttgttggtgatgctctgggtgaggaattcaaaggttatgtcttcaaaattactggaggttgcgacaagcaaggatttccaatgaagcaaggagtgttg

SEQ ID NO: 7556 - DNA, 238 bp, Glycine max
  unsure (1)..(238): unsure at all n locations; Clone ID: 701147292H1
ggaagtgtatttggnnactgacctatcttggtagnanatttgaagtttaaaccttcaaattaatcaaaccattttaatttgcctatagattctgagtcactgctgctatggcgctacgcgtacttcttgtgttggggatgttgctgatgttgtgcctgttaagtttcatctgatccaaagatagaagaagaaatactgggaagcagaagaagaactgcagtttcccgataacgagccc

SEQ ID NO: 7557 - DNA, 247 bp, Glycine max
  unsure (1)..(247): unsure at all n locations; Clone ID: 701147293H1
ggccgaatgtgtctctccgcagcagccacacttcttcgccgtttcagctgaagagccatccgcaggtggttttcatcgctttagagttttgttttcttctaattcgttgcgtttttggnttctactcgtaaatcatagttgtgtttgggattcacttaaagatgttcaaattatcgccgtttgtggctttgtgtttctttttggttttgaaagatgtgactgagacacgttattgttttgtgtatac

SEQ ID NO: 7558 - DNA, 260 bp, Glycine max
  unsure (1)..(260): unsure at all n locations; Clone ID: 701147294H1
ggtggcatgacttttttctccaggtgacacgtgtgacatacaacgcacacatttgcgttagatcaacgtgatgattctgaagatgaaattgaagttcttgcttaaaagaaatttgaaatttgaaaaaccctagttagatttcagaattggaagaaaaaacagcatggggtttagagtgcgaaatctgaatcccgtattccgaacttggcataacaaggcttcgtcttcaaatntcnctcctccggtgctggaatcactta

SEQ ID NO: 7559 - DNA, 261 bp, Glycine max
  Clone ID: 701147295H1
ggcatcaattcaaaatatatcatcaattataagcatgggtttgtggaacacaacgaatgcagtgtcttgccgctttcacaagtttggtgatgaccaaaagaatctggtcttccaaggtgatgccacgtcttcttccaggggcatagaactcacaaagttagacggtggaggaaaaccagtgggtggcagtgtggggagagtgttatactcttctccagtggcacctttgggaaagctctacagtggtcgcaagctttgaaa

SEQ ID NO: 7560 - DNA, 263 bp, Glycine max
  Clone ID: 701147296H1
gatgggaacaatactagttgtgaaggtttctgcagagtcagcgagcgagttcggggaattagtagctgatccaaccactaatgaactattgcattacacagagaaacctgaaacttttgtaagtgatcgaataaactgcggtgtgtacatatttacacccaatatctttacagccattgagggtgtttctactcaacggaaagacagagctaatctaagacgtgtctccagctttgaagcaatgcagccagacacaaggagtc

SEQ ID NO: 7561 - DNA, 269 bp, Glycine max
  Clone ID: 701147301H1
catgcattgtgtaacgtgctatccgctgcaacaactcacttttggttcctgcttgatgaactatacggaaacaagtattcactatggtgcagatatgttggttactcagcatcatagatgctttacttttgacacatgctagaagaacttgtaatatcttcattaataccacttcttccgatccaggatcagtcacctcaaacctgcaactcgtgacagcatcaactaccagtgcatggcatccccaacattaacagtggttttgatcc

SEQ ID NO: 7562 - DNA, 264 bp, Glycine max
  unsure (1)..(264): unsure at all n locations; Clone ID: 701147302H1
ggcacccaaaggtgcaaaaatattaagatgataaacattggagcacttgttgtactctttgcatttctcttcctcagttgtgcctatgcacaagacacaacaacccttgtgcctgcaatcataacttttggtgactcagccgtggatgtagggaataatgactatcttcccacccttttcaaggctgattaccctccttatgggagggactttgctaaccaccaacctactgggaggttttnccaatggcaaattagctactga

SEQ ID NO: 7563 - DNA, 255 bp, Glycine max
  unsure (1)..(255): unsure at all n locations; Clone ID: 701147304H1
gggctgagaaaatagcgactcagaaacacgctcgtcttcacgatcctgcgattccgctctccaacgagtctgcgcaggatgaaanatcgggaggctagccgtcggtgaagaatcgcgcgattcgccaggnaatcgcgattcaagcacgattcatccccgatacagagattcaaccacaattcaggaaaaaaaaaaaacgagacaaactccgtttcgtatcantagaagnggaatcgtatngattccggaatnggg

SEQ ID NO: 7564 - DNA, 259 bp, Glycine max
  Clone ID: 701147306H1
ggggaaggtgagaagcgaagatgagcagcgacacaaaagccaacagcaacgttggagggggatccagatcgaggttaaatcactacctctatagcggtgacaagaaacatgtcttcgttggtttaactctcatcaccgctgtctttaccatctcatggttccttatgaacagagggaccaaacaccaatctcatcaagattacttggaaaaagctgataaagcaaggagccaaagactctcatccagttctgcttctgc

SEQ ID NO: 7565 - DNA, 99 bp, Glycine max
  unsure (1)..(99): unsure at all n locations; Clone ID: 701147307H1
ggttgttgtgtgtaantgtgaagagaagagaatggtagtanggtnaatntgccncancnnattgtcaccaattgacgnnagnacctaaccatgattcaa

SEQ ID NO: 7566 - DNA, 266 bp, Glycine max
  Clone ID: 701147308H1
gggtgcgggttaaaatgcaacgataactgttgaaatagaaaaaagaaaaacagtgttttggtgtagctgagaaaacaggtttaaatcacctctgaatttctgctatggcttcaaccagatcagtctttcttcttcttttcattcaattgtgcttctcacttctacccttgtcattcgctcaatcccccgccaccgggtctaccgaaggttacaccatttatggtcgagtgaagatccccagtgtgggaacaaaagattacattctt

SEQ ID NO: 7567 - DNA, 194 bp, Glycine max
  unsure (1)..(194): unsure at all n locations; Clone ID: 701147309H1
tcgcaacttcttacaatgctctcttccttggtggggccagaacactcctcccaantcatgnagacaanntttcccgaattggggntgacaatanaggnnttcttggnaantagttggntcaaatctgtgcnctatatngcagggnttncaagtganacccccccnnaagttctgctcnnaggggagtcnncatt

SEQ ID NO: 7568 - DNA, 245 bp, Glycine max
  unsure (1)..(245): unsure at all n locations; Clone ID: 701147310H1
gacacttactagtagtaagcatggagtcctncaaagatctgtgcttacctcttcctctgcatgatctttctctcttccgccactcccattctcggttgtggctactgtggcaaaccccccaaaaagcacaagcctggtaaaacaccaaagacacccaaaacacccgttgttaagccaccagtcaccatccctcccattaatgttcctcccgttgttcttccaccaatagtgaagcccccaggtat

SEQ ID NO: 7569 - DNA, 271 bp, Glycine max
  unsure (1)..(271): unsure at all n locations; Clone ID: 701147311H1
ggttcaaagcacgccgtgtttcgctgtctctcccatcctttcgcattctcaatacccttttgatttgtgaaaggaaagcaaacatggttgaaccaggtccaacaccctacaatcatggacaangntacnggnnanctcccatctncgntcntggtccttnatctggtattagangtnatganggagnctacngngacccagctatgtaccanagancctcttttgggaatactcgaatgcngcattgcagtttcctgtgatgcccacatgc

SEQ ID NO: 7570 - DNA, 259 bp, Glycine max
  unsure (1)..(259): unsure at all n locations; Clone ID: 701147313H1
tggcaagaagaaagccgctgatccctttgccaagaaggactggtacgatatcaaggccccttccgtctttcaggtcaagaatgttggcaaaaccctcgtctctcgtacccagggaaccaagattgcttctgaaggnctcaaacatagagtgtttgangtctcattggctgatctccaaggagatgaagaccatgccttcaagaagattcgtttgagagctgaggatgttcaagggaaaaatgttctgacaaacttttgg

SEQ ID NO: 7571 - DNA, 259 bp, Glycine max
  Clone ID: 701147314H1
gacaacatatccattttatttacaacaacaatggcttctgtgcctcaaccaaaaatctcccttctaaccttattcttcttctcgtccttcaccatcattgcgcatgcaattgttcctcaaaacgaaaccttcaaatttgagaactcaggtgaacttggaccctacatcgttgagtacggtgcagattacagaatgataagcatcttcaactctccattccaagttggtttctacaacaccaccccaaatgccttcactc

SEQ ID NO: 7572 - DNA, 253 bp, Glycine max
  unsure (1)..(253): unsure at all n locations; Clone ID: 701147315H1
gagaaagttgaggttgttgaaacagcacatgctgaggaaaagaaggggttcctcgancaagattaaggagaagctaccagggcacaagaagacagaggaggccacagctactactcctcctccaccaccacctgttgcatcattggagcatggtgaaggtgctcatcatgaaggagaggccaaggagaagaaaggtatattagaaaagataaaagagaagcttcctggttatncactnccaagacagaggagg

SEQ ID NO: 7573 - DNA, 229 bp, Glycine max
  unsure (1)..(229): unsure at all n locations; Clone ID: 701147318H1
gttctcctatggtacttgtaaacgttctcgaatantctccttgcacttcttagcacttctattatatcctagctctgctaacttcctgaatttataattaattcattcagttcaatcactactatattattacaccaaaaaatgaaagactatatatatacaatacatttatgaattaagtgtaacattagtattactaattaaggaatgatagaaggggtttcagttg

SEQ ID NO: 7574 - DNA, 252 bp, Glycine max
  Clone ID: 701147319H1
ggcatctgactcctatagtttcctctgctaattccatatccccgttttccttcactcttgaaccccgattcatttccaccagcacaagaagcatggctgcaatatcaataccttctcacatgaaagcttggacatactctgagtatggaaaatccaaggaagttctcaagtttaatcagagtgtggctttgcctgaggtgaaggaagaccaggtcctcatccaaggtcgctgctgcttcccttaaccccatt

SEQ ID NO: 7575 - DNA, 257 bp, Glycine max
  Clone ID: 701147320H1
gggatttgagatggttcaaggaccagtggagaatggtactgagggaggaaaacctgttttgaatgagaaggagaatggcaagctggaaaaagatgtgggagctgctgcggatgccatcaaatttgggacacatggagaggaatctgcaaaaaagaaagggaatgatgtttcagacgtgaatgccccgaaagatgctgctgaagattggcctgcacctaagcagattcattctttttattttgtcaggtggcggccta

SEQ ID NO: 7576 - DNA, 254 bp, Glycine max
  unsure (1)..(254): unsure at all n locations; Clone ID: 701147321H1
ggatcaagtttatggaaaaatgattcaaaatgcttagcatggctagacaaatgggaacctaactcagtcatatatgttaattatggaagtataacggtgatgacagagcatcacttgaaagaatttgctnagggactagcaaatagcaagcaacatttcttatggataataaggccagatgtagtaatgggtgaatctatatctttgccacaagagttctttgatgcgatcaaggacaggggatatataacaag

SEQ ID NO: 7577 - DNA, 259 bp, Glycine max
  Clone ID: 701147322H1
gacactaaacaagttaaaagaagagcatcactgaactaacaaagcaaccctatgtcgaaggtggtttgtgtcaccggagccagcggcgccatcggatcatgggtggtcctactcctcctccagcgtggttacaccgtccatgccaccgtccaagatatcaaggatgaaaatgagacgaaacatttggaggaaatggaaggagcaaagagtcatctccatttttttgaaatggatcttcttgacatcgactccattgccg

SEQ ID NO: 7578 - DNA, 256 bp, Glycine max
  Clone ID: 701147323H1
ggcacagcaaaacaattttcaaactcaattaccattccataacctaaatctcctctttgtttccgagtcagagagcaatggcacgtaccaagcaaaccgctcgcaagtccaccggcggaaaggcgccgaggaagcaattggcgactaaagccgctcgcaagtccagctccggccaccggcggagtgaagaagccccaccgcttcaggcccggaacggtggctctgagggagatcagaaagtaccagaagagcactg

SEQ ID NO: 7579 - DNA, 265 bp, Glycine max
  Clone ID: 701147324H1
ggtagggagttggatctgtggtttggttgcgatgcggtgtgttgcgaatcactgtccaattcccgatcgcttgatccagacagtgaatcagaatcagaatcagaatcagaatcagagagaaacgatgagggcagtaagtgcgttaatggtggctcggatgttgacgcgggaccactcgctccctgtccttggcaacgaaagcatacccttcggatcggtgtggtggttcgcctaatgcccggcgtctcctgtttccctcgtcctc

SEQ ID NO: 7580 - DNA, 259 bp, Glycine max
  unsure (1)..(259): unsure at all n locations; Clone ID: 701147325H1
gaggcctccaaatattttcctttttagctttgattagagtggcctagttgttgtttttctcaatgagaagggcttccactatgcattgcgcactttggcgcttctgtgttcccttgttgctacttgttagcttcagttatgcacctttgttttggcgacaactgaaatttcagggaatgaagtgagcnctggatggaaaggttttaaatgaagagttagcaaaacctgaatcctacaaggncatgatgaagaagcaaat

SEQ ID NO: 7581 - DNA, 265 bp, Glycine max
  unsure (1)..(265): unsure at all n locations; Clone ID: 701147326H1
gaagctgagaaacctgaaggatgggacaatgaacctgaggagatagatgatccagaggcaacaaaaccagaagattgggacgatgaggaggatggtgaatgggaagccccnaagattgagaacccaaaatgtgnagcagcccccggttgtggtgagtggaagaggccaatncaagaggaatccagcttacaaaggaaaatggcatgccccactaattgaaaatcctgcttataagggaatttggaagcctcaggacattccaaac

SEQ ID NO: 7582 - DNA, 253 bp, Glycine max
  Clone ID: 701147327H1
ggcttcgaagatgggatctcagactcagcagcttcatcacctctctctttgattctcttcaaccttcagtaccactttaacaaactggtgccttttcttagttgcgctgcttttaaaaagtctgatgggttcaagattcccatctcatcagctcagtaatggcctgtatgtatcaggccgccctgaacagccaaaagaaaagactccgacaatgagttcagttgccatgccctataccggtggtgacatcaag

SEQ ID NO: 7583 - DNA, 233 bp, Glycine max
  Clone ID: 701147328H1
gatgtaggagatttacgggatgaatggcctcaaaacgctttgtcgtttgtggttattgagtcctgagtgatcttgtcatccgacctttgccatgacaggtgcgcttgcatggcaggtcaaaaaatgttaataaaaaaagttttattggtttggggagagatcgcacgggggttgcccggggtctcttcctcttgtgtggtgtggtgtttgctgtgctctccttttcgttatgc

SEQ ID NO: 7584 - DNA, 256 bp, Glycine max
  Clone ID: 701147329H1
ggatcaagtttatggaaaaatgattcaaaatgcttagcatggctagacaaatgggaacctaactcagtcatatatgttaattatggaagtataacggtgatgacagagcatcacttgaaagaatttgcttggggactagcaaatagcaagcaacatttcttatggataataaggccagatgtagtaatgggtgaatctatatctttgccacaagagttctttgatgcgatcaaggacaggggatatataacaagtt

SEQ ID NO: 7585 - DNA, 256 bp, Glycine max
  Clone ID: 701147330H1
gacagcacagcactctttgcaacacaacaaaaaaagacaacacagagagaagcgtcttaataaacgctcttctctgaaaaacctgatttcttctcttcttctcttctctttcgtttcgatcttcgatctctgaaaatgagagagtgcatttcaatccacatcggtcaggccggtattcaggtcggaaacgcctgctgggagctctactgcctcgaacacggcattcagcctgatgggcagatgccaagtgataaga

SEQ ID NO: 7586 - DNA, 235 bp, Glycine max
  unsure (1)..(235): unsure at all n locations; Clone ID: 701147331H1
cgtgacaatctttctangctagatcagtgcctcatnnttctttcagttttcctgcttcttctcttcttcaactggttttgagattgccattttcttatcttgtttagtttagcttgtttggttgagaggnattaattattttgtataaaacaatgaaggagagtgtaggaaaccctttgcgtcttcaatctgtgaatcatatctccctcatatgcagatcagtggaacaatcaat

SEQ ID NO: 7587 - DNA, 257 bp, Glycine max
  Clone ID: 701147332H1
aaagagacccggaaagggtgggaaccgcttttggaaatccattgggcttggatttaagactcccagggaagccatcgaaggaacctacattgacaagaagtgccccttcactggcaatgtttccatccgtggccgtatcttggctggaacatgtcacagtgctaagatgaacaggactattattgttaggaggaattatctccattttatcaagaagtaccagaggtacgagaaaaggcattccaacattcctgctc

SEQ ID NO: 7588 - DNA, 231 bp, Glycine max
  unsure (1)..(231): unsure at all n locations; Clone ID: 701147333H1
ggaaatgtcttgtttannagctagtaaatatgcaagagcttccaaaagatatgaaaaggccgtgaagtacatagaatatgattcctcctttggtgaggaggagaaaaagcaggccaagaccttgaaggttgcctgcaatctgaacaatgctgcttgcaagttgaagttaaaagactacaaagaagcagagaaattgtgtactaaggtgttggaccttgagagtacaaatgt

SEQ ID NO: 7589 - DNA, 255 bp, Glycine max
  unsure (1)..(255): unsure at all n locations; Clone ID: 701147334H1
ggccgctctctgagaaaaacagatagtgtgggaganagaagagcggaagagaaaatgacgaccaggttcaaagaanaaacaggaagaagagaggtcacgtcagcgccgganacggccgtatcggaaagcncngcaagcatcccggaggtcgcggtaacgcncggtngcatgacatcnccaccgtatccctcttngacaagtaccatcctggtttcttcgggnaggtaggcttncgctanttccacaaacttcgca

SEQ ID NO: 7590 - DNA, 150 bp, Glycine max
  unsure (1)..(150): unsure at all n locations; Clone ID: 701147335H1
ggnttaccatatttgacanagtcatcatttctttncctanctatggcnttcgaatnacnatgaaggnnaagtanccntggccatatgggaaagttnttgtgaanctagnactcaggatcgttnggtttctgaaggnccnatgtttcaang

SEQ ID NO: 7591 - DNA, 250 bp, Glycine max
  unsure (1)..(250): unsure at all n locations; Clone ID: 701147338H1
tttatcagcaccaattatgccaatttcaatgttttttcctgagatctgtccctcaaacccttccttcagagtcaacattgctgtgtggactgcatcatcaagctccatatcatctgtgtacctcttctcaagaaacgtctttgcattagaaacatttttccccanagcagaagctttccaagaaaaatatgaacctgatggatccacctgatataattgtggcccattatcatcaaacccggcaactagc

SEQ ID NO: 7592 - DNA, 76 bp, Glycine max
  Clone ID: 701147339H1
caggaagggcagtggatagagccactgctgaacatctctttgaggttatcaacttcaagggaagatgtgttgagga

SEQ ID NO: 7593 - DNA, 254 bp, Glycine max
  unsure (1)..(254): unsure at all n locations; Clone ID: 701147340H1
gagagtggtggggtgtgcagaagagcgtcgcagttgtaaccctaatncagaagaagcgcagttcaagcgagtgacagccaccagccatgggtcgtatgcacagccgcggtaagggtatatcctcttctgctttgccctacnaaaggacacctcctagctggctcaagatctcttcgcaagatgtcgaagaaaatatctgcaagtttgcgaagaaaggtttgaccccgtctcagattggtgtcattctcagggat

SEQ ID NO: 7594 - DNA, 268 bp, Glycine max
  unsure (1)..(268): unsure at all n locations; Clone ID: 701147341H1
gggagatgagtggatgaattaattgatgaatgaaattcaaatactaattgttgctgtcacaattcacaagagattggattttggaatggaaagggtgttgtcagtagatgagatatcggagcaatactgggtggctgnnnnnnnnnnnnnnnnnnnnnnnnnnnnnnnnntcaagtcaaagatgaaccggagcgaatccgaatgggcctttcagcagttcctacagcaggaagctgcttcttcttcatctaattctgatcatgatgat

SEQ ID NO: 7595 - DNA, 257 bp, Glycine max
  unsure (1)..(257): unsure at all n locations; Clone ID: 701147342H1
atatatattttatcttatctaaaatctttctaactaaattaacatagttaaatagttagactcaaaataacacttttatatttcaagagacaaaaatagaataatttttttaaagaaacaaaaataaaatttgaaaattttaacgaaaataatatatttttctctactttttctattnnagataaaatgtacacaactgatttgatatgtaatatacaaatcaagaatgcataaaattaggaatgaaaaatgatgta

SEQ ID NO: 7596 - DNA, 252 bp, Glycine max
  unsure (1)..(252): unsure at all n locations; Clone ID: 701147343H1
gattgacccgtattggacagtgatacctgtgatgcttgttcattactattcaacttcaccctttggcacagtatcantggtggaggtcgaggatcgtaacgttgttgacttgggcgtggagtgttaggctgatccacaactacttcaggcgagaaaagtggcagtggggtgccagggaggattggcgtttcactgatttgagccatcgctatggaaggcattggtggtgggcttctttcttcgccatctacg

SEQ ID NO: 7597 - DNA, 254 bp, Glycine max
  Clone ID: 701147345H1
gggggcttacggaaaggtaaaatatattaggacttaccctccaaagatttgtcttccttgttgcagaagaaccgtgctttctaatcttgtaattttctgcgttgcttcgtggttaattcttcgtgttcttgtgatctttctgttggagtatttacaacactcctttgtaagtttaactaaagaggctaattaattttcaattggaccacagcagatggctgaggagggtcacagggttactctaaatgtttatg

SEQ ID NO: 7598 - DNA, 253 bp, Glycine max
  Clone ID: 701147346H1
ggcatcaattcaaaatatatcatcaattataagcatgggtttgtggaacacaacgaatgcagtgtcttgccgctttcacaagtttggtgatgaccaaaagaatctggtcttccaaggtgatgccacgtcttcttccaggggcatagaactcacaaagttagacggtggaggaaaaccagtgggtggcagtgtggggagagtgttatactcttctccagtgcacctttgggaaagctctacagtggtcgcaagc

SEQ ID NO: 7599 - DNA, 268 bp, Glycine max
  Clone ID: 701147347H1
gatcaacttctaccgttctacatagcatctcctttaccaccattctagatatcagagaactctgcagctctcttaggtttttaaaaaacaccacgcaaacagcaagatggccacttccgacagtaacatgctactaaattatgttccagtttatgtgatgctcccactcgtcgttgtcaatgttgacaatgtttttgaagacccagatggccttaaagaacagctcttgcagcttcgagctgcgggtgttgacggggttatggttgat

SEQ ID NO: 7600 - DNA, 248 bp, Glycine max
  Clone ID: 701147349H1
gggctcaagctttatttcacgtagctgactttaccgtcagctcaattggaatagtttttcgctatgttcgcaggcaagtgagacgatccatcaatgcccttatctgcttcgaaagaaccggtgtcatccaaacatggtgaagaggtggcaactggatcaataatagctgaaacttctactgtacagggttcggcttgcccaactgttccaagcttgagatctattttagaatatgcttaacacaacac

SEQ ID NO: 7601 - DNA, 248 bp, Glycine max
  unsure (1)..(248): unsure at all n locations; Clone ID: 701147350H1
accccacttattttgctagattttctttatctttactgcattgttcaacttcacaatttgtgactttcttnnttcnagcttcatccacgggtttgattatgaactcatggaaacactctttggatattcaagtaacaatcaaagccatgaaaaaaataggtgtctttcaactacagccaagtccaactccaacacaccaactcaattattcattctggaccctcgaaaatcccaaaacattgcaactg

SEQ ID NO: 7602 - DNA, 246 bp, Glycine max
  Clone ID: 701147351H1
gtggtaaaaaattattaaaacaaacgcttaattagtctgtttactccaagcgcatgtatcaaggaaatgttcttctttttgtagttttcaaataaggttcctttgctattgtaggccctagtcactatcttctggtctcattaaatcgacggcactgaatggctccaaacatagtcaaagacaagcatccatacaagacagaaaaaagttatatataaaagtgcccacactttgtacttttgcata

SEQ ID NO: 7603 - DNA, 253 bp, Glycine max
  Clone ID: 701147354H1
ggcacaagtttgttgagatagctagaagcaataagatgaaaatgaaagtgcttgttttgtttgttgctacagttttggtagcatatgaatgccatggctcagactaccagaagttccctctccaaatgaaaactgggtttggtgggcaatacagcaatgaggtggcatgtgccagttggaggcttggcgtggaagcaaacaacgtagtccaagtggcaaactgttcctgcagcttgcggagagtacatagctg

SEQ ID NO: 7604 - DNA, 258 bp, Glycine max
  Clone ID: 701147356H1
atgcacaagtttgttgagatagctagaagcaataagatgaaaatgaaagtgcttgttttgtttgttgctacagttttggtagcatatgaatgccatggctcagactaccagaagttccctctccaaatgaaaactgggtttggtgggcaatacagcaatgaggtggcatgtgccagttggaggctggcgtggaagcaaacaacgtagtcaagtggcaaactgttcctgcagcttgcggagagtacatagctgactacg

SEQ ID NO: 7605 - DNA, 245 bp, Glycine max
  unsure (1)..(245): unsure at all n locations; Clone ID: 701147357H1
gacagaacaannctgcaatagaganaanngccagataganaaaaagagcgacttttgagttcaaaagatgactaacttcccattgatcaacttggagaagctcagtggtgaggnaagaaacgataccatggaaaaaattaaagatgcttgtgaaaactggggattctttgagctggtgaatcatggcattcctcatgacatattggacactgtggagaggttgaccaaagagcactnacaggaaa

SEQ ID NO: 7606 - DNA, 249 bp, Glycine max
  unsure (1)..(249): unsure at all n locations; Clone ID: 701147359H1
ggtgatagaaaaaggaggnacgcagaccgaggcgtttccagtttgaaaggtgangaggaagtttaggatttntggtggtagcnattaatttacgtttatgaatggttgggaactttagttcttttgatttgaggtatttttgtttgatgatgctctgtgagtgtgattggttgctcatgcgataacactttcccttctgcttcagtggattgctggaaattgttcttannganttacatcgactgactg

SEQ ID NO: 7607 - DNA, 261 bp, Glycine max
  unsure (1)..(261): unsure at all n locations; Clone ID: 701147360H1
ggatgaactagtgtgacattagagangaaccaatttaaaagaagagcagcggagctaaagagggganaggagagaggagaagagaagctaaaganagaaaggagatgggagtggagaagcagttgttgaggtctggcaccggtccgaagccaattcccggtcagaacgtaaccgttcactgcactggtttcgggaagaacggtgacctttctcagaaattctggagcacaaaggatcctggccagaacccattcactttca

SEQ ID NO: 7608 - DNA, 250 bp, Glycine max
  unsure (1)..(250): unsure at all n locations; Clone ID: 701147361H1
tccattatagtttatatgtctgaagggaggattatgcagtatagggccttgttgtggctaattggttttgagatgngnccaaaaactttagtatctgcttttacatgttccaatttataggcttcctggatattgtcaagagaaggcagaccagggattggatttcctgccaatgattcatagacaaagaacccgccaaatttttgacttagaagctggcttattaatcctctttctccaacagaataag

SEQ ID NO: 7609 - DNA, 254 bp, Glycine max
  unsure (1)..(254): unsure at all n locations; Clone ID: 701147362H1
gaagaaagaagcaccacaaattaattctcgtttcccattcccatccccatgccaactattttgcataggattttccttctttacaacctcgtacactcattcctcctctgtctggtccccaagaaggtgcgtnccttcctccccccttcttggttccaaaccaaaaccatcannnnnnnnnnnnnnnnnnnnnnnnnnnnnnncagtgcccgcatcatcangagaacaacaatgggaccccaacgagctgaagc

SEQ ID NO: 7610 - DNA, 253 bp, Glycine max
  unsure (1)..(253): unsure at all n locations; Clone ID: 701147365H1
gatattttgcaacantttctcctcacttgtngcntaacaccaaagaactaacaaatagttctcattgcatagccatagatggaatttcccaacgaagcaataccagaagggtgttcacagaagaaaacgggcaagggggaaaataggaatcaagcggatcgagaacacaacgaatangcaagttaccntcctgcaaacgcccgtaacgggttgctccannaaggctatgaatngnctgnnctgtgccaangcc

SEQ ID NO: 7611 - DNA, 258 bp, Glycine max
  unsure (1)..(258): unsure at all n locations; Clone ID: 701147366H1
gaatggcatggttgcagttgcagagaatcatcaccaataccaagggaggtgctaatttgatctcaccgctcccacgattcttctcgaaatgttccccctatgttttgaaagttggaataccagagtttctaaacgggattgggaanggggttgagtcccacgttcctaagcttgaatctgaaatcggtgatttccagaaacttctcgtcattcgaacccttaaactcaagaagctcggtattccttggcaaacatagg

SEQ ID NO: 7612 - DNA, 246 bp, Glycine max
  Clone ID: 701147367H1
ggctttccttttttttaatttgaatacttcttatgcaactatagtgaggctaagagattggtccataattaatcaaaatgttggctatattccacaaagcttttgctcatccacctgaagagctcaacagccctgcatcttacaaaggttccaagaagcctaaggttcccgaggaaactctcaaagatttcctttcccaccatccttcacaacacttgctctatgagctttggtgatgctgctgtt

SEQ ID NO: 7613 - DNA, 248 bp, Glycine max
  unsure (1)..(248): unsure at all n locations; Clone ID: 701147368H1
ggagaaagacacgatgcaggaagcgacgaaggtgataataattcngtgccggaacttctggtatcgccaccgccggtctgcttaacgaagcaatcaataccttacataatgctcgagagagaagactgtttcgcttcgctgtggcagaaatacacctacgatcgtctccaccttcatttgaggaagcaagtttgcgagttaccgcacttaccgtttcccaagttcttaccctcactacgtgcctcgga

SEQ ID NO: 7614 - DNA, 249 bp, Glycine max
  unsure (1)..(249): unsure at all n locations; Clone ID: 701147369H1
ggaggaagaggaaaagaggattagagggtcgccacgtttagcaataaccaaaccctctctactcttttttcttctccttctcttcgctagggttttagcttcttcctcttcacttcgttcttnctcgcctctacaatgagcaacgacaaggacacattcaacgtcgccgatctcacttctgctctcaacgaggacaatagagcagaccttgtcaatgctcttaagagcaagatacagagtttggctgga

SEQ ID NO: 7615 - DNA, 251 bp, Glycine max
  unsure (1)..(251): unsure at all n locations; Clone ID: 701147370H1
gaagaagaagaaggagcatggccatgagcatggccatgacagcagcngcagcagtggacagtgnattaaactgctgcatcacctatatatttaaaaggtttatgggaccatagtagcgagggctgtgccttaatttctctctntctnnnnnnnnnnnnnnnnnnnnnnnnnnnnnnnnnctttntccctatcttgtgatctatntatgagtgagaaaaacaagagtgaganattgtgcgtgtatctggntg

SEQ ID NO: 7616 - DNA, 248 bp, Glycine max
  Clone ID: 701147371H1
atagtgttttcgtaacagttcaaataattaaaaagtaagcagacaaatggcgcccgataatgttcctaagatctggccatttcaacaacaaatgatgcctacctctcagctcccaagtagcacaataggttaatacaatgaacaagctttctgctaataattcagcaatgttctcttttgatgtcacaattcaagagaacatgaattggctattgatagtgagtacaattgacacatgggagttatga

SEQ ID NO: 7617 - DNA, 256 bp, Glycine max
  Clone ID: 701147372H1
ggggaatttgttgatacagctataaatagatttgttctcattgcacttggtgctgctgtatcttgggagtcaatatctgcatatatccaatctgggctggtgaggatctgcatgatcttgtcacaaaaaatttcatgggtgttgcaacatctttggaaggtgttgtcaatcactaccttcattgtgttgaatataagaaggtgccatctaaaattcttacttaccaagctgctgatgacccaatttacagtggcta

SEQ ID NO: 7618 - DNA, 251 bp, Glycine max
  Clone ID: 701147376H1
gacttcaaaacactcataacacaaagcacaaagcaaagcttcatccttgagttaaaaaatggcagcagcttcttccatggctctctcatccccatccttggctggcaaggccgtgaagctgggcccatcagccccagaagtgggaagggtgagcatgaggaagaccgtcaccaagcaggtctcctcaggaagcccatggtacggcccagaccgagtcaagtattgggcccattctctggcgagcccccgtc

SEQ ID NO: 7619 - DNA, 265 bp, Glycine max
  unsure (1)..(265): unsure at all n locations; Clone ID: 701147377H1
gattttgagaatgagaaggcctctgggaaatctgtgggtgaaaaagcagcagaagatctgaggcaaagaataattgnacataatattcttgttgtatcanaatactatgcaagaattacattgaagagacttgcagagcttttgtgcctcagtatacaggatgctgagaagcatctctcagatatggttgtgtctaaggcgctggtggcaaagattgataggccaatggggatagtctgtttccaaacagcaaaggatagcaatg

SEQ ID NO: 7620 - DNA, 250 bp, Glycine max
  Clone ID: 701147379H1
ggaacagagaaagaaatggagaatgcggaggagcagcagcagcaaaacgaggaggttttgtcggttgaacttccggctccttccggttggaataaactgttcttccctaagaaagtgggaacaccaagaaaaagtgagattgtattcattgctccaactggggaggagatcaataccaaaaaacaattggagcagtacctaaaggcacatcctggcaatcctgtcatttcagagtttgactggggaactg

SEQ ID NO: 7621 - DNA, 250 bp, Glycine max
  unsure (1)..(250): unsure at all n locations; Clone ID: 701147380H1
gggggggagtgttctttggttttgctagttttgttggttttgttaatttgttagttgtgttaatttgttaatgttgttagtttcgtcggattttcagtttagtattttgggtcaatttcgtgtgcacgtacgactttgcatgtttttcantgaattataggatatgttcaagaaatgggtaattgttttgaaaataaaagttcttgacgttttgtgacttgaaatccttgattcttctctacatgtncag

SEQ ID NO: 7622 - DNA, 249 bp, Glycine max
  unsure (1)..(249): unsure at all n locations; Clone ID: 701147381H1
ggttgtgcgtcggagctgtgtctggggaaatttgcgttgtttttcgcggtacagctcacacacactgaacggtaagtatggcggaccaaggctgttacaaatccgaacccgaanagttcatgacnaacaggcttctttnccaggaagcagtttgtcgtccgatgttcttcatccagggagggcaaatgtttccaaggctgaacttaaggagaagctagctaggntttatgatgtgaaagacccnaatac

SEQ ID NO: 7623 - DNA, 247 bp, Glycine max
  unsure (1)..(247): unsure at all n locations; Clone ID: 701147382H1
gatcgaagcaaaaaatgaaaacccaaagtgcttctactcctctgtctntttctctctcttgctatccttttgggctagtnggcactgctgcaagtggcaactcccaagaagcgcagtgccaagccaccatgnttcaacattcaacagaagcctttttccttcnacttttctctttggaattggttcttctgcttaccaggcagaaggagcagcaagtgtagatgggagaggaccaagcatatgggac

SEQ ID NO: 7624 - DNA, 244 bp, Glycine max
  unsure (1)..(244): unsure at all n locations; Clone ID: 701147383H1
acatcctcataagaaccagcagatgcatgatgagtaaaaacagtaactgcaaggcgcgaaccaaatagtgcctaaaaaagcacaaaacagaaacngacaatgcaaagcagggttttttcccaaaataagtccgatggagttgaaactccaggggcagaggcgcataaggtagacgatgcagtagcaggaaatcgcgactggaaaggtgccaaattgcgcancctgggccggggacnnaaccttt

SEQ ID NO: 7625 - DNA, 53 bp, Glycine max
  unsure (1)..(53): unsure at all n locations; Clone ID: 701147384H1
ggcangagtttgttgtgagctatncnctagtttatcctgaggagantatgncg

SEQ ID NO: 7626 - DNA, 222 bp, Glycine max
  unsure (1)..(222): unsure at all n locations; Clone ID: 701147385H1
ggggtgagtgttgtctatctcttcttctctttgtgtttggctgtggacgtaaaataatggtctgtctttggtttgggnnnnnnnnnnnnnnnnnnnnntatgtgtctcnntnccatcagaaacccacacttcatgatgaggcctctgcttctctggttgcgcatgatgcgtaccagtcgcatacctgtgcaccttctcagtctctaagcagccgcaaaatcg

SEQ ID NO: 7627 - DNA, 249 bp, Glycine max
  Clone ID: 701147387H1
gaattgcaatcaaattagttcattctctttgcgcagtttccctacctctcctttcaagatgcagatcttcgtcaagaccctcaccggaaagaccatcacccttgaggtggaaagctctgacaccatcgacaacgtcaaggccaagatccaggacaaggaaggaattcccccggatcagcaacgtctcatcttcgccggaaagcagctcgaggacggccgtaccctcgccgactacaacatccagaagga

SEQ ID NO: 7628 - DNA, 257 bp, Glycine max
  unsure (1)..(257): unsure at all n locations; Clone ID: 701147389H1
ggtgaagtgtatttggtcactgacctatcttggtagagatttgaagtttaaaccttcaaattaatcaaaccattttaatttgcctatagattctgagtcaccgctgctatggcgctacgcgtacttcttgtgttggggatgttgctgatgttgtgcctgttaaggtttcatctgatccnaagatagaagaagaaatactggaagcagaagaagaactgcagtttcccgataacgagccacttatcgtgagagacgcg

SEQ ID NO: 7629 - DNA, 253 bp, Glycine max
  unsure (1)..(253): unsure at all n locations; Clone ID: 701147390H1
gatagcatagagtgagaagtgagaagagaaaaatgggcaatctccatacccagtagacaacttttcatagatggagagtgggaaagtccctcttctcaaacatcggtttccgatccatcanccccgctactgaagacatcatagggcatattccagccgctactaaggaagatgttgaccttgcggtggatgctgctaaaagagccnttcccataacaaaggcaaagattggtcttcagctcctggctctgtt

SEQ ID NO: 7630 - DNA, 251 bp, Glycine max
  Clone ID: 701147392H1
ggcatcaattcaaaatatatcatcaattataagcatgggtttgtggaacacaacgaatgcagtgtcttgccgctttcacaagtttggtgatgaccaaaagaatctggtcttccaaggtgatgccacgtcttcttccaggggcatagaactcccaaagttagacggtggaggaaaaccagtgggtggcagtgtggggagagtgttatactcttctccagtgcacctttgggaaagctctacagtggtcgcaa

SEQ ID NO: 7631 - DNA, 251 bp, Glycine max
  unsure (1)..(251): unsure at all n locations; Clone ID: 701147393H1
gaagaagaagggagcgagcttcgtgatcgattgcgcgaancggtggaggataagattatggacattgcttctctggagaagttccttcaggagaggattaaggtcggcggcaaggccggtgcactcggcgattccattaccgtcaccagggacaagagcaagatcaccgtcacctccgacagcaacttctctaaacggtatctgaaatatttgaccaagaagtacttgaaaaagcacaatgtgagggattg

SEQ ID NO: 7632 - DNA, 259 bp, Glycine max
  Clone ID: 701147394H1
gatctacactcataaatcattacatggtcatagtctacacctaattagccaaacacaccacagcaccaaactagttggctcaattctctttgaatggctttggaggctttgaattcaccaacagcagccaccactcccttccgtggttaccaagaagaggaggaggaggttgaccttcacctacgcgagccttgggccaagagaaaacgctccaaacgacctcgttttgagtcggaggaagagtacttggctctttgcc

SEQ ID NO: 7633 - DNA, 243 bp, Glycine max
  unsure (1)..(243): unsure at all n locations; Clone ID: 701147395H1
ggaaaaactggaattccaatgattcttaatttcttacaatccaatctgcaaactgagtgagatatataacttgtttttgatttcttcctcatcattttgcatatacaaagattaaaatggaagggttttttggaaattgcttcancatgattttgctgatgttgtgcttcaccaacttgagcatagcttttgctcaaagtcatatgaatggatttggagagcagccactggccaagattgcca

SEQ ID NO: 7634 - DNA, 270 bp, Glycine max
  Clone ID: 701147401H1
atcagtggtgccccccaggataacaacataatgctgtggaatgctgtcatatttggtcctgatgatactccatgggatggaggcacgttcaagttgacaccccaatttactgaggactatccaaataaaccaccgactgtacgatttgtgtctcgcatgtttcatccaaatatttatgctgatggaagtatttgtttggatatattacaaaatcagtggagtcctatttatgatgtggctgctatactcacatctatccagtcatgcttg

SEQ ID NO: 7635 - DNA, 245 bp, Glycine max
  unsure (1)..(245): unsure at all n locations; Clone ID: 701147402H1
gggaagtgtatttggtcactgacctatcttggtaganatttgaagtttaaaccttcaaattaatcaaaccattttaatttgcctatagattctgagtcactgctgctatggcgctacgcgtacttcttgtgttggggatgttgctgatgttgtgccttgttaaggtttcatctgatccaaagatagaagaaganatactggaagcagaagaagaactgcagtttcccgataacgagccacttatc

SEQ ID NO: 7636 - DNA, 262 bp, Glycine max
  unsure (1)..(262): unsure at all n locations; Clone ID: 701147403H1
gggcgtttgggcctcagtgtttgctatgatttgagatttccagagatgtaccaattgctgcgtttccaacatgaagcacaggtactactggtgcctgcagcattcacaacagtaacaggtgaagcacgctgggagattcttcttcgtgcccgtgcaattgagagncaatgctatgtcattgctgctgcgcaagctggcaaacataatgataaaagagaaagctacggtgacacattaattatcgatccatgggggacaatgt

SEQ ID NO: 7637 - DNA, 272 bp, Glycine max
  unsure (1)..(272): unsure at all n locations; Clone ID: 701147404H1
aggtaatgagcagttcttgaatgaacttagcaaatggattttccatgaacgaggtcacctcaaggcggtgaatgtgcaacaccacaaagttggggaagctaatgaaccagccatctatcggatcaatgataatttggaatactctgttgaagtttatgagtggtctgggacagcatgggaaccttacgtagctgatgnngtnncaagtgcaattttacatgatgagcccctatgtcttgaagactttatcaactgatggcaagggccgttat

SEQ ID NO: 7638 - DNA, 263 bp, Glycine max
  Clone ID: 701147406H1
gaggaaaggggaacccaaaccgaaaccctaaccctaacggagagatggcggagcacttggcatcgatattcgggacggagaaggacagggtgaactgtccgttctacttcaagatcggcgcgtgcaggcacggcgaccggtgctcccggcttcacaccaagccgacaattagcccaacattggttctgtcgaacatgtaccagaggcccgacatgaacatgagcatatcaccaaccccgatcagccacaaccccaatcccttg

SEQ ID NO: 7639 - DNA, 265 bp, Glycine max
  unsure (1)..(265): unsure at all n locations; Clone ID: 701147408H1
gaatcatgatttcnactctcnttactctntagttntnttgttnngtatatatnaaggcggcacagcactggcctaantgggtgtaagtgagtcttgggagtgagtcactcttcctgcagaacccagatctgtagacaatatgggaagcactggtttgctacatttganatgccttgtcantgcttnagtaagtgtgtcgcttgtgcaagcagaagatgcgtataagtatttcacatggacggtgacttatgggactcttatccct

SEQ ID NO: 7640 - DNA, 268 bp, Glycine max
  Clone ID: 701147412H1
gatcacagggtttttttctcttttcttttttcttcttaaatataataattttaaataaaattgttatcttcgtttcttaggattggattttgctgattatatccaccgaacccttttgtgattgctttctggttcagttgctgtggatagttgttaaaatttgccttcaggttgaaacttatagtgttgggtcaggatattatgattaatggaaaggtactcagactgagtattggggcgaaagttcgggttcaacttcccatagcag

SEQ ID NO: 7641 - DNA, 273 bp, Glycine max
  unsure (1)..(273): unsure at all n locations; Clone ID: 701147414H1
ggcgagaganagtgggggaacgaagaagctacagctacagctgaaacagaagctccttcgatctacaatctatagcgattaagctctcattttctgagagtgnnnnnnnnnnnnnnnnnnnnnnnnnnnnncgtgattccaccatttccccatcatgatttctgctaccaaactcaaatccgttgatttttacaggaaaatcccgagagatttgactgaggcgtcgctatcaggagccggattatccatagtggcagctctggctatgatgtt

SEQ ID NO: 7642 - DNA, 274 bp, Glycine max
  unsure (1)..(274): unsure at all n locations; Clone ID: 701147415H1
gaagaaattgaggttccagtttccaaagaaccagcaggaganaataccaagatggaaactgatgaagctcctgccaatgttgctgcacctcctagcaccaatgacaatgatgttaacatgcaagatgctaattgccaaggcaactgctgatgcccctgggtccgaaaatgggacccctgaggcaggagataagcctgtgcaaatggatactgataccaaggttgaggctccaaagaaaaaagttaagaaaataaacattcctgtggtggagtta

SEQ ID NO: 7643 - DNA, 264 bp, Glycine max
  unsure (1)..(264): unsure at all n locations; Clone ID: 701147417H1
ggaagctgaaccctaactagctgagcagacggaggagaactcgactgaagctgcctctgcgacgccgtttcgattcagcctcagacatttccgttgcagtcatggtgcaagaaaatggcaagaggaagaaaccaaacattctggtgactggcacaccggggacaggaaagacaactgtgtgcactgctctagctgaanccacccagctcttgncacatcaatgtcggagaattagtcnaagaaaagaactgcatgatggntggg

SEQ ID NO: 7644 - DNA, 262 bp, Glycine max
  Clone ID: 701147418H1
aacacaaaaaaatgaaacctacaatcaccattctcttgttgtctctactacttctcataacttcaccctccttggcaacccgacccgcatccaaccctgatcaagtcaagcacaacaaaaacaacaaccaaggtggtggtgctggtgctggtgctggcgggttctttggccctggaggagggttcagcatacccggttttggaaacgggtttggaaatggcatcataggaggaggatacggatccgggtatggaggtccgaa

SEQ ID NO: 7645 - DNA, 266 bp, Glycine max
  unsure (1)..(266): unsure at all n locations; Clone ID: 701147419H1
acgcccaccactgttcttccggttaaaaaccttcgggtgggtggcacacttctttccctacaggcagcgtcagtaagaattaagccaaaataattaattaattcttggcaaaatcacatggccgccgccgcagatgggctcttccggccgatctacgagggctgcatctccgcctacgacaacgacgtcgagcgccgcccctaccacaagaactgcggctgcgctctgcacagcaagtcgaggaggaacagcagancgtgcacgca

SEQ ID NO: 7646 - DNA, 251 bp, Glycine max
  Clone ID: 701147420H1
ataataatatatgcaaaacctgaacagctggaataggatggttacacatgttgtataatgctctattagacatttagtttgaatggaatattggaggggatgagaaaaaattatctgacaaatgatatacatgtgtcacagagaattggaagcaatgtgaccaaaggtgataatctcgacgataatactgtagatagtgccacatataatgtaaaatcttcaaatgttaaggaaccagttagatcaccaac

SEQ ID NO: 7647 - DNA, 267 bp, Glycine max
  Clone ID: 701147421H1
ggcagtgaaacatgggggactcaacttgtctcatgcaacaaccattctgttatgcttcagggatttccaatgaagccagtgagaacaacccaattcatgcacttgagcagtcaatttcgtttgggagattcatgtcagagtccctggcatgggagaagtggtccagcttctcccacaaccgctatgtcgaagaggcagagaggtactcaagacctggttcagtggcacagaagaaggctttctttgaagctcactacaagaaacttg

SEQ ID NO: 7648 - DNA, 262 bp, Glycine max
  unsure (1)..(262): unsure at all n locations; Clone ID: 701147422H1
ggttttttttttnctttctgttattacacaacacactctgtgaaaaagggggagtttcttattccttctagacgcttccattgatcggcgatttctgatacatggcggagcatcacgaacacgaggaagtgaagggtnantccttgttggagaanatttctgggaagatccacgaccacgattcctcgtcttcgtcggattccgacaacgacaaaaccagcgccactgattccttcaagtctaatgttttcaggcttttcgg

SEQ ID NO: 7649 - DNA, 87 bp, Glycine max
  unsure (1)..(87): unsure at all n locations; Clone ID: 701147423H1
acgatggctactgttgcagagtacatggtggatggttctcttaggcatgtattactcgcaacgatangtatcttgatcgtcgcaaga

SEQ ID NO: 7650 - DNA, 269 bp, Glycine max
  unsure (1)..(269): unsure at all n locations; Clone ID: 701147424H1
ttcctgttgaaaagcagtctagaaaaaatctcctccaccataaattaaagaaagtaatacagacatacacacacaaaaatcatagagcataaaccttgggtaatagaaaaatttgacaatagtagaaaaataaagggttgatagattaagtacctgatagcgtctganacgaaacttggttctgtgagtttaaatccatggacattcaccctgtcaaaaccaaacctggaactctgaaacccaaaacaaagggcaccaaaaaatcaaac

SEQ ID NO: 7651 - DNA, 246 bp, Glycine max
  unsure (1)..(246): unsure at all n locations; Clone ID: 701147426H1
ggtgacaatctttcanngctagatcagtgcctcaannttctttcagttttcctgcttcttctcttcttcaactggttttgagattgccattttcttatcttgtttagtttagcttgtttggttgagaggaattaattattttgtataaaacaatgaaggagagtgtaggaaaccctttgcgtcttcaatctgtgaatcatatctccctcatatgcagatcagtggaacaatcaatggatttctatc

SEQ ID NO: 7652 - DNA, 273 bp, Glycine max
  unsure (1)..(273): unsure at all n locations; Clone ID: 701147427H1
ggaanaganngananagananagagantcctnaaacttgngngcgattcncttncantcacaacaagcaacanatccactatggctcttctnagtcgancctcttcacgcttccctcagctggtttcccctcaaagggtantttcactccagacaacgctctcatntctgaacgcatccncatccananncacgcctacaccatatgccncgccaccgttccgtcacgnttnctctcccgccggnntatcgaangcggcgganttcgtgatct

SEQ ID NO: 7653 - DNA, 266 bp, Glycine max
  unsure (1)..(266): unsure at all n locations; Clone ID: 701147428H1
gacgcaacgcaaccatagaatggaatgaatgaaggcaaagcttatacttataaaagagagatagaaattggttgtgaaaaacagaagcactttgtttctaagtaaaaggnatcttcagctgccatgtttcatcgctggagcaattctcatcaacangatcagggaagcagcgagctttatgctgaatccaagattaaagagctgaagggtgttatcggacccttatctggacgcatttgacgtattgcactgatgcagttttaaga

SEQ ID NO: 7654 - DNA, 271 bp, Glycine max
  Clone ID: 701147429H1
gtcctacacattgcaagtcattatgaaatgattttttatgcaatctatcatttgcacctttggttttgagctctcattataacttggactaagatgtatttatttgttataatctcttcttgttaatttttcagattttcatgtgaaaagtattgaattaaaaaaataatccatatatttgatatttttaaaatataaaatgttcaatattttttcttgcgcaatatctcatcgagtttgatcttttatttaggttgggttggtttttctg

SEQ ID NO: 7655 - DNA, 274 bp, Glycine max
  Clone ID: 701147430H1
acataggagtgttgttgggttgctggtacttctgaaaagcccaccccaaagtcgaaacgaaagcgcagagagagcgaaacgatgtcgtacgacgatgtggagatcgaggacatggagtggaacgaggagttgcaggcgtacacgtacccgtgcccgtgcggggacctgttccagatcacgaaggaagaccttaagctcggcgaagagattgctcgatgccctagttgctctctctacatcaccgtcatctacaacctcgaagatttcctctccg

SEQ ID NO: 7656 - DNA, 272 bp, Glycine max
  unsure (1)..(272): unsure at all n locations; Clone ID: 701147431H1
gattggtgacaaagttagaaacaaggagaaagaaagaagatggcaggaaagaaaatcccagatgtgttgctgaattcaggacacaaaatgccagttataggcatgggaacttcagtggagaatcgtccatcccntgagacccttgcttctatctatgttgaagccattgaggtgggttaccgtcattttgacactgctgcagtgtatggaacagaggaagccataggcctagccgtggccaaagccatagacaaaggccttataaagagtag

SEQ ID NO: 7657 - DNA, 262 bp, Glycine max
  unsure (1)..(262): unsure at all n locations; Clone ID: 701147433H1
ggtcgcgtttgggattcaaacctcaaaatggacgtttccgagctcgccaagaagctcggtctctccgattccaaactcgttgtacggaannctgccgagctccgtcgcctctgcgaagtccagttcgattcctccgtcattggagtcggcgaggttgcaaaatctatcatatgcttggaaatcgccgccatgagactcagcatctcttcgaccgatcctctgcggcgaggctgagcggaatgtccgaaagagttacatcaga

SEQ ID NO: 7658 - DNA, 280 bp, Glycine max
  Clone ID: 701147434H1
ggaaacacagtgtcagtatctgagttttttcttcaaactcaaaccctaacaaacaaaaaccatgtatcgttttttctcttccattcgccatggccgtggatcttccctcgcatctcttctcgcgccgaaacctgcacttccattcaacgccgctctacgacctcgccgtttacctcaaaacgacgggcatgttagaggattttctagctcgaatttagattggaggaggctattgtgaaccagaatgtgaatgcagatgcaaatgctcatccagattcta

SEQ ID NO: 7659 - DNA, 223 bp, Glycine max
  Clone ID: 701147435H1
agcagctaccactacatagacctttcaaagatcgttctcgttgggtacggatttacaggaatagattgctttttgcgcttttggcaagtattttggaacacttatttttagagtctcattgcttctttatcccccatttaatttgtagttgctttatattcaacaagaccataagacttattgattgttcacttggttttatgacattatagtttatggcaaa

SEQ ID NO: 7660 - DNA, 261 bp, Glycine max
  unsure (1)..(261): unsure at all n locations; Clone ID: 701147436H1
gacgggatttttgtgataataggntatcctttggtttccacganatccttcaaacncccgaaatttgacattcncatggtcatggatagtgaagtgttagtaaattcccaagnnccaagaccctacctcgctttctgcttcngaatatcannagtgcacacaacataatccacanccttttcacctagaccctctaattaccctgttgctgcatccaaaccagtctacnatcatcctcagngtagcagggacgtatgatgc

SEQ ID NO: 7661 - DNA, 260 bp, Glycine max
  Clone ID: 701147437H1
ggcgagagaagttattagggtttttgagtgcggcggtccaaacactcttctctgcagcttttgcctacaactcccttcaccatggctgaacaaaccgagaaagcttttctgaagcaaccaaaagtgtttctcagcacaaagaagactgggaagggaaagagacctggaaaaggtgggaaccgcttttggaagtccattgggcttggatttaagactcccagggaagccatcgaaggaacctatattgacaagaagtgccc

SEQ ID NO: 7662 - DNA, 259 bp, Glycine max
  Clone ID: 701147438H1
ttcttacatgattgtatgacaactgcagcaccattaatacttttcattctgttccttgcaagtactgttttcatccgcttttgtataataacagcagccctatgtctctgaagcaaagctgcatattcctttctgcttttctctcctctaataactacataaacgggtaaaaaatagtcagtcggttagagttctcaaggaaagtgttaggctgaaagaattaggtgagaagagggaaatacatgattggagagtagtg

SEQ ID NO: 7663 - DNA, 242 bp, Glycine max
  unsure (1)..(242): unsure at all n locations; Clone ID: 701147439H1
ggtgacaatctttctanagctagatcagtgcctcatntttctttcagttttcctgcttcttctcttcttcaactggttttgagattgccattttcttatcttgtttagtttagctnntttggttgagaggaattaattattttgtataaaacaatgaaggagagtgtaggaaaccctttgcgtcttcaatctgtgaatcatatctccctcatatgcagatcagtggaacaatcaatggattt

SEQ ID NO: 7664 - DNA, 266 bp, Glycine max
  unsure (1)..(266): unsure at all n locations; Clone ID: 701147440H1
ggagtttagctgcagaaggtaganngagagaganatngagagnatagagcacagaacggtngaagtgnnctgcataaagatgcatgttgcagaganaggagaaggagnagtggtgttgttcttgcanggnttcccagaantcnngtantcatggcgccaccannttctagctctgagctcnctcgggtaccgtgcngnggtacctgatctccgtngctanggtgacacagnngcnccttnganggtgancagcnacacgtgttttc

SEQ ID NO: 7665 - DNA, 271 bp, Glycine max
  unsure (1)..(271): unsure at all n locations; Clone ID: 701147441H1
ganggnttcaatgtgttagatctgtaaccggctaagcnatttgattgggaaagtccaagcttccaaagtgagtaagcttagagtgtgctttagagaagtatctcaggaatcnngactgattcccaaggaaaagaacaggaaatttgtggagaccattgaactccaaattaggctgaaaaactatgatcctcagaaggacaagcgttttagtggctctgttaagttgcgtcacatccttgccccaagatgaagattgtatgctggagatgcc

SEQ ID NO: 7666 - DNA, 263 bp, Glycine max
  unsure (1)..(263): unsure at all n locations; Clone ID: 701147442H1
tccctgttacaatcacttgctcttgtggccgtgtaaccgcaaatgttccttgtgatggtggtggtagcagtagcaattataatgctgatgccatacatgaagcttccattattcaaacattgcctgcaccacttcaaccagttgatgcaantggcaagaaagttcccctaggacaaagaaaactgatatgtgatnntgaatgtgctaagcnnnnacgcaaaagggttctcgcagatgcttttgacattactgctccaaatctg

SEQ ID NO: 7667 - DNA, 270 bp, Glycine max
  Clone ID: 701147443H1
tgaccacagacttctcaataatttataaactttatgaaacttaagtatcacttaatccctatccactaatttcccctgttcattattcttaatagaaatttatagatggtcaggtttatcagcagagaacctttagtttccattgctgatcttacccttttcgttcattcataacggttcttcagttgatttatcttaatgtttggctttaatacacttgtttgggctcagctgttgatgaactaatccaaaattgtggtgagatagcat

SEQ ID NO: 7668 - DNA, 228 bp, Glycine max
  unsure (1)..(228): unsure at all n locations; Clone ID: 701147444H1
catagagcacagnatcggtggaagtnaacggcatanagatgcatgttgcagagaaaggagaangagcagtggtgttgttcttgcacggcttcccagaactctggtactcatggcgccaccagattctagctctgagctccctcggttaccgtgcggtggcacctgatctccgtggctacggtgacacagaggccccttctacggtgaacagctacacgtgttttcatc

SEQ ID NO: 7669 - DNA, 266 bp, Glycine max
  unsure (1)..(266): unsure at all n locations; Clone ID: 701147445H1
ggcagcacagcagtgagtgaacccaccgtcaccacaccacaccacaccacaccaacaaagtagaaatacttgtaacatttgctgcaattacaactccatttgtggacaatttgatttgggtggtgcctttgcgaatagttggttgaacgagntcctttgcaaccatgagttttgtcttccgagggagtaggggagatattgaaagtggcttttcagaatatgttcctgaaagaaccttgatgcgggttcatccagctcgaccagtt

SEQ ID NO: 7670 - DNA, 270 bp, Glycine max
  Clone ID: 701147446H1
ggattcatgggatttagagagagagagaacttcaactgagggtgagagtgacacaaatctagggagcactactctaaaagttctattagattcttcaaaacatgaccatgcatcgcgagtcttgggcttttgtcttcggcgttatgggcaacatcatctcctttggagtgttccttgctccattgccaaccttttaccaaatctacaagaagaaatccactgaagggttccagtcacttccttatgttgttgcactgttcagtgcaatgc

SEQ ID NO: 7671 - DNA, 270 bp, Glycine max
  unsure (1)..(270): unsure at all n locations; Clone ID: 701147447H1
aaacttaaagaaggctggctaccacacatgggaaaaattaattctcaaggatccacaagatccttccactccaaatgcagtttcatacaaaacagcagcgagagagaaactgataaggcagggatacangnctgttgggatcattggagaccaatggagcgatctcctcggaggccacagaggcgaaagcagganntttaagcttcctaatcccctgtactacattcagtagttccttcacctctcaacaatctagcttgctcctatcta

SEQ ID NO: 7672 - DNA, 269 bp, Glycine max
  Clone ID: 701147448H1
ggggggaatataactatttaagtattatgtttatgtagatagcttcggtttttgtttggggtgaacttgtacatatatagcttctgaagtcgttgatatgtcaataacttcttgggtgcattgtacatatataatgaactgaggttattcatggatcagtattggaacacacgtcactgtctcactgaccttatttctatcctcatttctcaggtttccaattattcgaaggaagtggaggagatgaaacatgtaacaaagcaagaatt

SEQ ID NO: 7673 - DNA, 258 bp, Glycine max
  unsure (1)..(258): unsure at all n locations; Clone ID: 701147449H1
ggggtgtggctatgggaagggtcaggagaattctcagttcgctccgcatatcaggccagatttgatgatggtgttattcatgaagaagatcaggtatttcagcatgtgtggaaattaaaaattccaccgaaggccatgttctttatatggagattagtngttgatagattacctacttgtgataatctcattagaagaaatattntnnctgcctgatatatataatgattctcaaacgtatataatctaaagttttca

SEQ ID NO: 7674 - DNA, 246 bp, Glycine max
  unsure (1)..(246): unsure at all n locations; Clone ID: 701147450H1
gcacaagtttgttgagatagctagaagcaataagatgaaaatgaaagtgcttgttttgtttgttgctacagttttggtagcatatgaatgccatggctcaggctaccagaagttccctctccaaatgaaaactgggtttggtgggcaatgnagcaatgaggtggcatgtgccagttggaggctggcgtggaagcaaacaacgtagtcaagtggcaaactgttcctgcagcttgcggagagtacata

SEQ ID NO: 7675 - DNA, 260 bp, Glycine max
  Clone ID: 701147451H1
gattacctggttgctaaaatgaatgatattgcaccaaatttggccactttaattggtgaagttgttggtgctcgtttgatttcccatgctggtagccccacaaatttggcaaagtgcccctcttcaactcttcaaattcttggtgcggagaaggctttgttcagggcattaaaaacaagaggaaacactcccaaatatggtttgatattccactcttcttttattggtcgggcatctgccaaaaataagggcagaatggc

SEQ ID NO: 7676 - DNA, 258 bp, Glycine max
  Clone ID: 701147453H1
ggaggctgagttctgtaattgtgttttggctgtggacaatggctctgtcttctgggcttttcttgtgttcttcttcccgtgttctcccaccaccagaaacccacactttcatgaggaccaggccttcttctgctgccttgcgcaccatttccgttagctgttgcaccgtctctcagtcgtctaagccagcccgcaaaatccgtggtatcatgaaaccccgcaaagtctcccccgagatggaagacctcgtcggcgctc

SEQ ID NO: 7677 - DNA, 259 bp, Glycine max
  Clone ID: 701147454H1
ggttgagaggatcgtgagaggggcagtagccgagattccgtgagttgcaaaaatgaagacgattctttccaccgagaccatgaacatcccggacggcgtgagcatcaaagttcatgccaaggtcatcgaagttgagggcccccgcggaaaattggtgcgagacttcaagcatttgaatctcgattttcagctcattactgacgaaaacggtaaaagaaagctgaaaatcgacgcgtggtttggttctcggaaaacatcc

SEQ ID NO: 7678 - DNA, 243 bp, Glycine max
  unsure (1)..(243): unsure at all n locations; Clone ID: 701147456H1
tgacatncnaatagcgaaagaaattgggctggactcttcagattctctatctcatggncaagaatattcccanagggcaanggagcagttaacccccttggggttaaattctanaacaatgtcatcgatgagatcctagcaaatggtttaaaancttcgtcactctttttcattgggactttccacnagctcttgnagatgngnatggnngattccgtagtcctaaagtagtggcggnttttc

SEQ ID NO: 7679 - DNA, 257 bp, Glycine max
  Clone ID: 701147457H1
ccccgggcaggtatcagcggactacatggagtggtttttcaagatatctcacctatttgtcacaccgacccacgaaggcgatgagcccaaacagccaactaccccagatgtggatgcatacgtcgagccacatgtcccccggaggttccaattgcagttgatctccccatacattcagtggtattttaatttggttaagtagtttgtaattgttttttattaatatttgtaatcatgtgtttttatgactgtcacag

SEQ ID NO: 7680 - DNA, 266 bp, Glycine max
  unsure (1)..(266): unsure at all n locations; Clone ID: 701147458H1
ggagtgagcgtagttgaggttttgccactnccgaaaccaaattttcttccttcgttggcatctgtgatctcttctcctcacaatgagcagatcagggcaaccaccggatttgaagaagtacatggacaagaagcttcagatcaagctgaatgcaaatcgcatggttgttggtactctccgtggctcgaccagtttatgaattagttgttgacaacactgtggnnntgaatggcaatgagaaaaatgacatagggatggtggtaatc

SEQ ID NO: 7681 - DNA, 266 bp, Glycine max
  Clone ID: 701147459H1
ggagagtgaaactgcgtcaaaccctctcctcgccgtcatcgccgcagcattggccaccatcagtttctccggctacgtgttgcagaatggagtcaaatcaggcagcttcttctatggaagttgagactgtcccatctgaagccaaacttttgccaccaaagccaaagtttgagcctttgaagcctcatgagatgtctgatggtcaggtacagttccgcaagtgaatgttccacctcatcgttatacccctctcaagaaagcttgga

SEQ ID NO: 7682 - DNA, 265 bp, Glycine max
  Clone ID: 701147460H1
ggaggctgagttctgtaattgtgttttggctgtggacaatggctctgtcttctggggcttttcttgtgttcttcttcccgtgttctcccaccaccagaaacccacactttcatgaggaccaggccttcttctgctgccttgcgcaccatttccgttagctgttgcaccgtctctcagtcgtctaagccagcccgcaaaatccgtggtatcatgaaaccccgcaaagtctcccccgagatggaagacctcgtcggcgctcccgaga

SEQ ID NO: 7683 - DNA, 253 bp, Glycine max
  unsure (1)..(253): unsure at all n locations; Clone ID: 701147461H1
ggcacaagtgagtttgttgatcgagataactagaaacagtgtgatgaaaatgaaggtccttgttttcttcgttgctacaattttggtagcatggcaatgccatgcgtacgatatgttccctctccgaatggacactggctatggtgcccgtactccggaggtgaaatgcgcaagttggaggcttgctgtggaagcacacaacatctttggctttgagaccatcctgaagagtgcgttgaagcaacaaaggnta

SEQ ID NO: 7684 - DNA, 269 bp, Glycine max
  Clone ID: 701147463H1
ggagggcgaggaagccacatagagacacaatacagagtgagttgttgctccttcgccacaactctctgccaacatgggtatctccagagattctatgcacaagaggcgtgccactggtggcaagaagaaggcctggaggaaaaagagaaagtatgagcttggtcgccagcctgctaacactaagctgtcaagcaacaagacagtcaggaggatccgtgttagaggtggaaatgtgaaatggagggcattgagattggatactggaaatt

SEQ ID NO: 7685 - DNA, 276 bp, Glycine max
  Clone ID: 701147464H1
gggagaaggcaagcccatgccacaccaacactcctctcccacaacactcctctcccacttcctaatcgcccttccaattttcttcaattcaagcaccaaactttcttcttcaagttcccgaacctgaacccgaacccgaacccgaacctccttcgattgcgcaggctcaattgctcagtatcagacggcaccgttccgtcttcggttggtgccacggactcttcttctcttgcggtgaagaagaaagcagcagaggtgtcttctgagctcaaaggg

SEQ ID NO: 7686 - DNA, 258 bp, Glycine max
  unsure (1)..(258): unsure at all n locations; Clone ID: 701147465H1
ggagtgagcgtagttnaggttttncnacttcgaaaccnaattttcttccttcgttggcatctgtgatctcttctcctcacaatgagcagatcagggcaaccaccggatttgaagaagtacatggacaagaagcttcagatcaagctgaatgcaaatcgcatggttgttggtactctccgtggcttcgancagtttatgaatttagttgttgacaacactgtggaatgaaggcaagagaaaaatgacataggatggngg

SEQ ID NO: 7687 - DNA, 256 bp, Glycine max
  Clone ID: 701147466H1
ggcacaagtgagtttgttgatcgagataactagaaacagtgtgatgaaaatgaaggtccttgttttcttcgttgctacaattttggtagcatggcaatgccatgcgtacgatatgttccctctccgaatgaacactggctatggtgcccgtactccggaggtgaaatgcgcaagttggaggcttgctgtggaagcacacaacatctttggctttgagaccattcctgaagagtgcgttgaagccacaaaggaatac

SEQ ID NO: 7688 - DNA, 234 bp, Glycine max
  unsure (1)..(234): unsure at all n locations; Clone ID: 701147467H1
gctgcgttgtgcgtcggagctgtctgtgcaaatttgcgttgttcttcgcggcacacctcactcactgaacggtaagtatggcggacaaggctgttacaatccgancccgaaagttcatgaccaacaggcttctttccaggaagcagtttgtcgttgatgtccttcatccagggagggcaaatgtttccaaggctgaacttaaggagaagctggctaggatgtatgaagtgaaag

SEQ ID NO: 7689 - DNA, 252 bp, Glycine max
  Clone ID: 701147468H1
gtcacaactcataaaggaaagctttgagatttgttggacattttagagtggtgaagaggatggtgggtgttatttcgttggtaacaggaatggctggtccaagtgggttggatcagcttcaactgcagaacaggttactgaaggagttgatgccagcaacctcactgcaattatcacaggaggagcaagtggtataggattggagacagcacgatgttggctcttcgaaaggtccatgtcatcattgcagta

SEQ ID NO: 7690 - DNA, 102 bp, Glycine max
  unsure (1)..(102): unsure at all n locations; Clone ID: 701147469H1
ataaatgacgaatatgatattaatattattncagataattcagccattagaaataatacaataggtcanataactactcatctagatcagataccggtaggc

SEQ ID NO: 7691 - DNA, 254 bp, Glycine max
  Clone ID: 701147470H1
ggcacaagtttgttgagatagctagaagcaataagatgaaaatgaaagtgcttgttttgtttgttgctacagttttggtagcatatgaatgccatggctcagactaccagaagttccctctccaaatgaaaactgggtttggtgggcaatacagcaatgaggtggcatgtgccagttggaggcttggcgtggaagcaaacaacgtagtcaagtggcaaactgttcctgcagcttgcggagagtacatagctgac

SEQ ID NO: 7692 - DNA, 269 bp, Glycine max
  unsure (1)..(269): unsure at all n locations; Clone ID: 701147471H1
ggaggaaaggaagagattcaagagaagaaaggaaagcgaaagtgtgtcacgttttgttgatgctgttgctgtgaatgaatctgcgatacgatacgcacacacatcatcatcatcgccacatgcatattatgcgtatatacgcgtagatctgataaagaaagtagannnnnnnnnnnnnnnnnnnnnnnnnnnnnnnnngccatgtcgggattcagagacgctcgctgttttccgcgtccaatcctcgctgtgaatctcgccctcgctct

SEQ ID NO: 7693 - DNA, 258 bp, Glycine max
  Clone ID: 701147472H1
ggtggaaaaaattgataaaagttcatactctgaatatctctctctgtatgctccctgactcttgcccttttacgactttttggtgcccataaattgaagttgctccctcgcttctccatcacttatggtctttgaaacaaagctagcatagcatttttcttttacaaagcaagacacccttttccttttcattccatcatctctttagctttgtccaaagaccatgtctgtggtggctgataattctgcaaacaatgg

SEQ ID NO: 7694 - DNA, 293 bp, Glycine max
  unsure (1)..(293): unsure at all n locations; Clone ID: 701147474H1
gatggacaaaaacaatagcaataattcaagctcttctagtgtgtgcangcggaatccgtcaagcacttacaagcaatcctgcttttcgagccgttcaacgcatccactagctttaaccaacaagaacctaactaataaacccttcaccgnaaggtcccaaatttctncaatgnatnccatncactnaatattgatttatcccaaanacaaaacccacgtncatnccacattcataaagggctccacacaggaagggntccagggatccagggatncaatncccccatnaanag

SEQ ID NO: 7695 - DNA, 258 bp, Glycine max
  unsure (1)..(258): unsure at all n locations; Clone ID: 701147475H1
ggcatcaattcaaaatatatcatcaattataagcatgggtttgtggaacacnacgnatgcagtgtcttgccgctttcacaagtttggtgatgaccaaaagaatctggtcttccaaggtgatgccacgtcttcttccaggggcatagaactcacaaagttagacggtggaggaaaaccagtgggtggcatgtggggagagtgttatactcttctccagtgcactttgggaaagctctacagtggtcgctagctttgaaa

SEQ ID NO: 7696 - DNA, 251 bp, Glycine max
  Clone ID: 701147476H1
tacagaaccatggctttggccaagttgccaccaaacgcttcatcagttccagcagttttagcgtttggagattccatcgtggacccaggcaacaacaacaacataaaaacattgatcaagtgcaacttcccaccttatggaaaggattttcagggaggaaacccaacgggtcgattttgcaatggaaaaattccttctgacttaatagttgaacaattgggtattaaggagtatttgcctgcatatttgga

SEQ ID NO: 7697 - DNA, 260 bp, Glycine max
  Clone ID: 701147477H1
atcagcggtgccccccaggataacaacataatgctgtggaatgctgtcatatttggtcctgatgatactccatgggatggaggcacgttcaagttgactctccagtttactgaggattatccaaataaaccaccaactgtgcgatttgtgtcccgcatgtttcatccaaatatttatgctgatggaagtatttgtttggatatactacaaaatcagtggagtcctatatatgatgtggctgctatactcacatctatcca

SEQ ID NO: 7698 - DNA, 219 bp, Glycine max
  unsure (1)..(219): unsure at all n locations; Clone ID: 701147480H1
antgactcacttggcagnctaagcaatgctgagtaacangtgcccccatcatttatttgtgggtgtgtgatgaaaatagaaactgagatgatatcatagcctaattatgcttccatagaatggaagactacgaatgagaagcaacatcatggagatataagttggagaatgcaagntatgattgaatgagngtgcacngtgagtgtaagtgagatctgt

SEQ ID NO: 7699 - DNA, 252 bp, Glycine max
  Clone ID: 701147483H1
gactgcaattcaaggtaaaactcttctccattctcaatcttctcattgcattccaaaccctactcccccaaaatttaaaattttccccctttccatgtaattttctttcattttctcgggaaccaaacggtacgagactgatcaatttgccctttcccttctctgctttaaaaaggtttgaacttcccatggcgagcgctgttgatgcttccggaaacccgatcccaacttctgcggtgttgatggcgtcgt

SEQ ID NO: 7700 - DNA, 233 bp, Glycine max
  unsure (1)..(233): unsure at all n locations; Clone ID: 701147484H1
ggggagagaatagaanngagagatggatccagacncgttggcaaaggcattcgtggagcactactacagcaccttcgacaccaacaggaacggcttagcgaatctctaccaggagggttccatgctcactttcgaagggcagaagatccaaggcgcttccaacatcgttgccaagctcacctccctcccttttcagcatgccaccactcaatcttccaccgtcgactgccagt

SEQ ID NO: 7701 - DNA, 257 bp, Glycine max
  unsure (1)..(257): unsure at all n locations; Clone ID: 701147485H1
gactaataaacttttcaaataattaaacccacacatgaccatggcggaagccactgcatcggaactggaaatcgtcgagcnnnnnnnnnnnnnnnnnnnnnnnnnnnnnntggctgtcgacggcgttgaatcaaacctgaagcggactagagaggacagcgatgacgaagaagacggtgtttcgaagaagcagaaggaggatgcagaagaaaagaaagcatcaggtcccgtgaaattgggtttcaaaagcttcgcct

SEQ ID NO: 7702 - DNA, 257 bp, Glycine max
  Clone ID: 701147487H1
atcagcggtgccccccaggataacaacataatgctgtggaatgctgtcatatttggtcctgatgatactccatgggatggaggcacgttcaagttgactctccagtttactgaggattatccaaataaaccaccaactgtgcgatttgtgtctcgcatgtttcatccaaatatttatgctgatggaagtatttgtttggatatactacaaaatcagtggagtcctatatatgatgtggctgctatactcacatctat

SEQ ID NO: 7703 - DNA, 240 bp, Glycine max
  Clone ID: 701147488H1
accgacaagcaaacgaaaagtaaatccaatcaatcgttggaatctctcaacttatcgcttcttcctgatttgggggtttccgtttcaatggacgacggcgagttggatttctcgaaccatgaagtgttttcgagtccgaacatgggggagcttccgagcagcggttcaatggacagtttcttcgacgagcttctcaaggacacgcacgcgtgcacccacacccacacgtgcaaccctccc

SEQ ID NO: 7704 - DNA, 261 bp, Glycine max
  unsure (1)..(261): unsure at all n locations; Clone ID: 701147489H1
ggtagccaaagaaaagaaaatcctcaattttctgagcagccaaacactctctctctgtctctcgaaaattctcagtttgcagagaaaatctgaatcatgtcgtggcaagcgcatgtcgacgatcaccttctgtgtgacatcgaaggtaacnacctcactcacgctgctatcatcggccaagacggcagcgtttgggctcagagtaccgacttccctcagttcaaacctgaggagataatgccatcatgaatgactttaatg

SEQ ID NO: 7705 - DNA, 268 bp, Glycine max
  unsure (1)..(268): unsure at all n locations; Clone ID: 701147491H1
gaatacaaaaaagtcgtttttttattttntttattttcaaccatgggctggtgtgaaccccgaggcaggagggtggaaggcttatccttctgttatggagactgctcttgatagtggtgatggaaggagtcatcataacatgagtgatgatgggtcggtgatgcatttctctgctacaaggtcagtggcagtgccatcatctggacagaataaagtgattcctagtccaactcagtttagcatcctctataaggggaaaatgtgtatc

SEQ ID NO: 7706 - DNA, 264 bp, Glycine max
  unsure (1)..(264): unsure at all n locations; Clone ID: 701147492H1
gatttggctgagggtaagcgtctnnactctctcgatgctggntcaatcatccatgcactctggcttcagccccaacaggtactggctctgcgccgccaccgagcagagcatcaagatctgggatttggagagcaagagtatcgttgaggncttgaaggttgaccccaagactgaggctgatgccacctccggtggtggtaacgccaacaagaagaaggttatttattgcacaagtttgaactggagtgcggatggaagcacttt

SEQ ID NO: 7707 - DNA, 270 bp, Glycine max
  Clone ID: 701147494H1
gacagcatatcaataatctattttatactatacccacattttgataattatttttctagttgataagccatgggctactccgaggaaagcttgaggttgacgttgatctcaagtctaacgcagacaagtactggcaaacccttaggaactccactgaaatattccccaaggccttccccaatgattacaaaagcattgaggttcttgagggtgatggcaaatcacctggttctatccgccacataagttatggtgaaggttcaccacttg

SEQ ID NO: 7708 - DNA, 116 bp, Glycine max
  Clone ID: 701147496H1
acactgaggtgtcactgactacatgtatatcattctaaaagactgaggtatataactaggggtcatctatccctgaagtctattgatttattctgaggtccacaccttattgcaga

SEQ ID NO: 7709 - DNA, 146 bp, Glycine max
  unsure (1)..(146): unsure at all n locations; Clone ID: 701147501H1
ggcacagaattanggttttccaattcacagngcaacacaacgaaccaacaatggcgcagctcanccgnagtcgcagccgcagcacgggcnagcagcgctggagcaggtgcagtgcttcggtcgcaagangaccgccgtggccgcga

SEQ ID NO: 7710 - DNA, 275 bp, Glycine max
  unsure (1)..(275): unsure at all n locations; Clone ID: 701147502H1
ggcacaagtttgttgagatagctagaagcaataagatgaaaattgaaagtgcntgttttgttttgttgctacagttttggtagcatatgaatgccatggcncagactaccagaagttccctctccaaatggaaactgggnttggtgggcaatacagcaatgaggtggcatgtgccagttggaggcttngcgtggaagcaaacaacgtatcaagtggcaaactgntccngcancttncggggagttcatagcnggctacggtcnaagggnncnant

SEQ ID NO: 7711 - DNA, 264 bp, Glycine max
  unsure (1)..(264): unsure at all n locations; Clone ID: 701147505H1
gctatactcaaattctaccatctaaaactcaattccaaactaattttgctatgccacatcaaaaaacaatcttcaacttccaaaccacacaccttacatacaatgtcattgctgcaactatagttttcntagccaaattctgcagtgtgggagaattcnattttgggaccatttcacaccaaggggaatggaaatagncctatccggacnattatcctaccaaattaattatggancccacctcgggcctaaaccattggactt

SEQ ID NO: 7712 - DNA, 273 bp, Glycine max
  unsure (1)..(273): unsure at all n locations; Clone ID: 701147506H1
gaaggtggttgtggaagaagagatggaggaagcaaagggagtagtgaagcacgtgctcctagctaagttcaaggacgacgtcactccagagaggattgaagagctcatcaaggactatgccaatctggtcaatctcatcccacccatgaagtcatccatggggcaagggtgtaagtgctgaaaacctgcatcaagggttcanccagncctttgatcacctttgagagttccagaagggttgcaagattntgtagctcaatcctggccatgttg

SEQ ID NO: 7713 - DNA, 263 bp, Glycine max
  unsure (1)..(263): unsure at all n locations; Clone ID: 701147507H1
gaagatgttcttattaaaattacacactgtggtgtttgcttcgccgatgtagtttggacaaggaataaacatggtgactcaaagtatcctgttgtgcctggtcacgagattgctgggattgtgacaaaggttggctccaatgtccaccgttttaaggttggtgaccatgttggagtggggacttatgtccactcatgtagggattgtgnacattgnaatgacagagaagaagttcatgtaccaaggganctgttttcacttta

SEQ ID NO: 7714 - DNA, 262 bp, Glycine max
  unsure (1)..(262): unsure at all n locations; Clone ID: 701147508H1
gaagccggatataaatttaatgaggaaaagttgttggagtataatcatatgagtttcggagggccgcctgttactgttggatcggacgaagaagcaaatgagctactgcggcacattgaagaagagtctgccattgaagcagaagtccttacagctcctccaaagctggtatacaaccaactgatttaagattcacccaggaactattgggtgcagtcaggggtactggggcagtcatgtcctggtcattaacnaaattgnc

SEQ ID NO: 7715 - DNA, 248 bp, Glycine max
  unsure (1)..(248): unsure at all n locations; Clone ID: 701147509H1
acctcatcgatgatgtatcacaggatgctctatcagcttgtggttctcttcttgaagtttctatccaaaaggcagctatatgtcgcacagccatgcaccgcggtgcagcgctgctgcaatgtcatatttatcttgtaagaaaaaattntatgctttgntgtgtcgtctattgtttaaatgcnaaacccctttcctcngtgggagggggagggttcngaaattaaactattaaagnattaaaatattag

SEQ ID NO: 7716 - DNA, 264 bp, Glycine max
  unsure (1)..(264): unsure at all n locations; Clone ID: 701147510H1
gcatgaggaagaccgtcaccaagcaggcctcctccggaagcccatggtacggcccagaccgngtcaagtacttggggcccattctctggcgagcccccgtcctacctcactggcgagttcccaggtgaatacggctgggacactgctgggctttngggcgacccagaaacctttgccaagaaacggtgagctcgganttgatccattccaggtgggcatgttnggggctttgggntcgnttttcccgaattgttgttcccgaaa

SEQ ID NO: 7717 - DNA, 258 bp, Glycine max
  unsure (1)..(258): unsure at all n locations; Clone ID: 701147511H1
gattgatatcattatctcttctattggactaaagataactaaactcccagatatttgttcacttcactttctcagtgcagttgttgcctaatgcaatggaggaagaagccaaggtggttttgttgggtgcacggttcagtatgtttgagatgagagttaagatagcttggcagagaagggatcnaatatgagtacctgggaccagtcnccacaacnagggntactttgcttccaggaattgaacccaattcccaggag

SEQ ID NO: 7718 - DNA, 263 bp, Glycine max
  unsure (1)..(263): unsure at all n locations; Clone ID: 701147512H1
gagtacaaggctgctactggggctttcacgcctgaccgtgttgctgtgtattgcaagtgcgagatgccttataacccagatgacctcatggtgcagtgtgaggggtgcaaggattggtaaagccagtgtattctgctttcttgtttactgttattacattgtgagtggtttttggatgtccgggtctcnaattttagcattagatgcgntgtttgctcggatgaaggaatctctggatnttcagctcctgcagagccagccag

SEQ ID NO: 7719 - DNA, 263 bp, Glycine max
  unsure (1)..(263): unsure at all n locations; Clone ID: 701147514H1
gangtttgtgaagtgttaagtaattaatggcagcttcaagntgcatcntnctccatctcctctgctntcactcttcactccaaaaatccaatgcctccccaaacacgacaaggaccatgatctgttccaatttccatcaatcaatnaccttnaaacacatgggttcntnaggttatcaagacaaacancaagntttggattcacgnnacnatcnacaaggnttaattttnctcgcngngggttgagtngttcnncatancctc

SEQ ID NO: 7720 - DNA, 246 bp, Glycine max
  unsure (1)..(246): unsure at all n locations; Clone ID: 701147515H1
tgaganagcaaggnaatatgctatagtaataagaacttgatgaggccgtgagtctcaaggatgaaacagttgttcttcagtttgaaactcggcttcagaatggccttgagtgtggtggtgcatatctaaaatatctccgaccacaggaggctggatggaatccagggatttgatatgatccncatatcctatcagtttggnctgaaatgtgtgcacaaccaagtccnttatttccagcataggatc

SEQ ID NO: 7721 - DNA, 269 bp, Glycine max
  unsure (1)..(269): unsure at all n locations; Clone ID: 701147516H1
gacagcatatatatcaataatctattttatactatacctacattttgataattttctttgtagttgatagccatggctacccgtggaaagcttgaggttgacatgattntcaagtccaacgcagacaagtacngggaaacccntagggattctactnggatantccctaagggccttccccacatgtttaccaaaggcattgaaggttccttgaggggtgttgcaagtcntcnggnttcnattcggcacataaggtantgnggaaggtc

SEQ ID NO: 7722 - DNA, 304 bp, Glycine max
  unsure (1)..(304): unsure at all n locations; Clone ID: 701147519H1
ggatcagaacctacgccgagcgngaccccaaattaccaattccaattccttcttcccaacttcacaaagccatgttcttccaggtcccgttgttcgacggtttccccttgaggtggatgcagagcaacaactttcccttccgttcgatgaagccaattcagaagaaggntaccccaaccacagggagggacgatgcttccccttgtcgagganttgaaggattgattgacaaaggacgnaggcgattaagganggcgnangacgacgacggagatgacaagggaaganggtggttaaagtngng

SEQ ID NO: 7723 - DNA, 263 bp, Glycine max
  unsure (1)..(263): unsure at all n locations; Clone ID: 701147521H1
ggcacaagtgagtttgttgatcgagataactagaaacagtgtgatgaaaatgaaggtccttgttttcttcgttgctacaattttggtagcatggcaatgccatgcgtacgatatgttccctctccgaatgaacactggctatggtgcccgtacnccgggagttaaattgcgccagnttggaaggcttgcngtggaagcacacacaatctttggctttgagaccattcctgaagantgcttgaagcaacaaaggattacatcca

SEQ ID NO: 7724 - DNA, 238 bp, Glycine max
  unsure (1)..(238): unsure at all n locations; Clone ID: 701147522H1
gaagcaacattgttaaccattctcttcactttaaagttacatagtttttcattgttttacttaatctacaatggctgcttcaacaatgactctctcttcatcatcattggctggccaagctatcaagctgccccctccaaccctgagccttgtgttggaaagggtancnngggggaaacaggcttccaagganggtttcccnaggagnccantgttcgggccagacgtgtnagtattg

SEQ ID NO: 7725 - DNA, 263 bp, Glycine max
  unsure (1)..(263): unsure at all n locations; Clone ID: 701147524H1
caatgatgaaatgattttctttaacacaaatactcttattaaaagagttaaatgtagttacgaattattcgagtattgaagtgaaataccaataaatgaaagacaaatatttttagacaagctaaaatgagacatattatatgcaatggagaggatactactaacttgaagcntcagtctttcaatgataggactcagtttaactaacttgatgcgtcgaaaataagatagnttgttaactgtaattacttttagaggaataa

SEQ ID NO: 7726 - DNA, 259 bp, Glycine max
  unsure (1)..(259): unsure at all n locations; Clone ID: 701147525H1
ggtagggagttggatctgtggtttggttgcgatgcggtgtgttgcgaatcactgtccaatcccgatcgcttgatccagacagtgaatcagaatcagaatcagaatcagaatcagagagaaacgatgagggcagtaagtgcgttaatggtggntcggatgtgacgccggaccattngttcctgtcttggnaacgaangcntacccttcggntnggngnggtggttcgccatgcgggngtctcntgtttcntngncttctt

SEQ ID NO: 7727 - DNA, 254 bp, Glycine max
  unsure (1)..(254): unsure at all n locations; Clone ID: 701147526H1
gaagaagaagggagcgagctttcgtgatcgattgcgcgaaccggtggaggataagattatggacattgcttctctggagaagttccttcaggagaggattaaggtcggcggcaangncggtgcactcggcgattccattaccgtcaccangggacaagagcaagatcacgtcacttcgacagcaacttctcctaaacggtatccgaatatttgaccaggagtacttgaaaaagcncatgtgagggatggcttnc

SEQ ID NO: 7728 - DNA, 235 bp, Glycine max
  unsure (1)..(235): unsure at all n locations; Clone ID: 701147527H1
atccacgcggatgttgtagtgcagtacgtggtgctccgccgagaccttatcgacacgtggccgctaaggagcgtggtcactcaaggttgccacgcttctgtttccgccgtttggttcaacaaagacgatcctttcaccgtcgattattgcagccccgataaaattggatctatgcacaaagtttacattgaagtaaagggggaancccagatcaaaaacttgtctgagaaacttt

SEQ ID NO: 7729 - DNA, 258 bp, Glycine max
  unsure (1)..(258): unsure at all n locations; Clone ID: 701147529H1
cctgcagcttcgacatantatcctacgcgctcaagtacaagtccacaatcacnggtgtgatctccaagggcaggctctacaatctcaaaggtgtcaccgtcaaaatcttgctcctgtggctcaacatcgtcgaggtctctcgtcaggggcaacgatatttacttctctgtcggcancggttccggtgattcggcgtcgagaacttcctcgagagcccccaatgtggttgtggcttcgatgcaaaacgctccccttaaa

SEQ ID NO: 7730 - DNA, 252 bp, Glycine max
  unsure (1)..(252): unsure at all n locations; Clone ID: 701147531H1
gagagaganagagtctaactagaattttttttctctctttcataacctagtgagactctgtgtcagagtttgtgaagtgaatcccataatcatgaagaaaggtaactgggacttggtcnccaactctcagttcctgtgtcngatcaatctaattttgccaggactgaaagtgggactttaaggatggggtctgcttgtcaacaggggtggagttcgaatgtcnctcagaatgtgtcgagctccanctccaat

SEQ ID NO: 7731 - DNA, 274 bp, Glycine max
  unsure (1)..(274): unsure at all n locations; Clone ID: 701147534H1
ggcacaagtttgttgagatagctagaagcaataagatgaaaatgaaagtgcttgttttgtttgttgctaacagttttggtagccttatggatgccatggctcagactaccagaagttccctctccaaatgnaaactgggtttggtgggcaatacagcaatgaggtggcatgtgccagttggaggcttggcgtggaagcaaacaacgtatccaatggcaaactgttcctgcagcntgcggnaatacatagctgactangttctaggagaccaata

SEQ ID NO: 7732 - DNA, 266 bp, Glycine max
  unsure (1)..(266): unsure at all n locations; Clone ID: 701147536H1
gaataataatagcaataacaatagcaacgagaaaaaattaacgagggaggggagaagagaaagaaggaaggagacatttataaaaagctctttcccttcccctaaatccctcacactcattccatttttacctttctctctcgctcgcaaacgcaaataataaaaaacaaggntttagccatggcatcgaagcggatcttgaaggaactcaaggatctccaaaaggatcctcctacctcatgcagcgccggtcctgttgctgaaga

SEQ ID NO: 7733 - DNA, 270 bp, Glycine max
  unsure (1)..(270): unsure at all n locations; Clone ID: 701147539H1
aactattgtaggtaagtatagagaaagcaagataagtcagatgatgagaaggaccctggtgtctttgcgaagaatcccgaaaagggcaatgtagcgagaatatatatgctagagcctgaaataatgaccttgnaattagaagcagacnataagatagaggacatatatacttactaaaaagggttntcntcntcccttgttcccnaattcnaacggcnaaggnnaattttnaatccggatgttacatnattgngatacagagataagntt

SEQ ID NO: 7734 - DNA, 263 bp, Glycine max
  unsure (1)..(263): unsure at all n locations; Clone ID: 701147540H1
ggccattgttgttgctattatcatccgcagctgcttttattcgcaccgcaaacagtgagccatggccgtcggaaagaacaagcgcatctccaaggggaagaanggtggcaagaagaaggcagctgatccctttgccaagaagggtttgtatgaccnttagggntcctcctgttttcnaagtgaaaaatgttggcaaaaccntngtntctngtactcagggtaccaggattgcttccngagggccccaggcntagnntntttgg

SEQ ID NO: 7735 - DNA, 265 bp, Glycine max
  unsure (1)..(265): unsure at all n locations; Clone ID: 701147541H1
gaaaaagaatattgaaggaaanttggtatggcattaaantacggctgaagatttagatgatgcagctcagaaagcagtgaaagctgcttacaaatgaaggtttacttctgctcaaatttaaaattcggtttagttacttattttggtgtcaaactattcccngnggaggggattgatgcngagaggagtccttattgagnngcnattgcngtttccaattagntanngtgattcccagttggagnacnattggggttgatcccaa

SEQ ID NO: 7736 - DNA, 261 bp, Glycine max
  unsure (1)..(261): unsure at all n locations; Clone ID: 701147542H1
gacacaagattgagacacgaaacagaaaatgccaggnctcacagcaccttccgattactcccaagaacccccccgcnactctttctcttctcatcaacgccaaggaacctttcaatgcggagccaccgcgtgctgcgttggttgcttcctacgtcaccccttccgattcttctataagagggaccaaggtccaattcccatcggtgaggacantcnacaggttattcgggaacgggttcgggtttgtggagcggcccaaac

SEQ ID NO: 7737 - DNA, 255 bp, Glycine max
  unsure (1)..(255): unsure at all n locations; Clone ID: 701147543H1
ggagaacaaaacaagtgtttcgaatagattatcctaagtctttgggaatagtgctgcaatggcttcaagtcaggaggaggtgacccttttgggagctactggaagcccatttgtgtgcagggttcatattgccctcaagttgaagggagttcaatacaaatatgtcggagaaaatttgagggacaagagtgaactgttctcaaatccnancccngntcacaagaagggtccagtgttatcacaatgagaagncca

SEQ ID NO: 7738 - DNA, 261 bp, Glycine max
  unsure (1)..(261): unsure at all n locations; Clone ID: 701147544H1
ggcaactcttggagctganacactcacactttcagcaaaactctcctcagttatccctccaaccgaacagatgaaacatggttctagttgcaagttcatggcgaggngggaaaaggggcagaaggcattgctactgttgattttcgaggtcaccngtggacnagacaaaaacttgnaggatggctagcngcaggggctcatcttaagtactgaatnggnngggnggatcngtggganggnataagcatgaacttagtggac

SEQ ID NO: 7739 - DNA, 267 bp, Glycine max
  unsure (1)..(267): unsure at all n locations; Clone ID: 701147545H1
acgcgcatcacttttcttgagacaattcaaaacaaactcaatgcacatttccccggtaaaggctatgtttggatattttgcgaattgaattgcacattttttaattcttagggggggaaaatgaagaatgtgttagtattttagaaataaaagtgttttgaannnctcaaacttgcatccaaacatgtactaattcattaggttagaaacaagtttgagggaacangagtggggttgcaaaaagtgcagctcntcataggcatagaa

SEQ ID NO: 7740 - DNA, 216 bp, Glycine max
  unsure (1)..(216): unsure at all n locations; Clone ID: 701147546H1
gcaangnagggtacagcacaggtgttggattnggtgctgagattattggaaccttcgttttggtctacactgtcttctctgcaactgaccccaagaggaatgctagagatctcatgtgccggttttggcacatttccatttggcttgcngtgttcatggttccacttggnaaccatcccattaacaggcantggaattaaccntgtaaggagctta

SEQ ID NO: 7741 - DNA, 238 bp, Glycine max
  unsure (1)..(238): unsure at all n locations; Clone ID: 701147547H1
tgtctccattctttaggtcccggtgcttaatgtagagtttgaatgtcagcaaaatcttaactagtctacaaactttttgggcatggtccatcttttagttctttttatatcnagcggttacttacattacnaacacgtgnatttgattcccccggggcacnacntcctagnttgacccccaaggggagctccccnanncctaataagccaaggttaaacnatanggggcnngattagg

SEQ ID NO: 7742 - DNA, 242 bp, Glycine max
  unsure (1)..(242): unsure at all n locations; Clone ID: 701147548H1
gatagaagcgatgagtaagaatgtaagaggaagcatatttgcatgtaggatatgccacagcccctccatgacatntttagattttagaataaatttatganncccaaaatattttattaggcttttttttattgctgaaatataattggtgagatctccatcggttgaggtgcngacatgattaaaggatcnaatgtattgatgccggacngngtagaattaattatcntanccnatgcngt

SEQ ID NO: 7743 - DNA, 256 bp, Glycine max
  unsure (1)..(256): unsure at all n locations; Clone ID: 701147549H1
agttggagancaacaccgagaagaactaaaccacctgctagttattattgcttgatatgacatgcgctatgtcntgggttgggtgttcgagctcttggaaggngatgaaaactatgccttgtttggaaggaaatgtaagaacatagagacatgatttttctgtaccttcttgaatatatatgcttttaaagttatgagtgctgtatgttctatttcatttggggttgggtgggcagctttccatgaaccatctggt

SEQ ID NO: 7744 - DNA, 223 bp, Glycine max
  unsure (1)..(223): unsure at all n locations; Clone ID: 701147550H1
tcanacttagggtacagcacaggtgttggattaggtgctgagattattggaaccttcgttttggtctacactgtcttctctgcaactgaccccaagaggaatgctagagatctcangtgccggttttggcaccacttccaatggctttgctgtgttcatggttcacttggcaaccatcccagtaacaggcatggcattaaccctgctaggagnctaggagctt

SEQ ID NO: 7745 - DNA, 257 bp, Glycine max
  unsure (1)..(257): unsure at all n locations; Clone ID: 701147551H1
ctgttttcctttgtcccttttgtatcacagaatcattctgggcatctctcgtattccttctccttctctctctcctcctttcccttcattcctggttttggnttttctanggtcctgctttccacacaatccactatagnttcttctataccttccttgtggatctgtcatatgacttcctcatcgtgaagatccaaggngaacaggncctcaacaacggtttcaggncctttcaatcaaggntctgagtgagaaag

SEQ ID NO: 7746 - DNA, 230 bp, Glycine max
  unsure (1)..(230): unsure at all n locations; Clone ID: 701147552H1
atcattcacctttttaaatattcttttttcttattattttgaatatatagtagatccacgttaagatagaagcaattaacaaatcgttatttttgtgttttttttctgtataatgtggaaatcctactaaacacacggttcaactgtatccaacntgactgtgatcttaanncttccttaggcattcnaacatnngtcctgttggttggaagnatatggcaccaacaaag

SEQ ID NO: 7747 - DNA, 260 bp, Glycine max
  unsure (1)..(260): unsure at all n locations; Clone ID: 701147553H1
gagtgaagaaaatgaaagtccttgttttctttgttgctatagttctagcagcatggcattgccatggctcagaccatgaccatgaccatggccacacctaccaaattttccctctgagaatggaaactgggcatggtgggcatacatttcgggagnancnntgccnaanttnggnggntngttttggaannnnccacnntcnattgnctggaaaacggttcctcaagttngcgagggatatatngggaactacntgcttg

SEQ ID NO: 7748 - DNA, 260 bp, Glycine max
  unsure (1)..(260): unsure at all n locations; Clone ID: 701147554H1
tcctcaaataaacgttggtggcgactccacgcgccttcctttcttggaagacgcacctgtgagccctcgcgtcgccctcctgccgaagggtaggttgcgataacagtcaatttgtgttttccacaanacggaaaagaaccaaaaaatcaanttcncnaaaataggaaaaaatgttgtgaacattgcncaattttccattaccatgcatggtgcggacnaagtcngcnttgctgccnttcagggtgnagtttgcatgcctc

SEQ ID NO: 7749 - DNA, 161 bp, Glycine max
  unsure (1)..(161): unsure at all n locations; Clone ID: 701147555H1
agaacagaatatgtatggcactaatcaccatattacttcgtatcatggtgtttgtttgtctgtgtttaaagttaaggacgttatacccttcgtgcctgctacatatatatagtgggcactataatattaccaataaattaacctccatgtataagnntaat

SEQ ID NO: 7750 - DNA, 262 bp, Glycine max
  unsure (1)..(262): unsure at all n locations; Clone ID: 701147556H1
gaacgaganataccgtgacactgcaacagagtgagagaaattgcaggcggcggcacagaggggaantagtagtaaataaggatcaatggcggttcctgggaggngcaacggcatcaacgacgacgaagaggagttagacgacaatgcncttttcgaagaaccnggtgtcgtcgnagacganaccgnatacccctncttaacttcgcggactcttccggnggngctcaaattggcgangnccangccctccgtctcgntcttg

SEQ ID NO: 7751 - DNA, 254 bp, Glycine max
  unsure (1)..(254): unsure at all n locations; Clone ID: 701147557H1
gagtgaagaaaatgaaagtccttgttttctttgttgctatagttctagcagcatggcattgccatgggctcagaccatgaccatgaccatgggccacacctaccaaattttccctctgagnatgaaaactggccatggtgggccatacattccggaggtatcatgccaaagtttgaaggcttgtgtggaagcacacacgtcattgactggaaaacgttcctccagattgcgagggaaaattgggactacatgct

SEQ ID NO: 7752 - DNA, 257 bp, Glycine max
  unsure (1)..(257): unsure at all n locations; Clone ID: 701147558H1
ggcctacgcagagagaaattgagtttctgagataaccacttttctctttgattcatcaatggcaaccgcgaggnccgtgaaggatgtttcgcctcacgatttcgtgaaggcttacgcctcccatctcaagcgttccggcaagatggagtttctgagttggacngatantgtaaaaacnagcnaaanttaanggatttggncccatatgatccnngacctgnaatantgtangggntgcntcnattgcnaggaagntt

SEQ ID NO: 7753 - DNA, 252 bp, Glycine max
  unsure (1)..(252): unsure at all n locations; Clone ID: 701147560H1
atcattaaacagacatacagagcaaaacacaagtgtgctagtgataccccgggaagttgcccagccagaacacccagaaatcctgttgttccaaccacagtaaaaagaaaagctgcctgcaccatcaaaggtttttgttactgttggtaagaatgcatacaacttaccaggaacatgtggtttccagttggaagtcntaatangaattacnaggtggcacngnattcnatcggggtttttacttntacataa

SEQ ID NO: 7754 - DNA, 256 bp, Glycine max
  unsure (1)..(256): unsure at all n locations; Clone ID: 701147561H1
ggaagctcactgaaatcaacgaacaatctcaatgtagatccttgaagctaccggagaatgtaagagtaaccaagatatcaaggttgatatatacaaattcaggtaatgctattctggcatagcatcaaatgccctttcacctactctggaaatggcagcggaatgagcgtaactctctggcaaggccatgctaccttgcagcctcagttgtggcaaccatnnagtggcatcctgatgacaaatgacattgctgata

SEQ ID NO: 7755 - DNA, 246 bp, Glycine max
  unsure (1)..(246): unsure at all n locations; Clone ID: 701147562H1
tcactccaatggacatgcaatggcatngaagttgttgagagcaggttactactggatgtcgatggagacagattgttgcaaacacgcaaggnaatgccacaaatgccagatttatgctgacagaatttcatgtaccaccaactacacttaatgtcttctctccgtgggcctcnccaagtgggcatcgatangattgtagatcgaaccgangcttcaaacgggcacggttcatccagtggcattgat

SEQ ID NO: 7756 - DNA, 258 bp, Glycine max
  unsure (1)..(258): unsure at all n locations; Clone ID: 701147563H1
ggagtttgagggcatcagagatagcgaagaagttgaatctgcaacctcacccagaaggtgggttttacgtggagacattccgagaccattccgtccagctttcgacctctcagctcccccccgaatacaaagtggatcgccctgtatcgacctccatctatttctcgtttccttctgggagtgtgtctcggctccatcggataccctggggcgaaacctggcatcantacatcggnggaccctttaaccgnatgtana

SEQ ID NO: 7757 - DNA, 231 bp, Glycine max
  unsure (1)..(231): unsure at all n locations; Clone ID: 701147564H1
gaggctacaaaantacacacaacggatagagagagtgcagcggagcagaaagaagcaaagggggaagaaaggtggtgtgtgttgtcgcaatggacatcactgccttcaaatccctcaacattccatttccaacctttccatcaaaatttctccttttcgtccatcagtttcttcantcaaacttttcggatnccttcctgaacttggttcatctcccattgctctctcaag

SEQ ID NO: 7758 - DNA, 253 bp, Glycine max
  unsure (1)..(253): unsure at all n locations; Clone ID: 701147567H1
gaccgtaatcctttacgctctctcactcacaaacgcacactgaattcaaaaacattcgaaagagagaggcatggccgagcaaaccttcatcatgatcaagccagatggcgttcaaagangccttattggcgagattattagcagatttnagaggaagggtttttacttgaaagggntgaaactcgttactgtggaccgncctttgctgagaagcactatgctgatttgtctgcaaagccttcttagnggnttg

SEQ ID NO: 7759 - DNA, 147 bp, Glycine max
  unsure (1)..(147): unsure at all n locations; Clone ID: 701147568H1
tcactccaatgganatgcaatggcaagganagttgttgagagcaggttactactggatgtcgatggagacagattgttgcaaacacgcaaggnaatgccacaaatgccagatttangctgacagnantcnngtacccccaacnncna

SEQ ID NO: 7760 - DNA, 238 bp, Glycine max
  unsure (1)..(238): unsure at all n locations; Clone ID: 701147569H1
gatgtagaatcanatgaaaattccaagtttctaagaagctatttcatgaacaaattgtggattgacaagagtgggaagaatttgaatgttggagaggatgaattgcnagaggtttcngaggntgagatagngcccnggaggcnngnaggattntggnncnngntttcnaggaaantccaggggaaagggtgtngggcaatgncncggaaggtgaagggancnttgaggaagangnctt

SEQ ID NO: 7761 - DNA, 258 bp, Glycine max
  unsure (1)..(258): unsure at all n locations; Clone ID: 701147570H1
ggagtcgcgtctgataataaaaatacacagtgagctctcgcttctagccctagggcgctgctcccgattttctctcttcggattgagtgaattgtgaaatgggttggaaagctgctgagaaactcttaggcnctggaaagttgtcananggggtaattgttantgttantaggggcnaaggttanggncgagnntgggcntattagcnttgtcnattcngnctcnggatcgnggcaatgtganggtaaaaatcnggtg

SEQ ID NO: 7762 - DNA, 197 bp, Glycine max
  unsure (1)..(197): unsure at all n locations; Clone ID: 701147572H1
tacgtgagattgttgagcngagttggactgctgactaatcatcatagataagatagggcttctgtgacaatcaaaaggttgtcaaaaggatatatgagngantaaccagcagncttcaaaaagaaccatatgattttctagtccttgacacngtgctgctcaaactcnangagttaatgntcccacntaatttcccc

SEQ ID NO: 7763 - DNA, 259 bp, Glycine max
  unsure (1)..(259): unsure at all n locations; Clone ID: 701147573H1
tccctctttgtctttcacacctctttggctctttctattcttatacattttaaaatatatgtttttaatgataagataagtatttacacttttattaacaatcaaaagttatcaatgaatgcgtagattagttgccaagttaaatattaggaagtggagttaagttgttcnaaagnaacctaattaccaacctttgagaaggattacctcctaaggataaagggggttccaaattaaattaccattataaccatggaaa

SEQ ID NO: 7764 - DNA, 254 bp, Glycine max
  Clone ID: 701147575H1
tagccatatattcacttggaaaaatactttttaaagtcaaagttgaacaacaaaaagttactccatgtaattttgagctgtatttttatatatgcataaaaataaataagataaaattaattatggccgaaataatttcttgatgtcaaatttttaacatactagaaactgcattcacatagctgttgaccagcaatcgtgcaacgcaaaaggcaagttgaagatgactctctctgagtcggttttttattaat

SEQ ID NO: 7765 - DNA, 252 bp, Glycine max
  unsure (1)..(252): unsure at all n locations; Clone ID: 701147576H1
gatctctttcaaacttcagatctatttcttcatcggttgttcaagtaaatggccttcgtcaccactgctgaagtgtgtgatgcgaacccccagttaattttgagtggggagcttcgtgcccttcagccagtttttcagatttacggtcgtcgacaggtcttctctggacctatagttaccttgaaggtgtttgaagacaatgntttggnnnnnanagttccntgaagagaaaggaatgggagagtgcttgtg

SEQ ID NO: 7766 - DNA, 265 bp, Glycine max
  unsure (1)..(265): unsure at all n locations; Clone ID: 701147577H1
ggttgttgtttgttgttgcattttgcacttgcaaaattttncgttgcagaggcagagagaggaggcaacgccacaccgcaccactctcactctgcaacacccgaatctcgtttcacctaaacgacctcgtttttgcgntcttttccctttctcttctgatngaggttcagagagaagaagaaggagcngcaatggactctcgcacgtataatcctcgcaccgtcgaagaggnttttagggattcaagggccgnanagcnggtctc

SEQ ID NO: 7767 - DNA, 263 bp, Glycine max
  unsure (1)..(263): unsure at all n locations; Clone ID: 701147579H1
ggggcaaatatctcagttcttccactttttcttaggatggaagactcgtgggagaattggatttcttctttggaaatgggtgaagacaacaattccaatggtcatcncacactaaactcactggatcggggtaaagctccctcaacnggggattgacctagagccaccagatttctcatttcatcaaagtgaccaacaacaacaacacacntataccagncatataatctcatcatgtaataacaatgatttcccatacaagc

SEQ ID NO: 7768 - DNA, 142 bp, Glycine max
  unsure (1)..(142): unsure at all n locations; Clone ID: 701147582H1
catttcacacattcatattaatcacgtgttcanaataacacatgtcaagtacaacacaacntatcaccctcacacaattcattacagatcatcacgnaataagtcacgatgaccntactaagcgntatgcnacaggtacatt

SEQ ID NO: 7769 - DNA, 252 bp, Glycine max
  unsure (1)..(252): unsure at all n locations; Clone ID: 701147583H1
ggccggaaaacatgaagcttaagcagttggaaggtctcctcggtggtcttcaacagttccctcaacccaaggtcgagcttgaacagtacccaacaggaccccatatagcttctcgaatgctttcactgcagagaattctttgaggatgtgagcgacaaagtagtggctgactttggatgcggttgtggnacgttaggngntgcagctgcactgttgagtgcagaacatgttcttggcatgacatgatccaga

SEQ ID NO: 7770 - DNA, 259 bp, Glycine max
  unsure (1)..(259): unsure at all n locations; Clone ID: 701147584H1
ggcacaagtgagtttgttgatcgagataactagaaacagtgtgatgaaaatgaaggtccttgttttcttcgttgctacaattttggtagcatggcaatgccatgcgtacgatatgttccctctccgaatgaacactggcnanggtgcccgtacnccggaagtgaaattgcnncagtttggangcttgcngtggagcnncccacanccttgggntttgagancatnctgaagaattcnntggaagccacnaagggattac

SEQ ID NO: 7771 - DNA, 259 bp, Glycine max
  unsure (1)..(259): unsure at all n locations; Clone ID: 701147585H1
gggtgcagaacaagatagataccaaaccataatgttgctgcaacattctatgttctgtgccattcctccctctcactttcaccccaccacttcaaacaaagggaacccatctcttcacggcttccttctcctagaaaggcccaaggcttccaccntaagattttcctctcttggcgctggtttcttcgatgacatcgtccaaattgctcataacaaggttcggattgcagntggtgtctctgtggcgatccggtnagct

SEQ ID NO: 7772 - DNA, 249 bp, Glycine max
  unsure (1)..(249): unsure at all n locations; Clone ID: 701147586H1
cgatcaactaaagaaatatgtgctatctgagctcaagttgacagctgagagaaataagctgaggggatttgaacatatcaagggggtcatattagaaccgcaagaatttgacatggaaagagatttggtgactgcaacactaaagangaaaaganaccaactactccagtattatcaggtgggaatagatgactataccaagttgaaagggaaaaagcataacttctgagattcnaaattctagaccgg

SEQ ID NO: 7773 - DNA, 253 bp, Glycine max
  unsure (1)..(253): unsure at all n locations; Clone ID: 701147587H1
ggcacaagtgagtttgttgatcgagataactagaaacagtgtgatgaaaatgaaggtccttgttttcttcgttgctacaattttggtagcatggcaatgccatgcgtacgatatgttcccttctccgaatgaacncngggnaaggttgccgtannccgggagtgaattgcgnannttggaggcttgntgtggaaccacacaccntctttggctttgagacatcctgagattgggtgaagcaacaaagggatac

SEQ ID NO: 7774 - DNA, 253 bp, Glycine max
  unsure (1)..(253): unsure at all n locations; Clone ID: 701147588H1
aagccagctggattcaaacaagaaagcaatgtcgatccagtgcaaggtgtgcatgcaaacatttatgtgcaccacatcggaagtgaagtgtagggagcatgcttgaagccaaacaccctaaatctgatgtttatgcttgttttcctcatctcaaaaagtgaactattggagagtgccaattgnggaaaacttanatctccatggcctctccctaaacctattgacagagatcttccccatttctatcnatana

SEQ ID NO: 7775 - DNA, 250 bp, Glycine max
  unsure (1)..(250): unsure at all n locations; Clone ID: 701147590H1
gcttggcgaacaatatagatcagactccaaaatagttaaccaacaagcttatttctatgctaaaaccctcaatatcactgccaaaaccgcatgggtgttcgacatagatgagactacactctctaatctcccttactatgctgaccangggattggggtggagttatataatggaactcgtttaataaatgggntgaccttggcgagnnacggnangccagagantctcaaattgtacaagaaactgttg

SEQ ID NO: 7776 - DNA, 250 bp, Glycine max
  unsure (1)..(250): unsure at all n locations; Clone ID: 701147591H1
gggtgcgaccaaatattcccgttcctcgggccttgactattgagccatatattcgcattcgcgcgtttccttcggctcttgcttccgtgactgagaaaaganaattagggtcacgagggtttcatcctgcggcatcanacangggaagangcaatnggcaaaaggcaaagatggctcncnagnagaacatcnagaagcagnagggcggctcaaanggaagccagctggantcnaacaaggaagcaatgtc

SEQ ID NO: 7777 - DNA, 111 bp, Glycine max
  unsure (1)..(111): unsure at all n locations; Clone ID: 701147592H1
tttgtagncccagagtagaacngtaatttatttcctccattatataaattggnatangnatcctcgtttggccaaggatgtgagattgctatccatgccgatgatnccatg

SEQ ID NO: 7778 - DNA, 265 bp, Glycine max
  unsure (1)..(265): unsure at all n locations; Clone ID: 701147595H1
gagagaaagagagaganagatgtcgaagcgtggtcgtggtggttcggcggggaacaagtttccgcatgtcgctgggtcttccagtgggcggcgacggtgaaatgcgccgacaacacgggggcgaagaactctacaatccnnttcgtgaaaggggttnaaagccgnttgaacnttcttccctcggcctgcgttggcgacanggtgattggccacngtgaangaagggaaacccgattntgaggganaaagtcttngccaactgtca

SEQ ID NO: 7779 - DNA, 276 bp, Glycine max
  unsure (1)..(276): unsure at all n locations; Clone ID: 701147601H1
gatccaactaaaattagaatgtgtttttgtatactaaaattaaatagataataatgagattggtaaacaggtagataaaaaaactaaagaatatatagctagttatatacttttgatgcaacttacatggttttcaaactttttatttctccaatgtagtttggaatgggaccagttattaagcaattcctcaattccctgagtaacaganatatgatagaagcctaaatgaattatatagttcttcgcgtaagagcagtgaaggtttcactcaca

SEQ ID NO: 7780 - DNA, 266 bp, Glycine max
  Clone ID: 701147602H1
ggtctctcaatcacttcacgcacactgtcacaggtgtagcggcgaaactgaggtcgtagaaagaatggcgaaaacgacgtcgttgttgctctttacactgctcctcttcggaaccttagctctcatccaggcgaagaaatcgaaggaggatttgaaggaagtgacccacaaggtttactttgatgttgagattaatggaaaagaagcaggtcgtattgtgatgggtcttttggaaaggctgttccaaaaactgcagaaaactttcg

SEQ ID NO: 7781 - DNA, 263 bp, Glycine max
  unsure (1)..(263): unsure at all n locations; Clone ID: 701147604H1
ggaagctggaaaagttagaagtagtgaagaaaatgaaagtcattgttttcttcgttgctataataattttaggtgcagaatggcaatgcaatgggtcagagcatgagcatgagcatggccacagctaccaaattttccctttgcgaatgaaaacnggccccggtggccactacattccggaggtatcgtgcaaaagttggaggctggtgtggaagcacacaacgtcattgactggagaaccatcctcaagattgcgagggata

SEQ ID NO: 7782 - DNA, 263 bp, Glycine max
  Clone ID: 701147606H1
gggtggtagcggctgtgacagactcagaggcggagcaaggagaatgggaaggtcgagaagaaagtacaagcaatcgagaaccaaggtccgtgtgggactccctaagaagaaccctaggcttttcaaaccctctttctccgttccacccaagctcttgcgaaccctcgccgaagagccccaatgggacgaccaaggcaccgttaacagcaactactcctccttcggcgttctccccgaccctaatccctcaccgagccttctcc

SEQ ID NO: 7783 - DNA, 262 bp, Glycine max
  Clone ID: 701147607H1
gtgggtcaaacttctcctctctttagctagctagctgcagagattaacaacgtggagatagaatcatcagcagcggccaccgataacaacaattggggtggtcgtggtgttgagagagagataccatacagtggctttgacagaggaaccttcttggcttggcaagatctgagagtggtgattcctaactttggaaagggaccaaccaagaggttgcttaatggactcaatggctatgctgagcctggtagaatcatggcta

SEQ ID NO: 7784 - DNA, 251 bp, Glycine max
  Clone ID: 701147608H1
gactcatccttcattaccaaacatatctcatttgaatacattccttgtagtttatactgaaagatgggtttgaagatggcgttactgatcctaggcctttccctcatgctccttttggtctcctctgaggtggcatccacgaatacaaaagaggaggcaaatggagtggatgatgccaaatatcccggtggaagctatggagggggttacccaggtcatggcggtggcggttatcctggccatggcggtgg

SEQ ID NO: 7785 - DNA, 257 bp, Glycine max
  unsure (1)..(257): unsure at all n locations; Clone ID: 701147609H1
gagcgaagaagatattngggtttttgagtgcggtgcggcgatcctagcactctcttactgcagctttcgccgacagcttcattcaccatggctgagcaaaccgagaaggcttttttgaaacaaccaaaagtgtttctcagctcggagaaaactgggaaagggaaagagacccggaaagggtgggaaccgcttttggaaatccntgggcttggttttaagactcccagggaagccatcgaggaacctacntgacaaga

SEQ ID NO: 7786 - DNA, 256 bp, Glycine max
  unsure (1)..(256): unsure at all n locations; Clone ID: 701147610H1
gattgatcagttgaatgtgcaaaagcaggaaatattagaaaaatgtgaactagaacagattagcctcccgatcatactggatcctatggatactgatagctcagtaccaggtccatcttttgactttgatcaactaaatagggcactgaaagataggagacactcagacagggataaaattgaggtagagtttaagcaaaaaattgatgccttgatatctgagangncnagaacagcaccaatttgaaggcntgga

SEQ ID NO: 7787 - DNA, 258 bp, Glycine max
  unsure (1)..(258): unsure at all n locations; Clone ID: 701147611H1
ggtggtagtggggtaacgatacgtaataagttctatcattgaggaagtttcctgtgcatcgtctccgaaaatgaacgacgcagatgtctcaaagcaaatccagcagatggtgcagttcatccgccaggnagctgaggaaaaggccagcgagatctctgtctccgccgaagaggaattcaatatcgagaagctgcattggtcgaagccgacaagaagaagattcaggcaagaatacgaagcaaagagcgccaattgaaa

SEQ ID NO: 7788 - DNA, 266 bp, Glycine max
  unsure (1)..(266): unsure at all n locations; Clone ID: 701147615H1
tgangaaaagtnaagtngnncaagctcatgctgtggtgctnaagctnaagggcacaattccaaaagggaaacatagtactgatgctatgagaatcnagcctgcgcgtttggacaacaatggtcaggtgttttggaagttgaaaagttataatagtgaatgtgctgttctgttgcaagatatcaaaattaaggatgnaactgctactgcacctgctgaaaaatggtttgtttatggtcctgaaaagaaggatgaggttgataagtac

SEQ ID NO: 7789 - DNA, 261 bp, Glycine max
  Clone ID: 701147616H1
ggagggcgaggaagccacatagagacacaatacagagtgagttgttgctccttcgccacaactactctgccaacatgggtatctccagagattctatgcacaagaggcgtgccactggtggcaagaagaaggcctggaggaaaaagagaaagtatgagctggtcgccagcctgctaacactaagctgtcaagcaacaagacagtcaggaggatccgtgttagaggtggaaatgtgaatggagggcttgagttggatactgg

SEQ ID NO: 7790 - DNA, 240 bp, Glycine max
  unsure (1)..(240): unsure at all n locations; Clone ID: 701147617H1
ggccaaaggaaanngctaaagagaagaaaagncnaagcaagggaccaaccaaaacacacacagagaaacatgtcttccccaagcaagcgccgagagatggacttgatgaaactgatgatgagtgattacaaggtggagatgattaatgatggaatgcaagaattttatgtgcaatttcatggacccaatgacatcctatcaggtggtgtgtggaaataagagttgattaccggatgctat

SEQ ID NO: 7791 - DNA, 264 bp, Glycine max
  unsure (1)..(264): unsure at all n locations; Clone ID: 701147618H1
gaggcgaganaaggcttttgagttatgatgatgaaaganatcatgattatttatctgaaactaagggggttgagtgtgaggcaagttgtgcttttacgagatttagtctaggagaataagaaacccggattgttcacgtgccaaccaagaatctcgaagctcccaaaatccaacagctaaaaaattcacagctgtgtcatccatgaccatgattcaatcccatccaaatccctctctataatgcctcatcaagatccagtagta

SEQ ID NO: 7792 - DNA, 275 bp, Glycine max
  Clone ID: 701147619H1
gagggtttcagtggtgttagatctgtacccgcctagccattgatttggaaaagtccaagcttcaaagatgagtaagcttcagagtgatgctcttagagaagctatctcaggaatcatgactgattccaaggaaaagaacaggaaatttgtggagaccattgaactccaaattgggctgaaaaactatgatccccagaaggacaagcgttttagtggctctgttaagttgcctcacatcctcgccccaagatgaagatttgtatgcttggagatgc

SEQ ID NO: 7793 - DNA, 259 bp, Glycine max
  unsure (1)..(259): unsure at all n locations; Clone ID: 701147621H1
gggtgttgtgttaatctcattcacacattcacagttatactctctctctctttgtcgcttggatcactgatctcatctcaattttcagatatgtcgacatctgataagccagaagtggtggaaaggggtagcaaggatgaaaaacacaaggaagatgatcaagaggaggggaagggtggattcattgagaaggtgaaggatttcattcatgacattggtgagaagatnncgaagctattgggtttgggaagccaactgc

SEQ ID NO: 7794 - DNA, 257 bp, Glycine max
  Clone ID: 701147622H1
gctatcgagtatgctaaaaagcataatatacctgttcctgtgacaaagaaatccatttatagcagggataggaatctttggcacctaagccatgagggtgatattttggaagacccagctaatgagcctaaaaaggacatgtacatgatgtctgtagacgctgaggatgctcctgatgaagcagaatatgtggaaattgagatagagtctggcctcctgtttcagtcaatgggaagaggcttcgccagcaactttat

SEQ ID NO: 7795 - DNA, 92 bp, Glycine max
  Clone ID: 701147623H1
agggtttcaagagtgttttgaactactccagaaccctctcttgtttttcacaaatttgggttcagtagagtactgacccagaaaagaagatt

SEQ ID NO: 7796 - DNA, 223 bp, Glycine max
  unsure (1)..(223): unsure at all n locations; Clone ID: 701147626H1
ataatgtgtatgtgtatgtagtgtggccactctggaagagaagagaaccaactcaactcaaaactcaaattatttggtttctgctctgtncattccctctgctgcttaacaacatccatcttctccaaaacaaaaacaaagaaatatctaaaatctggaacttacgctgatccataatttgttgcttnnggcnccttcgtacaatgtcagaactttagcatca

SEQ ID NO: 7797 - DNA, 260 bp, Glycine max
  unsure (1)..(260): unsure at all n locations; Clone ID: 701147627H1
gatcgaagcanaanatgaaaacccaaagtgcttctactcctactgtctttttctctactcttgctatccttttggctagtngcactgctgcaagtgcaactccaagaagcgcagtgccaagccaccatgtgtcaacattcaacagaagcctttttccttccacttttctctttgganttggttctctgcttaccaggcagaaggagcagcaatgtagatgggagaggaccaagcatatgggacaccttacatagacagca

SEQ ID NO: 7798 - DNA, 254 bp, Glycine max
  unsure (1)..(254): unsure at all n locations; Clone ID: 701147628H1
gattttggtgatcttgtgaattgatctgcgatgtccggacgaggtagttctgttggatacatgggctagcatgtatggtatgagggctaggattgcattggctgaaaagggtgttaggtatgaatacaaggaagagaatctcatgaacaggagtcctttgcttttgcagatgaacccaattcacaagaagattcctgttttgatccataatggcaaacccattgtgnnnctgcagnnnnagtgcatacatgatg

SEQ ID NO: 7799 - DNA, 253 bp, Glycine max
  Clone ID: 701147629H1
ccctcattcaattcttcaacttgatcctgaagtttaatatggtagatataaatgtttgaatggactagaattattcttgaggtcctatatttttgtaaagaaattgtttcttttgatgattacacttaaactttgatagttttgcctacatgatgcctagaaaattcatttctgttacaaagttgatcccttcaggtctaagtgagtaaatgttatgttgactgttttcgttgtgaatcataatacaaggtgg

SEQ ID NO: 7800 - DNA, 252 bp, Glycine max
  unsure (1)..(252): unsure at all n locations; Clone ID: 701147631H1
gcttaacagcnctacagtccaactctcaaccatccntngactcaanngcttccaccggaaganccgantccgcaaaatggatcaatctccggagcggtgttcaacataacaaccaccangatcggtntcgccctcanntccattccggcgaccatgaaggttttangcatagttccggggttggtggtgatcgngttggtggcatgataacagatgtgactgtggggtttatgctaaggtacacaagttccg

SEQ ID NO: 7801 - DNA, 262 bp, Glycine max
  unsure (1)..(262): unsure at all n locations; Clone ID: 701147632H1
gaccacttcaaaacactcataacacaaagcacaaagcaaagctcatccttgagttaaaaaatggcagcagcttcttccatggctctctcatccccatccttggctggcaaggccgtgaagctgggcccatcagccccagaagtgggaagggtgagcatgaggaagaccgtcaccaagcaggtctcctccaggaagcccatggtacggcccagaccgagtcaagtattgggcccntctctggcgagcccccgtccttactaac

SEQ ID NO: 7802 - DNA, 273 bp, Glycine max
  Clone ID: 701147633H1
ggggataaattaagacattcaagtttgtgacaaaacccgaaaaacgcgtaattgtcccttaaattgcatatcccgaatcctaatcgcatgcgatccattcttacaaacaaagccgtagtttagttggaaagggtctttttctttcctacttggaaggtttctcttcgtatttctcgtaaaactctcaacctcaaaggaaaaaagaaaaggctttagttatatggataacaaatcaccaagcaaggagtccaaggaggagacacgtgagtcgct

SEQ ID NO: 7803 - DNA, 260 bp, Glycine max
  Clone ID: 701147634H1
gagactggggttgtgaagcctggtatggtggtgacttttggtcccactgggctgacaactgaggttaagtctgttgagatgcaccatgaggctctcacagaggctcttccaggtgacaatgttggatttaatgtgaagaatgttgcagtcaaggatctcaagcgtggttttgttgcatccaactccaaggacgaccctgccaagaagctgccaacttcacatcccaagtcatatcatgaaccatcctggccagattggta

SEQ ID NO: 7804 - DNA, 275 bp, Glycine max
  unsure (1)..(275): unsure at all n locations; Clone ID: 701147635H1
ggatatccattttatttacaacaacaatggcttctgtgcctcaaccaaaaatctcccttctaaccttattcttcttctcgtccttcaccatcattgcgcatgcaattgttcctcaaaacgaaaccttcaaatttgagaactcaggtgaacttggaccctacatcgttgagtacggtgcagattacagaatgataagcatcttcaactctccatccaagttggtttctacaacngccaccccaaatgccttcactctagctttgcgtgtagggctc

SEQ ID NO: 7805 - DNA, 263 bp, Glycine max
  unsure (1)..(263): unsure at all n locations; Clone ID: 701147636H1
ggcgcacccagagaggaggaanntttgagagaganagagggaggagggagagtgttgacgctccatcaagatgggtatttctagggattccatgcacaagaggcgtgccactggtggcaagaagaaggcatggagaaagaagagaaagtatgagcntgggcgttcaggccgcaaacaccaagttatcangcaacanaactatnccggaggntttcgtgnncgagtggcntgttaatggagggcttgaggttggtaccggcatt

SEQ ID NO: 7806 - DNA, 259 bp, Glycine max
  unsure (1)..(259): unsure at all n locations; Clone ID: 701147638H1
gttatagatttattagtatactattatgcgttaaatttatgtttaatttgatcaaatatttttgtactctacaaaatcaaaggaaaataaataagttaaaaaaggaaattaattcatgtttcacattaaaataaaataaggggatgtactaaattgatcttcttacaaaattaacacataactttctataatttggtataggtcttaaagtaacaacaataataacaaacgagaaggtaattganatgaaaattatctt

SEQ ID NO: 7807 - DNA, 255 bp, Glycine max
  unsure (1)..(255): unsure at all n locations; Clone ID: 701147640H1
gggttaacaataaatgantaagagagagagaganaataatgtgtatgtgtatgtagtgtggccactctggaagagaagagaaccaactcaactcaaaactcaaattatttggtttctgctctgtaaattccctctgctgcttaacaacatccanttctccaaaacaaaaacaaagaaatatctaaaatctggaacttacgctgatccataatttgttgctttcttcctcgtacaatgtcagaactttagcatcac

SEQ ID NO: 7808 - DNA, 259 bp, Glycine max
  unsure (1)..(259): unsure at all n locations; Clone ID: 701147641H1
gggtccccatataaataaatgacgtaatttattgaatgaaagtgtaggtgcttgctttatataaatttaaaagttgacggaaaagtcttattgtagctgtttggttataaaattgaaaaaaaaagacgggaaaatagaatggacgcagatagtgattncagaattgggaattgcgatggatgggagaaacggaagcggaagcaggaggagtggggaagcaggaggaatggggaaggcgataatcgcgttggtantggga

SEQ ID NO: 7809 - DNA, 262 bp, Glycine max
  unsure (1)..(262): unsure at all n locations; Clone ID: 701147642H1
ggatcagnaatcgtanagatanacacttggctgnngaaggtcggaaaanaaaatggagttgttcttctacacggtgttcggtggtttggccgcggttgtggcagttatggagctgagcaagaacaacaaggatcgaatcaacacctcttccgcattcaattcctcgagaacaactacctcctcgtctattccctcatgatggctggagattggctacaaggtccatnnggcctactacctttacagtacatatggatacggg

SEQ ID NO: 7810 - DNA, 213 bp, Glycine max
  unsure (1)..(213): unsure at all n locations; Clone ID: 701147643H1
gtgttctgagctgctagaagcaatggagaggaaaagaagccatgcttctttcaccatgtttgcaatgcttgttggattgctctctcagagccttgtcattcccgtaatatccaccactgttgcagatccagaagaactaactnacaccccagatccacatgctggaagtccccccacaggctacacacaatagtagtcctccatctncatggc

SEQ ID NO: 7811 - DNA, 252 bp, Glycine max
  unsure (1)..(252): unsure at all n locations; Clone ID: 701147644H1
gagccaaggaaatgccctggattcatatatagatgttccatctctttgggtcaaaccaatatgaatccttctgaatttcgtacatttattgaaaacatggcttctgagtatcatggagatacctatcaccttataactaagaactgcaatcattttacagatgatctctcttatagattgactgggaaacaaatcccaggttgggtgaatcggcttgctnagctaggtgcttgtgcagctgtctacttcctg

SEQ ID NO: 7812 - DNA, 249 bp, Glycine max
  unsure (1)..(249): unsure at all n locations; Clone ID: 701147645H1
gtggtggtatgagttattggtactcctttcagggcttctaaccaatgcagctgatgcagtagccaccgctggaataataattatggtcactttacntatctacaattttcattttgctttgagcttggccgtttcaacaaaggtagggaacaatcttggagctaacaggcctaacaaggcaaagacatcatcatcgtcatcatcactgcgctactttgtgcttctaacagaaatgtggctactcttaaa

SEQ ID NO: 7813 - DNA, 259 bp, Glycine max
  unsure (1)..(259): unsure at all n locations; Clone ID: 701147648H1
aaagagacccggaaagggtgggaaccgcttttggaaatccattgggcttggatttaagactcccagggaagccatcgaaggaacctacattgacaggaagtgccccttcactggcaatgtttccatccgtggccgtatcttggctggaacatgtcacagtgctaagatgaacaggactattattgttaggaggaattatctccatttatcaagaagtaccagaggtacgagaaaaggcatcccaacntcctgctccnta

SEQ ID NO: 7814 - DNA, 253 bp, Glycine max
  unsure (1)..(253): unsure at all n locations; Clone ID: 701147649H1
ttcacantganatgttagganactgcatttgttaatattnnacatnnnattgnaagatgnttgaggtgtctgtgttggaaatatacctgacagtctgacacctcaagtggaagacttgtatgtgctttataggcaatnatgnttatatatatggttctgnttcancatatatctanatanatatggtttttcangganaggtacgaaagaattgttgcttatagaaaattcgattttggtnatcaaggcaccc

SEQ ID NO: 7815 - DNA, 105 bp, Glycine max
  unsure (1)..(105): unsure at all n locations; Clone ID: 701147650H1
acatggaagtctaagctcaaanctcagtttcctagtactcaatgagtactctncgntnntgggtgnnttcnctactgcnactggnatngccacatncacaatgat

SEQ ID NO: 7816 - DNA, 262 bp, Glycine max
  unsure (1)..(262): unsure at all n locations; Clone ID: 701147651H1
cactggtagggctcctaattctaagaggctgaatttagaagctgttggtgttgagcttgactacactggagcaataaaggtggatgagtattcctgcacaagcatacctagcatatgggctgtgggtgatgtcacaaaccgaatgaatctnactccggtggccttgatggaagcatcgtacttgctaaaactgtatttggtgggcaaaaaattcaagccagacttaccataatattccctatgcagtggttccgcattccgc

SEQ ID NO: 7817 - DNA, 271 bp, Glycine max
  unsure (1)..(271): unsure at all n locations; Clone ID: 701147652H1
gatcgcaaaatcagaacccaactaaccaaaccagctatggcggcgatgcagaggccacttcaagagaaccattgcaatcgccaagctacgcgcgtgcttttcctctctccgacnnnnnnnnnnnnnnnnnnnnnnnncgtcccctccgccgcagctcngnctgttcgatcaccagccgcacccttaacaacggtcccttacgccgatgaagtcctcgccaagcgcaaaacgttcctgcggtcntccgtcttccattataataagaaactct

SEQ ID NO: 7818 - DNA, 259 bp, Glycine max
  Clone ID: 701147654H1
ggcattatatttgagttcaaacaaatcaaagccatggccacctccaacttctctattgttctctccgtctccctagccttctttttggtgctacttaccaaggcacactcgaccgataccgtttctttcaccttcaacaagttcaacccagtccaaccaaacattatgctccaaaaagatgctagtatttcatcctctggggtgttacaactcaccaaagttggcagcaacggcgtgcccacctcgggatctctcggtc

SEQ ID NO: 7819 - DNA, 210 bp, Glycine max
  unsure (1)..(210): unsure at all n locations; Clone ID: 701147655H1
gcaannngagagaaataatagatattatagnnaannatagaatacnaatgnncaataaatatataattttctcctttttgttttatgctcactgggagttcggtaggattattttgcgacnccagagtcagaaaatgttntnactatttnctaccatatnttcaagacantttnaaanacnnnnttattattagttatgtgttnttnaaa

SEQ ID NO: 7820 - DNA, 239 bp, Glycine max
  unsure (1)..(239): unsure at all n locations; Clone ID: 701147657H1
antagnaattgatattgacttttgtgatgtggaggnanncttgcngaatgatgtcattgaggnacaagctgatnatgnnatttgtaatgtggaagagaacatgcagaatgatgtcaatgaggagcaagttgatagtcgccaattgtgatgcggaggagaactgncagaatgatgtcaatgaggagcaagttgatgccattcagcaagttatgcatgctgcatctagtgtaatggtgttg

SEQ ID NO: 7821 - DNA, 254 bp, Glycine max
  Clone ID: 701147659H1
aatggtcctgaatacagtttaagaggctattgttggatacttccacatgtcccgaaatgaatatattgacaaaaatagtgaaagccactgcactatgccatggtaaaaataataatcaggtcagcttgaggtggctcgttggctgaagtcccacatggactaaagcaagagatgaaactgacagacgctattataaaaggagttatcagacacagtggcaaagcatcttgcgctggggcatgacgcagctagtg

SEQ ID NO: 7822 - DNA, 261 bp, Glycine max
  unsure (1)..(261): unsure at all n locations; Clone ID: 701147662H1
gaagtgaagtggctcaagctcntgctntggtgcttaacctntaagggcacaattccanaagggacccatngtnctgctgctatgagaatcgagcctgcgtgtttggacaacaatggtcaggtgttttggaagttgaaaagttataatagtgaatgtgctgttctgttgcaagatatcaaaattaaggatgaaactgctactgcacctgctgaaaaatggtttgtttatggtcctgaaaagaaggatgaggttgataagtac

SEQ ID NO: 7823 - DNA, 258 bp, Glycine max
  unsure (1)..(258): unsure at all n locations; Clone ID: 701147663H1
acacgtgatcgctcaagaagcttattcaaactcttcaatgagagatttgtaatttactgattgcatttccatgttgttattgcgtgtttctatctggacataagaaaagttattaagaccaaacaaagtaagaatccagtgctttgaaagaactcctacacctgaaattntatcacctagaaaagcaaatagaactgaaatagtganatctcttaagcagaacgcaacttcgacagcaccncnanatggtcnctgtng

SEQ ID NO: 7824 - DNA, 262 bp, Glycine max
  unsure (1)..(262): unsure at all n locations; Clone ID: 701147664H1
gacnacattccaaaacacaacacacatacattgtagtatcacttttgtctacggaatttgttcttttgagttatggcaagcttaaaggttgcatgtgnggtnttgatgcgnatggctgtgatgagtgnaccaatgcatggtncaagccgtgtgcgtgcaatgatgtttctgtgaacctagnaccgtgcctatcttcacctgatgcagggtggagatgttccagaatcgtgctgtagcggngtgaggnacatctgggttctgc

SEQ ID NO: 7825 - DNA, 256 bp, Glycine max
  unsure (1)..(256): unsure at all n locations; Clone ID: 701147668H1
cctccaattcccggatgaatcattgagtgaggcacttgaaagattcaaaagtctattgcaaaaaatgcctactcatggtttttctgaaccaatacagctgcaacatatttatagatgggttaagacccacaatctaaatagctcttgnnngttnccactggggggtaaaatccaaattgaagaccccgaggaagccatggacttgattgaagctggntgtagtgacttgctattttgagagacagagcccacttct

SEQ ID NO: 7826 - DNA, 264 bp, Glycine max
  unsure (1)..(264): unsure at all n locations; Clone ID: 701147669H1
tccagctaggctttttgcagtccctcctcgaatagcccagggcattattccaggggttacggctgaatcttatcaagaggacaacaaattatggnaaaagcatgttaacgcttacaaaagaatgaataaattgattggcactaccagatatcggaatgtgatggacatgaatgcaggccttggaggatttgcagctgtgctgaatcacaaaagtctgggtgatgaatgttgtgcnccacaattgctgagaacacttgggtgttg

SEQ ID NO: 7827 - DNA, 97 bp, Glycine max
  unsure (1)..(97): unsure at all n locations; Clone ID: 701147670H1
gctatcgagtatnctaaaangcttaatatacctgttcctgtgacanagaaatcccatttatancanggntaggaatctttgggcacctacagccatg

SEQ ID NO: 7828 - DNA, 253 bp, Glycine max
  unsure (1)..(253): unsure at all n locations; Clone ID: 701147671H1
gataatgcttaattttaaaattgtatttgcaggagccagtttctcatgttgtggctcgtccttcaccgagtgatattcttgagtggcattatgtgttggagggaagtgaaggaacaccttttgcaggtggatattactatggaaaaatcaagtttcctcctgaatatccatataaacctcctggaatcagcagactacccctaanggcngttcctgncccgnaaaaanttgtttnccaanngggccttccncc

SEQ ID NO: 7829 - DNA, 255 bp, Glycine max
  unsure (1)..(255): unsure at all n locations; Clone ID: 701147672H1
gattgatcagttgaatntgnnnaagcaggaaatattaganaaatgtgaactataacagattagcctcccgatcatantggatcctatggatactgatagctcagtancangtcnatcttttgactttgatcaataaatagggcactgaaccgaaggagacactcagacagggataaaattgaggtagagtttaagcaanaaattgatgccttgatatctgagattganagaacagcaccanatttgaaggcatgg

SEQ ID NO: 7830 - DNA, 256 bp, Glycine max
  Clone ID: 701147675H1
ggcacaagtttgttgagatagctagaagcaataagatgaaaatgaaagtgcttgtgttgtttgttgctacagttttggtagcatatgaatgccatgggctcagactaccagaagttccctctcccaaatgaaaactgggtttggtgggcattacagcaatgaggtggcatgtgccagttggaggcttggcgtggaagcaaacaacgtagtccaatggcaaactgttcctgcagcttgcggagagtacatagctgac

SEQ ID NO: 7831 - DNA, 258 bp, Glycine max
  unsure (1)..(258): unsure at all n locations; Clone ID: 701147676H1
ggacgatgatgagcagcancaacnacaangttgganaatttggagacaccactactgaccaangnnttngttgggggctagcttnggagactccganggangcccttaaagaccactttgagnagtanggtcagatccttgaagctgtcatcatttccgatangcacactggcaaatccaaaggctatggctttgtgactttcaaggaggctnangctgccaaganggntgtgngattnngcaatctcaacatcaatg

SEQ ID NO: 7832 - DNA, 232 bp, Glycine max
  unsure (1)..(232): unsure at all n locations; Clone ID: 701147677H1
ggcagttcaaagcgantgaaagattcgaaacgangantagaaagcgttgtgaagaatggcggaagagggactgtgctcggtgtccacagcgtagaggagtggaangaacatnctcaagaagggagaagagtccaagaaattgattgtggtggattttactgcttcttggtgcggtccatgccgtttcatgccccaatctgcagagtttgctaaaaagtgccgaatgtnanct

SEQ ID NO: 7833 - DNA, 256 bp, Glycine max
  unsure (1)..(256): unsure at all n locations; Clone ID: 701147678H1
ggggccttggttgagtatttgctccgcagagncagagaggnnaaaganacgnnaacaacgatggctgtgaaagggtcaccacaacggtgggacatgagattatttttgacaattactctttctttaatctcggtctctgtttctgctcttcaacacgtaagttcacaaaaacattaatcccaccaccgttgagacaacccaaactagttttcttggtaaagtcgtgaactttttgtggagctcatctggctctgga

SEQ ID NO: 7834 - DNA, 254 bp, Glycine max
  unsure (1)..(254): unsure at all n locations; Clone ID: 701147679H1
gggggggggnaacagcacnacacgtcgaactaccctccctcactcaaaaccctcgangctcactccctctctcacatcgcaagccagccaccgcctccantggtggcactgtcataatccggcgcgaattgccccctcaacgtgggagantgtcgctgaagaagttgtttcgggtacggctaagagatttctgggaatctcatcctgaggantgccagcacacaaaccattgttgggttatcatggcaaccaca

SEQ ID NO: 7835 - DNA, 178 bp, Glycine max
  unsure (1)..(178): unsure at all n locations; Clone ID: 701147680H1
atcgangcaaaannctnnnngccnaaagtgctanctctccctatgtactntnatctctactgcttcgcctataccttttgggctagtgcgcactgcngtcnagtatcaactcccaagaagcgcngtgncaagccaccatgtttcnacattgcaacagangcctntntccatccacntt

SEQ ID NO: 7836 - DNA, 259 bp, Glycine max
  unsure (1)..(259): unsure at all n locations; Clone ID: 701147681H1
gcgaacagaaactttacatcaacaatacgacttggtcaaagaaaggactatgaatggaaattcaatctatggttcccacgtgatgcagtatggtgacatagggcttagcaagaacaatcttgtcgnatatttgggtacaaatcctgctaatgataattttacttttgtgcataaaaactcattggtgccaccttcaaaagcagtcaaccaacgtgatgcagatctcatccattctgggataagttccgcaaagctcctg

SEQ ID NO: 7837 - DNA, 269 bp, Glycine max
  unsure (1)..(269): unsure at all n locations; Clone ID: 701147682H1
ggcgcaggtagagagagcgagagaacaagaacataagggaaccacagcggcggtaacagaagaacaagcagagaatgggtcgagtgagaacgaagacggtgaagaaatcctctcggcaggtgatagagcgtcactactcgcgcatgaccctggacttccacacgaacaagaagcttctggaggaagtggcgatatcccgtcgaagaggctaaggaacaagatcgcnncggttctcgacgcactgatgaagcgcatccagaagggccctg

SEQ ID NO: 7838 - DNA, 239 bp, Glycine max
  unsure (1)..(239): unsure at all n locations; Clone ID: 701147683H1
gacacagagagtccagcaatataccaaaaatcatgtttggaccattattttgataaacctatacaagtaacaggagatgtacggctcacattctatgagaaaatgataggagggcgcctgttctactgctgttttaatacagcttttattaggaacagctactacagctcccaatacaagagttggacaaagttgggaaganaggaacatcaatatgtggccctgactctgctaganta

SEQ ID NO: 7839 - DNA, 267 bp, Glycine max
  unsure (1)..(267): unsure at all n locations; Clone ID: 701147684H1
ggcatatccaaaggaacaaaaatattattaagatgatcaacattattggagcacttgttctatcnttgcattctcttcctcagttgtgtgtatgcaaagacccnacnaaccntggggcnggaattnaaactttgggggatcnggnggnggatgtagggaacagtggcatcttcccacccttttnaaggctgattaccctccttatgggagggactttgttaaccaccaacctactgggagtttgcatggcaattagctactgatgtc

SEQ ID NO: 7840 - DNA, 254 bp, Glycine max
  Clone ID: 701147685H1
ctcggtaacaattttctcaccggaacagttccccaaggaattgctaagctcgttaatttaacctatttgagtctcgaaggaaaccaacttgaaggtaccataccggattttttctcttccttcacggatcttcggattcttaatttttctacaacaaattttccgggaatatccccaactcgatttcttccctggcgccgaaactgacgtacttggagcttgttccacaactcatttccgggaaaatccctgat

SEQ ID NO: 7841 - DNA, 232 bp, Glycine max
  unsure (1)..(232): unsure at all n locations; Clone ID: 701147686H1
gtatccggaaaantttgcatcantgttagaaatncacanttagtagantctgcaanttttttttcatttgatgtgaaaacacggggaaaatgagtgttgaaaacgcgtgtccaaacactccataagtctaatatgttttggctttttaattaattgcgaatgcttttttaaatgaggacaacaatttctactttctgatatctaaagtgtagagagtacttcagtgtacata

SEQ ID NO: 7842 - DNA, 241 bp, Glycine max
  unsure (1)..(241): unsure at all n locations; Clone ID: 701147687H1
ggtgtacatgatgaactctaggaagtttgcaaaacggataaagagtgagcggaagttatattccggaaagttatatctttttcagttgtagtgtttttttgtttttatttttccctagataagcagaccgtggaaaactgcaagtnaaagctggagcttttgcttcaatcacatttgactatttcactgattagaacaggcaagatgtccctttgggttgatcttttaggtttcgaccatt

SEQ ID NO: 7843 - DNA, 256 bp, Glycine max
  Clone ID: 701147690H1
gatggagaaggatacctccgtcgcggatcgtctcgctcgcatgaaagtcaactatatgaaggagggaatgaggaccagtgtggaaggaattttactggtacaagagcacaatcatcctcatatacttcttctgcaaattggaaacacattctgcaaactcccaggtggtcgtctcaaaccaggagagaatgaaaatgagggcttgaagagaaagttgactagcaagcttggtgctattcaccagctcttgtgcctg

SEQ ID NO: 7844 - DNA, 257 bp, Glycine max
  unsure (1)..(257): unsure at all n locations; Clone ID: 701147691H1
ctataaagacctggggaaaatggatcgatgataatatcaatccacgaaaacagattgtctactatcgtggatattctaatgcccatttcagaggtggggactgggactcaggtgggtcatgctacggtgaaactgaaccagcttttaatggctctatcctgaataactatcctttgaaaatgaaggtagtagaggaagtgatccggggaatgaaggttcccgnnaaagttattaaatgtcacaaagctgaccatttc

SEQ ID NO: 7845 - DNA, 249 bp, Glycine max
  unsure (1)..(249): unsure at all n locations; Clone ID: 701147692H1
tcctgttatgatgtgtatatctatttagctggagtgacccgtccttttgattaactcgtaaccctttaaacttacggagaataagannatnctataaggaatgagttttcaaattaatctttttctgctttctaatttttttttacaagcaacagattagatgttttctctaatcttctatttcttttcctagccagaacacgtggggtgcaaccatgtttaatttaaanttnaataggcataaaatga

SEQ ID NO: 7846 - DNA, 265 bp, Glycine max
  Clone ID: 701147694H1
gatgaaaagtgaagtggctcaagctcatgctgtggtgcttaagctaaagggcacaattccaaaagggaaacatagttctgatgctatgagaatcgagcctgcgtgtttggacaacaatggtcaggtgttttggaagttgaaaagttataatagtgaatgtgctgttctgttgcaagatatcaaaattaaggatgaaactgctactgcacctgctgaaaaatggtttgtttatggtcctgaaaagaaggatgaggttgataagtac

SEQ ID NO: 7847 - DNA, 257 bp, Glycine max
  Clone ID: 701147695H1
ggatgcacaagtttgttgagatagctagaagcaataagatgaaaatgaaagtgcttgttttgtttgttgctacagttttggtagcatatgaatgccatggctcagactaccagaagttccctctccaaatgaaaactgggtttggtgggcaatacagcaatgaggtggcatgtgccagttggaggctggcgtggaagcaaacaacgtagtcaagtggcaaactgttcctgcagcttgcggagagtacatagctgact

SEQ ID NO: 7848 - DNA, 234 bp, Glycine max
  Clone ID: 701147696H1
ggttgcagaagtagtgtttcactgtttcttgctgcttgtgctctatgtgggtcgcgtgaagggaacttcatcagcacaggatggatttccagggattcctaaacgacttgcaggattgggaactttctagaaaggataaaacacgagcacaaaaggaaaatcttactggatccgtgggtgtggagaaggcatcaaaaggagataccattctttgatcgtgcaagaaattctcca

SEQ ID NO: 7849 - DNA, 270 bp, Glycine max
  unsure (1)..(270): unsure at all n locations; Clone ID: 701147704H1
gngacaacatcacggctacaaatnntattcaacatctttaatggcagcaccaacttngctacattgctaggcgcttttcncnctgatnccttttcngtcgcttacaagatactggcattctgacacngnggnttgccttggngtttgtttgacatancaantggacagggncaantgagaacgcngcnnccnacttcactgggaaaaatctgccaattgncncgggaccaacnacangggcantcncctttcttcaaanancgntttggg

SEQ ID NO: 7850 - DNA, 255 bp, Glycine max
  unsure (1)..(255): unsure at all n locations; Clone ID: 701147711H1
tgaggctattnctcttgggattgctgagatgactactgctgttatngccacttgtgatcatngggttgtggccaagatccagagggtggtcatggatagggatacttatccaaggnagtggggtttggnacccagggctttcctgnagaagangcttatagtgaagggnaactcgataagcatgggaagcccatgngagactccacaggatggcttaggaactggtttngccatggtgggatactgattnncgct

SEQ ID NO: 7851 - DNA, 249 bp, Glycine max
  unsure (1)..(249): unsure at all n locations; Clone ID: 701147713H1
gacattgagatttcctgttgtcattattgtttaagtaatctggctctaagcatgattagggacttaatctttcttgtctcttaccaaggacttcctaacctcatagagggttgaataaatatttgacaatcccagcctatacccttatggnaaacatgaatgtaaaaattatctggagcttaattngtatnataataataattacttatcttaaagtnaattccataacttaatactaaaatgattaat

SEQ ID NO: 7852 - DNA, 278 bp, Glycine max
  unsure (1)..(278): unsure at all n locations; Clone ID: 701147714H1
gggggttagattaggtcttcntacccaaaacaagactttcaatttctgtttcagttcgcggagatcantattttatctaggtccattcgtcgatagaagatacgaagataccaaaggcnatgtntttgntgggnttngttttatggattctagcgtccnnccgggctgtggcagaaggnggccaangatcntattccttgggncctcgataangctggcaaaactaaccttgccttcacatgcncaagagatgangagnattaatcccanccatcnnc

SEQ ID NO: 7853 - DNA, 264 bp, Glycine max
  unsure (1)..(264): unsure at all n locations; Clone ID: 701147719H1
ggtatatgttcttttatcaggcaccatagtgaaatataagtttgccgctcaattnaatgattcaactcaaagtttgatatnccaanatgagtncaagtngagaccaagaactatttcnctgctggtaactangttgcacttggnagtaggaactaattgnncacattacatncaaagcctctttaaaaccntgtttggnattatgggantncnacggaccngncnagaaaggatttgggttcnccanagnctnccccnaaatng

SEQ ID NO: 7854 - DNA, 258 bp, Glycine max
  unsure (1)..(258): unsure at all n locations; Clone ID: 701147720H1
gaatcgtcgacaacttnatcnnngacaacttgatcaaagnttataanggcacatagcnnagcaaagccaaantcttagcccagaatccntcctcgggccagcattcgaanttagtttctgatcctaagnaacactttggatcctggaatctttgcacaatatgtccacanctggaccggtgnattaggaaaacctaaccagactggggatattngctaccgctgcaananatcccatttcttgctcacatcaangtcg

SEQ ID NO: 7855 - DNA, 258 bp, Glycine max
  unsure (1)..(258): unsure at all n locations; Clone ID: 701147721H1
gggtggaganaggggcactgactcacacacacaatagtcgggggcagcttcaaagtacctccacattgtctcctacncttactgntctcttctctctcatcatttttattntttccaatcanaccaaacaaaactaagcaccgcncntttctctccggaatccccatctcccttcattctgagctctgggacgnatcccaggtctcaccatctttccacgcantcttncatcagattcacccttcggtttanggcaac

SEQ ID NO: 7856 - DNA, 273 bp, Glycine max
  unsure (1)..(273): unsure at all n locations; Clone ID: 701147723H1
ggcagttcaaagcgangaaagatttcgaaacgaagaaagaaagcgtgtgangaatggcggangagggacaagtngtcggtgtccanagncgtananggagtggaaggnactctcaagaagggacgaanagtcccaaacatcttnattgtggtggattttactgcttcttggtggcggtncnatgccgtttcattgccccaattcntgcagantttgctaaaaagttggccgaatgtcaccttgcctcaaggtggatgtgggatgaattggaga

SEQ ID NO: 7857 - DNA, 256 bp, Glycine max
  unsure (1)..(256): unsure at all n locations; Clone ID: 701147725H1
ctatgtatatcgggagtaaaatttattgttttctcatttagggagtaaaacttaaaatggagacacctagaatccaagtgaataattnaactttattttattttcggaacgtcatanattctaaacaccccggatctcttttcnttatcgaaaaaancctgggncttaacaatgagggaagcagnttcctattaatgataattannatgaggtaaaaaatgtgattcnggtgcncaggggtgcaaaaaatgaccng

SEQ ID NO: 7858 - DNA, 259 bp, Glycine max
  unsure (1)..(259): unsure at all n locations; Clone ID: 701147726H1
gggctcagcacagacattgtcagttgcagtaaaaaggacacgggagagacgtaaggttttcaatgctggcaactgcagggattttggaagttccaaaggaggccaacaagatatattgtgaagctcaagatatgtnaagactgacaggaaaaaatgtanggtccagataagtggatatttttccctaatagaaanggattttcctagtccactgttggacattgtgccacaccgcatatttcctggtcctattccagca

SEQ ID NO: 7859 - DNA, 255 bp, Glycine max
  unsure (1)..(255): unsure at all n locations; Clone ID: 701147728H1
gactcaccactttcaaaacactcataacacaaagcacaaagcaaagctcatccttgagttaaaaaatggcagcagcttcttccatggctctctcatccccatccttngctggcaagggcgtgaagtngggcccatagccccagaatgggaanggngagcntgagganaccgtnaccaagcaggtctcctcnggaagcccatgggtacggccccagaccgggtcaagtnttgggcccattcttgggcgagccccgt

SEQ ID NO: 7860 - DNA, 278 bp, Glycine max
  unsure (1)..(278): unsure at all n locations; Clone ID: 701147729H1
catgaaagtatttacgcaggatgtactagaccaacttattggagtctaacaaacaagtnannattgggaatcccttggagaacgggactctagttggngtcttgcatatncctacnncangggaaaactttcagaagggtantttccagtcataanannctnccagggagggaaagatcctaaacangggggatcnggattaaagtcnanccngggaaattttggaacaaaccaaccaatngtggagatttctcccngatgcctcctgcaagtnaaaa

SEQ ID NO: 7861 - DNA, 92 bp, Glycine max
  unsure (1)..(92): unsure at all n locations; Clone ID: 701147730H1
gtgnatatatgactctcaagccgtgcgattgcttgcaattgnacatatgtnaggtggaaaaaaacatgtaaacttgtacttgttattaatta

SEQ ID NO: 7862 - DNA, 250 bp, Glycine max
  unsure (1)..(250): unsure at all n locations; Clone ID: 701147733H1
gatcgtcgacaacttgatcgtcaacaacttgataaaagtttatacggcagttgcaagcaaagccaactctagcccagactccttcctcgggccagcatttcgaagttggttctgatcctaagaaacactttgggactctggaatcttgcacatactgtccacagctggancggtgaattaggaaaaccttaccccgactgggggtgtggctacgntgcaananannccatttcttgctcaccatcaaacg

SEQ ID NO: 7863 - DNA, 265 bp, Glycine max
  unsure (1)..(265): unsure at all n locations; Clone ID: 701147734H1
gggtgtggcactcaaacattgttttgttgtaggaagaggaatcttgagaantgggcaggggacagcaagagcaagattctgntcatcggagggactggttaccatcggaaaatttcatcgtgggaanccagcggccaagttgggcnacccaactttccctttggtgaagggagtccanttntccaaccccgaaaaatcnacccctcatcgnacaatttcnaanggctcggggtcaatcctggtttangaaatccaataccgtccc

SEQ ID NO: 7864 - DNA, 255 bp, Glycine max
  unsure (1)..(255): unsure at all n locations; Clone ID: 701147735H1
ggaggaagagaagagacactgaggtcgttggcgagaatgggaagaaagaaggggtatgttgagttcgaggagtcgccgccggacgattttgatccggcgaatccgtacaaggacccggtggcgatgctggagtgagggagcacatcgtgaganagaantggatccaaatcgagaaggccaagattcttaaggagaanctccgttgtgctaccgcatcgaaagcgtcaaccaacttcagaattccggcaacttgtt

SEQ ID NO: 7865 - DNA, 260 bp, Glycine max
  unsure (1)..(260): unsure at all n locations; Clone ID: 701147739H1
ggcacaagtgagtttgttgatcgagataactagaaacagtgtgatgaaaatgaaggtccttgttttcttcgttgctacaattttngtaggcatggcaatgccatacgtacgatatgttccctctccgaatgncactgggctatgatgcccatactcccggagtngaangcngcangtngggaggnttgngtgnnangnncacancatccttgggctttgngaccattccngaanaannncgtggaagcacaaaaggaatc

SEQ ID NO: 7866 - DNA, 274 bp, Glycine max
  unsure (1)..(274): unsure at all n locations; Clone ID: 701147740H1
agtttgttgatcgngataactagaaacagtgtgatanaaaatgaaggnccntgttttcntcgttgctanaattttggtagcatggcnatgccatgcgtacgatatgttccctctccgaatgaaccacnggcnatggtggccgtaactccggagtgaatgggcaanttggaancttgctgtgnaagcncncaacatcttnggctttnagaccattcctgaaaattgcgttgaagcaccaaaggantanatccanggngaacaatatagntcancc

SEQ ID NO: 7867 - DNA, 104 bp, Glycine max
  unsure (1)..(104): unsure at all n locations; Clone ID: 701147743H1
ggcacaanaatacaatacaanacaannacagcgcaangagagagtgtgtgancagtgcnacnngaaacagnncaacaatggcganccttaaggttcctcggcct

SEQ ID NO: 7868 - DNA, 253 bp, Glycine max
  unsure (1)..(253): unsure at all n locations; Clone ID: 701147744H1
catcgtgatttgaaatccgcgaatatattacttgatcacttcaatgagagctaaggtttctgattttgggttctcaaaggaagaggtctttgatggtcgtaattctggccttaaaggtacatatggctacaggacccagcatacattttcctcaagccagttcacagtgaagangaccattaccagtttaggaataanannnttggactcancactggccatccaccacatcaaaatttgatgggatatatcc

SEQ ID NO: 7869 - DNA, 255 bp, Glycine max
  unsure (1)..(255): unsure at all n locations; Clone ID: 701147745H1
ggtcatatgggatttccccgttttctcccccgatcgagatatcctctctttcacccccaaaagaagaatgattgaatcatnaaaaatttggagcgtgaagtgtnatgaaaataaaattncnatncgattttttatttagaagggggancccagatnattacccgaatncaggataattnaagggtnggccttgatngaaccnattaaataaagtacccaggctcgtttagaaaaaccaatttggnaatatanctc

SEQ ID NO: 7870 - DNA, 202 bp, Glycine max
  unsure (1)..(202): unsure at all n locations; Clone ID: 701147746H1
gaaactttagtgggatttggttcatgggggaaaagccaagccantnccncngaatactnctggtcctancactgaatttgggttccagtngaagggtccaactcctataattttaatggnccaaaccagaagggaattgggttttncngcatccaagtgnatccagagatcaagannaagaggaggntcagggccctacnat

SEQ ID NO: 7871 - DNA, 264 bp, Glycine max
  Clone ID: 701147747H1
gacaagtttgttgagatagctagaagcaataagatgaaaatgaaagtgcttgttttgtttgttgctacagttttggtagcatatgaatgccatgggctcagactacccagaagttccctcttccaaattgaaaacggggtttgtggggcaataccagccattgaggtggcatgtggccaattggaggcttggcgtggaagcaaaccaacgtagtccaagtgggcaaactgttcctgcagcttgcggagagtacatagctgacta

SEQ ID NO: 7872 - DNA, 258 bp, Glycine max
  unsure (1)..(258): unsure at all n locations; Clone ID: 701147748H1
gacagcaaaataactagttatagaattgcagtggcagaagcgaagtgaagtgggaaagagacagaaccgaaaatggttgcnnctttgangtcttccgatcatagactctcntctccccatcgnnttccacagcaattcccattcgtcaggcatnatgggaatatggttnccttntaccctgtgaaaccatggggnggacacgnntttgtgagcnaaggtcttcggaccaaagttgcnagttctcccgcttccggncca

SEQ ID NO: 7873 - DNA, 256 bp, Glycine max
  unsure (1)..(256): unsure at all n locations; Clone ID: 701147752H1
atatgntcatttgattatntttacaaatcaacacaagatttcttaacatattttattcttactcacatgntatttatctcataattactcaaagctaaatattattagatttggacaaccatgtgtctctccatcttagattangatgcatnacntangtattnnattattgatngatantctaattagttctggacaagtgggacataannatncatggtgaaaancatgttgtncccaagtatngnagaggtgg

SEQ ID NO: 7874 - DNA, 240 bp, Glycine max
  unsure (1)..(240): unsure at all n locations; Clone ID: 701147759H1
aacaaganagaagagaaaagaagagganaaggagagtggagaggaagaaaaggattgaagttgttgctgtgagaaagagaaagagtgaaatcggatttgggaaggaattacaatccatggantgtaagacgnncaaatctcactcgaccatccagaaggtggtggttcaccctctcgtgcttctcagcatcgtcgacaactacacngatcgccaagacntcgcancgnctcgtcggcnct

SEQ ID NO: 7875 - DNA, 265 bp, Glycine max
  unsure (1)..(265): unsure at all n locations; Clone ID: 701147761H1
actgtggaaatcttgtgtttacatcatcacagttggaatgctggttgctttacttctaggtttaaatatgtcatggactgcaattactgctggcattgctctcatagtttctgatttcaaagatgctacaccatgttagagaaggttcgtatcaactttgataatncnttgtggaagttattacngtggatggccccaatanaacgggaatnnccaatgctctgtgggacataatgnagcctattctcaggttgatcgtgcantg

SEQ ID NO: 7876 - DNA, 255 bp, Glycine max
  unsure (1)..(255): unsure at all n locations; Clone ID: 701147762H1
caccagttcagtcatgttccattgtttcaccttcttccctcccgagggaaaaaaactctctnnnatcattggtgtcagttncaaaanccactgcacctttctcgagttnngttttnggagattttgnaggggcnctggtaaggcgtnaacgtggtgattcgtgnacataantatgttatgaggctganagatcagaggttggaggggctccatcnaaangctgcctaagaaggtgaagatngggatanactttnc

SEQ ID NO: 7877 - DNA, 243 bp, Glycine max
  unsure (1)..(243): unsure at all n locations; Clone ID: 701147763H1
gatgtccccttgtcttatctcactagatgagatcagctacatgcataaggacatattgtattttatcaaatataatataggtttaatatgttcttagttcctgaaaatntggtaatttgatttagtccttcactttttttattattttggtctnataattttaaaagttttgaaatggnactatnaccattactaatgagtggcngcatcnaatatgctacctcacgtgtcatctcaaagtag

SEQ ID NO: 7878 - DNA, 260 bp, Glycine max
  unsure (1)..(260): unsure at all n locations; Clone ID: 701147767H1
ggaaacagaatttgtgtaagaagagaaagagaacgctggcaaagccgaagcagagtttcaattcaattcaatagcgatttagagtttccgtaaagaacttgatttcacgcatttttantcngtatcagatggtcactttgcagcacctggagagccacntggcnttcacnggagaatgangcngganactggnnagnaataaatggggntgnncnaacnaatcctggcccggtccaaagccangnccantacacggtncc

SEQ ID NO: 7879 - DNA, 233 bp, Glycine max
  unsure (1)..(233): unsure at all n locations; Clone ID: 701147768H1
gcaactaaagtaatttaggncccataatcagcaaggcaaggaagttcacaatgctaaacctcagattttaaaagnactactaactcagtcanttttgtttagatttcttgcangtctnatantggannaaaattntgtaagactttctatgacngatntgaccagtaagangtcnccaaaaaatnttanggaaattcatataaaaaacttgcactactatgttgttaaatgct

SEQ ID NO: 7880 - DNA, 266 bp, Glycine max
  unsure (1)..(266): unsure at all n locations; Clone ID: 701147769H1
gggagatgagaatattcaagcatcatcaaaggggaaaatatgttgaaagcttcaactgctcggaggcaccaaggaagaaaagcaagaagatagaaaacaagaggaggtttagtgatgaacagataagatcactagaatgctatttgagtcagagtcaaagcttgagccaaggnagaagatgcaactggctagagatcttggcctgcanccttcgcccagtgggtntangggttccaaaaccagaaggccaggtgggaatccaaacc

SEQ ID NO: 7881 - DNA, 194 bp, Glycine max
  unsure (1)..(194): unsure at all n locations; Clone ID: 701147772H1
gctagagttgtggtcatagtacagaaactgttctanntagatgcgagtngtaaganagacatgatgacaatttgtnaaaanagttttaccggtctacatggatctntgtggtccntgagtatctcnatcagnttggtgaggttgcnttcgangtggacttcngcatnaaccaaatnnaaacttgttgccggtgg

SEQ ID NO: 7882 - DNA, 258 bp, Glycine max
  unsure (1)..(258): unsure at all n locations; Clone ID: 701147773H1
gacacacactctgtcacgcacccaccattctactacactcctctctctcactctcactctctgctccgtgatagctgtaccacgtttttctctccatcttcgaaacancatctctgnctcagtcccaacccacannattctcatgggctgctctagctctgagnactncttcttcctggctttcaccggcacttcaagtgcnacatggngcgtttncaaggnnggaagcgaacgcgatcntgcagaaagagttagatt

SEQ ID NO: 7883 - DNA, 229 bp, Glycine max
  unsure (1)..(229): unsure at all n locations; Clone ID: 701147776H1
gatcagcggtgcccacnaggataacaacataatgctgtggaatgctgtcatatttggtcctgatgatantccatgggatggaggcacgttcaagttgactctccgtttactgagggattatccaaataaaaccaccaactgtgcgatttgtgtctngcatgtttcatcnaaatattaatgccggatgggaagtattggtttggatatactacaaaaatcagtggattcc

SEQ ID NO: 7884 - DNA, 282 bp, Glycine max
  unsure (1)..(282): unsure at all n locations; Clone ID: 701147777H1
gggggaaggaaagaaattagaaatatttattcattgtcaccaaatcttgttccctggcaaganaaagaaagaagggagagaagaagttgttgggttnagttggattggatttctaatccgaattnnataccttggcgttttccctangttttaaaggcacaaaaccccttctntcctcccctnctccttgctnnttcctaangggtaatgccttggctttaancctttngggaaggangaagggaccaactaacnccgancaagtanncnnganaataggng

SEQ ID NO: 7885 - DNA, 247 bp, Glycine max
  unsure (1)..(247): unsure at all n locations; Clone ID: 701147778H1
ggcgtacgcagcttcatccctaacgcgtgcatagcagagtcagagacagagacgcagccatgnggcggagactgcgaggtgttataggcaaattaagaacaagccataccccaagttcacgtttctccgtggtgttcctgatcccaagatcaggatttatgatgttggtatgaagaagaagggtgttgatgagtttcctttccgtgtccatctggttattgggagaaggaaatgtttccaagtgagg

SEQ ID NO: 7886 - DNA, 249 bp, Glycine max
  unsure (1)..(249): unsure at all n locations; Clone ID: 701147779H1
ggaagcgaanccagatganaatgtaaaacggtgggattgagcctcgaatcttcaaaagttggagttgcagggattggtgnttgctcaagttaatgagagatngcatgaattcccgtatattgctggacgctgcaaaaagtgcatattggcttctcctcnggtttcaagaaggcaacaattcttgataaggtgtgtnggaggctccactgatccaagagncntgcaagccctaagggcctcttgaggtga

SEQ ID NO: 7887 - DNA, 277 bp, Glycine max
  unsure (1)..(277): unsure at all n locations; Clone ID: 701147782H1
gggtgaactgctttgatacatttgatgcagcaattccctttggagggtacaaaatgagtggtcaaggaagagaaaangggngaatacagtctcaagaatttacnttncaagttgaangctgttgttacantccntgagganccccagcntgggcttggaacanccattaacctttaagaattaatttgcaggaacangattaantanatnggnncccaatgaattaaggncccntaaaatggggttnatcccnanccaaaagtttncggaagaaagg

SEQ ID NO: 7888 - DNA, 223 bp, Glycine max
  unsure (1)..(223): unsure at all n locations; Clone ID: 701147783H1
ggccgaaaaccctaacaacacaggcgcagagcgtgatccattgacgaanatggtgcancgtctcacctaccgcaaatgcacagctatgccacnaatccaacaacacagggtctcaaaacctgtgggaantcgttatcagancaccagaagaggcaactggccantnnccgtcatggcaaaggttcagggattcacantnaggctgcanatacaaanatcagtt

SEQ ID NO: 7889 - DNA, 281 bp, Glycine max
  unsure (1)..(281): unsure at all n locations; Clone ID: 701147785H1
ctcatcaaacatgccatatgggcgcaccctagaacgtggtggacaggttgtactacntggttcagcnccagatcctcgtatccaaaatgattttnngaatttgggccaatgganttngcatttccgntncacatggattcgtggctaaaactttgacctttgcnataatgnnggagncctccttnccacacttgganagaagnccgggagcccggattgccaagccnagattccctncaaancctttggagccnatgtggnatncaantnagagncnaaag

SEQ ID NO: 7890 - DNA, 273 bp, Glycine max
  unsure (1)..(273): unsure at all n locations; Clone ID: 701147786H1
gtaagttgaggtctaagtggattggtccttttgttgttactaatgtttttccttatggtacaattgagatcaaaagcgactccacaaacaagagctttcaaggtnnaacgggacattcgncttnaagnccattcnncaangaaacccntncctttagtgggncgtaantggtggnaagaaatttccttannccaaccctaatccttgcctncgaccatggattagggaagtttttccttttcctaagctcctgcttgtgcttttaaaannacc

SEQ ID NO: 7891 - DNA, 241 bp, Glycine max
  unsure (1)..(241): unsure at all n locations; Clone ID: 701147787H1
ggagttggtcctccttccaactatttgagttgtttttcttttctccagtgccaattccggtcactctcttcattaataaattctactatatatatgaagaagtggccactgctgctgaancannatccttcaancaagnctttccccttntggntttcccaatcnccantgacatcaaggntatgaaacntgtgggtctggtggggaggggcaaatttggcttcccnaanngaagnnatgg

SEQ ID NO: 7892 - DNA, 253 bp, Glycine max
  unsure (1)..(253): unsure at all n locations; Clone ID: 701147788H1
ggcccttggaccttttgtngaattccaactgggnnccgttgtactttccacgnancangtttatnncgaccacacgttacgtagancgtgncccntggtccaaanttncgatncaacttagcacttggcntggagccngaggaanaaatattaaaagggaaaaaggggaaattggattaantttggngcattggangcattnangnancnaattaaccattngacggacaaagggggggnnattnnaaaaacg

SEQ ID NO: 7893 - DNA, 257 bp, Glycine max
  unsure (1)..(257): unsure at all n locations; Clone ID: 701147789H1
gaccgcgcaccacactggagaggaagagggagtgagaganagtgttcttcgtttgctaccttctcccagaaatggttacgttcaggtttcaccagtaccaggtggtcgggagggctctcccaacgggaagcagtcagnatccgaagatctaccgantgaagtctggggccaccaacgaggttcgcgccaannccaaattcnggtattttgaaggancttgaangaaagtgagaagaancattggtccaatcttncca

SEQ ID NO: 7894 - DNA, 247 bp, Glycine max
  unsure (1)..(247): unsure at all n locations; Clone ID: 701147790H1
ggacgagggttttgacttgtgattttccttcnacacagtcggcaaaatctttcaccaccaacacacagccatggcaggctctcaccttctttctcactcaccctcccttcccaaaacctataactactcttaaaccaaaaccctntattcccaaanctttttttccaccccctnaaatcnaangcaccggaaaannnggtgtnctcnagcngannctcnccaaaaggtgcaaaaacgnggnangagg

SEQ ID NO: 7895 - DNA, 241 bp, Glycine max
  unsure (1)..(241): unsure at all n locations; Clone ID: 701147791H1
ggcacaagtgagtttgttgatcgagataactagaaacagtgtgatgaaaatgaaggtccttgttttcttcgttgctacaattttggtagcatggcaatgccatgcgtacgatatgttccctctcgaatgaacatggctatggtggcccgtacncccggagtgaaatgcgccaattggaggcttgctgtggaagcacacaacatctttggctttgagaccattctgtaagatgcgttgaagc

SEQ ID NO: 7896 - DNA, 238 bp, Glycine max
  unsure (1)..(238): unsure at all n locations; Clone ID: 701147792H1
aagacgacagaagggtacggctgcgagaagacgacagaagggtacggctgcgagaagacgacagaagggcctcttgcatctgttttagcatcttgatatagggncttatggagantttcatttnctctagctgcggggtatgctcggttantggtgnaagcattttgaatttnantataannnaccntttttctcanaaagaaaacngatagaganttttnaaccttancctccnntg

SEQ ID NO: 7897 - DNA, 204 bp, Glycine max
  unsure (1)..(204): unsure at all n locations; Clone ID: 701147794H1
tacagatggtgatgctgtggaggatcataaatcagagaggaagaagaaaaagatagaaaagaggacattggaacaggagatggaggttgacgatcaggctgaagatgtggtgccattggatncacagtgagagaaggaacagctaaaaagaagataaaaaggtnagtaatggagaagcattcgaggctggtgagtgtctaaaaa

SEQ ID NO: 7898 - DNA, 275 bp, Glycine max
  Clone ID: 701147801H1
ggaggaagaaacacacaaaccttcttccaagtgttcttcccattattctacattgtcctctctttggttctctattatttattaattgtgcactcctttggttctctaatatttatttccaccgttttcttaaaacaaaagcctcttcaaattctccaacaataataacccaaaatgggccactggaaaagcttagaagttgtgcaaactttccttggagaactctaaaaccctactttgccatgattggctatacaatttgggctatgcaggca

SEQ ID NO: 7899 - DNA, 285 bp, Glycine max
  Clone ID: 701147802H1
gacagagagcatagtaatacttactgagtgcttgcagttgctgcgtcgcaaggtaccggcggcgacggagagctatcttctcaatttccgatcactgcattggttctgttgacgagggttttgttctacttgacttgcatacttgatggcgtcaaagttgcagaagttgcagtccgcagcatgtcaagcatctcaatttgtatccagtcgtggaactaactactacaggcaattgctggaacagaacaagcaacacatcaggagcctcctacagtagagaaatgc

SEQ ID NO: 7900 - DNA, 257 bp, Glycine max
  unsure (1)..(257): unsure at all n locations; Clone ID: 701147805H1
catccttctgttatggaagataacaacattatttgataatggcgttgaatgccgagaagcctagatgctattattgatagatgttctgcacttcaaancattcgtcaagcagtcttacagtatagacaagtattcaatcaacagcatgtcgagccaagggtaaggagggtggcgttaaatcgnggtgctgagtacttggagcggtactttcgtctaattgcttttgcagcatatcttggaagtgaagcatttnangg

SEQ ID NO: 7901 - DNA, 104 bp, Glycine max
  unsure (1)..(104): unsure at all n locations; Clone ID: 701147806H1
angacgacagangggtacggctgcgagangacgacagangggtacggctgcgagaagacgacagaaggggcaaaanaantnataacaanaataannnaaaattt

SEQ ID NO: 7902 - DNA, 253 bp, Glycine max
  unsure (1)..(253): unsure at all n locations; Clone ID: 701147807H1
gggatggatgaaggcagatttgactttctgcatggtgccatgtcttttgataatatttgggatgagattagtcgtgctggacaagagtgccccagcaatggtgaacctcacatttatattgttagttggaatgatcantttttcatccttanagttgaatatgattgttattacatcatgacactttgggagagagacttatgaagggtgcaaccaggcatatatcttgaaatttgacagcaacacaatgatg

SEQ ID NO: 7903 - DNA, 254 bp, Glycine max
  unsure (1)..(254): unsure at all n locations; Clone ID: 701147810H1
ggcacaagtttgttgagatagctagaagcaataagatgaaaatgaaagtgcttgttttgtttgttgctacagttttggtagcatatgaatgccatggctcagactaccagaagttccctctccaaatgaaaactgggtttggtgggcatacagctatgaggtggcatgtgccanttggaggcttggcgtggaagcaaacaacgtatcaagtgggcaaactgttcctgcagcttgcggagagtacatagctgcta

SEQ ID NO: 7904 - DNA, 181 bp, Glycine max
  unsure (1)..(181): unsure at all n locations; Clone ID: 701147812H1
ggcagcgcttgagancaagccccactcaaccaccacaccacttctctctgctcttcttctacctttcaagtttttaaagtattaagatggcagagacattcctatttacctcagagtcagtgaacgagggacaccctgataagnctgggangnatctccgatgtgtcctcgacgnttgcnt

SEQ ID NO: 7905 - DNA, 161 bp, Glycine max
  unsure (1)..(161): unsure at all n locations; Clone ID: 701147814H1
ggatatagactttatcgtggctctgccattcctttatggaattaagatgtgttcttgactggtcatgtanaactaacatccctcaccatgtatgactggctaaagctgggaggacataaatgcagtntggaccttgtcaaatgtgatcngtcttgaataga

SEQ ID NO: 7906 - DNA, 258 bp, Glycine max
  unsure (1)..(258): unsure at all n locations; Clone ID: 701147817H1
aggactcaatggtgaagtctcctagtgattcaaatccatgcactcttcctcctccatatgagcctataaacctacaagactttctagagaagaaagctagttcaataaggcaggtagaaacttgggaagaccatactgggagaaagaaaaagggggacaataatagtatgtcctgatgaagatttgtcatgtctctttatttcgtgntgtgacaattaaatggcctttatcatacatacccctatcccccccaataca

SEQ ID NO: 7907 - DNA, 259 bp, Glycine max
  Clone ID: 701147818H1
ggcacaagtgagtttgttgatcgagataactagaaacagtgtgatgaaaatgaaggtcctgttttcttcgttgctacaattttggtagcatggcaatgccatgcgtaacgatatgttccctctccgaatgaacactggctatggtgcccgtactccggaggtgaaatgcgcaagttggaggcttgctgtggaagcacacaacatctttggctttgagaccatcctgaagagtgcgttgaagcaacaaaggaatacatcc

SEQ ID NO: 7908 - DNA, 253 bp, Glycine max
  unsure (1)..(253): unsure at all n locations; Clone ID: 701147820H1
ggcacaagtgagtttgttgatcgagataactagaaacagtgtgatgaaaatgaaggtccttgttttcttcgttgctacaattttggtagcatggcaatgccatgcgtacgatatgttccctctccgaatgaacactggctatggtgcccgtactccggaggtnnnaatgcgcaagttggaggcttgctgtggaagcacacaacatctttggctttgagaccatcctgaagagtgcgtgnngcaacnaaggata

SEQ ID NO: 7909 - DNA, 253 bp, Glycine max
  unsure (1)..(253): unsure at all n locations; Clone ID: 701147821H1
taatttgggaattattgctcccatcgccattggtttcattgtcggcgctaacattttgttgggtggggccttctctggagcggccatgaaccccgctgtgacatntgggcctgctgtcgtgagctggacctggaccaaccactggatctactgggccgggcctctcatcggtggtggaatcgctggccttgtntacgaggttgtcttnanncagcnacacccacgagcagcttcccaccactgactantagag

SEQ ID NO: 7910 - DNA, 256 bp, Glycine max
  unsure (1)..(256): unsure at all n locations; Clone ID: 701147824H1
ggcatcaattcaaaatatatcatcaattataagcatgggtttgtggaacacaacgaatgcagtgtcttgccgctttcacaagtttggtgatgaccaaaagaatctggtcttccaaggtgatgccacgtcttcttccaggggcatagaactcacaaagttagacggtggaggaaaaccagtgggtggcagtgtggggagagtgttatactcttctccagtgcacctttgggaaacnctacanggtcgcaaccttnaa

SEQ ID NO: 7911 - DNA, 215 bp, Glycine max
  unsure (1)..(215): unsure at all n locations; Clone ID: 701147826H1
ggagtggcggattcccccagttgttagtgtgtatttccctctccttcctccacttcccggggatccgataattttcccaagaaaccagatccgaaaaaagccccgttccatccgatttgttgggatctgtggagtggagaaagaatgggttactaaagaccagaggagacctccaattgaaaccaggcctccgaaaaaacccagggtcggnnaaa

SEQ ID NO: 7912 - DNA, 75 bp, Glycine max
  unsure (1)..(75): unsure at all n locations; Clone ID: 701147828H1
ctacaaacaaatgtattcgtccatttagttatctagtatttgtttattctaanatcaaaccatttcaactgcaat

SEQ ID NO: 7913 - DNA, 223 bp, Glycine max
  unsure (1)..(223): unsure at all n locations; Clone ID: 701147829H1
ggaaacgaaaganaaagagaatggagaagagggtagcaatattacaggaatggtttgaccgcgttgactcggaganaagtggaagcataacagcggtgcagctaaagacagctcttgctgtgggcaactgggatttccgctctcagtggttcagnaaatgatcagnttgtacgatttcnaacgggntnggaaccaaggggcttccaaggatttgttccccncc

SEQ ID NO: 7914 - DNA, 92 bp, Glycine max
  Clone ID: 701147830H1
agagagtttttaagaaagagggaataaaacaaaagagggtaagcttagtgtggctgtttagtgggtacccttgttgccctcataggaagtga

SEQ ID NO: 7915 - DNA, 125 bp, Glycine max
  unsure (1)..(125): unsure at all n locations; Clone ID: 701147831H1
aacttcagtgagaagaatatactgggacaaggaggttttggaactgtttacaaaggtgaactgcatgatggcacgaagattgcagtgaaaaggtgganccggggcataagtgggaaagtgccaca

SEQ ID NO: 7916 - DNA, 216 bp, Glycine max
  Clone ID: 701147833H1
gagagaaagagatcacatagcagaatggcttctactcaatgtttcttgcaccaccatgctcttaccgcccctgccagatccccatcacaacgcatcatggttagcaccaagcctaaccagcttgtttgcaaggcacagaagcaagaggtattgatgtcagcccatctctcgcggtagctctaacgtgtcatggtgtgctgtgttggtccaaagtcc

SEQ ID NO: 7917 - DNA, 267 bp, Glycine max
  unsure (1)..(267): unsure at all n locations; Clone ID: 701147834H1
ggccgaacaccattgggttgggttatctgaagctttttcagcggaggaaacataactgcgcacgtttgggaaccctattttggtgaacatctcaagaatcagagttttttttaccactatcaggtttaggattattatctgaaatggcatcggtgtctactcagcaacagttccgttacacgcagccaccatccaaaggtgctcattgagnaaatttgccgtgggagtgcacagaggacgnactattgaacttgggaagctattggg

SEQ ID NO: 7918 - DNA, 125 bp, Glycine max
  unsure (1)..(125): unsure at all n locations; Clone ID: 701147836H1
tgcaacttcctctgttttgctcccctgtttaagccttatcataagcttagaatggcacacaaggnattttccattgccctagtgactctcattgttctctttgtcaacacgaacctccaaggtga

SEQ ID NO: 7919 - DNA, 255 bp, Glycine max
  unsure (1)..(255): unsure at all n locations; Clone ID: 701147837H1
ggccgtgttggaagaaggtgatatattgaaaattgatatggcatgccatatagatgggttcattgctgtggtagctcacacccatgttcttcaggaaggtcctgttactggaagggcagctgatgtcattgctgctgctaatactgctgctgaggtggccttgaggcttgtcaggccgggaaagaagaacaaggatgtaagtgatgcaattcaaaaggttgctgctgcctatgactgtaaaatngttgaggggtc

SEQ ID NO: 7920 - DNA, 257 bp, Glycine max
  unsure (1)..(257): unsure at all n locations; Clone ID: 701147838H1
ggttgtgcgtcggagctgtgtctggggaaatttgcgttgtttttcgcggtacagctcacacacactgaacggtaagtatggcggacaaggctgttacaatccgaacccgaaagttcatgaccaacaggcttctttccaggaagcagtttgtcgctgatgttcttcatccagggagggcaaatgtttccaaggctgaacttaaggagaagctagctaggatgtatgatgtgaaagaccctaantactggattttcttc

SEQ ID NO: 7921 - DNA, 260 bp, Glycine max
  Clone ID: 701147839H1
ggaagcagatgagagattggcacgtgaactccaagaacaactgtatcatgatgatccttttgaaggcagagggattgatgaagatttagcatgggacctgcagcgtgcagaggctcttctgcgtacaactattgatagccacagcatgaatcaacctacacagcttccaagggcaaatagacagtctcgcacacggtttcaacaaaacccttctagaaggagagctatggctccaagcttctttctctaatagatgtcac

SEQ ID NO: 7922 - DNA, 137 bp, Glycine max
  unsure (1)..(137): unsure at all n locations; Clone ID: 701147840H1
attaggatgagatatgtatatcaaaggaacattgnnagantacaagcaaacaggnacctaaatgtanccatcatgcataccatcagagcttcagaaagcccttcagcaattgcagcatcattnaanccaccaccatt

SEQ ID NO: 7923 - DNA, 208 bp, Glycine max
  unsure (1)..(208): unsure at all n locations; Clone ID: 701147841H1
gagggaagaatattcacgccctgggacccacaggctattcctactacagcagcaatgcaaagtgccaaaatagtggtggatagattgattgagaggcagaaagctgaaaatgggggaaagtatcctgagactgttgcacttgtattgtggggaacagataatattaagacatatggtgagtcccntggctcaggtcttgtggatgatt

SEQ ID NO: 7924 - DNA, 249 bp, Glycine max
  unsure (1)..(249): unsure at all n locations; Clone ID: 701147842H1
ggaaatagagttgctgctcaaaatcaaggaagangagttaaactcaattattgtggaaatgagaaggaattgcacttctttacaagagaaattagtgaaggangaaacagaaaaaacagtggctgcggaatctcttgttaaggagaganaggctaggcttaactttgaaaggtcacagagtacactacaggaggatcttggacgagcacaacgagagctccaaagtgcaaatcagaagatttgtcctcc

SEQ ID NO: 7925 - DNA, 189 bp, Glycine max
  Clone ID: 701147843H1
tacttcaacaagagcatcacagtcacatctagaagcacacgtatgcacaggttcaggtcgataactctcaagctcatccaaaattgttcttagctttgtaaaataatcataatattcatgtctccttgtgtaattgaagccaatttatgttgtaatcagaatttgaagcaatcaccttgtaagtatcag

SEQ ID NO: 7926 - DNA, 246 bp, Glycine max
  Clone ID: 701147844H1
cgacattgaagagcttctttacagctcagtggagaatgaagaacacatatgtgtattgaaggaccgcaacaagccgatcatcttcaccatggcaagacttgaccgtgtgaagaacatcacgggacttgtggagtggtatggcaagaatgcgcgcctccgcgagttggtaaacctcgtggtggtggccggagacaggaggaaggagtcccaaggattggaagagaaggccgagatgaagaagatgtt

SEQ ID NO: 7927 - DNA, 247 bp, Glycine max
  unsure (1)..(247): unsure at all n locations; Clone ID: 701147845H1
caatgaagacagttctactcgattatggtggtttcaagtttgcactgaagttgcattcttcaggtggctccatcaaatgatagtatacgctcctcagaaattgatgcaaaataccatatggacctttgcaaaaatatcttggagagggcatctntcctgatgttgatgcnactaatttatactacgggggcacaaaattgcnggtcggaaatgnattgcaaatggcncacaggtccttggngcaagg

SEQ ID NO: 7928 - DNA, 256 bp, Glycine max
  unsure (1)..(256): unsure at all n locations; Clone ID: 701147847H1
gattcatctttttgttcgtgttgtgtttgctttgaagaagtgaggggtgttctttgttggtgaatacacccactcacgcgttcgtggttgcaggctctaatcagatcccaaatgatcaactttgtgcttctcattagtcgccaagggaagtgagactgacaaaaatggtactcaccttattctcagaaggaaggggtaaggtatccgtgagctcatggnatgattcttnccgtgtcccaagcaatgtaattttgta

SEQ ID NO: 7929 - DNA, 237 bp, Glycine max
  unsure (1)..(237): unsure at all n locations; Clone ID: 701147850H1
gcattattgaaggaagaattcaacacctatagtaaattgacgacatagcgtatggtcatgaagagtttnncttntcggtttcnccattgggtttgggtagatagaaattttnagtttggtcctgatcacaggaattnattatactgtattgtnttacatccaaagcngtccggaatcgtcccaatgcaatgcttacagattattaccgcttctgctgactgatttttgntnacaatc

SEQ ID NO: 7930 - DNA, 155 bp, Glycine max
  Clone ID: 701147851H1
ggaggtcgcatgtttaacgaggtgggtttcttgtctgcattcatataggcttaaaaagactgatctattggttgggcaaatatctcagttcttccactttttcttaggatggaagactcgtgggagaattggatttctcttggaaatgggtgaag

SEQ ID NO: 7931 - DNA, 160 bp, Glycine max
  Clone ID: 701147852H1
gatgacatacttgttgttgtcacatctggagaaaatgtgacagaagtacagccacaatttgatgcaataagtaaatgtcctggaagggggatcattgtttcggggattgctcctccagggtccggatttgacttctatagtcgattcttctgcccgaaag

SEQ ID NO: 7932 - DNA, 211 bp, Glycine max
  unsure (1)..(211): unsure at all n locations; Clone ID: 701147853H1
ggagaacacatanacaatacancaatctaaacgcnnaggcacaatcgcanttcgccgaatccnaaacgcaggtttcncgctacantncctctcnacagtgtgcgctagtagtttgctaagnctcactgggngccatggctctgtcactcggnaagtccgcanattctcgtcagngnagggttgctggttcgtnattgcaaaagaagnncnc

SEQ ID NO: 7933 - DNA, 133 bp, Glycine max
  Clone ID: 701147854H1
gggcttactgaccaagatatcgttgctctatctgggggtcacactattggagctgcacacaaggagcgttctggatttgagggtccctggacctctaatcctcttattttcgacaactcatacttcacggagt

SEQ ID NO: 7934 - DNA, 151 bp, Glycine max
  unsure (1)..(151): unsure at all n locations; Clone ID: 701147855H1
ggatgctttgtaaagatcacgaggttgttattattattgcaaatagcaaacctgtcacgactacggggcaggagatagatgtattgtatcaaaaggtggacaacatcaacgatctgaaaggtttccaatnggaatnctgatgtaggcttng

SEQ ID NO: 7935 - DNA, 253 bp, Glycine max
  unsure (1)..(253): unsure at all n locations; Clone ID: 701147856H1
aagtctgattcattgtcagcagttgattccaaaaggattgaagagcaagcttatcgtttgaagaatgatgatgacttccctccactttcccattgaatgccagtnaaggatggtgaatatgtaatagcattaacagtaatggtcatacatggaaactattatgactttgcctgcttttcatcaggtgctaccaaaggatggcgattttgtaagaagtaagaagtaagaacagtgtgcatcgtctccaaaaatg

SEQ ID NO: 7936 - DNA, 103 bp, Glycine max
  unsure (1)..(103): unsure at all n locations; Clone ID: 701147857H1
gggaaccccggtcncctttgtgatttgcttcacaaaaaccagtgtncggtccacacccatctctccctttttctcccacctgcnaacgatgttcggtttaagg

SEQ ID NO: 7937 - DNA, 134 bp, Glycine max
  unsure (1)..(134): unsure at all n locations; Clone ID: 701147858H1
ggtggtgctggtgatgtgcattctgtttcaatcaagggttcaagaactggttggatgccaatgtcaagaaactggggtcagaactggcagagcaataactacctcgatggtcaaagccncccttaaaggtnacc

SEQ ID NO: 7938 - DNA, 221 bp, Glycine max
  unsure (1)..(221): unsure at all n locations; Clone ID: 701147859H1
gaagtgaaggaaggaggtgacaggtgagagagatccagaacggtcaggcccattggagtaacaaatcgcatttcgattctcaccacggaagaagcgcanctcaaacaaaccaaatggaagcacaaagctcccagcatacccaagttattgagatcagtggtgactttcctgatggtggaaggaagatttgtgcggaagcaccatgtgggtttgcagatgcg

SEQ ID NO: 7939 - DNA, 240 bp, Glycine max
  unsure (1)..(240): unsure at all n locations; Clone ID: 701147860H1
gaagaagaagggagcgagcttcgtgatcgattgcgcgaaccggtggaggataagattatggacattgcttctctggagaagttccttcaggagangattaangtcngcggcaaggncggtgcactccggcgantccattaccgtcaccaagggcagagcaagatcacgtcacttccgacagcaattctcctaaacggtatctganatatttgnccaggnagtattgaaaaagcacattgt

SEQ ID NO: 7940 - DNA, 257 bp, Glycine max
  unsure (1)..(257): unsure at all n locations; Clone ID: 701147861H1
tggtgtggtgttgaccatcactcaaaatgactatttgttcgtcttccgatttgcaggatccggatgacaagatgtaaatgcatgcatgtttatgatcggacgttaaatgtaacaattaaacatgtgttatcgtgttcaatttacttaaacgcttacaacatcttgttgatcgagccgaatggcttggattcaggtggcaagatcgagagtaaatgtcctaagggccattaaaaggtaaaggncccaccccgggggtt

SEQ ID NO: 7941 - DNA, 255 bp, Glycine max
  unsure (1)..(255): unsure at all n locations; Clone ID: 701147862H1
agagcttagagcagcaattcagagaatgttggacacccctggcccctaccttcttgatgtcattgtgccccatcgggagcatgtgttgccgatgattcccagtaatggatccttcaaggatgtgataactganggtgatggtagaacgaggtactgattgcctangaccaaatgttcctngatgcttgtttggnacnattttatatnaaaaatgcngcccaaanaaaantntngnncggggganncanannnttt

SEQ ID NO: 7942 - DNA, 258 bp, Glycine max
  Clone ID: 701147865H1
ggagttgagaggatcgtgagaggggcagtagccgagattccgtgagttgcaaaaatgaagacgattctttccaccgagaccatgaacatcccggacggcgtgagcatcaaagttcatgccaaggtcatcgaagttgagggcccccgcgaaaaattggtgcgagacttcagcattgaatctcgatttcagctcatttactgacgaaaacggtaaaagaaagctgaaaattcgagcgtggtttggtctcggaaaacatcg

SEQ ID NO: 7943 - DNA, 252 bp, Glycine max
  unsure (1)..(252): unsure at all n locations; Clone ID: 701147866H1
ggaggttcgtagaggagaaattcaaattcaatgcaaagaaattagatttttgaacgaaagctacgaactctaagttcatggaccgcttgcgtcctaggaatcgagcggtcttttctggatttacaaatgccgagattgagaaaatggagaaattgttaagggnacctacagggggancatgggcaggaattttaccaaaaactggctcgaagtttcaactattcctctggtcgtgctgggaagcctatcata

SEQ ID NO: 7944 - DNA, 245 bp, Glycine max
  unsure (1)..(245): unsure at all n locations; Clone ID: 701147869H1
tgaatacaaatacaaagaagggaacaaataacaaacaaaaatanaaagataaagacccctaagtggagtctatcaaaagcttctccaggatggcctcagtgggatagttccacttgccaacagctattggatccacagttaaaaaganaaaaaaacattaatcttgtaagggtaaaagggtttttcataaatctaatcatnnatttctactctatttctcttcaaccaatcacctatatttcttc

SEQ ID NO: 7945 - DNA, 243 bp, Glycine max
  unsure (1)..(243): unsure at all n locations; Clone ID: 701147870H1
ggcgggttaaaatgcaacgataacggttgaaatagaaaaaagaaaaacagtgttttggtgaagctgagaaaacaaaggtttagatcacctctgaaattctgctatggcctcaaccagatcactcattctttgtctgttcatnnaactgtgcttctaccttctacccctctcattcgctcaatcccccgccaccgggtctgccgaagttacaccattatggtcgagtgaagatccccatgtggg

SEQ ID NO: 7946 - DNA, 209 bp, Glycine max
  unsure (1)..(209): unsure at all n locations; Clone ID: 701147872H1
acaagaggccaatcctattcatagctcgagatgggtgaagaagtgaaggtagttgttccagaatcagtgttgaagaagcgcaagagggaggaggaatgggcgttggccaagaagcaagaactcgatgctgccaagaagaagaganccgagagccgcaaactcatctacaacagagctaagcatacgctaaggngtacntcnccgggagg

SEQ ID NO: 7947 - DNA, 162 bp, Glycine max
  unsure (1)..(162): unsure at all n locations; Clone ID: 701147874H1
gtatggcgccagcaatggtttggtccggagaaattggtgggacaggatggtcgcatatggatgtatgttcagtgcatctaaattaatcaggtgacccttttctgtgttcttacttgtatcattcggatgactaagagatgaactgagctganttntttnaaa

SEQ ID NO: 7948 - DNA, 201 bp, Glycine max
  Clone ID: 701147876H1
ggagatagagatggaaatagagaggctaagaagaaatgcagaggcgctggttgagaagaccatgaaagggaacgatgcttctcatgatgctgctcatgtttggagagttcgtgatcttgctctctcccttgccaaagaggaaggcctctcttccaatccccactccatggaaattgttgagcttgctgcgcttctccatga

SEQ ID NO: 7949 - DNA, 136 bp, Glycine max
  unsure (1)..(136): unsure at all n locations; Clone ID: 701147877H1
gggattttaaatataaacctgctagaagatttctctgctatccatggcaaacaaagttaagcatgcaactcctgttcttggtatgggctgcagtgatggcaggccacaaagctactattgggganggagtttggaa

SEQ ID NO: 7950 - DNA, 156 bp, Glycine max
  unsure (1)..(156): unsure at all n locations; Clone ID: 701147878H1
ggaagagtgaagagaatggctcccaagggtttaacctttctggctgtgttaatatgcgtttcagcactgccactgagtccttctgttgcgggggaagggcaaaataatggccttgttatgaacttctacaaggatcatnccctcaggnngaanana

SEQ ID NO: 7951 - DNA, 200 bp, Glycine max
  unsure (1)..(200): unsure at all n locations; Clone ID: 701147880H1
gatccacaactnaaaaactacttctcaattcagntaacacaccaancccacatccaaagcttcagttcaatntggcaaccttgtcaagttttgctcccttggccattccaaagtttagttcctagtaattaagtgccattgtcctttgaggctgaaagctaggccaaggacattctttgtntttggagattcacttgttg

SEQ ID NO: 7952 - DNA, 238 bp, Glycine max
  unsure (1)..(238): unsure at all n locations; Clone ID: 701147881H1
ggagaaaganaagaaagaaaatgcaaacagatatggtgtgggccccagcgcgaaacgaaacgcaccgaatgtgaggaagcggcgagagcgacgggaattggagctggagatgaagtggagaatgccggacacgcacccgatggtctcgcgtgaatctctccggcggagtttctcgccgcgacgatgacggcgacaccgcgctgctctgtctcttcattactctgtgtgtgttctctct

SEQ ID NO: 7953 - DNA, 249 bp, Glycine max
  unsure (1)..(249): unsure at all n locations; Clone ID: 701147883H1
ggtgcaaaggnngaagaggaaaaagaggattggagggtcgccacgtttagcaacaaccaaaccctctctactctttcttcttctcttcgctagggttttagcttcttcctcttcacttcgttcttctggcctctacaatgagcaacgacaaggacaccttcaacgtcgctgatctcacttccgctactcaacgaggacaatagagcagaccttgtcaatgctctcaagagcaagtacagagtttggctg

SEQ ID NO: 7954 - DNA, 240 bp, Glycine max
  unsure (1)..(240): unsure at all n locations; Clone ID: 701147884H1
gaagacagcnaaaacaatcatattcttgggacttcttggcgaaacagaaatccctgcttcctgcaagantgcttttgatgttgtttgtttccgcatggagganaggttatcatacaccagcacaganaaggatatggtgctttgcancatgaactggaaatagaatacccagatagccaaattacagagaagcatagagctacttactgatttgggaagactcttaatggaaaaaccaca

SEQ ID NO: 7955 - DNA, 244 bp, Glycine max
  Clone ID: 701147885H1
agaacatgcctttaccaaaggtgcctactttattgggaagatgatatggagcaaaggctacaaggaactgctccaacttcttaaagatcatgaaaaggaattatctgctcttgaggttgatttatttggcagtggagaggactcagatgaagttcaaaaagctgcagaaaagttggaactagcattagagtccacccagctcgtgatcatgctgatgctctatttcatgattacaaattgtttc

SEQ ID NO: 7956 - DNA, 136 bp, Glycine max
  unsure (1)..(136): unsure at all n locations; Clone ID: 701147886H1
gcccttctaaaaccttatctctttcagttatcctcggccatggcgtctctactgctagcatcaccttctccactctccgttcaattgcacaattccacctgtcacctttccttcnctnactcccaaattcntgctt

SEQ ID NO: 7957 - DNA, 193 bp, Glycine max
  unsure (1)..(193): unsure at all n locations; Clone ID: 701147887H1
gagagaaagagagagaaanatgtcgaagcgtggtcgtggtggttcggcggggaacaagttccgcatgtacgctgggtcttccagtggcggcgacggtgaactgcgccgacaacacgggggcgaagaacctctanatcatttcggtgaaagggtcaagnccgtttgaacngttttcccgggcctgcgttggana

SEQ ID NO: 7958 - DNA, 243 bp, Glycine max
  Clone ID: 701147889H1
gaagacagcaaaaacaatcatattcttgggacttcttggcgaaacagaaatccctgcttcctgcaagagtgcttttgatgttgtttgtttccgcatggaggagaggttatcatacaccagcacagaaaaggatatggtgcttttgcaccatgaactggaaatagaatacccagatagccaaattacagagaagcatagagctactttacttgaatttgggaagactcttaatggaaaaaccac

SEQ ID NO: 7959 - DNA, 134 bp, Glycine max
  unsure (1)..(134): unsure at all n locations; Clone ID: 701147890H1
gangacagnnaaaacaatcatattcttgggacttcttggcgnaacagaaatcccngcttcctgcaagagtgcttntgatgttgnttgtntccgcatggagganaggttatcatacaccagcacaganaaaggng

SEQ ID NO: 7960 - DNA, 250 bp, Glycine max
  unsure (1)..(250): unsure at all n locations; Clone ID: 701147891H1
cattgttggagagagcagaacaaactacatcctatccaatagtctttatcttgtggtggcaggtagtgacgacattgccaacacctattttgttgctcacgccagaatattacagtatgacattccttcttacaccgaccttatggtcaactcagcctctaattttgtaaaggaactgtataatctgggagctcgtagatttcatactgggtgcaccaccgattggatgcgtgccatcacagagaactnt

SEQ ID NO: 7961 - DNA, 197 bp, Glycine max
  Clone ID: 701147892H1
ggcacaagtgagtttgttgatcgagataactagaaacagtgtgatgaaaatgaaggtccttgttttcttcgttgctacaattttggtagcatggcaatgccatgcgtacgatatgttccctctccgaatgaacactggctatggtgcccgtactccggaggtgaaatgcgcagttggaggcttgctgtggaaccaca

SEQ ID NO: 7962 - DNA, 86 bp, Glycine max
  Clone ID: 701147893H1
ggattttacgagttctttaagaagtactattctgatattgctggcccagagtaatgcaagcaagtacaagaccttgatctaccttg

SEQ ID NO: 7963 - DNA, 63 bp, Glycine max
  unsure (1)..(63): unsure at all n locations; Clone ID: 701147894H1
gacacttacngacttaagagtgaagagtactgagtgagatagagagagtgagnnacgcacttt

SEQ ID NO: 7964 - DNA, 169 bp, Glycine max
  unsure (1)..(169): unsure at all n locations; Clone ID: 701147895H1
ggtagtataaattcgatgggtggcattagccccaatttcttcatctctgcatatgaatanatcgatttcaatctttgccagtatcgaaacatctctgtgcacttcattcccaaatcccactcggtctctggngtntctgcaccgatttgaggaggttngagggggaaaa

SEQ ID NO: 7965 - DNA, 195 bp, Glycine max
  unsure (1)..(195): unsure at all n locations; Clone ID: 701147901H1
ggaacttctcacgttcatttctacacatccctagctctgtcgttccgtcgttgacgatggcgtttcgggtgcgaancctgacctccgctctctctttcttctctctctcttgtccatcgcttccgccaatgtcttcttcgaagagcgtttcgatgacgggtgggaaaatcgatgggttaaatcagattggaaaaa

SEQ ID NO: 7966 - DNA, 149 bp, Glycine max
  Clone ID: 701147902H1
ggagttggtcctccttccaactatttgagttgtttttcttttctccagtgccaattccggtcactctcttcattaataaattctactatatatatgaagaagtggccactgctgctgaatcagttattccttcaatcatgtctttctct

SEQ ID NO: 7967 - DNA, 250 bp, Glycine max
  Clone ID: 701147903H1
gtctatggccacgtctagcaccatttgcacatgtcctcgtagttaatcaaatgcgtcttggataaacactttcaattcttcactcattttctgcaaaaattaacttgggcttatagtgcttttacaagaaaatttcctccaaggtcaacatcatgaaagtacaccagaatcaccccaattttataaggaagttttttttaacgaagaaaaattaaggaaattttaaaaacattttaagggtttttctttg

SEQ ID NO: 7968 - DNA, 246 bp, Glycine max
  Clone ID: 701147904H1
ggcacaagtgagtttgttgatcgagataactagaaacagtgtgatgaaaatgaaggtccttgttttcttcgttgctacaattttggtagcatggcaatgccatgcgtacgatatgttccctctccgaatgaacactggctatggtgcccgtactccggaggtgaaatgcgcaagttggaggcttgctgtggaagcacacaacatctttggcttgagaccattcctgaagagtgcgttgaagcaaca

SEQ ID NO: 7969 - DNA, 239 bp, Glycine max
  Clone ID: 701147905H1
gaccacattccaaaacacaaacacatacattgtagtatcacttttgtctcggaatttgttcttttgagttatggcaagcttaaaggttgcatgtgtggttttgatgtgcatggctgtgatgagtgcaccaatgatggtgcaagccgtgtcatgcaatgatgtttctgtgaacctagcaccgtgcctatcttacctgatgcagggtggagatgttccagaatcgtgctgtagcggagtga

SEQ ID NO: 7970 - DNA, 157 bp, Glycine max
  unsure (1)..(157): unsure at all n locations; Clone ID: 701147906H1
tatggaaatgagtggttgtattgtggttgctctgcaaattggcgccgtttaagacaccagaattcctgttccatgccnnnnnnnnnnnnnnnnnnnnnnnncaattacttgtnatctctcagcttttcttcttgagatcttaatatacattgactta

SEQ ID NO: 7971 - DNA, 181 bp, Glycine max
  Clone ID: 701147907H1
ggatgcacaagtttgttgagatagctagaagcaataagatgaaaatgaaagtgcttgttttgttcgttgctacagttttggtagcatatgaatgccatggctcagactaccagaagttccctctccaaatgaaaactgggtttggtgggcaatacagcaatgaggtggcatgtgccggttg

SEQ ID NO: 7972 - DNA, 248 bp, Glycine max
  Clone ID: 701147908H1
ggcaagaagcagaactctctccgcatagccggaataccaggagctatggaatcaatatcatcgcttctacaaactaataggagtgtgattcctgcagctgatgagattggtgaaaataaacttttatttgatcaccaaaattacgggttctggacatttaaccacttgggactcctcatactgaaaaaacttgcacgtgaccttgacaactgtggaaagattggaaacactaggggcctccttccaaa

SEQ ID NO: 7973 - DNA, 131 bp, Glycine max
  unsure (1)..(131): unsure at all n locations; Clone ID: 701147909H1
acgcacctcaaaatgggagaagccctttaaggtgtatagtcataggcccaagaccaagttaatgagctgatgctttgttattatcatttacttagttattctagaagggggtagnatggacattgctgagt

SEQ ID NO: 7974 - DNA, 237 bp, Glycine max
  unsure (1)..(237): unsure at all n locations; Clone ID: 701147910H1
gattgaggcnaatacagtttatggtgcattgcgcggattagagacattcagccagttgtgttctttcgattatacaactacaacagtaanaatatacnaggcaccttggtccatccaagatanacctagatttgcatatcgtgggcttatgctggatacatcnaggcactatttacctattgatgtaattaagcagattattgnatctatgtcctatgctaaacttaatgttctaca

SEQ ID NO: 7975 - DNA, 237 bp, Glycine max
  Clone ID: 701147911H1
ataccttgatttttatactgaccttaccgctacatctccagccgtttctggagtgatggtatatatagcaactcccgacaagaaatctaatgtaaattatttgggccctgcatcgattgaagacattgcaaggcaaataattcaagctaaaggtcccgcaggacctaacagagattatcttttcaaccttgaaaaggctcttcatgaaataggatgcaaagacaaacatgtcattga

SEQ ID NO: 7976 - DNA, 237 bp, Glycine max
  Clone ID: 701147912H1
ccctccgtcgcatttcattctttctgcataaaatttgtagtattactcttcacaattttattgatggtcattcgtccagatcaactctaaaactgaaaagaaagaagaaaaaagagcataaaaaagagcacgcacgtaggcaattatatgcgtggctgaaattttttgtaatttatgcaagtatatgttaagcacatggaatcggagtttcaaaatggaattaaacaatgaaaatat

SEQ ID NO: 7977 - DNA, 199 bp, Glycine max
  unsure (1)..(199): unsure at all n locations; Clone ID: 701147913H1
attgttgaagattcggtgttaactagcgatatagccattggtatataaacgaggttaagtctcactttacaaaataaattttataagattgagttaaactctccttttcttgtttcnatgagtttacaagtgtcaagaaaatttgaagcacattgcaacctaccttggttcaatgagtttacaatcgtctaggaaactg

SEQ ID NO: 7978 - DNA, 113 bp, Glycine max
  unsure (1)..(113): unsure at all n locations; Clone ID: 701147914H1
ggaacggaaaagcactggcgcantaaccctgaggcttctcttctcttctcttctctgtcgtgagtcaccatggtgagggttagtgtgctgaacgatgctctgaagagcatgta

SEQ ID NO: 7979 - DNA, 241 bp, Glycine max
  unsure (1)..(241): unsure at all n locations; Clone ID: 701147915H1
tgtcccaatccaaatcctagctcgtacacatccccatactcggataaatcaggcacccctgcttcatacaaaccagaaaagaaaactttatattatatcagaatttaaaagacattaacattttcataccacatcctacttaagtagcagccaaggaataccttgtttttatcctcagcaaataacgtgccgtatgtnacctgtgtatgaaagactacatacttnggcatatagatctacc

SEQ ID NO: 7980 - DNA, 248 bp, Glycine max
  Clone ID: 701147916H1
ggaacaaaacaagtgtttcgaatagattatcctaagtcctttgggaatagtgctgcaatggcttcaagtcaggaggaggtgacccttttgggagctactggaagcccatttgtgtgcagggttcatattgccctcaagttgatgggagttcaatacaaatatgtcgaagaaaatttgaggaacaagagtgaactgcttctcaaatccaacccagttcacaagaaggttccagtgtttattcacaatga

SEQ ID NO: 7981 - DNA, 208 bp, Glycine max
  unsure (1)..(208): unsure at all n locations; Clone ID: 701147917H1
gannganaagaganatggcanaccnanacaaangtggcagtattaggtggcatcaccgaagtgcagggagctgccaacagcgtcgagatcaacaatctcgctcgctttgctgtagaggaacaaaacaaaagagagaattcanttctggagtttgtgagggcgattagtgcaaagcagcaatggttgctggagtgattactantaactt

SEQ ID NO: 7982 - DNA, 158 bp, Glycine max
  Clone ID: 701147918H1
gactcacagcagagccaccaaatacttgtgttgtgtcgattctctgtcatccatgatccatcacttacaaactagtactacttgctttcaataaaaacaaaaacacactctttggtgaccacaacaacaataacaatggctgcctcactacaagctgc

SEQ ID NO: 7983 - DNA, 153 bp, Glycine max
  Clone ID: 701147919H1
ggagggatggttgtgatgttttgatctcgtcggaggatggatcgaattgttggattttgataatgatggtacgcattacgtgaaaaccttgtggtaattttgaattcttcaatggcgtcctctagctccagcaagaagatccatgctgatact

SEQ ID NO: 7984 - DNA, 239 bp, Glycine max
  Clone ID: 701147921H1
gggacagtgggacccaacaattagaataaattaactattttgcttctaattggattctgatttgaagtgcctacctttctgctttgtctaaagttggtagggattcagtgaaacccttatgattaaggaataagaaatgtctcgagatattaaagatcctacttaatcataccctaaagcagtcaattaaagtgtgacaagttaatcattaagttcatagaaacttatgaaaaacattt

SEQ ID NO: 7985 - DNA, 168 bp, Glycine max
  unsure (1)..(168): unsure at all n locations; Clone ID: 701147922H1
tttcagaatttagagagagaattttattttgttttttcggttatctttattggtttctcttacatcgtttttgtaggcgctgaggaagaagcttggcagcataactttgttggggagcataaaattcnggcaancccttgaagtnggagagtattagntgggactctt

SEQ ID NO: 7986 - DNA, 226 bp, Glycine max
  unsure (1)..(226): unsure at all n locations; Clone ID: 701147923H1
ggtctcatgtgctgatatcttggacatngcttctcgtgactctgttgttcttcttggagggccattttggaaagttagacttggaagaagggattccagaactgccaactttactgctgctaacactggtgttattccacctcccacatctaacctcaccaaccttatcacaaggtttcgagatcaaggactctctgctagggacatggttgctttatctggagcc

SEQ ID NO: 7987 - DNA, 216 bp, Glycine max
  Clone ID: 701147924H1
gacaacaaaaaactacttctcaattcagttaacacaccaaccccacatccaaagcttcagttcaatatggcaaccttgtcaagttttgctcctttggccattctaagtttagttctagtaattagtgccattgtctttgaggctgaagctaggccaaggacattctttgtatttggagattcacttgttgataatggaaacaacattacttggctc

SEQ ID NO: 7988 - DNA, 233 bp, Glycine max
  unsure (1)..(233): unsure at all n locations; Clone ID: 701147925H1
gacaagtatagatatgaaatcaaggacatacttgaaatggaaatgaagattttagaagctcttaattattacctggttgtataccatccataccgttcactatctccgttgcttcaggatgcaggtctgnnngatctaaacatgactcaactaacttgggggcttgtaaatgacacatacaagatggacctattcttgtacatcctccgcatttgattgctttagcttgcata

SEQ ID NO: 7989 - DNA, 242 bp, Glycine max
  Clone ID: 701147926H1
gacacacacaaacacaacaacatatggaggtgctaagggtgcaaaccatagcttccaaatccaaagatgctgccatcccagccatgtttgttagggcagagacagagcaaccaggcatcacaaccgttcaaggggtgaaccttgaggtgccaattattgattttagtgacccagatgaagggaaagtggtgcatgagattttggaggcaagtagggactggggcatgttccaaattgtgaac

SEQ ID NO: 7990 - DNA, 229 bp, Glycine max
  Clone ID: 701147927H1
tgaggttcaagaatatggtgcatgcatggagtgaactggaggaattaataaatgggaaagaaagtgtgtggtttagggtttaaagcggttttcttgttgagggttgcaggaaaacaaagtgttggcgtgacttctcctgcatgcatgtgaataatcacgataaggctctatagccagtcacctttttttctctattttaaggaaatgaaaattactcaacagagaaaac

SEQ ID NO: 7991 - DNA, 233 bp, Glycine max
  Clone ID: 701147929H1
gaaggtaggaaacccataaatttattctagtaatacatttctgggttttgtttgccttgtgtgtatctttctattgacgagaataatggaatgttcccaattctctgtttttttgcttttgtccatttttgtgggaatttgtttagcttctactgaggaacaggaaagggacaggattgccaagctgccaggacaaccagaaaatgtgctatttgcacactactcaggctatg

SEQ ID NO: 7992 - DNA, 215 bp, Glycine max
  unsure (1)..(215): unsure at all n locations; Clone ID: 701147930H1
gtcatgctttcancttatgctcccgtgatttcagctgagaaggctcaccatgagcagttatcagttggtgaaatcacaaacagcgcattcgagccatcatctatgatggccaagtgtgatcctcgccatggaaaatacatggtcttgctgtctcatgtaccggggtgatgttgtgcctaaagatgttaatgcagctgtgggattatcangaccag

SEQ ID NO: 7993 - DNA, 243 bp, Glycine max
  unsure (1)..(243): unsure at all n locations; Clone ID: 701147932H1
ggaagaaatggtgaaggcaaagtttgaggctactgccatagaaaaagagctgagggagacttcatggtgcttggcttcccccttggcttgctgttcactatattcatagtaagtcttttgttgatagtcattggaacaaacatgggaaacctgctttggaaatggttactcaaaaggccctagagaaaaaggcacaagctggaaagtgggctgancctcatgtggaaaccattaaaactaaat

SEQ ID NO: 7994 - DNA, 245 bp, Glycine max
  Clone ID: 701147933H1
catacagaatatcctgttaaatctgaaacttctcaaaatcttaagagcaagaaaagtcctctacatgatctattagcagaagaagttttaaaaaaatctaatgaaatagaagctgaggttccagatagtatattgccctcacataatatagctgcacattcagaatcactggatgatggcaattttattgaggcaaaagatactaaaagaagccgaaaaaagtctggaaaatcaagggtttggga

SEQ ID NO: 7995 - DNA, 133 bp, Glycine max
  unsure (1)..(133): unsure at all n locations; Clone ID: 701147934H1
ataccgtcctangatattactgcacagccttcacacttctgatcctaattcttttctagttttaacagcctttgctttcccaaaccctggtagatacatgcaaagtgcagtgcacttaaagccctcatcttca

SEQ ID NO: 7996 - DNA, 245 bp, Glycine max
  unsure (1)..(245): unsure at all n locations; Clone ID: 701147935H1
gtacttcttatttttataggattttagttagcaatctaatcaggaaatcaactcagcccattcgaactggttaacattattgggtcctctttaataataattatgttcacaatcaaaatttatgagattaattcttgaagtatagaaatcactaaagtaacttttnccnctttaaataaagttttttttatatacataattagaganttaaacnccgtcggtaggtatangaaattctcctcnna

SEQ ID NO: 7997 - DNA, 238 bp, Glycine max
  Clone ID: 701147938H1
gagccaccaaccagaatcaaaataagaaaaacagagtaattttgcatcgtcgtcacacatggagatctccggcaccgttctccgtcaggtcagctacgtctccggctatgggacccacacgcggtcccgcggcctggctcctcgttttggggtgaggatggggatgggttctggtttctgtgacgaggggcatttgcggtattaccaggacaccaaaaaggttctcaccccaaagaag

SEQ ID NO: 7998 - DNA, 246 bp, Glycine max
  unsure (1)..(246): unsure at all n locations; Clone ID: 701147940H1
gagagtggtggggtgtgcagaagagcgtcgcagttgtaaccctaatcagaagaagcgcacttcaagcgagtgacagccaccagccatgggtcgtatgcacagccgcggtaagggtatatcctcttctgctttgccctanaaaaggacacctcctagctggctcangatctcttcgcaagatgtcgaaganaatatctgcnagtttgcgnagaaaggtttnaccccgtctcagattggtgtcatctc

SEQ ID NO: 7999 - DNA, 231 bp, Glycine max
  Clone ID: 701147941H1
gacgtctaagtttgagtgagaagaaactgaaaagtgcttccgagtctcatggagccgaccttattaggttcacacagagaaatatcctcagagtttttcctaaaggagaacgtgtccaatcctcaaatttcaggccatatttagggtggttgtatggagttcagatggttgcattcaatatgcaggggcatggcaaatcactccggttgatgcggggtatgttcaaagcaa

SEQ ID NO: 8000 - DNA, 232 bp, Glycine max
  unsure (1)..(232): unsure at all n locations; Clone ID: 701147943H1
gaagcataagttagttccaaacaaggatttagcagaagcagcattcagagatttgaagaagagggaacagactgcttacaatgttgttgcttacaaggataaaccacgtttgaagagtgctgtagaaatgcttaaaactaccgaagaaatagaacagcgattganagaagtatattttgatcttctggctatctaaactaggtggttggagttggtgaaaattttggtttct

SEQ ID NO: 8001 - DNA, 229 bp, Glycine max
  Clone ID: 701147944H1
ctctcatttcagagataggtgaatttactcatgatagttggaggtgggacatgaagtgtaggaggaacttatttgatcatgaaagtgatttagctgtgcagtttatggaggaaatcagttctattcctattcagatcattgtcctattctaattaaagctaaaaatgtggattggggtcctaaaccttttaggatattaaactgctggctaacagataattcttcaaag

SEQ ID NO: 8002 - DNA, 221 bp, Glycine max
  unsure (1)..(221): unsure at all n locations; Clone ID: 701147945H1
aagacgacagaagggggcagactcaacactctctccagacacttccttcatcaaatggcttctcacgacggcatctccgctgcttcttcagattccgtcttcaatcacctcgttcgtgctcccgaagatcctatcctcggggtaactgttgcttataacaaagatccaagtccagttaagctcaacttggganttggtgcttaccgaactgangaaggaaa

SEQ ID NO: 8003 - DNA, 239 bp, Glycine max
  Clone ID: 701147947H1
gatggggttcttcagcatcacaaataacggtttaactagaagacattctgagaaattgcatacttaataaatataaatgaatttgatgcttggttttagagatctagtctaccaagtatgaaacaattatcatgcatttggaccggtccatgacaattgtctgacttgtgctcaagatttggaatttagaccatatttatttgacctgaagcacttccaaaactctatccttcttaatg

SEQ ID NO: 8004 - DNA, 241 bp, Glycine max
  Clone ID: 701147948H1
gaggacaagtggctataacactacttgcattgagttagactttgatagtttgattagctctaataaggttaaggaccagagaaagagagaaagaaacagaatttggaagaaaaaaagcacaagatgggttattggaagttctaaggttcttcccaagatcaagaaggtttttgagaagaatagcaccaagaaagctgctgctgctgaggccaccaagtcctttgatgagtcaaaggaggaa

SEQ ID NO: 8005 - DNA, 233 bp, Glycine max
  unsure (1)..(233): unsure at all n locations; Clone ID: 701147950H1
ctctatttaaattgaaccctattttatacatgttacaaatgataccattaggtattattaacaaagaaaatataccaaaatataattacttgatgaataataataatgaattttctataacatgccaaagaactataacangctctcagcattactgaaatctctgtacaagctaataaactattcaaatatgccaagaaaagctccatggctgcataccnccggttagaccc

SEQ ID NO: 8006 - DNA, 238 bp, Glycine max
  Clone ID: 701147951H1
gacaaacaggcacacagtcggttcttccttctcaaatattcttgagatccccattttctccgaagcaaagccatggctaagggtcctggtctctactctgacatcggcaagaaagctagggatctgctgttcaaggactaccacagtgaccagaagttcaccatcaccacctactcaccgactggagtggctattacagcattaggaaccaggaaaagtgaactgtttctggctgatg

SEQ ID NO: 8007 - DNA, 134 bp, Glycine max
  unsure (1)..(134): unsure at all n locations; Clone ID: 701147952H1
gacatcacattcaataaaaatggcaanggcatttccgtccgtaacctctgtaactgtggagaacgtgacattccctcccaccgtgaagcctccctgctcccccaacacttcttcctcgccggngccggntnagg

SEQ ID NO: 8008 - DNA, 229 bp, Glycine max
  Clone ID: 701147953H1
tctccaataaaaaataagtaaagaggggcaactgtcataccctaatttcatccggggaccattgtttggtggcatgcaaccttcgcttgaccacctcgaggtacttaacacccgtcgttaggtaatccgtcaagtttctcaacattctgaaaagaaaatgtgtatcattacgaaatttgtaaagtttcgggaaggaatcagcaaaaaaacacaaaagggtgtatttagt

SEQ ID NO: 8009 - DNA, 233 bp, Glycine max
  unsure (1)..(233): unsure at all n locations; Clone ID: 701147954H1
ggcacaagtgagtttgttgatcgagataactagaaacagtgtgatgaaaatgaaggtccttgttttcttcgttgctacaattttggtagcatggcaatgccatgcgtacgatatgttccctctccgaatgaacactggctatggtgcccgtactccggaggtgaaatgcacaagttggaggcttgctgtggaagcacacaacatcttngggcttnnagaccatcccngagggg

SEQ ID NO: 8010 - DNA, 239 bp, Glycine max
  unsure (1)..(239): unsure at all n locations; Clone ID: 701147955H1
gggttatggtgttgggtaagcgaattagcgaagaagcataagancgtcgatggatagtctcaagttcgcatctttgacgctgcctccttgttctcgacgctctgggatgctaggaaagaggttgaattcccctttacttattattgattcttcagcacagttttgctattgcaagactgatcttgctgccgcatcatcaagtattccactgccaaatatgagattttcttgtagatttc

SEQ ID NO: 8011 - DNA, 134 bp, Glycine max
  Clone ID: 701147956H1
ggcacaagtttgttgagatagctagaagcaataagatgaaaatgaaagtgcttgttcttgtttgttgctacagttttggtagcatatgaatgccatggctcagactaccagaagttccctctccaaatgaaaac

SEQ ID NO: 8012 - DNA, 245 bp, Glycine max
  Clone ID: 701147958H1
gacatggaaaacagagatggatgactccattcatgaagaaaatattcgaaaaccggaggtatgttcaaggccctattgctgaccaagaaattggaaagacagaaactgactgcaaagttggtgaaaagaaattggaaaaggtgtgtgtggaaaatccaagggataacaggggaaaaggagcttctgaaatgtcccaaggagaagcagagcattcaggaaaggtggcttgcactgcaacaaatttc

SEQ ID NO: 8013 - DNA, 213 bp, Glycine max
  unsure (1)..(213): unsure at all n locations; Clone ID: 701147959H1
gatgattttggaagttctgatgaagagatggaggatgctgatagtgacagtgatgatgagagtnnnnnnnnnnnnnnnnnnnnnnnagaaacccatcctaagaataagaaggcagatctaggaaagaagagacccaatgaatctggcattcaaaaactccagtttcctccaagaaagctaagaatgccactcctgaaaagactgatggtaaga

SEQ ID NO: 8014 - DNA, 228 bp, Glycine max
  unsure (1)..(228): unsure at all n locations; Clone ID: 701147960H1
ggtggtagtttggcagcgacacgtatcttcatcaataatcgcagaagcagtttccggtgcatctcatcgtcttccaaaatgaacgacgcagatgtctcgaagcaaatccagcagatggtgcgtttcatccgccaggnagctgaggagaaagccnccnagatctctgtatctgccgaagagggattcaatatcgagaagctgccattggttgaagccgaaaagaagagt

SEQ ID NO: 8015 - DNA, 231 bp, Glycine max
  Clone ID: 701147961H1
ggtaagcggtcaacacaagaaaattactatccctggaaagaaaatgcagaccgtggcagaacgatttgaagaagctttagggacatcctctgttatgactgaagaccatggcagaacgatttgaagaagctttagggacatcctctgttatcactgaagggacacatgttggagcacttaattcattgagacctggaatatttggaaaactacagcagatgatgctgaaag

SEQ ID NO: 8016 - DNA, 107 bp, Glycine max
  Clone ID: 701147962H1
cagagaaggaaattgaagcatcaaactcgaagatgctatcatgtttaacaactgcagaagaacttagaagggagattgaggaggccaacgaggagcaagtacttgct

SEQ ID NO: 8017 - DNA, 250 bp, Glycine max
  unsure (1)..(250): unsure at all n locations; Clone ID: 701147963H1
gactcaagcacaacatctctatcgagtaaattaactatgaagcctaccctactattatccctttccttcctgcctctctttgctttcctggctctttcagaagatgttgaacaagttgtggacataagtggcaaccccattttcccnggtggcacatattacattatgccatcaacttggggcgctgccggtggtggattgaaactaggccggacaggaaactcaaactgcccagttactgttttgcaag

SEQ ID NO: 8018 - DNA, 237 bp, Glycine max
  unsure (1)..(237): unsure at all n locations; Clone ID: 701147964H1
gcatgcgatctgtttttgagagctggttcatcgantacaaagttgatgtgatctttgctggccatgtccatgcttatgaaagatcatatcgatactctaatgttgactacaacataacaggcggtaacaggtatccattacctaacaaatcagcacctgtttacataacagtcggagatggtggaagtcaagaaggtcttgcttcaaggtttttggatccacagccagaatattctg

SEQ ID NO: 8019 - DNA, 231 bp, Glycine max
  Clone ID: 701147965H1
ggagaagcaatgattgtgttatggtaatcgtacgtaatagcatctattcaatggcatttttcattgttgctgtgtaaatggaagcagttgttattgaacgatttttccaagtatatcagatatttgctggggattaagtgaaaaagactcaatggtaaaaccaaaagtgtctactcaaccaaaaatatgctacaggcctattcgaccttctgacctggacattttagagca

SEQ ID NO: 8020 - DNA, 227 bp, Glycine max
  unsure (1)..(227): unsure at all n locations; Clone ID: 701147967H1
gaaggaaggaagagagcaccaaggcaattagtcatgccatatttgttatctttatactctctgtgagtgcaagatgttgtggacaagaagaccttgataatgatatattagctcctatggagaaagcagagcaggaagctctatactccaccattcaaggctttgttggtgattcctggaatggctcagatctctatccagatccttgtggttgnactccattcagg

SEQ ID NO: 8021 - DNA, 227 bp, Glycine max
  unsure (1)..(227): unsure at all n locations; Clone ID: 701147968H1
ggcacaagtgagtttgttgatcgagataactagaaacagtgtgatgaaaatgaaggtccttgttttcttcgttgctacaattttggtagcatggcaatgccatgcgtacgatatgttccctctccgaatgaacactggctatggtgcccgtactccggaggtgaaatgcgcaagttggaggcttgctgtgganncacaaaaatttgggntttgagacnattccngag

SEQ ID NO: 8022 - DNA, 226 bp, Glycine max
  Clone ID: 701147969H1
gaagccatttatgacatctgcaggcgttcactggacattgagaggccaacctacaccaaccttaatcgtttagtttctcaggtgatatcatcactgactgcttccctgaggtttgatggagccttgaatgttgatgtcaatgaattccagaccaaccttgtgccataccccaggattcattttatgctttcatcttatgctcctgtaatttcagccgagaaggctc

SEQ ID NO: 8023 - DNA, 179 bp, Glycine max
  Clone ID: 701147970H1
ggcatcaattcaaaatatatcatcaattataagcatgggtttgtggaacacaacgaatgcagtgtcttgccgctttcacaagtttggtgatgaccaaaagaatctggtcttccaaggtgatgccacgtcttcttccaggggcatagaactcacaaagttagacggtggaggaaaaccag

SEQ ID NO: 8024 - DNA, 225 bp, Glycine max
  unsure (1)..(225): unsure at all n locations; Clone ID: 701147971H1
gattgtaaagcattcttcgcctttctctctcttctttttactctctctctgtctctctctacgctttctcgttcgagatccctcaagggatccactaactgaaggagaaatggggttgacattcaccaagcttttcagccggcttttcgccaagaaggaaatgcgaattctgatggtgggtctcgatgcagctggtaagaccaccatcctgtacaanctcaaact

SEQ ID NO: 8025 - DNA, 225 bp, Glycine max
  Clone ID: 701147972H1
gggaggagattgggcaatgacgtcacgtcgaatggggtcccgcaacccactaataaaacaatcaagcaaggccggttcagtcaatccctcgacccgattagcaagtgtcatgaatttggtgtagtaatccgccacagaattggtttgggataatttgaacaactgggcccttgggctatcaaattgggatgggccaaattgtttctcaattgcttgcgcaagagc

SEQ ID NO: 8026 - DNA, 102 bp, Glycine max
  unsure (1)..(102): unsure at all n locations; Clone ID: 701147973H1
gggggggggaaaantnttanatgantgagagaagagagatgggaaggagaanattggggaaggantcaaantcntacacgcttccatcatcaccgtctcact

SEQ ID NO: 8027 - DNA, 224 bp, Glycine max
  Clone ID: 701147974H1
gatgatattagttttaacgttaagcttaggaagaaatctgtgtaagtagcctagtcatactctgtatcatttcatttcgataatcatccatagttactgaagaaaatggcaaccatctccgctgctatcacaaccccatcgatcacccgcgcatgtctagtgcaaagacgttctcttgggttctcatctcccgttcttggtttgccagcaatgggtaaggtggg

SEQ ID NO: 8028 - DNA, 226 bp, Glycine max
  Clone ID: 701147975H1
gactgtaggtagagaaacagaaaccaccttgtttcggaattctgttgcaaaattaagaagaaagaaacatactccattaatgggtggtgttagatgggctcaagagtcatcttcatccatgaaactcttgctgttcatggtgcctctcgtacttgttgctgggcttgtttttatattgggtcctaacccttctagttgggtttcttttgccaacgcacctgtgtta

SEQ ID NO: 8029 - DNA, 224 bp, Glycine max
  Clone ID: 701147976H1
gatagacgacggctgatcacacattcaaatgctaagagcaagagtgagaagtttcctcctccccaccaagatggagctctaggctatcctttgggttcttcacatcacatggatccagtttttgatccccctgatgttccatttagttctacaaacttctcacaacctaaagcaaatatccaaacctggtccggcccattggtagatccttctggtgtgggcgt

SEQ ID NO: 8030 - DNA, 227 bp, Glycine max
  Clone ID: 701147977H1
ggcatatccaaaggaacaaaaatattattaagatgatcaacattattggagcacttgttctactctttgcatttctcttcctcagttgtgtgtatgcacaagacacaacaacccttgtgcctgcaatcataacttttggtgattctgctgtggatgtagggaacaatgactatcttcccacccttttcaaggctgattaccctccttatgggagggactttgttaac

SEQ ID NO: 8031 - DNA, 133 bp, Glycine max
  unsure (1)..(133): unsure at all n locations; Clone ID: 701147978H1
annaaaattgaaagtagngaagtgtttgtagtcacatttgagggggacaagaaaccattggctctagtgatggggtcaaggccatatagtaagggagtctgtgaaggtatagaatatgcacttaaaactatga

SEQ ID NO: 8032 - DNA, 210 bp, Glycine max
  unsure (1)..(210): unsure at all n locations; Clone ID: 701147979H1
gatatcagaagcgcanacctaggatttcggccgtntgctccccaaggaaagaagcagagtgtttcttttgaaatcagctagaaaagatgtcaggtgaagaggtagctgttgcagctgaggcacctgctgctttcaattccaggtgagccaatggacatcatgactgctctacagcttgtgctgagaaaatctctggcctatggtggtctt

SEQ ID NO: 8033 - DNA, 243 bp, Glycine max
  Clone ID: 701147980H1
ggtttaactgctgggttgttagatttccgcacatctgaagggctaatatggaaaaaaaaataaaggcaaattattgaaggcttgacaactattttaatttttctttgactggtaataatgcttgtgcctggtttcctactgattttcatgaacagtttgtgcctggaagttcatcagaagtacttatcacttcttctgattctcggattcgacttgttgatggtattgaattagttcataagt

SEQ ID NO: 8034 - DNA, 204 bp, Glycine max
  unsure (1)..(204): unsure at all n locations; Clone ID: 701147981H1
ggaagaaaaagcgcatacggcgtttgcgaaattgcgatttcatgtcatagagaggaaaagaggagangcggggcggagcagagacgaatggcagatcagagcgagcattcgaaaacggcgttgcctccggaggaccaggaccgtcccgttcgggnntacgcggatggcatctacgatctcttccanttggccacgcccgtccct

SEQ ID NO: 8035 - DNA, 157 bp, Glycine max
  unsure (1)..(157): unsure at all n locations; Clone ID: 701147982H1
gggaacggcgaacgntcgcaaganacgcaacacanagttgaacgaggaataggcgtgtagggaaaccgtttcattttcaagcgcgtgactttcaaatccaatcttccataccaatggccttcagcaacgctctcagatctgcngcgaacttgtcgnt

SEQ ID NO: 8036 - DNA, 226 bp, Glycine max
  Clone ID: 701147983H1
gattgtaaagcattcttcgcctttctctctcttctttttactctctctctgtctctctctacgctttctcgttcgagatccctcaagggatccactaactgaaggagaaatggggttgacattcaccaagcttttcagccggcttttcgccaagaaggaaatgcgaattctgatggtgggtctcgatgcagctggtaagaccaccatcctgtacaagctcaaactt

SEQ ID NO: 8037 - DNA, 206 bp, Glycine max
  unsure (1)..(206): unsure at all n locations; Clone ID: 701147984H1
ttcagcggtgcccccanngataacaacataatgctantggaatgctgtcatatttggtcctgatgatactccatgggatggaggcacgttcaagttgactctccagtttactgaggattatccaaataaaccaccaactgtgcgatttgtgtctcgnatgtttcatccaaatatttatgctgatggaagtatttgtttggatatac

SEQ ID NO: 8038 - DNA, 229 bp, Glycine max
  Clone ID: 701147985H1
ggaagctggaggattttcatcttccacagcgtcaacatgttatacttccaaaccatatcattgtgcctgattctgaaaagaacaagtttagctttggaagtttgggagttgctttgggagttaatacaagctatgtaagtggcccagagagcgaaaagagttctacacctgtttctgaaacatctcagactgttgaagaaactgtggaggagcaggattcaagtcaaat

SEQ ID NO: 8039 - DNA, 114 bp, Glycine max
  unsure (1)..(114): unsure at all n locations; Clone ID: 701147986H1
gatcanacatcttaaaactatctagatagtctcagtttagttagcaaacaaccccacaggccacatccaaaggttcatttcaatatggcaatcttgtcaagttttgctctttga

SEQ ID NO: 8040 - DNA, 235 bp, Glycine max
  Clone ID: 701147987H1
ggaaggagtgaggtagcaacagcactgccactgccactaccaatagcagaatgggaaccttgggcagagctttctacgccgtcggattttggatccgcgagaccggccaagccatcgatcgcctcggctctcgtctccaaggcaactacctctttcaagaacagctatctaggcatcgacctctgatgaatctgttcgacaaagctccctcggttcacagggatgcatttgtggc

SEQ ID NO: 8041 - DNA, 226 bp, Glycine max
  Clone ID: 701147989H1
ggcagccaagaaaagaaaatcctcacccattttcttcgtagccaaacactctgaaattctcagttatgtcgtggcaagcgtatgtggatgatcacctactgtgtgaaatcgaaggtaaccactccactcacgccgctatcatcggccaagacggaagcgtttgggctcagagcaccaacttccctcagttcaaacctgaggaaataactgccatcaataatgactt

SEQ ID NO: 8042 - DNA, 224 bp, Glycine max
  Clone ID: 701147990H1
gaacacgcggcttccgccggaggtgaaccgcgtgctgtacgttcggaaccttcccttcaacatcaccagcgaggagatgtacgacatctttggcaaatacggcgccattcgccagatccgcatcggcaccaacaaggacactcgcggaaccgctttcgtcgtctacgaggacatctacgacgccaaaaccgccgtcgaccacctctccggcttcaacgtcgcca

SEQ ID NO: 8043 - DNA, 202 bp, Glycine max
  unsure (1)..(202): unsure at all n locations; Clone ID: 701147991H1
gggaggaaagtgganatcctatctgagtgccaatccgttgattgaagaatcattggcatcacactctacagatttgcagcaacgtgcttatgaattgcaagctcttataggtttggatgtacaagctgttgaaacaataatgccacgagatgcaagttgtgaagacattgaggttgataagaatctttctttcctcaatggg

SEQ ID NO: 8044 - DNA, 194 bp, Glycine max
  unsure (1)..(194): unsure at all n locations; Clone ID: 701147992H1
gatcanacatcttaaaactatctagactagtctcagtttagttagcaaacaaccccacaggccacatccaaaggttcatttcaatatggcaatcttgtcaagttttgctcctttgaccattcttagtttagtcttgttagtggttggaatcattgtgtctggggttgaagctaggccaagagcattctttgtgt

SEQ ID NO: 8045 - DNA, 223 bp, Glycine max
  Clone ID: 701147993H1
gagagaatcatggatatacctaaacaaacacttggtagtttggccatggtaatattactctttgctgggattattttggtgtaccactggaactcttccttctccaacgaattcgttctgacggtaaaggaaccactttgcaagcaatcatatcttaccactcccaatattgaagcaaatggagatggccttgacactgctttggccaaagcctccatgggaa

SEQ ID NO: 8046 - DNA, 178 bp, Glycine max
  unsure (1)..(178): unsure at all n locations; Clone ID: 701147994H1
accctctacatcactcaacaaaataagaagatcagcttttaattccaatgccaataaagctgataaactgtcattatcccaaaatatgccagaagaatcctgcataaaatgatttagtgacactttaagtattctctagtctagtctcatacgtcacctgtttttttttttanaangg

SEQ ID NO: 8047 - DNA, 246 bp, Glycine max
  Clone ID: 701148001H1
gggaaaggaactactaaaaggaatatcagaaagcttgggattggaagccaattacatagaggatacaatgaacctagattctggttggcaaatgatagcagcaaatatgtatccaccttgtccacaacctgagcttgcaatgggaatacccccacattctgatcatggcctcttgaaccttctcctgcagaatggggttagtggtcttcaagtgcttcacaatggcaagtggatcaatgtcggttc

SEQ ID NO: 8048 - DNA, 266 bp, Glycine max
  unsure (1)..(266): unsure at all n locations; Clone ID: 701148002H1
antgtatagggtgggggcaacaatatcataaaaaatacttagttaaaaaaacgaaaatactgtattgcaattgtattgcaattcgaaacgaaatatagttcgagatcattgtattatttttgtactatattaatcttaatcttaattggaacgaaatctttcaaaattggatttctaattcttaatttatattttcgttttttcgttcttttctttttcttagattataatccgaaaacaaaagagttaagtgaattaaaaaccca

SEQ ID NO: 8049 - DNA, 240 bp, Glycine max
  Clone ID: 701148003H1
ggagagatgcagcagcacctgatgcagatgcagcctatgatggcagcctactaccccaacaacgtcactactgatcacattcagcagtatctggatgagaacaagtccttaattctgaagattgttgaaagccagaattcaggcaagcttagcgagtgtgccgagaaccaagcaaggcttcagagaaatctcatgtacttagctgcaatagctgattctcaaccccaaccacccaccatg

SEQ ID NO: 8050 - DNA, 249 bp, Glycine max
  Clone ID: 701148004H1
gaataatataactatataagcggttcttccatttgactcttgttctgaacgacttttcaagagaatcaatccatggcagtgaaagtatacggtccccactgtgcttccaccaagcgggtgctggtttgtctggttgagaaggaagtcgaatttgaggttgtccctgttgatgtcactaagggggagcagaaggatcctgagtacctcaaactacagccatttggagttgttcctgtcatcaaagatgga

SEQ ID NO: 8051 - DNA, 242 bp, Glycine max
  unsure (1)..(242): unsure at all n locations; Clone ID: 701148005H1
gatcgaagcaaaaaatgaaaacccaaagtgcttctctcctctgtctttttctctactcttgctatccttttggctagtngcactgctgcaagtgcaactccaagaagcgcagtgccaagccaccatgtttcaacattcaacagaagcctttttccttnccacttttctctttggaattggttcttctgcttaccaggcagaaggagcagcaagtgtagatgggagaggaccaagcatatggg

SEQ ID NO: 8052 - DNA, 248 bp, Glycine max
  unsure (1)..(248): unsure at all n locations; Clone ID: 701148006H1
gaccacattccaaaacacaaacacatacattgtagtatcacttttgtctcggaatttgttcttttgagttatggcaagcttaaaggttgcatgtgtggttttgatgtgcatggctgtgatgagtgcaccaatgatggtgcaagccgtgtcatgcaatgatgtntcacgnncnctagcaccgtgcctatcttacctgatgcagggtggagatgttccagaatcgtgctgtagcggagtgaggaacatct

SEQ ID NO: 8053 - DNA, 238 bp, Glycine max
  unsure (1)..(238): unsure at all n locations; Clone ID: 701148007H1
ttatctattttatctcttgctattctcacacccttcgcaattgctgtggaaggaccgcaaatgtgggctgctggatggcaaacagccatgtntcanattngnccccaattncatatngtggctagctgctcanagtgtattctatcatctatacaatcnagtgtcatacatgtctctggntcagatctctcctttgacgtttagcattggaaacaccatgaaacgtatatctgtcatg

SEQ ID NO: 8054 - DNA, 240 bp, Glycine max
  unsure (1)..(240): unsure at all n locations; Clone ID: 701148008H1
gacgtttagtaatttttttattctcttctgcgttcttcccaccaacatacgaaaccatgtccaccgacttgcacctccacaacgacctgccccagctccgaatnnnnnnnnnnnnnnnnnnnnnnnnnnnnnnnaaaaccgacgacctcccctccgacgatgacgaccgcaacgccgtctcttccgtcatcactcaaaccgagaccgaaactgacggagccaccatcgtcgacgtcgccg

SEQ ID NO: 8055 - DNA, 239 bp, Glycine max
  Clone ID: 701148009H1
caacaaacatgatgatgaatcaactgccgaaccctaatgatttggtcatgagcaccatgagagggggacctgaagaaacccctaagcctccatcagctaatagacctccagagaagagacagcgagttccatctgcttacaaccgcttcatcaaggatgagatccaacgtatcaaagctgggaatcctgatataagccacagagaggcctttagtgcagctgcaaagaattgggccctt

SEQ ID NO: 8056 - DNA, 209 bp, Glycine max
  Clone ID: 701148010H1
gatagagtagaatgataaccaaaacgaaaaaacaagcgtcatcaccttcttcactccctgtttctgttggttccatcccttcattcacaccttgatccgtgatctcctaatttctcacttgtatgaagcaagaatagataagtaatggcaggagcagaagcaagggctctgtggcagagaactgctaatcgttgctttgtccaagaaga

SEQ ID NO: 8057 - DNA, 170 bp, Glycine max
  Clone ID: 701148011H1
aattgttctaactcttagcagccatggcgagcaccaaagttcagagggttatgactcagcccattaacttgattttcaggtttcttcagagcaaagcacgcattcagatttggctatttgagcaaaaggatttgaggattgaaggcagaatcattggttttgatgaatac

SEQ ID NO: 8058 - DNA, 229 bp, Glycine max
  Clone ID: 701148012H1
ggcacaagtgagtttgttgatcgagacaactagaaacagtgtgatgaaaatgaaggtccttgttttcttcgttgctacaattttggtagcatggcaatgccatgcgtacgatatgttccctctccgaatgaacactggctatggtgcccgtactccggaggtgaaatgcgcaagttggaggcttgctgtggaagcacacaacatctttggctttgagaccattcctgaa

SEQ ID NO: 8059 - DNA, 231 bp, Glycine max
  Clone ID: 701148013H1
ggagaaagagaaagcatagaaaggaaacgaaaaaacagagtacccgacagaatttgaaaacaaaggctgaaatttgaagaaactgagatcattgggtgtgaaatatatggcagaggttgtcctgctagtcgatgatttgaaattactttctgcgagtcctcgttgtagaatttgtcatgaagaagagtttgaaagcgtagaaaccttggaagcaccttgtgcttgttctgg

SEQ ID NO: 8060 - DNA, 121 bp, Glycine max
  Clone ID: 701148014H1
ccggttctattcccacggcaaatcactgacccggttatcaatacagtctgtgataaagagcgccatcacaggcaagacgagacccttgccgatcaaccctagaagcgggttatacctcttg

SEQ ID NO: 8061 - DNA, 231 bp, Glycine max
  Clone ID: 701148015H1
gatataccattatttaaatgcattgatgattgttatgtgagcctattgtattatttattttgatcttttcagttgttgcttctatatctactaatctgaattcaattccgttcgtaatggtacaaattttaaggactggaaagagaacatgcaaattgttcttggctgcatggatctaaaccttgcattaaggagtgagaaactccctactcctacgaattccagtacctt

SEQ ID NO: 8062 - DNA, 241 bp, Glycine max
  Clone ID: 701148017H1
gcttcagatctattggtatattccaacattaaaactggccaatatatatgagaattgagaactccaagttatttaatcttcttgtgatacacaatttgattctaacataaattagacctcttcttgtgttactctttagacactccactaatccaacttaagtcattgtacaagcacaaatggattttctgcggtgcttgctattggttattattcttccgttgtgttattctattgatgc

SEQ ID NO: 8063 - DNA, 238 bp, Glycine max
  unsure (1)..(238): unsure at all n locations; Clone ID: 701148019H1
gtatactctttgtgaacatgcccggacccatcaacatatatcctagaccaganaataaaaaganaaaatattttatcattttagaatttagagtatgattatcaattatggtgcttacttgttaaaatagcagggaatgaacctccacgnaagacatcacttgtattntcatcttcccttcttctcttgagaacagagttgccaccatgagatacnagaagtagacgaggtggcatag

SEQ ID NO: 8064 - DNA, 241 bp, Glycine max
  unsure (1)..(241): unsure at all n locations; Clone ID: 701148020H1
ggcactgtgaatcacagaatccccgttagcactctcgtctcgacgattccctgtgatctctcagtcttctcttgctgtggttcagacttcagagcaggatccaaaagccttggtcaagactcattcatgtctgttcctaatgaggaaaacttgttntattcccagcttttttattttttcttggatctccttgattccatcatagtcgacgtggcatcagagtgtcacagagtagcaaggc

SEQ ID NO: 8065 - DNA, 237 bp, Glycine max
  unsure (1)..(237): unsure at all n locations; Clone ID: 701148021H1
ggctttccacacactttcaccaatttataaattatttgcagttacactccaagtctactttttctttggcagcttagccttcctattttggaaaccctcttcactgctctcccaccttttttgtgtgtatgtgtatgagcttctcttctactctattcactgcactcttattaataaatatcagtgcttggaaagcagaggagaagatccatagctaagntagatctcgngntgggt

SEQ ID NO: 8066 - DNA, 238 bp, Glycine max
  unsure (1)..(238): unsure at all n locations; Clone ID: 701148022H1
ggcatatccaaaggaacaaaaatattattaagatgatcaacattattggagcacttgttctactctttgcatttctcttcctcagttgtgtgtatgcacaagacacaacaacccttgtgcctgcaatcataacttttggtgattctgctgtggatgnnngggaacaatgactatcttcccacccttttcaaggctgattaccctccttatgggagggactttgttaaccaccaaccta

SEQ ID NO: 8067 - DNA, 235 bp, Glycine max
  Clone ID: 701148023H1
ggcatcaattcaaaatatatcatcaattataagcatgggtttgtggaacacaacgaatgcagtgtcttgccgctttcacaagtttggtgatgaccaaaagaatctggtcttccaaggtgatgccacgtcttcttccaggggcatagaactcacaaagttagacggtggaggaaaaccagtgggtggcagtgtggggagagtgttatactcttctccagtgcacctttgggaaagc

SEQ ID NO: 8068 - DNA, 235 bp, Glycine max
  unsure (1)..(235): unsure at all n locations; Clone ID: 701148024H1
acttcacctcatcagctagaatgctctctttttttgcacaccaaatcaaggtgcacgcgcttcttcattcattggtgatgatatcaaaatcacaggaattgcatcaccaccgagatcctcagtcctttctttgcttcttcagcccaaatctctctctgagagcatcttcntggaggacagcggcaacctcatgaagctgaatgggattttcatcaactcgtttgaagaactagaa

SEQ ID NO: 8069 - DNA, 236 bp, Glycine max
  unsure (1)..(236): unsure at all n locations; Clone ID: 701148025H1
gacagtgattcattcgaaaaccaaatccctaattttctctctcttcaatggcgccgcagaaactcaacgattacgaacggaagcgactcgagaacattcgccgcaacgatgaaatgatggctgccctcaaactccactccaaagccacccaactntccaacttcaagcgtagtcaaagggttggaaccaaatcctacaacatgaaatcggaaaagaaacccaaaaccgaaacccca

SEQ ID NO: 8070 - DNA, 233 bp, Glycine max
  unsure (1)..(233): unsure at all n locations; Clone ID: 701148026H1
ggctccgtgttttttctctctgcagaatttcccaaatttctccactaccctatctcctttgctcctgaaactcccacattcttcaccagcaatgcacgatcttcaatacgaatgcagtttcgatatttgatatcggagtatcggtgtttgagcggctgaattggaattggaaaatgcttgaggcaatggaaagttcggtcaatggtgggttcacccatttnttgagctgtgga

SEQ ID NO: 8071 - DNA, 233 bp, Glycine max
  Clone ID: 701148028H1
gaacctaagaaagagaagtagtagcagtagcagtaggaagaggatgatcggcgtcggaaagatcaagcagtacagtaacgtcctcgacaagcccctcaccaagggcaagcaagaggttagtttgagcgcattcgcgttcttgttctcggagcttgttcagtacaaccaaacgcaggtcgacaatattggcgagcttgaacgaagactggaggatgctggatatgcggttgggg

SEQ ID NO: 8072 - DNA, 234 bp, Glycine max
  Clone ID: 701148029H1
gaagccagagaaagagaaggaaccaacaacaaagagcagagagaaagagaggaccattccaaccctaatttctctgctaaaccctagttgtttggcatttcctctcttctccctcgtaaatcttctcccattccctccggtagctttccagatccaaataaatcatggttttctgggtttttggctacggttcactggtgtggaaccctggattcgattacgacgagaagatta

SEQ ID NO: 8073 - DNA, 234 bp, Glycine max
  Clone ID: 701148030H1
gagggaaaaaagaaaagaaaagaaagcagtgaaggagagaaagatgggtaagaaggaagtggcgttgttgttgtttgagatgcgagcctattccggtagaaagggaaccttctctgtacttcttctctttctcctcttgattctaattcttcccatcatttaaagtttcttccttcgttcacactttctcttctcttctcttcttcttctttgttcaaagacttcacctttttg

SEQ ID NO: 8074 - DNA, 242 bp, Glycine max
  Clone ID: 701148031H1
ggggaatttgttgatacagctataaatagatttgttctcattgcacttggtgctgctgtatctttgggagtcaatatctgcatatatccaatctgggctggtgaggatctgcatgatcttgtcacaaaaaatttcatgggtgttgcaacatctttggaaggtgttgtcaatcactaccttcattgtgttgaatataagaaggtgccatctaaaattcttacttaccaagctgctgatgaccc

SEQ ID NO: 8075 - DNA, 242 bp, Glycine max
  unsure (1)..(242): unsure at all n locations; Clone ID: 701148032H1
gggaatcgaattgaggaagtgaaaaggtgggccagtctcaagtggcagaatgattcttcaactacatctcccttgtgtggaagagagcgagagaagaaacgcaagaattttgatagggattgtgaattagatagtacgattgtngttgactattcgccaacaccaaaagcttcttggtcacctgcataccataaaatgtttgttgacttatgcatcgaagaaacattgaaggggaacaagtc

SEQ ID NO: 8076 - DNA, 241 bp, Glycine max
  Clone ID: 701148033H1
gcaccaagagacagctgcactgaacaaaacaaatttaaattacgatattcgtttcaagcagaggagaagggacacacagttcacacaataataacatcttcattcgtttacccacttttctttacgaccttattccttcgattctgtcttagaatgacgaattcactatctccctgaaaccatgactgtgagggacagtcatcatcattgagccttacccagaactaaaaaagcaatcttt

SEQ ID NO: 8077 - DNA, 237 bp, Glycine max
  Clone ID: 701148034H1
ggggggaaggaaagaaattagaaatatttattcattgtcaccaaatcttgttccctgcaagagaaagaaagaagggagagaagaagttgttgggttgagttggattggatttctaatctaatctatacctttcttttttcctatgcttttaaggcacaaacccttctttcttccctcttctttcttcttcttatcgttattccttgcctttaccctttagggaaggaagaaggaaca

SEQ ID NO: 8078 - DNA, 194 bp, Glycine max
  Clone ID: 701148035H1
cccaaatcccaagtctcctaaaaccctaattcgcagtgaaaatgagagaaatcttgcacatccagggagggcaatgcggtaaccagatcggagcgaagttctgggaggtgatatgcgacgagcacggcatcgaccacaccggaaagtacagcggcgactccgagctccaattggagcgcatcaatgtttattac

SEQ ID NO: 8079 - DNA, 244 bp, Glycine max
  Clone ID: 701148036H1
acccttggcctactcctgagtagtttagagccattgttgcatggccaagagataggcctattttttaggaggaggcaggtcctgcagatgcttaatgagctgcccaagtagatagaagaagagcaaaggaagatgaagacatggtggatcttgttgattatttcatgggaggaaatggagcttcccagccatgatcttcaaaaatttgtgacttgtctttattttcatttatcgctttcactcc

SEQ ID NO: 8080 - DNA, 241 bp, Glycine max
  Clone ID: 701148037H1
ggaggcactgacaccgcttgagcaaaagcaggagataaacattaaacactgcaaaattcgtaggaaccgcacaattgagatagttgcaaccagcaagtcaccaccatggcacttgttgaagcctctgcttctctttcaatctcttctgttgctcgtcttttcactccaccaaaatgctctcccaccgctcactttcctcatcggaattttgttgcaactcgaccatcattcatcgctggtt

SEQ ID NO: 8081 - DNA, 235 bp, Glycine max
  Clone ID: 701148039H1
gcacaagtgagtttgttgatcgagataactagaaacagtgtgatgaaaatgaaggtccttgttttcttcgttgctacaattttggtagcatggcaatgccatgcgtacgatatgttccctctccgaatgaacactggctatggtgcccgtactccggaggtgaaatgcgcaagttggaggcttgctgtggaagcacacaacatctttggctttgagaccattcctgaagagtgcg

SEQ ID NO: 8082 - DNA, 245 bp, Glycine max
  Clone ID: 701148040H1
ggagggggatgagtttagttagtgaagaacttctcaagattaatatgcttttgtataatgtatatgcatgtttcttcctgttcctgccaaggtgacttatcctgtggttggcccatttggcagtgtctgctgatgctttaggcattctttagataacttgcatccattttttttttccctgagtaatgccattggtcaccaagttggataaggcttttgttgatattgctgagtaatgccattgg

SEQ ID NO: 8083 - DNA, 238 bp, Glycine max
  Clone ID: 701148041H1
caacaaacatgatgatgaatcaactgccgaaccctaatgatttggtcatgagcaccatgagagggggacctgaagaaacccctaagcctccatcagctaatagacctccagagaagagacagcgagttccatctgcttacaaccgcttcatcaaggatgagatccaacgtatcaaagctgggaatcctgatataagccacagagaggcctttagtgcagctgcaaagaattgggccca

SEQ ID NO: 8084 - DNA, 240 bp, Glycine max
  unsure (1)..(240): unsure at all n locations; Clone ID: 701148042H1
ggcctacgcagagagnaattgagtttctgngataaccacttttactctttgattcatcaatggcaaccgcnangaccgtgaaggatgtttcgcctcacgatttcgtgaaggcttacgcctcccatctcaagcgttccggcaagatggagcttcctgagtggactgatattgtagaaacagcanaatttaaggaattggctccatatgatcctgactggtttatgttagggctgcctcaat

SEQ ID NO: 8085 - DNA, 229 bp, Glycine max
  unsure (1)..(229): unsure at all n locations; Clone ID: 701148043H1
gcccatccatcacacctcaaacccatttccttgatatcttagttatctaattacctcaattaatcccttaattgcaagcatcatggctgaggagannnnnnnnnnnnnnnnnnnnnnnnnnaagggcgatgatgtgcctggcgaggttgattataagaaggaggagaagcaccacaagcatcttgagcaccttggggaacttggtgctgcggctgtcggtgcttatgcc

SEQ ID NO: 8086 - DNA, 238 bp, Glycine max
  unsure (1)..(238): unsure at all n locations; Clone ID: 701148044H1
ggcacaagtttgttgagatagctagaagcaataagatgaaaatgaaagtgcttgttttgtttgttgctacagttttggtagcatatgaatgccatggctcagactaccagaagttccctctccaaatgaaaactgggtttggtgggcaatacagcaatgaggtggcatgtgccagttggaggcttggcgtggaagcaaacaacgtagtcaagtggcaaactgttncctgcagcttgcg

SEQ ID NO: 8087 - DNA, 243 bp, Glycine max
  unsure (1)..(243): unsure at all n locations; Clone ID: 701148045H1
gaacacgcggcttccgccggaggtgaaccgcgtgctgtacgttcggaaccttcccttcaacatcaccagcgaggagatgtacgacatctttggcaaatacgncgccattcgccagatccgcatcggcaccaacaaggacactcgcggaaccgctttcgtcgtctacgaggacatctacgacgccaaaaccgccgtcggaccacctctccggcttcaacgtcgccaaccgctacctcatcgttc

SEQ ID NO: 8088 - DNA, 237 bp, Glycine max
  Clone ID: 701148046H1
ggggttggcattttgggcatcgcttgggcctttggtggcatgatcttcatccttgtttactgcaccgccggtatttcaggaggacacataaacccggcggtgacattcgggttgttcctaggacgcaaggtgtcgttgataagggcgttgttgtacatggtggcacagtgtgccggtgctatctgtggtactggattggccaaggggttccaaaaagcatactacaacaggtatgga

SEQ ID NO: 8089 - DNA, 246 bp, Glycine max
  unsure (1)..(246): unsure at all n locations; Clone ID: 701148047H1
gtctgtgtgataggaaagaacacttggtgagaaatcatttgttaggatccctgaaactggttctgacttttgagggataaagataagaaaaacaaagaaaggaatggaaaaagaatgtttcggcagcatttgtaaaattatagataaataacgtaaggngaagattctccttccaaaggtttccccatgccatcctaggaaacacgcagagtgaaaaccggtagcagaaaactggtttgaacaatt

SEQ ID NO: 8090 - DNA, 244 bp, Glycine max
  Clone ID: 701148048H1
ccgtatgcatacattcacattctctccctttttgattcgcgttatcaagtaaattattttggtatcatcaaaatttgcatgattcacaaaatcaaacaatgaataaccaaaagccaaatttacttggtaataagcaatatgtacgaggctaattccttcatcttagcacctccattattttaaatcatcaacatgtcccttaaaatatctctttaatttttcggttcttagtgacatcaatata

SEQ ID NO: 8091 - DNA, 238 bp, Glycine max
  Clone ID: 701148049H1
gagggaaggaggagaagacaaattaaccaccaacaacagcagaagaaaataaaggagcaaactaaaatggcagcaaataaatacgttgcattgttgttggtggtgttccttatcgctggaagtgctaatgccagaccaaaagaagtcagctgcgcaagtatttgcatcgacaaagaatgcaaaagtgactttaacagttggtgtgcaatattcaattgtggtctcaaatgtgcactca

SEQ ID NO: 8092 - DNA, 227 bp, Glycine max
  Clone ID: 701148050H1
agctttggctgctttgaacactcaccttgcttccaatacttacctggttgggcattctgtgaccctggctgacatcataatgacatgcaatttatatttgggttttgcaaacatcctggttaagtgctttacctctgagtttcctcatgttgagagatacttttggaccttggtcaatcagccaaacttccgaaaaataattgggcaggtcaagcaggctgaaacta

SEQ ID NO: 8093 - DNA, 234 bp, Glycine max
  Clone ID: 701148051H1
ggcatcaattcaaaatatatcatcaattataagcatgggtttgtggaacacaacgaatgcagtgtcttgccgctttcacaagtttggtgatgaccaaaagaatctggtcttccaaggtgatgccacgtcttcttccaggggcatagaactcacaaagttagacggtggaggaaaaccagtgggtggcagtgtggggagagtgttatactcttctccagtgcacctttgggaaag

SEQ ID NO: 8094 - DNA, 235 bp, Glycine max
  Clone ID: 701148052H1
gggagctgggtttgttttcggcctttgatcttcgattctctctactttttctctcgcgaaaaccgtatcagcaatgtctggagaatcagccagcgctattcacaagggtcaagtcgatctcttagacttcattgactggtctggggttgaatgcctcaatcaaagctccacccactctctccccaatgctatcaaacagggttatagagaagacgatggtttgcatctggagagt

SEQ ID NO: 8095 - DNA, 244 bp, Glycine max
  unsure (1)..(244): unsure at all n locations; Clone ID: 701148053H1
aacaaggactgtcctgccaatgaaaatgaagaaaaggagcctgaggacaaggagatgacactggaagagtatgagaaggtgctggaagagaaaagaaaggccctgcaggcacaaaaaactgaagtaagaaaggtggacatcaaggagtttgcatccatgcagccactgtctaacaagaaagaaaatgatgagatctttattaaattgggatctgacaaggataaacgcaaagatgctntagaga

SEQ ID NO: 8096 - DNA, 235 bp, Glycine max
  unsure (1)..(235): unsure at all n locations; Clone ID: 701148054H1
ggcacaagtgagtttgttgatcgagataactagaaacagtgtgatgaaaatgaaggtccttgttttcttcgttgctacaattttggtagcatggcaatgccatgcgtacgatatgttccctctccgaatgaacactggctatggtgcccgtacnccggaggtgaaatgcgcaagttggaggcttgctgtggaagcacacaacatctttggctttgagaccattcctgaagagtgc

SEQ ID NO: 8097 - DNA, 236 bp, Glycine max
  Clone ID: 701148055H1
gactgcgaaccagtagggactcccattccgactcttagccgccgatctctcagggcttgcatcttctcaggtaagctgtgaagatgtacacatcaaggaagaaaatccacaaggataaggatgctgaaccaactgaatttgaagagtcagttggacaggcattgtttgatctggaaaataccaatcaggagcttaaaagtgatctgaaggatttatacataaactcagccgtgcaa

SEQ ID NO: 8098 - DNA, 236 bp, Glycine max
  Clone ID: 701148058H1
ggggtctagttagagtgaatccatgaccgtgaccatggcggctgcgtttacaagtacaagtgcaacactgagactgtcaaatgttggagagagcagaggtttgcagctgcgtaagtgtaaccctaatcctaataagctgaaggttatgggggggtttggaggttgttctggagtggcagtgggtgtgagagaaagaaaaggaattggaagggttagggttcgggttcgggcgagtt

SEQ ID NO: 8099 - DNA, 236 bp, Glycine max
  Clone ID: 701148059H1
acttcacctcatcagctagaatgctctctttttttgcacaccaaatcaaggtgcacgcgcttcttcattcattggtgatgatatcaaaatcacaggaattgcatcaccaccgagatcctcagtcctttctttgcttcttcagcccaaatctctctttgagagcatcttcatggaggacagcggcaacctcatgaagctgaatgggattttcatcaactcgtttgaagaactagaag

SEQ ID NO: 8100 - DNA, 227 bp, Glycine max
  Clone ID: 701148060H1
ggagagaaagagtgaggagagaattacagagcattttccaacacgattacacgaccgaatcaaaccctctctttctctccgaagctgcgtttaatatcttactcgccttagattgttcttctctttcattatactgttctcttttcgatttgagggaacagtacaagagtgtgaggatcggttaacccaactgcacaggtagtcataaaataatggagtctcagatg

SEQ ID NO: 8101 - DNA, 238 bp, Glycine max
  unsure (1)..(238): unsure at all n locations; Clone ID: 701148062H1
ggaagtgaaagagagattctgcgtgcaggaagagcgaangngttgagtgtggcaatggcggaggagcaaggtgaattcaggatttacaattccatgactcagcagaaagagatcttcaaaaccaaagtccccggcaaggtttccatgtacgtttgcggagtcactgcctacgacttcagccatctcggtcacgctcgcgctgcggtttctttcgatatcctcttcaggtaccttaagc

SEQ ID NO: 8102 - DNA, 239 bp, Glycine max
  Clone ID: 701148063H1
gggtgtggaacgtgacaatggtggcgacgaacgtgaaggcagaaaccatgtctctgatggacaagcgcaggcacttggaggctgagatgaactccatcatcgcccgcctctcccagccaggcgctcctggcctctccggaaatctcgtcgattccgaggattttccccattccgatatcgacgtccccgttgttcgagccgaacgacgtcgcctggcagagctgcgcaggaaccacaac

SEQ ID NO: 8103 - DNA, 240 bp, Glycine max
  Clone ID: 701148064H1
gaacacgcggcttccgccggaggtgaaccgcgtgctgtacgttcggaaccttcccttcaacatcaccagcgaggagatgtacgacatctttggcaaatacggcgccattcgccagatccgcatcggcaccaacaaggacactcgcggaaccgctttcgtcgtctacgaggacatctacgacgccaaaaccgccgtcgaccacctctccggcttcaacgtcgccaaccgctacctcatcgt

SEQ ID NO: 8104 - DNA, 237 bp, Glycine max
  Clone ID: 701148065H1
gacacaatacaagttaaagggatgatggagaaaggaagtgtggttgaagctgcagtaactagatctcccatgcagatgaagatgggggatcatgaattagaaggcaacactaccagtgccctacgcactgccgagacgtttctgcgtttgttccctgttggtctatgtgtttcagcacttgttctcatgcttaagagctctcagcagaatgaatatggatctgttgattacagcgat

SEQ ID NO: 8105 - DNA, 207 bp, Glycine max
  unsure (1)..(207): unsure at all n locations; Clone ID: 701148066H1
ggaagcagaaccatcgctcaagctcacactcacagtaaaatccaaaccaaaatggcggaaaataaagccattgaagaggctcagagcaagttccgttcagagttccttcaagttctgcgtagtaggcgacccgctcaagttccattaacagtcgaattngcgaancagtggtgaatcctttgcatcagaactctcctccatcgatcg

SEQ ID NO: 8106 - DNA, 233 bp, Glycine max
  Clone ID: 701148068H1
ggcacaggtgagtttgttgatcgagataactagaaacagtgtgatgaaaatgaaggtccttgttttcttcgttgctacaattttggtagcatggcaatgccgtgcgtacgatatgttccctctccgaatgaacactggctatggtgcccgtactccggaggtgaaatgcgcaagttgggggcttgctgtggaagcacacaacatctttggctttgagaccattcctgaagagt

SEQ ID NO: 8107 - DNA, 225 bp, Glycine max
  unsure (1)..(225): unsure at all n locations; Clone ID: 701148070H1
ggaaatgantgcccatcagtgctcagcattctctgctagtccttacatacagagaaaacatggaccatgcgtactacctttccagaatatgttgctgcacttgctacaattgttggatctgtgcttttcgctatatttggacntntnngtattgcctgtcttccattaggacttatattttcatttattcggcgtccaaaggctgttatcactcgctcacagtat

SEQ ID NO: 8108 - DNA, 232 bp, Glycine max
  unsure (1)..(232): unsure at all n locations; Clone ID: 701148072H1
ggaggatcgcgtgagcactcctcttacagatccgcacaagcattgcatatcaaatcaagcatcctgttccttatctctgtctctgcatttcccttcctnnnnnnnnnnnnnnnnnnnnnaaaaccctaattctatacatggaagggaaatctcaaatctaatgactaattaattaatccatcgatcaagcatggagtccgaactcaaagacctcaattcgaagccgccgaac

SEQ ID NO: 8109 - DNA, 237 bp, Glycine max
  unsure (1)..(237): unsure at all n locations; Clone ID: 701148073H1
ggggtgtgagagcgagaatcagaagatgaagaaggnagacacagtgaagctgatcagtgccgaaggttttgaatttgtggtcgacaaagaagctgcaatggtttcacagaccatacataacatgcttacttctccagggagtttcgctgagaggcagcacggcgaagttacctttcctgagatcagcaccaccattctcgagaagatttgccagtactcttattggcatctccaatt

SEQ ID NO: 8110 - DNA, 236 bp, Glycine max
  Clone ID: 701148074H1
ttccccgatgattccagcagctgtctgtcaaatggaaaaaagaagggaaaatggagtaaatcaataacaacattgattcaatcctagtacaaattataccaaaaataatgccttccaacatgatacccaaatatttcattttagttacaagttacaaattacaactaacaaaagcgaatgattttcaatagtaaaaaaacagaaacaagatttagcaccaaataagcagagaacgc

SEQ ID NO: 8111 - DNA, 222 bp, Glycine max
  Clone ID: 701148075H1
gaaaaaaaaaagagaaaaggatctgcaacgcattttgtatctgaaagaaaaagagggttctcatttcgcaaccatcggccgcacttactcttgttctcaagggattcgattttctctgcactcacttctagggtttcctccgcgctatcagcaatcatggccgacgaaacaccaaatgagatgaaggaggaggttccagaaattgttccttttgatcctacc

SEQ ID NO: 8112 - DNA, 234 bp, Glycine max
  unsure (1)..(234): unsure at all n locations; Clone ID: 701148076H1
gagtgcaaganaaaatgaccaagatcttctttgtattgctgttatgtctgatcatagcagcttcttctgggtttgtgaattgctttgatgttgaaaagaaggaaaagattggagtatttgagctcaataaaggtgacctttctttgaaggtcaccaactggggtgcttcaattttgtccctggtgattcctgataagaatggaaagttgagtgatgttgttcttggatatgatt

SEQ ID NO: 8113 - DNA, 239 bp, Glycine max
  Clone ID: 701148077H1
gataagaaagaagatcaaaagaaaaaagagaaacaaatggcagcactgggtggctttaccgacatcaccggagcacagaacagcatcgatatcgaaaatctcgctcgctttgctgttgatgaacacaacaaaaaagagaatgcagttctggagtttgtgagggtgattagtgcaaagaaacaagtggtttctggcaccttgtactatatcactttggaggcaaatgatggtgtgacgaa

SEQ ID NO: 8114 - DNA, 250 bp, Glycine max
  Clone ID: 701148078H1
gacagacaaacaaacaatttaccagctatacttgttccttttgaaggttagaagtgctacaatacaaacaatggcagctactcaggaagatgtgaagcttttgggtattgtgggaagcccatttgtgtgcagggtccagattgcccttaagttgaagggagttgaatacaaatttttggaagaaaatttgggcaacaagagtgatttgcttctcaaatacaaccctgttcacaagaaggttccagtgttt

SEQ ID NO: 8115 - DNA, 252 bp, Glycine max
  Clone ID: 701148079H1
ggcgtacgcagcttcatccctaacgcgtgcatagcagagtcagagacagagacgcagccatggggcggagacctgcgaggtgttataggcaaattaagaacaagccataccccaagtcacgtttctgtcgtggtgttcctgatcccaagatcaggatttatgatgttggtatgaagaagaagggtgttgatgagtttcctttctgtgtccatctggttagttgggagaaggaaaatgtttcaagtgaggccc

SEQ ID NO: 8116 - DNA, 239 bp, Glycine max
  Clone ID: 701148080H1
ggtggcgctcgatggcacagaagatgggaaactgtatttgctaacagttttgagaggactgacaatgaaatcctatcagacgcagttgcgcctgaaatggtaggatctactgcctctgtggtgattctatctggttgccaaattattacatccaactgcggcgactcaagggtagttctttaccgcaggacacaaactatccccttgacagtggatcagaagccggatagacaagatga

SEQ ID NO: 8117 - DNA, 238 bp, Glycine max
  Clone ID: 701148081H1
ggtgcaattgaaagagagatttgatagcctcaactcaagtaagggttttctctttgagaaaatcgtatcttacaccttttggtgaccactttgagtgagagaagagaaattaagagagatactcaaattagattcaagagagatggccatcaaccatgaaacttgggctttcattttcggtcttctaggcaacgtgatctcctttatggtgttcctcgctccattaccaactttttac

SEQ ID NO: 8118 - DNA, 236 bp, Glycine max
  Clone ID: 701148082H1
gattcaaacattggggcgaatccgacacaggcacattgttaggttgttgggcttctgttcaaatcatgagacaaaccttttggtctatgagtacatgcccaatggaagtttaggcgaggttcttcatggaaagaaagggggtcatttgcattgggatacaaggtataaaattgcggtggaggctgccaaggggctttgctatctgcaccatgattgttcgccactcattgtccatc

SEQ ID NO: 8119 - DNA, 243 bp, Glycine max
  Clone ID: 701148083H1
gacaaaaccaaattataatatttcatgcttctctttcactcttgtcacattccacaaaaacgaagtacgactacaagggaagaaaaacttagctactaaggaaggatcaaagagaatggctcaagcaatggcatcaatggctggcttgcgtggttcctctcaggctgtgttggaaggtagccttcaggtgagtggctccacacgcttgaatgtggggagtggaagcagggtggcctcagtcac

SEQ ID NO: 8120 - DNA, 204 bp, Glycine max
  unsure (1)..(204): unsure at all n locations; Clone ID: 701148084H1
ggcatcanannnaaaanctatcatcaattataagcatgggtttntggaacacaacgaatgcagtgtcttnccgctttcacaagtttggtgatgaccaaaagaatctggtcttccaaggtgatgccacgtcttcttccaggggcatagaactcacaaagttagcacggtggaggaaaaccagtgggtggcagtgtggggagagtg

SEQ ID NO: 8121 - DNA, 231 bp, Glycine max
  unsure (1)..(231): unsure at all n locations; Clone ID: 701148085H1
ggctacagagccagaaaaggttaacgatgatgtccaagtcctggctccagtgaaggaaaaggtccaaaaggagagtggcatcaggtccaggggccgagcaagaggcccggactcgattccaaaagctattattaagcggaagaagtctaannattacctgatatgggctgcagctgcggctttgctagtcctcctgttggcagtgcttggatacatctatcttttctgaaa

SEQ ID NO: 8122 - DNA, 231 bp, Glycine max
  Clone ID: 701148086H1
ggcacaagtttgttgagatagctagaagcaataagatgaaaatgaaagtgcttgttttgtttgttgctacagttttggtagcatatgaatgccatggctcagactaccagaagttccctctccaaatgaaaactgggtttggtgggcaatacagcaatgaggtggcatgtgccagttggaggcttggcgtggaagcaaacaacgtagtcaagtggtaaactgttcctgcag

SEQ ID NO: 8123 - DNA, 227 bp, Glycine max
  Clone ID: 701148087H1
ggaggaacataagggtgttgtttatatcgtgcttgagagttgatatttgagtggtctttcaatggggcatttgggtcagaatattttgaattatgaacttgaaaatggagtcaatatgtgttgtgatgaagactgttctaagaatgagatcaatacaactcttattcagtatgctgtgaaagacctattgacgggtcttggggaagacatcaacagggaaggcatta

SEQ ID NO: 8124 - DNA, 244 bp, Glycine max
  unsure (1)..(244): unsure at all n locations; Clone ID: 701148089H1
gcatcagcccatcaactagccaaaaaggagtttgtgtaagggaagaagatggtgtcaggttctggaatctgcgccaaagcgagtggtggtggacgctcgccaccacatgttgggtcggctagcgtccatcgttggcgaaagaaccttcctgaatggncnncaaggttgccggtggtgcnctgcgaaagangatttgcatcnncgggcggtcnggtganggcagaagatgaaatanntganattc

SEQ ID NO: 8125 - DNA, 236 bp, Glycine max
  Clone ID: 701148090H1
gcctccgaaaaccctaacaacacaggcgcagacgcaaacgcaaacgcaaacgcaaacgcaaacgcagagcgtgatccattgacgaagatggtgcagcgtctcacctaccgcaagcggcacagctatgccaccaagtccaaccaacacagggtcgtcaaaacccctggtgggaagctcgtttatcagactaccaagaagagggccagcggacccaagtgccccgtcactggcaagag

SEQ ID NO: 8126 - DNA, 234 bp, Glycine max
  Clone ID: 701148091H1
caacccatatcccatataaaagctggctctattctgaatcatggttggtgcagttcaagtatacactatacaaaataaaatggctggctaagtttttcaactttaaaaagtggaaaggataatgacaaaaaagccacaaggtaagcaaatcatgttaaaatagagatcgcatgcattcaaagcacataacctacaacaaccagggcataacatataattccagaagaaagtaac

SEQ ID NO: 8127 - DNA, 214 bp, Glycine max
  unsure (1)..(214): unsure at all n locations; Clone ID: 701148092H1
gggtgtggcactcaaacattgtttgntgtaggaagaggaatcttgagaaatggcaggggacagcaagagcaagattctgttcatcggagggactggttacatcggaaaattcatcgtggaagccagcgccaaagctggccacccaactttccttttggtgagggagtccactctctccaaccccgcaaaatcacccctcatcgacaatttcaaa

SEQ ID NO: 8128 - DNA, 249 bp, Glycine max
  Clone ID: 701148093H1
agaaggaggagacggcgacgcaattagaagaaaccgcgaaggaacgcgacgcgctgcgatacggagattgggaattcgagccacatgatggtcaccggcatggagaagatctcggcgaaggtgagcagcttctccggcaacgcgctgccgctgccgcgttcgcagaaatacaccggcatggcggcggtggcgtacggcgtaatcaagcgcgcgaatgagatcgtggaggagcttttgaagcagaacgag

SEQ ID NO: 8129 - DNA, 246 bp, Glycine max
  Clone ID: 701148094H1
ctattataaaagaaaaaaaaacatcaaacctagtactattaaataggatgttccatttattatataagttgttcatatgaattaaataaggccattcattttcatatgcaactagaagggagaaaaaacgaaattgacatggcttgtcacacacatgttgaaatcaaatgagaatcgttgttctactcccacaaagatggaaggaaagtaatttcaggtaattctcatgctgggttgaaatccatt

SEQ ID NO: 8130 - DNA, 244 bp, Glycine max
  Clone ID: 701148095H1
ggagttcaacgagatggagcaaataaagcacagaacagttgaagtgaatggcataaaaatgcatgttgcagagaaaggagagggtccagtggtgttgttcctccacggcttccctgagctctggtactcatggcgccatcagattctctctctcagctccctcggctaccgcgccgtcgctcccgatctccgtggctacggtgacaccgaagcaccaccttcaatcagcagctacaactgcttc

SEQ ID NO: 8131 - DNA, 236 bp, Glycine max
  Clone ID: 701148096H1
ggaagtgtgaagcactgagcagttgaggaaatgggaacccttgggagagcgatctacagcgttggtaactggattcgagaaactggacaggccattgatcgtctcggttcccgtcttcagggcggttactacttccaagagcagctctctaggcatcgaactctgatgaacatatttgataaggctcctgttgttgataaggatgtatttgttgcgccaagcgcctccgtcattgg

SEQ ID NO: 8132 - DNA, 270 bp, Glycine max
  Clone ID: 701148101H1
ggggcgttgacttctccgacaattccacttctcgcgatattcccgatcctcccggtttctgtcgcacttctctcgatcaggacgattcaacgctcagtcgccagaagaaggacgctgaatccaactggaaagcccagaaagcttgggaggtagcacaagcccctatgaagaatttgctaatgatggggttctgatgtggatggctggtagcacagtccacttgttcagcatgggatcactttctcagccctttggcaacccatcagtgcc

SEQ ID NO: 8133 - DNA, 268 bp, Glycine max
  unsure (1)..(268): unsure at all n locations; Clone ID: 701148102H1
tcccanatacaataaaggaagatggcaaaatgtttgatgaagagacacctaacaatagagctgacccagtcttaatttgtttccatgctcattttctttgtttttgttaaaaaattgtgccacatacctaacagatgagccattgaataatatatgggaaaaaccatattgcatttgaccagttattcagaaaaaagagagatttaaaacaaagatagattatagaaaaaagaaatgtatatataagtaaatggtccataagaaagta

SEQ ID NO: 8134 - DNA, 264 bp, Glycine max
  Clone ID: 701148103H1
ggaagaaggttggttgattggtcccattgattccgaagagaaaagaaaagatgtttgagccacaacagctatacactcacgcgaagaccgaggaattcgacctcgaatcaggagaaaccctctacccagggctgagcgtcggcgagaaccagctccgatggggtttcatccgcaaggtctacggcattctccgcgcagatcgtcctcaccaccctcgtctccgtcaccaccgttttctatactccaatcaatgacctcctcaag

SEQ ID NO: 8135 - DNA, 260 bp, Glycine max
  Clone ID: 701148104H1
gattcttagaaaccctaatttcgtcgttgtttcaatactctcttccttggaaaaatcaaaaggtgctcgcaggtgcagcgtttagttcaaagattgtaagcgatcttacatcgtgaatcattgataaagtaacatttatttgtgaaacgtcactggttcgtgtctgaattgaagaagtgtcatccatgagattgagaaagggaaataaagtggagatccgtggcaatgctgatgggctactgtggaatggcgttgtgctc

SEQ ID NO: 8136 - DNA, 260 bp, Glycine max
  unsure (1)..(260): unsure at all n locations; Clone ID: 701148105H1
ggaagcagaagggttcctcactctcttcatctgattgaacaaaatgtacacctcgaggaagaaaattcacaaggataaggatgccgagcccactgaatttgaggagacagttggacagtacttgttcgacttggaggacaccaatcaggatctgaaaagtgacttgaaagatctctacataaacaagctattcaaatggatgtggctggtantcgcaaggctgtagtcatctatgtgcctttcagattgaggaaggcatt

SEQ ID NO: 8137 - DNA, 260 bp, Glycine max
  Clone ID: 701148106H1
ccttatctgaagcccttctacttcactagctgcatctgaatgggaagtgaggccaaaaaccttctctggttgaggacatggtgggtaatagttcatcctcatagtctgcatacgatctttaaaaactctatcatttctgtttcttccatctttagagcttttcccattttttcaacaacaaccaggctagatttttaagttcctgtgtgtagagttctaaggtgttcctgagttacaaagagaagtgactctagcatggc

SEQ ID NO: 8138 - DNA, 259 bp, Glycine max
  unsure (1)..(259): unsure at all n locations; Clone ID: 701148107H1
gacagcagagcaaaanaaagaaagaaactgcaacttcctctgttttgcccccctgtttaggccttttcataagcttagaatgacacacaaggaattttccattgctctagtgactctcattgctgttctctttgtcaacatgaacatccaaggtgccactgctgactatggtagttggcagagtctcatgccantttttntggcgggggtgatgcttctggcacaatgggtggagcatgtgggtatggaaatttgtata

SEQ ID NO: 8139 - DNA, 260 bp, Glycine max
  Clone ID: 701148109H1
ggagctgaaaccgagaagaagaagatggagatgtatcagatctggagcaggagaatagcgttgggagcgttcgcgtttgttctgcttttcctatcggcctcagcagacgacgtcgttgtgctctctgaagataacttcgagaaggaagttggtcaggacagaggagctctcgttgagttctatgctctggtgtggacactgcaaaaagctgctccagaatatgaaaagctggtagcagcttcaagaaagccaaatctgtt

SEQ ID NO: 8140 - DNA, 238 bp, Glycine max
  unsure (1)..(238): unsure at all n locations; Clone ID: 701148110H1
ggaagcacaactgcntgtggacttatcgtcaaggcaaactaagttcttcagtcttgacttgagtgctttgagttcatggatccaatccaacacaagttcgtcaacgttggtgctctcaagctccacgtcgcagaaaccggaaccggtccaaacgccgtcgtatttgcacggcttcccggagatatggtactcgtggcggcaccagatgatagctctcgccggtgccggattcanagng

SEQ ID NO: 8141 - DNA, 50 bp, Glycine max
  unsure (1)..(50): unsure at all n locations; Clone ID: 701148111H1
tacgtcngcgagaagacgacagcaggtgagatnngngctnntaggctacc

SEQ ID NO: 8142 - DNA, 241 bp, Glycine max
  unsure (1)..(241): unsure at all n locations; Clone ID: 701148112H1
gggcacaagtgagtnntgttgatcgagataactagacaacagtgtgatgaaaatgaaggtccttgttttcttcgttgctacaattttggtagcatggcaatgccatgcgtacgatatgttccctctccgaatgaacactggctatggtgcccgtactccggaggtgaatgcgcaagttggaggcttgctgtggaagcacacaacatctttggctttgagaccattcctgaagagtgcgttg

SEQ ID NO: 8143 - DNA, 260 bp, Glycine max
  unsure (1)..(260): unsure at all n locations; Clone ID: 701148113H1
gagangaagagantgcggtnaaagagcctttggntctcattaggctcagcctcgacgagcgtatctatgtcaaactccgttccgacanagagcttcgtggnaaacttcacgcttatgatcagcatcttaatatgattcttggcgatgttgaagaaatcattactacagtggaaatcgatgatgagcatacgangngattgtgaggactacaaagcggacagttcctttcctgtttgtcaggggagatggggtgatattgg

SEQ ID NO: 8144 - DNA, 265 bp, Glycine max
  unsure (1)..(265): unsure at all n locations; Clone ID: 701148114H1
ggtctcgtggaagtgtaagcaagcaaaaccctagcggcgcctgctttctttgttcgtgttttgcatcaggatggagtctcaggtgaagcacgcacttgttgtcaaagttatgggtcgtactggatccagaggacaagtgacccaggttagagtgaagnttacgatgatcagaaccgtcacatcatgaggagtgaaaggacctgtgagagaaggagacattctcaccctactcgagtctgaaagggaagcaagaagattgcgctag

SEQ ID NO: 8145 - DNA, 261 bp, Glycine max
  unsure (1)..(261): unsure at all n locations; Clone ID: 701148115H1
gagaggaagagagtgcggtgaaggagcctttggatctcattaggctcagcctcgacgagcgtatctatgtcaaactccgttccgacagagagcttcgnggcaaacttcacgcttatgatcagcatcttaatatgattcttggcgatgttgaagaaatcattactacagtggaaatcgatgatgagaatacgaagaaattgtgaggactacaaagcggacagttccttcctgtttgtcagggagatggggtgatattggttt

SEQ ID NO: 8146 - DNA, 263 bp, Glycine max
  unsure (1)..(263): unsure at all n locations; Clone ID: 701148116H1
ggatgagggtgtgaattctaaaaggaaagaacagttgagctggtcagaaaatcaatggcatcatccttgggttttgagttcctgacgaagaagccttacagtcctccatcctgggcatcccatctccacnctttacttcccattctcttctcttgcgcatcttcccantccaattcacagatggaacttccaatctgcccaccaataccgagntgtggatcaagcgagagaactttcggnatgcagtgantggtaacaaatga

SEQ ID NO: 8147 - DNA, 275 bp, Glycine max
  unsure (1)..(275): unsure at all n locations; Clone ID: 701148118H1
gggttcgaggaagagggctaagagaaagggtagaggaatatccgcagggcaaggggcaagttgtggttttggatgagaggtcagaaatctcgntctggacntggcgttaggaagggtttcgaaggtggccagatgccgctttatcgccgaatccccaaactcagaggaattgcaggaggtatgcatgcgggattgcccatatgtccatgtaaatctgagagacatagaanntgctaaatttaaggaaggggaagangtgtctctagagtcactga

SEQ ID NO: 8148 - DNA, 229 bp, Glycine max
  unsure (1)..(229): unsure at all n locations; Clone ID: 701148119H1
gatcnctgaagaagagggtgaagaanttcaagaggcctcagagtgacaggaaaatttctgtcaagacaaactggcgcagaccaaagggtatcgattcccgtgttaggagaaagttcaagggatgcactttgatgccaaacattggttntggttcancaagaagacccgccatatctccctaatggttttaagaanttgttgntcacaatgtgaaggnctggnactgctc

SEQ ID NO: 8149 - DNA, 260 bp, Glycine max
  Clone ID: 701148120H1
ggcagtgaatacaagccaaaagaacaacatggacattgatctttctcctcagttgcccaagaaagtttacggtgccaatggtggctcctactacgcatggtccccctccgaccttcccatgctccaccaaggcaacattggtgccgctaagcttgctctcaacaaaaacgcctttgctcttcccgttactctgactcttccaaagtcgcttatgttcttcaaggtagtggagtggctggaatagtgttgcctgaatcaga

SEQ ID NO: 8150 - DNA, 238 bp, Glycine max
  unsure (1)..(238): unsure at all n locations; Clone ID: 701148121H1
ggatgatcattacacntatnanactcaatttngttttaacaataatattactagtttcattgntagttgcattgagagtntcaatttaggcgatattgacaaatacaatgatatttanttttatagttacatttttttgaagggcagaaattgtagtganangataattctagtactagtataataaccagtacgnatgntanaaatgntagtgattccactataggagaaagttctt

SEQ ID NO: 8151 - DNA, 258 bp, Glycine max
  Clone ID: 701148122H1
gagagaagaacgtaatcataatccaaattccaattccaaaacgagccaccaacaacaacccaactggtgtcgctctgtcagttcactttcctcgtgtttggttcgtactatgaagaggactatgccatggagtgatgacgatgagtcatcgtcttcacattcagattctgaatgtgatagtgaatggagggggaaattccaaaggtaaatctagaaagcagacaactaagaaaagtggtctaattgactttgaagctc

SEQ ID NO: 8152 - DNA, 255 bp, Glycine max
  unsure (1)..(255): unsure at all n locations; Clone ID: 701148123H1
ggcacaagtgagtttgttgatcgagataactagaaacagtgtgatgaaaatgaaggtccttgttttcttcgttgctacaattttggtagcatggcaatgccatgcgtacgatatgttccctctccgaatgaacactggctatggtgcccgtactccggaggtgaaatgcgcaagttggaggtgctgtggaagcacacaacatctttggctttgagaccattcctgaagagtgcgtngaagcaacaaaggaataca

SEQ ID NO: 8153 - DNA, 251 bp, Glycine max
  unsure (1)..(251): unsure at all n locations; Clone ID: 701148124H1
aaaganacccgacnaagggtgggaaccgantttggaaatccattgggcntggatttaagactcccagggaagccatcgaaggaacctacattgacaagaagtgccccttcactggcaatgtttccatccgtggccgtatcttggctgtaacatgtcacagtgctaagatgaacaggtattattgttaggaggaattatctccattttatcaagaagtaccagaggtacgagaaaaggcactccaacattcc

SEQ ID NO: 8154 - DNA, 256 bp, Glycine max
  unsure (1)..(256): unsure at all n locations; Clone ID: 701148125H1
ggcaatgagtatcttgtgattccggaacagctctgtttgctcttcacttttaccttcatgaacgcgtacagtcattgtcaaaggtctccttgtcgtacgacgatgctacaaaatcattttgttttccaatatctgtttttttcttgcattatttattttggatcttaggagtagtaagtaaaacagcacctcaggttttttattttggcagatatacntgttttttgttacacaaatatttgtatctttgcttgaa

SEQ ID NO: 8155 - DNA, 255 bp, Glycine max
  Clone ID: 701148127H1
gggttgaagctgcagtaactagatctcccatgcagatgaagatgggggatcatgaattagaaggcaacactaccagtgccctacgcactgccgagacgtttctgcgtttgttccctgttggtctatgtgtttcagcacttgttctcatgcttaagagctctcagcagaatgaatatggatcgttgattacagcgatcttggagctttcaggtacttggtgcatgcaaatggcatttgtgccggctactctctatt

SEQ ID NO: 8156 - DNA, 268 bp, Glycine max
  unsure (1)..(268): unsure at all n locations; Clone ID: 701148128H1
ggtttctgtgtttctcatgccatccgggatgcttggaactctgctttctctgattgatgttttgcctttgttctcgaacactggttggggtcagaaagccaacctggattttctgaagaaacacatgggagctacatttgagaagcgcaccagccttggcgtgcatatatagatcctgcagatgttcattcagagacttcttagctgtgtcgaagatccggtgtncgctntgntgngcntnanctctttncgacgttgtcantgttaa

SEQ ID NO: 8157 - DNA, 258 bp, Glycine max
  Clone ID: 701148129H1
gggaagttttggaagaaaggaaaagattggtataggttggatggaaggacagagagttctgagaggcagaagcttgttgagagatttaatgagcctttgaataagagggtaaagtgcactctgatttcaaccagagcaggctctttgggtattaatcttcatgcagctaatcgtgttgttatgttgatggttcttggaatccaacgtatgatctccaggccatctatcgatcatggaggtatgggcagaaaaagcctg

SEQ ID NO: 8158 - DNA, 267 bp, Glycine max
  unsure (1)..(267): unsure at all n locations; Clone ID: 701148130H1
agcatcaattaattaaactcttttcaaaattcttgagattgttatcattcgattttgccaaatattttttttttatatagatcacaagaaacaaacttactaaaatatggtagaactactggattttgtcggatatgttgatggcttaatttagtaccttgaaaatttatttatttaatatattttactttaacgttataattcatataaagtattaacatattntaccanaatnagtattaacatacaaaattagattgatggtaa

SEQ ID NO: 8159 - DNA, 250 bp, Glycine max
  unsure (1)..(250): unsure at all n locations; Clone ID: 701148132H1
ggcacaagtgagtttgttgatcgagataactagaaacagtgtgatgaaaatgaaggtccttgttttcttcgttgctacaattttggtagcatggcaatgccatgcgtacgatatgttncctctccgaatgaacatggnatggtgccccgtactccggagtgaatgccgccaattggggtttcntgtggaanncacaccatctttggctttagaccattctgaagagttcgttgaaccacnaaaggattct

SEQ ID NO: 8160 - DNA, 272 bp, Glycine max
  unsure (1)..(272): unsure at all n locations; Clone ID: 701148133H1
atattacactaattctttttaatgttaaaaatattacatttatatctcttctaagagatgttgtaaacattaaataaagagtattgtgagactanaaatctcncctgtaatttacttggttataggaccaccactaacattttttctctccaatggaagcatagaataaagtaatatactgttaactaaaattatgaccgagcgagtacattgtgtatctttaagaaaacattagtcgaattatttgtttgtttaccctaattttactgaga

SEQ ID NO: 8161 - DNA, 261 bp, Glycine max
  unsure (1)..(261): unsure at all n locations; Clone ID: 701148134H1
gatcanttcaaaatatatcatcaattataagcatgggtctgnggaacacaacgnntgcagtgtcttgccgntttcacaagtttngtgatgaccaaaagaatctggtcttccaaggtgntgccacgtcttcttccaggggcatagaactcacanngttanacngtggaggaaaaccagtgggtcagtgtggggcgagtgttatactcttctccagtgcanctntgggaaagctctacagnggtcgctagctttgaaaccgac

SEQ ID NO: 8162 - DNA, 241 bp, Glycine max
  unsure (1)..(241): unsure at all n locations; Clone ID: 701148135H1
cggttttgttcttctgactaccgacctaacccaagaagagagaatagaggaagcttggggtttgaatcgaatcgaatcgaagcgattcatcgatcgatcgatggctcttntaggagttgaactgaagcatgcngcggagggcgtaccggaggcgaattgctccgnagcccaccaancagggcgagggcctccgccactactattctctcaacatccacgagcatcagctccttcttngcca

SEQ ID NO: 8163 - DNA, 260 bp, Glycine max
  unsure (1)..(260): unsure at all n locations; Clone ID: 701148136H1
ggttggtgtttaaaattaaaaccgagcctcttccccaaaggagacacagagcgagagagaatcgtaacaaaagcggtaaccggaataagttgtctctacgatttgagccatggcaacaacaacaccctcaaaccgatcatcagaggcgtttgctctcatggcaatcctcagcactctgctttcacggcggtggcggcgaagganagcgtgtacgagatactccccaagtacgnncctctcgagcggtctgttaccggaca

SEQ ID NO: 8164 - DNA, 267 bp, Glycine max
  unsure (1)..(267): unsure at all n locations; Clone ID: 701148137H1
ggggaaatcgttgggttaaatcagattggaaaaaagatgagaacctgagctggggagtggaaccacacctctggccaatggaatggagacgctaacgacaaaggtattcaaaccagtgaggattacagattctacgctatttcagctcagtaccctgaattcagcaacaaggntaagacactagtcttcnaattctgtcaagcntgancagangcttgactgcngtggtggctacatgaagttgctcagtggtgatgttgatcagnc

SEQ ID NO: 8165 - DNA, 215 bp, Glycine max
  unsure (1)..(215): unsure at all n locations; Clone ID: 701148138H1
agaaaaggggaaaacgcaaagaaaaaaagaggaagatagatcangatctcccttgcgtttgtctcagttgaagnaattcaagagcagaacgagactaactcaacggtatcagacgtttcagggtttcagcanttccattttttttttccggatttgagttggaagaagntcaaagaggttcctagttgcttggnttgtncctctgggnggtggng

SEQ ID NO: 8166 - DNA, 214 bp, Glycine max
  Clone ID: 701148139H1
gcttcccaagcctacgaggccagaaggcttgagtttgaggctatggcagaggctcaagcttacaaaactagttctgtttctgaacctttggctacaatttctgataataagagtaactgctgtaactcttctgccgctgatctccgccgctgccgtctccgccgctgatgtgtctgtatctgagaagttttctactacttttgatgacttagaa

SEQ ID NO: 8167 - DNA, 236 bp, Glycine max
  unsure (1)..(236): unsure at all n locations; Clone ID: 701148140H1
ttcagaaaattgacggtgacaactaccctgagtcactgaaccgtatgttcatcatcaatgctggttctggatttaggctcttgtggaacaccattaagtcattcctagatcccaagaccacctcaaaaatcnnntgtcctaggtaacaaataccagagcaagtgcttgaaatcattgatgccagtgaacttccagagttcttgggtggtacttgtacttgtgcagataaaggtggt

SEQ ID NO: 8168 - DNA, 248 bp, Glycine max
  unsure (1)..(248): unsure at all n locations; Clone ID: 701148141H1
agtagacgagtgattgcgttgcgantgacgacgacgaggaatcatgtcttccggcggcggcggtggtaagccgttcttctgccacgtgtgcagtcagaggattacgtgctccgatgagtcggaaccattctgcccgatgtgtatggaaagtttcgtagaagaatgcaaccctacaatcccaaccctaatctcttccccgacagtgatgaatcttcggatcccgaactccccttccaccgcttctcact

SEQ ID NO: 8169 - DNA, 262 bp, Glycine max
  Clone ID: 701148144H1
ggcataagaacaagcacaaggtctgattcgtgtttccttacatcaacttgtggtctaaaaatgggaaggatgccatgctgtgagaaggtagggttgaacaaaggaccatggaaaaccgaagaagatgagaagctcgtggcttatgttgaaaggcatggccctggaaactggcgttcagtgcctgccaagcgggtcttcaaagatgtggcaagagttgtagactgaggtggatcaactacctaaaccctaatatcaaacgagg

SEQ ID NO: 8170 - DNA, 257 bp, Glycine max
  unsure (1)..(257): unsure at all n locations; Clone ID: 701148145H1
ggggttaanaagcaanagaattcgctatcgctgggacagtttttgtttgacagcacagcactcggaaatttctggcgatctctgcgttttcccctattttttctgaatctaacaacaaacattcctctggcaacaatcaatactattnataagagttccttccttcactctcacccaagccaagaaaggaacaagaacaagaccaacaaagtaacgtnaaagagaaagagatggaggangttgttccagtggtggat

SEQ ID NO: 8171 - DNA, 246 bp, Glycine max
  unsure (1)..(246): unsure at all n locations; Clone ID: 701148147H1
tctgttgagtaggtacgcgagtnaggggctcgtggaggagcagactgaggccaangacatgctcaacattcagcgttaggttggttggttcctacgtgctaatctaatatgtgctcaatgaactacgtgcaaatggatcttgggctttactgagaaaattgntgttctttttcttgagtttggaatttagtggataattggttattacttattatgtgttgaatttgagttagtttagatgcagag

SEQ ID NO: 8172 - DNA, 266 bp, Glycine max
  unsure (1)..(266): unsure at all n locations; Clone ID: 701148148H1
ggaagatacggaggctgctgctatcgaatactcggataaggagggtaagggcggtgaagtgcagtacttcaatccccttttctctcttctccttttatttcatcactctcttcgttccttcttcttctccaaagttttcaattttcacacttttcgagtaacaacatcttttcaatggggtcccaaattcccgtgagtggtctggaatcaaaacattcgcnacntgctacccagactagttgcttgancccttgggaaaacttaaa

SEQ ID NO: 8173 - DNA, 259 bp, Glycine max
  Clone ID: 701148150H1
gaaccaaactaaagataaacaaaatttagaaacaaaaacatgttggtgaaggtgtacggtccaacctatggagcccccaagagggtgctggtgtgtctgattgagaaggaaattgagtttgaaacagtacatattgatctcctcaagggagagaataaggaacctgagttcctaaagctgcaccatttggatcacttcctgttattcaagatggtgattatactctctatgaatctcgtgcaataatcagatactttgc

SEQ ID NO: 8174 - DNA, 270 bp, Glycine max
  Clone ID: 701148151H1
ggagtgtgagagaaaccagtgactgacttttcgagaaagaaaaacaaaaatgagtttccgtcattccatcatgaacgctcttcccattctcctcttcttcctcttcgtttctgcattagtttctgcgaagaaaactggtgatgtgacggagctgcaaattggcgtgaagcataaaccagtatcatgtgaagttaggcacacaaaggtgacagagtcaaagtacactataggggaaaactcactgatggaactgttttcgattctagcttt

SEQ ID NO: 8175 - DNA, 256 bp, Glycine max
  Clone ID: 701148152H1
ggaccacaaccatgtcagcgttcatttcccacaaccttaaacccggcggcatcatggtgtccccttctctgcaccaccgttcctcattcccttcgcaactttctttgaaagcacccttctctgcttcccatcctttagtcctcacccgaagactcttccttccttcggtttccggcatctggacgctctcaccggcggcaacaacaacaatgcccgcgaagcgttctcgcaattcgacgcggaatgcttcttttcc

SEQ ID NO: 8176 - DNA, 255 bp, Glycine max
  unsure (1)..(255): unsure at all n locations; Clone ID: 701148153H1
gagagtgaganaaactagtgactgacttttcgagaaaggaaaaaaaaagagtttccggcattattccatcatgaacgctcttcccattcttctcttcttcctcttcgtttcggcattagtttatgcgaagaaaactggcgatgtgacggagttgcgaattggcgtgaagcataaaccagatcatgtgaagttctggcacacaaaggtgacagagtcgaagtacactatcggggaaaatcactgatggaactgttt

SEQ ID NO: 8177 - DNA, 254 bp, Glycine max
  Clone ID: 701148155H1
cttggaaaacattgtagaggctgcaaaaagggctgggaagaaggtcaatgttttacttcggattaatcctgatgtggatccacaggttcatccttatgttgccactgggaataagaactctaaatttggcattagaaatgagaagctgcattgctttttagatgcagtgaaggaacatctaatgagctcaaacttgtaggggcccactgccatcttggttcaacaattaccaaggttgacattttcagggatgc

SEQ ID NO: 8178 - DNA, 253 bp, Glycine max
  unsure (1)..(253): unsure at all n locations; Clone ID: 701148159H1
ggagggttgtcatcagggagccatactaagaaaaatgatggaaagtctcatattagctctcatgggcatggaattcagagaaggaatgtcatcactggatccgattcacaatatataaatcaatcgggtctgctctagttagaaagaagagggtgcatacacagttcaatgatctacagaatgttacctacaaaagcgacggcatgcagctgataggtcccatagccaacaaganagagatataagtctcata

SEQ ID NO: 8179 - DNA, 257 bp, Glycine max
  unsure (1)..(257): unsure at all n locations; Clone ID: 701148160H1
ggaaggagaaaggggaagcagaatcagcgtgatggcgagaaactgggtggttcgatccttggcgcttcgccacgcaatgaagaatagggttctcacactctccttcaaccgaattcttccctcactcccatcaaaatcctctctcttagnnnnnnnnnnnnnnnnnnnnnnnnnntctcagcctccctcctcccctccttccaccactctcgctccctctcctccgcctcagctccttccgacgttgtccttgttaa

SEQ ID NO: 8180 - DNA, 69 bp, Glycine max
  unsure (1)..(69): unsure at all n locations; Clone ID: 701148161H1
ganatngtgaaactgagagaaattcgcaanccctaattncngaaanatcngcgntggctgcctccaagg

SEQ ID NO: 8181 - DNA, 262 bp, Glycine max
  unsure (1)..(262): unsure at all n locations; Clone ID: 701148164H1
ggaggtgaagaaactacaattctcactgaaagaaagttgctaactcttggcaccagttatcagcttaacatagttgataacaccaaaggcacaacaacattgagggaatgaggctgtcatntcagctgtatgtgttattgtgctatttcttatgctgctgcgtatgatccttggatccnaatgggacatnacgatccaatggggtgttgtgtcatggacaccagatggctatnnanccggggnaaaatgggcaattcccaat

SEQ ID NO: 8182 - DNA, 260 bp, Glycine max
  unsure (1)..(260): unsure at all n locations; Clone ID: 701148165H1
gcacaagtgagtttgttgatcgagataactagaaacagtgtgatgaaaatgaaggtccttgntttcttcgttgctacaattttggtagcatncccaatgccatgcgtacgatatgttccctctccgaatgaacactggctatggtgcccgtactccggaggtgaaatgcgcaagttggaggctgctgtggaagcacacaacatctttggctaagggaccatcctgnagagtgcgttgaagcnncannngaatacatccag

SEQ ID NO: 8183 - DNA, 259 bp, Glycine max
  Clone ID: 701148166H1
cctccaaaatctggcgaaattgatcaatttttccctgcttgaagtactccctctgcacacatacatgatattagaagtccagttgagttcaattattatcaaagcaaagaaaacaaaaacagataatatgcaatctgtgcatttaaatagggaatacaatatgtctgtataaaaatacactttactcaatcataaatgagtaacagtgtgtttgggttaccattttcccaaacttaaccagcattttttttaaaaacat

SEQ ID NO: 8184 - DNA, 218 bp, Glycine max
  unsure (1)..(218): unsure at all n locations; Clone ID: 701148167H1
agggtggttttgatttggagtgcagctatgcgattgtacagagagccaagcagcagttattgtataagcttcgtagatttgagaaactggcggagttggatccagtggaacttgagaaaagaatgcaggatcaagaagagganaggatgacacatttatggaagaggaagatggtcatgatgagaaaaaccaagcatcatgcaaagaaatgactttag

SEQ ID NO: 8185 - DNA, 254 bp, Glycine max
  unsure (1)..(254): unsure at all n locations; Clone ID: 701148168H1
tatatacctnatgatatanngcncaagtttttgtcaganaacaanatggaggttggcaagtnntgggaaatannatccagtgggatatcctgagagctccaccagtagatacccctccatggantctacacgtgtctgnttgnttncaagactaannccagaggatcntattgtgatcnacgtaagccgngaatagaaagtacacnntatggtatgttcttgccanattgccttcttgttgtcagattttnata

SEQ ID NO: 8186 - DNA, 261 bp, Glycine max
  Clone ID: 701148169H1
cagaaaattcttcgtcggtggcaactggaaatgcaatgggaccactgaggaggtaaagaagattgttactactttgaatgaggctaaagtccctggagaagatgtcgtagaagttgttgtgagccctccttttgtgttccttcctgttgtaaaaagtttgctgcgccctgatttccatgtttcggcacaaactgttgggttcgcaaaggtggtgcttataccggtgaggttagtgctgaaatgctgttaatttgggaatcc

SEQ ID NO: 8187 - DNA, 254 bp, Glycine max
  Clone ID: 701148170H1
ggttggtgtttaaaattaaaaccgagcctcttccccaaaggagacacagagcgagagagaatcgtaacaaaagcggtaaccggaataagttgtctctacgatttgagccatggcaacaacaacaccctcaaaccgatcatcagaggcgtttgctctcatggcaatcctcagcactctgtttgcacggcggtggcggcgaaggagagcgtgtacgagatactccccaagtacggcctcccgagcggtctgttacc

SEQ ID NO: 8188 - DNA, 264 bp, Glycine max
  unsure (1)..(264): unsure at all n locations; Clone ID: 701148171H1
caattttggtggtagaccaaggtaggtcaattgccatggacattggtggtgaagtggaagagaccgtgagagagttgaggcaatacttcaaaactggaaaaaccaagagtgtgacatggaggaaaaaccagctcacagctctcttagaccttgttcatgagaatgangatgctatatttaaggccctcatcaagntcttgggaagcaccctgttgaggcttaccgtgatgaggttggaggggtagaaaaatccgccagcaatgc

SEQ ID NO: 8189 - DNA, 243 bp, Glycine max
  Clone ID: 701148172H1
aaaaaaagtgttttaagttcctctcacgatatgaagttaaattacgtgtaaaaattaagaaataaatacatggattaaaaacatctttttatgaagttcagagataaaattgtatgatatgaaaataaaatgaaacggtatgaattcttttttctctactttttgtataggaaatagtagtgtgtgagtatcttgaaataaggtgtaaatgtatgatttgcttaaaaaaaggtgtaaatgtat

SEQ ID NO: 8190 - DNA, 253 bp, Glycine max
  Clone ID: 701148173H1
tatctttacattagcgaagagttgcagccagcctatgaagaccgagtaagatatataagtagtggtgtgaatagttccttcttcaagacacgaaagattgcatgtggaggagaatggttgatgactgaaacctaaataattggtgattgtgagagaactaagatttggagtagaaaaccaattttttgttgaatggtgtccaagatcttcaggtctttcaggttcaaaatggaaaggttagaattagatatga

SEQ ID NO: 8191 - DNA, 250 bp, Glycine max
  unsure (1)..(250): unsure at all n locations; Clone ID: 701148174H1
ggcnccaattcaaaatatatcatcaattataagcatgggtttgtggaacacaacgaatgcagtgtcttgctgctttcacaagtttggtgatgaccaaaagaatctggtcttccaaggtgatgccacgtcttcttccaggggcatagaactcacaaagttagacggtggaggaaaacagtgggtggcagtgtggggagagtgttntactcttctccagtgcacctttgggaaagctctacagtggtcgcaa

SEQ ID NO: 8192 - DNA, 251 bp, Glycine max
  unsure (1)..(251): unsure at all n locations; Clone ID: 701148175H1
taatttgggaattattgctcccatcgccattggtttcattgtcggcgctaacattttgttgggtggggccttctctggagcggccatgaaccccgccgtgacatttgggcctgctgtcgtgagctggacctggaccaaccactggatctnctgggccgggcctctcatcggtggtgaatcgctggccttgtttacgaggttgtctttatcagccacacccacgagcagcttcccaccactggactactaga

SEQ ID NO: 8193 - DNA, 253 bp, Glycine max
  Clone ID: 701148176H1
ggtgaagtaaaagctgctaacccaaattcttgtcagtggtaaccatgacagttggttccttcttcatcaggacctccagggttctcaactcctccaactttctgcttctctgcactctcagtggtggtggtgtagtggcatactcagaatcacaatcaggagctgaacgtcctagtattaagctaatgagcctgccaaaaagaaagtggtggttcttggaacaggatgggctgctaccagtttccttaaggat

SEQ ID NO: 8194 - DNA, 231 bp, Glycine max
  unsure (1)..(231): unsure at all n locations; Clone ID: 701148177H1
ggcacaagtgagttngttgatcgagataactagaaacagtgtgatgaaaatgaaggtccttgttttcttcgttgctacaattttggtagcatggcaatgccatgcgtacgatatgttccctctccgaatgaacactggctatggtgcccgtactccgaggtgaaatgcgcaagttggaggcttgctgtggaagcacacaacatctttggctttgagaccattcctgaagag

SEQ ID NO: 8195 - DNA, 256 bp, Glycine max
  unsure (1)..(256): unsure at all n locations; Clone ID: 701148178H1
aaagatgaagccaatatgaagcaatgaattcatagagattgctaaagtgaaaaagaaaaaganaaaaaaaagttatatggaggaaaaactatcagataattggagggtccaaatgtaatgggataaaaactanatataaaaccacagttnagtatgacaatcaaattcacaggaaggatattggggattaagccagactgtgcgagcattttcggttcaataatggttgagatcccttaatttctagagataaata

SEQ ID NO: 8196 - DNA, 268 bp, Glycine max
  unsure (1)..(268): unsure at all n locations; Clone ID: 701148179H1
gagagagagaaactgagagaaattcgcaaaccctaatttcggaaagatcggcgatggctgcctccaaggatcgcgagaacttcgtctacatcgccaagctcgccgaacaggccgagcgatacgaagagatggtggaatcaatgaagaacgttgcgaatctcgacgncgaactgactgtggaggagcggaattactttctgttgggtacaagaatgtgattggtgctcggagagcatcgtggaggatcctgtcttccattgagcaaaag

SEQ ID NO: 8197 - DNA, 259 bp, Glycine max
  Clone ID: 701148180H1
ggagagggacggtagcagagattccgtgagttgcaaaaatgaaaacaattctttctgcagagaccatgaacatcccggacggcgtgagcgtcaaggttaatgccaaggtcatcgaagttgagggcccccgcggaaaattggtgcgagacttcaagcacttgaatctcgattttcagctcatcactacgaaaacggtaaaaggaagctgaagttggagcctggttcggtctcggaaacatccgcggccattcgcacggcc

SEQ ID NO: 8198 - DNA, 262 bp, Glycine max
  unsure (1)..(262): unsure at all n locations; Clone ID: 701148181H1
ggtgttgaagagggaagaagatgtcgggtatgggagacgggtacgtgggcaccgcccaagacgcggtgaggattcgacggttggagaagcagagagaagcggagctgcgcaaaatccaagagctcaaaaccaagtcgacctccgccaagggccaacccggtctcctccaattcggttccagcacttcgagattcttgagatgcctttaaganggaaatgtgggtttggtcactagagagcagtatgtagancagaggttaac

SEQ ID NO: 8199 - DNA, 253 bp, Glycine max
  unsure (1)..(253): unsure at all n locations; Clone ID: 701148182H1
ggcacaagtgagtttgttgatcgagataactagaaacagtgtgatgaaaatgaaggtccttgttttcttcgttgctacaattttggtagcatggcaatgccatgcgtacgatatgttccctctccgaatgaacactggctatggtgcccgtactccggaggtgaaatgcgcaagttgaggcttgctgtggaagcacacaacatctttggctttgagaccattcctgaagagtgcgttgaancaacaaaggaat

SEQ ID NO: 8200 - DNA, 254 bp, Glycine max
  unsure (1)..(254): unsure at all n locations; Clone ID: 701148183H1
tctcatcatcatctcacccggcaacttttcttgtcaaagttctttcagttggaatttgttgtccggacctgagcaagtttccagattcagaaatccaattgactccagccttcatgggaggcggacgggtttgtcccaaggacagtcntncgagtaccgattgacatattgaccaactctcagctgtttctgaaaccccacgtgcagtcctccccttgtttatagaagctgncanacaaacatnacctttaanc

SEQ ID NO: 8201 - DNA, 256 bp, Glycine max
  unsure (1)..(256): unsure at all n locations; Clone ID: 701148184H1
cttgctgattatcgatattttccagaaccagaccttccagcagtaatcctttctcaagaatatgttgatggtataaaaaattctttaccagagcttccagaaattaagcggagaagatatgagcagatgggcttaagcatgcaagatgttcttttcctggctaatgntaaaaatattgcaatttttttgatgcnactcttgcaaaaggtgctgacccaaagctggttgccaactggataatgagtgatattgctgc

SEQ ID NO: 8202 - DNA, 251 bp, Glycine max
  unsure (1)..(251): unsure at all n locations; Clone ID: 701148185H1
gattggaggaagaaaggtgctgtcactgatgtaaaggatcaaggccaatgcggtagttgttgggcgttttcaactattgtagctgttgaaggtattaaccaaatcaagacacataagctagttcccttgtctgagcaagaacttgtagattgtgacactacacaaaatcaaggatnaatggtgggttaatggaatctgcgttcgagtttatcaagcaatacggtataactacagcaagcaattacccttat

SEQ ID NO: 8203 - DNA, 253 bp, Glycine max
  Clone ID: 701148186H1
tcagcttgagttgtggaaggagaagagtaccggcaagtacgagaagaaagtttacgttttgcccaagcaccttgatgagaaggtggctgcacttcaccttggcaaacttggagctaagctcaccaagcttagcccggcccaggctgattacatcagtgtgcctgttgagggtccataaagcctgctcattacaggtactaagtaattgagattatcaacggaaagtgagggaaagacaaaatcggttttatga

SEQ ID NO: 8204 - DNA, 258 bp, Glycine max
  unsure (1)..(258): unsure at all n locations; Clone ID: 701148187H1
ggagagagagagangagaaaggaggaaagatgagtagttcatcaaggccggtgccgaggagagagagtccatggggagtcaccggagagaatcatcctgaacccaaagctcaccgctgcaatgaccgtgtcgaggacgttattcaggcttgcttngtatggaaacccattcaagactgttccgggatttcaagctctctggcagtgcatgnnttccaaacccggtgaggaaccaacagccccatttacttatctggat

SEQ ID NO: 8205 - DNA, 235 bp, Glycine max
  unsure (1)..(235): unsure at all n locations; Clone ID: 701148188H1
gacgtcgaatatccatcantcactcacacattggttttactctctctgactgtcaccctcatccattaacagtctccatcactctcctctccctcctaattacaatttaataaatctacctcactcattcatcccttcttcactcttccaaaaccattgatcactccaatggatcctcctctcatcagcgactccacattctcccccgcttactccctcgccgagattggcctgg

SEQ ID NO: 8206 - DNA, 268 bp, Glycine max
  unsure (1)..(268): unsure at all n locations; Clone ID: 701148189H1
ggaactcataatattcatcactagaagtgttggatgcatttctatttctaacnnnnnnnnnnnnnnnnnnnnnnnnnngagaaagaaaagaatggcaaagttaataaaattctttgagttgaacacaggggccaagattccttctgttgggttaggcacttggcaagctgagcctggtgttgtagccaaagcttcaccacagccattctggttggatacaggcatattgattgtgctcaagcgtataacaatcaagcagagattggtt

SEQ ID NO: 8207 - DNA, 224 bp, Glycine max
  unsure (1)..(224): unsure at all n locations; Clone ID: 701148190H1
aagacgacagaaggggnattctngaantatnncncccatcgccattggtttcattgtcggcgctaacattttgttgggtggggccttgtctggagcngncatnaaccccgntgtgacatttgggcctnctgtcgtnagctggacctggacnaccactggntctactgggccgggcctctcatcngtggtggaatcgtggccttgtttacgangttgtctttatc

SEQ ID NO: 8208 - DNA, 253 bp, Glycine max
  unsure (1)..(253): unsure at all n locations; Clone ID: 701148191H1
gacaagcgagtttgttgatcgagataactagaaacagtgggatgaaaatgaaggtccttgttttcttcgttgctacaattttggtagcatggcaatgccatgcgtacgatatgttccctctccgaatgaacactggctatggtgcccgtactccggaggtgaaatgcgcaagttggagnttgctgtggaagcacacaacatctttggctttgagaccattcctgaagagtgcgttgaagcaacaaaggaatac

SEQ ID NO: 8209 - DNA, 251 bp, Glycine max
  Clone ID: 701148192H1
ggcggacgtcgtagttcagaggctcccatcccatacccatgagatccttctcctcttccctctttctccttctcttcttcttctcttcttcactctccaatccccaaaatgcccctctctcactcaaaggtgttgatattgaaaggccggttttggagttctccccttccgttcttccggtatttcgggttctctaggtgttaaggacgctttacgatgcgagcgtgttcgggtttcgggcatctcgagag

SEQ ID NO: 8210 - DNA, 253 bp, Glycine max
  Clone ID: 701148193H1
acaatattccattttgatatgtaaatgtaaatgtgagtttcttagaaaatgttttcgctatagttcttaattagatattatttttccatgtgctatgcaaaaatggtttaaggaaaagttcttgtagcatctcttcgtgtgcatatcacatcatgtcaataaacacaacttccaatatctatagtggtcactcttcattttgactgttatgttatcataaccaaatattttctcttcttttatattatttact

SEQ ID NO: 8211 - DNA, 190 bp, Glycine max
  Clone ID: 701148194H1
cttccgttttcctttttctatttccctgcctagaaggaacttcattataaactaatcaattaaaattaaaacccggaaaaagtgcatcgcttgtgtgtgatgttttgaatcgtgcatgcttttggggttggaagagtgtgtgcaatgcagaaactgagattggtgctgtgagaggaaaagagaaacgatg

SEQ ID NO: 8212 - DNA, 243 bp, Glycine max
  unsure (1)..(243): unsure at all n locations; Clone ID: 701148195H1
ggtagtggttgggtttgagtgcgtgtgtgtgagaatggaagagagtggtgatgcgagggatcttcagaaaccgttcctccacacagggagttggtacaagatgggtnccaggcagtccagcatcatgggatcctccactcagganagccgcgacggcgccgttnccgtctctcngcgtctcatcgtcgcntgggtcccattcaattcggctcantgtgggtatcttctccaacccaagggtat

SEQ ID NO: 8213 - DNA, 249 bp, Glycine max
  unsure (1)..(249): unsure at all n locations; Clone ID: 701148196H1
gagagtggtggagtgtgcaaaagagcgtcgtagtcgcaaccctaattcagaagaagcgcagtttcnaagcgagttaacagccaccagcctgggtccgtatgcacagcngcggtaagggnatatcccttctgcttngncctaaaaaagggcncctccnanttggcncangatnttcgnantntcgaggaaatttctgcanttgcgaaaaaggtttgncccnttccnaaatggtncnattcnagantcccg

SEQ ID NO: 8214 - DNA, 239 bp, Glycine max
  unsure (1)..(239): unsure at all n locations; Clone ID: 701148201H1
ggcatcanttcaanntatatcatcaattataagcatgggtntgtggaacacaacgaatgcagtgtcttgccgctttcacaagtttggtgatgaccaaaagaatctggtcttccaaggtgatgccacgtcttcttccaggggcatagaactncacaaagttagacggtggaggaaaaccagtgggtggcatgtggggagagtgttatactcttctccagtgcacctttgggaaagctcta

SEQ ID NO: 8215 - DNA, 264 bp, Glycine max
  unsure (1)..(264): unsure at all n locations; Clone ID: 701148202H1
ggggtggtagatctggcggcttggtttgttctacttcctcttacactgggattagaacaaggcgtttgtgcacttctaacaacaccacctttcccttcccccaacaacctcaatcactctctttcgctaaacctctcaaactcatgtctcaacctttgaccaccaactctgttcttgttgaagaggctgctgctgatggtgattcctccgcngccgcacctcccctcttcgattatcatcgtatcgaccaaaaactgctccaaa

SEQ ID NO: 8216 - DNA, 261 bp, Glycine max
  Clone ID: 701148203H1
ggcacaagtgagtttgttgatcgagataactagaaacagtgtgatgaaaatgaaggtccttgttttcttcgttgctacaattttggtagcatggcaatgccatgcgtacgatatgttccctctccgaatgaacactggctatggtgcccgtactccggaggtgaaatgcgcaagttggaggcttgctgtggaagcacacaacatctttggctttgagaccatcctgaagagtgcgttgaagcaacaaaggaatacatccat

SEQ ID NO: 8217 - DNA, 276 bp, Glycine max
  unsure (1)..(276): unsure at all n locations; Clone ID: 701148205H1
ggtatttggaggaaggaaggtaaaggaagcaaacgcaagagcaagagcaagagcgaaagcgncagagaagatggaaggagaagagggttctcagcagccacagttggtgctcgcggacaagctattccttctccggcaacccgatgtgcaagacattgacaaggttcgctacaaagaggatgtcttcactcatgtcaaggaaaacgatatggtccctctgtgcgaaaccctagtcgctgattccgtgttggacttgggtcgtgcccttttggactc

SEQ ID NO: 8218 - DNA, 260 bp, Glycine max
  Clone ID: 701148206H1
tctggaggtaacaaagaggagtagctgtgcagagaagcctagggttctacatttttagagagactagtgagtgttagagtgattgtgaggtgctaagaagaggatgagggatgccctttcttgtgtaagcaacaattattttgtactctctatctcatttgtgttagggtttccttgtatggctggctaaaaaccctagttggggatttctaatgaacagttgatgtatttacttttcatatctaattaattgtgttttg

SEQ ID NO: 8219 - DNA, 142 bp, Glycine max
  Clone ID: 701148207H1
acgcaagagtattctttaagacagttgttagcagatgtgcctggaaatgttgatatggtcatttttccaaattacgaaagcagtgtggagcgagatgatatcaaggagcctttcagtgaggtttcaatgttcaagaagaact

SEQ ID NO: 8220 - DNA, 260 bp, Glycine max
  Clone ID: 701148209H1
ggaagaaaggcagagttattgccattgcctctgcctcttgcaacaccaaactgatacacacttaataatattatagtaaaaattagccaccaaagtacactaaccccttttttcatacaactcaataggtaattgcttctttcttactattccttatgctttcttctgcttgaaaaatgaaaatctcatccatttttttataaagggtcctttgtgttgcaaaagggttcaggtgatcgatcttttatgtaatataactt

SEQ ID NO: 8221 - DNA, 261 bp, Glycine max
  Clone ID: 701148210H1
aactccttgggataaagatagtgttgccatgttttcaacgctctaactaaggcatacaactccttatcataagtagaatagttaagggtaggaccacttaatttttcactaaaataagcaattggatgaccttcttgtaacaatacagccccaatcccaacatttgaagcatcacattcaatttcaaaagattttgaaaaatttggcaaagcaagtatgggggcaaaggttaaattttgcttaggagcttgaaagcttctt

SEQ ID NO: 8222 - DNA, 263 bp, Glycine max
  Clone ID: 701148211H1
tctcattaaaaggatcaatgaaatgtggccagatgattgaattggaatcctattatctaccccaaattctaaagaggaaaataactcacgtgcactccattaatccaaatgttaattctcccttatatctattgaaacaaacaaacaccaattgaaccattaggactatccaagtgataggaggctgagataatatacgtgagatcataagttcaaactttaatacgatcttatacacaaacgaatggacactagttatctct

SEQ ID NO: 8223 - DNA, 265 bp, Glycine max
  Clone ID: 701148212H1
gacaccaacaccaaaacaaacccactaagatggcttcctttgtatccttcctagtgctgcttcttgcagcccttatcctcatgcctcaagggcttgctacttactacaaaccaattaagaagccaccagtgtacaagcctccagtgtacaagccaccagtgtacaaaccaccggtttataagccaaaaccaccggtttacaagccgaaaccaccggtttacaagccaccatataagaagccaccatacaagaaaccaccttatgg

SEQ ID NO: 8224 - DNA, 247 bp, Glycine max
  Clone ID: 701148214H1
catgaaacacccatacatagacaaatcaaacagaaggactagacctgagaaccttctcaagcttctcagctttaatgtaatcattgtcattaaggggtccagcaggaaaaggtgtgatttccacaatgatatggggtgttgggagctcatcaaaaagagctctcacattgttgcaacacacactttctccatgagcactttccctacggatttggcaacccttgtgagaggtggcatcaacaaagtg

SEQ ID NO: 8225 - DNA, 270 bp, Glycine max
  unsure (1)..(270): unsure at all n locations; Clone ID: 701148215H1
gatgacagagattatcaactcatgcttaagttcgaagactattttaactgttttagttttgagttcagaataaagcacgcagcagaganatctcgaagtgcaaccaagaaattgcttgaagatttcacaaagaaacgaagacctagaatcgccaaaagaacaagtccaaagtccaatgaaattanaatttattattatcttgtgtgcctcaattagcacgtttgtatgtatgggagaatgggagccaacttggagcacaagagctgcaga

SEQ ID NO: 8226 - DNA, 270 bp, Glycine max
  unsure (1)..(270): unsure at all n locations; Clone ID: 701148216H1
gacacacagagcggtnctcatattttgnaganccgaaaaacacgttaaagaaatcccattcccactaccgaagcaaattaagaagatgaagcagcagagagtggagtttatgggcatgggcatgggcatgggcatgggcctgggccttttggtggtgatgatggcatgtgggtcggcgagtggtgcggatgatttggcaaccaagtgttcancggtgatcagaagtataccgtgtttggatttcgcgaagggaaggnagaaacgccgaaa

SEQ ID NO: 8227 - DNA, 237 bp, Glycine max
  unsure (1)..(237): unsure at all n locations; Clone ID: 701148217H1
ccacggngancgtgcttnatgtttcganaaatgcactttccgncgaggttccgccggnggtaggaaaccttatcaagttggaggagttgaagatggcnaataactccttcacaggcaccatcncggtggnactcaanaacacncgggtcacgaagagtcgatgagtctccnggnaacgatntcgtggngaaggtncgtctcagtttcggtgatatgngngcctcnatgtgctgtctc

SEQ ID NO: 8228 - DNA, 241 bp, Glycine max
  unsure (1)..(241): unsure at all n locations; Clone ID: 701148218H1
catcatattatgngtgacatgctacaccatttgaatgacagttttgagcaaaagataaagtgtgtttagaaacgtggtggaccatcttgagaaaacgtaaccttaaaagttactacattcaattttcacacaatttaaattanattaaattccgcaaacaaggttacactgcagtgcaaggaattgctgatcgtgaccataatacaagcatatgttaaaatttctctagaagctgaccacc

SEQ ID NO: 8229 - DNA, 268 bp, Glycine max
  unsure (1)..(268): unsure at all n locations; Clone ID: 701148219H1
catgcatgnntntgacaacacaagttctaagangaggctcaaattcacggacaccaatggcttgccgcaaacctctagtataaactgcattcaagttataaatgtcatagacttcattgagtaatccctcatgcatcacgcaatctaccctctgctctacatatctgtccagtacagggagagatgcatccacacatataaaacaacnatcatatcttaagttatcaacttgaccccacttctgccctgccacaagcaagaccaatat

SEQ ID NO: 8230 - DNA, 273 bp, Glycine max
  unsure (1)..(273): unsure at all n locations; Clone ID: 701148220H1
gggagttcaacgngatgggagcagntaaggncacagantagttgangngaatggcatgaaaatgcatnttgtngagaaaggagagggtccagtggtgtngttcctccacggcttccctgagctctngtacncatggcgccaccagattctctctcncagtccctnggatatccgcgccgncgctcccgatgctccgnggctacgtgacaccgacagnancannttcaatcancagctacgactgcttcccacgnanggtgtnatntcnttanc

SEQ ID NO: 8231 - DNA, 258 bp, Glycine max
  Clone ID: 701148221H1
gatagaggttgtatgcaggataccaaccaagagtctggtgctacactaccggggtatggaggttgcagttccttggctgagaaacacggtgaaaaacgtgttgccgaaaatgatgatgatgtgagggaggacaacaagaagctgagagaatgggtgccttcccttgttcctaagactgggggtggggggtactttctgcatagtaacccaattgaagtgaaagagggctcaggagaagatgaaatttcacatattgac

SEQ ID NO: 8232 - DNA, 242 bp, Glycine max
  unsure (1)..(242): unsure at all n locations; Clone ID: 701148222H1
ggaggaggaaatcggncgtctataccgaataaggacgacggtgatgcagatgctgagggacagaaattttctggttggtgacttcgagatcaacatgtccaagcacgagttcaagtccaagtgcggcgaacncatgaagcgcgaggacctcgtcatcaacaaatccaagaaggacaactccggcgaccagatctacgttttcttccccgacgaacccaaggtcggcgtcaagaccatgaaga

SEQ ID NO: 8233 - DNA, 269 bp, Glycine max
  Clone ID: 701148223H1
gagaagcagaaagagaagcattagcaaaagcaagaagaactagtctaagcagaaatggcctcttcagtgatggcatctgtggccctcaaacctgcccctttcactgttgagaagtcctcagttagaggccttccctccctctcaaggaactcctcttcattcagagttgtggccagtggtggcaagaagatcaagactgacaagccttatggaattaatggtggcatggctttgagggaaggagttgatgcatctggcaggaaaggaaa

SEQ ID NO: 8234 - DNA, 260 bp, Glycine max
  Clone ID: 701148224H1
ggcatcaattcaaaatatatcatcaattataagcatgggtttgtggaacacaacgaatgcagtgtcttgccgctttcacaagtttggtgatgaccaaaagaatctggtcttccaaggtgatgccacgtcttcttccaggggcatagaactcacaaagttagacggtggaggaaaaccagtgggtggcagtgtggggagagtgttatactcttctccagtgtacctttgggaaagctctacagtggtcgcaagctttgaaa

SEQ ID NO: 8235 - DNA, 267 bp, Glycine max
  Clone ID: 701148225H1
ggaagcttatcagagaaacttatgcccagacctatggagaagatctcctcaaggccttggacaaagaactcacgagtgattttgagaggctggttcatctttggacacttgattctgctgaacgtgatgcatttttggcaaacgaggcgactaaaaaatggacttcaagcaatcaggttctggtggaaatagcctgcactaggtcctctgaacaattgtttgctgcgaggaaggcttaccatgttctttataagaagtctctggagg

SEQ ID NO: 8236 - DNA, 271 bp, Glycine max
  unsure (1)..(271): unsure at all n locations; Clone ID: 701148227H1
tttattctgataaaaatatcgctataaagaatgatgaaaaaatcgttatcatcgcaaataaaattttatagcttataattatttttttagattatttgtagttatttttttttcattttatacctgataatcaaataatttaaatacaggtttaactactaaanatgattttatatggttttttatgatttgccgcttaaaaaactaaaaattctaaataaaaagaattatcttaaaatctccacttgaaatatttaactataatgagttc

SEQ ID NO: 8237 - DNA, 272 bp, Glycine max
  unsure (1)..(272): unsure at all n locations; Clone ID: 701148228H1
ggggaaatcgttgggttaaatcagattggaaaaaagatgagaacctggctggggagtggaaccacacctctggccaatggaatggagacgctaacgacaaaggtattcaaaccagtgaggattacagattctacgctatttcagctcagtaccctgaattcagcaacanggataagacactagtcttccaattttctgtcaagcatgaacagaagcttgactgcggtggtggctacatgaagttgctcagtggtgatgttgatcagaagaaa

SEQ ID NO: 8238 - DNA, 261 bp, Glycine max
  unsure (1)..(261): unsure at all n locations; Clone ID: 701148229H1
gaccacattccaaaacacaaaacacatacattgtagtatcacttttgtctcggaatttgttcttttgagttatggcaagcttnnaggttgcatgtgtggttttgatgtgcatggctgtgatgagtgcaccaatgatggtgcaagccgtgtcatgcaatgatgtttctgtgaacctagcaccgtgcctatcttacctgatgcagggtggagatgttccagaatcgtgctgtagcggagtgaggaacatctgggttctgccag

SEQ ID NO: 8239 - DNA, 167 bp, Glycine max
  unsure (1)..(167): unsure at all n locations; Clone ID: 701148230H1
ggagagagaagnntccatttatnanacatcntgtgcgcantctcncntctcctaggtttcgctcccatcaacanccacgatcgtgnagaggntcacttatcgcangcgcnatagctatgtatcacatcnaancagcacgggttnttaagncncctgngggtngtttg

SEQ ID NO: 8240 - DNA, 266 bp, Glycine max
  unsure (1)..(266): unsure at all n locations; Clone ID: 701148231H1
gacatcacgtcacgtaaacaatactaatatacacgcccgcacctctctcacaagtctcaccaacttccactctcatcaatgactctcaccaatgctttcctcgntccttccttcgccgttcacggtggtagggtttccgatccgcgtccattcctcttttctctcttccctccgacgccttcttccgctccccaacctccntctccagggacaagaacattctatatgcttctgcttatgatttgaatgcagttggttcagcttca

SEQ ID NO: 8241 - DNA, 272 bp, Glycine max
  unsure (1)..(272): unsure at all n locations; Clone ID: 701148232H1
gatggtggctgcaatgatgctntttcttctcanntctacgcnttgaagagcgttgagccggatgctgcggattgcttggntggttgcagtactgcctgtgttcaaagcgactcgaggctnaagcacggtgtgnacgcaaatgcagcattagatgcggtccagattccacaatcaaggaggacatgagttgatttgagtatgtaaagtcacagcgcaagcnagcagtgtttcatcaccatagtcttatttagtcctgcttatncctataataa

SEQ ID NO: 8242 - DNA, 93 bp, Glycine max
  unsure (1)..(93): unsure at all n locations; Clone ID: 701148233H1
gggggccacgaaaagncacctctctgcgcttaaaacgactgcggcccacgatcgcgttcttcagttgaggcatgttattcgctgctcactcct

SEQ ID NO: 8243 - DNA, 261 bp, Glycine max
  Clone ID: 701148234H1
gggagttacttgaaacgacatcgtttcagggaagggagtgaagtgatagaggaaaccgtagaacagtggtggaaaaatgaaggcattgggatggtggctgatagcggtaggcacgcttcgattggcctccgtgtggttcggtttcttcgacatttgggctcttcgactcgccgtcttctccaacactacaatgactgaagttcatgggcgcacatttggaacttggacactgttgacctgcaccctttgctatatctgcgc

SEQ ID NO: 8244 - DNA, 258 bp, Glycine max
  Clone ID: 701148235H1
gaccacaccgagtcgcagaaaaagaaaaaagcgatcatagtttcacttcggccttatccagtttagggtttcggttctctaccctatctttcacgtatcgaaaccttaaatttacgatcaggtctgagcaatctggttggtagaacctttggtcttagtgagtcaagttttatgtctgaattagacgatcaaattcctactgccttcgatcctttgctgatgcaaatgctgatgactcgggtgctgggtcaaaggagt

SEQ ID NO: 8245 - DNA, 258 bp, Glycine max
  unsure (1)..(258): unsure at all n locations; Clone ID: 701148236H1
ggggtaagagattctctttctttgagttgcgtgtgcaaagaaaagtggtctataaaaatctgctctcagtcccacttcccaattcattttcattccacgagatatggcttcnactctgcttcccctggcaaccttcttcttagttctctccgcttcttatctccagattgctggggcgaaagcacaaccgttgactagtctcaagcttaactctccgatccttcaggagtctattgctaaagagatcaatgaaaatcc

SEQ ID NO: 8246 - DNA, 260 bp, Glycine max
  Clone ID: 701148239H1
ctgcccaatgcatgaggctcctgaagaggtctaaggtgggtagatatttgcagcctaaccccacacccaaggcaacagccttaccattgggcaaggcttctaagtcacagcaactcattcttttttcccaccctctgttctgctaaaaatgtagagcttttttggggtagacgttttttttcaagtctaccctaaaaatgatgcagtagcaggatagaccaacaaaatctccaaaatacccaaaagaaaaggtctacgct

SEQ ID NO: 8247 - DNA, 257 bp, Glycine max
  unsure (1)..(257): unsure at all n locations; Clone ID: 701148240H1
tcccgaaatacccatatagtctgaatgattgaatttattcctttataattctaattctttcaaaggttgtnataaaaaaaagtaaactgaggtttacgtattcctgttctgantgattgtttatgctgcagtagtcttgtagtcctgtactccagtattggtcttgctctnctttcttnttcctgtgatagtctgattttnaaagatgcaatcatcttatatggtgnctnaatgtttctcatgcagcggaagcacca

SEQ ID NO: 8248 - DNA, 271 bp, Glycine max
  unsure (1)..(271): unsure at all n locations; Clone ID: 701148241H1
gaagaaggtgttccattttcaacactcatcagatcccagtcatcaattgcgttaacaactncgtaaggcaaccatgaggggcattctttctgtaaggacagccttggttcaacatcgtagtgagaaattgggccttggtttcaggctatttagcactcagggtgcttccactgctagtaccccacagccgccgccaccacctccaccaccagagaaaacccattttggtggccttaaggatgaggacaggatatttactaacttatatggg

SEQ ID NO: 8249 - DNA, 263 bp, Glycine max
  Clone ID: 701148242H1
gatctcctccctcccacttatatactaaagtacaataacaatcacaagaatatgatctactatatatcattataaaatttggacctaacttaaacccaaaaaatctaactcaactccacttatatattctgttttagcattagtcaatgtgagattttaaaaaaatgcctcaagcttattaaataagaagaaagagacaagcagcagattaatacttgtagaattgcatcgttgaatacagacttccggatgatgtttcagat

SEQ ID NO: 8250 - DNA, 262 bp, Glycine max
  Clone ID: 701148243H1
ggcacaagtttgttgagatagctagaagcaataagatgaaaatgaaagtgcttgttttgtttgttgctacagttttggtagcatatgaatgccatggctcagactaccagaagttccctctccaaatgaaaactgggtttggtgggcaatacagcaatgaggtggcatgtgccagttggaggcttggcgtggaagcaaacaacgtagtcaagtggcaaactgttcctgcagcttgcggagagtacatagctgactacgttct

SEQ ID NO: 8251 - DNA, 241 bp, Glycine max
  unsure (1)..(241): unsure at all n locations; Clone ID: 701148244H1
cntgacaattgctttactactcagtaaccaggcaggggtaactcagaaaacaatgatgtggagaatggagatgataattttatcacaaataaaagaaagaatgctaataccttacataaatttgagggtggcactcttattgtttgtcccatggctttgttaagtcaatggaaggatgagcttgaaacacattcaaaggaaggtagtatatccatatttgttcatatggtggagcaagaac

SEQ ID NO: 8252 - DNA, 262 bp, Glycine max
  unsure (1)..(262): unsure at all n locations; Clone ID: 701148246H1
acttgagagcaatagagacgtcgttganctccgggcacgggttgaagcttttgcaactcagtttgccatgccgggttttgacatttgaacatgaagtggccggtgaattgccattantgantanttacatatgcgacaatggtgtgtcgttgtgcccgctttttacaaaagcacatcttgtcctatatttgtggagcttctctcttctctgcattgtatgcagttgtcagatttcacatcttgcatgagttgccatctggta

SEQ ID NO: 8253 - DNA, 268 bp, Glycine max
  Clone ID: 701148247H1
ggcacaagtgagtttgttgatcgagataactagaaacagtgtgatgaaaatgaaggtccttgttttcttcgttgctacaattttggtagcatggcaatgccatgcgtacgatatgttccctctccgaatgaacactggctatggtgcccgtactccggaggtgaaatgcgcaagttggaggcttgctgtggaagcacacaacatctttggctttgagaccatcctgaagagtgcgttgaagcaacaaaggaatacatccatggcgaac

SEQ ID NO: 8254 - DNA, 267 bp, Glycine max
  Clone ID: 701148248H1
gttcccaattttctttgaatctagtaatttagggattagaatgaagtgaactgaaaacattctgtctgagactgacctttgattttcttgctcctatctttttagtttgtacaaatggaagagtaatttgtttgagaaggtgaaactgaaacctaataatattgttgctctctgcatcatctatgtaatgtattgtccaggtagatatttaggctgttgttccatgtgtgagtgaataaaattgagctacatttcatgcgtttcttc

SEQ ID NO: 8255 - DNA, 258 bp, Glycine max
  unsure (1)..(258): unsure at all n locations; Clone ID: 701148249H1
ggagtgtgggcgttggtgcgcacgctaatgttgggagttatcggagctggaacgangttgcgatattcaaaggcccttcttcaaccatggaaggtagggttctcctctttgtccgctgtcgacggccggaaacaccaccttctggatttgcaggagatcgagacggttctcaccgacgttaaagctgacaacgttaaggttataccagttcccaagcatgcgattgggctgatttcatggtactcgccatggcaggtc

SEQ ID NO: 8256 - DNA, 255 bp, Glycine max
  unsure (1)..(255): unsure at all n locations; Clone ID: 701148250H1
ggaacggaaaagcactggcgcantaccctgaggcttctcttctcttctcttctctgtcgtgagtcaccatggtgagggttagtgtgctgaacgatgctctgaagagcatgtacaatgctgagaaaaggggaaagcgccaagtcatgattaggccatcctccaaagtcattatcaaattccttttggtgatgcaaaagcacggatacatcggagagtttgagtatgttgatgaccacaggctggtaaaatcgtggt

SEQ ID NO: 8257 - DNA, 261 bp, Glycine max
  Clone ID: 701148251H1
ggcacatagtaagttgtgattcagcaaacaaagatacagacacagattgttatcccaacgttttatcctttcagttacagctttcagctcaccgaactaactcaactcatggcggtgctcatccgttgctcttgtttcctcactcgccctcgcttctcacaacctcaattctacgccaacaacaccaaacccgtactcccaggaaaattagcttgtctttctctaaaagggacaagggtgttccacactttgtagacagtt

SEQ ID NO: 8258 - DNA, 268 bp, Glycine max
  Clone ID: 701148252H1
ctcactgacattgtatcaaaggaaggaggatatgtcacttttggatacaacaataaaggaagaattatgggagaaggaaacattggaaattagcacaagacataaataaaaaatgttttatatgttaatggacttaagcacaacctcttaagcataagccaactatgtgacaagtgcttaaaaattgaattcaacaagagttgttgtctcatttgtgaagctatttctggtaaggttgtccacataggtaaaatattaggtaatatct

SEQ ID NO: 8259 - DNA, 255 bp, Glycine max
  Clone ID: 701148253H1
ggcacaagtgagtttgttgatcgagataactagaaacagtgtgatgaaaatgaaggtccttgttttcttcgttgctacaattttggtagcatggcaatgccatgcgtacgatatgttccctctccgaatgaacactggctatggtgcccgtactccggaggtgaaatgcgcaagttggaggcttgctgtggaagcacacaacatctttggctttgagaccattcctgaagagtgcgttgaagcaacaaaggaata

SEQ ID NO: 8260 - DNA, 258 bp, Glycine max
  Clone ID: 701148254H1
ggcacaagtttgttgagatagctagaagcaataagatgaaaatgaaagtgcttgttttgtttgttgctacagttttggtagcatatgaatgccatggctcagactaccagaagttccctctccaaatgaaaactgggtttggtgggcaatacagcaatgaggtggcatgtgccagttggaggctggcgtggaagcaaacaacgtagtcaagtggcaaactgttcctgcagcttgcggagagtacatagctgactacgt

SEQ ID NO: 8261 - DNA, 262 bp, Glycine max
  Clone ID: 701148255H1
gagcgccaatgtttttttcagaggagtttcatcttgtaatcaaaagagtttatcttatagtaagaaatcgatgtcttactccattttaaggaacaaaacaagagaacaatagcctgacaaagggtttagccataaaatcgaatccatcattgatttgagatattgataaggtgaatactcatttctcgtcaatgctaggcataatgcgggtatagggacctaaaaaagattatcttttcttcctatcttatgaactttaagg

SEQ ID NO: 8262 - DNA, 265 bp, Glycine max
  unsure (1)..(265): unsure at all n locations; Clone ID: 701148256H1
ggcgaggttgtgtcggccaaggtcattcgaaataagcaaactggtcagtctgagggatatggattcgtggagttctattcacgagcgacggctgagaaantcttgcagaactataatggcacgatgatgcccaatacagatcaggcattccgtctgaattgggccacattcagtgcggggganaggcgttcttccgatgctacttctgatctctctatattngtgggggattggccattgatgttactgatgctatgctgcaaga

SEQ ID NO: 8263 - DNA, 257 bp, Glycine max
  Clone ID: 701148257H1
gacactaaacaagttaaaagaagagcatcactgaactaacaaagcaaccctatgtcgaaggtggtttgtgtcaccggagccagcggcgccatcggatcatgggtggtcctactcctcctccagcgtggttacaccgtccatgccaccgtccaagatatcaaggatgaaaatgagacgaaacatttggaggaaatggaaggagcaaagagtctctccatttttttgaaatggatcttcttgacatcgactccattgcc

SEQ ID NO: 8264 - DNA, 239 bp, Glycine max
  unsure (1)..(239): unsure at all n locations; Clone ID: 701148262H1
ctgcaacttcctctgttttgctcccctgttaaggccttttcataagcttagaatgacacacnaaggaattttccatggntccaatggactctcatgcnggttcnccttggtcnacnntgaacantccaagnggcatngnnacnaatggaattnggcnnaatgctcnnngccatttttantgccggggtgatnctctggcacnatggtggagcatgtgggtatngaaattgtatagccag

SEQ ID NO: 8265 - DNA, 242 bp, Glycine max
  Clone ID: 701148264H1
gcattgggtgttcctgctacttcccctgacatacgtggctcacgttctggcacttgttgccagcatcttggtcgtgctctgggtcctcaatttttggggtggctggcttgggattctgataacaaggccctcatcttcaatcttcatccagttctattgtcatggcttactagtccttgggggtgaagctattataagccacaaagcattacccctgaagaaggaagtgaagaaattgatac

SEQ ID NO: 8266 - DNA, 260 bp, Glycine max
  Clone ID: 701148265H1
gagggacccaaattttaagaacttggctttgcttccttacaaagtgaggtctctaagtttcactttctttgcatagggcaacctcctttctctgtgactctgagtatcgtatcgttttattattatttctaattctctcttatcaggtccattgaatatgtctccgtcgttggatcttcctcccaagggtggcctcagttttgatctatgccgaagaaacgcaatgcttcaaaacaagggcctcaaagccccaacctttc

SEQ ID NO: 8267 - DNA, 259 bp, Glycine max
  unsure (1)..(259): unsure at all n locations; Clone ID: 701148267H1
cactaccacaatcccatacccctctccttatttcttcctacagtgaagatgtccaccagcaagttattttcatgttgcccaattaacaaatttaatttntatttcccaggtgagattcatttancactatgattaatcttagatggcagtgtgagcagccaaccaaaattaaatgctatactagatagcagatctcagagtggctgccacaccaaagatttgctagaatgaaaatacttgtaanatatnaagaacctac

SEQ ID NO: 8268 - DNA, 269 bp, Glycine max
  unsure (1)..(269): unsure at all n locations; Clone ID: 701148268H1
ggagttcaacgagatggagcaaataaagcacagaatagttgaagtgaatggcataaaaatgcatgttgcagagaaaggagagggtccagtggtgttgttcctccacggcttccctgagctctggtactcatggcgccaccagattctctctctcagctccctcggctanccgcgccgtcgctcccgatctccgtggctacggtgacaccgaggcaccaccttcaatcagcagctacaactgcttccacatagtgggtgatctcgttgcg

SEQ ID NO: 8269 - DNA, 238 bp, Glycine max
  unsure (1)..(238): unsure at all n locations; Clone ID: 701148269H1
aaannagacccggaaaggganggaaccgcttttggaaatacattgggcttggatttaagactcccagggaagccatcgaaggaacctacattgacaagaagtgccccttcactggcaatgtttccatccgtggccgtatcttggctggaacatgtcacagtgctaagatgaacaggactattattgttaggaggaattatctccatttatcaagaagtaccagaggtacgagaaaagc

SEQ ID NO: 8270 - DNA, 270 bp, Glycine max
  Clone ID: 701148270H1
ggagagagaagcctccatttataaaacatcgtgtgcgcactactctacttctcctaggtttcgctcccatcaacagcaacgatggtgcagaggctcacttatcgcaagcgccatagctatgctaccaaatccaaccagcaccgggttgttaagacccctggtgggaagttggtgtaccagaccactaagaagagagcaagtggacctaagtgccctgtcactggcaagaggatccaagggattccacacttaagacctgctgaatacaag

SEQ ID NO: 8271 - DNA, 256 bp, Glycine max
  unsure (1)..(256): unsure at all n locations; Clone ID: 701148271H1
ctatgcaatattctcagggaaggaaacaaattgaatctgagttatcctacagtaatacacggtccaacacaccagatgaatttcaagcaaatactnttgtgaactggatgacttatggatagatactttgccattgaactttgcatatgatctctttcattaatatataattgacatttttttgttggctggtttgaaaatgctaatagaagaaactagagagaatgaaccaggtanagaaaaagaatcagacttt

SEQ ID NO: 8272 - DNA, 260 bp, Glycine max
  unsure (1)..(260): unsure at all n locations; Clone ID: 701148273H1
gaagcattggntnctctctctcanttgagacgagtnanttagatgtcntcatcaagatgtcgtctctgatagcagaagatgtgaagagcagatcagaggtgtaccacggggacgaaatgtgccaagtgaagtccaaggagcttctcaaggnaatcgccctccccaacggccttcttcccctcaaggacatggaggagtgcggctacgncagacaaaccggcttcgtctggctcaaacaanagaagagttacacccacaag

SEQ ID NO: 8273 - DNA, 256 bp, Glycine max
  unsure (1)..(256): unsure at all n locations; Clone ID: 701148275H1
gtgattccaagatcaatgaacgtgagtggtttggttggactcaggtcactgttgagcacatagcaaagacagctcaccaagatctttaaacacaatcactgccagcatatgtcctaagcaaggtnnactaccactgtctgaaaggattaccaaccctcattaacttgcattaaggccattgattctcatgataattgttcaccccctcaatttgtacatttcagttgtggtgataataatgttggtttagtagatc

SEQ ID NO: 8274 - DNA, 258 bp, Glycine max
  unsure (1)..(258): unsure at all n locations; Clone ID: 701148276H1
atcctcttgaagtacttgtttatgttctcccatttctctttacacctctttgcacttcgatcataaccaatgctcttcatagccaaagntatctcctcccaaagaggccctttagacccnnnnnnnnnnnnnnnnnnnnncccttgtgcctgcanatcaaactcagtccttaaccttatcaaagcctccacttcatccttcggccaccgcgaactactcatgtgcacaaaatcccaacactaacaccattatttccac

SEQ ID NO: 8275 - DNA, 264 bp, Glycine max
  unsure (1)..(264): unsure at all n locations; Clone ID: 701148277H1
gatgtgcccatgtaacaccctctactaccacctagatttatttataaaattaggacaagtagaatataatgtttttgtttttngttaaaaattttcttataaaataagatgatatcatataacttcaaatgttttaaaagtcatcgcatagacaaataatactagtttaaatcgcattggctctccaaaggtcatttaaaatccataactaaactattacaataaaaagaagtccaaagaagaaataaacatgagtctagtcct

SEQ ID NO: 8276 - DNA, 236 bp, Glycine max
  unsure (1)..(236): unsure at all n locations; Clone ID: 701148278H1
ttgaaggtaattttaattttattttcctctggattgtgagaatttatggcatggtcccagagcatccaaacaaaacaaaactaagggggtctatctagcttagtatgtgtgagatattgtaaactttctgtcacgtgtctttgattcattacaaaaagagcttccaaacaaaacaaaaccaagctcttcgaacgaacacctnattacatgcttctagaccactatggttttgacta

SEQ ID NO: 8277 - DNA, 265 bp, Glycine max
  unsure (1)..(265): unsure at all n locations; Clone ID: 701148279H1
gaggaccaagangaagaaacaacctcanaatccctttcttgtgtcgattagattactttcacaccagagtcgttcgagtacttcaccttctttctctctaagcgcaaaacctcgtactgtttttggcggttaaggatgtcggggaaggagcgaagggttgatcacaggcaaaacctccgccgccaacaaagacaaggacaagaagaaacccatctcgcgttcttctcgtgccggncttcagtncccattggtcgtatccacggtt

SEQ ID NO: 8278 - DNA, 270 bp, Glycine max
  Clone ID: 701148280H1
actggaagaagaactacattttcccgataacgagccacttattgtgagagacgggaacagaaggctaatgcaagacatagattgtggtgggttgtgcaagacgaggtgcagtgcacattcgagacccaacttgtgcactagggcgtgtggcacgtgctgtgtgaggtgtaagtgtgtcccacctggcacatctggaaatagggaactatgtggaacttgctacactgatatgactacccatggcaacaagaccaagtgcccttagagaaa

SEQ ID NO: 8279 - DNA, 258 bp, Glycine max
  Clone ID: 701148281H1
gggtgcctctgcttcctacacgcagggtttcccgaagatttaacacctatggctcctaaagctgatagtttaaagaaggctgatccaaaggcacaagccttgaaaactgctaaggctgttaagtcaggtgctactttaaagaaaaagaccaagaagatccgaacatctgttaccttccatcgaccaaagaccttgaaaaaggataggaaccctaaatacccacgcattagtgctccacccaggaacaagcttgatcac

SEQ ID NO: 8280 - DNA, 144 bp, Glycine max
  unsure (1)..(144): unsure at all n locations; Clone ID: 701148282H1
ggccattgttgttgctattatcatccgcagctgcttttattcgcaccgcaaacagtgagccatggccgtcggaaagancaagcgcatctccaaggggaagaagggtggcacgangcnggcagctgntncctttgccaagnngna

SEQ ID NO: 8281 - DNA, 260 bp, Glycine max
  Clone ID: 701148283H1
gatggccgctgctctgcgtcgcgaaggaaggcgtttgacccaaccaatcaacgccctccgttcctctctcatctctcaagaccaatcccctcatggcgcgcgcttcatttccactcaagtggtgagaaaccgaatgaggagtgtgaggaatatccagaagatcaccaaggccatgaagatggttgccgcatccaagctgagagccgttcagaccagagctgaaaattcccgcggcctctggcagtcgttcaccgctcttt

SEQ ID NO: 8282 - DNA, 254 bp, Glycine max
  unsure (1)..(254): unsure at all n locations; Clone ID: 701148284H1
gaaagtaagcagcgttgcaacgctgtttcctttctgnttcttttcttctnccttccgacgagatctacaacgttgttgntgtttagatcttgaatagtgttttggtgttcggtgagatggtagaaaggaagcaatcacgttatgtgaagttgactaaagatcagacacctctcgaagacattacccctggcgaactcaaccagccaattcaggttcctcagttggacgtncgcnagtgccctgaatgtagacag

SEQ ID NO: 8283 - DNA, 156 bp, Glycine max
  unsure (1)..(156): unsure at all n locations; Clone ID: 701148285H1
gcttcgttatcccgacattaatttntgtacacacacacagattcccctctttcgantttcgatactttgatcagatccacaacacttcttcatccatgangcttggttcttcaggatccagtgtcgtggttccaaggaacttcagattgntggagg

SEQ ID NO: 8284 - DNA, 254 bp, Glycine max
  Clone ID: 701148286H1
gaaaacaaacaatttaccagctatacttgttccttttgaaggttagaagtgctacaatacaaacaatggcagctactcaggaagatgtgaagcttttgggtattgtgggaagcccatttgtgtgcagggtccagattgcccttaagttgaagggagttgaatacaaatttttggaagaaaatttgggcaacaagagtgatttgcttctcaaatacaaccctgttcacaagaaggttccagtgtttgttcacaat

SEQ ID NO: 8285 - DNA, 255 bp, Glycine max
  unsure (1)..(255): unsure at all n locations; Clone ID: 701148287H1
aggtatgggttctctggagttggcaacaatgggcttccctttggaggagtgggttctgggtttgatggtaatatgggtgggccttctgggctcggtggatttggaggattcggtgggcctagcgggctcggaggtcttggtaacggtgaagggcccaaccttcctctcccttgagagttgagaccacacaccttcgngtttcttattttcggtcgctattatcatagcctatatagtgtttctttatgtttagtt

SEQ ID NO: 8286 - DNA, 251 bp, Glycine max
  unsure (1)..(251): unsure at all n locations; Clone ID: 701148289H1
gcctggccaggagtccagccttctcctttgaggggaggtgaggcttctacagcccaggagcctcagccagagctagaggttgctcatgaggccactccagaggcgactccacaggtttcacatgctatttcacctgttgtggaggtctctgagggtgaagaaggcgccgatgacatcgactatgcagtagatctataggcatgcagantacctgggatccctggnctacagcagtacagagacacttcgcc

SEQ ID NO: 8287 - DNA, 254 bp, Glycine max
  unsure (1)..(254): unsure at all n locations; Clone ID: 701148290H1
ggagaattggagtgagtttnatggcgagagcaagctctggtctgcaatacccagagcggttctacgccgcggcctcttacgttggattcgacggatccaccaaatctctcacttccaagttctccaactccaccgctcttcttctctacagcctctatcagcaggctagtataggaccttgtaatgtcccagaacccagttcatggaaacttgtggagcatagcaaatggnnncnnctgnaccagcttggaaac

SEQ ID NO: 8288 - DNA, 259 bp, Glycine max
  unsure (1)..(259): unsure at all n locations; Clone ID: 701148291H1
anaagcacatnttatgcatganatgacttagttncacagatnccatgattagtaatattcagaatttctgtttgatctattcaaatttccccatcctatataattaacacattagttcaggttcctagtttctaaatgacgcaccttcatctatgattaggtcnaggttacatctatcacaacatcaaatgagtagtcacaatattnacttttcacaattatacttgttcagacatctccncgctcttaacactttaaa

SEQ ID NO: 8289 - DNA, 256 bp, Glycine max
  unsure (1)..(256): unsure at all n locations; Clone ID: 701148292H1
ggaagcagaagggttcctcactctcttcatctgattgaacaaaatgtacacctcgaggaagaaaattcacaaggatngggatgccgagcccactgaatttgaggagacagttggacagtacttgttcgacttggaggacaccaatcaggatngnnaagtgacttgaaagatctctacataaaccaagctattcaaatggatgtggctggtaatcgcaaggctgtagtcatctatgtgcctttcagattgaggaagg

SEQ ID NO: 8290 - DNA, 264 bp, Glycine max
  Clone ID: 701148293H1
gacagcaacacacattgttaaaagtttctttatttcaagtgaagttagttagttatatttatatacacaatcatgtcaatgagatcaattggtacaagccttagccttatggtatggcttgtaattgcaacatcagcattagcaaaatctgataaccccccagtcctagacacacaaggcaaccctcttgagcctggcaaagattactacatcaaacctgccataaccgacgttggaggccgcgtcatttgttaagcagaaaca

SEQ ID NO: 8291 - DNA, 263 bp, Glycine max
  unsure (1)..(263): unsure at all n locations; Clone ID: 701148296H1
ggcctgcgagtgtgcttaaaaccctagcccctcttctcttcattcttcactcaggaaacaagcataatggccttctgtaataaggttggaaatgtcttgaggcagggtgctgctcgcagcacacaagcacctgtttcatccatgcttaattacattcgctgcatgtcttcaagcaagctttttattggaggccttcatatggagttgacgatcatctcttaaggatgcattttctggctttggagatgtggttgatgcnaaag

SEQ ID NO: 8292 - DNA, 256 bp, Glycine max
  unsure (1)..(256): unsure at all n locations; Clone ID: 701148301H1
ggatgaggactttgacttcagtacaagatgttgtctttgtgttctccaactacaatctaatgaacccaaccacctacggcacacggaaagaatttcgttgtagtgttcattacacccaacaaccaagtgcagcaattcaccaaaaaagaagaaggcaattcaaagttttgaaccttggttcaatatctagagtccctgcaagctcaaacacatngnngatatccaaatgcatcctgggcagatcgtttngtangga

SEQ ID NO: 8293 - DNA, 252 bp, Glycine max
  unsure (1)..(252): unsure at all n locations; Clone ID: 701148303H1
ggttgttgtttgttgttgcattttgcacttgcaaaattttngttgcagaggcagagagaggaggcaacgccacaccgcaccactctcactctgcaacacccgaatctcgtttcacctaaacgacctcgtttttgcgntcttttcccttttcttcttctgatttaggtttcagagagaagaagaaggagcagcaatggactctcgcacgtataatcctcgcaccgtcgaagaggtttttagggatttcaaggg

SEQ ID NO: 8294 - DNA, 257 bp, Glycine max
  Clone ID: 701148304H1
gagacaaaattttgtttgagaaattgatgattatctgaatgcgtgcatggtttggtcatgattttgcagtcagaaatcctcacgagataccaccaccaaccccatgacctcaactacaacatcgccagggtcagggacagtgacaggaacaggatccgaaggggcagtggtgtacacgggtgcagacaacggcgttgtgtataatacagttacgggttccgggtccaagttcagtaaccggaggagaaacaatgctc

SEQ ID NO: 8295 - DNA, 225 bp, Glycine max
  unsure (1)..(225): unsure at all n locations; Clone ID: 701148305H1
gcttctgcanngtcattttacntctcagcagcttcggctagggttcagaaacgaaaaagggttcggtgttctgtncgcgatgagagccaagtggaagaagaagcgtatgangaggttgaagaggaagcgccgaaagatgagacagagatccaagtagtgcgttaaacctagtttgtttctgttgcntttacaattgcttatgttgtcgaatgggacacccagttg

SEQ ID NO: 8296 - DNA, 258 bp, Glycine max
  unsure (1)..(258): unsure at all n locations; Clone ID: 701148306H1
ggaggaagccacatggagacacaatacagagtgagttgttgctcnntcgccacaacttctctgccaacatgggtatctccagagattctatgcacaagaggcgtgccactggtggcaagaagaaggcctggaggaaaaagagaaagtatgagcttggtcgccagcctgctaacactaagctgtcaagcaacaagacagtcaggaggatccgtgttagaggtggaaatgtgaaatggagggcttgagattggatactgg

SEQ ID NO: 8297 - DNA, 257 bp, Glycine max
  Clone ID: 701148308H1
ggctctgtgccagttaacaagtcaacttcaggttgaaaagcagatggagcaaaatacagattaaaccaaatgttgaaatccgtctcaatgatttgaagcttgtgcttggaccagagttgaagatagtttatcctttgattcttaattttggtgtaagtggagagcttgagttaaatggtcaggcccatcccaaatggataaaacctagaggcatactgtcatttgagaacggtgaagttgatctagttgcaacacag

SEQ ID NO: 8298 - DNA, 252 bp, Glycine max
  Clone ID: 701148309H1
agttatcagattttgttgttgcaactggctcaacagttataaggctgacagattttggtgtagaaggagctgatgcgaaaaacatcttttatttgagggaggttgatgatgctgacaaattgtatgaggcaatcaaggcaaagaagaatgggaaagctgtggttgttgggggaggatacattggtctggagcttagtgcagtgttgaaactcaacaatattgacgttaccatggtctacccggagccttggt

SEQ ID NO: 8299 - DNA, 253 bp, Glycine max
  unsure (1)..(253): unsure at all n locations; Clone ID: 701148310H1
ggcgcattgaacganaattagggtttgtagtgtagcaggaagaagcagcaatgggcgccgaagataacacgtaaggttagcagaaaccctgaattgataaggggaatcggaaagtactcgaggtcgcagatgtaccacaagaggggcatttgggctatcaaggccaaaaacggtggcgttttacctcgccacgaccctaaacccaagcctgaagctcctgctgaaaaaccacccaaattttaccctgctgatg

SEQ ID NO: 8300 - DNA, 258 bp, Glycine max
  unsure (1)..(258): unsure at all n locations; Clone ID: 701148311H1
gaaccccaattccaactctaatctcataacatatncaaatctctactcatggttacttgtttgcttcttggatcatacaatttatagccaccaatagcatggtaactaatcaatatgacttgctcacccttgtcatccagtttccttctcaattagtcaggaatatgtttgtagcagattgaaccaaacactctaaggtgagctacacatggtttcacaccagtccaagcttcttctagtgtcatacctgtaagtctc

SEQ ID NO: 8301 - DNA, 252 bp, Glycine max
  Clone ID: 701148312H1
gaagaaagatcatcattgatacctatggtggctggggtgctcatggtggaggtgccttttcagggaaggaccctaccaaggttgacagaagtggtgcctatattgtaaggcaggctgcaaagagtgtcgtggcaaatggccttgctagaaggtgcattgtgtcagtttcctatgccattggtgtccctgagcccttgtcagtgtttgtggacacttatggaactgggaagattcctgacaaggagattctgc

SEQ ID NO: 8302 - DNA, 252 bp, Glycine max
  Clone ID: 701148313H1
atccttcttgttcttgtttcattgtaagaggataattgagttgtgttggtaatagtagctttggaagtggagaagaatagagagaacgatgatattataaaaaagaagctcaaatgatgatgagctttcatggtgaattttgtggacttctctgcttattatctccttatgatcatccacccaataatacatcgctggtttttgtttctgcaaattccttagccggaaagacaaacaaaaaagaaaataaag

SEQ ID NO: 8303 - DNA, 251 bp, Glycine max
  Clone ID: 701148314H1
gaggaggaagaggaaagaggattagagggtcgccacgtttagcaataaccaaaccctctctactcttttttcttctccttctcttcgctagggttttagcttcttcctcttcacttcgttctttttcgcctctacaatgagcaacgacaaggacacattcaacgtcgccgatctcacttctgctctcaacgaggacaatagagcagaccttgtcaatgctcttaagagcaagatacagagtttggctggac

SEQ ID NO: 8304 - DNA, 261 bp, Glycine max
  Clone ID: 701148315H1
ggactctgttatcaagtgatggcgatgatggcggcgacgacactcacactgacaccaccgagatggtcgtggcgtccaactcgtcgttccttttgccggcaaatgcatccagggctgagaggtttgggaatgtacagaaatggtgggagcaatgaattgaatgtttctgcctgggatgataagcccttgaaatgcttccgagcggtaacaaggcttacttggatgagcaggatgtggtgacgtttcttgatcctcctaagg

SEQ ID NO: 8305 - DNA, 252 bp, Glycine max
  Clone ID: 701148316H1
ggcacaagtgagtttgtgatcgagataactagaaacagtgtgacgaaaatgaaggtccttgttttcttcgttgctacaattttggtagcatggcaatgccatgcgtacgatatgttccctctccgaatgaacactggctatggtgcccgtactccggaggtgaaatgcgcaagttggaggcttgctgtggaagcacacaacatctttggctttgagaccatcctgaagagtgcgttgaagcaacaaaggaat

SEQ ID NO: 8306 - DNA, 253 bp, Glycine max
  unsure (1)..(253): unsure at all n locations; Clone ID: 701148317H1
ggaattgaaaatcgagaaacggaatgatgaaataacgtagggagttggatctgtggtttggttgcgatgcggtgtgttgcgaatcactgtccaatcccgatcgcttgatccagacagtgaatcagaatcagaatcagaatcagaatcaganagaaacgatgagggcagtaagtgcgttaatggtggctcggtgttgacgcgggnacaatcgntccctggtctttggcaacgaaagcatancttcggaatcggt

SEQ ID NO: 8307 - DNA, 256 bp, Glycine max
  unsure (1)..(256): unsure at all n locations; Clone ID: 701148318H1
gacagttaatttatcataacatttgtttttggtgcattcaaaaaatggctgggattgtagtgatttttgactttgactcaacaatcattgagtgtgatagtgataattgggtgcttgatgagaccggtttaactgaaaagttctatcagcttcttcctagcacgcattngaaccctctaatggataagntgatgaatgaacttcattcacaaggataaggcnntttctnnaanactgcatgggttccatanagaac

SEQ ID NO: 8308 - DNA, 248 bp, Glycine max
  unsure (1)..(248): unsure at all n locations; Clone ID: 701148319H1
gtagctgaagttcttgagaggaacaaattacctggtgcaatattcacctctttgctgtggaggtgctgacattggtcaggcaatagcaaaagacactcgcattcccctggtttcatttactggaagttcaaaggttggcttgatggtccagcaaacagttaatgagagatttggcaaatggcttgcttnanttaagtggtaacaatgcaataattgtcatggatgatgcagactcaattggcgtacgc

SEQ ID NO: 8309 - DNA, 254 bp, Glycine max
  unsure (1)..(254): unsure at all n locations; Clone ID: 701148320H1
gatcgaagcaaaaaatgaaaacccaaagtgcttctctcctctgtctttttctnctctcttngctatccttttggctagtngcactgctgcaagtgcaactccaagaagcgcagtgccaagccaccatgtttcaacattcaacagaagcctttttccttccacttttctctttggaattggttcttctgcttaccaggcagaaggagcagcaagtgtagatgggagaggaccaagcatatgggacacctacatag

SEQ ID NO: 8310 - DNA, 252 bp, Glycine max
  Clone ID: 701148321H1
aagtctatttcattaatctacataataaatatttatattaaagattaatataaattacgaaaaatcaaattttaattttaattagaaataatttcaaaagcacacaaaaaattacatctaagtattccatcagacatttgatttgtctcaactacttgcattagattgttgtcccgttgggcgcttttgatttcatcgaactccgctaaacctagtttggtgaattctccttaaacttgatgagttagggta

SEQ ID NO: 8311 - DNA, 256 bp, Glycine max
  unsure (1)..(256): unsure at all n locations; Clone ID: 701148322H1
ggttgacaaaggaaacgtgtagtacgagggccaatttccaaaaaccttttgtctcgcaacctcacctcttcctccttcaatctctttcggaatttcccaaaatccttagtgggaggaagagatggntctgactcagaagattcacgaagctttcaaaggcaccgtcgagaggatcactggcccccgaaccgtttccgccttcaaagaaaaaggagttctcagtgtctccgagttcgtcaccgccggcgataatctc

SEQ ID NO: 8312 - DNA, 251 bp, Glycine max
  Clone ID: 701148323H1
gggggttttagttagacagtggcggggcagtgatacagtgtgggcataaaattttcgaagttgaagcgagaacttgccatttcaagggttttagggttagggttttctcaaattgcaaggacatgggtttcaaccttcaaccatatgggattcaatccatgctcaaggaaggccataagcacctttctggcctcgacgaagcggttctcaagaacatcgacgcttgcaaacaactttccactattactcga

SEQ ID NO: 8313 - DNA, 197 bp, Glycine max
  Clone ID: 701148324H1
ggaacctacgccgagcgaaaccccaaataccaatccaatcctctcccaacttcacaaagccatgtctccaggtcccgttgtcgacgcttcccctgaggttgatgcagagcaacaacttccctccgtcgatgacgccactcagaagaagataccccaaccacaggaggacgatgctccccttgtcgaggacttgaagg

SEQ ID NO: 8314 - DNA, 250 bp, Glycine max
  Clone ID: 701148325H1
gggggttttagttagacagtggcggggcagtgatacagtgtgggcataaaattttcgaagttgaagcgagaacttgccatttcaagggttttagggttagggttttctcaaattgcaaggacatgggtttcaaccttcaaccatatgggattcaatccatgctcaaggaaggccataagcacctttctggcctcgacgaagcggttctcaagaacatcgacgcttgcaaacaatttccactattactcga

SEQ ID NO: 8315 - DNA, 265 bp, Glycine max
  Clone ID: 701148326H1
gagagagaaacggttgaattgaagatgaaaatcactgtcatgactgctgatgaacaaatcatcacgttagatgtggatccccacgaatctgtggaaaacgtcaaagcattgctcgaggttgagacaagtgtgcctcttcaacaacagcagcttctgtttaatgggaaggaagtgaggaattctgagaagttgagtgctcttggtgttaaggatgatgatttgctaatgatggtgtctggtgctggcgctactgcttctagtggat

SEQ ID NO: 8316 - DNA, 249 bp, Glycine max
  Clone ID: 701148327H1
tatatctgatttctactgaacattgtatatacgggcttagatggtttctattgttttggtgacaactcaggagacatgtttctgtaaaagctagtatcaagctcaagcaacataaacagttgatagtttctgtaattctgtaaatattgacaacatgaaaagggcacaggaaacgttcttcttactttttttctattggcatgtttaatttaggttttgcaaattatagtttgatctaatggaaaagac

SEQ ID NO: 8317 - DNA, 252 bp, Glycine max
  Clone ID: 701148330H1
ggttttggggttttctgattaactctttcttctcataactctgccgccgcaacagccccaaatccaatggcttcagagaagaaactttcgaacccaatgagggagataaaggtgcagaagctcgtcctcaatatctccgttggcgagagtggagatcgtctcaccagagccgctaaggttttggaacagcttagtggccaaacccctgtgttttccaaagcaaggtacacggttcgttcctttgggattaga

SEQ ID NO: 8318 - DNA, 255 bp, Glycine max
  unsure (1)..(255): unsure at all n locations; Clone ID: 701148331H1
agaccctatgttaaatgttttattaatattgacttagtactgatagttgataatctacttttgaaattcccattttggaaataatgttcgatttttagcatagaatatctgaaatagtttgataagaccaattgggataaggaaatatagatgcatctataattanatattaagctctgattgtaatttgcatcttccaattttctatattaaagtgcaacagaatagaggctttgctcttggttaataatgacg

SEQ ID NO: 8319 - DNA, 254 bp, Glycine max
  Clone ID: 701148332H1
ggagctaaatgatttgttcaaaatcgctgttactcaacccaaagtgcctgttggtgttgatcccaagtccatattatgtgagttttataaagtggggcagtgtgccaagggcttcaaatgcaagttctcgcatgatttgaatgttcagaggaaaggggagaagattgacatttacagtgataagcgtgaccaggaaacaatggaggattgggatcaagagaccttggagaaggtggtggagtcaaagaaaactg

SEQ ID NO: 8320 - DNA, 252 bp, Glycine max
  unsure (1)..(252): unsure at all n locations; Clone ID: 701148333H1
ggagagaaagagtgaggagaaaattacagagcattttccaacacgattacacgaccgaattcaaaccctctccttctctccgaagctncgtttaatatcttactcgccttagattgttcttctctttcattatactgttctcttttcgatttgagggaacagtacaagagtgtgaggatcggttaacccaatgcacaggtagtcactaaaataatggagtctcacgatgagactggatgccaggctcctgaa

SEQ ID NO: 8321 - DNA, 262 bp, Glycine max
  unsure (1)..(262): unsure at all n locations; Clone ID: 701148334H1
ggggtgccattgttgttgctattatcatccgcagctgcttttattcgcaccgcaaacagtgagccatggccgtcggaaagaacaaggcgcatctccaaggggaagaagggtggcaagaagaaggcagctgatccctttgccaagaagggttggtatgacattaancntccctgctgtttttcaagtgnaaaatgttggcaaaaccctcttctcaaggtactcagggtaccaagattgcttctgaaggactcnaagcattaga

SEQ ID NO: 8322 - DNA, 243 bp, Glycine max
  unsure (1)..(243): unsure at all n locations; Clone ID: 701148335H1
gtcgagatcgagatctaggtcaaggtcgagatctaggtcgaggtctaggcctagacaaaggccaagatcgcgttctagaagtcgtggcaggtcaaggtcaccaattcgtggaaggtcaaggtcaccaattcatggaaggtctgaacctacaaatcctggtgacacactttatgtaactgnnctatcttcgagggtcaccgaaagagacctagaggngcattctccaaggnaggaaaggtttct

SEQ ID NO: 8323 - DNA, 260 bp, Glycine max
  unsure (1)..(260): unsure at all n locations; Clone ID: 701148336H1
ggaggagcagcagcagcaaaacgaggaggttttgtcggttgaacttccggctccttccggttggaataaactgttcttccctaagaaagtgggaacaccaagaaaaagtgagattgtattcattgctccaactggggaggagatcaataccaaaaaacaattggagcagtacctanaggcacatcctggcaatcctgtcatttcagagtttgactggggaactggtgagacccccaggcgatcagcaaggatcagtgaga

SEQ ID NO: 8324 - DNA, 245 bp, Glycine max
  Clone ID: 701148338H1
gtagagattaatgagaggagcacaaagggaaaaggtgttgagtttgatgaggtgaaagggcagcttgaagcagctcaggagaacatcacaaagttgtttgacaccaaccgcaagttgatgatgaatatggaagagggtaccttgtcttctgttgggaaggatgcagcagagtcgggtgaaagtggaagtgtcagcagaaggagagtttcagaacaggcacgtagagaatcagaaaaaataggaca

SEQ ID NO: 8325 - DNA, 227 bp, Glycine max
  unsure (1)..(227): unsure at all n locations; Clone ID: 701148339H1
gagataacaatcattcatcccctctccccaacggntaaagagagagaagggtcccttcattctctcacacagaaaaatggcagcgtcagtttcgtgctcatggctaacccttccctcccaaatgaggagcctctccctcacatcctcttcttcatccctttgcatctccaattccgcttctctcagtttctccagaaacctctcacgccctttcttctcaaaaggta

SEQ ID NO: 8326 - DNA, 246 bp, Glycine max
  Clone ID: 701148341H1
gggaataagttcttttccatacaattgaatttttagaattatggctcagttattgtcaccagtatgcatggaggctctgaaaatccacaatccatcattgaatctttgttcaagaagctcatggcggatgctggtgaagggtgcaagtccttgcacctttctgacacacagtggtagtaagcgaagagggtttggcaaagtaagagttactgctgaagactcagtttctccctctgagaccatgca

SEQ ID NO: 8327 - DNA, 248 bp, Glycine max
  Clone ID: 701148342H1
cttacctctacatccttccgttgataccatttccctttcagcatgaactcctgatccaataaatcacttttggggtcatattcagctctgcatccaaaataaaagatatgatcacaataatttaaagttgaagttaaatttgaaacaaaaatagcgcaaataaatcagctaggcatgtactgatgtgcatgataccagtcaattcatcttaaggccataattgcagatagatgacttgaagtacaagt

SEQ ID NO: 8328 - DNA, 247 bp, Glycine max
  Clone ID: 701148343H1
gggttgcaccttggtaaggtgagaaaatatggcatttgcaggaacaactcagaagtgcatggcttgtgacaaaacagtttatctggttgataagttgaccgcagataaccgagtgtaccataaggcttgcttcagatgccaccactgcaaaggaacactcaagctcagcaactataactcttttgaaggagttctttactgcaggccacactttgaccaactgttcaaaagaactggtagtcttgac

SEQ ID NO: 8329 - DNA, 259 bp, Glycine max
  Clone ID: 701148345H1
ggaggagcagcagcagcaaaacgaggaggttttgtcggttgaacttccggctccttccggttggaataaactgttcttccctaagaaagtgggaacaccaagaaaaagtgagattgtattcattgctccaactggggaggagatcaataccaaaaaacaattggagcagtacctaaaggcacatcctggcaatcctgtcatttcagagtttgactggggaatggtgagacccccaggcgatcagcaaggatcagtgaga

SEQ ID NO: 8330 - DNA, 246 bp, Glycine max
  Clone ID: 701148346H1
gaaacattcattctttgtttgcttctcaagtctctcgaagcctctttctctctccttctagaagctatctgtgtttggtgttactaagtctccaacaagcaaagtacatggttgatttggaaatccaggtccccaccccattcgacccgtttgccgaggtgagagaatcggatgcccccggagcaaaggagtatgtgcatattcgaattcagcagaggaatgggaagaagagtctgaccacagtgc

SEQ ID NO: 8331 - DNA, 225 bp, Glycine max
  unsure (1)..(225): unsure at all n locations; Clone ID: 701148347H1
ggaggagaagggngtcaatggcagagtgtttgggtgtttcagtttcaactcttgggctcattctctcttagtaggcccacaatcttttatcgatctcccattaatatctctctctttgcctctcaatctcatttccctgctgctgcatttggttatttgacaccttccaacccacacctgtacgccgctgtctcctccgactccaaggccgctacttcgctagac

SEQ ID NO: 8332 - DNA, 245 bp, Glycine max
  unsure (1)..(245): unsure at all n locations; Clone ID: 701148349H1
gaaacaaggtcaagggataaatttgggttccaggaagagaacaaatttgattctcttaacttaagcatgttgaacctggactctaaatttactgagaatgtgagcaaaagtcgttcgaaatggtgtttatggtatgaatgcagtgtatcagnaaaacaatgcaaacttggtgagtaatgtgatcagtaacaagtacaatggtaatattcttcataacaaagagatccaacnacaacaccaanatg

SEQ ID NO: 8333 - DNA, 214 bp, Glycine max
  unsure (1)..(214): unsure at all n locations; Clone ID: 701148350H1
gactganactttgctctctgtgaggantcaatttccaattagggtttcgcttagagtaaccaattaccatgggagtcttcacctttgtcgttcgcaaatccggcgccgaatggagcgccaagcaacattccggcgacatcgaggcctccgccgactccacctacgatctccaaaggaagctcgtgcaagccgctctcgccgttgattcctccgg

SEQ ID NO: 8334 - DNA, 243 bp, Glycine max
  unsure (1)..(243): unsure at all n locations; Clone ID: 701148352H1
gaccctaacaggagagataacatagatagttgactactggtataatgctattatttcttgggtggcattgctactaagacctagcagttcattattgtcagcaatcatcattattcattacagattaaatcaagtttcccctcagtcatcgaaanttgnttatccaaagcaatcttctagttcaaaatccaaaaatagataacacaggaaatcttaagtataagatccaaaaaatgaaaagaa

SEQ ID NO: 8335 - DNA, 224 bp, Glycine max
  unsure (1)..(224): unsure at all n locations; Clone ID: 701148353H1
gggttttagtttgnacttattgtaatgagtctantnctagcctctatcatagggatattgatggnttagtacaattatacccgttctcattgttgctgagtgaatgcttttttaattactattggttttctgtgctttttaagactgacctgttgagttattaattgcttacacttcatgataaaaanngnnaangggcncncaaanntntannnnnacgnnna

SEQ ID NO: 8336 - DNA, 244 bp, Glycine max
  Clone ID: 701148354H1
atcatcagaaacttctaaaggtttattttacgagtttgttatgtcagcaatactacatattgggaacacactaaaattggactttgatgtataccaagttaatataattctactatgtaaggttcttcacgataggaagataaaatgaacctatatttttgcaatattttatgaaatttactatatatagctgagtgtgtttaatgtaatgatgtaattgaagccgctcaaaaggctgtcactg

SEQ ID NO: 8337 - DNA, 245 bp, Glycine max
  Clone ID: 701148355H1
aaagagacccggaaagggtgggaaccgcttttggaaatccattgggcttggatttaagactcccagggaagccatcgaaggaacctacattgacaagaagtgccccttcactggcaatgtttccatccgtggccgtatcttggctggaacatgtcacagtgctaagatgaacaggactattattgttaggaggaattatctccattttatcaagaagtaccagaggtacgagaaaaggcactcca

SEQ ID NO: 8338 - DNA, 196 bp, Glycine max
  unsure (1)..(196): unsure at all n locations; Clone ID: 701148356H1
gagacgaatgagacaagatagctgaacataaaggtgaggttacgtgtatctcttgaagtagtgccatgccaccccatgcaataataagatcactncaatcaccaatgcattcatcgttgttggaattccagcgctgtgtttggaaattggaactggaggggcttcaggtgncataatctcaaccttagataacaga

SEQ ID NO: 8339 - DNA, 245 bp, Glycine max
  Clone ID: 701148358H1
gggtgcacgtacattgcctccgcgcaaactgctatcctgcgctgtgctgggaagacaacctctttcatggctcgaaagaaggtcttgtctaattagatctttgagcaacctcgatcctgcagagcatctctaaactagaaatggatggtggtggctacaacttaacaacaacctctttgagcagttcaatggagcaagtgatgagacccaaatcaccattgccgggcttagttgattttcatggg

SEQ ID NO: 8340 - DNA, 241 bp, Glycine max
  Clone ID: 701148359H1
gaggagagtgaagttttgtggtgtggtttagtgtcaaatggcggcgagtagaagcacttttcctctgatgaaatacttgagagtgcgcgtcgacgctcttccccgcaacactcccttaaccctcgctcccaactttttgattcgccgcttctgtgaagaggttaggggttgttttctcgacaagtctgaggtcacagatcgcgtcatttcctgcgtcaaaaacttccagaaagttgatcct

SEQ ID NO: 8341 - DNA, 249 bp, Glycine max
  unsure (1)..(249): unsure at all n locations; Clone ID: 701148361H1
aagccaaatgnaagattcttcagctataatccagcaacaaagaagacaaccctgcttgcccaagacctctactttgccaatggggttgcagtttcagcagatcaacaatttgtggtcttctgtgaatctgtcttgatgagatgcaataaatatttcgtcctgggccctaaaacaggaaccatagagaagttctgtgacctgcctggcatgctnnataacattcattatttatggacaagggcactattt

SEQ ID NO: 8342 - DNA, 250 bp, Glycine max
  unsure (1)..(250): unsure at all n locations; Clone ID: 701148362H1
gntacccgacggtatagggatgagacaataaacttaaatccgtcagttatcgggtacgagtatgaggatatgttggagagtcgggataaaggattgaggagacaatacccatactcgtcccgtacccattgccatgtctatttttgtttctataagtcaatttttcatttcgtttgctcttaattcanacaaaaaagaatggttatccatattattctttttctcgactttcttttttccaaatgtatca

SEQ ID NO: 8343 - DNA, 244 bp, Glycine max
  unsure (1)..(244): unsure at all n locations; Clone ID: 701148363H1
gccctgtctaatttagaggtcacgactttagtttaatcaagtaataagaactaagacgttactaattgtgctacacgacctacctgacaaaggctaacatgaaccacttatggaccacctttgnaatccgtcaaattcatcttatccatacagtcatatgatgcaccctctccattatatttttttcttatttctccctctccctcctcctttctccaaccagtgacggcaaccctttttctaa

SEQ ID NO: 8344 - DNA, 244 bp, Glycine max
  unsure (1)..(244): unsure at all n locations; Clone ID: 701148364H1
ggcatcggnacaatgtcaggacctnannnntgctcnnactcancagttctnaacccgaatgcaggagctggccacgttgaaaaactcgctgctctcgattcctatctctctggttcccctaattccattgccattcttctcgtctccgacgtttttggatatgaagcaccaaatttnaggaacattgcagacaaaggttgcagctgctgggtatatgtggttgttcctggactttttctatggg

SEQ ID NO: 8345 - DNA, 241 bp, Glycine max
  unsure (1)..(241): unsure at all n locations; Clone ID: 701148366H1
gggttcctggcaaagaagctactgccgtatttagatgcagctgagaatgagactgaggaaacatacacatttcagggacaattggaatctgaatcatctgatatgcaaaactcagttcctatactcgaaatggatagcatgaagacatgcattgaataggaggttgatcgcgtttacgagaggttacaagctcttgaaacagntaagggtttctaacaacactgcanggttccnaacagat

SEQ ID NO: 8346 - DNA, 242 bp, Glycine max
  Clone ID: 701148367H1
gagggcggaaatgggtatgtgatgagagtgagattggcgtcgttcttcaccggggctgcagcggcgtcgtttctggggctctacaccctccacaaggattacaaggtcccgcaccaatcctttactcaacagatcccatcatcatgatagacattgctcgtctcccacactttgtgtaaatcttctcaaaagcaaacaaaagacagaaaacatatattacaaagtgttgttgaaggaaacaa

SEQ ID NO: 8347 - DNA, 238 bp, Glycine max
  Clone ID: 701148368H1
ggatcgggttaaaaaacctgtgccgggctttcgcttaagtcgcaggagctgacggctatgtttctaggtgttagactttattgcagttttgtgatggagtatgatatacacaccctactcgatatggcaaccttggtcacaaccctttgggttatttatatgatacgcttcaaattgaaatccagttatatggatgataaggacaaccttgcaatgtactatgtggttataccttgtg

SEQ ID NO: 8348 - DNA, 246 bp, Glycine max
  Clone ID: 701148369H1
gcaatccatatgcattatacggaattcccaatccaaaaaacaatcagaaaaatagagaggtagggagcacgaccacttacgacggacacggcagtgaggttgtcactgacggggcaatgacaatggagggacagacagtgtggattcacggcatgacgacgaacagtagcagcaacgcgataaagagggaggctgagggagcaggctttttaaatttttgtactgaaagacttttcgccacttcag

SEQ ID NO: 8349 - DNA, 241 bp, Glycine max
  Clone ID: 701148371H1
aaccaccactactaccaagtgaaaaagcaactaagcatagtgtgtaagaaagggagaaaaacaagtgctgtgtagagagaaaaatggctaggtggtgcatgatcttggtggttcttgctcttgccgtggttgcaagtgccagaaacatgcccaatgacgctggtttggaggaccagaagaacttccttgggtatgggttttcgggagttggcaacaatggccttccctttggtggagtggg

SEQ ID NO: 8350 - DNA, 247 bp, Glycine max
  unsure (1)..(247): unsure at all n locations; Clone ID: 701148372H1
gagtacgggcattactactcattagcgatanataaggataacgcggcactcttctcttttgttttgtcaattcggatatgtcttctgatagtgcaaaggaaaatgcatcagtagttgattcatcagtcactgaagggaggaatgacattggaaattcagatgatccagagagctcaggttacaagtttaatgaaaacattaatacaactagggcagataaagggggacattctcatggtcagatagg

SEQ ID NO: 8351 - DNA, 245 bp, Glycine max
  unsure (1)..(245): unsure at all n locations; Clone ID: 701148374H1
gttcttggaattcacagatcccaaggtcaaaccttcaacctcagaagcacttagagccaaagcaaaagcnnnnnnnnnnnnnnnnnnnnnnntgtgtcatgaaccgttgctagcatcttcttctgtgtgctctcttggagcctccaacgacccaaaccttggtttcaggaaacatgaggacactgatgactcaacgtatttaagtgataatgatggagagcctgaagatatggtaaagcaagata

SEQ ID NO: 8352 - DNA, 239 bp, Glycine max
  unsure (1)..(239): unsure at all n locations; Clone ID: 701148375H1
ggggagtgggagcaaatgaggcgaatagacaatgaaggtcggcggcgtggtgttatacggcggagttccacgtggcagcgtcgtgcctctgcttctcagccgccgcagagtttctcttcgcgnnnnnnnnnnnnnnnnnnnnnncatttctgaccacgtttctttcgtgaaggatgtagctgcgactcagcctcctcagcatctttcacaatcctcagcattttgaaaaccagangtga

SEQ ID NO: 8353 - DNA, 240 bp, Glycine max
  unsure (1)..(240): unsure at all n locations; Clone ID: 701148378H1
catgaaacggtgatgaanaagaagaggaagaggaggagggtggttttgacttggagtgcagctatgcgattgtacagagagccaagcagcagttattgtataagcttcgtagatttgagaaactggcggagttggatccagtggaacttgagaaaagaatgcaggatcaagaagaggacgaggatgacacatttatggaagaggaagatggtcatgatgagaaaaaccaagcatctgcaa

SEQ ID NO: 8354 - DNA, 244 bp, Glycine max
  Clone ID: 701148379H1
ggccgctctctgagaaaaacagatagtgtgggagagagaagagcggaagagagaatgacgaccaggttcaagaagaacaggaagaagagaggtcacgtcagcgccggacacggccgtatcggaaagcaccgcaagcatcccggaggtcgcggtaacgccggtggcatgcatcaccaccgtatcctcttcgacaagtaccatcctggtttcttcgggaaggtaggcatgcgctacttccacaaat

SEQ ID NO: 8355 - DNA, 248 bp, Glycine max
  Clone ID: 701148382H1
ggaagcagagtaagtgtctcaacaagtgatatgcaaagcatgtctctctgtgcttcactctcctccacagcttcacacctcacttcccttgcctccgtctcttcttccacctctccactttcccgcaaattttctctcactttccgggaaaaaaacagaaccccaattgcaccacctcacaagctccccttcttctcagcaaggcctgcccccaccagagtagtgttggtgaagtctcaggccacagc

SEQ ID NO: 8356 - DNA, 243 bp, Glycine max
  Clone ID: 701148383H1
gggagagggaaaagagttgaagacttgaagtgaagaaagaaagaattgagaaaggatagggtttagggttggcaaaggaaggaagggatggaagcagctgtggtggacgtcggctctaagcttctcaaagcggactttgcaattcctgaccagactcccgccatgataattcccactcagatggaagcaattgctcgatgatggatcatcactgatagttcactggctgacaatgtcaccgtt

SEQ ID NO: 8357 - DNA, 241 bp, Glycine max
  unsure (1)..(241): unsure at all n locations; Clone ID: 701148385H1
ggtgctctgaaaaagtccatgagatattcagagtttcatacccaccttcctcccctttcttataacaagaacaataattaacaccgctagaaaaatcatcatctctttcaccattaaagcaattaggaaagaggtttttgattgaagctggcgatatgnnnnnnnnnnnnnnnnnnnnnnnnnnnctggtgtggatgatagcgacgccgtttagggtgttggggaaagcgagggacatgta

SEQ ID NO: 8358 - DNA, 243 bp, Glycine max
  unsure (1)..(243): unsure at all n locations; Clone ID: 701148386H1
ggggtacgaggatgagccaccagancccgagattgaggaaggtgcagaggaagatttggagaacaaaaacgatgagttaactggagagcctattgacactgaggataaggaagaggaacaaccagtggagcggcctcgaaagacatcaaaatatatgactaagtatgancgtgctaggattttaggtacccgtgctcttcaaatcagtatgaatgcactgtcatggttgatttggagggggaa

SEQ ID NO: 8359 - DNA, 231 bp, Glycine max
  Clone ID: 701148387H1
ggcatcaattcaaaatatatcatcaattataagcatgggtttgtggaacacaacgaatgcagtgtcttgccgctttcacaagtttggtgatgaccaaaagaatctggtcttccaaggtgatgccacgtcttcttccaggggcatagaactcacaaagttagacggtggaggaaaaccagtgggtggcagtgtggggagagtgttatactcttctccagtgcacctttggga

SEQ ID NO: 8360 - DNA, 238 bp, Glycine max
  Clone ID: 701148389H1
aagagacccggaaagggtgggaaccgcttttggaaatccattgggcttggatttaagactcccagggaagccatcgaaggaacctacattgacaagaagtgccccttcactggcaatgtttccatccgtggccgtatcttggctggaacatgtcacagtgctaagatgaacaggactattattgttaggaggaattatctccattttatcaagaagtaccagaggtacgagaaaaggc

SEQ ID NO: 8361 - DNA, 238 bp, Glycine max
  Clone ID: 701148390H1
gggactaccattgctacgccccaaaagcacttttcctccctctgacttttgctgcaactactaccagtacaagttggaatggctcgattttcattggatgagatatcagacactggtgcctttgtgagatctgcttcaacattcagaaattggatttcgagggacccgaattcgctgtttccaccggaatcagggaggtatcatctctatgtatcatatgcttgtcctggggcttcca

SEQ ID NO: 8362 - DNA, 246 bp, Glycine max
  Clone ID: 701148391H1
gacgaaaggaagatctcgatggattcagtgaatcctaaatatatactgaggaactatctctgccagactgcaattgatgctgcagaaataggtgattttggagaggttcgcagcctgctcaaattagtggagcatccgtatgatgagcaaccaggaatggaaaaatatgctcgcttgcccccagcttgggcatatcgaccaggtgtatgcatgctttcttgttcttcatgaggctcccatttaggt

SEQ ID NO: 8363 - DNA, 263 bp, Glycine max
  unsure (1)..(263): unsure at all n locations; Clone ID: 701148392H1
atntatananatanattntacnctgtnnaattnagtgaaaatgcagacagaaaanaatgtgggaattaacattgangccgccaagaaatattgcgtccctcggggcatnggcggaacaaggtncaacagactatacaaagcaagagaanaggtttcatttctctattttaccctntgcccntgtttccatattttatcctttggcatgtaatgtaatcagatacaaatactanacagcnagaagccagcatagtgcatannnt

SEQ ID NO: 8364 - DNA, 240 bp, Glycine max
  Clone ID: 701148393H1
atatcagatatgaacgggatagccataatgattcaaaaggtgacattaagacagacaaggatggctatggtatggtaagcagcagcagccacctgagttggaaagaatcaaaagagtataggggtaagagattttctgatgcccctggtgggagtttggattcctggcatacatcacgtggcaatacacctactgaagttggaaaggacagttcaatggcagaagaaagggactatttgg

SEQ ID NO: 8365 - DNA, 241 bp, Glycine max
  Clone ID: 701148394H1
ggtattagcacaaaacaagcaaaccctaactctaacccttgtcgaaaccccttatccgatcatggctactgatgcccgtgactcgcgtcgcaagtatcgccgatcatcctctccggaggacgtggacagatcctcgaagcgccacaagcaccgccaccacagccaccgccaccgccacgggagcaaaaaacgcgacgaagagattaaattcgatgatcgaacaattggtgcggttcttctc

SEQ ID NO: 8366 - DNA, 243 bp, Glycine max
  Clone ID: 701148395H1
gctttctagaatggaagaatgcaagaagagaggaagtgtccgagtatcagaaacagattggggagcagtatcttgccaatgttgagaaggaattggagagatggcggaatgcaaggaacgcaaggaaagttaacaatgaccagaatttacaggagacaatggacaaagagttggatactcataggctggagcatggtcccaagaaaagaaagatccctgacgaaaacaataatgacgacgatg

SEQ ID NO: 8367 - DNA, 239 bp, Glycine max
  Clone ID: 701148396H1
acacaagtgagtttgttgatcgagataactagaaacagtgtgatgaaaatgaaggtcctgttttcttcgttgctacaattttggtagcatggcaatgccatgcgtacgatatgttccctctccgaatgaacactggctatggtgcccgtactccggaggtgaaatgcgcaagttggaggcttgctgtggaagcacacaacatctttggctttgagaccattcctgaagagtgcgttgaa

SEQ ID NO: 8368 - DNA, 251 bp, Glycine max
  Clone ID: 701148402H1
gggcacaagtttgttgagatagctagaagcaataagatgaaaatgaaagtgcttgttttgtttgttgctacagttttggtagcatatgaatgccatggctcagactaccagaagttccctctccaaatgaaaactgggtttggtgggcaatacagcaatgaggtggcattgcccagttggaggcttggcgtggaagcaaacaacgtagtcaagtggcaaactgttcctgcagcttgcggagagtacataac

SEQ ID NO: 8369 - DNA, 231 bp, Glycine max
  unsure (1)..(231): unsure at all n locations; Clone ID: 701148403H1
ggggtttcacanntcagacacacactcggntctgccttcacaaaaaaattatcgagatccccttttctcctaagaaaagccatggctaagggtcccggtctctactctgacatcggcaagaaagccagggatctgctgttcaaggactaccacagtgaccagangttccaccatcnaccactactcnccnngggnnttgnnaaaaacagcatcnggaacggnanntttttt

SEQ ID NO: 8370 - DNA, 233 bp, Glycine max
  unsure (1)..(233): unsure at all n locations; Clone ID: 701148404H1
ggtgaaaccaaagtggtgtctgacaaggcagtggagaaatttgactggaatcccttacattacatccaagaagtcatctgatgttggtgtggaaaacaaaactgagcagggggactcaatagccatgaaaggaaggattatactgtacacaaaactagggtgccaagaatctaaagcaattaggctatttttgcgtatgaanaggcttagatatgtgaatccacanggtgggt

SEQ ID NO: 8371 - DNA, 234 bp, Glycine max
  unsure (1)..(234): unsure at all n locations; Clone ID: 701148405H1
ggcatcaattcaaaatatatcatcaattataagcatgggtttgtggaacacaacgaatgcagtgtcttgccgctttcacaagtttggtgatgaccaaaagaatctggtcttccanggtgatgccacgtcttcttccaggggcatagaactcacaaagttagacggtggaggaaaaccagtgggtggcagtgtgggganntgtnatactcttctcnagnncncctggggnannnc

SEQ ID NO: 8372 - DNA, 235 bp, Glycine max
  unsure (1)..(235): unsure at all n locations; Clone ID: 701148406H1
gacacattggtatcgatgtcaactctattgtctccaaggcaactgctaggtgggagtggcaaaatggcaaaatagccactgtacatatcagctataactctgcctctaagagactcactgttgctgctttctatcctggcactcaaactgtgacactctcccaggatntggacctcaanaaggtgctcccaaaggggtnngggttggatactgntanangnggacagcaaaaana

SEQ ID NO: 8373 - DNA, 250 bp, Glycine max
  unsure (1)..(250): unsure at all n locations; Clone ID: 701148407H1
gaacgcagccaagaaaagaaaatcctcacccattttcttcgtagccaaacactctgaaattctcagttatgtcgtggcaagcgtatgtggatgatcacctactgtgtgaaatcgaaggtaaccacctcactcacgccgctatcatcggcnaagacggaagcntttgggctcagagcaccaacttccctcagttcaaacctgaggaaatactgccatcaataatgactttaaangngcttggnccanttcc

SEQ ID NO: 8374 - DNA, 119 bp, Glycine max
  Clone ID: 701148408H1
gggtgggatctaggttagcaaccagcgatctggggcttttctttctcccccacaccacacccagattcaaaaactcgctctgctctgctctgcaattccccttccgtttcgtttcgatc

SEQ ID NO: 8375 - DNA, 178 bp, Glycine max
  unsure (1)..(178): unsure at all n locations; Clone ID: 701148409H1
agggtgcccccacaccaacaacattgatggggaacacatcacgtgaaagttttctagttagcatgaagggannnnnnnnnnnnnnnnnnnctacagcactattccttgtctcttccccctcaactgaggagctgctccttgttgtccttgcatcccaatggttgagacactgctatcg

SEQ ID NO: 8376 - DNA, 207 bp, Glycine max
  unsure (1)..(207): unsure at all n locations; Clone ID: 701148410H1
cagcaaagtgacctaaagatcggtcattcntggaggacagcattggcacatggagaactttgaaagcttaaaatggtgttccctcttcactattgttaagacaacagtggcttttgaagtaaatacactcatatgaaattaattaataattttactttttaagacatatgtgttgtatgtgatctattaggccattccgtaaaggga

SEQ ID NO: 8377 - DNA, 235 bp, Glycine max
  unsure (1)..(235): unsure at all n locations; Clone ID: 701148413H1
attaatggctctcatgatgagtggaggagatctcggggtgtcggcttttcctgatggagagagtatttttacatggattggcacaattgaaggtggaaaagggactcagtatgagggtttntcttataaactctccttacgttttcccctagactatccttntaagcccccccnaggnggnnntttnanacantgtgcttncatccaaatgttgaccagtttggcaacatttgtc

SEQ ID NO: 8378 - DNA, 242 bp, Glycine max
  unsure (1)..(242): unsure at all n locations; Clone ID: 701148414H1
ggggatttgaaattcaaaaggcaggcaggcaagtgtccgttgctcaacgattcgatttctgatttatttattatatttaaaaatgttgcaacggcctatataattgaattgaagantnttatcggcgaagaaggnctcaatngagagagngagntggagaccccaggnngagnaggantttatcggccaaggaggcnttcgagaagnttgaaaaaggtgggagaagggacatatgggaaggt

SEQ ID NO: 8379 - DNA, 236 bp, Glycine max
  unsure (1)..(236): unsure at all n locations; Clone ID: 701148415H1
ggttgccacctgcttagtaaaagatccaaaaaagcgtccaagttcagaaaagcttttaaaacaccacttctttaaacaagcacgtgccagcaaatatctagctcgcaccattttaganggccttgntccttnnggngnncgtttaggntgctntnaggncaaacaggggcatttattggngcggancaangnctntacgcgggtaagggncantttctccgcaanaanantttncg

SEQ ID NO: 8380 - DNA, 230 bp, Glycine max
  unsure (1)..(230): unsure at all n locations; Clone ID: 701148416H1
ctccccttctttttctttgtttgcagaggaaaaggaaaattactgggcggcaaaagagagaggaacttgaaaaagaggtatatatattgatacgcactgcacaatttgatggcaaattctaattgcgatgtagaatcaatgganctcttcanccacacacagcatgngattagcnctnaaatnttngcttaattcctnnnagcgatttttnaannnnngcnncnccgnnc

SEQ ID NO: 8381 - DNA, 235 bp, Glycine max
  unsure (1)..(235): unsure at all n locations; Clone ID: 701148417H1
gaccacattccaaaacacaaacacatacattgtagtatcacttttgtctcggaatttgttcttttgagttatggcaagcttaaaggttgcatgtgtggttttgatgtgcatggctgtgatgagtgcaccaatgatggtgcaagcngtgtnatgcaatgatgttnctgngaacctagcacgtgcctatcttcccntgaatcnngggnggatntttccaaaaccgngctnnagngga

SEQ ID NO: 8382 - DNA, 239 bp, Glycine max
  unsure (1)..(239): unsure at all n locations; Clone ID: 701148418H1
ggtagagaaccaaccatgggtcaatactcaattcatcatcagcttgtggccatagtctcattatttatccttttgcttccaaatatccatgggtggggagacgatgggcatgtcattgtttgcaagattgcacaggctcgcctcagtgaagcagctgcagnggctgtgaagaaactgctgccaatatcccgcngaaaatgntttgnccanaagtgttctgggcaaatcatttcnaccat

SEQ ID NO: 8383 - DNA, 233 bp, Glycine max
  unsure (1)..(233): unsure at all n locations; Clone ID: 701148420H1
ggattaacaaaataaaaagtttcatgagtgcggaagagtctgtaaatcgcgacttcgaatggcgagttgcgaataaagcgaagataggaaaagtgcggcaaaggatgtgtgtgtgcttgtttcattgtttgcattgtagagtcggtgatcgaagttgttgaatgctatcttcatttacgaaatganggaggncncagagaaagntaagggcatgacaacaatangntttgggg

SEQ ID NO: 8384 - DNA, 240 bp, Glycine max
  unsure (1)..(240): unsure at all n locations; Clone ID: 701148421H1
gaggcctccaaatattttccttnttagctttgattagagtgggcctangttgttgtnnttctcaatgagaagggcntccactatgcattgcggaacttngggnggcttctgtggtncccttgttgctaattgcnagcttcagttaggcnccttttgttttggcngaaaactgaattccaggnattgaagnnanccangannggangggttnnaaaaganngttannaanccctncnccgg

SEQ ID NO: 8385 - DNA, 232 bp, Glycine max
  unsure (1)..(232): unsure at all n locations; Clone ID: 701148422H1
ggtatcacattggtttattttgaaaccctaaagtttgcccccttacacgttttttgtctcttttttctcccatctttgtttcgagaagcatttgacgaagagaagagacaatgaatcgcggtttcaattcaacccacttcatctcaggtgtttgaagttgagataaaatgagcggaacagagaaagcaggatcaggaaccaccaaaaccccggcggntttcctnaatccatg

SEQ ID NO: 8386 - DNA, 231 bp, Glycine max
  unsure (1)..(231): unsure at all n locations; Clone ID: 701148423H1
gcattttcccttgatctggatgcaactctaaatttggagacactgaattcaataatgacaattggtcatagtagagttccggtttatgcaggagaaaaaaccaatattattgggcttgttctggttaaaaatctatttatggttgattcaaaggctgcagtncctctaagaaaaatgctcatcagaaaancccnngtgttanaagagaccctccntctnngngganacnng

SEQ ID NO: 8387 - DNA, 228 bp, Glycine max
  unsure (1)..(228): unsure at all n locations; Clone ID: 701148424H1
ggcacaagtgagtttgttgatcgagataactagaaacagtgtgatgaaaatgaaggtcctgttttcttcgttgctacaattttggtagcatggcaatgccatgtgtacgatatgttccctctccgaatgaacactgnctatggtgcccgtactccggaggtgaaatgcgcaanttggaggcttgcngtgnaancacacaacncttnggnttggaccnntccggggggg

SEQ ID NO: 8388 - DNA, 231 bp, Glycine max
  unsure (1)..(231): unsure at all n locations; Clone ID: 701148425H1
ggttgctgacaagccaatcctttgtgtaggtgctcaaccctagtaagccgcaatggtgaagtactcaagggagcctgacaatccaactaagtcttgcaaggctagaggcgccgaccttagggttcattttaagaacacaagggaaactgcctttgnaatcaggaanttgcccttggncaaggctaaaaggtattggaagatgttcttgcccacaagcaggcattccattca

SEQ ID NO: 8389 - DNA, 235 bp, Glycine max
  unsure (1)..(235): unsure at all n locations; Clone ID: 701148426H1
ccacatggaatatctaagctttgattccgttgataaatcagaaaccagtgaagattcgtatttccaatcaattactactgaattccttaattcattgaacacatccggtttgccaactcattctatcaaacttaaaattggaagtcctataatgttgttaaggaacctcgaccaaaatcaaggtctatgtaatggtactagattagnggtaacaagnnggnaaacctgtatttgc

SEQ ID NO: 8390 - DNA, 255 bp, Glycine max
  unsure (1)..(255): unsure at all n locations; Clone ID: 701148427H1
cctcagctgctctcactgtagacccttcactccacttgtcaagagcttctagcattgtgatgttgattgcatatgtagtctacattgtctttcaactgtggacacacaggcagttatttgaagccgaagatgagggtgaggatggtgaggacggtgaagaagaacaagctgtgattggattatncagtggcattgcttggttggtagggatgantgtgtcaatgccgtgtnnnctgaaaatggggggaaacatng

SEQ ID NO: 8391 - DNA, 231 bp, Glycine max
  unsure (1)..(231): unsure at all n locations; Clone ID: 701148428H1
gaggcctccaaatattttcctttttagctttgattagagtggcctagttgttgtttttctcaatgagaagggcttccactatgcattgcgcactttggcgcttctgtgttcccttgttgctacttgctagcttcagttatgcaccttttgttttggcgacaactgaaatttcagggaatgaagtgagcactgatggaaaggttttaaatgaagagttagcanaacctaatc

SEQ ID NO: 8392 - DNA, 241 bp, Glycine max
  unsure (1)..(241): unsure at all n locations; Clone ID: 701148429H1
ggtgcaattgaaagagagatttgatagcctcaactcaagtaagggttttctctttgagaaaatcgtatcttacaccttttggtgaccactttgagtgagagaagagaaattaagagagatactcaaattagattcaagagagatggccatcaaccatganncttgggcnncattttcggtcttctaggcaacgtgatcctcctttagggtgncccncgcncnntgncnacttnaaanaaaa

SEQ ID NO: 8393 - DNA, 232 bp, Glycine max
  unsure (1)..(232): unsure at all n locations; Clone ID: 701148430H1
ggttcacttcaagtctcaagtccctcttcacaaaatcccaattggcactaagcagtggcggtattacgatttcggtccgaaagctgtgcctccccttatatgccttcctggaaccgcaggaactgctgatgannatnttaacnngtcatgtcantggnnnanaagggntancggggcaanngggnganaanccncgggtagggaaaaatncggngggggttccannttttaa

SEQ ID NO: 8394 - DNA, 235 bp, Glycine max
  Clone ID: 701148432H1
atactttcatttttcagttttgttatacaactttttctgtagtatattatatataacatatctccagttcattttgtataattatatgtatgaatttttggtttgagtattgtagctgctatttgctggggaataggaaaacctgtgactgtggaagagatacaagtagaccctcccaaagccaccgaagttcgagttaagatgctttgtgccagtatatgctccacagacatct

SEQ ID NO: 8395 - DNA, 235 bp, Glycine max
  Clone ID: 701148433H1
ggtctcgtggaagtgtaagcaagcaaaaccctagcggcgcctgctttctttgttcgtgttttgcatcaggatggagtctcaggtgaagcacgcacttgttgtcaaagttatgggtcgtactgggtccggaggacaagtgacccaggttagagtgaagtttttggatgatcagaaccgtcacatcatgaggatgtgaaaggacctgtgagagaaggagacttctcaccctactcga

SEQ ID NO: 8396 - DNA, 238 bp, Glycine max
  unsure (1)..(238): unsure at all n locations; Clone ID: 701148435H1
gactcgtggcagttgtgtgacacagaaattaagctagagcttcatagtttcttcttcttttctcaccttccttctctcccttcagacaaagggacaaaaaatcnnnnnnnnnnnnnnnnnnnnnnnnnttccaaaaccatgtcccacagtcatctaagtttcgcctttgggattctaggtaacattgcccccttcgtgtgtttctggcaccactaccaacnttttatagagtgngtaa

SEQ ID NO: 8397 - DNA, 233 bp, Glycine max
  unsure (1)..(233): unsure at all n locations; Clone ID: 701148436H1
ggcgcattgaacgaaaattagggtttgtagtgtagcaggaacaagcagcaatggcgccgaaggtaacacgcaaggttagcagaaaccccgaattgataaggggaattggaaagtactcgaggtcgcagatgtaccacaagaggggcatttgggctatcaaggccaaaaatggtggcntttnactngccangacccnaacccccaanntgaancnccggtgaaaannntntttt

SEQ ID NO: 8398 - DNA, 238 bp, Glycine max
  unsure (1)..(238): unsure at all n locations; Clone ID: 701148437H1
aagctaagaggcggcttcattcatttaaaggaaatagtcttaagacatgggatgaggttatggagaaatttctgaagaaatattttcctgagtctaagactgcagaaggcaaagccaccatctcttatttncaccaatttcctgatgaatctttgagtgaggccttggaaanattctgtggttaattgagaaanccccccccnctncggggttcnaaanccnnancgngtccnttttt

SEQ ID NO: 8399 - DNA, 239 bp, Glycine max
  unsure (1)..(239): unsure at all n locations; Clone ID: 701148438H1
aggttactacctacccattactgtaaggggcttttatttttatgtgatctttgttactaatttgtgcttattaatttacatacatgcatctcgtttttnatttttattgagatgaaaataaatnggtataattgatctncgggagtgctattttgatcgattcngagtnatgctaaggagcgatcgtgtncataaaattgcggtgtgttgtcngtggcnagggcnnccggcgcnnanaa

SEQ ID NO: 8400 - DNA, 231 bp, Glycine max
  unsure (1)..(231): unsure at all n locations; Clone ID: 701148439H1
gactcactataaacattaattagaaaaagaaaacatattacttaaattgctttgatttttgtcttctaatgtgtttgggtttttttattagacaaaaataaataggttaaattataatttttaatttgtaattttattttttatctttaaatctgcaaattttgtncttcaatattctaaattatgcaattctagtccgtccgttgactatcggtggacctttccatgcct

SEQ ID NO: 8401 - DNA, 257 bp, Glycine max
  Clone ID: 701148441H1
attcaaatgttgctgcttctgcaaatgtttcacttcaaatgaaagcagacttcttatagattatttcattggtctaccccacttgagacttggactgtggtcatgtctcccattaaagctattttattgcaatgagttttagagttgctgctattaccttgctgtgagggcatgtatgttctaaacttggagatcatttctgaatgaacacaggattacaatttaaatgtggtattgaaacagttcggtggccatgt

SEQ ID NO: 8402 - DNA, 233 bp, Glycine max
  unsure (1)..(233): unsure at all n locations; Clone ID: 701148442H1
ggattccacgaccttattttggagccgcggtggcggtagcggtggccggcgattgtagcggcgtaggagcaagaaatggttttatgttgtgaggaagattgttaaactgtgggaatatgtcattgagaagcatagtccgtgaactcaaggagatgagagatggaataggagncccntcaaggcggggtgccanaaagcaagcatcgnctcagtcggacaangtcacatgtccc

SEQ ID NO: 8403 - DNA, 231 bp, Glycine max
  unsure (1)..(231): unsure at all n locations; Clone ID: 701148444H1
tatcacagaagcaacaatcaatatataattttcaatgttctgtttccgaggctaatttgggtgtgcctggggagaatgctactgcttcaagatatccacctgattttctggatagcaatcattcaacttctcttccatcttttgggggatcaagaatatctgctcactataatccttatgcatcaacctttgagaaaccactaactttnaaattcagttcaagtattttta

SEQ ID NO: 8404 - DNA, 232 bp, Glycine max
  unsure (1)..(232): unsure at all n locations; Clone ID: 701148445H1
ggagccaccaccggagatagtgctcaaagttgatatgcattgtgaggcctgtgcaaggaaagttgcaaaagcattgaaaggattccaaggagtggaagaggtgagtgcggatagcaggacaagcaaagtggtagtgaaaggaaaggcagctgaccccataaaggtgtgtgagaggctacaaaagaaaagtggtaagaaagtggagctaatttcacccttgccaaaacctcna

SEQ ID NO: 8405 - DNA, 230 bp, Glycine max
  unsure (1)..(230): unsure at all n locations; Clone ID: 701148447H1
ggaaactgtaaggcctacgggtcggtggccccaaaccatcctctgctaagggacacagtagactgtgtgctgtgcaagagctgcataatatagggacataattaccctccatccatcattttngctacttcttnacnanactttaaataatttnccntctnnaaaattatggacgntcncnagaatntngggnaaatgtnntgttagaggggcaagggaacagacaaaag

SEQ ID NO: 8406 - DNA, 233 bp, Glycine max
  unsure (1)..(233): unsure at all n locations; Clone ID: 701148448H1
ggcacaagtgagtttgttgatcgagataactagaaacagtgtgatgaaaatgaaggtccttgttttcttcgttgctacaattttggtagcatggcaatgccatgcgtacgatatgttccctctccgaatgaacactggctatggtgcccgtactccggaggtgaaatgcgcaagttggaggcttgctgtggaagcacacaacatctttggctttgagaccattcctgaggnng

SEQ ID NO: 8407 - DNA, 232 bp, Glycine max
  unsure (1)..(232): unsure at all n locations; Clone ID: 701148449H1
aaagagacccggaaagggtgggaaccgcttttggaaatccattgggcttggatttaagactcccagggaagccatcgaaggaacctacattgacaagaagtgccccttcactggcaatgtttccatccgtggccgtatcttggctggaacatgtcacagtgctaagatgaacaggactattattgttaggaggatttatcctccattttatcagagtaccagngtacgggaa

SEQ ID NO: 8408 - DNA, 209 bp, Glycine max
  unsure (1)..(209): unsure at all n locations; Clone ID: 701148450H1
aaggttgattttcgacatgctttcatagatttttacccagcttggggtaaatctttctaaagtaggagcttctgaggtcataaagacatgccctgctgcaatgggatttgcatttgctgctggaacaacagatggacctggagcttttgactttaagcaaggtgatgatcagggaatctttctggaaacctgnncggnaattntnaang

SEQ ID NO: 8409 - DNA, 226 bp, Glycine max
  unsure (1)..(226): unsure at all n locations; Clone ID: 701148451H1
ggaaggaaaaagtacaaggacgtagctgatgcagcacaagcagcttttgagtcagcagaatatgctgcagctgctgcaagagcagcattggaactctcccgatctgaatcacatgatccctgatgatcattatnngcccaagactccaaccaagaaaagtggaggatggacatgatgatgtgagnctccantgggannaaagggaatcccncgtaancnncngggg

SEQ ID NO: 8410 - DNA, 231 bp, Glycine max
  unsure (1)..(231): unsure at all n locations; Clone ID: 701148452H1
gactcctggcagcatatactcataaatcacatagctagttgtttaaagtaagagagaagaaagaagcaaatggcaaactttccagttgttgacatggggaagcttaacaccgaagagagacctgcagccatggagattataaaagatgcctgtgagaactggggtttctttgagttggtgaaccatgggatatccattgagcttatggacacagtggagannctcacaaaa

SEQ ID NO: 8411 - DNA, 235 bp, Glycine max
  unsure (1)..(235): unsure at all n locations; Clone ID: 701148453H1
ggggtgcagtgtttagagtagaagggaacgtcataccttcacacgagattggacaaaacctaatcatttcaatattcttttcgtgtcttacattatacacacagcctaacattaggctggttttatgcgttgcttttcatgctatttaaattactaattancaanttaatacgantntttncnccttncccncccnggggttatgaactantaactattattganattgcnnncc

SEQ ID NO: 8412 - DNA, 240 bp, Glycine max
  unsure (1)..(240): unsure at all n locations; Clone ID: 701148454H1
ggagtccaaaggtttcgaaacgcaatgtccactctgcttcactccgctcccacttcttctccttccttctctcggatcatcactcctcgtttcgctttcgctccaatcactcgcatctctctccgaaacggcgtccgtagcaaggcgatcgaagcagtgaagttggagaatggaaggccgagcgcgaggatttcntanncagnggnggggaaaacgnnttncgattagtgggggccaang

SEQ ID NO: 8413 - DNA, 216 bp, Glycine max
  unsure (1)..(216): unsure at all n locations; Clone ID: 701148455H1
gtattggtttttcattcctctccttgccctgtaattggatcgagtaaaagtttgttctgctttgattaacacatctttgtatatctttatatctgaatacaggaatgacagcactgaggtcgctaaatgtttcaaattccncgtatanccantganggnctacggnttttgacccttnaaaaannttnnccccctntctcacgggggantnngggg

SEQ ID NO: 8414 - DNA, 237 bp, Glycine max
  unsure (1)..(237): unsure at all n locations; Clone ID: 701148456H1
gagantcagaatanaggtcacttccaactttcatgccatctgcattgnctatcctcntctctcgttgaggtcccaaaaacagacttataaaatcttcaaattgatgctgnaagaaacacgcactcaattatttccccaactttngaaacgangantttgaaanngaagagaaggcnnncccanntggggtttgaaaagggcaatagccgcggcaaacaagnntttgttttnggncgc

SEQ ID NO: 8415 - DNA, 227 bp, Glycine max
  unsure (1)..(227): unsure at all n locations; Clone ID: 701148457H1
gtgttaaatttcttatattgatcatgtgaaaattaaccgaagaagaagagtcatgtactcacacagaataaaaaaatattaaattatcattaatcacaaatcattttatgttgtcataaatttgttaatttttattataattaaataccttaaaattttagattgaaattttaatttcccatattaatatttatttaaaaaatgggntccaaaaaanagncccgggg

SEQ ID NO: 8416 - DNA, 234 bp, Glycine max
  unsure (1)..(234): unsure at all n locations; Clone ID: 701148458H1
cttgggaggtgagatgtatgattgaattttataagagtataataaatgaacacattattaaccatttttagactattataattaaaataatgtttccagtataaaaaaatatttctggctaccttactgcagaagattgttactgctaaatggaagactgctacagcagangagaagaagccttatgaggggatntaccatgcggggaaagacgcttntttgcnggttttaaaa

SEQ ID NO: 8417 - DNA, 230 bp, Glycine max
  unsure (1)..(230): unsure at all n locations; Clone ID: 701148459H1
gggattcgttggaaaaaagtaagactattcggtgataacatgtctgcttgcttttttgggacggcttttttgttaagattttgggttgaaaaggttgaggaagatgcttatgcttgcaacttttttttaaacccattttagcaccaagtataaaaagtngttcttggtcttgtttccaagtgttgaggtaggtgataggggttttgagcatgtgagtgattcatgcctct

SEQ ID NO: 8418 - DNA, 228 bp, Glycine max
  unsure (1)..(228): unsure at all n locations; Clone ID: 701148460H1
ggaagagggttgagttcagagttgaaacttgagagagtgtcgttgattccaatttacgacggaggagtgaggaatcacaatctccaccggcgaaacctgtaactgttggcgacgctcaacactcgcactacgccgatagtgatgnagagtgcttttgcaagcgcctctgcgattactgaccagaggcagaagatagagcagtataagcaatacttgctgctgtcattt

SEQ ID NO: 8419 - DNA, 147 bp, Glycine max
  unsure (1)..(147): unsure at all n locations; Clone ID: 701148461H1
cagtantcaagtctagtatttctatcggtacttaattatgtcattgtcgtttaatgtnattgcnatttatntnatgtgtactttgtctcantcacnanacaattacnaaaacctagctcttagtnaaatanttacatganatccctc

SEQ ID NO: 8420 - DNA, 233 bp, Glycine max
  unsure (1)..(233): unsure at all n locations; Clone ID: 701148464H1
aataaagaaaatgtcacggtaaaattgcacacttcgatcaaatgggcttaactctctaacaagtccccagtggagtcgccatctgtcgcaatgtgggccacaatgggacgacgaataaaatatttagataantaantaanttgttttccaaaaaatgaaaaacttgggaagtcgccaccaacatttatttaaggatgttaccatttttagaaaagactttagttttatgataa

SEQ ID NO: 8421 - DNA, 234 bp, Glycine max
  unsure (1)..(234): unsure at all n locations; Clone ID: 701148465H1
ggctcgaagaagtcccattcattgcactgatagcagcgatggggatcgatcttaaggctgggggtaagagcaaaaagaccaaaagaacagcaccanagtccaatganatctacctcaaattacttgtcaagctttatcgatnccttgttcgaaggacagacagcaatttcaatgcngtgatactcaagngcttnttcatgngcaaggttaacnagcctccaatttctttgtcag

SEQ ID NO: 8422 - DNA, 140 bp, Glycine max
  Clone ID: 701148466H1
ggaaggaaaaagtacaaggacgtagctgatgcagcacaagcagcttttgagtcagcagaatatgctgcagctgctgcaagagcagcattggaactctcccgatctgaatcacatgatcctgatgatcattatagtccaag

SEQ ID NO: 8423 - DNA, 231 bp, Glycine max
  unsure (1)..(231): unsure at all n locations; Clone ID: 701148467H1
ctcccatgaacaaaactgctcaaaacaaaatgactcatttaacatggtttgaacttgattgaaatgtgtggtatgtgactcaaaatcactaaaggcacaaatgggaaggattctagtgatgttgtcataactgantncagnnnattataactaaattcagttgtcataactgaattggtctnagtaccaagtatagtctttgttcctagagctagcaactagagtatatta

SEQ ID NO: 8424 - DNA, 228 bp, Glycine max
  unsure (1)..(228): unsure at all n locations; Clone ID: 701148468H1
ggacgacgaagaaacgaatcaggttgatcaaatacgcgagtaggagtggcacaatgtgttgagtgtggagcaagaacgtttttatcaatggcggaatgtgtggcttctgcattctgtgttaagctgaatncgcagagangncntgttagagagaggggcttcccgggccatnttnnaantcnccagtccttaaaagantttccccnaaatggggtttnntttnttcct

SEQ ID NO: 8425 - DNA, 236 bp, Glycine max
  unsure (1)..(236): unsure at all n locations; Clone ID: 701148469H1
gacacacaacatttacatttctctctccagtatggcttctactcacaatgagttttatgcacttatgctagtggtggtggttggctccatggtggcttcctgtggtgctaacttcaaccaagactttgatctaacatggggtgatcaccgtgctangatattcaatggtggtcagcttctatctctttctcgggaaaaagtctcnggctcnggnttccatccaagaaagnttnntg

SEQ ID NO: 8426 - DNA, 212 bp, Glycine max
  unsure (1)..(212): unsure at all n locations; Clone ID: 701148470H1
ggacactaaacaagttnccaagaagagcatcactgaantaacaaagcaaccctatgtcgaaggtggtttgtgtcaccggagccagcggcgccatcggatcatgggtggtcctactcctcctccagcgtggttacnccgtccatgccancgtccangatatcgnggatgaanatgagacgaaanntttggagaaaatgganggcgcantnttt

SEQ ID NO: 8427 - DNA, 235 bp, Glycine max
  unsure (1)..(235): unsure at all n locations; Clone ID: 701148471H1
ttatataggttttcaaccccaaagcttacaaatctgnnttaagtccaagcccataaatanaataaaatcttgacaggataagataagatttgatcaaataaantctagataaggataagatattatnggntgaaataatanctngatgagntaanntcnggatnangntagntttgggaaaaaaaaaattggccggcncctctcnnggcccaggncccttccgggntnanncccc

SEQ ID NO: 8428 - DNA, 115 bp, Glycine max
  Clone ID: 701148472H1
gacacagaacaatagtagcaagcagagccccaagacgagcttcaccttgcgccgaagggccacagatggttgaaaccgatatggatgccgaaactgttgcaaatgtggttccacc

SEQ ID NO: 8429 - DNA, 244 bp, Glycine max
  unsure (1)..(244): unsure at all n locations; Clone ID: 701148474H1
ggcacaaaaatacaatacaaaacaaaacagagcaaagagagagtgtgtgaaaagtgaaacaaaaaacagaacaacaatggcgacacttaaggttcctcagcctcttccccccgttgcagatgattgtgagcagctccgaaaagccttctcaggttggggaactaacgaggagctgattgtatcgatcttggctcataggantgctgctcagnggaannttatnaganaanttcnncccanncnt

SEQ ID NO: 8430 - DNA, 231 bp, Glycine max
  unsure (1)..(231): unsure at all n locations; Clone ID: 701148475H1
ggacaaagagagtgccaggtgtgtgaaggagctcgttacttgggatccagttgttgttattcttaatcggagatcgcagcggcggattgcatgagcggcggatcggaggcggtgtgagcagaggatcgaaagatgtctgcgatcatagtgtgcgggaagagatcagcgctgttccaagaccttcctcctnnnaggatccgttgttncctcttcttcttctcaatntaaacc

SEQ ID NO: 8431 - DNA, 229 bp, Glycine max
  Clone ID: 701148476H1
ggggagagaatagagaagagagatggatccagacgcgttggcaaaggcattcgtggagcactactacagcaccttcgacaccaacaggaacggcttagcgaatctctaccaggagggttccatgctcactttcgaagggcagaagatccaaggcgcttccaacatcgttgccaagctcacctccctcccttttcagcagtgccaccactcatctccaccgtcgatgcca

SEQ ID NO: 8432 - DNA, 227 bp, Glycine max
  unsure (1)..(227): unsure at all n locations; Clone ID: 701148477H1
gggggttgggagaggagagagagtgggagtcagagagcaaagtaaagcagccgattggactttgagtccgtttgttccttggttttgttttcttcagatatttttctttttttcgttttttctgtcgtttcaccccaaacagatttttggtnncnaaacaggcctcanctctatttttttctncnccngnngaacagaagaaacacgtncgttncttnccnccnang

SEQ ID NO: 8433 - DNA, 227 bp, Glycine max
  unsure (1)..(227): unsure at all n locations; Clone ID: 701148478H1
gtggtgaaggaggtagcacagaggaagaggtggttgcggaagaggagggagaaagagaggaccttctcaatgtttttttttttnctttaatnaattttggggggtttaanctgccagaaattttaanttggttttnnaacccaacnttgacnatttttngnncanncanantccncttannaatttttnaccatccccccnnntctttggnggggggnngnaaaaaa

SEQ ID NO: 8434 - DNA, 235 bp, Glycine max
  unsure (1)..(235): unsure at all n locations; Clone ID: 701148479H1
gaacaacggaacaaaattttctgtgttccaattttgctttggacacaacaaaacggtagcttgagctttgaaacatagcagcattcacttttcacgagagaacaaacaaggccttcttcttcaccttttcacattgtgttgcatcatcaccatccatttccattgttagctcctcttaatggttatggcaactgtggggtctgaacctgcttgtgcaagaacggttnntgatgtt

SEQ ID NO: 8435 - DNA, 241 bp, Glycine max
  unsure (1)..(241): unsure at all n locations; Clone ID: 701148480H1
gaccacagactgtttttcttccanctctnggtacanangccanaatggtgtcaccatatctgattctntacatnactcttcnnangntttngtngtacnnctannantatcgcagagngntcaagaactcaacccttccacctggtcctagaggccttcccataatngggaatcttcatcagctaaatagttcttctctttatctgcaactatggcgactctcaaagananacggtcntct

SEQ ID NO: 8436 - DNA, 234 bp, Glycine max
  unsure (1)..(234): unsure at all n locations; Clone ID: 701148481H1
gacaacacaagtattcaaaatatctctatatattccctccatttctgagaatggcgaaggctgcggagaagaagccagcggctgagaagtctccggcggagaagaagcctaaggcagagaaaaagattccgaaggaaggcggtggcgagannncgaagaagaggtcgaagaagagcgtggagacctacangatctatatcttcaaggtgctgaagcaggtacaccctgacatcg

SEQ ID NO: 8437 - DNA, 229 bp, Glycine max
  unsure (1)..(229): unsure at all n locations; Clone ID: 701148482H1
gacaatacagagtgagttgttgctccttcgccacaactctctgccaacatgggtatctccagagattctatgcacaagaggcgtgccactggtggcaagaagaaggcctggaggaaaaagagaaagtatgagcttggtcgccagcctgctaacactaagctgtcaagcaacaagacagtcaggngcnccgtntaaggnggggnaatttaannggggggctttnnnttnc

SEQ ID NO: 8438 - DNA, 240 bp, Glycine max
  unsure (1)..(240): unsure at all n locations; Clone ID: 701148486H1
ggggaaggaagaaggggtatgttgagttcgaggagtcgccgccggacgatttcgatccggcgcatccgtacaaggacccggtggcgatgctggagatgagggagcacatcgtgagggagaagtggatccaaatcgngaaggcnaagatcattagggagaagctccgntggtgctaccgcatcgaaggnttcaacnacctccaaaantgccgcaacttcgtaaacaattntnnggnncccc

SEQ ID NO: 8439 - DNA, 224 bp, Glycine max
  unsure (1)..(224): unsure at all n locations; Clone ID: 701148487H1
ggcacaagtttgttgagatagctagaagcaataagatgaaaatgaaagtgcttgttttgtttgttgctacagttttggtagcatatgaatgccatggctcagactaccagaagttccctctccaaatgaaaactgggtttggtgggcaatacagcaatgaggtggcatgtgccagttggaggcttggcgtggaannaaacacgtttccaggggnannttttccc

SEQ ID NO: 8440 - DNA, 239 bp, Glycine max
  unsure (1)..(239): unsure at all n locations; Clone ID: 701148488H1
gtggtttttgaatttntttttggattgtttttttccaagttgctgcatcgcgcttgcaaatggaggtttggttcctgtcagtgaagctctgaaggatattggtatgaatggaaagttatacctagtgctgagncanaagcttnnangggttctttnatgcaggaacaggttgtccgncccattnctnnaaattngctanaaaattttggtnaannanattcccattncgggnggggggg

SEQ ID NO: 8441 - DNA, 230 bp, Glycine max
  unsure (1)..(230): unsure at all n locations; Clone ID: 701148489H1
ggagaaagagaaagcatagaacaggaaacgaaaaaacagagtacccgacagnatttgaanacaaaggctgaaatttgaagaaactganatcattgggtgtgnaatatatagcagaggttgtcctgctagtcgatgatttgaaattactttctgcgagtcccccgtngnagnttttctcatgaagagttttaaancgtngtagaccnctgggagcnncctggggttgttng

SEQ ID NO: 8442 - DNA, 228 bp, Glycine max
  unsure (1)..(228): unsure at all n locations; Clone ID: 701148490H1
gtgtgacacaagctaaagataaggacacgagttgctgaagattccctcatgccttgttcgcaatttttgttatgacaacctaggatttatttatcaattccattacttttattctctgaatatagtgcatgtacagctggccaatgattggcagccatattcctcagctgtattatgaatgaatgantcggggattataacccaancattagtttccanngncacggg

SEQ ID NO: 8443 - DNA, 232 bp, Glycine max
  unsure (1)..(232): unsure at all n locations; Clone ID: 701148492H1
ggatgtgaggtggtttgtgatgggggatgatgacacggtttttgtggcagaaaatttggtgaaagtgttgcaaaaatatgaccacaatcagttttattacattgggagttcctcggagagtcacttgcaaaacatttatttttcttataatanggcttatgggggtggtggttttgccattagttatcccctggntgtggcatgggananncccnagggggttccagggtcc

SEQ ID NO: 8444 - DNA, 228 bp, Glycine max
  unsure (1)..(228): unsure at all n locations; Clone ID: 701148494H1
ggattatacgggaggcatctccatgtatatagctggcctgggggcgaactgagacaaacaatggaccttggtgattcagggcttatacccttagagataaggtttttgcatgatcctgctaaagatacaggttttgtcggcagtgcattgacaagtaacatgatacgattttttaagacccaagatgaatcatggagccatggggtngccatnncggtaacaatngaa

SEQ ID NO: 8445 - DNA, 252 bp, Glycine max
  unsure (1)..(252): unsure at all n locations; Clone ID: 701148495H1
ggcatatccaaaggaacaaaaatattattaagatgatcaacattattggagcacttgttctactctttgcatttctcttccncagttgtgtgtatgcacaagacacaacaacccttgtggccgcaatcataactttggtggattctgctgtgggatgtanngcaacaaaggactaatctttcccaaccccttttcnanggcngataancccnccctaaggggagggacttgggnaaanccaccaancctnng

SEQ ID NO: 8446 - DNA, 241 bp, Glycine max
  Clone ID: 701148496H1
ggaagaacatgggaccgattggcgtgtgggctataatgcaggtaatgatatggagaatgcagttcaggcaatgaagaaagcagtctcgacaaatctagcaggaaggaggccagacccctttactctggttgcatgtgttaaatacctgaaagaaaaaggagacttggatttagcccttgagattcttaagttatgcatagagaacagccatatctcagtcacttcctatgatggactggta

SEQ ID NO: 8447 - DNA, 267 bp, Glycine max
  unsure (1)..(267): unsure at all n locations; Clone ID: 701148501H1
gtccccaaataaagatccaaacagaaacaggaactttcttcancacaccaaagcaaaggagctctaaacaatttatgaacacctgttttcttccagggggcattaccccaaaatgnaaaccttcatgaaagtcacagaaaaaatgantttacataggcgttnaacnattattatntggtggannttcgaaaccntttggncaatggngtaaactaaactnccanttccagcaggntggaatctccncattataaccccnaaaggtca

SEQ ID NO: 8448 - DNA, 247 bp, Glycine max
  unsure (1)..(247): unsure at all n locations; Clone ID: 701148502H1
acacaagagatgggcttctcctcttcttactcccttacaagatgggcaaattcaatctgtcccatagagttgttttggcaccgctgaccagacagaggtcttacgacaacgtcccacaaccccatggcnatcctctatnatncccaaagacnttcaanggngggcttttcnatnanggaacccggggnttntnaaaggggaaggggttgnaaacccccnggaaaagggcgaaaaaanttttttttgg

SEQ ID NO: 8449 - DNA, 258 bp, Glycine max
  unsure (1)..(258): unsure at all n locations; Clone ID: 701148503H1
aagaggaaaagaaaaacaaacaaacactgcttgaggttcaacgaacgcacagagtcgatcatactgaaagtgattaagggccgagttgcatgagttgaatcggcggaaatgggagctagtcgaaagcttcagggcgagatngatcgtgttccacaagaaggttcagnaaggccncnaatctncgatancancnggaanagggttnncgacannanntngnccaaccanangganantccanggntnccctnaaaaang

SEQ ID NO: 8450 - DNA, 260 bp, Glycine max
  unsure (1)..(260): unsure at all n locations; Clone ID: 701148505H1
gacaactatgctattatgtttattattcagatagtctttnttttttgtattaaaaggggtgaaaaccaaaagaattccaaaatcataatttcaaaaganttccacaagagcacctngcttncataggncggnggttncncaaaacccaaaacactcatnttcccataatanaantnngtnatttgngtnaaaaatntcatgngngnnttcaaccccanattttcctnaaccctnttnccccntacncntcaangnccttt

SEQ ID NO: 8451 - DNA, 156 bp, Glycine max
  unsure (1)..(156): unsure at all n locations; Clone ID: 701148506H1
taagcggtgtcttagttggtgaaagtttcaagagcttgacgaagttgcaggtggtggatttcagnnccaaccaattgngtantgctntnccctctgtnttcntcnancttccgtcgttncagcagttgacantgncctnnaangatnncacgaatc

SEQ ID NO: 8452 - DNA, 271 bp, Glycine max
  unsure (1)..(271): unsure at all n locations; Clone ID: 701148507H1
gctaagtagcaaattgtttcagtagtcatgttttttgtactaattttatttgttttcaactcagtttaaggtggttgtgttattgttcacatggagaaaataaacagtgggggttcttccatcagaaggcgttcattgagcatatcaagtcacataagccatcatacagacaatgatgatgatgctgaatgtgagagtgtttcagaggctggagacattggaaatcnnggtacctntccngaaagnggaanttccgctggcctttgganaa

SEQ ID NO: 8453 - DNA, 256 bp, Glycine max
  unsure (1)..(256): unsure at all n locations; Clone ID: 701148508H1
gaattaattaaaagagtcttataattagagacaaatgaagtatttatgatttatgggtgattttgtttaaacttaaaaaataattttaaaataggtgatttttaatttttttttaataaatagatagaattacttatttcaagtaaatagtttatccaaacatattagaaaanaaataaaatttttattttatttaaaancaangcttacttgaaaacnataagattaggcaaccaacccctatattaanaggaaa

SEQ ID NO: 8454 - DNA, 255 bp, Glycine max
  unsure (1)..(255): unsure at all n locations; Clone ID: 701148509H1
gtccccaaataaagatccaaacagaaacaggaactttcttcaccacaccaaagcaaaggagctctaaacaatttatgaacacctgttttcttccagggggcattaccccaaaatgtaaaccttcatgaaagtcacagaaaaantgantttncatatgcngtttancaatttttatgggnggagttncgaanccttangccnngntnaacntacnctcccncttcgngggntgttctctcanaataacccncaana

SEQ ID NO: 8455 - DNA, 263 bp, Glycine max
  unsure (1)..(263): unsure at all n locations; Clone ID: 701148510H1
gtacactgactcaactggagcatacacaatgtacgtggacgaggatcccgcagatcaaatatgcagtgccaagcttgtaagcagccctcaccctcaatgcaaggaagtcaccccgggccgcgacgaagccgtcgttattctcacccgctacaacggcattgcatccgatgataggttcgcnaatgccatgggcttcatgtctcaggaggttgcttctggtgtcncgnggctccncaggaannngggggnttcnnaanttnttt

SEQ ID NO: 8456 - DNA, 242 bp, Glycine max
  unsure (1)..(242): unsure at all n locations; Clone ID: 701148512H1
gttatggacactaangtctctccctgctctcctactttctctcctcttctttgcaagagtcttagggttgcagtggcagtggcttgtcctcatangggcccttggncttnaaatccagcttcctcantacctcactcctccaancaaganctcntctaaggaagttctncatccttctgcnncatggtnntggnttaancctcncaaaggggganagttnnttggggacacantgggccacc

SEQ ID NO: 8457 - DNA, 234 bp, Glycine max
  unsure (1)..(234): unsure at all n locations; Clone ID: 701148513H1
ggaccaccactactacccaagtgaaaaagcaactangcataatgtgtaaganagggagaaaaacaagtgctgtgtagagagaaaaatggctaggtggtgcatgatcttggtggttctgctcttgccgtggttgcaagtgccagaaacatgcccaatgacgctggtttggaggnccagaagaacttcctggggtangggttttcggnatngacaacantcccttcgcnggggngg

SEQ ID NO: 8458 - DNA, 127 bp, Glycine max
  unsure (1)..(127): unsure at all n locations; Clone ID: 701148515H1
gaatgcaaatggtgaaaagttgcaacggtcatacaacgagcttgtggagtataagcttgttctgcagaaggcnggtgagtttttccactccagctcaaagtctcagccttagagcagcagaganaac

SEQ ID NO: 8459 - DNA, 251 bp, Glycine max
  unsure (1)..(251): unsure at all n locations; Clone ID: 701148517H1
gataactagtcgtagtattatttcatcgattctctcccttctctttctctctgcgacaccagatgatggagacgacggcgaagcgaaacgctgtcgtttcgccaatcgcggcgttgttgttggtggtgctactcgcggcgagtgtggtggtggaggctcaggagaactcggacgtgnagacgctggtgaagcacatgcagggaagagtatgcgacaaaggatgggatgtaaggcggtcaattaccgttgta

SEQ ID NO: 8460 - DNA, 156 bp, Glycine max
  Clone ID: 701148518H1
gatgcgtcaagctagtgacgttaaagaagcgcttactggaagacaacccagcttttctttccctcctctatcttcatttttatttcttgcatgtagttaggacatcttgcttgtgattgtgatttatttcaacttgtttagtaatgaacaaaaagc

SEQ ID NO: 8461 - DNA, 257 bp, Glycine max
  unsure (1)..(257): unsure at all n locations; Clone ID: 701148519H1
ggaacaacaagtcttacattaggtggaggatatttggaaacagctagcaactatgggctctcatgcagcttactagctctcctgttgccttattgctccgtttcatagtaatatnngctctatgtttcagaacaatggctttggtgaagtngcnacnaaangnttcatcagttccggnggttntagnnttnggannntcgatcgtggcctggggcaacaacancatcaaaanancgcngatgngggcnccccccccc

SEQ ID NO: 8462 - DNA, 218 bp, Glycine max
  unsure (1)..(218): unsure at all n locations; Clone ID: 701148520H1
ggatcgaagcaaaanatgcnaacccaangtgcttctctcctctgtctttnntctctctcttgctatccttttggctagtggcactgctgcaagtgcaactccaagangcgcagtgccaagccaccatgtttcaacattnaacnagangcttttcccttcaanttncctcttgggaagggttctcccgttnaacgnggaaaagggccnanatttanagg

SEQ ID NO: 8463 - DNA, 241 bp, Glycine max
  unsure (1)..(241): unsure at all n locations; Clone ID: 701148521H1
ggttaattaatgtagagaaccaaccatgggtcaatactcaattcatcatcagcttgtgggccatagtctcattatttatccttttgcttccaaatatccatgggtggggagacgatgggcatgtcattgtttgcaagattgnacaggctcgcctcagtgaagnagctgcagaaggctgtgaaagaaactgctgccaatatccgcagaaatgattttgtccacaagtgttcttgggcagatc

SEQ ID NO: 8464 - DNA, 253 bp, Glycine max
  unsure (1)..(253): unsure at all n locations; Clone ID: 701148522H1
gacacacacgatggttgaaattgaagcaaagcacgtgtttgtgtgtgtagtnnnnnnnnnnnnnnnnnnnnnnnnnnnnnnnncaggctccaatggctttctctgcaatgactagcatgcactctcctcaatttctncgncttcccatctcccttccncgttcttcaccctctggtcgattttcancgccaatctcaaacggcntaaaccactctccattggntnattcnattctggtgnnacaagaaggggg

SEQ ID NO: 8465 - DNA, 260 bp, Glycine max
  unsure (1)..(260): unsure at all n locations; Clone ID: 701148523H1
ggaaacgaagaagccctaactacgcacgcattcgtgagaaaactcaatattcgtcgctcatggcactctcttctcgtctcttttccaaatccaaattgatctatggcagtcaaatacttctacaaaaggagcatgctattccagttcgtcactttggctaaagagtctgcccctcctgcccttangggagangagatgctgaagaacatttttgtggaggtgaagagcaatttgagaccgccataggantnttaaagagg

SEQ ID NO: 8466 - DNA, 252 bp, Glycine max
  unsure (1)..(252): unsure at all n locations; Clone ID: 701148524H1
gacaccataatattatgaatatgtctttctagctccaaaattcctatgcatgatggcaattgataccctcatgccagccacaatgagcagcagtcctgcaccttgcagccgatcctggtcaattagtgaggactccctaagaaggtatgtgcagtttgcgagtgaaagctgcatacaagagttattggcagcttnggtcacaaacaaaggaaatggcaacgatggatggaaggtgctnactctnaaaanggg

SEQ ID NO: 8467 - DNA, 237 bp, Glycine max
  unsure (1)..(237): unsure at all n locations; Clone ID: 701148525H1
aanccaaagttgatggatttatgacattgatcgagaatgtaaattggatgggtgacgaggcacctcagagtggaaatgaatatgtaaacgaggtcataatttatttggaaattttggtttcaactgcttcaacagatattgccttcncaagtccttaagagattttacaggnaatttttgcccccaatancggngaagatagttgggncnttagttagtgattctgttaagaggnta

SEQ ID NO: 8468 - DNA, 251 bp, Glycine max
  unsure (1)..(251): unsure at all n locations; Clone ID: 701148526H1
ggttctggtttgtcgttctttctctcgcaatcttcactacattcaccgagcatttgcattcacattgaatatggctgagactacacaatctaatgctgagttgttggagtggcctaagaaagttaagcgccgcttcctgcatgttgtgtatcgtgttggtgatcttgatcgcaccattaagtttnanatggtcngnccccggntttcgcttttnaggaaaagagttattccagaggagaaattngccatgc

SEQ ID NO: 8469 - DNA, 268 bp, Glycine max
  unsure (1)..(268): unsure at all n locations; Clone ID: 701148527H1
ggagattgtggtgagtagcataatggaggcaccgaagctgaaggtagtgacactgaaagccatcgaagcaactccgtcaaccttcaaagagttcggtcaggtcgtggaggcttcgcgagacggccaggaattcggtccccacgatgctcaactngacntttcccaaggaactccaangntctannatnancannttggaaaattgcccgcttaagtttccaanatnaccctccngnatnngaccccgggccccggggttttngggggg

SEQ ID NO: 8470 - DNA, 253 bp, Glycine max
  unsure (1)..(253): unsure at all n locations; Clone ID: 701148528H1
gaccgaatcacagttgtatgtagtctaaaaagttggcggaatataactctgttgtgtgcagtggtctctcacaagggaataatagtctcacatacattcacaaaaacctgagctttattgcgttgttgttgctgtagatggaaaagggtagaaccgtggtgntgtccgctctgcagtttgcttgcaccgatgatgtctcancaaatgtcgccaccgccgagaggctagttagagctgcacataancagggtgc

SEQ ID NO: 8471 - DNA, 255 bp, Glycine max
  unsure (1)..(255): unsure at all n locations; Clone ID: 701148529H1
gactgaagaaaacggcgattgagagggagagtttgagaatggtgaagaaggaggagttcttgagagaaaacggcganaacgaaaaccgttccgtctcgcggagtgacttccctcccaacttcatcttcggagttgccacttctgcatatcagatagaaggtgcttgtaaggagggtggtagaggtcctagcatatgggatgcctttacacacccnnnaggaaaaattcttgacaaaagcaatggtgatgttgcat

SEQ ID NO: 8472 - DNA, 250 bp, Glycine max
  unsure (1)..(250): unsure at all n locations; Clone ID: 701148530H1
aactccacgtggtctccgaacattgaacactgtctgggctcagcatttgagtgaggaattgaaacgtaggttctacaagaactggtgcaagtccaagaagaaggccttcaccaagtactctaagcagtatgaaactgaggagggaaagaaaaacattgaggcgcagctggagaaactgaagaagtatgctactgtggttcgtgttttggctcacactcagatcaggaaaatgaaagggttgaagcaganc

SEQ ID NO: 8473 - DNA, 210 bp, Glycine max
  unsure (1)..(210): unsure at all n locations; Clone ID: 701148531H1
gtctcttgcaaaagccactttccctgccggctaacggcgtcagtctgtcatgcttgcgttgcatgtccctcgtgggtccctcctttccaagacaatattggtgtccaagaagaaaggcagcnngntccangantctgattcctcgagggggngcccnccatacantnangggtgggnntangnaagaaannnnngnaanacangnnaant

SEQ ID NO: 8474 - DNA, 72 bp, Glycine max
  Clone ID: 701148532H1
gacattactttgtccaaaactacaacctttgtcaatttctttcttgttcgactctgcttctttctccaactt

SEQ ID NO: 8475 - DNA, 238 bp, Glycine max
  unsure (1)..(238): unsure at all n locations; Clone ID: 701148533H1
ggagggttagattcgangttgttgttctaaaacgtncacacattctccgtcgccacaacaacaatggctccgaagaaaggtgtgaaaggttccgttgtagcagcgaagaagaaggttcaggagaaggtgacgaatcctttgttcgagaagcgtccgaagcagttcgggatcggaggcgcgctgccgccgaagcgggacctgacgcggttctgaatggccgaagaacgtccaaatccac

SEQ ID NO: 8476 - DNA, 177 bp, Glycine max
  unsure (1)..(177): unsure at all n locations; Clone ID: 701148534H1
tgatggccttgccttcttcattgcaccatttgacactaaaatccctccaaactctggtgggagcaaccttggactcttcccatcagacaatgttgttgctgtcgagtttgacacctaccctaatcgtgataagggggatccagattatagacacattggtatcgaggtcaacnctat

SEQ ID NO: 8477 - DNA, 244 bp, Glycine max
  unsure (1)..(244): unsure at all n locations; Clone ID: 701148535H1
gatcccaaattaaccaataattttttagttaaacaatgtccatgggccatcattaacacttttggaaacgttggtgtctactatattgtattattattatcatggtttctcgtatctggtgtgtgtgtttggggacgacccgcnacttttctgcaagncttngaaatcacgtggtcagagactcatatcaggcaanttgancanggcagagccaccnanctnttnnanncaaanccngggggng

SEQ ID NO: 8478 - DNA, 207 bp, Glycine max
  unsure (1)..(207): unsure at all n locations; Clone ID: 701148537H1
caaggattttagcttccttggcccaatattgttcacctccctcattactctcatcctcactggcatgatgcagatgttcttccctcttggacctactgcccatgctatctatggtgcaattggtgcaangaaatncccnggnaanatggggnnngaaatggacaactggatcaagggtttcanttaaggaggagtacantggggccc

SEQ ID NO: 8479 - DNA, 269 bp, Glycine max
  unsure (1)..(269): unsure at all n locations; Clone ID: 701148538H1
gangagagaggagaagagaagtaaagnnagaaaggagatgggagtggagaagcagttgttgaggtctggcaccggtccgaaagccattcccggtcagnacgtaaccgttcactgcactggtttcgggaagaacggtgacctttctcagaaattctggagcacaaaggatcctggccagaacccattcactttcaaaatnggccanggttctgttatcaaaggattgggatgaaggtntgcttggcntggnnaattggtgaagtgcccct

SEQ ID NO: 8480 - DNA, 238 bp, Glycine max
  unsure (1)..(238): unsure at all n locations; Clone ID: 701148539H1
cacgtttttccattgtatacgcaaagcaagaaagtaaacnaatgacagagttaccagtttatattgttggaggtggataaaatgacgtcaaaggtgatgtttagttaggaaacaacaacttaggaaatatttgtgcagttaatttgaacatttacccgggtttctttaaaactggacatactatttggatatgggntggagattaaaangaaatggagtanagttattgtcttattgt

SEQ ID NO: 8481 - DNA, 86 bp, Glycine max
  unsure (1)..(86): unsure at all n locations; Clone ID: 701148540H1
ggacaaccaacgaagataaacaaccatagtggttttctctctttttttttnttttnccnangtngtgaccnggttnttnnnttaag

SEQ ID NO: 8482 - DNA, 262 bp, Glycine max
  unsure (1)..(262): unsure at all n locations; Clone ID: 701148541H1
gggatctgaattgcggaggaagatgattcagcttctgttcacggtgatattttcggaggcttcaatgatagcgttgctgctgttcaagacccctttgaggaagctcgtgataatgggcttggatcggttgaagcgaggtcgtggacccttgatggtgaagaccgttgcagggaccgttctcgtggtgttgttgtcnagtgtgtatagcatgttgaaagattcagaagcgtgggatccaagagggtgctgttnnnnccccnnc

SEQ ID NO: 8483 - DNA, 256 bp, Glycine max
  unsure (1)..(256): unsure at all n locations; Clone ID: 701148542H1
ggcagaagaagcgagagagagagaagaaagaatcaagcttagtcaaagtgtctgtgactgtcacacacagtctttaagatctggaagcgcttctcacttgcccacaacaacaattcctctcaatttcaaaattttcagcttcaaaataataannccctaagagaggggttgcaagccaaantgagaagcgcaagctgtcnncggttttgatgtgtctaanggtgtcttctncgcncaantaanncgnggggggggg

SEQ ID NO: 8484 - DNA, 255 bp, Glycine max
  unsure (1)..(255): unsure at all n locations; Clone ID: 701148543H1
gtaccttaattgggtcttgggcttaaatatggttgttattatattctctagcacaattttcaacctacctaanaattgcatccactatgtttcaactccctctaataaacccaataataactggcatagaaaaatgtgataaggaaataattggantcatgananctaaantttaagctaaattcacaagtngngtccccttnnctcngagaagannataanattttaaaggcggtaganttgngggggtttccc

SEQ ID NO: 8485 - DNA, 251 bp, Glycine max
  unsure (1)..(251): unsure at all n locations; Clone ID: 701148544H1
ggagaaaaacgagccaattcatcattttntctcttctctgcntctncttgttcaaatcttaggagctgaggagaatcaatcgagagagatatgtctggnatcgctcgtggacgccttgctgaggaacgaaagtnatggcgcaaaanccatccacacggtttcgttgccaagcccgangactctacntganggccccgtaaanttgnagggccggcnntggnatntccggcaaacgggnttttttggggggt

SEQ ID NO: 8486 - DNA, 254 bp, Glycine max
  unsure (1)..(254): unsure at all n locations; Clone ID: 701148545H1
ggatgcagttggaaccttttcctttggtcttctttccttctctgtctctctgcttattgttattgctgttgtgactaaggaacaaggggttgcttcttcccttttgttttcaaaggaagagaatttncaatttncaatttttcatggggttcnctgaaatggagagagatttcatgggtctcaantnnaaagaaccactagttgnggncnangncnncatgannaatganggcgaaanantntggaagnganac

SEQ ID NO: 8487 - DNA, 225 bp, Glycine max
  unsure (1)..(225): unsure at all n locations; Clone ID: 701148546H1
cctgangagaatccattctcatgttncataactgtttggtgaaatcagcatccatcacttcttctctaggacaaaatcttatgcacttttcgtttccttttggggtgtagtaaaggtgttcngctcctagtactagagttggatcatgctcatcttcattgccagggtcacagcaattgaaattgaaacattgnaaggagttcantgagctttgcgngcccgaat

SEQ ID NO: 8488 - DNA, 264 bp, Glycine max
  unsure (1)..(264): unsure at all n locations; Clone ID: 701148547H1
gacagcaacaaacatcttcacaaactagtaatattattcttcgaatccattttattattcataatgggtattttcacatttgaggatgaaaccacctcccctgtggctcctgctaccctttacaaagctctagttanagntgccgaacaacgtcatcccangggctgnccccnccttggnggntnttgnagnanngggggggccccggtcnnncctngaccnntnatggggtgcagggangtgggaggatggangaanacannc

SEQ ID NO: 8489 - DNA, 85 bp, Glycine max
  unsure (1)..(85): unsure at all n locations; Clone ID: 701148548H1
ggcagccannacagcaanaaacgnccagagattcttcctcaacacaatcganntnanaaaangcttccgattctaaacccagncc

SEQ ID NO: 8490 - DNA, 259 bp, Glycine max
  unsure (1)..(259): unsure at all n locations; Clone ID: 701148549H1
gggtgtggataggtggcagctacgacacaacacaacacaacacaacacaacacagtcctaagttattgggacactgtattgcatgtaaatcaggaaatcatgacttctactcatgacctctcagataatgaagctgatgaccagcagcagtcggaatcacaaatggagcctttatctgcaaatggattccttatggcnggtaccgcccanttncccnnatcnngnccnatttanggagtttntttgncccccnnaaaaa

SEQ ID NO: 8491 - DNA, 271 bp, Glycine max
  unsure (1)..(271): unsure at all n locations; Clone ID: 701148550H1
ggcacccaaaggtgcaaaaatattaagatgataaacattggagcacttgttgtactctttgcatttctcttcctcagttgtgcctatgcacaagacacaacaacccttgtgcctgcaatcataactttnggtgactcagcngtggatgtngggaataatgactatcttcccaccctttaacagggnggatcnccccccntngggggggggttttgacnnacnccacntccccccggggngntnnaaaaggnaagagggattnttnnngggg

SEQ ID NO: 8492 - DNA, 243 bp, Glycine max
  unsure (1)..(243): unsure at all n locations; Clone ID: 701148551H1
attgctgaaatggctggtatgagtcacagaattagagagagaactgatgcccttgatgctgccggaaacacgactgccgctattgggaagggatttgccattggttctgctgcccttgnatcactggccctctttggtgcctttnnnanccgagcgcnattcanaactgntgatgtgtacccnnaannggttntcagnggnttgattgnggaaaaaatgcttccagggtggttcctaaaanaa

SEQ ID NO: 8493 - DNA, 252 bp, Glycine max
  Clone ID: 701148552H1
gatccatactcaaaatacaaaaatggagagagtagctaaggtgttggtgatgttgagcatggtggtgttggtgcttgcatcaaatgctgaagggggacgattacttgaggaagagaatgtggatcagccccagaccttccttggatcaggtggaggccttggtgggatatttccaagcccaagcccaggcttcagcttcaccggcgtgggctttggcccatctgggttttgcactttccctggtggttgcac

SEQ ID NO: 8494 - DNA, 265 bp, Glycine max
  Clone ID: 701148553H1
ggagtgtgagagaaaccagtgactgacttttcgagaaagaaaaacaaaaatgagtttccgtcattccatcatgaacgctcttcccattctcctcttcttcctcttcgtttctgcattagtttctgcgaagaaaactggtgatgtgacggagctgcaaattggcgtgaagcataaaccagtatcatgtgaagttcaggcacacaaaggtgacagagtcaaagtacactataggggaaaactcactgatgggaactgttttcgattc

SEQ ID NO: 8495 - DNA, 254 bp, Glycine max
  unsure (1)..(254): unsure at all n locations; Clone ID: 701148554H1
taccttctgtaatatatttgtgtcatatttttggtaatacaggaagatctgataaatcttgaaaattacacgggcaaggatcttaaagtacgaatcaaagtagcagcaaaggagtaattcaaaattcattccttactactaatatttattataaggattaaacaagaggcaattacttagtaaattcgagaacatgttcaatacttgaacgcttgattatntaccnacnncttagntcacaaaagcttnngtnc

SEQ ID NO: 8496 - DNA, 252 bp, Glycine max
  Clone ID: 701148555H1
acggtccttcgacctcgacacaactctcaccaccaccatgcctaaactccttgcaccgccattgatttttgatctccagtaaatggaaaatggaacatgttcatcaaactgaatctcagtattggaagcaacaccaccactttgtgacactaactttttttttgttacatgtatgtgattgatctatctctgaatttgattatattaagatttaattaagtttttcatacttgaaatatgggtcgtttcaga

SEQ ID NO: 8497 - DNA, 249 bp, Glycine max
  unsure (1)..(249): unsure at all n locations; Clone ID: 701148556H1
gaacacgcggctgccgccggaggtgaaccgcgtgctgtacgttcggaaccttcccttcaacatcacgagcgaggagatgtacgacatcttcggcaagtacggcgccattcggcagntccgnatcggcaccaacanggacactcgnggaacggnntncancgtctacggggatntctangacgnnaaangcggggtanacctntcnngggtttnantgggcnaaaggngnttctcntgttttataaaaaa

SEQ ID NO: 8498 - DNA, 250 bp, Glycine max
  unsure (1)..(250): unsure at all n locations; Clone ID: 701148559H1
gaccacattccaaaacacaaacacatacattgtagtatcacttttgtctcggaatttgttcttttgagttatggcaagcttaaaggttgcatgtgtggttttgatgtgcatggctgtgatgagtgcaccaatganggtgcaagccgtgtcatgcaatgatgtttctgtgaacctagcacggtgccaatctacctgatngcaggggganttntnccaaaatcggctgtagcggantgaggaacttttgggt

SEQ ID NO: 8499 - DNA, 251 bp, Glycine max
  unsure (1)..(251): unsure at all n locations; Clone ID: 701148560H1
ggattgaaggttccttggcttcttcacactcacagcgtgccaccatcacgctacactaagagtgcaggaacatcctgtatgggttggaaagcagctgagaaactcattaggcactggaaaattctcagaggagataatgttatgataacaaggggcaaagataagggtgagnccgggattctaaagcgtgtcattcgctctcaaantcgtgtcttgtagagagtaaacccngggtaaagacgcttntaacc

SEQ ID NO: 8500 - DNA, 254 bp, Glycine max
  Clone ID: 701148561H1
atccctgagatggatccaaccctccggaagcagattcaggagtgtaatttgcagattgtgaatgtcacaactcctgctaattttttccatgttctaaggaggcaggtacatagagattttcgcaaacctctcattgtaatgtcccctaagaacctgcttcgtagcaaggcttgcagatcaaatttatctgagtttgatgatgtccaaggccacccaggctttgacaaacagggaaccagattcaagcgcctcat

SEQ ID NO: 8501 - DNA, 255 bp, Glycine max
  Clone ID: 701148562H1
ggtgtacatgatgaactctaggaagtttgcaaaacggataaagagtgagcggaagttatattccggaaagttatatctttttcagttgtagtgtttttttgtttttatttttccctagataagcagaccgtggaaaactgcaagtgaaagctggagcttttgcttcaatcacatttgactatttcactgattagaacaggcaaagatgtctcttttgggttgatctttttatgtttcgatcaattgaattttccc

SEQ ID NO: 8502 - DNA, 254 bp, Glycine max
  unsure (1)..(254): unsure at all n locations; Clone ID: 701148563H1
gaagtagacatatagcgaaaggttttcccatatttatttatctagaataaccacctaatctactctttaaaaaaaatcacttgaaaatatggtataatcntttaatattncaagggtaaaatnttttnactntggtattatnnggnatattnnanncacnggttgactngccnaaaaattnaaaggnnnataattcccngcctgggaagaaaaggtntngccccncctagagnggtggtnnannattagggcgg

SEQ ID NO: 8503 - DNA, 266 bp, Glycine max
  unsure (1)..(266): unsure at all n locations; Clone ID: 701148564H1
gnatcaattcaaaatatancatcaattatnancannggnttgtngnacacaacgaatgcnntgtcttgccgntttcacaantttggtgntgaccaaaagaatctggncttccaaggngatgctacgncttcttccaggggctagaactcncaaagttagacggtggaagaaaaccagngggnggcatgtggggaaagtgttatnctcctctccaatgnacctttggggaaagctctacatggncccaanctttnaaaccnctnccc

SEQ ID NO: 8504 - DNA, 256 bp, Glycine max
  unsure (1)..(256): unsure at all n locations; Clone ID: 701148565H1
ggcacaatgcaagttctataggctcgtttggttttgccgattagtgtttactgaaacaacgttttttgtgatatcgagaaaaaaaaaaaagngtgatntcgaggagaccggggaatcctactaaaaggttcggtganaatggcggtggattgttctcttcgaaatctaggtcgccaccggttttgtctatngcnctntaattnngggaggtttgtttcnncanggctaaangnatngaggccnaggggnttccaac

SEQ ID NO: 8505 - DNA, 253 bp, Glycine max
  unsure (1)..(253): unsure at all n locations; Clone ID: 701148567H1
ggatcagaaatcgtacagatacacacttggctgaggaaggtcggaaaagaaaatggagttgttcttctacacggtgttcggtggtttggccgcggttgtggcagttatggagctgagcaagaacaacaaggatcgantcaanacctcttccgnattcaattccttcaagaacaattacctcctcgtctattcccccnangatggntgaagntggnnnaaaaggccaanttgnnaacaccntaaagaanacagg

SEQ ID NO: 8506 - DNA, 249 bp, Glycine max
  unsure (1)..(249): unsure at all n locations; Clone ID: 701148570H1
ggtgtacatgatgaactctaggaagtttgcnaaacggatnnagagtnagcggnngttatattccggaaagttatatctttttcagttgtagtgttnnntngnttntatttntccctagatangcagaccgtggaaaactgcaagtgaaagctggagcttttgctcaatcacatttgactatttcatgattagaacaggccaagatgntccctttnggttanaanaattngaggnccttaangggggccc

SEQ ID NO: 8507 - DNA, 232 bp, Glycine max
  unsure (1)..(232): unsure at all n locations; Clone ID: 701148571H1
atcgaagcaaaaaatgnaaacccaaagtgcttctcacctctgtctttttctctctcttgctctccttttggctagtggcactgctgcaagtgcaactccaagaagcgcagtgccaagccaccatgtttcaacattcaacagaagcctttttccttccacttttctctttggaattggttcttctgcttaccaggcagaaggagcagcaagtgtagatgggagaggaccagnc

SEQ ID NO: 8508 - DNA, 249 bp, Glycine max
  Clone ID: 701148572H1
gatgagaagagtgtcttgttcacaccagatgatgctaagaatgatgttggtgttggattaaggtatgactacgggatattctatgcatccaagacgttttatgatcagaataaggagaggagacttttgtggggttggattggagagtctgacagtgaatatgctgatgtagccaaaggttgggcttcagttcagagtattcctagaactgtggagcttgataggaagactggcagcaacttgcttcag

SEQ ID NO: 8509 - DNA, 255 bp, Glycine max
  unsure (1)..(255): unsure at all n locations; Clone ID: 701148573H1
ggcgtcgctccgcaccagtttcaccgcacgaatatcttgttgtttggagcgatccgagaaaaactctgtaaacatgttggtttaccaggacctccttacaggtgatgagcttctctctgactccttccgttacaaggaattgagaatggaatgctgtgggaagttgaggggaantgggttgttaaaggngcanttaatgtagacattggnncacncccttnggnggggggtgaaggagaagttgagggtntnnct

SEQ ID NO: 8510 - DNA, 74 bp, Glycine max
  unsure (1)..(74): unsure at all n locations; Clone ID: 701148575H1
gggntgtgtgaactggccaatcanagtatcatgcatcacacgcttctgcatntttatgtatctttntttaacac

SEQ ID NO: 8511 - DNA, 253 bp, Glycine max
  unsure (1)..(253): unsure at all n locations; Clone ID: 701148576H1
gatcactgattagacaactctcttccaaccaccatggccaatttcaaaactttcttcatttcccaaaccctaaccctaaccctccttttctccaccctagtgactgccacttaccaccacaacatctctccaagtcttgtacggttctcgtgagaagctgacccacctccacttcnacntgcaganatttttactagngaaaaccntggganantggnattgcnccccccngggggggngnagcttnntcttt

SEQ ID NO: 8512 - DNA, 259 bp, Glycine max
  unsure (1)..(259): unsure at all n locations; Clone ID: 701148578H1
ggcacaagtgagtttgttgatcgagataactagaaacagtgtgatgaaaatgaaggtccttgttttctacgttgctacaattttggtagcatggcaatgccatgcgtacgatatgttccctctccgaatgaacactggctatggtgcccgtactccggaggtgaaatgcgcaagttggaggcttgctgtggaagcacacaacatctttggctttgagaccattcctgangagtgcgttgaagcaacaagggatcnctcc

SEQ ID NO: 8513 - DNA, 260 bp, Glycine max
  unsure (1)..(260): unsure at all n locations; Clone ID: 701148579H1
gatcttgcaaacttgcgcgcaaaaggtgtcgatgctaggatagcatcaggtggaggtcgtatgaatgtcacaatggatcgttatganaatgattggagtgttgtnaaacgagggtgggatgctcaagttcttggtgnnnccccttataagtttacanntgctcttgaagctgtcaaaanctgaggncanacccagaggccaatgcaccaatatntnccctccttngttatgnttnccnagngtnggnacacntgtnggnc

SEQ ID NO: 8514 - DNA, 243 bp, Glycine max
  Clone ID: 701148580H1
gacacacagagcggttctcatattttggagaatccgaaaaacacgttaaagaaagtcccattcccactaccgaagcaaattaagaagatgaagcagcagagagtggagtttatgggcatgggcatgggcatgggcatgggcctgggccttttggtggtgatgatggcatgtgggtcggcgatggtgcggatgatttggccaccaagtgttcagcggtgattcagaaggtaataccgtgtttgg

SEQ ID NO: 8515 - DNA, 257 bp, Glycine max
  unsure (1)..(257): unsure at all n locations; Clone ID: 701148583H1
ggaaggtgaaggtgatgatggaattggaagtcgacgagaacgacttgaaagccgccggtgctgagctcttcgtcgacggtggtcggcgcggcattcgcatcaatggctgggtgatcgagactcggaggcactccatactcaactcttccacactccaagagtgggaacagaatctcgatangtctcatttaccagaaatggtttttggggaaaacacttngattctaaaacacttgagcagtggcaccaacattctt

SEQ ID NO: 8516 - DNA, 260 bp, Glycine max
  unsure (1)..(260): unsure at all n locations; Clone ID: 701148584H1
gatgaaaaagggagtgcctgataacccataaccgaccgcaccaccgttttcctttgctttgcgttctacaatgtcgaaaacctcagagattattacatgcaaagctgctatttgctggggaataggaaaacctgtgactgnagaagagatacaagtagaccctcccaaagccaccgaagttcgagtnnaaaatgctttgtgccnatatgtgccccagaganntctntggccacaangggtttncccatanccnntttacc

SEQ ID NO: 8517 - DNA, 260 bp, Glycine max
  unsure (1)..(260): unsure at all n locations; Clone ID: 701148585H1
gtggaacccaagcaaagaagttgagtacacgggtcaggttgttagatatgaggataactttgactcaaccaccaacgtggttgtcaccatcactccaactgataagaagtccatcactgactatggttcacccgaagagtncctctctaaggnggnttatttnctnggaaaacaggccttnttnggngaaacacaacntgagggggnttttatccnaatnnaatgggccgggttaantttttngagtngaaannccnnng

SEQ ID NO: 8518 - DNA, 181 bp, Glycine max
  unsure (1)..(181): unsure at all n locations; Clone ID: 701148586H1
atacccatatctttgacaaatgtttcttcactgcaagttctgatctctcaaataaccatctaaaaggggnaatcccagtgatggttcattttcataanttacccccatcagttatcaaaacaatcttggcttgatacaaccanaatacactccatctccatttcnccaacaccancagagc

SEQ ID NO: 8519 - DNA, 250 bp, Glycine max
  unsure (1)..(250): unsure at all n locations; Clone ID: 701148587H1
cttgttcaacaagctccagcagtggcaatatacaacagcttcaaaactccactttaacatttggtgctgcaagacctttgcctagccttttgcccatgactgacaganaagatccctatggttttaaatcgggtgatttacttgatcaagtatgctttaggaatcttgggtttgttggcaaagatagctgcattccaagtaggtttgtagaaaatgaattgagtcatctgtaagtgattttacccaaatg

SEQ ID NO: 8520 - DNA, 250 bp, Glycine max
  unsure (1)..(250): unsure at all n locations; Clone ID: 701148588H1
ggctgcaaatgccattttattttgctctacctcctcacttctagggttcgcagcttgtctctcaaacaatggcgctgttccttctctacgaatccgcttcgggctanaccctgttcgaggttcacggcctcgacgaantnggccagaacaccgaagcgnttcgaganctcnttncggacctnnaagaggttcgaaaaagtcgnnaagttcgntcnaacaaccctttnacttccgctcnggatgnaaaaaa

SEQ ID NO: 8521 - DNA, 234 bp, Glycine max
  unsure (1)..(234): unsure at all n locations; Clone ID: 701148589H1
gggtgacagtatagagcgaganagagaganacaaagcagcacccatttggatcctctcttctcttctttgatctccgttaccctttttgttttctcaacagagagagagagagngnttctttcgaanttcgtttgcgtgtgttgtgtgntcagtcancgaggncnccnccncngggaggnncggggnnntttagtttncncnanaattcnntgttcntntgngananggggggt

SEQ ID NO: 8522 - DNA, 254 bp, Glycine max
  unsure (1)..(254): unsure at all n locations; Clone ID: 701148590H1
ggacaaagaagattgaggaatgaagagaaaggtgtccctttcctgtcccctacagcatcggcgttgtaagagatcccattccaaatttccaatctcaattctcatttctcagtttcacaatctccaataaaaaaaccaaaagggcagttantaattttncacaactgggattccangcgggttctcttcctcttcttcatgttcattattgaatccccaccccaaattttctaattcttccccttnactcnccc

SEQ ID NO: 8523 - DNA, 228 bp, Glycine max
  unsure (1)..(228): unsure at all n locations; Clone ID: 701148591H1
ggagacacaaacttcacaccactttgtactctccgtccntccttcttcgatccagatctctctccttctccctcaaatggcttccccttctgcaatgttccatgccccnggnctntctttccaatcgagctctggtacccggtacaggatctccaacccaagttcagttccctttcaattgggggnaaaatttccnaacgggnaattgggcccaaggggggntttntt

SEQ ID NO: 8524 - DNA, 262 bp, Glycine max
  unsure (1)..(262): unsure at all n locations; Clone ID: 701148592H1
ggcgtaggcaaagagagagagagaaaagcgtgaatcatgtcggacgaagagcatcacttcgattctcaggcggatgcgggancgtccaagacgtatcctcagcaggctggtaccattcgcaagaatggctacatcgtcatcaaatccaggccttgcaaggttgtagaggtctctaacgtcaaagacaggcaagcatggacatganaaagtgtcatttggttacaattgatntctttanggnaaanggcttgtnttctnnncc

SEQ ID NO: 8525 - DNA, 253 bp, Glycine max
  Clone ID: 701148593H1
gaaggatcagcagggagaattaggtttttagggtttacaccgagcagccacacctcccgcagcagccatggttctcaaaactgagctatgccgattcagtggtgccaagatctacccaggaaagggcatcagatttgttcgtggtgattctcaggttttcctgtttgcaaactcaaaatgtaagaggtatttccacaatcgcctgaagccttcaaagctcacctggactgcaatgtacagaaagcaacacaat

SEQ ID NO: 8526 - DNA, 248 bp, Glycine max
  unsure (1)..(248): unsure at all n locations; Clone ID: 701148594H1
cccctnatcacattnttgntaannttaataggatgggaattcctttgnccatantgnggntgatcangcttctagtggtnngtttggttcatggggtnaacttnttcttcngggtaaagaagtttgtaaagaagtggaagcagaagctgctgctggctaaacgtcatnctcttgtgggnacngangtttgtaaagaagtgganccnnaanctgctgcatggctaaaagtcatgcncgcgagttantcc

SEQ ID NO: 8527 - DNA, 263 bp, Glycine max
  unsure (1)..(263): unsure at all n locations; Clone ID: 701148595H1
ggaagtgtatttggtcactgacctatcttggtagagatttgaagtttaaaccttcanattantcanaccattttaatttgcctatagattctgagtcactgcctgctatggcgctacggtacttcttgtgtcggggatgtngctgangtngtgcttntaaaggttnncatcngancccannganngangaagaattcngggnagncaaaaaanaancggcantccccggaaangggncctttttgggggaaancngngaacac

SEQ ID NO: 8528 - DNA, 257 bp, Glycine max
  unsure (1)..(257): unsure at all n locations; Clone ID: 701148596H1
gggaaaagaaatgggtctccacactgttctggttgggaagacagagaaaagcaaaggagcagactatgcagtggagtgtgtgaatgacttggcacaagtgatcccagagatatgggcaaacgaaatggacggtgaggatcaaacgatgacacgtaccaagagtgaattggaggccgtactcgcgtgtgctgtggttggagcttgaaaaatgtttggatgtggaggaggataaaggcctnacgttgtacangtacntc

SEQ ID NO: 8529 - DNA, 279 bp, Glycine max
  unsure (1)..(279): unsure at all n locations; Clone ID: 701148601H1
gaccgatacacacatacatcaccaactgatatataatactagatttcttgtagtctattattagagagaagaattgagttggaagaacccagaaaaaganaccaaaaaataaataaaacgatgtggtggccattccagcagaataggatccttcctggggttttccatccatattcctactgccggggaagttacctcctgggatcngtgggaagtggnccccntggctttgttaagggggctntaggggtcttggggnnaaacccncnnggtctcttt

SEQ ID NO: 8530 - DNA, 261 bp, Glycine max
  unsure (1)..(261): unsure at all n locations; Clone ID: 701148602H1
atatatttagtagtattgctctaataaaaaagataatatactaattaatatataatatgagtaaagtaaaatttaatagaaaatatttgatatattaganaattaaaataaccctaacaatacatctatgtgtataaccacctgcaaagtgtgtcgagaatttcagcttaattggtattgaggcattgtgtcagtatcagtttttatacaancctccaataaacttggggtgnnttggcagcagtcacttgnnctangggt

SEQ ID NO: 8531 - DNA, 286 bp, Glycine max
  unsure (1)..(286): unsure at all n locations; Clone ID: 701148604H1
gatctatgctagcaagaagaagataagggaaaaggaaaaggagagggagagtgaggctagcttgttttggaaaatagcacctgtggagaacactgagaagaaagcgatgaggccttcgcatttcaggtatttccatagagggcagggaacgaagccgtccgagggggatttcttggttatgaagcccaagaaagaagaagtgggctgagcacgacatgntgtggaaccaattttgagcnntggggaggncctggatccggnnttgcaaactatgnancccgggcat

SEQ ID NO: 8532 - DNA, 272 bp, Glycine max
  unsure (1)..(272): unsure at all n locations; Clone ID: 701148605H1
ggaaaaaaggaagaggaacgaagcaatcgcaagtcgtctgttctgtcccgcgggagcagacgacctgtcttcatcgccaaacaacctcaaaaacattcatcaacgttcactattaatccatccatcattaagtaagaaaataaggttcgatttttttatctttgttatgcttctgatccatcatggaggtgccgagttcctggggatgcccttcgcaaacaggttcattattctcctncctatcatgcttaattttccagattctgcttctg

SEQ ID NO: 8533 - DNA, 253 bp, Glycine max
  unsure (1)..(253): unsure at all n locations; Clone ID: 701148606H1
ggcagtgttgtagatgttgatcacttgatgatgctgtccctgttgccggaaacgaaatgggtttgattcctaaccctaaccctaaccctaatgctaaacccaagcaacctgcgttttgcttaaaatggccatggaatgatgcaaaccctagccctagccctagcccctgcaagtttgagggtctttgccattgaaatctctccaaaacttgggttaatcgcttcaatttgcgagctctgttcgagtcggnaga

SEQ ID NO: 8534 - DNA, 267 bp, Glycine max
  unsure (1)..(267): unsure at all n locations; Clone ID: 701148609H1
catgacctagggagcgagaaagtatgtgttgggctaggttgggacgtataggatgcactccatctgtgatgcattctcatgggacaaatggatcttgtgttgaagagcaaaatgctgctacatctgattataataacaagcttaaagctctagtggatcaattcaatgacaggttctctgctaattccaaattcatccttatacccaatgaatcaaacgccattgacatgcacatgggtttttggtttcggatgctgcngcnnccca

SEQ ID NO: 8535 - DNA, 257 bp, Glycine max
  unsure (1)..(257): unsure at all n locations; Clone ID: 701148610H1
gaagaaaaaaaaaaacattttcatcatcttctncttctttttcatcaatcatcaccagtggttcttttccttctgagaaggtcgaattgtgttttgcaaaaatgggagttccagagaaggaccctctttcccaattgagtttgcctcctggttttcggttttaccccaccgacgaggagcttctcgttcagtatctgngccgcaaggtcgctggccaanattctctcttccatcattgccgaaattggactggtang

SEQ ID NO: 8536 - DNA, 259 bp, Glycine max
  Clone ID: 701148611H1
ggaagaagaaggttggttgattggtcccattgattccgaagagaaaagaaaagatgtttgagccacaacagctatacactcgcgcgaagaccgaggaattcgacctcgaatcaggagaaaccctctacccagggctgagcgtcggcgagaaccagctccgatggggtttcatccgcaaggtctacggcatcctctccgcgcagatcgtcctcaccaccctcgtctccgtcaccaccgttttctatactccaatcaatga

SEQ ID NO: 8537 - DNA, 257 bp, Glycine max
  Clone ID: 701148612H1
aaagagacccggaaagggtgggaaccgcttttggaaatccattgggcttggatttaagactcccagggaagccatcgaaggaacctacattgacaagaagtgccccttcactggcaatgtttccatccgtggccgtatcttggctggaacatgtcacatgctaagatgaacaggactattattgttaggaggaattatctccattttatcaagaagtaccagaggtacgagaaaaggcactccaacattcctgctca

SEQ ID NO: 8538 - DNA, 168 bp, Glycine max
  Clone ID: 701148613H1
agggtaacttcgaccttgtgggaaacaacttccctgtcttcttcgtccgcgatggcctcaagtttcctgacatggtccatgctctcaaacccaaccccaagtcccacatccaggagaattggaggatcctcgatttcttctcccaccatcccgaaagccttcacatgt

SEQ ID NO: 8539 - DNA, 258 bp, Glycine max
  unsure (1)..(258): unsure at all n locations; Clone ID: 701148614H1
ggcacaagtgagtttgttgatcgagataactagaaacagtgtgacgaaaatgaaggtccttgttttcttcgttgctacaattttggtagcatggcaatgccatgcgtacgatatgttccctctccgaatgaacactggctatggtgcccgtactccggaggtgaaatgcgcaagttggangcttgctgtggaagcacacaacatctttggctttgagaccatcctgaagagtgcgttgaagcaacaaaggatacatcc

SEQ ID NO: 8540 - DNA, 171 bp, Glycine max
  Clone ID: 701148615H1
agggtaacttcgaccttgtgggaaacaacttccctgtcttcttcgtccgcgatggcctcaagtttcctgacatggtccatgctctcaaacccaaccccaagtcccacatccaggagaattggaggatcctcgatttcttctcccaccatcccgaaagccttcacatgttct

SEQ ID NO: 8541 - DNA, 206 bp, Glycine max
  unsure (1)..(206): unsure at all n locations; Clone ID: 701148616H1
tctcttgctctgtatctttgatttgatcattccaatcttcaatttttctatatatccatcaatccgctgagtgcaaagttctaatctttcgcctattgggttctactcctttctctcttcgnttccgatcgatccaattttcttcccatgggtacgatcggacacaacaatctcaatgccaaattggttcttctcggggacatggg

SEQ ID NO: 8542 - DNA, 275 bp, Glycine max
  unsure (1)..(275): unsure at all n locations; Clone ID: 701148617H1
ggtgcaaaggaggaagaggaaaaagaggattggagggtcgccacgtttagcaacaaccaaaccctctctactctttcttcttctcttcgctagggttttagcttcttcctcttcacttcgttcttctggcctctacaatgagcaacgacaagggacacctttcaacgtcggtgatctcacttccgctctcaacgaggacaattaganagacttgtcaatgcntctcagagcaagatacagatttgggtggacagattctganatcaagggccngg

SEQ ID NO: 8543 - DNA, 255 bp, Glycine max
  unsure (1)..(255): unsure at all n locations; Clone ID: 701148618H1
gagaacagaagggagaattaggtttttagggtttacaccgagcagcgacacctccctcccgcagtagccatggttctcaaaactgaactatgccgattcantngtgccaaganctacccccggannggncatcanctctggtccgngtgatnctcggttttctgtntgggcacttcaaatgtagcggtattncacaaccgcctgatgccctcaaagtcactggatgtatgtacagaaagcaacacaaaaaggcat

SEQ ID NO: 8544 - DNA, 277 bp, Glycine max
  unsure (1)..(277): unsure at all n locations; Clone ID: 701148619H1
agcttgagagagaagctgcacggcaagcattgctccagatggaaaagactgttgaaatcaatgagaattctcgaattcttgaagatttggaactgcttagagctgtacccactgagcaattgccaagttctgtagatgagacgagtcctgcacactctcaggatggtctggggtagtttcaagttttggggatagtaaccccttggaacaactagggattatattatcaaagccgatgatgaagaggangaaggagaagccacctgtantccaaatc

SEQ ID NO: 8545 - DNA, 260 bp, Glycine max
  unsure (1)..(260): unsure at all n locations; Clone ID: 701148620H1
ggaagacaccgagcgacaaagatcgacgatgatggacgaaaccgaagaattagaaccgttgtttgattacagccgggttcagcctctgaaccccatcgacctcgatgatgatcttgatgattacgaggatgtgatttgcgttgatagtaaaaagaggaagattcncaggctgttggggaatgagaagactaatgggaaaagagtaacagtggtggacattgaggatgatgattggttactcctncgaccaagatcgcagt

SEQ ID NO: 8546 - DNA, 268 bp, Glycine max
  Clone ID: 701148621H1
gggttgcaccttggtaaggtgagaaaatatggcatttgcaggaacaactcagaagtgcatggcttgtgacaaaacagtttatctggttgataagttgaccgcagataaccgagtgtaccataaggcttgcttcagatgccaccactgcaaaggaacactcaagctcagcaactataactcttttgaaggagttcttactgcaggccacactttgaccaactgttcaaaagaactggtagtcttgacaaaagcttcgaagggacaccaa

SEQ ID NO: 8547 - DNA, 256 bp, Glycine max
  unsure (1)..(256): unsure at all n locations; Clone ID: 701148622H1
gacatcgatcaagatggaagctaagactaagccatggttggctctatctctatttctattggctacaaattgcatgcaacaatgtgtccatggagaatcgcaagtgccttgcatgttcgtccttggggactctctatctgacaatggaaataacaacaaccttcaaacaaatgcaagttccaattacagaccatatggcatcgatacccaacaaggccccacgggagnnttaccaatggaaaanatatattggctt

SEQ ID NO: 8548 - DNA, 267 bp, Glycine max
  unsure (1)..(267): unsure at all n locations; Clone ID: 701148623H1
ggcacaagtgagtttgttgatcgagataactagaaacagtgtgatgaaaacgaaggtccttgttttcttcgttgctacaattttggtagcatggcaatgccatgcgtacgatatgttccctctccgaatgaacactggctatggtgcccgtactccggagtgaaatgcgcaagttggaggcntgctgtggaagcacacaacatctttggctttgagaccatcctgaagagtgcgttgaagcaacnaaggaatacatccatggcgaac

SEQ ID NO: 8549 - DNA, 262 bp, Glycine max
  unsure (1)..(262): unsure at all n locations; Clone ID: 701148624H1
ggagttcaacgagatggagcaaataaagcacagaatagttgaagtgaatggcataaaaatgcatgttgcagagaaaggagagggtccagtggtgttgttcctccacggcttccctgagctctggtactcatggcgccaccagattccctctctctcagctccctcggctaccgcgccgtcgctcccgatctccgtggttacngtgacaccgaggnaacaccttcaatcagcagctacaangnttccacatatnggtgattcg

SEQ ID NO: 8550 - DNA, 261 bp, Glycine max
  Clone ID: 701148625H1
gagttgttttggaaagccaggctgtctttattacaagcaggaaatcagtgatccaacggaaaggagtacttgaaacaacacatgagatgcttgagagattggaagcacatctcagggccattgggcagttcacggttactgcaaacatgaggggaagcagtgcagaggaagtggctgagagaatactgagtcaaccatcattaatgggtttgcagggacccactgtaatcctgttttctgcaagcgtgatgggaaggtaac

SEQ ID NO: 8551 - DNA, 257 bp, Glycine max
  unsure (1)..(257): unsure at all n locations; Clone ID: 701148626H1
gagagaagaaagtgtttagctttctcttacttacatcatcacttgctcgctgtgatattatctaacaaattattcatttcattgttcatactcactcgcacctaactccgccatggcttctcttcccaccnctttcgctataaccaaatctgcatcctccataaacaaggtggaccactctctggtcaagatcaaaccatacaacttctctctcaatctaaatcgtcaagggaccatgcnaacatctttaaccagaa

SEQ ID NO: 8552 - DNA, 252 bp, Glycine max
  unsure (1)..(252): unsure at all n locations; Clone ID: 701148627H1
aaagagacccggaaagggtgggaaccgcttttggaaatccattggggcttggatttaagactcccagggaagccatcganggaacctacattgaacaagaagtgccccttcactggcaatgtttccatccgtggccgtatcttggctggaacatgtcacagtgctaagatgaaacaggactattattgttaggagggattatctccatttatcaaggagtacagagtacgagaaaggcattcaacattctgt

SEQ ID NO: 8553 - DNA, 255 bp, Glycine max
  unsure (1)..(255): unsure at all n locations; Clone ID: 701148628H1
gggggaaggaaagaaattagaaatatttattcattgtcaccaaatcttgttccctgcaagagaaagaaagaagggagagaagaagttgttgggttgagttggattggatttctaatctaatctatacctttctttttcctatgcttttaaggcacaaacccttctttcttccctcttctnnnnnnnnnnnnnnnnnnnnnnntgcctttaccctttagggaaggaagaaggaacaactatactactatatcctat

SEQ ID NO: 8554 - DNA, 71 bp, Glycine max; identical to SEQ ID NO: 6746
  Clone ID: 701148629H1

SEQ ID NO: 8555 - DNA, 260 bp, Glycine max
  Clone ID: 701148630H1
gacacagttcacacaataataacatcttcattcgtttacccacttttctttacgaccttattccttcgattctgtcttagaatgacgaattcactatctccctgaaaccatgactgtgagggacagtcatcatcattgagccttacccagaactaaaaaagcaatctttatcacatatcacaattcacaaagcttctgtggttgatgggtagaaggggaatccaactgtttgatgagaaaagagatgtttttttctctgt

SEQ ID NO: 8556 - DNA, 262 bp, Glycine max
  Clone ID: 701148631H1
cacgagaaatgcttcaacaacatagtagtctgaagacaatcaagaagaaacttattaggaaagcccttgatatgatccgcaggattgctgatgaggatcctgacgagtcaactgacaaagaaaagaaagaagatgcatcctctgacaatgatgagaagaaaggtcaatattctaagttctggaatgagtttggtaaatccattaaacttggtatcatcgaggatgccaccaacagaaatcgtttggcaaaactgctcagatt

SEQ ID NO: 8557 - DNA, 264 bp, Glycine max
  Clone ID: 701148632H1
ggagagaagttattagggtttttgagtgcggcggtccaaacactcttctctgcagcttttgcctacaactcccttcaccatggctgaacaaaccgagaaagcttttctgaagcaaccaaaagtgtttctcagcacaaagaagactgggaagggaaagagacctggaaaaggtgggaaccgcttttggaagtccatgggcttggattaagactcccaggaagccatcgaaggaactatattgacaagaagtgcccttcatggcaa

SEQ ID NO: 8558 - DNA, 257 bp, Glycine max
  unsure (1)..(257): unsure at all n locations; Clone ID: 701148635H1
gatcgaagcaaaaaatgaaaacccaaagtgcttctctcctctgtctttttctctctcttgctatccttttggctagtggcactgctgcaagtgcaatccaagaagcgcagtgccaagccaccatgtttcaacatcaacagaagctttntccttccantttcccnttggaattgggtcctctgcttaccaggcagaaggagcagcaagtgtagatgggagaggaccaagcatatggggacactacatagacagctatg

SEQ ID NO: 8559 - DNA, 229 bp, Glycine max
  unsure (1)..(229): unsure at all n locations; Clone ID: 701148636H1
tcagatctggagcaggagaatagcgttgggagngttcncgtttgntctgcntttcctatcggcctcagcagacgacgtcgttgtgctctctgaagataacntcgagaaggaagttggtcagggcagaggagctggcgttgagttcnatgctccttngtgtggacactgcaaaaagctgtccagnatatgaaaagctggtagcagcttncaaggaagccaatctgntttt

SEQ ID NO: 8560 - DNA, 200 bp, Glycine max
  unsure (1)..(200): unsure at all n locations; Clone ID: 701148637H1
caaggatatagcttccttggnccaatattgtncacctccctcattantctcatcctcactggcatgatgcagatgttctccctcttcgggctaactgcgcanggtatctatggtgcnantggtgctatgtatctcgggntacatgtgtnaganctgacnactgatncaacgctcaantangattngtacatgggagctct

SEQ ID NO: 8561 - DNA, 260 bp, Glycine max
  unsure (1)..(260): unsure at all n locations; Clone ID: 701148638H1
ggaatcagattgagatggggtcgtttggtcggagaagcatgtccactgtggcgaaagcggtggaggaaatcaccggcactggcaacaccaagatccgcaaatcttccagcgggctctgcaccttcctcggcatccctcgccaatctcgttccgaaatcgctctcattctctccaagttcatcaaactctataatttcaagagtcccggcattaagaaggncaagatttgggagcagnattgcagacactgttgcgtggca

SEQ ID NO: 8562 - DNA, 118 bp, Glycine max
  Clone ID: 701148641H1
ccattttgtattgtttacatgcacagcaccgttcagaaggaggacaattcccctggcatcaccatcttgagtggatctatgaagaattcctgctgatttcaggacaggttcaaatttt

SEQ ID NO: 8563 - DNA, 223 bp, Glycine max
  unsure (1)..(223): unsure at all n locations; Clone ID: 701148642H1
gatcgaagcaaaaaatgaaaacccanagtgcttctctcctctgtctttttctctctcttgctatccttttggctagtggcactgctgcaagtgcaactccaagaagcgcagtgccaagccaccatgtttcaacattcaacagaagcctttttccttccacttttctctttggaattggntcttctgcttaccaggcagaaggagcagcaagtgtagatgggag

SEQ ID NO: 8564 - DNA, 251 bp, Glycine max
  unsure (1)..(251): unsure at all n locations; Clone ID: 701148644H1
ggagannnacgngccaatncatcattttctcacttctctgcnncttcttgttcaaatcttagganntgaggagaatccatcgagantaatatgtcnggtatcgctcgtggacgccttgctgagnaacganatcatngcgcaaaaaccatccanacggttnacgttgccaagcccgggantctacctgatggcancgtaaattgatggtctngcatgcatattcctggcaaagaccggactgttgggagggt

SEQ ID NO: 8565 - DNA, 252 bp, Glycine max
  unsure (1)..(252): unsure at all n locations; Clone ID: 701148645H1
ganaaaaaaaagaaacaaattgagcaatgaatttgtaaatagggcnaaagtaatggataaggaattaatttctctggntatattagaaaaccgaattcgattgtctaatgatgaaactaaaccgaaatatttnactaaaatatatgatccttcctgaacggacgctttcgtggacaaatcgaaatgtttntcanccnnnncccaatntgaaaannatgaaaaaaaaatnccattttgataataaaattcggg

SEQ ID NO: 8566 - DNA, 237 bp, Glycine max
  unsure (1)..(237): unsure at all n locations; Clone ID: 701148646H1
ggaaactgtaaggnctacgggtcggtngccccanaccatcctcctgctnaggggnacagtagactgtntggctgtgcaanagctgcanaatatagggncctnnattaccctccatccatcatttntgctacttctncaccacantntanattcttntnnccttcttannaaatattggacagtttcanatggttatnaggcaacangnattggtagaggggccaagcnncagncgaa

SEQ ID NO: 8567 - DNA, 262 bp, Glycine max
  unsure (1)..(262): unsure at all n locations; Clone ID: 701148648H1
ggctgaaaaaganaaaaaggaacatacgagangaatcttctgacaacatgcgaganacaataataataaatagtaaataaaattaaanaaggnnaaaaaaatggtcattcactgattcacgtgactaaataaatactgaaacctatcactttaccctcagttctgttgttgtgttgtgttgtgtgtcttcccttggtgttccagtttttatttgcagccgccatgtgcggaatcctcgcagtgttgggttgcgtcgacaatc

SEQ ID NO: 8568 - DNA, 256 bp, Glycine max
  unsure (1)..(256): unsure at all n locations; Clone ID: 701148649H1
aggtatcccaatctgttctaagcaaaggcacaaatatgaaactcggttaaacaactggatttcatgtgtaaattggaattatcacaaggatacaaaatgaatagaacaaaatgcctctggtaatagtcaagtagtctttcatcaccactatgcttagctatgacngcaccaagagcacaaacaccagcacgcccanagataatgtcatttgctgcaactcattaaccaaattattccttntnaggtttcacgcngg

SEQ ID NO: 8569 - DNA, 259 bp, Glycine max
  Clone ID: 701148650H1
ggagatgatggcatcatttgcagggactactcagaagtgcaaagcatgtgagaagactgtgtatttggtggatcagctcactgctgacaacaagatctatcacaaatcatgtttcagatgctaccactgcaagggtacccttaagttgagtaattattgttcctttgagggtgtttatactgtaagcctccattttgatccactccttaagaagactggccagcttggaccaaagttttgaaggtattccagaactgca

SEQ ID NO: 8570 - DNA, 275 bp, Glycine max
  unsure (1)..(275): unsure at all n locations; Clone ID: 701148651H1
ggatcactgatcagtggtttggtgttgttgatagagaaaatgcattccagccctttggcttcttgaggaacccattaggatggcatccatccttgagccatccaagcctactttttttccggctatgacgaaaattgttggcacacttggtccaaagtcacgatcagttgatataatttccccattgncttgatgcaggaatgtctgtggcaanggtttgacttttcnnggggggatcccagatacccatcaagggacatggaaaattgagattg

SEQ ID NO: 8571 - DNA, 246 bp, Glycine max
  Clone ID: 701148652H1
ggtgcttcaacatttgttctgtctggcagaaactggtgccctaaccgagcctctttgggatgctgctacaaatccgtatccatacccaagtaatgcagcttttgtacgcgagtttactataaaccttttaagcacttcatttcccaacatgactgcttccgaggttactccaatttgtaatggacttttggagtccacaaaatgactccccacatttaaaactcatatacgggatttcttgtacag

SEQ ID NO: 8572 - DNA, 262 bp, Glycine max
  unsure (1)..(262): unsure at all n locations; Clone ID: 701148653H1
ggggtgcctgtaatcgaaagagagaccaaaaaggcagttggtaatataagtttgcgagacgttcaattcttgctaactgcaccagaaacctatcatgattatagaggtattacagtaaagaacttcctgactgaggttagaagctacttggagaagaataaaaatgcatccccaatgttaagtgaatatgtcactgcaaaaaggactgcnccatccaaggatttgtttcagctgcttgatcaagggaggtccatnagtctat

SEQ ID NO: 8573 - DNA, 258 bp, Glycine max
  unsure (1)..(258): unsure at all n locations; Clone ID: 701148654H1
tcggtcatttactttgcaagtcatcttttaatgagtttgaaagtaaataagcgaaaccaaagttaaaatcaacacataaacaagcttttatccataaaaattgcttgantctgttcaaaggtccaatgccttaatggtctctttcacttttattggtaaaatgaaacttnccaaagtttaaaatcaaccctgcgcgtaagtttcttgcttttaagaactagtgggtctgagtnctcaccgcattgagggnacggtang

SEQ ID NO: 8574 - DNA, 254 bp, Glycine max
  Clone ID: 701148655H1
gttgcttgaaatattgggcagcacaatcaatggttttgctttgcctttgaaggaagagcataagctgtttctggcccgggcattgatcccgcttcacaagcctaagtgtgttgcactttatcatcaacagctttcttattgcattactcagtttgttgagaaggacgtcaaactagctgatactgtggtaagaggtctttgaaatattggccgataactaatagtgcaaaggaggtagtgttccttagtgagtt

SEQ ID NO: 8575 - DNA, 251 bp, Glycine max
  unsure (1)..(251): unsure at all n locations; Clone ID: 701148657H1
ggataaagaaaagagaaatggcaacagaaacaaaagtggcagtattaggtggcatcaccgaagtgcagggagctgccaacagcgtcgagatcaacaatctcgctcgctttgctgtagaggaacaaaacaaaagagagaattcagttctggagtttgtgagggtgattagtgcaaagcagcaagtggttgctggagtgaattactacataacttggaagcaaaagnggtgagttaaaaatgggtatnaagcg

SEQ ID NO: 8576 - DNA, 251 bp, Glycine max
  unsure (1)..(251): unsure at all n locations; Clone ID: 701148658H1
gacacaaaaaatttctagagcgagaaagtgagaggagagagaaagtagctgatcctccatggcctccaccagggaacgcgaaaactttgtctacaccgccaagctcgccgaacaagccgaacgctatcgagaaatggtggaagcaatgaagaatgtggcgaactgaacgtggaattgacggtcgaggagcggaaccttctgtcggtagggtacaagaacgtggtgggtgctcgtagggcttcgtggangat

SEQ ID NO: 8577 - DNA, 257 bp, Glycine max
  unsure (1)..(257): unsure at all n locations; Clone ID: 701148659H1
ggcttaatggaaggcccttgagcttttctttctttctctgctctcttttcttttaggtttccactctcacacactctccctcttctctttctctgcaataatctctcttctcttcttcactctctcaactcctgccaaacccccatttccgcagttctaaatttggagtctgatgactccgncattgctggtaacgaagatgaaggggcatgccatggctcgatgggagcatcggnactcaacatcctgnctgttct

SEQ ID NO: 8578 - DNA, 253 bp, Glycine max
  unsure (1)..(253): unsure at all n locations; Clone ID: 701148660H1
gatgatcagtctgaattagagaacaataggtttgggaaaaataaaacaatatggaagtgcatgagaatggtgggtctcctaggcagagccagagcctctcagagttgcagattgtgactatgatgagcgtgccacccctcaagatgaccgaaccncgagcagttcgcaaagttttggtgagtgaggacaacacaagggccatcatggatgctaccaagtagttatgtattatgagaatttgaaggagaaggag

SEQ ID NO: 8579 - DNA, 250 bp, Glycine max
  unsure (1)..(250): unsure at all n locations; Clone ID: 701148661H1
atagtaagagtttgtaatattattgtattgtagtagtagccatggggactttcaatcactatgtgattgttaagttcaaggatggtgtggctgttgatgaactcattcaagggntggagaagatggtctcggggattgaccatgtcaagtcctcgaatggggaaaggacttgaaagtcatgatatgctaagacaaggtttcactcatgttttcctgatngcatcaatgggaaggaggattcaacgctttc

SEQ ID NO: 8580 - DNA, 254 bp, Glycine max
  unsure (1)..(254): unsure at all n locations; Clone ID: 701148662H1
acttttaataaacatcactgttttttcaaaaagatgacgtagaacagaagtaaaacaggtaatttatttaaaatggggaaattcttgatatattatgnatataagttnanttgtcagtncnngntttactcaattanatactanagaggattttattcatttttcttattagcaaggcctattnnattcccatatttatctacaaattggttggtaattaattggctggttgggtgggttgagttgagttggga

SEQ ID NO: 8581 - DNA, 134 bp, Glycine max
  unsure (1)..(134): unsure at all n locations; Clone ID: 701148663H1
ggcttcannatggtcaccaaanaccngaaccggnctccagtatnactcacatcnanaccaccagtccttcnaattcaaagaattttgagggtgatgtgtcctcctagcacnataaagagnaaagngttggagca

SEQ ID NO: 8582 - DNA, 267 bp, Glycine max
  unsure (1)..(267): unsure at all n locations; Clone ID: 701148665H1
ggatttggatttgcatgacattctaattgagactgagaagcgtgggatagcttttgatcaattacttaccattcctgaacaagatgaatgggtatacagtgatgggaaatcaacaacatgtgttgcctttattctttcaatgtataaagcggctggaatatcgggcctatttctagctccatcaagtaactgaattcccaattcgtgatgcatacatgcntagggattttggaggataaccaaacacggctaccaagatggtgccac

SEQ ID NO: 8583 - DNA, 253 bp, Glycine max
  unsure (1)..(253): unsure at all n locations; Clone ID: 701148666H1
gataataggtcatggtatcaactgttttgttaacagacagttgatttacaattttccagaggagctctttgctgatgcgggaatattggctattgaacatgctgattttgatggtattgagcgtctggctttggtaactggtggtgaaattgcatcaacctttgacaatcctgagtctgttaagcttgggcattgtgaccctattgaggagatatgattggcgngnttaactgatcatttctggtgtgcnang

SEQ ID NO: 8584 - DNA, 263 bp, Glycine max
  unsure (1)..(263): unsure at all n locations; Clone ID: 701148667H1
gggagggcgaggtggtgtccattgcagttttctaatgaaaacaacaaaatagacacctgttaagaaggaggacaacgatggtgctgccgctatttactgctttcattctcttgcttttaatccgaatggattgttagcagttccttccaccgtcccggcattcccttgggcaacacattaatgaactgggccctgaaaatanatgaagggatctgtaaattaccnagtccatttcttcgaaggatctagcaaaatcctatttt

SEQ ID NO: 8585 - DNA, 249 bp, Glycine max
  unsure (1)..(249): unsure at all n locations; Clone ID: 701148669H1
ggcacaagtgagtttgttgatcgagataactagaaacagtgtgatgaaaatgaaggtcctgttttcttcgttgctacaattttggtagcatggcaatgccatgcgtacgatatgttccctctccgaatgaacactggctatggtgcccgtactccggagtgaaatgcgcagttggaggcttgcgtggaagcacacaccatctttggctttgagaccattcctgangagtgcgttgaagcaacaaaggat

SEQ ID NO: 8586 - DNA, 253 bp, Glycine max
  unsure (1)..(253): unsure at all n locations; Clone ID: 701148670H1
cacttaatcatggagttagagccatgtgtattaatattcccggatttgcataccacaaagcattcaaggcaaggaaaaatctagtggccatatttcaatctattgtggacgagagaagaaacttaaggaagggctatctgcctggaaaagccaaagatatgatggatgctctgatagatcttgaagatgatgaaagaaagttgagtgataaggacatcntgacatcatgttgatgtacttgaatgcgggncac

SEQ ID NO: 8587 - DNA, 232 bp, Glycine max
  unsure (1)..(232): unsure at all n locations; Clone ID: 701148671H1
ggaacctttgcattcnattcattcaagattcagcaagtgcgttttggaagcagagaccgaaatacttcgagatggcccgtacaaagcaaactgctcgtaagtcaactggaggaaaagctcccaggaagcagcttgcaaccaaggctgcacgtaagtctgcaccaacaactggtggtgtgaagaagcctcatcgttatcgccctggaactgttgctcttcgtgagattaggaa

SEQ ID NO: 8588 - DNA, 247 bp, Glycine max
  unsure (1)..(247): unsure at all n locations; Clone ID: 701148672H1
gacataacatctgacattgtggaatgtgaagtgaaaggaaaagaaaaaatgatccctgcatcaaaccctaatcctaaaaatgtgtacctcatcagaggtctgtaagtggagtttccctaccaacctatggatctcagtttgtgtttatgggtnaaatgatttccaccttaatctagctcagaaagaaggccatgtcgcagttgcttgagtctccaaccggtactgccagtcccttcattctatgtcc

SEQ ID NO: 8589 - DNA, 258 bp, Glycine max
  unsure (1)..(258): unsure at all n locations; Clone ID: 701148673H1
ggcanccagagaggaggaagctttgagagagagaganggatgagggagantgttgacgctccatcaagatgggtatttctagggattccatgcacaagaggcgtgccactggtggcaagaagaangnatggagaaagaagagaaagtatgagcttgggcgtcaggccgcnaacaccaagttatcaagcaacaanactatccggagattcgtgttcgaggttgcaanttnaatggagggcatggaggttngnaaccggc

SEQ ID NO: 8590 - DNA, 251 bp, Glycine max
  unsure (1)..(251): unsure at all n locations; Clone ID: 701148674H1
ggtcttcaattttttttttncgtgtcgttactttcatctctaactactcttctnctgcatcatttctctgttgcagcaccggttacgaaaattcgtggaaccgatttctggtgttgagctgcgattgcatgtggaaatcgatttctgattaatctggaagtttgatgtgcttgctgcttttggtttgaatttgaagtggtctaatggggaatatactgaatctgaacaattccaagactagntggaaggnt

SEQ ID NO: 8591 - DNA, 249 bp, Glycine max
  unsure (1)..(249): unsure at all n locations; Clone ID: 701148675H1
ggcacaagtgagtttgttgatcgagataactagaaacagtgtgatgaaaatgaaggtccttgttttcttcgttgctacaattttngtagcatggcaatgccatgcgtacgatatgttccctctccgaatgaacactggctatggtgcccgtactccggangtgaaatgcgcnagttggaggcttgcngtggaagcacacaacanctttggcttgagaccattctgaagagtgcgtgaagcaacaaagga

SEQ ID NO: 8592 - DNA, 253 bp, Glycine max
  Clone ID: 701148676H1
ggcacaagtgagtttgttgatcgagataactagaaacagtgtgatgaaaatgaaggtccttgttttcttcgttgctacaattttggtagcatggcaatgccatgcgtacgatatgttccctctccgaatgaacactggctatggtgcccgtactccggaggtgaaatgcgcaagttggaggcttgctgtggaagcacacaacatctttggctttgagaccattcctgaagagtgcgttgaagcaacaaaggat

SEQ ID NO: 8593 - DNA, 260 bp, Glycine max
  unsure (1)..(260): unsure at all n locations; Clone ID: 701148679H1
ggcatatccaaaggaacaaaaatattattaagatgatcaacattattggngcacttgttctactctttgcatttctcttcctcagttgtgtgtangcacaanacacaacaacccttgngcctgcaatcataacttttggtgattctgcngtggatgtaggcaacaatgantancttcccnccctttncaangctgattaccctccttatggganggacttgttaaccaccancctatgggnggtttgcaatggcaattag

SEQ ID NO: 8594 - DNA, 255 bp, Glycine max
  unsure (1)..(255): unsure at all n locations; Clone ID: 701148682H1
gacacaacacagaacaaaaacaaagaaaaaaaaacccttagccaacacaaccatcatggccacctctgctattcagcaatcagcattcactggtcaaactgctctgaagcagctcaatgagttcgtccgcaagaccggtggcgccggcaaaggtcgcactaacatgcggncgcacgtcaagagtgccntcagagctttggtnttggcctgaccgtnccaattactngggaccnttctcgggtngcttcantgtna

SEQ ID NO: 8595 - DNA, 241 bp, Glycine max
  unsure (1)..(241): unsure at all n locations; Clone ID: 701148683H1
gggnngtagccggcgagacaangtggattccttaattctcactggatatggggaagaaagaaggtgaagcccccgtgttgtggttcgaaacctctgactctgtctgttgccaacaccagtttgaacccgatgggtcgactctccgtagtgattgttgtggttccaggcccttataccaaagggntggtnggatcnttcatgantaantttttcccntcaggaaatccgnacatgggattga

SEQ ID NO: 8596 - DNA, 249 bp, Glycine max
  unsure (1)..(249): unsure at all n locations; Clone ID: 701148684H1
gacacacacgtaacttcatntgggttgcagggnnaaanactaataacatggggtccgataataccaacttggngttcttnaangagatcggtttnggctcctccaacattggttcttacattaatggccaatngaaagccactggttctctgncacttctgttgatccttctaacnatcngagcatagctcnagngactggagcgatntgcccgattattangagggatccaagcttgnatgancnacc

SEQ ID NO: 8597 - DNA, 245 bp, Glycine max
  unsure (1)..(245): unsure at all n locations; Clone ID: 701148685H1
aagacgacagaagggtacggctgcgagaagacgacagaagggtacggctgcgagaagacgacagaaggggataccaaaaacaaaacacaagccaagtggaagtgagaaaaaatanaaatcaaagagcataatgtcagggatcttcacaagattggggagacccttcatgtgggagggcgcaagaaggaggaggagcataagggtgagcacatgctggagattccaaggggagcaccatggtgaac

SEQ ID NO: 8598 - DNA, 234 bp, Glycine max
  unsure (1)..(234): unsure at all n locations; Clone ID: 701148686H1
cgagaacagtggaggtnttcctggtgctaaaaaagtnnggaatcatggtctagatgtagaacaaaagagtgaaatgcgagttccgagtctggtagctaggttgatgggtctcgaatctattccggcagctcagcgagacaagtcccaagaaagccttgtgtgctgatgggaagaaggaatctttgggtgaccattgtgagttggntaggcaaggcgtggatttgggaattggga

SEQ ID NO: 8599 - DNA, 254 bp, Glycine max
  unsure (1)..(254): unsure at all n locations; Clone ID: 701148689H1
gggacggaaacaataagaagaggctataccagttactcaaaatatcctaccagcattgctgcactgtcgtttagcagagatggacgcctcttggctgttgcatcaagttacacattcgaagaagggcctaaagcaggaactanagccgacgaacaagatgctatctacgtacgcagtgtaaacgagattgaggtcaagccgaagcccanagtatatcccaatcctccagcttgattcctgatggtggccttnnt

SEQ ID NO: 8600 - DNA, 106 bp, Glycine max
  Clone ID: 701148691H1
tgggtatatagttcgagaaccatcgctgaaaggtgtcggaaataataatacgataagattgggtcactcactgtaaagaaatctttgcaatctaattaaatcatca

SEQ ID NO: 8601 - DNA, 233 bp, Glycine max
  unsure (1)..(233): unsure at all n locations; Clone ID: 701148692H1
ggnngtagccggcgagacacagtggattccttaattctcactggatatggggaagaaagaaggtgaagcccccgtgttgtggttcgaaacctctgactctgtctgttgccaacaccagtttgaacccgatggtcgactctccgtagtgattgttgatgattccaggcccctataccaaaggatggctggatcttcatgaataaattttcccctcaggatatccgtacagtgtg

SEQ ID NO: 8602 - DNA, 254 bp, Glycine max
  unsure (1)..(254): unsure at all n locations; Clone ID: 701148693H1
ggaggcggagacgaagaagtgaagagaaganaagagaagggatttggatctgaaaagagaagatggggggaggaatggaagcaaacaagaacaagttcatagaggnttggggcactgccagagagaatctggagttcaatttccgttggactcgccgcaaccttgctcttgttggcatcttcggcatcgctattcccgtcctcgtctacaagggcatcgtccgtgaattccatatgcaagatgaagataatggt

SEQ ID NO: 8603 - DNA, 255 bp, Glycine max
  Clone ID: 701148694H1
gggaatcaccattctgacctccttactcgttacactactttccccccttttcgccttgcagcagtgatcgagatgctgggaaagacgaggaaggtttcggcgcgtggcgaatccgtggcggcgaatacgccttcggtccctccgaagatgacgtaatcatcaagcacaggcttctcacgcgcaccaccaccaccaggggcgaccctcccttgaagaagcttcagaagaagttcacctcgttcgtctccgaagtgg

SEQ ID NO: 8604 - DNA, 257 bp, Glycine max
  unsure (1)..(257): unsure at all n locations; Clone ID: 701148695H1
gggcttctgaaatgtatactagggttttgggctgtgtggccaaaccattggcgagcccagctgaacaaggcggtgtcgctgctaggagctggggagactgaagaggccaaaagagctttgaaagaagcattgaaaatgacgaatagggtgagtcgcatgatgcaatatctcatttgaagcagctgcagaaaaagaagaccaaacctagtaatgggggtgcttccggggangcatcctttgttattgttgaaccatct

SEQ ID NO: 8605 - DNA, 259 bp, Glycine max
  Clone ID: 701148696H1
gatgttagtcgctcatgcagactccttagggattccttttgaatccaacggtggtgtttgttgtataaattcttttgggatcaacccatgccatcatgttttagtgggattgatagacccatggtatcacttataatctgaagtcaggaaagtttcattggtcatacaccaaagtgtaaccatccattgccatccttcaatggtacatgcaatcggtcccaaaggcttatatgtcctactgtgcaaaattgtcaaagtt

SEQ ID NO: 8606 - DNA, 266 bp, Glycine max
  Clone ID: 701148701H1
ggcagaaacacattcttcgaaggaatttgtcaaagagtagccatcgccccaacgatcccgtttcccttcacttctctacgcaaagccccttgttttgcatagagctacttaaaatgtcggagggaaatgcggagagaggaaagagaattgccattattggtgtctcaaccttattgttggtggcgatggttgtggctgtcacagttggtgtcaatgttagtgagaatggttccaacaatgaggacacaaaaattgcttcttctgta

SEQ ID NO: 8607 - DNA, 264 bp, Glycine max
  Clone ID: 701148702H1
gataccttaatatttcaaatacccagagggagtaacctctccaaagcttcaatttttatacattatccacattccttgctagctttatccacatctacaaaatagagtcattagatttccgtctctctttctctatataactgtgccatatcttatagagatctccttttgatcatttccttcaaattaacaacaaaatcatgggtctgagagacattggtgcttcactgcctcctgggtttcggttttatccgagtggatgag

SEQ ID NO: 8608 - DNA, 264 bp, Glycine max
  Clone ID: 701148703H1
ggagccgaagtggcagttcaggtggcaaaacagaacctctcttatcttctttgtaagaactacgacgaagtaacaacaatggtggcgggaactgcaaccttgaagcttagcctctccgctttttcttctccaatgtcaaatttcagcgcttccccttcattcccctctcgtctcccaatgcggaaccccttcttcttctaaacctcgatttctcaggatttacgccttgaccagcaacgacatcaaggtcggcaccaacctcga

SEQ ID NO: 8609 - DNA, 262 bp, Glycine max
  Clone ID: 701148704H1
gggagaagaaaataagaggagacaacagatacatccttggttgggctctgggtttaaggagggaaattgattcttgttctttgggaaggataaggaatcaatctgatcgctggaagagaggaagtagcaatagtaatggaaatggggatttccaagacgacaacaaaaacaagcactgaggttaccgacaacaattccaattccaatagcaatagcagcagcaccactcagactgaaactgacaaccatatctccgttgctg

SEQ ID NO: 8610 - DNA, 259 bp, Glycine max
  Clone ID: 701148705H1
ggcacaagtgagtttgttgatcgagataactagaaacagtgtgatgaaaatgaaggtccttgttttcttcgttgctacaattttggtagcatggcaatgccatgcgtacgatatgttccctctccgaatgaacactggctatggtgcccgtactccggaggtgaaatgcgcaagttggaggcttgctgtggaagcacacaacatctttggcttgagaccattcctgaagagtgcgttgaagcaacaaaggaatacatcc

SEQ ID NO: 8611 - DNA, 259 bp, Glycine max
  Clone ID: 701148706H1
catgagagtacattgtctaagcagagagaggacttgcgggaatgggaaaagaaactacaggagggtgaagagaggctggccaagggtcaaagaattatcaacgaaagagagcaaagggctaatgagaatgacagactatgcagacagaaagaaaaggaccttgaagaggcacagaagaagattgatgcaactaatgtaacactgagaaataaagaagatgatgtgaacaataggtttgcgatattactctaaaagagaa

SEQ ID NO: 8612 - DNA, 269 bp, Glycine max
  unsure (1)..(269): unsure at all n locations; Clone ID: 701148707H1
ggaaggatgatgaggttgtcaatagcagggtttcgaagctcgttgcccttttctgcgctaattagacaggtcgagcaagagatggaaactgtgatgaaggtgcttcagcctggacccttgggaatcatagagcacaagttttccgccgacgaaattcgcaaggctaatgccacggtttctaaaggngtgaccaattggcgaaccaatgcgatcctcgaagactacaatcacgttttaaaagactatattcacaacaagtgaagccaatt

SEQ ID NO: 8613 - DNA, 259 bp, Glycine max
  Clone ID: 701148708H1
gagtggtgagggagaagaaaacaaggagaaaaagggagagggtgaagccaaagcagaagaggaatccaaagaagaaaccgcagtgttggagctgaaaaagagtgagtattattacaacccaccaccgaggtatggcatggagttctatgcctcctaccctggaccatcgtacccgcctcagatcttcagtgatgagaaccccaatgcctgttctgtcatgtaaaaatggtggatgtcaggggtaatactggaactttgg

SEQ ID NO: 8614 - DNA, 261 bp, Glycine max
  unsure (1)..(261): unsure at all n locations; Clone ID: 701148709H1
ggtgttaagaaatttaagtgaggagctagagaatgatgatgaagtctgctatgtgtgcagtggtggttgtagcacttcttcttctggcggaggtggggcccatggctgaggctgtgacatgcaccccaacagagttgagtccgtgtcttccagcaatcacttcnggtgcaaaccctncnatgttgtnncacgancctanaccnanaaaacccttntttgggnccccnnaaaaaaancttgngnnagangtttttnncnccc

SEQ ID NO: 8615 - DNA, 262 bp, Glycine max
  Clone ID: 701148712H1
atctctactggaatttacttgggcaatttaaaattcccagattttatgatttttaagtaatatttattcaaatccttggtgaatttccgagtgttattattatagtctattgaggaatgaggaatgctaaacagctacaagattgtgattatccacaatttaaaatgcattgatgtatatggtactatggttgtagattatactcccttcgtccctaaatataagactctttcaattaattcatgctccttaagaaaagtag

SEQ ID NO: 8616 - DNA, 261 bp, Glycine max
  Clone ID: 701148713H1
ggagtgtgacgataggagtggaaacgacgtgtcgcttcaatttgaagggaagtgcagtggaacgtgccgaaagaagtgcatcaatctggttcttctgggtagggcttgtgttgtgatagagtcttacagagaagagtgtgtgtgtgtgataattgggataagctctaatcaatcaatttcaatggcatcatccaattcgactcagcaagaagggaacaaacccgcaaagagaaaacccgtgttcaccaaagtggatcagct

SEQ ID NO: 8617 - DNA, 265 bp, Glycine max
  unsure (1)..(265): unsure at all n locations; Clone ID: 701148714H1
ggggagtgaactaaaaaagcataaagtatggcttcgacggcagcgtaccttgctcggcgcgcggcgcagaaggagagggtttggatcctctaccgccgcgccctcaaagacactctcaactgggccgtacatcgccacctcttctacgacgacgcttcaaacctccgcgaaaggttcgaggagaacagacacgtggaagaccctgataccattgacaggctcataacggatgctgagttcctaaaanaatngngccatcccgntc

SEQ ID NO: 8618 - DNA, 263 bp, Glycine max
  unsure (1)..(263): unsure at all n locations; Clone ID: 701148715H1
ggaagcaaaacaacattagcatcaaaaccagagtggttctagtaatccggtgctgctagaggatgggaactagtgaatggcatatcgagcgaagatctagcttcggcactgaatcccccttagcaagagaggcaggaaatgtgcctgaaactgggtcactctctattgttgtgcttggcgcttctggggatcttgctaagaagaagacnttcctgcaantttccaattaanncggagggatttnttccccanatnaatttcnc

SEQ ID NO: 8619 - DNA, 225 bp, Glycine max
  Clone ID: 701148716H1
ttcgcaaaccctaatttcggaaagatcggcgatggctgcctccaaggatcgcgagaacttcgtctacatcgccaagctcgccgaacaggccgagcgatacgaagagatggtggaatcaatgaagaacgttgcgaatctcgacgttgaactgactgtggaggagcggaatttactttctgttgggtacaagaatgtgattggtgctcggagagcatcgtggaggat

SEQ ID NO: 8620 - DNA, 260 bp, Glycine max
  Clone ID: 701148717H1
gatgctgagacacaacgctatgataaggtgtgtcattgaggcatgggtttctatattatttgtttaatgttttgaacatgttactttatgttgttccattacttaacttgttttccttttgacaaaaacttgggcggccttgttttgggctgaagatattttcatacccctgtttgataattttttaatttgatgattaacatggatgtgaaccttttacccacataagccatttatacttagaaaataaaatctctttt

SEQ ID NO: 8621 - DNA, 259 bp, Glycine max
  Clone ID: 701148719H1
gggggttttctgattaactctttcttctcataactctgccgccgcaacagccccaaatccaatggcttcagagaagaaactttcgaacccaatgagggagataaaggtgcagaagctcgtcctcaatatctccgttggcgagagtggagatcgtcttaccagagccgctaaggtgttggaacagcttagtggccaagcccctgtgttttccaaagcaaggtacacggttcgttccttgggattagaagaaatgagaaga

SEQ ID NO: 8622 - DNA, 258 bp, Glycine max
  Clone ID: 701148720H1
ggcacaagtttgttgagatagctagaagcaataagatgaaaatgaaagtgcttgttttgtttgttgctacagttttggtagcatatgaatgccatggctcagactaccagaagttccctctccaaatgaaaactgggtttggtgggcaatacagcaatgaggtggcatgtgccagttggaggcttggcgtggaagcaaacaacgtagtcaagtggcaaactgttcctgcagcttgcggagagtacatagctgactacg

SEQ ID NO: 8623 - DNA, 258 bp, Glycine max
  unsure (1)..(258): unsure at all n locations; Clone ID: 701148721H1
accaagtgaaaaggaggagaaaaatgaatttactactaaacagaaagcagacgtgtaaacatcatttattttcagttcaccaatcaataacgtgtgattttgacccaaaccgtggactgtttaccaatctaattaacacgcatggcaatggtgcactcgtgtctataaatgaatgagaaatatgagaagtgagaacacatttcaaaacataaagtggnnngtagcaataacagggaaagaacaaggtcaaaaaaccac

SEQ ID NO: 8624 - DNA, 224 bp, Glycine max
  unsure (1)..(224): unsure at all n locations; Clone ID: 701148723H1
atcacagtatccttaataagtcaaaactttgtcacaactttttcccatcactttgtggaaagatattcattctaagggaaaaatgacagaggagcaatccaaaaaggtggctgagactgagagttttccctctaatcctgcncctgaacctgttgttgttccaaaggaggatgtggcagaggagaaatctgtaattccacaaccctctccctctcctgctgatg

SEQ ID NO: 8625 - DNA, 256 bp, Glycine max
  unsure (1)..(256): unsure at all n locations; Clone ID: 701148724H1
gaaagaaaagagtaagagtatgggaggctcatggtcatggcagctcacatgtgccctcttgctactcttctccgccgtagtcaccgccactgaccacattgtgggtgcgaatcgtggctggaaccctggctttaactacactctttgggccaacaaccacactttctatgttggcgatcttatctcattcaggtaccaaaagaaccaatacaatgtgttgaggtgnaccaanctgggtatnacactgcnctagagg

SEQ ID NO: 8626 - DNA, 149 bp, Glycine max
  unsure (1)..(149): unsure at all n locations; Clone ID: 701148725H1
agttgtaccactctaatattggtcttgcttgcatggnaaganaaatagaaaganaaaaaaacaagttttttcttttatttgattgaagatttgaaggggaaaaaaagaaaaaataattgacttgaaaaaacaaaattctttagctttaa

SEQ ID NO: 8627 - DNA, 234 bp, Glycine max
  unsure (1)..(234): unsure at all n locations; Clone ID: 701148727H1
gggttcttaaactcgttaataaaccaaacacaggcaaaagagtggtattactgtgttagtgttaccttaccactcaggcaaaataatggggagtaagaaaaaaagtggtggaaagggagagattgtggatggttccaagattatggagttagttggaaacgagaaagttttcagcaactttgtggaccataagtttgataatnggntaaanncagagttggganctctccatga

SEQ ID NO: 8628 - DNA, 256 bp, Glycine max
  unsure (1)..(256): unsure at all n locations; Clone ID: 701148728H1
gggggttcagtgtggggcaacttgcaagaccaaacttgtgtatgtcccgcgctgtttggtttgtgcccgcaacacacacacgccgtggtgtaaacgaggttttaacgctatcatatcatctgtcctctttcttctctctggatttttctccatnctttcagggctttctttcttctcttttgcctcccatattccattctcctcaaaatatctctacattttcctctctaccccaacaaaattccaaaaatttccc

SEQ ID NO: 8629 - DNA, 239 bp, Glycine max
  unsure (1)..(239): unsure at all n locations; Clone ID: 701148729H1
gggatcaaaccanaaccataacaagaatcaaggaaccaaccaaccaccccatttcagctctctctggatattgtaatggaagcaggtttagaatcaatgggagtatcagaggcttggaaggctcatgtgggcatggctctggtgcagctattctatggtggntaccatgtcctaaccaaagtggcacttaatgttgggatcaaccaactagttttctgcttttaccgcgatttccttgc

SEQ ID NO: 8630 - DNA, 258 bp, Glycine max
  unsure (1)..(258): unsure at all n locations; Clone ID: 701148730H1
ggaggtttctgttcgtttcatttcatttggtcacacagtgttgtcggccactttctctctctttcgcgcttcaactttcgtttttgcactgattgaaattgtgaggagcaacagaccacttgagatagtttaactcagctgcagggatggatctgtggggtgctcatcancgacttttgtccatnggnngncntgnggaatatggaacncctgannacttctatgggagaggatcaaacgatgaagaagaaaaaatnt

SEQ ID NO: 8631 - DNA, 259 bp, Glycine max
  Clone ID: 701148731H1
taaagtaaagccttcattgaaagcaacttcagattcaggaaagccatcttcagcctttgtaaattctggttttcccagtaatttggacaacactaataaaaagaattcggataaccattttgaagattcaacaaaatctcgttctagagttatgcaggctcatttgcaacatttgagagcagatcatgcagaagttggatctcaaaacaaattggcagaaatgagcagtaaatatagaaatagtgaatctggggttagc

SEQ ID NO: 8632 - DNA, 222 bp, Glycine max
  unsure (1)..(222): unsure at all n locations; Clone ID: 701148732H1
gatcgcacttaacacatcacacagcaagagaaagagtaatagaatcgtggttcgtttgcagaagaagaggttaagagaaggagtgaccgaagcgaagatgttaccaacagcttccaaaggacgnnnnnnnnnnnnnnnnnnnnnnnnnnnnnnnnntcgacctaacaatcccatgctgcttccctacctccgcagaatcatcaagtggcaacaaatggatat

SEQ ID NO: 8633 - DNA, 274 bp, Glycine max
  Clone ID: 701148733H1
ggatcccatttgaaatcaaaatcaaaaacaccaaatcctctaattcaagtttgcaccaagttttcctgagaaaatgtctggtcgtggaaagggtggaaagggtttgggaaagggaggtgccaagaggcacaggaaggttcttcgcgacaacattcagggcattacgaaacctgcgattcgtaggttagcgagaagaggtggcgtgaagaggatcagtggtttgatctacgaggaaaccagaggggttctgaagatattcttgggagaacgtgtt

SEQ ID NO: 8634 - DNA, 257 bp, Glycine max
  unsure (1)..(257): unsure at all n locations; Clone ID: 701148734H1
agttgtaccactctaatattggtcttgcttgcatggaaagaaaaatagaaaganaaaaaaacaagttttttcttttatttgattgaagatttgaaggggaaaaaaagaaaaaataattgacttgaaaaaacaaaattctttagctttaatttttntcgtttctctcccactttncttcttctgcacaatcaatcatagtataaangtnaaaaaaancntcgnnggtganaatccnncntggaangggggnttttttt

SEQ ID NO: 8635 - DNA, 258 bp, Glycine max
  Clone ID: 701148735H1
ggagttctaatatatcattcaaaagtttttgaaatgttgtcaccccttcttctatttctatgcctaactcttcctttgtttttgttgtccttcttcaaataccgtaaaaccttcaagaatccaccacttccaccaggtcctagaggccttcccataatagggaatcttcatcaactagatagtccttctcttcatgagcagctatggcatctctcaaagaaatatggtcctttattttcccttcaatttggattaagg

SEQ ID NO: 8636 - DNA, 232 bp, Glycine max
  unsure (1)..(232): unsure at all n locations; Clone ID: 701148736H1
cccttagccaacacaaccatcatggccacctctgctattcagcaatcagcattcactggtcaaactgctctgaagcagctcaatgagttcgtccgcaanaccggtggcgccggcaaaggtcgcactaacatgcgccgcaccgtcaagagtgctcctcagagcatttggtatggccctgaccgtcccaagtacttgggtccattctcggagcagattccatcatacctgaccg

SEQ ID NO: 8637 - DNA, 257 bp, Glycine max
  Clone ID: 701148737H1
ggtttctcttgttttgtttcacagtctgcagagtgcagagccttctctcctctattttgggcttccaacctttttgctccattcattctcaacaacaaaccaatctctatattttgcttagacaatgagggggagcttgtggcaacttgggcaatcgatcactcgccgtcttgcccatggagataagaaggctgttgctcgccgatgttttgcctcagaagctgagctgaaaaagacagtgtttcatgacttccatg

SEQ ID NO: 8638 - DNA, 254 bp, Glycine max
  unsure (1)..(254): unsure at all n locations; Clone ID: 701148738H1
gaccacattccaaaacacaaacacatacattgtagtatcacttttgtctcggaatttgttcttttgagttatggcaagcttaaaggttgcatgtgtggttttgatgtgcatggctgtgatgagtgcaccaatgatggtgcaagccgtgtcatgcnatgatgtttctgtgaacctagcaccgtgcctatcttacctgatgcagggtggagatgttccagaatcgtgctgtagcggagtgaggaacatcctgggtt

SEQ ID NO: 8639 - DNA, 267 bp, Glycine max
  unsure (1)..(267): unsure at all n locations; Clone ID: 701148740H1
gacaacaaaaaactacttctcaattcagttaacacaccaaccccacatccaaagcttcagttcaatatggcaaccttgtcaagttttgctcctttggtcattctaagtttagttctagtaattagtgccattgtctttgaggctgaagctaggccaaggacattctttgtatttggagattcacttgttgataatggaaacaacatnacggggctncnagggnangtgcggatncccccccnangggnattcnccccccncaaagac

SEQ ID NO: 8640 - DNA, 255 bp, Glycine max
  Clone ID: 701148741H1
gatgctgagacacaacgctatgataaggtgtgtcattgaggcatgggtttctatattatttgtttaatgttttgaacatgttactttatgttgttccattacttaacttgttttccttttgacaaaaacttgggcggccttgttttgggctgaagatattttcatacccctgtttgataattttttaatttgatgattaacatggatgtgaaccttttacccacataagccattttatacttagaaaataaaatc

SEQ ID NO: 8641 - DNA, 261 bp, Glycine max
  unsure (1)..(261): unsure at all n locations; Clone ID: 701148742H1
gagagatggaaatgataatggagaaacaaaagagtgctgtgaaacacacaagggcgtttgtggctgagaagcacctcactttgttgatgagatttggttcaaaataatgctcacctccaaaagctcatccacttcaaaaaaaattccaattctcctttcctttcatttgcacgtatacacattacaacaagttttttttttttngnggcccatctaacttngtctctattccaccaggtatttatcngcccttgctatttt

SEQ ID NO: 8642 - DNA, 113 bp, Glycine max
  Clone ID: 701148743H1
ggctcctcctattgcgacgccatttcgaaagttaggtcatctagggttatttcaactctgatgcctaaatgcaggttgggtcaggtcgccctaaccaagtttcaactcaaccc

SEQ ID NO: 8643 - DNA, 254 bp, Glycine max
  Clone ID: 701148744H1
tattgcacttggtaggtcagtggacctcacaaaattcagtgattatggggaattaattactgaattggatcaactattcgaatttggaggtgaattaacttctccacaaaaggattggcttattgtctacactgataatgagggagatatgatgcttgttggtgatgatccgtggcaggaatttgttgcaatggttcgcaaaatttatatctaccccaaagaggagattcagaaaatgagcccgggtaccttga

SEQ ID NO: 8644 - DNA, 269 bp, Glycine max
  Clone ID: 701148745H1
ataaaagaagcaactttttcatcagtggtgagagctatgcagggcattatgttcctcaacttagccaagttattgtaaagtacaactcggttacaaaagaaaatgctataaatctgaaaggtttcatggtaggaaatgctctaacagatgatttccatgatcaattgggaatgtttgagtttatgtggtcaagtggtttgatttcggatcaaacatacaagcttttgaacctactatgtgattttcagtcagttgagcacccgtcacat

SEQ ID NO: 8645 - DNA, 278 bp, Glycine max
  Clone ID: 701148746H1
ggagttctggatttgtttggtgctgaccctttttggttatatacctggaattatctatgctgtctatgctatcaccaagtgatcaccctttaactttgtgtggacaataaacaaatgtcatgggcgtttctgtctttcaactcagatattagtgtttctttaatatatcgccaatgttgtcatattcttatgttctgtttttaaaaccccttttgttcttagcttaagcgagagtggagtgtgtagcttactagcttgtgtatgtagtctctagattt

SEQ ID NO: 8646 - DNA, 235 bp, Glycine max
  unsure (1)..(235): unsure at all n locations; Clone ID: 701148747H1
gaaggagatgangaattgaccgatagggccaaagttgacgacatgtgtcatgtccatggccttatactatgttcaaatgatcctcttgttcccttgccctccatttttaccttcaacaattttctggttatctcccttacactttgcaacctctgattgaaccaaacgttatctttcttcatcatcgtctcatacacacatacataccctttagaaagttcttcatactcttcca

SEQ ID NO: 8647 - DNA, 258 bp, Glycine max
  Clone ID: 701148748H1
gactgccgcggaaacagaacaggggactcactctcttcgcagcggcactctcggtggctttcatcttctcggggtgagttgtcaagatgtacacatcgaggaagaaaattcacaaggataaggatgctgagccaactgaatttgaggaatcagttggacaggcattgtttgatctagaaaataccaacaatgagctgaaaagtgatctgaaagatttatacataaactcagctgtccaaattgatgtttctggcaacc

SEQ ID NO: 8648 - DNA, 257 bp, Glycine max
  unsure (1)..(257): unsure at all n locations; Clone ID: 701148749H1
gagattaagttgtgggactgagtggctgctattatatatttataaagacttgtgtaagtctccaacattcccatacccaccttgctctcattttttggtgttccattaattttcctttggaagaagaagctataggcgatgggaaattgccaagccatcgatgcagcancnttngtgattcagcacccgattgggaangtaganagttcgatgcacctttgagtgccacacatgtcatgaaaaccaaccctggtcat

SEQ ID NO: 8649 - DNA, 248 bp, Glycine max
  Clone ID: 701148750H1
gacaccaacaccaaaacaaacccactaagatggcttcctttgtatccttcctagtgctgcttcttgcagcccttatcctcatgcctcaagggcttgctacttactacaaaccaattaagaagccaccagtgtacaagcctccagtgtacaagccaccagtgtacaaaccaccggtctataagccaaaaccaccggtttacaagccgaaaccaccggtttacaagccaccatataagaagccaccatac

SEQ ID NO: 8650 - DNA, 221 bp, Glycine max
  Clone ID: 701148752H1
agtgcagaaaaaatgagactgttcgatccatggcctgttttcttcaagagagaatggaagcggaattggcccttcttggttggattcgccatcaccggaactctcatcaccaaactttcccttggtctctctgaggaggaaaccaaaaagtcgaaattcgtccaggcacacaagaggtgactttagaatggaagatttgcagtggctttgcacattgtatt

SEQ ID NO: 8651 - DNA, 234 bp, Glycine max
  unsure (1)..(234): unsure at all n locations; Clone ID: 701148754H1
catgtaccaatgaattgttgttctgagtaatcacatcttggtctctttcaataagttctcaaaaaaaatatgattgaaattttttttttattaaaaatattattttcaaacaaaaattaatcatcgacaaaaactaataaatacttcaacttaatatcttgatgaaaaaaaannnnncccagatttgagatggtttgagcataacaagataagtttgaatgccttaagtaaaaa

SEQ ID NO: 8652 - DNA, 251 bp, Glycine max
  Clone ID: 701148756H1
tggataatcgaatttatttgtataacactcttcaacttgaaaaagggctttaaaatctttttctgggtgccgaattgaatcattttttgtaaagtctgcaattagccctgatgcatcgaacatagtcagtggttctagtgatggaaatgcctatgtttggaaggttgacaaacctctggaagatcctactattttgaaaggtcatgatggcgaagttacagcagttgactggtgtagctctgaaattggga

SEQ ID NO: 8653 - DNA, 256 bp, Glycine max
  unsure (1)..(256): unsure at all n locations; Clone ID: 701148757H1
ggatattcatgatcaantggnaggtcttttagagagggntgagattgaactaacttcaaatactaatattgagatgcnatcaagaaatccattacatctggtaaacttataagactaataatttcttgcaacgcggatctttcntattatactgaatctaatgtnaacctgtnnagggntgttcccacanctgcangctgcnaaagcatgggncatnncggacttttaaanatnccnagactgttcacngacatcc

SEQ ID NO: 8654 - DNA, 252 bp, Glycine max
  Clone ID: 701148758H1
catcttcacagcatcttctgatgactttaatgatctctgcagtgcttcacatcttcttaggtaggcataatctttacaatggaccacttctttggcagcttcaacagtagccttgatgttcttcaaatcagccttaaaagccttggaaatagcctttgtcctatctgccacatctttcttcactttctccaacattgacttcatctcctcctccctctggagaatgttttccctgcttgactcctggaaatc

SEQ ID NO: 8655 - DNA, 262 bp, Glycine max
  unsure (1)..(262): unsure at all n locations; Clone ID: 701148759H1
gcgtcaacaactgcgggcgtcaccggaaaccctgccacgaataaacatgtgccagaagtggcttcactgcctctaccgccaccacttccggcgccggaggtgccggaatagcttctccggcgaccagatccggcgtctccgcgcgtcctcagaagagatcttttcctgaagagccctcgccggtggcggatcctccttcttcggaccagacgacgccgtcggaggcgaacgcgtggtcaaccgctgctccggatgccngcgg

SEQ ID NO: 8656 - DNA, 220 bp, Glycine max
  unsure (1)..(220): unsure at all n locations; Clone ID: 701148761H1
aggatgaactgcctcccgagtggtgctgtaggaccatcaaatgatgttgaagaaggagagattgattgatttgttccccttgattgttccattattttgaacggatatataaacggtatttctggggaacagttgctggacttaagagntgntgntttttggtggncaacggggancnntccngnaanantatngcggttgatancccncnccccccccc

SEQ ID NO: 8657 - DNA, 250 bp, Glycine max
  unsure (1)..(250): unsure at all n locations; Clone ID: 701148762H1
ggagcccatgactaaatatgatcctgaagtagtcatggagttttatgcaaatgtctagcctattgaaaagggcgtcatggataagtgctccagagtgtggggccaatggattccctatgacatagatgctatcaaccaattcttngggcatccattgatcttagaagngggatagcgatgcgaatacacagagagaagangccntttntaggttttgatgaagngnccatnggttaactattttnccccc

SEQ ID NO: 8658 - DNA, 254 bp, Glycine max
  Clone ID: 701148763H1
acctcatatgatattggaactggatttggacattttgctatcgcaactcccagatgtttacaaattggttgaagacatccgggctaagggtggaaatgtcaccagggagcctggtccagttaagggtgggaaatctgttattgccttcgtgaaggatcctgatggttatgcttttgagctcattcaaagaccttcaacccctgaaccattgtgccaagtaatgcttcgcgttggtgatttagagcgctcaatta

SEQ ID NO: 8659 - DNA, 277 bp, Glycine max
  unsure (1)..(277): unsure at all n locations; Clone ID: 701148764H1
gngagagagaganttcgagggcagctaaacaagttaaaagaagagcatcactgaactaacaaagcaaccctatgtcgaaggtggtttgtgtcaccggagccagcggcgccatcggatcatgggtggtcctactcctcctccagcgtggttacaccgtccatgccaccgtccaagatatcaaggatgaaaatgagacgaaacatttggaggaaatggaaggagcaaagagtcatctccatttttttgaaatggatcttcttgacatcggctccattgc

SEQ ID NO: 8660 - DNA, 117 bp, Glycine max
  unsure (1)..(117): unsure at all n locations; Clone ID: 701148765H1
gttatgcangcnggtatggctttcgntncaatttttgtacantgcagtgtctcacaggttctatagttcaancgtagtattanctttgaagtgagcnaaatnagttttaanaaagta

SEQ ID NO: 8661 - DNA, 254 bp, Glycine max
  unsure (1)..(254): unsure at all n locations; Clone ID: 701148766H1
tccatcatgaacctcaattcacgactttcccattttcattaagttttattgatcgatatcttcaccactctcagtgttttatccttgatttagtctttggttcataactccatcacaaaggtcctatgttttattccaacttcaagtaattgcatcctccttgctttaggaacttagagtctcaggtcatgnatttaaaatgtttacnacttttnaaagggggaactnccaaaagggattantgagcacttagt

SEQ ID NO: 8662 - DNA, 252 bp, Glycine max
  Clone ID: 701148767H1
taaacttgtgaagcatgatttgatgacgcataagacaatttttaatatttgtatttatttgcatgtaatcaaaataattaggaatcatgatttgcattaagacacaaatgtcttttggcttaacacaactcttcttatattaattggcttcatgaaaaagtaatcattgtctctaaacgacattcattatgcatcttagtcatcgtttgaaactaggtgtttgttggagcattaatgtaacatttaatgttt

SEQ ID NO: 8663 - DNA, 255 bp, Glycine max
  Clone ID: 701148768H1
gatagttgacaaatgaagattataagccagcaatagcatcaactgtgatctgctgtccaaaatcctgcgttatatatgcagcaaacggcaaagtttctttaattcttcatatatatttattttcacaatccgatcaaagcaagaccaacatatatattcattcatcttcacgtacatatccctcgttagttttcagataatatggagcaggagagtgagacaaacattgtgctgacgaagccattctctttaggg

SEQ ID NO: 8664 - DNA, 254 bp, Glycine max
  unsure (1)..(254): unsure at all n locations; Clone ID: 701148769H1
gagagaaagaaaaggaggaaatggaggaagcactttttaagacggtgaagaagagcaaaggtgaaattatgggttcttctccggcaacatattgtgttaccggagcaacagggtatattggttcatggcttgtggaggctcttcttgaaagagggtacactgttcatgctactgttagagatcctgaaaagtcactacacctgttgtcattgtggacaagaggtgaccgnttgagatttcnangggggnttaaa

SEQ ID NO: 8665 - DNA, 243 bp, Glycine max
  unsure (1)..(243): unsure at all n locations; Clone ID: 701148770H1
gacaccaacaccaaaacaaacccactaagatggcttcctttgtatccttcctagtgctgcttcttgcagcccttatcctcatgcctcaagggcttgctacttactacaaaccaattaagaagccaccagtgtacaagcctccagtgtacaagccaccagtgtacaaaccaccggtctataagccnnnaccaccggtttacaagccgaaaccaccggtttacaagccaccatataagaagccac

SEQ ID NO: 8666 - DNA, 262 bp, Glycine max
  unsure (1)..(262): unsure at all n locations; Clone ID: 701148771H1
gaattcaaaatatatcatcaattataagcatgggtttgtggaacacaacgaatgcagtgtcttgccgctttcacaagtttggtgatgaccaaaagaatctggtcttccaaggtgatgccacgtcttcttccaggggcatagaactcacaaagttagacggtggaggaaaaccagtggnnggcagtgtggggagagtgttatactcttctccagtgcacctttgggaaagctctacagtggtcgcaagctttgaaaccgactt

SEQ ID NO: 8667 - DNA, 240 bp, Glycine max
  unsure (1)..(240): unsure at all n locations; Clone ID: 701148772H1
ggaacngggaataaggaaacacttcgcctcggtgcgcatccncatccaatctaatcaacaaaagaagagtagagcgagagtggaatagaacaaagaagatgagcggcgccagcngcactataaggctatcgccgatggtgagcgtgtccccgaattgcaattgctcatcgntgatggtgatnaaagaagncgncggacggcgtggctcctttgtggatnaannncangctctntnggggt

SEQ ID NO: 8668 - DNA, 259 bp, Glycine max
  unsure (1)..(259): unsure at all n locations; Clone ID: 701148773H1
gaggatcatcanactaaactanatcanatcannatcaaactttgtcacggttatattagaccctttataaacctctttcaaggcttttcaatcannccctttctctaatcacttcttcttgtgctggcataacttcancaacttattctttgtnctcgatctcacgatggctcattgggccctgtctcagatgggctgtaactgttcctggtnggcgcgatttggncncncagaaagatcngcgggtnaaggcactant

SEQ ID NO: 8669 - DNA, 251 bp, Glycine max
  unsure (1)..(251): unsure at all n locations; Clone ID: 701148774H1
ggatgcaaaagttagtagtagtgaagaaaatgaaagtccttgttttctttgttgctatagttctagcagcatggcattgccatggctcagaccatgaccatgaccatggccacacctagncaaattttccctctgagaatgaaaactggccatggtggccactacattccggaggtatcatgccaaagttggaggcttggtgtggaagcacacaacgtcattgactggaaaaccgttcctcaagattgcga

SEQ ID NO: 8670 - DNA, 262 bp, Glycine max
  Clone ID: 701148775H1
gaagtgaaatgggggaattgacttagcatctgagcatgaaagatacctaacagaggtaaagtttccagaagcccgtcattgtatataactatccaaaagatatcaaagcattctacatgcggcttaatgatgacttaaagacagtggctgctatggatgtgcttgtacccaaggttggagagctaattggtggaagccaaagggaagaacgttatgatgtcatccagacaagaataaaggagatgggtttgcctgttgagcc

SEQ ID NO: 8671 - DNA, 252 bp, Glycine max
  Clone ID: 701148776H1
ggggggtaaaacagaaatcttattattcctacctgttagtaacattcatttacttaaaacttccgaggatgtttccggatgtgttgtttatgcttaatattttcctattttactaaaaatcatataaaaaaaaactttttagatgttctaatagaaaggattcttgtttttcgtcaatggtgttagccctgaatcctttttttgactctctaacagtaattccgctattattatagtctttttagtgaataa

SEQ ID NO: 8672 - DNA, 100 bp, Glycine max
  unsure (1)..(100): unsure at all n locations; Clone ID: 701148777H1
gggatanaattatggtaaaattnggctctccgaanaactaaaacgngggagaattcggnngttaccgcanaggtnaccatggacctaggttttttttttt

SEQ ID NO: 8673 - DNA, 264 bp, Glycine max
  Clone ID: 701148779H1
gaggaagatttctagtgacttcaacatgatgatggatcagaaactatacacatgtgagcatccccaatgcccttatagcgaagttcgccttggtttccatgataggtctgctagggacaatcatcaattgaattgtgcatacagaaacagttctgcagattatggtggtggtcccaatttccatgctactgaggataagccagtcatattcccccagtcctttgttcaacccaacactacaacacagtctgcaagtttggttgc

SEQ ID NO: 8674 - DNA, 256 bp, Glycine max
  unsure (1)..(256): unsure at all n locations; Clone ID: 701148780H1
ggcgcatcgaaccaaaattagggtttttgtcgtagcaggaagaaccagncaatnggcgccgaagataacacgcaaggtcagcagaaaccccgaattgataaggggaatcggaaagtactcgaggtcgcagatgtaccacaagaggggcatttgggctatcaaggccaaaaacggtggcgttttacctcgccacgaccccaaacccaaacctgaaactcccactgaaaaaccacccaaattttaccccgctgatgat

SEQ ID NO: 8675 - DNA, 253 bp, Glycine max
  Clone ID: 701148781H1
atctcaccagaagcataaacaattagctaaaaagtaagaccacattgctttactgatgtctggaaagtagaggaggtggaagagaaaattgtgccatgtatggagaggttgcagctggttctagtaatgaaagtttttatataatctacaaaaatttgcaattgcttaatgtaacagaatacaccaccaatcaattatataagtagttgcacttctttgaatctttatgtcataacataaatttaagctcttc

SEQ ID NO: 8676 - DNA, 253 bp, Glycine max
  unsure (1)..(253): unsure at all n locations; Clone ID: 701148782H1
gactgcgaaccagtagggactcccattccgactcttagccgccgatctctcagggcttgcatcttctcaggtaagctgtgaagatgtacacatcaaggaagaaaatccacaaggataaggatgctgaaccaactgaatttgaagagtcagttggacaggcattgtttgatctggaaaataccaatcaggagcttaaaagtgatctgagggntttatacataaactcagccgtgcattgaagtttcntggaaac

SEQ ID NO: 8677 - DNA, 253 bp, Glycine max
  Clone ID: 701148783H1
cctccacacccacctgctctcagctcaaagttgaatctggggtggctggtttacccatctactcccccaaactcatggaagggagttgtaaccatcgaggattgggtcactttttttttccccttcaaattattaattattaatgttctacattcacgcttcacctgcttgctggttgaaagataaatatttatcttggtaaaaaaatgattaaagtatataaagtgtccagtgtcctcacttaaatctactt

SEQ ID NO: 8678 - DNA, 221 bp, Glycine max
  unsure (1)..(221): unsure at all n locations; Clone ID: 701148784H1
gtcgtaanaggaagagagagtctaagtcagaaatgctaagttggattactagcattgctaaaaatccttgtgattccacagtcggttcgattcctgaaaagtctaagtggaagttttacagtngtcncgagatctggaagcaggttttgttgtttcgagaagctgtctttctgaagaaagattttgagacaaccagtgaacagcttaattggcaggacaga

SEQ ID NO: 8679 - DNA, 248 bp, Glycine max
  unsure (1)..(248): unsure at all n locations; Clone ID: 701148785H1
gaacactgttgctttggtgattataaatcctgggaatccttgtgggaatgtgtacagttaccatcatttggagaagattgctgaaactgcaaaacgggttggaacaattgtgattgctgatgaagtttatggccatcttgcatttgcgggcaagccttttgtgccaatgggagtttttggctctattgttcctgttctgactcttggnnnnattttctaagagatggatagttcctggatggaggctg

SEQ ID NO: 8680 - DNA, 250 bp, Glycine max
  unsure (1)..(250): unsure at all n locations; Clone ID: 701148786H1
gataccaaaaacaaaacacaagccaagtgaaagtgagaaaaaataaaaatcaaagagcataatgttagggatcattcacaagattggggagacccttcatgtgggagggcacaagaaggaggaggagcataagggtgagcaccatgctggagaatacaaaggggagnaccatggtgaacacagtagtgagtacaaaggagagcatcatggtgaacacaaagctggagagtaccatggtgagcacaagcca

SEQ ID NO: 8681 - DNA, 229 bp, Glycine max
  unsure (1)..(229): unsure at all n locations; Clone ID: 701148787H1
gcttcttgcggcgtganatcgtgcgattataccgatncctaacagagtgagatttcagggttacataatgaccaagaagaagaaacaaaatggggttgttgttggagagggtgatggtgttggtggtgttgtagatttggagtctgtcatacacaaccacgctctttttttcgacaagttgattgaattgattcccgccaagttctatctgccaactgatgacaaggag

SEQ ID NO: 8682 - DNA, 250 bp, Glycine max
  Clone ID: 701148789H1
ctctaccaaaggcaagcataagtggtacaatagcataagtgcaagaagccataactgataaagccattgaatatgttgctgcactatacccatctaactaacagaaaacctaatgtatccttccaaaaagctgttttcttttattaaagtggtaacaaaatcctctaaagtgagcttgtccctgaagtatgggtgtatacaccattaaattttagtaagtaaagatcacgatgaactttaaaataaataa

SEQ ID NO: 8683 - DNA, 248 bp, Glycine max
  unsure (1)..(248): unsure at all n locations; Clone ID: 701148791H1
gggagttcaacgagatggagcaaataaagcacagaacagttgaagtgaatgggcataaaaatgcatgttgcagagaaaggagagggtccagtggtgttgttcctccacggcttccctgagctctggtactcatggcgccatcagattctctctctcagctccctcggctaccgcgccgtcgttcccgatctcngtggctacggtgacacgaagnaccacttcaatcagcngctacaactgttccacac

SEQ ID NO: 8684 - DNA, 129 bp, Glycine max
  unsure (1)..(129): unsure at all n locations; Clone ID: 701148792H1
gaagaagaagaaggagcatggccatgagcatggccatgacagcagcngcagcagtgacagtgattaaactgctgcatcacctatatatttaaaaggtttacgggaccatagtagcgagggctgtgcctt

SEQ ID NO: 8685 - DNA, 255 bp, Glycine max
  unsure (1)..(255): unsure at all n locations; Clone ID: 701148793H1
ggttggttcaaaattatactctctctaagttttaaccttatgaatatggatatgtgccaaaatgtatcagtttccggtgagtgccaacaagtgcaggtttttgccccttcttgctcaagcagccttgatgacctcttctctgctcagaacacggaagtggatgttgagttggagtggctttcagagtttgttgaagactgttntncnnncccgccaggntgtgtctngtangtntgggnnacagaacaanaaacc

SEQ ID NO: 8686 - DNA, 254 bp, Glycine max
  unsure (1)..(254): unsure at all n locations; Clone ID: 701148794H1
gttgctaacacaagtaacagtgataagccagaagagaatgtggctgtcactccccagctgcactgaaagaaaacctacaaaacaagtattcttagacatatctattgatggcgancctgttggtcgcgttactatagggctctanggagatgatnnccctgcaggagttganaggtttagnaagnttgcangtggtgctgntgntatnngccacagaanagnggttttcncaannatantcccnatttnngtcc

SEQ ID NO: 8687 - DNA, 151 bp, Glycine max
  Clone ID: 701148795H1
gctcgagcgttttcaaaaccctaaattgaagaaatcccaatttcccctcctctctctctgctttggatgattttcaaccaaaaatctgtgcttttgtgcttttcgaatcttttgctctgatgggtacttccatcttctattgttcttctct

SEQ ID NO: 8688 - DNA, 254 bp, Glycine max
  Clone ID: 701148796H1
ggagtgtgtgagagagcgagcgagcgagcagtttcaaagagaggatttgggattgggaagggcgagggattgcgctgcgtctcttcctcttctctttcgattcatccctcattcataatcttccaatccaacaacctcagcctcacactcacacatacacacatctgaacgcgtatcgtccctcccatggcttcaaagcgcatcctcaaggagctccaaggacttgcagaaagacccaccaattcttgcagcgt

SEQ ID NO: 8689 - DNA, 265 bp, Glycine max
  unsure (1)..(265): unsure at all n locations; Clone ID: 701148802H1
gtgggaaaaggttaataccttggtcaacacanccttgctaanagactatacangtagatatacnttgtccgangggtaggatggcagggaactacnccaaatgggtcaacctcnttgagtagacgactcaatgtttnncatgtcagaggacanntgatanttcccnttccatggnganacacgatgtttctctcacatagggacatnagatgcccaccatggctaaaggncnantatgttcgaatntagacnatctcattgcttg

SEQ ID NO: 8690 - DNA, 242 bp, Glycine max
  unsure (1)..(242): unsure at all n locations; Clone ID: 701148804H1
cactcccttcagtttaatcttttggcgttgattttgtccattgatctcgtgcttgcatctatttactgcttgtggacttgtttggtgacccaaagtcactctccttgccaacaggcttggtttcaatttcatttttttggatctcctanaactctttgctgtttgaagcttcgaaatgttgtttagagaagtttgggacttgctaagtttgattgcttaccattaaatttccaacaggctaa

SEQ ID NO: 8691 - DNA, 161 bp, Glycine max
  unsure (1)..(161): unsure at all n locations; Clone ID: 701148805H1
ggtctcntngaagtgtaancaancnanaaccctatgcggcgcctagctgtctttagntcgtgtnttgcatcagnatggagtcncaggtgaancacgcacttattgtcaaaanttntggggtcgcantggatctcacgaggnnannttgagcccaggtnaga

SEQ ID NO: 8692 - DNA, 244 bp, Glycine max
  Clone ID: 701148806H1
attattattttagtgaaaaaggctttgcagtttgcaggattgatggtagtgtgaaactggaagagaggaaacaacagatccaggacttcaatgatgtaaatagcaattgtagagtttttcttctttctactagggctggtgggttgggaatcaatctcactgtagctgatacatgcattctttatgacagtgactggaatcctcaaatggattacaagccatggatagatgtcatagaataggc

SEQ ID NO: 8693 - DNA, 257 bp, Glycine max
  unsure (1)..(257): unsure at all n locations; Clone ID: 701148809H1
ggcatcaattcngantatatnatcaattataagcatgggtnngtggaacacnacgaatncagtntcttgccgcttncacaagtntngngntgaccaaaagaatctggtactnncaangtnatgccacgtcttcttccaggggcatagaactcacaaagttagacggtggangaaaaccagtgggtggcantntngggagagtgttatactcttctccagtgcanctttgggnnagctctncagtggtcgccagcttt

SEQ ID NO: 8694 - DNA, 246 bp, Glycine max
  Clone ID: 701148810H1
aggatgagtatggcatggttacatattagtaagtgtaagcaaaagccatagggacttagtgtatctttctgtaatcaacgtatggtactgaatcaaggcactacgtactatttttctgcataattctaagtttataaggctagtggtgactcgtaggtaaggtcggtactatgttagtcagggaatgataaggttgcactatagaacgtaacatgtgactagtacttaattttaaattaagtctta

SEQ ID NO: 8695 - DNA, 242 bp, Glycine max
  Clone ID: 701148812H1
gagagagcatagtaatacttactgagtgcttgcagttgctgcgtcgcaaggtaccggcggcgacggagagctatcttctcaatttccgatcactgcattggttctgttgacgagggttttgttctacttgacttgcatacttgatggcgtcaaagttgcagaagttgcagtccgcagcatgtcaagcatctcaatttgtatccagtcgtggaataactactacaggcattgctggaacagaa

SEQ ID NO: 8696 - DNA, 260 bp, Glycine max
  unsure (1)..(260): unsure at all n locations; Clone ID: 701148813H1
ggtgcacaggcgaaaaccctaatcctgaggcactgaaagtgtgatatggcaagagtcatttcctcttcctgcgcacgcctcgcaatgcgcctcttnnnnnnnnnnnnnnnnnnnnnnnngttcgccgtcactttacccaaaccctcatcactctccctctcatcgcgtcgattcctcttccctctctcccatgccatcgtccctccctccacccgcgtcgccggaatccggtgccgcgttaaccgcgccggagactcggg

SEQ ID NO: 8697 - DNA, 144 bp, Glycine max
  unsure (1)..(144): unsure at all n locations; Clone ID: 701148814H1
gccttgtagtcgctgccggggttgaggcgaggaggccctacgccgttgtccgagatgaatgcttcggttattgctggcatggttgcatattcccctcatcatactgcaattggtngtgtgataaagtgtgcaaatanccaatag

SEQ ID NO: 8698 - DNA, 261 bp, Glycine max
  Clone ID: 701148815H1
ggcacacaatcatgcagctctagggaatcaagaaaattattataccctttaagatgaaaccgtacctacgtgcaatattcctattattccttatccttctcgaccaatccatttcggcgagtgcttttttaaatttaaatggattgctaaacattgaaaagtggccctctggcgagaaaagtttggaaatgggaaagatagggaaggagacgacagatcatatcaaagaccttttaaagaaactgattgagtcccctcccg

SEQ ID NO: 8699 - DNA, 253 bp, Glycine max
  unsure (1)..(253): unsure at all n locations; Clone ID: 701148816H1
gggacttgctgctagggtggttgatagacagcaggtgcataggaccatttctaaagaagaaatgctgcatctgtttgagcttggtgatgatgacaaccctgagactttggctgatctaagtcaagaaaatgagcatcaagacaaccctanctttggttgggcattcactgaaacacacagcaccacattcaaatggcagtagttattctgataagttaatggaaagcttacttagcaagcatcatccgcggtg

SEQ ID NO: 8700 - DNA, 262 bp, Glycine max
  unsure (1)..(262): unsure at all n locations; Clone ID: 701148817H1
ggaacttcttcgcattttccaccgaaaatggcttcgcaaaacccagcagaggaagaaaattcaaatcgacattggtcccttgaagacttcgaggtcggtaaacctctcggtagnngcaaattcggtagagttttcgtcgccagagaagtcaagagcaaatttgttgtggcgttgaaggttatattcaaggaacaatttgataagtacagaattcatcaccaactgaggagatagatggagacctgaccagtctncgggcaca

SEQ ID NO: 8701 - DNA, 231 bp, Glycine max
  unsure (1)..(231): unsure at all n locations; Clone ID: 701148819H1
gggactaaagataactaaactcccanatatttgttcacttcactttctcagtgcagttgttgcctaatgcaatggaggaagaagccaaggtggttttgttgggtgcacggttcagtatgtttgagatgagagttangatagctttggcagagaaaggaatcaaatatgagtacatggaacaagatctcaccaacaagagtactttgcttcaagaaatgaacccattcacaa

SEQ ID NO: 8702 - DNA, 219 bp, Glycine max
  unsure (1)..(219): unsure at all n locations; Clone ID: 701148820H1
gactaaacagaanaactaactaaattaagganagtccaagtgtgtgggagacaaagagagacatggctaagtggtgtatgttggtgttggttcttgctctggctgtggctacaagtgccagagatgttcccaatcccaaggatgctggtctcaatgaccagaagaacttcatcagctatggtggagttggtggctattctggaattggaagcaatggac

SEQ ID NO: 8703 - DNA, 253 bp, Glycine max
  Clone ID: 701148821H1
ggagtttgatagcacatcccttgaagaaggagaagttgttgaagagggaatggatttgaaaaggtgccagctgcaagtgactgagagggctcttatcgagatgcttcttccttgcatagatcaaagttctgacggatcccgcaattcctttgcaagtgatatggtgaaacagttaagttatattgagcaacaaataactggctgttacaggtgggaagtaaatcagtaggaagtgctcctccctggagttgaa

SEQ ID NO: 8704 - DNA, 218 bp, Glycine max
  unsure (1)..(218): unsure at all n locations; Clone ID: 701148822H1
gatgaattgaganngtattttgtaagtacataattatcttgaataaattcactatttctttattttccgatcgcctggaaagaacaagatgtttcttttgttctttcttcaacaatttctgatctctagtagacctctcagtaggattcgaactcagatgaagttctgaccatctgtcagagaaaaaagaacgagtagctctgtatcaatggatctca

SEQ ID NO: 8705 - DNA, 244 bp, Glycine max
  Clone ID: 701148824H1
gaaccacacatttttcattaccgccgtgataacacactaacaccaccacttcatcaactttacttgacaacaatattgtaaaactcaaaatctagtttcatactttttttcttcttcttgaaatggctctccaggctgcttctcttgttcctgcttctttctcggttcttaaagagggaaagagtggtgtgtctctcaaggactccaccttgttcggtctttcattttcagaacctatcaaagc

SEQ ID NO: 8706 - DNA, 240 bp, Glycine max
  Clone ID: 701148825H1
ggatacagaaaagaaaaaggaaaccctagctggataggtcaaacatcatcatgtcggacgaagagcaccatttcgagtccaaggcagacgccggtgcctccaaaacctaccctcagcaagccggtaccattcgcaagaacggctacatcgtcatcaaaggacgcccctgcaagttgtggaagtttcgacttccaaaactggaaagcacggtcacgccaagtgccactttgttggaattga

SEQ ID NO: 8707 - DNA, 239 bp, Glycine max
  Clone ID: 701148826H1
atcagccacaaatttataccttcgtgtgaaccatatatatgtgaactctgaggatataaaggaaactggatacacctatattatgccaaagaacattttgaaaaagtttatatgcatagcagatcttcgaacacaaatttctgggtacatgtatggcgtaagtcctccagataatcctcaggttaaagaaattcgctgcattgtgatgccaccacaatgggggacacatcaacaagttc

SEQ ID NO: 8708 - DNA, 237 bp, Glycine max
  Clone ID: 701148827H1
gactcacaactccataacacaaggcggaaagcaagctcatcctagagttttaaaaatggcagcagcctcctccatggctctctcttccccatccttggctggcaaggccgtgaagctgggcccatcagcccccgaagtcgggagggtcagcatgaggaagaccgtcaccaagcaggcctcctccggaagcccatggtacggcccagaccgcgtcaagtattgggcccccccctggcg

SEQ ID NO: 8709 - DNA, 231 bp, Glycine max
  unsure (1)..(231): unsure at all n locations; Clone ID: 701148828H1
gggactaaagataactaaactcccanatatttgttcacttcactttctcagtgcagttgttgcctaatgcaatggaggaagaagccaaggtggttttgttgggtgcacggttcagtatgtttgagatgagagttaagatagctttggcagagaaaggaatcaaatatgagtacatggaacaagatctcaccaacaagagtactttgcttcaagaaatgaacccattcacaa

SEQ ID NO: 8710 - DNA, 242 bp, Glycine max
  Clone ID: 701148829H1
ggcgcattgaacgaaaattagggtttgtagtgtagcaggaagaagcagcaatggcgccgaagataacacgtaaggttagcagaaaccctgaattgataaggggaatcggaaagtactcgaggtcgcagatgtaccacaagaggggcatttgggctatcaaggccaaaaacggtggcgttttacctcgccacgaccctaaacccaagcccgaagctcctgctgaaaaaccacccaaattttac

SEQ ID NO: 8711 - DNA, 245 bp, Glycine max
  Clone ID: 701148830H1
gacacacacccctttttaactacttacttcccactttacccttctcaactctcttactgttactattactgttactccacctaaatcaaaattcaaacatacctattgcatttgcagatagattgaatgttgtgaacaaacaatgggttcatccaaggccttatgcagtgtttctctgctccatttgttcatagtggtttgccttgtcttccaatgctttgctactaaaaaccatgctgacctga

SEQ ID NO: 8712 - DNA, 247 bp, Glycine max
  unsure (1)..(247): unsure at all n locations; Clone ID: 701148831H1
gacgcacatgacacaacactctctctctccttgttatgttccctcctcctagaatataaattcacgagagaaacacgaaaatctttcgattccggcgagaaaaaaacttggacggtgaaattggaaggttttccgggatcccaaggccgaatcttggttcaatttacgaaaagagaagagagaggaacaacaacacccgttgttgaatcttcaagctgaatcnatcatntagagagagaaagagaga

SEQ ID NO: 8713 - DNA, 240 bp, Glycine max
  unsure (1)..(240): unsure at all n locations; Clone ID: 701148834H1
gggccacggttggtgacaggtgaagcactaggctttgctggggttcccccaactgttatggtccagtgcttacaccaagcctttaaccacccagatgggtttgattactcctcaaagcattccaaggtggggtccctgcagatgtttatgancaatgatggtaactgtgaggaccttggaccaggggctttttctgcggaggaggtgcataagatcaccgtgcttgatctaagaatggct

SEQ ID NO: 8714 - DNA, 239 bp, Glycine max
  Clone ID: 701148835H1
ccactgccactaccaatagcagaatgggaaccttgggcagagctttctacgccgtcggattttggatccgcgagaccggccaagccatcgatcgcctcggctctcgtctccaaggcaactacctctttcaagaacagctatctaggcatcgacctctgatgaatctgttcgacaaagctccctcggttcacagggatgcatttgtggcccccagtggctccctcctcggcgatgtccac

SEQ ID NO: 8715 - DNA, 244 bp, Glycine max
  unsure (1)..(244): unsure at all n locations; Clone ID: 701148837H1
gggctcgcataccaaaaggtgttcttcttgttggccctcctggaactgggaagacacttttancaaaggctattncaggngaggcaggtgtcccattntnctcaatctcaggttctgagtttgtagagntgtttgtnngngtgggtgcttctcgagtccgggatttnttcagggaaggcncaaagagaatgcnccatgccattgtttttgttgatgaaattgatgctnntggnaaggnaaagag

SEQ ID NO: 8716 - DNA, 238 bp, Glycine max
  Clone ID: 701148838H1
tatggatacagatgattatgctacagggctatatgcaggagatgatgcagatggtgaaaaattagccagaaaggttgggcctgagattatgaatcagttgactgaaggatttgaggagatgactagtagagttttaccatcgccattaggggacgagtttttggatgcactagacatcaattatgcaattgaatttgagccagaatatttggtggagtttgataatccagacattgat

SEQ ID NO: 8717 - DNA, 243 bp, Glycine max
  unsure (1)..(243): unsure at all n locations; Clone ID: 701148839H1
gaccatatttcatgtctgttactcatttcttctcatcttctttttcttccctttaaaattattattccgtgcaaacnnnnnnnnnnnnnnnnnnnnnnnacgaagaacaagattagcgttatgggtctcttcctttctaggaatttggcttgcaaattcatatacccttttcttttttccaataaggtttcaaaggatttgttccccaagctncctggagaacatgatgtctctggtctctcc

SEQ ID NO: 8718 - DNA, 239 bp, Glycine max
  unsure (1)..(239): unsure at all n locations; Clone ID: 701148840H1
tccaccccctaacatggacccaaatctattgtccaggcccagttgngtggtatttccctttcatcacctttacattgtnttttgccactcagtcttcctcgngccttgtgntcacctgcttctnggcacctaaatncggcaactcgcatatggtcatatagagtttcacctcaaacttcncccctttactattngcatgaaagatcaccacgtcctcatggcaccctttgtngtctaaa

SEQ ID NO: 8719 - DNA, 238 bp, Glycine max
  Clone ID: 701148841H1
ggcacaagtgagtttgttgatcgagataactagaaacagtgtgatgaaaatgaaggtccttgttttcttcgttgctacaattttggtagcatggcaatgccatgcgtacgatatgttccctctccgaatgaacactggctatggtgcccgtactccggaggtgaaatgcgcaagttggaggcttgctgtggaagcacacaacatctttggctttgagaccattcctgaagagtgcgtt

SEQ ID NO: 8720 - DNA, 240 bp, Glycine max
  Clone ID: 701148842H1
gggttgattgcgggatggaagtggaggcagtgcaacaacagcgcaaaggagcgcacctgaagaagagggctctgaagaacaaagctttgggcatcactttcaacgagaaagatctcactgactacgtcaccggctttcacaagcgcaagaagaagagaagaaaggaagcccagaagcaacagaacgaggctctgcgccgcaaacgcaccgaggaacgcaaaaggaggaagttggaaagag

SEQ ID NO: 8721 - DNA, 218 bp, Glycine max
  unsure (1)..(218): unsure at all n locations; Clone ID: 701148844H1
ggagatagctagacagcaataagatgaaaatganagtgcttgttttgtttgttgctacagttttggtagcatatgaatgccatggctcagactaccagaagttccctctccaaatgaaaactgggtttggtgggcaatacagcaatgaggtggcatgtgccagttggaggcttggcgtggaagcaaacaacgtagtcaagtggcaaactgttcctgca

SEQ ID NO: 8722 - DNA, 240 bp, Glycine max
  Clone ID: 701148845H1
ggtgctctgctcgtgcctctagggttatcatttctccatttccattttctctctcacttttcaagaatcgtaagctatgggaaagtcttacccaactgtgagtgctgattaccagaaggccgttgagaaggcgaagaagaagctcagaggcttcatcgctgagaagagatgcgctcctctaatgctccgtttggcatggcactctgctggaacctttgacaagggcacgaagaccggtgg

SEQ ID NO: 8723 - DNA, 241 bp, Glycine max
  Clone ID: 701148846H1
atgcagagacatcatggctatccaattttatcactttcaaggcactaaggttttttctgatgcccctgatgctcttttctgctctttctaattgacaatttttgctaattgagctattggtcggtcaggtgaaggttcagctcgaacgaaatttgtgtcttatctttacttctcttttatcttcaataaaagataagtaaagaggggcaactatcataccctaattttgttcggggacatt

SEQ ID NO: 8724 - DNA, 257 bp, Glycine max
  unsure (1)..(257): unsure at all n locations; Clone ID: 701148847H1
ggtcattggagctgcgagtccgagtcggagatccgagtcgaggctgagttcaaatacggtgtaatcacactggatggtcacaccgatgattggaaggacattgatgggtcctactttcccctccttcccgcccttgacccagatgctgaaaatgaattcaaagggggaaagatcaccgttaaaagtgtccatgacggccgcgatatcttctttctgctgcaatagatggtgnctatgcctactctaaaggagaaagc

SEQ ID NO: 8725 - DNA, 248 bp, Glycine max
  unsure (1)..(248): unsure at all n locations; Clone ID: 701148848H1
ggcaattgcatagagaagtgcagagagagcgcacntagacgactcagtcaaacagtcggtaactctttcttttcttttctttctttctccgatcgcatcgctcgcaaccacaatcatgccttcccgaagaagaactctcttgaaggtcatcattctcggtgacagcggggtggggaagacgtctttgangaaccagtatgtgaataagaagtttagtaatcagtacaaggcaaccattggagcggatt

SEQ ID NO: 8726 - DNA, 239 bp, Glycine max
  unsure (1)..(239): unsure at all n locations; Clone ID: 701148849H1
atggaaatgtaatgcctgcctgtgttcctggcctggttccaagtcttgtccttgctaatttcaccaaatctctctactctgatagtctcaacgacacaaagtatacaggaattggtattggttcagaagataactggattgtngtggtcttgaccactaacactccttcaggaacctttgctccctatagttctaatggtggtcaatttgatttctaaacnnccantgattactgctca

SEQ ID NO: 8727 - DNA, 238 bp, Glycine max
  Clone ID: 701148851H1
gactcgcagttgtattgttgaacaagggtttctctgtctgcttcttcactttctctcgtttcaatcgaaaccaaaacaaaaacatgggcagaaaattcttcgtcggtggcaactggaaatgcaatgggaccactgaggaggtaaagaagattgttactactttgaatgaggctaaagtccctggagaagatgtcgtagaagttgttgtgagccctccttttgtgttccttcctgttgt

SEQ ID NO: 8728 - DNA, 241 bp, Glycine max
  unsure (1)..(241): unsure at all n locations; Clone ID: 701148852H1
gagtgaatacaagccannagaacaacatggacattgatctttctcctcagttgcccaanaaagtttacggtgccaatggtggctcctactacgcatggtccccctccgaccttcccatgctccaccaaggcaacattggtgccgctaagcttgctctcaacaaaaacgcctttgctcttcctcgttactctgactcttccnaaagtcgcttatgtncttcaaggtacattcatttctctat

SEQ ID NO: 8729 - DNA, 230 bp, Glycine max
  unsure (1)..(230): unsure at all n locations; Clone ID: 701148853H1
gaaatttggatggggatctgcatttgggtcactggcaattgcaatgggaatatctaacatggtcttcttcataggcactccattgtacaggcacaggttgccaggaggtagccctcttactcgtgttgctcaagtcttggttgctgcatttagaaagagaaatgcctctcttggtagcagtgagttcataggcttgtatgaggttcctgggcagacagtctgctatcnag

SEQ ID NO: 8730 - DNA, 237 bp, Glycine max
  Clone ID: 701148854H1
caagtttgttgagatagctagaagcaataagatgaaaatgaaagtgcttgttttgtttgttgctacagttttggtagcatatgaatgccatggctcagactaccagaagttccctctccaaatgaaaactgggtttggtgggcaatacagcaatgaggtggcatgtgccagttggaggcttggcgtggaagcaagcaacgtagtcaagtggcaaactgttcctgcagcttgcggaga

SEQ ID NO: 8731 - DNA, 251 bp, Glycine max
  Clone ID: 701148855H1
gatgcacaagtttgttgagataactagaagcaataagatgaaaatgaaagtgcttgttttgtttgttgctacagttttggtagcatatgaatgccatggctcagactaccagaagttccctctccaaatgaaaactgggtttggtgggcaatacagcaatgaggtggcatgtgccagttggaggcttggcgtggaagcaaacaacgtagtcaagtggcaaactgttcctgcagcttgcggagagtacatag

SEQ ID NO: 8732 - DNA, 237 bp, Glycine max
  unsure (1)..(237): unsure at all n locations; Clone ID: 701148856H1
ggatacggatagggaagagtattcagtgtctcgtgtagaataatcaatggaagtaggaatgtctctgaacgcgctggttcgtcttcctctctcgaattcacgcttccacgacgatgctgctccgatgattattaggcactctctgttttcgagccgaannnnnnnnnnnnnnnnnnnnagttataaggttccacagcgtcatcaagtgttcgtggttgaagccaagggcaaaaaggg

SEQ ID NO: 8733 - DNA, 236 bp, Glycine max
  Clone ID: 701148858H1
gacacaacattgatttctgagattcagatgatggcgagtgagtcgcaaaactgggtgttcatggtcactgcacagacaccaaccaacattgccgttatcaagtattgggggaaaagagacgaaaccctcatcttaccggttaacgacagtatcagtgtcactctcgatcccagccacctctgcaccaccaccactgctgccgccagtcccgctttccaccaagatcgcatgtgggc

SEQ ID NO: 8734 - DNA, 237 bp, Glycine max
  Clone ID: 701148860H1
ggagagagtgagtgagatagagagagacgcttcgcaaatctcaatcgaatctcagaaaaatgagagaaatcatcagcattcacataggtcaggccgggatccaggtcggaaactcctgctgggaactctactgcctcgaacatggcatccagcccgacggcatgatgccttctgactccaccttcggtgtagcccacgacgccttcaacacttcttcagcgaaaccggatctggcaa

SEQ ID NO: 8735 - DNA, 199 bp, Glycine max
  unsure (1)..(199): unsure at all n locations; Clone ID: 701148861H1
attgtatggccgccaattcgagtagccgagggatcaccgccttggggaagcgagtcgccaaccagatctggacttccaaccccccctcagctcctctcacttccaggaggggagcnatagcagctgcatacagtagcagcggcgggtcagtgtatgacaagaaccctgatgatcagatccactctggggcggtcccaga

SEQ ID NO: 8736 - DNA, 242 bp, Glycine max
  unsure (1)..(242): unsure at all n locations; Clone ID: 701148862H1
gtcctgcaagacatgaaagaaaaagacaaggttcacacttcagatactttgttgcacaaaattttaaagtacatcaacagaagaggggctaatgaaaaggcaagacaaagaggtccatgaagacatgcctgccaatttaatatggtgaaacggtgatcaccatatggtcagtgcttaaatagaaganaataaaggattacaaatatacagatgtaacttatatccatttgcctcatggccaa

SEQ ID NO: 8737 - DNA, 248 bp, Glycine max
  Clone ID: 701148863H1
gataaagagtggcttagtccaaaacctcacacgactccctttgttgcgttgtgtttcctttcgccgaaaccctcgctcgcaacttctacagaatccctttcaccatggatattgaggaggacatccgttctttacagctcgattcagcagcagaagacaagcatggggtggtaaatgcagaggatggaaggccagaagaagttgagaaatctgataagatggatgaagatccaaagcaggatgttgag

SEQ ID NO: 8738 - DNA, 257 bp, Glycine max
  unsure (1)..(257): unsure at all n locations; Clone ID: 701148864H1
ggtgatttgaaagataagccatggtggcaaaagatgcaaactcgtgaagagttgattgaagcctcggctaccctcgtatggatcgcttcagcccttcatgcagctgttaactttggacagtatccatatggaggtttaatcctaaacaggccaaccattagcaggagattcatgcctgagaaagggtctgctgagtatgcagctttggctaagaaccctgagaaggagtttgncaagactattactggcaagaagga

SEQ ID NO: 8739 - DNA, 154 bp, Glycine max
  unsure (1)..(154): unsure at all n locations; Clone ID: 701148865H1
gggcagcatagagaatanagatagagcgaattgaaactctctaatggcnctctacacccatctcatcnnnnnnnnnnnnnnnnnnnnncttcattcaccttcgcctctatgtcttccaaagcctctcttcccctctnntactttgacagtgggc

SEQ ID NO: 8740 - DNA, 243 bp, Glycine max
  unsure (1)..(243): unsure at all n locations; Clone ID: 701148866H1
ggctcagtttctgttgtattttctcaattacaacatcgtattctgcaaattcaaaccgggtcttggttttctgaaagatgggaggtggcaaggacaagcatcatgatnaatctgacaaaggaattttttcacaccttgctcatggggtagctggtgcagcacatggtggacatgggtacncacctggggcttacccancancacctggggcataccctccacaacaaggatatcctccagntg

SEQ ID NO: 8741 - DNA, 233 bp, Glycine max
  unsure (1)..(233): unsure at all n locations; Clone ID: 701148867H1
agagtcagcaggaaattttgtacaaccaacaattgttgagatttctcccgatgctcctgtagttaaagaagaattgtttggtccagttctgtatgttatgaaatttcagactctggaagangcaattgccttgaacaattctgtacctcaaggattaagtagttcaatcttacccaaagacctggaactatattcaagtggattgggccacgaggtagtgatngtggtatagt

SEQ ID NO: 8742 - DNA, 243 bp, Glycine max
  unsure (1)..(243): unsure at all n locations; Clone ID: 701148868H1
ggaggtgagctggcctgggctgtgatattggggcagcgcagcaatacgtaacaagttctatcattgaggaagtttccggtctccgaaaatgaacgacgcagatgtctcgaagcaaatccagcagatggtgcggttcatccgccaggaagctgacgganaaggccaacgagatctctgtctccgccgaanaggattcaatatcgagaagctgcagttggtcgaagccgacaagaagaagatcag

SEQ ID NO: 8743 - DNA, 234 bp, Glycine max
  unsure (1)..(234): unsure at all n locations; Clone ID: 701148869H1
agggtattgcactgcggctgctacttcggctccatcttctccgatctcctcaaactctatcagcgcagaaccaagcctctatcaccatggggaagacacatggaatgggagctgcccgcaagctgaagtctcaccgtaggagacaaaggtgggctgacaagtcatacaaanagtctcatctgggaaatgaatggaagaagcttttgctggttcatcccatgccangggtattgt

SEQ ID NO: 8744 - DNA, 212 bp, Glycine max
  unsure (1)..(212): unsure at all n locations; Clone ID: 701148870H1
cagtatagtttacaagtcatatctctcatgtttgtaggccattgggatgagttgcttctggctagtgcttctttggcaacatcatttgtcaatgctactggtttcaacgtgttggtaagttgacactattttctaattttatgttatagttttcccatttccagaatgtgagatgagatctatccatgcttgcatgtatatatatgncatgg

SEQ ID NO: 8745 - DNA, 233 bp, Glycine max
  Clone ID: 701148871H1
gatggaaaagaaaagaaaggaaattaagaggggtaaacaccccctaagggaggaacacggtacctgagcagcaggtgatgaagacccaacaggggcatccagagatgcaaagtctcatcactagccagtagtgcctgtggttctcaaaagacagctgagggaagaaaggtggcttctcttagaacatgagaagtattggcggacagtgccttcgagttagcgccatgatgtct

SEQ ID NO: 8746 - DNA, 239 bp, Glycine max
  Clone ID: 701148872H1
gacccgtcaagcccaatgtaggttaaaagtagtcgtataaataaaaaaaataaattttctcacgacaagttttaacataacaaggtcctactaaaatcttatatttatcattatcttgaccaaatataattcatgaaatagacccttctaagtaatgtaatatgctggggtgttgtaagagatcattatggcggcttgtgcttgcaacctggggagatgttcagtggttcagggccgag

SEQ ID NO: 8747 - DNA, 233 bp, Glycine max
  Clone ID: 701148873H1
gacccaaaacaaaacacgcacaacctctctctgttttttggagtcagcttctctgcaaactgcatacaggatcgcaacatgggagtttgtttgagcgcccaaattaaagctgaaagcccatttaacactgtgttcaattcaaagtatgtgagtacagatggaaatgatctcggtagcacaaacgataaggtttcagcaaactcagttcctcagactcctcggagtgagggtga

SEQ ID NO: 8748 - DNA, 243 bp, Glycine max
  Clone ID: 701148874H1
gaagggaaaagcgaagtgtgaagacagacacagtgagaatgatgaagcgtcggttccttttggttctcttggttctctatgtcacagtggagttctacgtagaagcagatggtagtggtgggtttgtgagaacaagaggagtgcagcttatgctgaatgggagcccctactatgctaatggctttaatgcctattgggctaatgtatcttgcctctgatccttctcagagaaacaaagtctca

SEQ ID NO: 8749 - DNA, 241 bp, Glycine max
  Clone ID: 701148875H1
ggcacaagtgagtttgttgatcgagataactagaaacagtgtgatgaaaatgaaggtccttgttttcttcgttgctacaattttggtagcatggcaatgccatgcgtacgatatgttccctctccgaatgaacactggctatggtgcccgtactccggaggtgaaatgcgcaagttggaggcttgctgtggaagcacacaacatctttggctttgagaccattcctgaagagtgcgttgaa

SEQ ID NO: 8750 - DNA, 218 bp, Glycine max
  Clone ID: 701148876H1
ggaagaacaagtcttgcattgggtggagcatacttagaaacagcaactatgtctctcatgcagcttactagctcccctgttggctcactggtccgtttcattgtaatatttgctttatggtacagaaccatggctttggccaagttgccaccaaacgcttcatcagttccagcagttttagcgtttggagattccatcgtggacccagggcaacaaca

SEQ ID NO: 8751 - DNA, 249 bp, Glycine max
  unsure (1)..(249): unsure at all n locations; Clone ID: 701148877H1
gggagcacaaactgagctttggtttcgtattaccattttctggttctgacttggtcgcaacattatgcgagcgtctttctctcctacagttttggtcctaatcctacaattataaatatcctttgcttcttccaaacacnnnnnnnnnnnnnnnnnnnnnnnnnnnnnatccattctcttctccacacgcttcacaacttctcttcttctgaatctgcatctgcatcttctttctattgaactttttct

SEQ ID NO: 8752 - DNA, 250 bp, Glycine max
  Clone ID: 701148878H1
ggcagccaaagaaaagaaaatcctcaattttctgagcagccaaacactctctctctgtctctcgaaaattctcagtttgcagagaaaatctgaatcatgtcgtgggcaagcgtatgtcgacgatcaccttctgtgtgacatcgaaggtaaccacctcactcacgctgctatcatcggccaagacggcagcgtttggggctcagagtaccgacttccctcagttcaaacctgaggagataactgccatcat

SEQ ID NO: 8753 - DNA, 243 bp, Glycine max
  unsure (1)..(243): unsure at all n locations; Clone ID: 701148880H1
ggcatatccaaaggaacaaaaatattattaagatgatcaacattattggagcacttgttctactctttgcatttctcttcctcagttgtgtgtatgcacaagacacaacaacccttgtgcctgcaatcataacttttggtgattctgctgtggatgtagggaacaatgactatcttcccacccttttcaaggctgattaccctccttatgggagggatttnttaaccaccaanctactgggag

SEQ ID NO: 8754 - DNA, 242 bp, Glycine max
  unsure (1)..(242): unsure at all n locations; Clone ID: 701148881H1
gagtgaatacaagcnaaaagaanaacatggncattgatctattctcctcagttnnccaananagttnacngtgccaatngtggctcctactacgcatggtccccctccgancttcccatgctccaccaangnnacatttgtgcnnctnaagcttgcnctcnacnnaaacgctttngctgttcntcgttatctgactnttcaaagtcgcttatgttcttcaaagggacattcanttcnctant

SEQ ID NO: 8755 - DNA, 235 bp, Glycine max
  unsure (1)..(235): unsure at all n locations; Clone ID: 701148882H1
gatatcacaganaactattntggtttaatttgcctttcctttcaagggagctcattgaagagacannaaacaatggctgaaacaaagttgancatgatgaaggacaaaagatggtcactccgtggaatgactgctctcgtcacaggagncacccgaggcatagggcatgccattgttgaagaattggnncactttggagcaactgttcatatatgtggcagtaatcaagatgata

SEQ ID NO: 8756 - DNA, 234 bp, Glycine max
  unsure (1)..(234): unsure at all n locations; Clone ID: 701148884H1
ggtccttctcccaccgcaccccacacttccggcaccgtcggaactcancaccgcacatctgcaccccacactcgtcttctcacaaccgtcaatcgcagtcacagcgcacagctctagttctctctcacaagctttctccagctttgcaactagttttgtctgactctggcatatatttttgttcttcagaaaaatactaatggattcatcacaaagtgcggctcttgggggnaa

SEQ ID NO: 8757 - DNA, 234 bp, Glycine max
  unsure (1)..(234): unsure at all n locations; Clone ID: 701148885H1
gggagtgagggttttacgccaaagnngcaccgcgacgctgtctctcccactcttctccgccgccgcatgtganttagnagaagaggnggcgaatttgttaatttgtngtgagtctgtacgaaatgggtgaaatctggtggtcccttctgggggcggcgatcnccgtngtgatggcaggggcaagcgnttcccgtataagaancggcgtgcagaggagcngagantgcanagngc

SEQ ID NO: 8758 - DNA, 229 bp, Glycine max
  Clone ID: 701148886H1
cttggtctttgcggaaacaaagtagatgctatcgatcatcacaacactgaaattgacaaactgtcaaaggaaatagcgttagagagggataatgtcagcaatgatcccaagtccatcatgcctgcggcatttgtttcgtttaaaacacgatgcgtgctgcagtttgtgcacaaacccaacaaaccagaaacccaacaatgggttgacagagtgggcgccagagccacgt

SEQ ID NO: 8759 - DNA, 214 bp, Glycine max
  unsure (1)..(214): unsure at all n locations; Clone ID: 701148887H1
anagaagtaaatccaaactcaataaaatggcttcaaattccagcaccaacaacgctggctaccccatcaaaaccatcgtcgttttggttcaagaaaaccgttcctttgaccacatgctcggttggatgaagtccctcgatccgaaaatcaacggtatcaccggttcagagtctaacccgatttccacatccaatcccaactcgaatctggttca

SEQ ID NO: 8760 - DNA, 260 bp, Glycine max
  Clone ID: 701148888H1
acctatcattatcacacgtcaaattaattttcaagtattaattagtcttcagatgatatcaaacaaataattctacattaatagttcgattcttctacagtaaaattgttcagtatttggtgccacaaaccatttaatgacttgcataagtaaataatcatgcatcttatcacactaaatctgaccttactttgaaatttactttaccacatcaaatacaagagttggttggaactatgcaattccaagtttgagtttgt

SEQ ID NO: 8761 - DNA, 237 bp, Glycine max
  unsure (1)..(237): unsure at all n locations; Clone ID: 701148889H1
ggagtgagcgtagttgaggttttgccacttcgaaaccaaattttcttccttcgttggcatctgtgatctcttctcctcacaatgagcagatcagggcaaccaccggatttgaagaagtacatggacaagaagcttcagatcnagctgaatgcaaatcgcatggttgttggtactctccgtggctcgaccagtttatgnatttagttgttgacaacactgtggaagtgaatggcaatg

SEQ ID NO: 8762 - DNA, 246 bp, Glycine max
  unsure (1)..(246): unsure at all n locations; Clone ID: 701148890H1
ttaaggtcaaaaaagtccctaattnctggtgctgcttcctcaagtacaattgtttgactttgaaaatttcttgcactctcagacccaccagccaagtgatgagatctcttgtggccacccaaggcttggccagatggaaaaacctngtggcaaattggacactcgtgccctttccccntcttggaatctctcactgttncaacctcattggncaaatggngtnngagtagtagcagtagtaacatt

SEQ ID NO: 8763 - DNA, 232 bp, Glycine max
  unsure (1)..(232): unsure at all n locations; Clone ID: 701148891H1
gacagcaacacacattgttaaaagtttctttatttcaagtgaagttagttagttatatttatatacacaatcatgtcaatgagatcaattggtacaagccttagccttatggtatggcttgtaattgcaacatcagcattagcaaaatctgatanccccccagtcctagacacacaaggcaaccctcttgagcctggcaaagattactacatcaaacctgnnntaaccgacg

SEQ ID NO: 8764 - DNA, 235 bp, Glycine max
  Clone ID: 701148892H1
gagattattcatattagatcaccatgacacatttatgccatttttgagaaggatagatgaatctaaatcatcaaaggcttatgccactagaacaatccttttcttgaaagatgatgggaccttaaagccattggccatcgaattaagtttgccacatccagggtcaacaacagcttggtgcctatagtaaagtcatcttgcctgcaaaccaaggtgtagaaagtaccatttggct

SEQ ID NO: 8765 - DNA, 237 bp, Glycine max
  unsure (1)..(237): unsure at all n locations; Clone ID: 701148893H1
gatgaatttgcttaccaagagatgctcactcaccttgcactctgttccattccagatccaaagaaggtgctgcttattggagggggagatggtggaattcttagggaaatatcacgccattcttctgttgagcatattganatatgcgaactagaccaaatggtcattgatgtttattcggagtttttcccggatatagctgttggttacgaggatccccgagtgcatgttcatatc

SEQ ID NO: 8766 - DNA, 238 bp, Glycine max
  Clone ID: 701148894H1
caagaaacagcttatgctcttccttcaaaggcaaagcaaaaccattaattatgctgcccaatatttcaagcaactctgcaatcccactgtgtttctctgtctcaaatatgaacctgtaaaagatattgttgatggcttttctaatgaatggccgatgcaccatgaactttccataaatacggtggaggatagtcttcaggtaatccctctctctttggtcttctgagtcaaaaaggtc

SEQ ID NO: 8767 - DNA, 237 bp, Glycine max
  Clone ID: 701148895H1
gcctctcttcgaaccgggagagttgtcatcgtggtctttctatagggctggcatagcagagtttgtggccactttcttgttcctctacatcacagtgctgactgtgatgggtgtgttcaaatctaagagcaagtgttccactgtgggtatccaaggcattgcttgggcttttgggggaatgatctttgctcttgtttattccactgctggaatctcagggggtcatattaacccagc

SEQ ID NO: 8768 - DNA, 245 bp, Glycine max
  Clone ID: 701148896H1
ggaggaaacatttgcaatggctaacaacgtcgttgttgttcttaaggtagctcctgtttctctgcctccatttcccataacaaacaatgctctcactttcaagagccaaagacacacacttcatctgaattgcttccaaaccaaaaacagaacaacctcattcccttcttctcgtcaatcctcagaaacaaagctagttgctctgtgttggcgtgtctccctcctgaatcctcaacctcatcttc

SEQ ID NO: 8769 - DNA, 262 bp, Glycine max
  unsure (1)..(262): unsure at all n locations; Clone ID: 701148901H1
gatagtgggccaggatgtgcagctagtcatgttgggaactggaaggccggacttagaagatatgcttaggcagtttgagtcccaacaccgtgacaaagtcagaggatgggttggcttttcggtcaagatggctcaccggataacagcaggtgccaganattttncnganccctcaanttngccccgggggananaccaccntgccccntgttnggggaaanntcccanttananncncgccgggngggagagnnancncctt

SEQ ID NO: 8770 - DNA, 265 bp, Glycine max
  unsure (1)..(265): unsure at all n locations; Clone ID: 701148902H1
ggcgtctgtaaattgtaaattgcatcatccctgaagctgaacctcaaaaccctagctgtccgcctgtctgcaacggcgtcgttatgatcagttgngaatccaaaggantcgagtcgantcatctgaccggcgacagttatgtacagagaccgaggaggctcggatncaaatgcggaggtactcccntgnatcggangcgaatcaangnntcctnnanaaacntttnaangttcccnncttnnaaancnggggncgggaaaagang

SEQ ID NO: 8771 - DNA, 263 bp, Glycine max
  unsure (1)..(263): unsure at all n locations; Clone ID: 701148903H1
gacatgagaagagaaagtgagaaactaccaatggttcttatttaaagcaaataaatattganagacaagaggtaacagataaatagagtgtgtgaataataataagtagttgtagctggggagagtggaacattgtcagcttcataataaaggttgacaatgaagctggttttggaantgttttgaagtgnctgcntagcttcnggggncnnnccctgggnnngnnacccccngggntttgntttnaaaaaaggggcgccccc

SEQ ID NO: 8772 - DNA, 255 bp, Glycine max
  Clone ID: 701148904H1
gaaagctcggtgcataaacagcaatggcagagaaaccccaaccggttcgggttctatactgcggggtgtgcagcttgccccccgaatactgcgaattcgggtccgatttcgagaaatgcaaaccctggttgatccaaaacgtccctgacctataccctgatcttctcaaagaggcaaatgagaaggaagctgataaagttgctgacaaatacaaagtacggtattcaggagtggcgatggagtgttctcagcacg

SEQ ID NO: 8773 - DNA, 252 bp, Glycine max
  unsure (1)..(252): unsure at all n locations; Clone ID: 701148905H1
gaccgctattanggtttcggagtcgttgcaganntncncgttgatctanaaaaatggcgaggataanggtgtacgagttgangaataagacgnangcggagtactnnaccagctcaaggntctcaaggcggagtagccctgctccgcgtcgccaaggttaccggnggncncnaancaagctctccaaattaggtggtnacgntatcgtaccgcaggttttaaggtattnccggaaccngaannnncctnaga

SEQ ID NO: 8774 - DNA, 256 bp, Glycine max
  unsure (1)..(256): unsure at all n locations; Clone ID: 701148907H1
gggctgagaactattcgtgctncaacggcgttctccaagtgactctcctcgtcgctcccctagctattctccttatagaagaagctatagccggtctccctattcttcagaccgantaggagtngttnttactctcnngatatgggaggaggaagtnaaactatnnatancactcgaggcgaagtcannttcncanactanagccggtaaggggtctnttcccgatatgtnaaaaanggngtttccccncnnttcc

SEQ ID NO: 8775 - DNA, 200 bp, Glycine max
  unsure (1)..(200): unsure at all n locations; Clone ID: 701148908H1
gggtgttgtgttaatctcattcacacattcacagttatactctctctctctttgtcgcttggatcactgatctcatctcaattttcagatatgtcgnnctctgataanccagaagtggtgnaanggggnnncagggatgananccncntggnttttgatcangggnnggggnggggtgnnctnctttgngnggggggnnt

SEQ ID NO: 8776 - DNA, 238 bp, Glycine max
  unsure (1)..(238): unsure at all n locations; Clone ID: 701148909H1
gtccgccattantcgtagctgctgttcttncgcgtgaacaagcctcaggtaagccaaaaccatggttaagcataacaatgttatcccaaacggacacttccgtaagcactggcagaactatgtgaagacttggttcaatcagccagcacggaagacaaggagacgattggctcgtcagaagaaagctgtgaagatattccccagacctacggtggacctctcaggcccatgtacnggt

SEQ ID NO: 8777 - DNA, 282 bp, Glycine max
  unsure (1)..(282): unsure at all n locations; Clone ID: 701148911H1
attacatgaattcgtagataacatgattttgaaacatttttaatgtttagtggttgaacctcacctaagaccaaatagcgaactaccacctgctcttagtaaaatgcatttattctaaaatgcaattgataaaaacatatttggtgtcttnactcttgagccatattctggttngaaaaccaaacacctnaaacggttaaccanaanccattttgnaacnanncggaaaacttaggtcaaacaattgggnncggcnatttcttaaaaggggttagggnntac

SEQ ID NO: 8778 - DNA, 253 bp, Glycine max
  unsure (1)..(253): unsure at all n locations; Clone ID: 701148912H1
ggcatcaattcaaaatatatcatcaattataagcatgggtttgtggaacacaacgaatgcagtgtcttgccgctttcacaagtttggtgatgaccaaaagaatctggtcttccaaggtgatgccacgtcttcttccaggggcatagaactcacaaagttagacggtggaggaaaaccatgggtggcatttgggganatgttatancttctccatgcnctttgggaagctctacagggtcncaacttnnaaccg

SEQ ID NO: 8779 - DNA, 273 bp, Glycine max
  unsure (1)..(273): unsure at all n locations; Clone ID: 701148913H1
gtaatgtgccatgctgatgccaatacttgtcctgctttctccagtcaatgacttgtgccaatggaaaattactaatgtcattatctgctaaggcnntcnccanttgcannatggtaccagaaaggttttggcttgctgttaaaaagagcaaagatagctgtaaccaccctcatttaaggnaatgccagggatcaanggcnggaaattacccggnccatntnctcaatgccccncaagcccngttttgaaataggcttttnncccagtgtgngg

SEQ ID NO: 8780 - DNA, 258 bp, Glycine max
  unsure (1)..(258): unsure at all n locations; Clone ID: 701148918H1
gcctttccaatttttatgtaaatatcagtatttctattatatttctcttaaattaattaatcaatatgttcactctatttcttatttattcctcttctttccttttatcatttacgtatttttactctatttccttcttcaccgtcaaatatactgnaattnngtatcattgatttcaaaactttacggttttaaaattngnatagtacnagtgcccatttttnccaatcatgggaccttttttggtggggagaaaaa

SEQ ID NO: 8781 - DNA, 262 bp, Glycine max
  unsure (1)..(262): unsure at all n locations; Clone ID: 701148919H1
ggtgttaagacatgagatacaagttcactgttgctgaataactcagacaacagtaatggcaacgtttttctgcctatgcaagtttgctacgttcagcaacattagctcacgaaccttctcttcgttcttaccctccaaaacttctatctaccacagcttgtcctcttcttctgcaacattctcattcacatggacgatgccttcgcatatctcaacctcaaactgcnacaaaagngggnnattgcnccngagcnttnntnna

SEQ ID NO: 8782 - DNA, 250 bp, Glycine max
  unsure (1)..(250): unsure at all n locations; Clone ID: 701148920H1
cggtgtcaagattgtgaagttggaagatgcaacacagtctttgttagatggcttaaaagctgaaggaattactgtcaatgttgaagaggttggtgactacaagcttgaaaatgacactgggggccatntncccncnannggaatgaagatactcgtcactcaattgatgctcagtctcttagcaangggataaggatnctctaggtgcatcgggtcnattggnatnggaaangcctncacccccgggggg

SEQ ID NO: 8783 - DNA, 258 bp, Glycine max
  Clone ID: 701148921H1
gatttggttgagttgctgtatgaagaaatggctgaaaggtctatcatgccaaacacagtcactcagaacattgttttgggtggttatggcaaggcgggcatgtttgatcagatggagaaagtactgtccagcatgctgctgagcactacatgtaagcctgatgtttggacaatgaacacaatcatcagtgtttttggtaacatgggtcagattgatatgatggaaaaatggtatgaaaattccgttatttgggataga

SEQ ID NO: 8784 - DNA, 239 bp, Glycine max
  unsure (1)..(239): unsure at all n locations; Clone ID: 701148922H1
ggcacaagtttgttgagatagctagaagcaataagatgagaatgaaagtgcttgttttgtttgttgctacagttttggtagcatatgaatgccatggctcagactaccagaagttccctctccaaatgaanactgggtttggggganannacagnnggggggtgnnnnccncnggntgntggtggaaaacnaancnnncnnngggtcagggggaacntcccncgcagcngggnaaaana

SEQ ID NO: 8785 - DNA, 254 bp, Glycine max
  unsure (1)..(254): unsure at all n locations; Clone ID: 701148924H1
ggcacaagtttgttgagatagctagaagcaataagatgaaaatgaaagtgcttgttttgtttgttgctacagttttggtagcatatgaatgccatgactcagactaccagaagttccctctccaaatgaaaactgggtttggtgggcaatacagcaatgaggtggcatgtgccagttggaggcttggctggaangcaaacaactttcaagnggcaanctgtncctgcagttggggaaagcnatngctgaccact

SEQ ID NO: 8786 - DNA, 254 bp, Glycine max
  unsure (1)..(254): unsure at all n locations; Clone ID: 701148925H1
tgaaaactatcgaatatcctttgctcatggaatgggacttatttctgatgaactatacaggtcactgcaaaaaaattgtaaaggagagtacataaatgtagacaccaaaaatgtattatgttctagaaatatcgagacttcaatgaggttacctcaggcttagtatggtcatattttggacccgccatgngattgccttgatactgaaacanttgggggggtccccttnaaattttccgaaattttncccttnc

SEQ ID NO: 8787 - DNA, 227 bp, Glycine max
  unsure (1)..(227): unsure at all n locations; Clone ID: 701148926H1
gancgaagcnnnnantnangacccaaagtgcttctctnctctgtctttnacnctctcttgctatcctttggntagtggcactgctncnngtgcaactccaagaagngnagtgacatnccaccatgtttcatcattcancagaagcnttcttccttccattcgtctttgaatggtncttctgttaccnnncagaaggacancagtgtagatgngtcgggacaagcnta

SEQ ID NO: 8788 - DNA, 269 bp, Glycine max
  Clone ID: 701148927H1
gggaaggtgaaggtgatgatggaattggaagtcgacgagaacgacttgaaagccgccggtgctgagctcttcgtcgacggtggtcggcgcggcattcgcatcaatggctgggtgatcgagactcggaggcactccatactcaactcttccacactccaagagtgggaacagaatctcgatacgtctcatttaccagaaatggtttttggggaaaacatttgattctaaaacacttgagcatggcaccaacatcatttaatgcattgatg

SEQ ID NO: 8789 - DNA, 247 bp, Glycine max
  unsure (1)..(247): unsure at all n locations; Clone ID: 701148929H1
ggatggcaaggcaagcgcttctcctctttgtgttctggctatgcttcttggcaagagttagatcggacgaggattgcgtgtacacggtgtacgttcggacgggttcgatcatcaagggaggcaccgattcagtaattggtctgaagtatacgacaantccggctangcntatacatcaccaactngaggaatgggcggttataatgnccggggccaaattatacgaggggnncctcntntttcnggg

SEQ ID NO: 8790 - DNA, 254 bp, Glycine max
  unsure (1)..(254): unsure at all n locations; Clone ID: 701148930H1
ggcagcgcttgatttgaggccaggcaagccccacttcaaccagcacacctnctcctcgttcangctacccctttctgcncttcttctacctttcaagttttaaaagtataaagatggcagagacattcctatttncctcagagtccggtgaacgagggacncnctgncaagctctgngnccaatcccgatgcnatcgtnnnntttttccgggggggccnntacagaaggtnntgggaaattgngnanaaaagtg

SEQ ID NO: 8791 - DNA, 169 bp, Glycine max
  unsure (1)..(169): unsure at all n locations; Clone ID: 701148931H1
gacctcacagcagagcanaaganagnaagaaactgnaacttcctctgttttgntcccctgtttaggcctttcataagcttaggatgacacnnaaggcatttgccnatnggctcnatggtcncanagtnggacncantagntcacattaattttaaggggnacantnncc

SEQ ID NO: 8792 - DNA, 259 bp, Glycine max
  unsure (1)..(259): unsure at all n locations; Clone ID: 701148933H1
gctggaaataccacagatccaaaagaactcgtcaaaattttcttcaacatcaccattacaaaaattggtgataaactcaaagaaactaatattttgcatgagattgaggaggaacccagagccaagatggcacttgacacttgcaagcaactcntggctctttctngggggnaattaanagggtcnctggaggnaanaatgattccccccntggntgtgncnccccncnnaaataaangttgggggggggnccnnaccc

SEQ ID NO: 8793 - DNA, 247 bp, Glycine max
  unsure (1)..(247): unsure at all n locations; Clone ID: 701148934H1
gttcctattaacaaattaataaggttcgaaggaaattttggtatcaacactgttggactgcaaagaaatcataattgctagaattttaactaaatatagtgtctagctacagtatcgggcataatcagattctttatgcatgggttagatggctttatgnatttcccttacatttaaattnccttnnncngggagcaaatgtaatngnagtggngggncnaaangtggggtnnaccccccttgttta

SEQ ID NO: 8794 - DNA, 258 bp, Glycine max
  unsure (1)..(258): unsure at all n locations; Clone ID: 701148935H1
gttgcaatggccgtttctttggcagtgaaccgtcctctgcttggtcttcacgagaatgtaccattagctgttgctcatccccaattcctcccgttcaaatggccacccaagtccaaactcccctccgtcgtcggaattcgatgctcctcctcccctttcaacgacaaaaccctcatttcaatcacacctaannattcccacttaatccaaacctgntggtgggtggtnncacccctccttgnggnaaaannggaaaaa

SEQ ID NO: 8795 - DNA, 232 bp, Glycine max
  unsure (1)..(232): unsure at all n locations; Clone ID: 701148936H1
gggaaaagttanaagtagtgaagaaaatgacagtcattgttttcttcgttgctataataattttaggtgcagaatggcaatgcaatgggtcagagcatgagcatgagcatggccacagctaccaaattttccctttgcgaatgaaaaccggccccggtggccactacattccggagtatcgtgcaaaattggaggcttggtgtggagcacacancgtcatgactggagaccc

SEQ ID NO: 8796 - DNA, 249 bp, Glycine max
  unsure (1)..(249): unsure at all n locations; Clone ID: 701148937H1
atcagcggtgccccccaggataacaacataatgctgtggaatgctgtcatatttggtcctgatgatactccatgggatggaggcacgttcaagttgactctccagtttactgaggattatccaaataaaccaccaactgtgcgatttgtgtctcgcatgtttcatccaaatatttatgctgatggaagtattgtttggatatactacaaaatcggggnggcctaaatggagggggngctannccaatct

SEQ ID NO: 8797 - DNA, 227 bp, Glycine max
  unsure (1)..(227): unsure at all n locations; Clone ID: 701148940H1
ggtctcgtggaagtgtaagcaagcaaaaccctagcggcgcctgctttctttgttcgtgttttgcatcaggatggngtctcaggtnaagcacgcacttgtggtcaaagtnatgggncntactgganccagaggacnattnacccaggttatannganttttggatgaaagnnccgncantgtgaggaatnnnaaaancccntnnaaagagggnntttcncnccntttc

SEQ ID NO: 8798 - DNA, 259 bp, Glycine max
  unsure (1)..(259): unsure at all n locations; Clone ID: 701148941H1
gaaggaatatgaacttctcagaaggaantcagtgatactngttgctttggctttggtanccangagcatatcgatttgggagtcaagtatgatccttcaactggtatttatggaatagatttcttgttgttctggagcgncctggcnatcgtttcggacgccgccaaagtgcnaacncccgtgtgggnatncaccccngttcnacaanggggattnnnnaantgntcccnggtaaaangggggggntnncctnaanccc

SEQ ID NO: 8799 - DNA, 222 bp, Glycine max
  unsure (1)..(222): unsure at all n locations; Clone ID: 701148942H1
ggatcgcagtgggtatagtagatgaagggaaagggacagcagccagcttcgggactcacggaaccttctaggctatatataaaaaaaaaatattgcacgctcctccgggctcctggcattncaaattcaaggcctctttccaattttcaaagcanntatnggggcnctccnntttnccatngnanttagcanncacnntttttttntnaggggnnnnntgtt

SEQ ID NO: 8800 - DNA, 263 bp, Glycine max
  Clone ID: 701148943H1
gtcccttatgatgggcgcgtggggtgctaataccttccccatgcgtaaacaactcccgaaccctcattttcaaaatccatagaccatcgtcttttttttggtttttctaacattttcctcaaataaacattggtggcaactccactcgttttctccctcggagacaaacgctttggcccattgttgaggccttttcgcgcccccgttaaagggtaggttgcgacatatgttgaattttttttatgccataagccaaatagccc

SEQ ID NO: 8801 - DNA, 252 bp, Glycine max
  unsure (1)..(252): unsure at all n locations; Clone ID: 701148944H1
ggaagcaaaaaatgaaaacccaaagtgcttctctcctctgtctttttctctctncttgctatccttttggctagtggcactgctgcaagtgcaactccaagaagcgcagtgccaagccaccatgtttcancattcaacagaagctttttccttgnnanttgctctgggaatggtcntcngcnnaccngggngaagtcccncangntcagtggggnncaccnnncntnggggccccntnannatngnggtang

SEQ ID NO: 8802 - DNA, 249 bp, Glycine max
  unsure (1)..(249): unsure at all n locations; Clone ID: 701148945H1
gggaacttgaaggaattcaaatgactcgatccgctgaagtttatgaccccagccagaacaggtggggttttatctcagagatgagaacatccatggtgcctttgtttggttttgttcacaatggaacatggtttttcaagggaaatgaaattgggagtggtaattccacgtgtgacgcntattcacctgaaanctgatgttgnccctntnntatggnanggcacagggggggntatttncncccncncg

SEQ ID NO: 8803 - DNA, 102 bp, Glycine max
  unsure (1)..(102): unsure at all n locations; Clone ID: 701148946H1
ggcacaagtgagtttgttgatcgagataactagaaacagtgtnatgaanatnnaggtccttnntttcttcgantccacaatntnggncncatggcaattnca

SEQ ID NO: 8804 - DNA, 54 bp, Glycine max
  unsure (1)..(54): unsure at all n locations; Clone ID: 701148948H1
ttgctanaagcaataagatgaattatngnatccgcttnttttggtttttgctna

SEQ ID NO: 8805 - DNA, 253 bp, Glycine max
  unsure (1)..(253): unsure at all n locations; Clone ID: 701148949H1
ggtagtggcaatgagttccccttgcagttgcgcttgcgcttctactaattggagcgttgattatggttatggaggtggtggcgtgctttcaaattcaaaggtaanaagcaggaggtccaaagaaatatccatggcacattcagtttgtggtccgngaaggtccactgcactgggatttccaccctgcctttgggantccttgcccatcccgccattggggnnaacgnanaaagggcnccgananttnattttt

SEQ ID NO: 8806 - DNA, 255 bp, Glycine max
  unsure (1)..(255): unsure at all n locations; Clone ID: 701148950H1
aaatcggagcttgcgaganaggaggccaagctggaaagagaagtcatcaagatcgtcctaagcggaaacggcgagtccgtcctcaagcccaattcgggccaggccgtgtcggttcgcgaccaccacatatgtgtcgggtttcaagacgaagaggattctgggtatcgcgtgtggnagtggcatggccacatcatgtcttntgatgaggattnggggtntaacccgagtatatataggcattnntttnaggggtta

SEQ ID NO: 8807 - DNA, 261 bp, Glycine max
  unsure (1)..(261): unsure at all n locations; Clone ID: 701148951H1
ggaagcaaaaaatganaacccaaagtggcttctctcctctgtctttttctctctgcttgctatccttttggctagtggcactgctgcaagtgcaactccaagaagcgcagtgccaagccaccatgtttcaacattcaacagaagcctttttccttccacttttctctttggaattggtnctctgcttaccnggcngnaggagcagcnagtgtanatnggagaggnccagcnttggggacacttnnnntannggctttgtga

SEQ ID NO: 8808 - DNA, 226 bp, Glycine max
  unsure (1)..(226): unsure at all n locations; Clone ID: 701148952H1
gagagtggtggagtgtgcaaaagagcgtcgtagtcgcaaccctaatcagaagaagcgcanttcaagcgagtgacagccaccagccatgggtcgtatgcacagccgcggtanggntatnccctcttctnntttcccntaaaanaggncccctcctagngganaaanntcncttcgaagntgtngaanannatanctncnntttgcnaaaangttttccccngtctna

SEQ ID NO: 8809 - DNA, 232 bp, Glycine max
  unsure (1)..(232): unsure at all n locations; Clone ID: 701148953H1
ggcagcgcttnatttgaggccaggcaagcaccactcaaccaccacacctctcctcgttcacgctacccctttctgctcttcttctacctttcaagttttaaaagtataaagatggcagagacattcctatttacctcagagtcggtgaacgagggacaccctgacaagctctgcgaccaaatctccgangctgtcctcgaggttgcctcgagcaggacccagacagcaaatt

SEQ ID NO: 8810 - DNA, 236 bp, Glycine max
  unsure (1)..(236): unsure at all n locations; Clone ID: 701148954H1
ggggtgccattgttgctgtcatcatccgcagctgcnnttattcgcaccgcaaacaaacagtgagccatggccgtcggaaagaacaagcgcatctccaaagggaaaaagggtggcaagaagaaggnagctgntcctttgccaaaaggtttgnttgattaagggncctttcttttttnaagggaaaattttgaaaaacccctntttttgangnggggnnaaangtttnntnnnnnaat

SEQ ID NO: 8811 - DNA, 260 bp, Glycine max
  unsure (1)..(260): unsure at all n locations; Clone ID: 701148955H1
gacagcacagcactctttacaacacaacaaaaaaagacaacacagagagaagcgtcttaataaacgctcttctctgaaaaacctgatttcttctcttcttctcttctctttcgtttcgatcttcgatcacctgaaaatgagagagtgcatttcaatccacatcggtcaggccggtattcaggtcggaaacgctgctgggagctctactgcctcgaacacggcattcagcctgatgggcagatgccagtnntaagnttgtt

SEQ ID NO: 8812 - DNA, 252 bp, Glycine max
  unsure (1)..(252): unsure at all n locations; Clone ID: 701148956H1
ggctaaataaattaacggagactgtagacgggggtgggtatttgaattggaggtggatgttttctgtgaccaatctatgcttggcggcggagtaaggtggttgcgctcctcggagcgattcaagtttctgacaacgtcattctccaccaacgccaagaccacttattattccttttgcattcatcagccaacagacaacaacaaaacatgtcgttgncgaaagnttcgcagctgnaantntggnatgtgatt

SEQ ID NO: 8813 - DNA, 253 bp, Glycine max
  Clone ID: 701148957H1
gacagcatatactgatcataaatcacatagctagttgtttaaagtgagagaaaaagaaagaagaaaatggcaaactttccagttgttgacatggggaaacttaacaccgaagagagagcagcagccatggagattataaaagatgcctgtgagaactggggtttctttgagttggtgaaccatgggatatccattgagttgatggacctgtggagaggctccaaaagagcactacaagaagactatggagcag

SEQ ID NO: 8814 - DNA, 251 bp, Glycine max
  unsure (1)..(251): unsure at all n locations; Clone ID: 701148958H1
ggtggcgaagtcgcccttgacgacgactcagcgaactgaaactgagagtggagcttcgtccacagggaaacgcataagcatatcggaattccggggaagaaaganagaaacataatgtgttcttcggagactatcaacatcgctgcgagtacacagaaacttgatgttgataaacgattgctctccgcttctactacagaatcaccgatatatcctcaacaggngatatctttcgtgcagagacaataatg

SEQ ID NO: 8815 - DNA, 96 bp, Glycine max
  Clone ID: 701148959H1
ttctcttacgcaataataatactgctcctaatcatggtccaccgcactcattaccttaatatgttgttgtcaccgacaataattctgctcgaacgt

SEQ ID NO: 8816 - DNA, 257 bp, Glycine max
  unsure (1)..(257): unsure at all n locations; Clone ID: 701148961H1
gatccacaacaaaaaactacttctcaattcagttaacacaccaaccccacatccaaagcttcagttcaatatggcaaccttgtcaagttttgctcctttggccattctaagtttagttctagtaattagtgccattgtctttgaggctgaagctaggccaaggacattctttgtatttggagattcacttgttgataatggaaacnncaattncttggctaccacggcncgtgccgatgctccccnttatgggatgt

SEQ ID NO: 8817 - DNA, 258 bp, Glycine max
  unsure (1)..(258): unsure at all n locations; Clone ID: 701148962H1
gggagcagaggagtggcggaggacgaagtcgaacggcgacaatggttaacgaaacggtgcggtggtgtgctttgttgtagtcgtctccgatcatcntcgagaatncgcaaactggttttacctnattccngggggttttcatctttcgcncccaataaacctcttgtnnnantctccnctctntctgtctnggattctcnctnctaaatgncngngnggnantcantccgcccttnangatatncacaangggaanng

SEQ ID NO: 8818 - DNA, 251 bp, Glycine max
  unsure (1)..(251): unsure at all n locations; Clone ID: 701148963H1
ggaaaaaanatngcaattcagtaaaactggnacnccggagagagcaatggccattggcctgggtggcctcaatctgtttggagttattattcttggnaccatgtntanagatatggcagttgnacccagtngcnncattaaatttgnagcngacntatttccnctacggcagatgatgctggtcccttccancgaatccntcgggnacgctgttttnnatnnggaaaagngnncggngtnnaaaacnnccc

SEQ ID NO: 8819 - DNA, 251 bp, Glycine max
  unsure (1)..(251): unsure at all n locations; Clone ID: 701148965H1
ggggatatagtgtaatgctgtgtccagaaaattgcttactttgggatttttgttgaggttgaaggagtttctgcattaattcatcagtctgaattatcgtgggatgccactttgaacccagcatcatattttcagattggtcaggttctggaggcaaaanttcaccaataaactccgctcttnncctcttttnnatcgggggaggagncaccctgcnccantaanacncccttagggngggntggcccncc

SEQ ID NO: 8820 - DNA, 251 bp, Glycine max
  unsure (1)..(251): unsure at all n locations; Clone ID: 701148966H1
ggaaggcatttcattagcagcgttaaagaagagagaagaaaaatgcgaaagttcgatccatggcccgttttcttcaagcgcgagtggaaacgcaactggcccttcctcgttggattcgcagtcaccggagctctaatcaccaaactttcccttggncttaccgaggaagatgctaagattccaattcgttaaggcgcaaaaaaggngnttcctaannngngaanccgcggggttnncnttnatgggggtnc

SEQ ID NO: 8821 - DNA, 247 bp, Glycine max
  unsure (1)..(247): unsure at all n locations; Clone ID: 701148967H1
ggcacattgaaatctgaaccttccggatttcgttttgctttgttcaggtagccagccagtcatggtgctcttcaatgtttcacgcgtagagaccactcccttcgatggccagaagcctngaacctctggtctccgcaagaaggtgaaagtgttcgtgcaacctcattacctccataactttgttcagtcaacattcatgcattactgtggaaanattagagnnccncnctttttnnggggggggttt

SEQ ID NO: 8822 - DNA, 246 bp, Glycine max
  unsure (1)..(246): unsure at all n locations; Clone ID: 701148968H1
gacggcttacttgtcaaaacgtagtgtttcagtggttaggtcttcccttcccactgttgccctgacaccgccttgctaatcccatcctccctctttctctctctacattttaataggaatcaatttccaaccatgacggactacaaacaagaacaggatatggagattgaagcattagaagctatatcatggatgagttcaaagaatacactctggggaagtggctaaggtattcatcggngctnc

SEQ ID NO: 8823 - DNA, 210 bp, Glycine max
  Clone ID: 701148969H1
catgaccaatttttcttactggcaattcagtggcagtgtattgcttaggcttccgtcaaaatgaaaggaaaatcaatgagtctgacagaacaacttcagtcttcactcttcactagttgaacacaaataaaaaaaaattaaactactccaggataaataaaaggttcagaagcagcagacctagattgtctaagctatttataatgggcg

SEQ ID NO: 8824 - DNA, 117 bp, Glycine max
  unsure (1)..(117): unsure at all n locations; Clone ID: 701148970H1
ggatcgcagtgggtatagtanatgaagggaaaggnacagcagccagcttccgggactcacgnnaccttctaggctatatataannanaaantattnnnngctccnccgggctcntgg

SEQ ID NO: 8825 - DNA, 246 bp, Glycine max
  unsure (1)..(246): unsure at all n locations; Clone ID: 701148972H1
aagaatgttctgacaaatttctggggaatggatttcacaacagacaagctgaggtcattggtacgaaaatggcaaactcttattgaagcccatgtggatgtgaagacaactgataattacacattgaggctgttnnncattggttnnnaccaagagaagatcnnaccnggtgaagncctcctttagcnncannaagccatttagnccattccnannacggggggnnnncncnccaccgggtntttt

SEQ ID NO: 8826 - DNA, 231 bp, Glycine max
  unsure (1)..(231): unsure at all n locations; Clone ID: 701148973H1
cattccaaaacacaaacacatacattgtagtatcacttttgtctcggaatttgttcttttgagtnatggcaagtttaaaggttgcatgtgtggtttagatgtgcatggcngtgatgagtgcaccaatgatggtgcaagccgtgtcatgcatgtgtttctgngaacctagcacgtgctntngactgagnnggggggttcccaaatcgnnnnagggggnaaantntncnnncc

SEQ ID NO: 8827 - DNA, 250 bp, Glycine max
  unsure (1)..(250): unsure at all n locations; Clone ID: 701148974H1
ggaggcggagacgaagaagtgaagagaagagaagagaagggatttggatctgaaaagagaagatggggggaggaatggaagcaaacaagaacaagttcatagaggattggggcactgccagagagaatctggagttcaatttccgttggactcgccgcaaccttgctcttgttggcatcttcggcatcgctattccngtctcgtctacaagggcatcgncggnnaatcccnntgcaagnggaagtgnggc

SEQ ID NO: 8828 - DNA, 214 bp, Glycine max
  unsure (1)..(214): unsure at all n locations; Clone ID: 701148975H1
ttcgcaaaccctaatttcggaaagatcggcgatggctgcctccaaggatcgcgagancttcgtctacatcgccaagctcgccgaacaggccgagcgatacgaagagatggtggaatcaatgaagaacgttgcgaatctcgacgttggaactgatgtggaggagcggatttactttctgttggtacaagaatgtgatggtgctcggagacatctg

SEQ ID NO: 8829 - DNA, 248 bp, Glycine max
  unsure (1)..(248): unsure at all n locations; Clone ID: 701148976H1
ggcacaagtgagtttgttgatcgagataactagaaacagtgtgatgaaaatgaaggtccttgttttcttcgttgctacaattttggtagcatggcaatgccatgcgtacgatatgttccctctccgaatgaacanggctatggtgcccgtactccggaggtgaatgcgcaattnggngctttnctgcgnancacaannnttttnggnttggaacnntcncggangnnggngtnnaanaaaaanaaacc

SEQ ID NO: 8830 - DNA, 256 bp, Glycine max
  unsure (1)..(256): unsure at all n locations; Clone ID: 701148978H1
gggtctngtttgtcnntcnttctctcgnaatcttcactacattcaccgngcatttgcattcacattgaatatggctgagactacacaatctaatgctgagttgttggagtggcctaagaaagataagcgccgcttcctgcatgtngtgtatcgtgttggtgatcttgatcgcaccattaattttannctgaatgttagggataaanntttgnggaaaggatctcccagagganaatagccaattntttntggattg

SEQ ID NO: 8831 - DNA, 201 bp, Glycine max
  unsure (1)..(201): unsure at all n locations; Clone ID: 701148980H1
ggcacaagtttgttgagatagctagaagcaataagatgaaaatgaaagtgcttgttttgtttgttgctacagttttggtagcatatgnatgccatggctgcagnctnccngaagttccccntccaaatnnanaccngggttnggtggcaancccgcaatgnnnnagcatgncccaattggnngccttgcgnggnacnganc

SEQ ID NO: 8832 - DNA, 120 bp, Glycine max
  Clone ID: 701148981H1
gtgttgttaggtttgttaattgttattatcatctttagcttagttggaagggttggttgggaccaaaattgacctatcatcagattgcgcatggcacacgaggtgtctgttgcaaatttt

SEQ ID NO: 8833 - DNA, 251 bp, Glycine max
  unsure (1)..(251): unsure at all n locations; Clone ID: 701148982H1
gaccgcgcaccacactgagaggaagagggagtgagagagagtgttcttcgtttgctaccttctcccagaaatggttacgttcaggtttcaccagtaccaggtggtcgggagggctctcccaacggaagcagatcagcntccgaagatctaccgaatgaagctctgggccaccaacgagnttcgcccaattctaanttccggnntttntggatntcctnaaggggtaaaaagnaccnttgnacattttcntt

SEQ ID NO: 8834 - DNA, 220 bp, Glycine max
  unsure (1)..(220): unsure at all n locations; Clone ID: 701148984H1
gaacctagtaaantactattcccttttaatacccccattacaagttcgtaataaataaaaccatcattaaaaaaggaagagggggaagaaaagagaaaattttcagagataataaaaacggaaggntataagggacttgagttgantctcctgatgccttanctnccatttanttccttccttaagganttgggaaaaaaantaaattttgggggggggg

SEQ ID NO: 8835 - DNA, 240 bp, Glycine max
  unsure (1)..(240): unsure at all n locations; Clone ID: 701148986H1
gatccatactcaaaatacaaaaatggagagagtagctaaggtgttggtgatgttgagcatggtggtgttggtgcttgcatcaaatgctgaagggggacgattacttgaggaagagaatgtggatcagccccagaccttccttggatcaggtggngncctgggtgggattttccangcccaagcccnggntnnantncaccggcgtggnttggnccaacnggttttncantccccgggggt

SEQ ID NO: 8836 - DNA, 249 bp, Glycine max
  unsure (1)..(249): unsure at all n locations; Clone ID: 701148988H1
gaaggaacggtttgctgaagaaggcgaaggagcttgcgatcttgtgcgatgctgaagtcggagttatgatcttctccagcaccggaaaactctacgatttcgccagctccagcatgaaatcagtaatggaccgatacagcaantcaaangangancttgtcaccttgggngtccancctctgaattacgnagttattanaattntggcccnatntangccgngggntttacactcnccccaggnntttt

SEQ ID NO: 8837 - DNA, 255 bp, Glycine max
  unsure (1)..(255): unsure at all n locations; Clone ID: 701148989H1
gacagcacagnactctttacnacacaacaaaanaanacaacacagaganaagcgtcttaataaacgctcttctctgaaaaacctgatttcttctcttcttctcttctctttcgtttcgatcttcgatctcngaanatnagagagtgctttcaatccacatgggtcaggcgggtnttcaggncggaaacgcntgctggggattntatgcctcgaacagggcnttangctgaggggcaatnccaannngtaaangtt

SEQ ID NO: 8838 - DNA, 252 bp, Glycine max
  unsure (1)..(252): unsure at all n locations; Clone ID: 701148990H1
gagccacttgaagacaatgtgagggagaacaatgatggacctaccgactacgctcagaaccgctgatgagaattttcgccttgcctagagcaagtaacacctggagtttatgataaacaaatgtgtttccaatttctttttccaccctcttgattttcatatgttcattggcttgaacttgatagttttcngctcaacgactgntgtaaaataagattttctngggttgaactcctttaaatgattttngtt

SEQ ID NO: 8839 - DNA, 258 bp, Glycine max
  unsure (1)..(258): unsure at all n locations; Clone ID: 701148991H1
gggacagtccataaattctgaggatgacttttttacaaatcctgtggtgaagggatactacaaaaaccacatcaaggctgtacttacaagacgtaatagcatcactggagttgcttacaaagacgacccaactataatggcttgggaacttatgaatgagattaggtgcccttctgatccatcaggaaggacattcaggcttggatcactgagatggnncttaccggaaancntngggggaanctttgngggnggggt

SEQ ID NO: 8840 - DNA, 235 bp, Glycine max
  unsure (1)..(235): unsure at all n locations; Clone ID: 701148992H1
gacacaccgnttgttctattcttaactcaacttctgctacccactctcttcttccgagtccaaccacgcttttctctacagtcatgggcaaggtcaagattcggaatcaacggatttggaagantgagcngtntgttncnagagtcnntctgaaaagagacngtgntgggcncttnccgttaaaggcccnttnntcccngtgtggngganttnnttnaanggngnngggngggng

SEQ ID NO: 8841 - DNA, 101 bp, Glycine max
  unsure (1)..(101): unsure at all n locations; Clone ID: 701148993H1
ggggggaagttgngagccnagattancnacggcaccaaagncaacagnnacgttngaaggggatccagattcgaggttnaaatnactatcctctntatgcg

SEQ ID NO: 8842 - DNA, 198 bp, Glycine max
  unsure (1)..(198): unsure at all n locations; Clone ID: 701148994H1
ggatagagagcgcggcataacctaaacctatctttcttctctctctgtgtgtgcgcttcaacggcaaccagaagcagccatggccactgcaaggactgtgnaggatgtttcacctncatgggttcncnaaagggtacncnctcacancnngcncggcnncnnantggagctgccaaattgnacnntatanggnnnnac

SEQ ID NO: 8843 - DNA, 241 bp, Glycine max
  unsure (1)..(241): unsure at all n locations; Clone ID: 701148995H1
aagacgacanaaggggaganagagaganaganagatgtcgaagcgtggtngtggtggntcggcggggaacaagttccgcatgtcgctgggtcttccagttgcggcacggtnaactgcgncganaaancgggggcnaagaacctctacatcatttcggtgaaagggttnaaggccntnaaaccttcccctggtctncntttnnnacttgtgntcncccccttnaaganggnaacctttttgg

SEQ ID NO: 8844 - DNA, 127 bp, Glycine max
  unsure (1)..(127): unsure at all n locations; Clone ID: 701148996H1
gccatccagcggttcttgaagctgcagttgttgcaaagcctgatgatcattggggccaaactccttgtgcttttgngaagttgaaagangggtttgatttagntgcnctangaataatcncacnttt

SEQ ID NO: 8845 - DNA, 248 bp, Glycine max
  unsure (1)..(248): unsure at all n locations; Clone ID: 701149001H1
ggaaatgaggtgcattcctaccactacatgcgtttggaacgctgaattaattttcgcctaaaaagacaattcggtgggatctaggtaggcagcaaccagcggcatctggggattttcttcttctccccacacccagattcaaaaatcagctctgctctttcgtttggatctcaaaacagttctncttcgattggttctaggcattctagcttcctcggtctctggcagaagagcaaattctcttcctc

SEQ ID NO: 8846 - DNA, 257 bp, Glycine max
  unsure (1)..(257): unsure at all n locations; Clone ID: 701149003H1
gaggatggttcagaagaacaagctgtgattggattatggagtggcattgcttggttggttgggaatgactgtattcattgctgtgttgtctgaatatgtggtgggatacaattgaggaggnatcagattcatggggtttgtctgtgagcttcctaagcataatcttgctgccgatagttggcaatgcagctgaacatgcaggagcaattatatttgccttcaagaacaagctggacatctcattgggtgttgcatta

SEQ ID NO: 8847 - DNA, 261 bp, Glycine max
  unsure (1)..(261): unsure at all n locations; Clone ID: 701149004H1
atgtggtatgtttaagggtgtcaccattggtagggtacatcatgcaaatncaaaagcttaatgtcataagctttcatngaggtcaaggtcgacccntgggcaatagcctgaacgtcngcaacctaaaatcctnatttatagttgtgtagtattgttttatatncttggattattttnataaatgagttgaaattattttctcattttatgtctatttattcaaattaaaatttgaactgcaagaaganagtataaangttt

SEQ ID NO: 8848 - DNA, 245 bp, Glycine max
  unsure (1)..(245): unsure at all n locations; Clone ID: 701149005H1
ggatatccattttatttacaacaacaatgggcttctgtggcctcaaccaaaaatctcccttctaaccttattgctttcttctcggtccnttcaccatcattgcggcatgcaattgttccctccaaaacgaaaccttcaaatttgagaactcaggtgaacttggaccctacatcgttgagtacggtgcagattacagaatgataagcatcttcaacttctccattccaagttggtttctacaacac

SEQ ID NO: 8849 - DNA, 259 bp, Glycine max
  unsure (1)..(259): unsure at all n locations; Clone ID: 701149006H1
ggacgggagagaatctagaagaaganggagaaagtataggaataatagaagtacaatcaagttaaagcnaanacatcantggacgaaccgcacaaaccaggccaganatgtggggnccacactgcctatacccntncttnggcccttnctnnnnnnnnnnnnnnnnnnnnnnnncatttccatcaacattncccangnaanngtcccgttgagnatactcttnttcttcnctgcaaaatattcaattcccttcaantct

SEQ ID NO: 8850 - DNA, 178 bp, Glycine max
  unsure (1)..(178): unsure at all n locations; Clone ID: 701149007H1
gaagaagaagaaggatcatngccatgagcatggccatgacnncagcngcagcagtgacngtngantaanctgctggatcncctatntatttaaaaagggtttatgggaccnanagttggcgagggctgtgccttaattncccctnncgctctacactntntnanctngctntctcggt

SEQ ID NO: 8851 - DNA, 258 bp, Glycine max
  unsure (1)..(258): unsure at all n locations; Clone ID: 701149008H1
gacatgggtaagtatgcatatggttcaacttgatttctgataccatctattttttgcagggatcggcacccacaaagacaccccagtggacctgaagaagtccagcagggcctggggtttccagctctggttacgggcctctgtccggccctacaangtgcncgtttcccctagccaagttcatgtcatcgtggcataggtaagtgtgcacctcccccaactgatttctgatgtcacnattntttgnagggatgnggc

SEQ ID NO: 8852 - DNA, 190 bp, Glycine max
  unsure (1)..(190): unsure at all n locations; Clone ID: 701149009H1
tgaacagtgattaaacngctgccatnacctatntatttaaaaggtttatgggaccatagtagcgagggctgtgccttaannnnnnnnnnnnnnnnnnnnnnnnnnnnnnnnnnnnnnnnntgncctttttccctatcntgtgatctatttatgagtgagaaaaacaaagtgagaaantgtgcgtgtatcg

SEQ ID NO: 8853 - DNA, 266 bp, Glycine max
  unsure (1)..(266): unsure at all n locations; Clone ID: 701149010H1
ggcagattgcaaaggagaaaaacattcaaactagncaggctttcgcaggtttangnggtnatcagtagactgcaaagncgcaaatnggaacntttgaaggnanagnggntccggtaagcttgatgantatggaaacttcaaagttncccttcctcatgacactgtaaangacgataanctgatagangaatgctatgctccagctacttagtgcatcagcngcaccttgtcctacccatgatggcccattgagccacaaaatagtg

SEQ ID NO: 8854 - DNA, 250 bp, Glycine max
  unsure (1)..(250): unsure at all n locations; Clone ID: 701149011H1
ggttgtgtagatattgaccaatgggatttaccggagcatcgagcatcgagcnactattaaccaaagagnnagagagaattccgttggcacatttcacaggctctaatgaaccaagtttgggtccaanacccagccttnttacttctgaangagctgagtgtcaaagaattgcngttgaagattattacaaagcatacttttctcgcgggctaaaaganncnnccttgatttgatcagggccaaaatgnat

SEQ ID NO: 8855 - DNA, 266 bp, Glycine max
  unsure (1)..(266): unsure at all n locations; Clone ID: 701149015H1
ggaaccattcatttcaacgccgcgttggtgctcttcgcaatcttcttcctctctctccacaaagcattcttacttttcggttgcttttcgtgctgatggtgattcctgntgatgaaagaggcaattcggtagnaaaattatccaggnactnatgnaacngggttggngctnanntncccnagcaggtttnaggtggaggntntgaaggttttaaacccnagggggctaatttttnggttnagnnccnanttnnngtttgcanatng

SEQ ID NO: 8856 - DNA, 255 bp, Glycine max
  unsure (1)..(255): unsure at all n locations; Clone ID: 701149017H1
gggaagcaaaacaacattaccagagtggttctagtaattcagtgctgctagaagatggaaactagtgaatggcatatcgagcgaagatctagcttcggctctgaatcccccttangcagagaaggcaggaatgtgcctgaaaactgggtccactctctnttgtggtgcttggtgcttctggtgatcttggctaaggangangacatttccctggcacttttccacctatactgcagggattcttaccaccagatg

SEQ ID NO: 8857 - DNA, 255 bp, Glycine max
  unsure (1)..(255): unsure at all n locations; Clone ID: 701149019H1
gataacaatttcatctagcaatgttaaaaaaccaaccacaaccagattggcctgagcccattgtccgggttcagtccttatccgaaaactgcatagattcnatccctgaaanggaacatccaagctttctactgatagaccatcccataagaagttctaattttgatgatgccaatattccaatcatcgaccttggtggtctgtttggtgctgaccaacgtgtctcagactcaattcttaggcaaatctcagagg

SEQ ID NO: 8858 - DNA, 258 bp, Glycine max
  unsure (1)..(258): unsure at all n locations; Clone ID: 701149020H1
gggccaaggggcattacactgagggtgcggaattgattgattccgttctcgatgttgtgcgcaaggaggctgagaactgcgattgcntgcaaaggtttcaaagtggtgncaattccctggggggaaggaactggatcaggaatgggaaaccttgtngatttctaagatccagggaagagtacccagatagaatgatgcttactttctctgttttcccatctccaaaggtttcagacactgttgtggaaccctacaatg

SEQ ID NO: 8859 - DNA, 268 bp, Glycine max
  unsure (1)..(268): unsure at all n locations; Clone ID: 701149021H1
gacactaaacaagttaaaagaagagcatcactganactaacaaagcaaccctatgtcgaaggtgggtttgtgtcaccggaagcccagcggcggccattcggattcatgggtggtccttattcttncctcccagngtggttacannngtcccatgcnacngtcccaagatatcaaggatgaaaatgagacgaaacatttggaggaaatggaaggagcaaaagagtcatctccatttttttgaaaatggatcttcttgacatcgactcca

SEQ ID NO: 8860 - DNA, 244 bp, Glycine max
  unsure (1)..(244): unsure at all n locations; Clone ID: 701149022H1
ggatatccattttatttanaaccaacaatgggcttctgtgcctcaagcanaaatcnccccttctaaaccttattngncttctcgtctttcnccatcattgcggcatggcattgttcttcnaaaaggaagcnttcaaatttgaggaactccggtggaattggaccctacatcngttgnagtancggggcngattacagaatgataagcatcttcaactctcnattcccangttggtttctacaac

SEQ ID NO: 8861 - DNA, 256 bp, Glycine max
  unsure (1)..(256): unsure at all n locations; Clone ID: 701149023H1
gggtactgtctcttagctttgattctctgttctctgtnttgttctgtttcgcgtacaggaacttaaaacaatgaagactgcaaagggnaagggngnagcgaggccctcaaaagantcactgaagcctgttgatgaccgaaaggttggaaagcggaaggcttctggtaagcctgagaaaagcagagcaccaaagaaggagaagaaggccaagaaagaccccaacaagcctaaaagaccaccgagtgctttcttcgtg

SEQ ID NO: 8862 - DNA, 253 bp, Glycine max
  unsure (1)..(253): unsure at all n locations; Clone ID: 701149024H1
gcctctcttcgaaccgggagagttgtcatcgtggtctttctatagggctggcatagcagagtttgtggccactttctgttcctctacatcacagtggtgactgtgaaggggtgtgttcnaaatctaagagcaatntccaactgtgggtatcnaaggnattncttggncttttggggnantgancttnncnctggttnattcaactgctggaatctnaggggntcatattaacccagcagtgacgtttgggctt

SEQ ID NO: 8863 - DNA, 277 bp, Glycine max
  unsure (1)..(277): unsure at all n locations; Clone ID: 701149025H1
gatcttagatttgactcttggttgagagtgagtttggaacttgaaagaaactagaatggccactttagacgaacgcccttnctgcgaaaaaggnggcttcctcntcgaaggctaaanccctgacgntcnatggaacaantnncctttggggtcttggcnttcaantggatgaggcagattgcggtgatgtgtttggcttagatgaagagcttctggaaatggttcccaagccagttctcgccgtgctttttctttatccaattaccgcgaagtctga

SEQ ID NO: 8864 - DNA, 245 bp, Glycine max
  unsure (1)..(245): unsure at all n locations; Clone ID: 701149026H1
ccttgctctatttaaatatttactatttaggattggatgcgcggttcagagcgaaaagaagtagagggaattggttaaataattttaagtaattagttttttttaaaattaaatgatatgaataaaataaaaatatgataattntttnagtgattttaatttaaaatgaaaaagtaaccattaatttcgtatttncnctattccttctttccaaaggtagattatattaataancncgncagggg

SEQ ID NO: 8865 - DNA, 260 bp, Glycine max
  unsure (1)..(260): unsure at all n locations; Clone ID: 701149027H1
gagggtgttggacattctgaaggatatttttaatccaaaggggattgttgttccggatccagtttcaggcggtttgtactcggtgggggaaagatcacttgcaatantggatccttactccttatgttccggttggatcttcaggagatgattacgatattcttgcagagagtgttggagatgggagagtgttcttcgctggagaggcaactagcaaacagtattnntcgactatgcacggcgcgttcctcagcggaatg

SEQ ID NO: 8866 - DNA, 244 bp, Glycine max
  unsure (1)..(244): unsure at all n locations; Clone ID: 701149028H1
aaccacaggagagctgcaggcagagatacaagaacaaatatataataagttcccaaaatatgaaccgaacactaaaaaaaatattgaatgaaaagnaacaccactatagcttcattcagtcaggggagcacattatattgcaaggcagattgactgactcaccactttaaggtggattgcacttctaaattgtctttattangttataaatcacggtgcctgtttagcattctatctggtttta

SEQ ID NO: 8867 - DNA, 279 bp, Glycine max
  unsure (1)..(279): unsure at all n locations; Clone ID: 701149029H1
tgaggcgcgcaagtgagtttcctggaaaatgtcatgccaccaanaatttgctnccaattagtaaggtgggaacgggttgctcctaactacnacttaaaaccttatggtcccattggcnttatattatgggaattaccacaaccaaggntggtnaccatgtaatgccaattatattttccanattctggtggtttaaaatccgtggatttanatataaancgtttttaaaaattaccccattaggatatgcncttttttcctgaaatgnnggnggatntt

SEQ ID NO: 8868 - DNA, 60 bp, Glycine max
  unsure (1)..(60): unsure at all n locations; Clone ID: 701149031H1
cnanaggnngcgttttnatccctgaaagtaacctcccggggnaggtaattttccgggtgg

SEQ ID NO: 8869 - DNA, 279 bp, Glycine max
  unsure (1)..(279): unsure at all n locations; Clone ID: 701149032H1
cagtcaagctataaatatgacgggggcatataaatatatctgttagtaatgggtaacttgaattaataatattaatantaagaaattaaaatatccaccaaataacatttttggtttatggagtgatacttaggctccgatatatattgaggccagtgcaggntaatttaataatccaaangtgtgaagccgtgaaagattaacatttttggttttatataagttaccntggtcacgatccgntacnctnctttgacttngacctagatgacatccttt

SEQ ID NO: 8870 - DNA, 264 bp, Glycine max
  unsure (1)..(264): unsure at all n locations; Clone ID: 701149033H1
attggttgtgaatagaatactcctctctcttactgagaggctanacctanaanccttacctttccntcccgntctcatatgaggggacagaaactgagagtgaaatgnaggaaantgtaaggccntnntncttctccngntgggcnatccnctccnatcngnggttnaccgtggataagtncntttntntgngttggccccccaaaagtttcaaattggtaccaatgtccaggagggttaagttcttcntncccntcaaatncc

SEQ ID NO: 8871 - DNA, 243 bp, Glycine max
  unsure (1)..(243): unsure at all n locations; Clone ID: 701149034H1
catgaggaatgtgaaaggacctgtgagagaaggagacattctcaccctactcgagtctgaaagggaagcgagaagatgcgctagatggtctcnttntannggctgcctccaaattcgaaccaaaagcatattttacnngatattnatggtagttacancatgctaaaggggttatagcaccctatcttatgttttgganccatntcatcgaatattgcttgaatatgtatgnttaaactcgag

SEQ ID NO: 8872 - DNA, 258 bp, Glycine max
  unsure (1)..(258): unsure at all n locations; Clone ID: 701149035H1
ggagtgagcgtcaacaatggcttcttcgtcttcagcgtcgggttcgggttcagcttcggcggtgacggagcgaagaggaataccagggggctcagttcgtggaggatgttccaaacttaaccttactnaatngggtctcgatgttggttcagccctcgcttttctccaagaaagacttcagcaatacaaggtagtagaaatgaagcttcttgctcagcaaagagatcttcaggcaaagataccagatattgaaaagtg

SEQ ID NO: 8873 - DNA, 257 bp, Glycine max
  unsure (1)..(257): unsure at all n locations; Clone ID: 701149036H1
gggtggaaatggaatcggcagctgaaaaccctaattacccggcggcggactacaagcgaccttccatcttgtcatttcctcggangcccgccctcagagttacatcggagttcgatagtgaaagngagtccttcttcccataagatttcctgcaagtcgttggacagccttgccaagttcangttttngttcaaccacagcggtaagggcggcgacatctccgaacctcaattcagctttgtctccaagcaccttag

SEQ ID NO: 8874 - DNA, 252 bp, Glycine max
  unsure (1)..(252): unsure at all n locations; Clone ID: 701149037H1
gaatgggtttgggttgatgggtgtggttacaccaaggggaaacaagtgcataattgtccaatcagaggggcacntgtcatccaagtcttgcctcctctcttatccttttaaaacgntagnaagtccttcctttttggtacangttgcaagtgacattgtgaagtgttgtgagataaataatttatgtttgaattcaaaatgtnacttggctttgctacaaacttattaaaaaaatgtgaagcaggtgtaaaa

SEQ ID NO: 8875 - DNA, 248 bp, Glycine max
  unsure (1)..(248): unsure at all n locations; Clone ID: 701149038H1
tggaaaaaaaacaatatgacctttgttcaactactaccttcattcaatcatgttcagatgatnctgtnttgacttggtttggtagttgtaaacttttggctcactttcattgcacaggttgcttcaaaatgcttgaaaaggaagatcttaagcccccgttgggaacatattttgagtttcagactgaaagttttgaagaaggttcccatttcatttttaaaaaaatttgacactncattcccaacttt

SEQ ID NO: 8876 - DNA, 263 bp, Glycine max
  unsure (1)..(263): unsure at all n locations; Clone ID: 701149039H1
gggcacctctcatatggcaaaacaccccataaaaaaaatgatgnatctaagcntanattgtaccgtnttgccatagncgtccgatttggcatgtaacatcttgcttcagcnagntactcntgaaancnttgttcaatgtcctttataattatcccaatagcggaacctcaattctccnaaagttgtttacacccaganccaactcntcatacacgtctacactaggatcttccattcaaatttctaggttccttaaacgcaag

SEQ ID NO: 8877 - DNA, 252 bp, Glycine max
  unsure (1)..(252): unsure at all n locations; Clone ID: 701149041H1
ggaaggagagggagtgctgaggttgaagcgggaaacaatggcaattcccatgttgagggctgcaatgatttctcattctcaatctcaaccacgcatncattccatatctgctatttatgaaaccgctaagaggaggaagagagtggtgttctcttcttcttcttcagaacttaaccctgtaattcggtcagaggtatcatttgtgttgggantgcctcattccacatccaaaaaaggttaacacaggtgggg

SEQ ID NO: 8878 - DNA, 264 bp, Glycine max
  unsure (1)..(264): unsure at all n locations; Clone ID: 701149042H1
ggattaagtgagcaacacaacacaaccacacccatcattatctccttctccatctccatggcttccttacccagttttgctcctttcggatttcnaattgcnttgtaattggggagcnaatgnaaggantttgtantccacttcccagcaaaggtggtaatgggagtaggaagcccctacaaacttttcgcccttataacattgctcatcgcggttcaaacggagagcttcctgaagaaacgcgtcctgcatacttgagagcta

SEQ ID NO: 8879 - DNA, 322 bp, Glycine max
  unsure (1)..(322): unsure at all n locations; Clone ID: 701149045H1
gcacttcaattgcaattcaaattagttcattcttctttgcgcatttcccttaccttctcctttcaaagatgcagattcttcgtcaagaacccttcaacggaaagaaccattcaaccctttggaaggtggaaaagcttctgaacaaccaatggnacnaacgttcnanggggnccaaagtttncnagggaccaagggaaagggaatttnccccccgggtttcnaggcaaaaggtctacattcttcggcccgggaaaagcaagcttcgagggaacgggccgtaaccccttcgncncggactaccaaacattccaggaangggggt

SEQ ID NO: 8880 - DNA, 273 bp, Glycine max
  unsure (1)..(273): unsure at all n locations; Clone ID: 701149047H1
gaacacgcggctgccgccggaggtgaaccgcgtgctgtacgtttcggaacctttccctttcaacattcacgaagcgaggagatgtacgacatcttcgggcaagtacggcggcattcggcagtccgcnatgggnaccaacaagganactcgccggaaacgggcttncatngtttacgnggacttctaggacgccaaaaacngncgttcgacaacttntcggtttaaaggtggcnaaccggtaactaaatngttntttattaccaagnaggggng

SEQ ID NO: 8881 - DNA, 295 bp, Glycine max
  unsure (1)..(295): unsure at all n locations; Clone ID: 701149048H1
tacgttgagaatatagcntgcataacttttgaagtgattaaaaatcactgggcgnattnactatnnnatatggtcctanacttcattccatntaangnnttggattgccagttaangtcatgggccctaccaaatnccgnatncattganttggatcaggtcantcnancctannacngtccttaaattttcnataaattaccntnaaaatnttananangttaaaaccatggccatggtaaagcccangnattaaaatangccttnctttgggtaattaagaanaatngggctt

SEQ ID NO: 8882 - DNA, 254 bp, Glycine max
  unsure (1)..(254): unsure at all n locations; Clone ID: 701149049H1
gggttgattgcgggatggaagtggaggcagtgcaacaacagcgcaaaggagcgcacctgaagaagaggggtctgaagaacaaagctttggggcatcactttcaacgagnaaagatntcactgactacgtcaccggctttcacaagcgcaagaagaagagaagaaaggaagcccagaagcaacagaacgaggctctgcgccgcaaacgcaccgaggaacgcaaaaggaggaattggaaagagaacatgttcttaa

SEQ ID NO: 8883 - DNA, 250 bp, Glycine max
  unsure (1)..(250): unsure at all n locations; Clone ID: 701149050H1
gagcgcagttcgttccacgttgttgttcgctctgtgtctctcactctctctatatttgcatcattcatcggaaatggctctcgaggttgctgttaaggctgctgttggggctccaaatgttctcggagattgtccattttcccaaagggtcctcttaantttggaggagaagaaaatcccttacaaactccacctcatcgatctcngtaacaaacccgaatggtttttgggtgtgaatcctgaagggaag

SEQ ID NO: 8884 - DNA, 244 bp, Glycine max
  Clone ID: 701149051H1
tccagagagaagaagaaacttaatcgatcatcacttcacttcactaatacatcatgggcagacgagacccagaacaagtatgagagctctgaaggtggaggtcaaggatcgcggtgtttttgactttctcggtaagaaaaaggatgaagaagacaagcctcatcctccaggaggaggtcatcgccaccgagtttcaaaaagtcactgtctcagaccaaggagagaacaagcacagcctcttaga

SEQ ID NO: 8885 - DNA, 185 bp, Glycine max
  unsure (1)..(185): unsure at all n locations; Clone ID: 701149052H1
tctaggtcccaaaattcacaaaaagctgaatctgaaggtctaaaaaaattcnatagattttcttggtgtgaattactacaccacttattatgcggaacatgctgaacctgtcagtgccaaccgaaccttctacacagacatactagccagtctcagtacggaaaggaatggtctaccatgttgga

SEQ ID NO: 8886 - DNA, 231 bp, Glycine max
  unsure (1)..(231): unsure at all n locations; Clone ID: 701149053H1
cactgtcccgaagctgtcaacaatgngcgatttccggcgatctcagagtctnagcaacacttcctctggtatcgntcncanttcggctncaattccgaaactntnctnagtcttttccccaaaggtagactttnatcgtttcttgaanagagcttgtaagnatctctgaattcatccaaaatgcccttacctgacaattgtacgatgcaatatgcgtgggtatgcaagcca

SEQ ID NO: 8887 - DNA, 255 bp, Glycine max
  unsure (1)..(255): unsure at all n locations; Clone ID: 701149054H1
ggcacaagtgagtttgttgatcgagataactagaaacagtgtgatgaaaatgaaggtccntgttttcttcgttgctacaattttggtaagcatggcatggccatgcggtacggatatgttnccctcctccgatgaacactggctatggtgccngtactccggaggtgaaatgcgcaagttggaggcttgctgtggaagcacacaacatctttggctttaagaccattcctgangagtgcgttggaagcaacaaag

SEQ ID NO: 8888 - DNA, 250 bp, Glycine max
  unsure (1)..(250): unsure at all n locations; Clone ID: 701149055H1
gcatgtgttgttgttattattaacagctatatgatcttcgttttaattttgtggttttccttcctgcccttgttatgtttgtgcattanattaaaagtaaggaatgccccaccactaagtaatgctatatggattatgtatgtgttccatatatgtcaagtgagtggtgtgtggttgtgaagaatctatngcttttaatgaatcagatcctttggtgtgaaaaaaaaannangggagngnttnttcaggt

SEQ ID NO: 8889 - DNA, 265 bp, Glycine max
  unsure (1)..(265): unsure at all n locations; Clone ID: 701149056H1
aactgatgtatttacatccgagggatcaaaggggaaaggaggaagaaacgttctggcagtgggtanacctgattacttagccccagagataccttttggggaactgggacatgggtttactgctgattggtggtctgttggggtnattttatttgagttgcttgttggtattccacccttcaatgcngngaancctcntancacttntgaaaacaaccgnaggaatctnagggggtcatattaacccagcatgacgtttgggctg

SEQ ID NO: 8890 - DNA, 256 bp, Glycine max
  unsure (1)..(256): unsure at all n locations; Clone ID: 701149058H1
gaaagctcggtgcataaacagcaatggcagagaaaccccaaccggttncgggttctatactgcggggtgtgcagtttgcccccccgaatactgcgaattcgggtccgatttngagaattgnaaaccctggttgatccaaaacgtccctgacctataccctgatcttctccaaagaggcaaatgagaaggaagctgataaagttgctgacaaactacaaagtaccggtatatcaggagctggcgatggagctgcttc

SEQ ID NO: 8891 - DNA, 253 bp, Glycine max
  unsure (1)..(253): unsure at all n locations; Clone ID: 701149059H1
ggcacaagtgagtttgttgatcgagataactagaaacagtgtgatgaaaatgaaggtccttgttttcttcgttgctaacattttggtaacnagggnatgccatgcgtacganattgttccntntccgantgaacactggntatggtgcccgtactccggaggtgaaatgcgcaagttggaggcttgctgtggaagcacacaacatctttggctttgagaccattcctgaagagtgcgttgaagcaacaaagga

SEQ ID NO: 8892 - DNA, 280 bp, Glycine max
  unsure (1)..(280): unsure at all n locations; Clone ID: 701149060H1
gcacacagttatacagctctagagaattatcataccctttaagatgaaaccgtacctacgtccaatattcctattattccttatccttctcgaccaatccacttcggcgaggcntctaataggtaggnttanagaatccttttcnaaanttaangantccttttaatccctaagtctgaagaactaaaatcaaangatataaagaagctcccgagcgtcgaatttttgaagangaaacatgacggagttaaggacttctctcaagaagctatcctgaaac

SEQ ID NO: 8893 - DNA, 254 bp, Glycine max
  unsure (1)..(254): unsure at all n locations; Clone ID: 701149061H1
ggctgatttcaatcttgtcgaaaaattaaaactcacaaagcaatgattgaaattaacaagctactgaactttgcattgcccccatatcactaattgtcatcntcatctttcacgccaactttgnccctaggaagcggcttatngtgtgttaaaaagttcctatacaccgaaaacgtggcagggaaagtagtattaatcactggagcagcctcagggattggcgagcaagtagcatatgaatatgtaggcgcgga

SEQ ID NO: 8894 - DNA, 262 bp, Glycine max
  unsure (1)..(262): unsure at all n locations; Clone ID: 701149063H1
gacctaagtgctacttcaaagacaatatatgcttcaaacttggcatacagtatggagaaggatgatatggagtttcttttccaaaattgtggagaaattgttgatatccgcctacataccgatcataaacgggcgggttaaagggcatggacangttggttgccaccccagaaggctgcacaaaaagccncttgaattgaaaaaataangtatncggggccgccccggtggagtttttatncaaaggggaggggcnccnccc

SEQ ID NO: 8895 - DNA, 68 bp, Glycine max
  unsure (1)..(68): unsure at all n locations; Clone ID: 701149064H1
gagnagaannanatgcagtaccttggtcaaaatgaggcctctnctagcatgcccttcatgggtgttgc

SEQ ID NO: 8896 - DNA, 270 bp, Glycine max
  unsure (1)..(270): unsure at all n locations; Clone ID: 701149067H1
ggaagagtgaagagaatggctcccaagggtttaacctttctgggctgtgttaatatgcgttttcagcactgtcactggagtccttctgttgcggggggaagggcaaaataatggccttgntatgaanttntacaagggantcatgccctccaggctgaagacatccatccanagaacaagtcaagcttctctacaagcgccanaagaacactgctttctcctggctcaggaacatcttccatggactgtgctgttcagagttgtgatgct

SEQ ID NO: 8897 - DNA, 250 bp, Glycine max
  unsure (1)..(250): unsure at all n locations; Clone ID: 701149068H1
gacaggtagttggtgtgaggcaatgacgcggcctttcggtgtgaagggggggaggaagcgatagctacgcggaacncaaatacgacgccccatggcgaannngaatnnggaagaacgcaaccaaagaaaatgtggtggaggtggagcacanccaagaagaaganngaagaaactcnagcaccagcaccagangatgatggattgagcggtatcccattgcgcccagtgcggacaacactaacaaacccaa

SEQ ID NO: 8898 - DNA, 250 bp, Glycine max
  unsure (1)..(250): unsure at all n locations; Clone ID: 701149069H1
gaccaccaatcacaaatagccctcttggccttcaatttcgtccnattccaaatcatggtagctcttacagtttcacgtctacatnggnttgagtctagtggatggcactagncattangcggtttcaatttcaaagggggcagaaggnagnacgtgccttctttgngtttggtgattctctcgttgacaatggcancaacaacnacttagccaccacagctaagagcagacgctccaccttatgggcatt

SEQ ID NO: 8899 - DNA, 190 bp, Glycine max
  unsure (1)..(190): unsure at all n locations; Clone ID: 701149071H1
agtcgaagtcttcttngggactatgagattgagcatggtcattcagcttgaanntcgtctgcgtcgangngcttcccggaaagaatcnggcgatgtctgccgcaccgctgtccatgtacttgccggggccnagacttatagtgagacggttggtcacaatttttnactcaatggcancgtttgatgannt

SEQ ID NO: 8900 - DNA, 237 bp, Glycine max
  unsure (1)..(237): unsure at all n locations; Clone ID: 701149072H1
ggctgtgctcttcctaaaacccagaaccagatctagggttcaatntcctntcttttngatttgaccaagttttgcgtcttcaaggnatangtggggattgaaggcatgaggcttacgaggagagtcatcgatacgangagcagangaaaagctcccgttcgctaaacccgttactgaatctggcanaagggttatgtcggnncccanagntcgggatttgannttcctgttgnaacc

SEQ ID NO: 8901 - DNA, 331 bp, Glycine max
  unsure (1)..(331): unsure at all n locations; Clone ID: 701149073H1
aggncgcatctccggtcaaatgacgccgtctgtctagtccttatatgtagaatccgaggatgnaattggacaatgttttgaaattaaagngcattncaaagntttgcaaggtggtcctcctttccttgcnttggcatccgnctnctcctnttnttnctcccacnagttttcccagtgnataccantaaancatctggaaaggcccaatttaaaggcatttaaaaccatanacccctcctttcgtgggctctttggaaagggctaaaacnncanttncatntncaacattggggncccatttnntgaaacccccttccctttnnccaanttg

SEQ ID NO: 8902 - DNA, 241 bp, Glycine max
  unsure (1)..(241): unsure at all n locations; Clone ID: 701149077H1
ggaggaagaaaganaattacacagtttcaattttcagtatcagcttacactttttagaaaatggctactctatcaaggctttcatcggntangcggaagattccccaatancccacttnctctcaggttcctcatgacgatggacaaatgcttcttgaaaatcagctccagtggaaacactttccaggttcctctttaaagactaaagcaacacgtaaccagccattgttattcgagcagg

SEQ ID NO: 8903 - DNA, 258 bp, Glycine max
  unsure (1)..(258): unsure at all n locations; Clone ID: 701149078H1
gtggtggtggaggtagaggtcgtggaagaaaggatgctgttgagaagtcagcggaggaacttgacaaggagctggaagacctatcatgctggaanccnatgnacancccctgantcctgggaagccgnanttantttggtatatcnactnaagattggcttcctngnacaaagctggtttccttggcgtttactttgaatctcttactgcttggtgcttttaaacatgccatcttatttgaccgcatttaagtaatcg

SEQ ID NO: 8904 - DNA, 280 bp, Glycine max
  unsure (1)..(280): unsure at all n locations; Clone ID: 701149079H1
gacacacagagcggttctcatattttggagaatccgaaaaacacgttaaagaaagtcccattcccactaccgaagcaaattaagnagatgaagcagcagagagtggagtttatgggcctngggcatggggcattgggcatngggctggggcttttnggggtgantnaatngcattgtgggttcggcnnnntngtnccggataatttggccaaccaangttgttnaggngnntnntnnagaaaggtnaatcnccgttttttcggcntttccggggaggggg

SEQ ID NO: 8905 - DNA, 245 bp, Glycine max
  unsure (1)..(245): unsure at all n locations; Clone ID: 701149081H1
ggaagtgtattggtcactgacctatcttggaagagttttgaagtttaaacctcaaacccttttgcctttagattctgattctgagtctctgctgctatatatgggcgccacgcgtatttccttgtgttggggatgttgctgatggtgtgcctnttaaggtttcgtctgatccaaagagagaagaagaaatactggaagaagaactacattttcccgataacgagccacttattgtgagagacggg

SEQ ID NO: 8906 - DNA, 249 bp, Glycine max
  unsure (1)..(249): unsure at all n locations; Clone ID: 701149082H1
ggggatattggcggtggttctgagcgaggaaaaggccttggctttnggcccagaaggcccacttgtggaagagttttgggacaacgtgaggagatatggatcctacggntctcaacngtccagcnacaggtgccctttacaccatcttccgccctatagcagaacttctcaagaatcccatttccgcaattttcatccttgctcttttcgggggttcaatcttcattgtttctcaagtcctctctgcca

(The sequence listing continues in the following parts.)

1. A substantially purified nucleic acid molecule that encodes a soybean protein or fragment thereof comprising the nucleic acid sequence of SEQ ID NO: 22703 or the complement thereof.

2. A substantially purified soybean protein or fragment thereof, wherein said soybean protein is encoded by a nucleic acid molecule that comprises a nucleic acid sequence selected from the group consisting of SEQ ID NO: 5278 through SEQ ID NO: 15553.

3. A transformed plant having a nucleic acid molecule which comprises:
(a) an exogenous promoter region which functions in a plant cell to cause the production of a mRNA molecule;
(b) a structural nucleic acid molecule comprising a nucleic acid sequence selected from the group consisting of SEQ ID NO: 5278 through SEQ ID NO: 15553 or complements thereof;
(c) a 3′ non-translated sequence that functions in said plant cell to cause termination of transcription and addition of polyadenylated ribonucleotides to a 3′ end of said mRNA molecule.

4. The transformed plant according to claim 3, wherein said structural nucleic acid molecule is a complement of any of the nucleic acid sequences of SEQ ID NO: 5278 through SEQ ID NO: 15553.

5. The transformed plant according to claim 4, wherein said plant is soybean or maize.

6. The transformed plant according to claim 4, wherein said plant is maize.

7. The transformed plant according to claim 4, wherein said plant is soybean.

8. A substantially purified nucleic acid molecule comprising a nucleic acid sequence wherein said nucleic acid sequence:
(a) hybridizes under high-stringency conditions to the nucleic acid sequence SEQ ID NO: 22703 or the complement thereof, or
(b) shares a 90% or greater identity to the nucleic acid sequence of SEQ ID NO: 22703 or the complement thereof.

9. The substantially purified nucleic acid molecule of claim 8, wherein said nucleic acid molecule encodes a soybean protein or fragment thereof.

10. A substantially purified nucleic acid molecule comprising a nucleic acid sequence that shares between 100% and 90% sequence identity with the nucleic acid sequence of SEQ ID NO: 22703 or the complement thereof.

11. The substantially purified nucleic acid molecule of claim 10, wherein said nucleic acid sequence shares between 100% and 95% sequence identity with the nucleic acid sequence of SEQ ID NO: 22703 or the complement thereof.

12. The substantially purified nucleic acid molecule of claim 11, wherein said nucleic acid sequence shares between 100% and 98% sequence identity with the nucleic acid sequence of SEQ ID NO: 22703 or the complement thereof.

13. The substantially purified nucleic acid molecule of claim 12, wherein said nucleic acid sequence shares between 100% and 99% sequence identity with the nucleic acid sequence of SEQ ID NO: 22703 or the complement thereof.

14. The substantially purified nucleic acid molecule of claim 13, wherein said nucleic acid sequence shares 100% sequence identity with the nucleic acid sequence of SEQ ID NO: 22703 or the complement thereof.
